United States Patent Application Publication US 2022/0213167 A1 - sequence listing, part 4

SEQ ID NO: 65281 - protein, 15 aa, Homo sapiens
  CDR3 for alpha chain variable domain of TCR clone 32641 (TRAV17, TRAJ57)
CATGPSQGGSEKPVF

SEQ ID NO: 65282 - protein, 14 aa, Homo sapiens
  CDR3 for beta chain variable domain of TCR clone 32641 (TRBV12-5, TRBJ2-5)
CASGSRTHQETQYF

SEQ ID NO: 65283 - protein, 15 aa, Homo sapiens
  CDR3 for alpha chain variable domain of TCR clone 32642 (TRAV3, TRAJ22)
CAVRDRGGSARQLTF

SEQ ID NO: 65284 - protein, 16 aa, Homo sapiens
  CDR3 for beta chain variable domain of TCR clone 32642 (TRBV5-4, TRBJ2-3)
CASQQPGAGGAGTQYF

SEQ ID NO: 65285 - protein, 14 aa, Homo sapiens
  CDR3 for alpha chain variable domain of TCR clone 32643 (TRAV38-2/DV8, TRAJ30)
CAYRSADRDDKIIF

SEQ ID NO: 65286 - protein, 11 aa, Homo sapiens
  CDR3 for beta chain variable domain of TCR clone 32643 (TRBV7-2, TRBJ2-2)
CASSARDREGR

SEQ ID NO: 65287 - protein, 14 aa, Homo sapiens
  CDR3 for alpha chain variable domain of TCR clone 32644 (TRAV12-2, TRAJ13)
CAVRKTGGYQKVTF

SEQ ID NO: 65288 - protein, 17 aa, Homo sapiens
  CDR3 for beta chain variable domain of TCR clone 32644 (TRBV13, TRBJ2-3)
CASSLSRVAGGRNTQYF

SEQ ID NO: 65289 - protein, 14 aa, Homo sapiens
  CDR3 for alpha chain variable domain of TCR clone 32645 (TRAV24, TRAJ37)
CASDGSSNTGKLIF

SEQ ID NO: 65290 - protein, 15 aa, Homo sapiens
  CDR3 for beta chain variable domain of TCR clone 32645 (TRBV7-3, TRBJ2-2)
CASKANGANTGELVF

SEQ ID NO: 65291 - protein, 14 aa, Homo sapiens
  CDR3 for alpha chain variable domain of TCR clone 32646 (TRAV2, TRAJ9)
CAVEDWSGGFKTIF

SEQ ID NO: 65292 - protein, 15 aa, Homo sapiens
  CDR3 for beta chain variable domain of TCR clone 32646 (TRBV10-3, TRBJ2-1)
CAIRNGTSGHNEQFF

SEQ ID NO: 65293 - protein, 14 aa, Homo sapiens
  CDR3 for alpha chain variable domain of TCR clone 32647 (TRAV30, TRAJ26)
CGTGIVSYGQNFVF

SEQ ID NO: 65294 - protein, 13 aa, Homo sapiens
  CDR3 for beta chain variable domain of TCR clone 32647 (TRBV19, TRBJ1-3)
CASRLSLGNTIYF

SEQ ID NO: 65295 - protein, 14 aa, Homo sapiens
  CDR3 for alpha chain variable domain of TCR clone 32648 (TRAV12-3, TRAJ10)
SHLPLTGGGNKLTF

SEQ ID NO: 65296 - protein, 15 aa, Homo sapiens
  CDR3 for beta chain variable domain of TCR clone 32648 (TRBV7-9, TRBJ2-2)
CASGPLDTFPGELFF

SEQ ID NO: 65297 - protein, 12 aa, Homo sapiens
  CDR3 for alpha chain variable domain of TCR clone 32649 (TRAV2, TRAJ9)
CAVGAGGFKTNF

SEQ ID NO: 65298 - protein, 16 aa, Homo sapiens
  CDR3 for beta chain variable domain of TCR clone 32649 (TRBV13, TRBJ2-2)
CASSPRTGEHTGELFF

SEQ ID NO: 65299 - protein, 13 aa, Homo sapiens
  CDR3 for alpha chain variable domain of TCR clone 32650 (TRAV8-6, TRAJ34)
CAVSDQSTDKLIF

SEQ ID NO: 65300 - protein, 14 aa, Homo sapiens
  CDR3 for beta chain variable domain of TCR clone 32650 (TRBV12-4, TRBJ1-1)
CASTWTGHDTEAFF

SEQ ID NO: 65301 - protein, 13 aa, Homo sapiens
  CDR3 for alpha chain variable domain of TCR clone 32651 (TRAV27, TRAJ45)
CRSSGGGADGLTF

SEQ ID NO: 65302 - protein, 17 aa, Homo sapiens
  CDR3 for beta chain variable domain of TCR clone 32651 (TRBV10-3, TRBJ2-4)
CTSVPSVNKGSKNMQYF

SEQ ID NO: 65303 - protein, 17 aa, Homo sapiens
  CDR3 for alpha chain variable domain of TCR clone 32652 (TRAV3, TRAJ6)
CAVRDGPRAGGSYIPTF

SEQ ID NO: 65304 - protein, 12 aa, Homo sapiens
  CDR3 for beta chain variable domain of TCR clone 32652 (TRBV7-2, TRBJ2-1)
CASSPGNNEQFF

SEQ ID NO: 65305 - protein, 11 aa, Homo sapiens
  CDR3 for alpha chain variable domain of TCR clone 32653 (TRAV26-1, TRAJ27)
CIDSNAGKSTF

SEQ ID NO: 65306 - protein, 18 aa, Homo sapiens
  CDR3 for beta chain variable domain of TCR clone 32653 (TRBV7-9, TRBJ2-6)
CASSFPGAGISGANVLTF

SEQ ID NO: 65307 - protein, 14 aa, Homo sapiens
  CDR3 for alpha chain variable domain of TCR clone 32654 (TRAV8-4, TRAJ13)
CAVTLSGGYQKVTF

SEQ ID NO: 65308 - protein, 14 aa, Homo sapiens
  CDR3 for beta chain variable domain of TCR clone 32654 (TRBV7-2, TRBJ1-2)
CASSHTGSTYGYTF

SEQ ID NO: 65309 - protein, 12 aa, Homo sapiens
  CDR3 for alpha chain variable domain of TCR clone 32655 (TRAV3, TRAJ20)
CAVRDGDYKLSF

SEQ ID NO: 65310 - protein, 15 aa, Homo sapiens
  CDR3 for beta chain variable domain of TCR clone 32655 (TRBV7-8, TRBJ1-5)
CASSLERRGLEPQHF

SEQ ID NO: 65311 - protein, 14 aa, Homo sapiens
  CDR3 for alpha chain variable domain of TCR clone 32656 (TRAV1-2, TRAJ8)
CAAREDTGFQKLVF

SEQ ID NO: 65312 - protein, 11 aa, Homo sapiens
  CDR3 for beta chain variable domain of TCR clone 32656 (TRBV11-3, TRBJ2-7)
CASSRTYEQYF

SEQ ID NO: 65313 - protein, 15 aa, Homo sapiens
  CDR3 for alpha chain variable domain of TCR clone 32657 (TRAV23/DV6, TRAJ18)
CAARYRGSTLVRLYF

SEQ ID NO: 65314 - protein, 13 aa, Homo sapiens
  CDR3 for beta chain variable domain of TCR clone 32657 (TRBV7-2, TRBJ2-7)
CASSSPSGSEQYF

SEQ ID NO: 65315 - protein, 15 aa, Homo sapiens
  CDR3 for alpha chain variable domain of TCR clone 32658 (TRAV23/DV6, TRAJ13)
CAAWPGGGGSQKVTF

SEQ ID NO: 65316 - protein, 17 aa, Homo sapiens
  CDR3 for beta chain variable domain of TCR clone 32658 (TRBV19, TRBJ2-7)
CASSISFYDSYPYEQYF

SEQ ID NO: 65317 - protein, 12 aa, Homo sapiens
  CDR3 for alpha chain variable domain of TCR clone 32659 (TRAV12-3, TRAJ17)
RAMTLTGNKLTF

SEQ ID NO: 65318 - protein, 13 aa, Homo sapiens
  CDR3 for beta chain variable domain of TCR clone 32659 (TRBV7-9, TRBJ1-2)
CASSLKQNYGYTF

SEQ ID NO: 65319 - protein, 15 aa, Homo sapiens
  CDR3 for alpha chain variable domain of TCR clone 32660 (TRAV17, TRAJ56)
CATDANTGANSKLTF

SEQ ID NO: 65320 - protein, 14 aa, Homo sapiens
  CDR3 for beta chain variable domain of TCR clone 32660 (TRBV19, TRBJ1-5)
CASSLGTGGQPQHS

SEQ ID NO: 65321 - protein, 15 aa, Homo sapiens
  CDR3 for alpha chain variable domain of TCR clone 32661 (TRAV3, TRAJ5)
CAVRDLDTGRTALTF

SEQ ID NO: 65322 - protein, 13 aa, Homo sapiens
  CDR3 for beta chain variable domain of TCR clone 32661 (TRBV12-4, TRBJ2-7)
CASSPTETYEQYF

SEQ ID NO: 65323 - protein, 11 aa, Homo sapiens
  CDR3 for alpha chain variable domain of TCR clone 32662 (TRAV2, TRAJ13)
CASGGYQKVTF

SEQ ID NO: 65324 - protein, 15 aa, Homo sapiens
  CDR3 for beta chain variable domain of TCR clone 32662 (TRBV11-2, TRBJ2-1)
CASSLGTSGLNEQFF

SEQ ID NO: 65325 - protein, 13 aa, Homo sapiens
  CDR3 for alpha chain variable domain of TCR clone 32663 (TRAV13-2, TRAJ48)
CAEMDFGNEKLTF

SEQ ID NO: 65326 - protein, 15 aa, Homo sapiens
  CDR3 for beta chain variable domain of TCR clone 32663 (TRBV7-9, TRBJ1-6)
CASSSPGRGNSPLDF

SEQ ID NO: 65327 - protein, 20 aa, Homo sapiens
  CDR3 for alpha chain variable domain of TCR clone 32664 (TRAV26-1, TRAJ42)
CWVLLHRQTYYGGSQGNLIF

SEQ ID NO: 65328 - protein, 16 aa, Homo sapiens
  CDR3 for beta chain variable domain of TCR clone 32664 (TRBV7-3, TRBJ2-2)
CASSLKRGTLSGELFF

SEQ ID NO: 65329 - protein, 16 aa, Homo sapiens
  CDR3 for alpha chain variable domain of TCR clone 32665 (TRAV8-3, TRAJ10)
CAAGPILTGGGNKLTF

SEQ ID NO: 65330 - protein, 16 aa, Homo sapiens
  CDR3 for beta chain variable domain of TCR clone 32665 (TRBV7-2, TRBJ2-5)
CASSSKWLSGQETQYF

SEQ ID NO: 65331 - protein, 13 aa, Homo sapiens
  CDR3 for alpha chain variable domain of TCR clone 32666 (TRAV26-2, TRAJ43)
CILRAVNNNDMRV

SEQ ID NO: 65332 - protein, 15 aa, Homo sapiens
  CDR3 for beta chain variable domain of TCR clone 32666 (TRBV7-2, TRBJ2-1)
CASTHGTGIYNEQFF

SEQ ID NO: 65333 - protein, 14 aa, Homo sapiens
  CDR3 for alpha chain variable domain of TCR clone 32667 (TRAV26-1, TRAJ34)
CIARESYNTDKLIF

SEQ ID NO: 65334 - protein, 13 aa, Homo sapiens
  CDR3 for beta chain variable domain of TCR clone 32667 (TRBV19, TRBJ2-1)
CATSRGVYNEQFF

SEQ ID NO: 65335 - protein, 16 aa, Homo sapiens
  CDR3 for alpha chain variable domain of TCR clone 32668 (TRAV20, TRAJ38)
CAVQASNAGNNRKPIW

SEQ ID NO: 65336 - protein, 16 aa, Homo sapiens
  CDR3 for beta chain variable domain of TCR clone 32668 (TRBV7-8, TRBJ2-6)
CASGVGDSSGANVLTF

SEQ ID NO: 65337 - protein, 14 aa, Homo sapiens
  CDR3 for alpha chain variable domain of TCR clone 32669 (TRAV12-2, TRAJ13)
CAVKKTGGYQKVTF

SEQ ID NO: 65338 - protein, 11 aa, Homo sapiens
  CDR3 for beta chain variable domain of TCR clone 32669 (TRBV10-3, TRBJ2-7)
CAISEGLEQYF

SEQ ID NO: 65339 - protein, 12 aa, Homo sapiens
  CDR3 for alpha chain variable domain of TCR clone 32670 (TRAV12-3, TRAJ20)
CAMVRGDYKLSF

SEQ ID NO: 65340 - protein, 13 aa, Homo sapiens
  CDR3 for beta chain variable domain of TCR clone 32670 (TRBV7-3, TRBJ1-1)
CASSQDWGAEAFF

SEQ ID NO: 65341 - protein, 13 aa, Homo sapiens
  CDR3 for alpha chain variable domain of TCR clone 32671 (TRAV13-2, TRAJ48)
CAEMDFGNEKLTF

SEQ ID NO: 65342 - protein, 12 aa, Homo sapiens
  CDR3 for beta chain variable domain of TCR clone 32671 (TRBV5-1, TRBJ1-2)
CASNQDTYGYTF

SEQ ID NO: 65343 - protein, 12 aa, Homo sapiens
  CDR3 for alpha chain variable domain of TCR clone 32672 (TRAV21, TRAJ33)
CAKMDSNYQLIW

SEQ ID NO: 65344 - protein, 13 aa, Homo sapiens
  CDR3 for beta chain variable domain of TCR clone 32672 (TRBV11-2, TRBJ2-1)
CASSLDLVNEQFF

SEQ ID NO: 65345 - protein, 17 aa, Homo sapiens
  CDR3 for alpha chain variable domain of TCR clone 32673 (TRAV3, TRAJ6)
CAVRDGPRAGGSYIPTF

SEQ ID NO: 65346 - protein, 18 aa, Homo sapiens
  CDR3 for beta chain variable domain of TCR clone 32673 (TRBV20-1, TRBJ2-3)
CSASGLAGGPGTTDTQYF

SEQ ID NO: 65347 - protein, 11 aa, Homo sapiens
  CDR3 for alpha chain variable domain of TCR clone 32674 (TRAV2, TRAJ13)
CASGGYQKVTF

SEQ ID NO: 65348 - protein, 16 aa, Homo sapiens
  CDR3 for beta chain variable domain of TCR clone 32674 (TRBV7-9, TRBJ2-1)
CASSDVAGGSYNEQFF

SEQ ID NO: 65349 - protein, 15 aa, Homo sapiens
  CDR3 for alpha chain variable domain of TCR clone 32675 (TRAV21, TRAJ37)
CAVRPTLSNTGKLIL

SEQ ID NO: 65350 - protein, 16 aa, Homo sapiens
  CDR3 for beta chain variable domain of TCR clone 32675 (TRBV24-1, TRBJ2-3)
CATSDRRQDPTDTQYF

SEQ ID NO: 65351 - protein, 13 aa, Homo sapiens
  CDR3 for alpha chain variable domain of TCR clone 32676 (TRAV21, TRAJ27)
CAARPGNAGKSTF

SEQ ID NO: 65352 - protein, 14 aa, Homo sapiens
  CDR3 for beta chain variable domain of TCR clone 32676 (TRBV7-6, TRBJ2-3)
CASSLGTVTDTQYY

SEQ ID NO: 65353 - protein, 15 aa, Homo sapiens
  CDR3 for alpha chain variable domain of TCR clone 32677 (TRAV27, TRAJ38)
YAARRNAGNNRKLIW

SEQ ID NO: 65354 - protein, 13 aa, Homo sapiens
  CDR3 for beta chain variable domain of TCR clone 32677 (TRBV12-5, TRBJ2-3)
CASGDRQSDTQYF

SEQ ID NO: 65355 - protein, 14 aa, Homo sapiens
  CDR3 for alpha chain variable domain of TCR clone 32678 (TRAV35, TRAJ13)
CAGRSPGGYQKITF

SEQ ID NO: 65356 - protein, 14 aa, Homo sapiens
  CDR3 for beta chain variable domain of TCR clone 32678 (TRBV19, TRBJ2-2)
CASSMVGLSGELFF

SEQ ID NO: 65357 - protein, 23 aa, Homo sapiens
  CDR3 for alpha chain variable domain of TCR clone 32679 (TRAV26-1, TRAJ38)
CIADNAGNNHIQNPDPAVYQLRD

SEQ ID NO: 65358 - protein, 13 aa, Homo sapiens
  CDR3 for beta chain variable domain of TCR clone 32679 (TRBV20-1, TRBJ1-1)
CSARCGGNTEAFF

SEQ ID NO: 65359 - protein, 18 aa, Homo sapiens
  CDR3 for alpha chain variable domain of TCR clone 32680 (TRAV21, TRAJ52)
CAVRPSPAGGTSYGKLTF

SEQ ID NO: 65360 - protein, 13 aa, Homo sapiens
  CDR3 for beta chain variable domain of TCR clone 32680 (TRBV2, TRBJ1-1)
CASRWTVNTEAFF

SEQ ID NO: 65361 - protein, 13 aa, Homo sapiens
  CDR3 for alpha chain variable domain of TCR clone 32681 (TRAV8-3, TRAJ28)
CAVGAVGSYQLTF

SEQ ID NO: 65362 - protein, 11 aa, Homo sapiens
  CDR3 for beta chain variable domain of TCR clone 32681 (TRBV29-1, TRBJ2-5)
CSEDRTGTQYF

SEQ ID NO: 65363 - protein, 14 aa, Homo sapiens
  CDR3 for alpha chain variable domain of TCR clone 32682 (TRAV12-2, TRAJ48)
CAVNAFFGNEKSTF

SEQ ID NO: 65364 - protein, 13 aa, Homo sapiens
  CDR3 for beta chain variable domain of TCR clone 32682 (TRBV28, TRBJ2-7)
CAGAQQGLDEQYF

SEQ ID NO: 65365 - protein, 15 aa, Homo sapiens
  CDR3 for alpha chain variable domain of TCR clone 32683 (TRAV8-2, TRAJ16)
CVVSDGFSDGQKLLF

SEQ ID NO: 65366 - protein, 14 aa, Homo sapiens
  CDR3 for beta chain variable domain of TCR clone 32683 (TRBV7-3, TRBJ1-1)
CACSLGTGYTEAFF

SEQ ID NO: 65367 - protein, 15 aa, Homo sapiens
  CDR3 for alpha chain variable domain of TCR clone 32684 (TRAV25, TRAJ52)
CAGRPGGTSYGKLTF

SEQ ID NO: 65368 - protein, 12 aa, Homo sapiens
  CDR3 for beta chain variable domain of TCR clone 32684 (TRBV11-2, TRBJ2-2)
CASSLGGGELFF

SEQ ID NO: 65369 - protein, 14 aa, Homo sapiens
  CDR3 for alpha chain variable domain of TCR clone 32685 (TRAV38-2/DV8, TRAJ29)
CAYRSRSGNTPLVF

SEQ ID NO: 65370 - protein, 14 aa, Homo sapiens
  CDR3 for beta chain variable domain of TCR clone 32685 (TRBV12-4, TRBJ2-3)
CASTIAGWGDTQYF

SEQ ID NO: 65371 - protein, 15 aa, Homo sapiens
  CDR3 for alpha chain variable domain of TCR clone 32686 (TRAV25, TRAJ52)
CAGRPGGTSYGKLTF

SEQ ID NO: 65372 - protein, 13 aa, Homo sapiens
  CDR3 for beta chain variable domain of TCR clone 32686 (TRBV10-3, TRBJ2-7)
CASKLAVNYEQYF

SEQ ID NO: 65373 - protein, 13 aa, Homo sapiens
  CDR3 for alpha chain variable domain of TCR clone 32687 (TRAV29/DV5, TRAJ31)
CAASRNNNARLMF

SEQ ID NO: 65374 - protein, 13 aa, Homo sapiens
  CDR3 for beta chain variable domain of TCR clone 32687 (TRBV12-4, TRBJ2-2)
CASSITGSGELFF

SEQ ID NO: 65375 - protein, 14 aa, Homo sapiens
  CDR3 for alpha chain variable domain of TCR clone 32688 (TRAV9-2, TRAJ48)
CAPPPNFGNEKLTF

SEQ ID NO: 65376 - protein, 12 aa, Homo sapiens
  CDR3 for beta chain variable domain of TCR clone 32688 (TRBV29-1, TRBJ2-3)
CSVTGGADTQYF

SEQ ID NO: 65377 - protein, 14 aa, Homo sapiens
  CDR3 for alpha chain variable domain of TCR clone 32689 (TRAV12-3, TRAJ10)
SHLPLTGGGNKLTF

SEQ ID NO: 65378 - protein, 15 aa, Homo sapiens
  CDR3 for beta chain variable domain of TCR clone 32689 (TRBV6-3, TRBJ2-2)
CASSFLATLTGELFF

SEQ ID NO: 65379 - protein, 20 aa, Homo sapiens
  CDR3 for alpha chain variable domain of TCR clone 32690 (TRAV26-1, TRAJ42)
CCVLLHRQTYYGGSQGNLIF

SEQ ID NO: 65380 - protein, 16 aa, Homo sapiens
  CDR3 for beta chain variable domain of TCR clone 32690 (TRBV7-3, TRBJ2-2)
CASSLKRGTSSGELFF

SEQ ID NO: 65381 - protein, 15 aa, Homo sapiens
  CDR3 for alpha chain variable domain of TCR clone 32691 (TRAV21, TRAJ53)
CATLNSGGSNYKLTF

SEQ ID NO: 65382 - protein, 12 aa, Homo sapiens
  CDR3 for beta chain variable domain of TCR clone 32691 (TRBV7-9, TRBJ2-7)
CASSFGSYEQYF

SEQ ID NO: 65383 - protein, 12 aa, Homo sapiens
  CDR3 for alpha chain variable domain of TCR clone 32692 (TRAV23/DV6, TRAJ58)
CAARLLRGETSG

SEQ ID NO: 65384 - protein, 14 aa, Homo sapiens
  CDR3 for beta chain variable domain of TCR clone 32692 (TRBV7-3, TRBJ2-1)
CASSLAGGTNEQFF

SEQ ID NO: 65385 - protein, 11 aa, Homo sapiens
  CDR3 for alpha chain variable domain of TCR clone 32693 (TRAV3, TRAJ21)
CAVGNFNKFYF

SEQ ID NO: 65386 - protein, 12 aa, Homo sapiens
  CDR3 for beta chain variable domain of TCR clone 32693 (TRBV11-2, TRBJ2-5)
CASSLVGETQYF

SEQ ID NO: 65387 - protein, 13 aa, Homo sapiens
  CDR3 for alpha chain variable domain of TCR clone 32694 (TRAV27, TRAJ29)
CAGAHSGDTPLVF

SEQ ID NO: 65388 - protein, 14 aa, Homo sapiens
  CDR3 for beta chain variable domain of TCR clone 32694 (TRBV7-9, TRBJ2-7)
CASSIGQGAGEQYF

SEQ ID NO: 65389 - protein, 14 aa, Homo sapiens
  CDR3 for alpha chain variable domain of TCR clone 32695 (TRAV1-2, TRAJ8)
CAVREDTGFQRLVF

SEQ ID NO: 65390 - protein, 14 aa, Homo sapiens
  CDR3 for beta chain variable domain of TCR clone 32695 (TRBV11-3, TRBJ2-3)
CASSRLARTDTQYF

SEQ ID NO: 65391 - protein, 14 aa, Homo sapiens
  CDR3 for alpha chain variable domain of TCR clone 32696 (TRAV13-1, TRAJ26)
CAASSAHYGQNFAF

SEQ ID NO: 65392 - protein, 17 aa, Homo sapiens
  CDR3 for beta chain variable domain of TCR clone 32696 (TRBV25-1, TRBJ2-5)
CASSRRGGRGGQETQYF

SEQ ID NO: 65393 - protein, 14 aa, Homo sapiens
  CDR3 for alpha chain variable domain of TCR clone 32697 (TRAV12-1, TRAJ43)
CVVNGRSDNNDMRF

SEQ ID NO: 65394 - protein, 13 aa, Homo sapiens
  CDR3 for beta chain variable domain of TCR clone 32697 (TRBV27, TRBJ1-1)
CASSLSIGAEAFF

SEQ ID NO: 65395 - protein, 16 aa, Homo sapiens
  CDR3 for alpha chain variable domain of TCR clone 32698 (TRAV30, TRAJ24)
CGTEIVDADSWGKFQF

SEQ ID NO: 65396 - protein, 13 aa, Homo sapiens
  CDR3 for beta chain variable domain of TCR clone 32698 (TRBV10-3, TRBJ2-7)
CASKLAVSYGQYF

SEQ ID NO: 65397 - protein, 12 aa, Homo sapiens
  CDR3 for alpha chain variable domain of TCR clone 32699 (TRAV27, TRAJ36)
CAGMTGANNLFF

SEQ ID NO: 65398 - protein, 14 aa, Homo sapiens
  CDR3 for beta chain variable domain of TCR clone 32699 (TRBV12-4, TRBJ2-3)
CASSLVPSTDMQYF

SEQ ID NO: 65399 - protein, 13 aa, Homo sapiens
  CDR3 for alpha chain variable domain of TCR clone 32700 (TRAV2, TRAJ40)
CAVVTSGTYKYIF

SEQ ID NO: 65400 - protein, 14 aa, Homo sapiens
  CDR3 for beta chain variable domain of TCR clone 32700 (TRBV7-2, TRBJ2-2)
CASRGQGAAGELFF

SEQ ID NO: 65401 - protein, 18 aa, Homo sapiens
  CDR3 for alpha chain variable domain of TCR clone 32701 (TRAV8-3, TRAJ13)
CAVGAYPSGVTRKLPLEL

SEQ ID NO: 65402 - protein, 15 aa, Homo sapiens
  CDR3 for beta chain variable domain of TCR clone 32701 (TRBV19, TRBJ1-5)
CASSIVWADNQPQHF

SEQ ID NO: 65403 - protein, 16 aa, Homo sapiens
  CDR3 for alpha chain variable domain of TCR clone 32702 (TRAV3, TRAJ37)
CSVRPHGSGNTGKLIF

SEQ ID NO: 65404 - protein, 17 aa, Homo sapiens
  CDR3 for beta chain variable domain of TCR clone 32702 (TRBV20-1, TRBJ2-1)
CSASSSGLAGSYNEQFF

SEQ ID NO: 65405 - protein, 13 aa, Homo sapiens
  CDR3 for alpha chain variable domain of TCR clone 32703 (TRAV27, TRAJ41)
CTGEGNSGYALNF

SEQ ID NO: 65406 - protein, 14 aa, Homo sapiens
  CDR3 for beta chain variable domain of TCR clone 32703 (TRBV7-2, TRBJ1-1)
CASSFLTGTTEAFF

SEQ ID NO: 65407 - protein, 15 aa, Homo sapiens
  CDR3 for alpha chain variable domain of TCR clone 32704 (TRAV25, TRAJ52)
CAGRPGGTSYEKLTF

SEQ ID NO: 65408 - protein, 15 aa, Homo sapiens
  CDR3 for beta chain variable domain of TCR clone 32704 (TRBV19, TRBJ2-5)
CASHGLAGAQETQYF

SEQ ID NO: 65409 - protein, 14 aa, Homo sapiens
  CDR3 for alpha chain variable domain of TCR clone 32705 (TRAV13-2, TRAJ17)
CAENSKAAGNKLTF

SEQ ID NO: 65410 - protein, 12 aa, Homo sapiens
  CDR3 for beta chain variable domain of TCR clone 32705 (TRBV18, TRBJ2-1)
CASSSDEDEQFF

SEQ ID NO: 65411 - protein, 13 aa, Homo sapiens
  CDR3 for alpha chain variable domain of TCR clone 32706 (TRAV8-3, TRAJ28)
CAVGAVGSYQLTF

SEQ ID NO: 65412 - protein, 11 aa, Homo sapiens
  CDR3 for beta chain variable domain of TCR clone 32706 (TRBV11-2, TRBJ2-2)
CASSLPGELFF

SEQ ID NO: 65413 - protein, 14 aa, Homo sapiens
  CDR3 for alpha chain variable domain of TCR clone 32707 (TRAV12-3, TRAJ42)
CAMNYGGSQGNLIF

SEQ ID NO: 65414 - protein, 15 aa, Homo sapiens
  CDR3 for beta chain variable domain of TCR clone 32707 (TRBV5-7, TRBJ1-5)
CASSYGRLWDQPQRF

SEQ ID NO: 65415 - protein, 11 aa, Homo sapiens
  CDR3 for alpha chain variable domain of TCR clone 32708 (TRAV2, TRAJ21)
CAAFNFNKFYF

SEQ ID NO: 65416 - protein, 14 aa, Homo sapiens
  CDR3 for beta chain variable domain of TCR clone 32708 (TRBV15, TRBJ2-3)
CATRSGTSTDTQYF

SEQ ID NO: 65417 - protein, 14 aa, Homo sapiens
  CDR3 for alpha chain variable domain of TCR clone 32709 (TRAV13-1, TRAJ35)
CAASKGGFGNVLHC

SEQ ID NO: 65418 - protein, 15 aa, Homo sapiens
  CDR3 for beta chain variable domain of TCR clone 32709 (TRBV7-9, TRBJ1-6)
CASSSPGRGNSPLHF

SEQ ID NO: 65419 - protein, 12 aa, Homo sapiens
  CDR3 for alpha chain variable domain of TCR clone 32710 (TRAV30, TRAJ43)
CGTEERGNDMRF

SEQ ID NO: 65420 - protein, 13 aa, Homo sapiens
  CDR3 for beta chain variable domain of TCR clone 32710 (TRBV27, TRBJ2-7)
CASRFSQGYEQYF

SEQ ID NO: 65421 - protein, 16 aa, Homo sapiens
  CDR3 for alpha chain variable domain of TCR clone 32711 (TRAV17, TRAJ28)
CATASVSGAGSYQLTF

SEQ ID NO: 65422 - protein, 11 aa, Homo sapiens
  CDR3 for beta chain variable domain of TCR clone 32711 (TRBV7-9, TRBJ2-5)
CASSLGDTQYF

SEQ ID NO: 65423 - protein, 14 aa, Homo sapiens
  CDR3 for alpha chain variable domain of TCR clone 32712 (TRAV38-1, TRAJ40)
CALRPTSGTYKYIF

SEQ ID NO: 65424 - protein, 16 aa, Homo sapiens
  CDR3 for beta chain variable domain of TCR clone 32712 (TRBV13, TRBJ2-2)
CASSPRTGEHTGELFF

SEQ ID NO: 65425 - protein, 11 aa, Homo sapiens
  CDR3 for alpha chain variable domain of TCR clone 32713 (TRAV2, TRAJ33)
CAVESNYQLIW

SEQ ID NO: 65426 - protein, 15 aa, Homo sapiens
  CDR3 for beta chain variable domain of TCR clone 32713 (TRBV19, TRBJ1-1)
CASISGQIQNTEAFF

SEQ ID NO: 65427 - protein, 12 aa, Homo sapiens
  CDR3 for alpha chain variable domain of TCR clone 32714 (TRAV21, TRAJ31)
CAVSPASGRLMF

SEQ ID NO: 65428 - protein, 14 aa, Homo sapiens
  CDR3 for beta chain variable domain of TCR clone 32714 (TRBV28, TRBJ2-7)
CASSLLRISYEQYF

SEQ ID NO: 65429 - protein, 14 aa, Homo sapiens
  CDR3 for alpha chain variable domain of TCR clone 32715 (TRAV1-2, TRAJ16)
CAVNRFPDGQKLLF

SEQ ID NO: 65430 - protein, 13 aa, Homo sapiens
  CDR3 for beta chain variable domain of TCR clone 32715 (TRBV4-1, TRBJ2-1)
CASSQAGGDEQFF

SEQ ID NO: 65431 - protein, 15 aa, Homo sapiens
  CDR3 for alpha chain variable domain of TCR clone 32716 (TRAV9-2, TRAJ53)
CALTNSGGSNYKLTF

SEQ ID NO: 65432 - protein, 14 aa, Homo sapiens
  CDR3 for beta chain variable domain of TCR clone 32716 (TRBV11-2, TRBJ2-1)
CASSLEVANNEQFF

SEQ ID NO: 65433 - protein, 11 aa, Homo sapiens
  CDR3 for alpha chain variable domain of TCR clone 32717 (TRAV1-2, TRAJ31)
CAVNNNAKLMF

SEQ ID NO: 65434 - protein, 15 aa, Homo sapiens
  CDR3 for beta chain variable domain of TCR clone 32717 (TRBV28, TRBJ2-1)
CASSIIAGGRSEQFF

SEQ ID NO: 65435 - protein, 12 aa, Homo sapiens
  CDR3 for alpha chain variable domain of TCR clone 32718 (TRAV21, TRAJ3)
CCFYSSASKIIF

SEQ ID NO: 65436 - protein, 16 aa, Homo sapiens
  CDR3 for beta chain variable domain of TCR clone 32718 (TRBV19, TRBJ2-1)
CASSKAGPSSYNERFF

SEQ ID NO: 65437 - protein, 10 aa, Homo sapiens
  CDR3 for alpha chain variable domain of TCR clone 32719 (TRAV41, TRAJ34)
CAVEMIKLIF

SEQ ID NO: 65438 - protein, 12 aa, Homo sapiens
  CDR3 for beta chain variable domain of TCR clone 32719 (TRBV4-1, TRBJ2-3)
CASSQGTDTQYF

SEQ ID NO: 65439 - protein, 14 aa, Homo sapiens
  CDR3 for alpha chain variable domain of TCR clone 32720 (TRAV3, TRAJ34)
CAVGDINNTDKLIF

SEQ ID NO: 65440 - protein, 14 aa, Homo sapiens
  CDR3 for beta chain variable domain of TCR clone 32720 (TRBV7-2, TRBJ2-2)
CASSLGQNTGELFF

SEQ ID NO: 65441 - protein, 17 aa, Homo sapiens
  CDR3 for alpha chain variable domain of TCR clone 32721 (TRAV17, TRAJ28)
CATDPRRGGAGSYQLTF

SEQ ID NO: 65442 - protein, 16 aa, Homo sapiens
  CDR3 for beta chain variable domain of TCR clone 32721 (TRBV25-1, TRBJ1-1)
CAGSGDRDRGRIEAFF

SEQ ID NO: 65443 - protein, 12 aa, Homo sapiens
  CDR3 for alpha chain variable domain of TCR clone 32722 (TRAV27, TRAJ42)
CAGGGSQGNPIF

SEQ ID NO: 65444 - protein, 13 aa, Homo sapiens
  CDR3 for beta chain variable domain of TCR clone 32722 (TRBV19, TRBJ2-7)
CASSIRSSYEQYF

SEQ ID NO: 65445 - protein, 13 aa, Homo sapiens
  CDR3 for alpha chain variable domain of TCR clone 32723 (TRAV30, TRAJ6)
CGFIGGGSYIPTF

SEQ ID NO: 65446 - protein, 15 aa, Homo sapiens
  CDR3 for beta chain variable domain of TCR clone 32723 (TRBV20-1, TRBJ2-1)
CSARGIGGTYNEQFF

SEQ ID NO: 65447 - protein, 15 aa, Homo sapiens
  CDR3 for alpha chain variable domain of TCR clone 32724 (TRAV26-1, TRAJ44)
CIVRANTGTASKLTF

SEQ ID NO: 65448 - protein, 16 aa, Homo sapiens
  CDR3 for beta chain variable domain of TCR clone 32724 (TRBV7-7, TRBJ2-1)
CASSLASGTSYNEQYF

SEQ ID NO: 65449 - protein, 12 aa, Homo sapiens
  CDR3 for alpha chain variable domain of TCR clone 32725 (TRAV36/DV7, TRAJ54)
CAVVRGAQKLVF

SEQ ID NO: 65450 - protein, 14 aa, Homo sapiens
  CDR3 for beta chain variable domain of TCR clone 32725 (TRBV7-3, TRBJ1-1)
CASSLKGVNTEAFF

SEQ ID NO: 65451 - protein, 11 aa, Homo sapiens
  CDR3 for alpha chain variable domain of TCR clone 32726 (TRAV12-3, TRAJ41)
CAMNAREALNF

SEQ ID NO: 65452 - protein, 16 aa, Homo sapiens
  CDR3 for beta chain variable domain of TCR clone 32726 (TRBV7-8, TRBJ2-3)
CASSTEGQRETGTQYF

SEQ ID NO: 65453 - protein, 12 aa, Homo sapiens
  CDR3 for alpha chain variable domain of TCR clone 32727 (TRAV12-3, TRAJ20)
CAMVRGDYKLSF

SEQ ID NO: 65454 - protein, 14 aa, Homo sapiens
  CDR3 for beta chain variable domain of TCR clone 32727 (TRBV18, TRBJ2-5)
CASSPGVSQETQYF

SEQ ID NO: 65455 - protein, 16 aa, Homo sapiens
  CDR3 for alpha chain variable domain of TCR clone 32728 (TRAV4, TRAJ9)
CLVGDPNRPGGFKTIF

SEQ ID NO: 65456 - protein, 16 aa, Homo sapiens
  CDR3 for beta chain variable domain of TCR clone 32728 (TRBV28, TRBJ1-4)
CASSPPHRGRSEKLFF

SEQ ID NO: 65457 - protein, 15 aa, Homo sapiens
  CDR3 for alpha chain variable domain of TCR clone 32729 (TRAV30, TRAJ32)
CGTEILGGATNKPIF

SEQ ID NO: 65458 - protein, 13 aa, Homo sapiens
  CDR3 for beta chain variable domain of TCR clone 32729 (TRBV6-3, TRBJ2-7)
CASSFSGGYEQYF

SEQ ID NO: 65459 - protein, 16 aa, Homo sapiens
  CDR3 for alpha chain variable domain of TCR clone 32730 (TRAV25, TRAJ53)
CAGPKGSGGSNYKLTF

SEQ ID NO: 65460 - protein, 17 aa, Homo sapiens
  CDR3 for beta chain variable domain of TCR clone 32730 (TRBV11-3, TRBJ2-6)
CASKWRQGLSGANVLTF

SEQ ID NO: 65461 - protein, 12 aa, Homo sapiens
  CDR3 for alpha chain variable domain of TCR clone 32731 (TRAV12-1, TRAJ20)
CVAHFNDYKLSF

SEQ ID NO: 65462 - protein, 14 aa, Homo sapiens
  CDR3 for beta chain variable domain of TCR clone 32731 (TRBV11-2, TRBJ2-3)
CASSRLARTDTQYF

SEQ ID NO: 65463 - protein, 15 aa, Homo sapiens
  CDR3 for alpha chain variable domain of TCR clone 32732 (TRAV26-2, TRAJ39)
CSLRGDNNAGNMLTF

SEQ ID NO: 65464 - protein, 15 aa, Homo sapiens
  CDR3 for beta chain variable domain of TCR clone 32732 (TRBV5-4, TRBJ1-1)
CASSSLGWANTEAFF

SEQ ID NO: 65465 - protein, 13 aa, Homo sapiens
  CDR3 for alpha chain variable domain of TCR clone 32733 (TRAV2, TRAJ40)
CAVVTSGTYKYIF

SEQ ID NO: 65466 - protein, 16 aa, Homo sapiens
  CDR3 for beta chain variable domain of TCR clone 32733 (TRBV19, TRBJ2-2)
CASRSPGAGATGELFF

SEQ ID NO: 65467 - protein, 14 aa, Homo sapiens
  CDR3 for alpha chain variable domain of TCR clone 32734 (TRAV2, TRAJ22)
CAVGRGGSARQLTV

SEQ ID NO: 65468 - protein, 12 aa, Homo sapiens
  CDR3 for beta chain variable domain of TCR clone 32734 (TRBV19, TRBJ2-1)
CASSMQDTEQFF

SEQ ID NO: 65469 - protein, 14 aa, Homo sapiens
  CDR3 for alpha chain variable domain of TCR clone 32735 (TRAV1-2, TRAJ8)
SAVREDTGFQKLVF

SEQ ID NO: 65470 - protein, 15 aa, Homo sapiens
  CDR3 for beta chain variable domain of TCR clone 32735 (TRBV6-3, TRBJ2-7)
CASSSPGKVFYEQYF

SEQ ID NO: 65471 - protein, 16 aa, Homo sapiens
  CDR3 for alpha chain variable domain of TCR clone 32736 (TRAV2, TRAJ13)
CAARILGVTRKLPLEL

SEQ ID NO: 65472 - protein, 14 aa, Homo sapiens
  CDR3 for beta chain variable domain of TCR clone 32736 (TRBV19, TRBJ2-1)
CASEVTGARNGQFF

SEQ ID NO: 65473 - protein, 13 aa, Homo sapiens
  CDR3 for alpha chain variable domain of TCR clone 32737 (TRAV8-6, TRAJ27)
CAVSNTNAGKSTF

SEQ ID NO: 65474 - protein, 15 aa, Homo sapiens
  CDR3 for beta chain variable domain of TCR clone 32737 (TRBV7-2, TRBJ2-7)
CASSLKGALTYEQYF

SEQ ID NO: 65475 - protein, 14 aa, Homo sapiens
  CDR3 for alpha chain variable domain of TCR clone 32738 (TRAV8-3, TRAJ4)
CAVGAAGNYNKLIF

SEQ ID NO: 65476 - protein, 15 aa, Homo sapiens
  CDR3 for beta chain variable domain of TCR clone 32738 (TRBV6-5, TRBJ2-1)
CASSYDAGAGNEQFF

SEQ ID NO: 65477 - protein, 15 aa, Homo sapiens
  CDR3 for alpha chain variable domain of TCR clone 32739 (TRAV17, TRAJ13)
CATDAASGGYQKVTF

SEQ ID NO: 65478 - protein, 17 aa, Homo sapiens
  CDR3 for beta chain variable domain of TCR clone 32739 (TRBV11-2, TRBJ2-1)
CASSLYPPGVEYNEQFF

SEQ ID NO: 65479 - protein, 14 aa, Homo sapiens
  CDR3 for alpha chain variable domain of TCR clone 32740 (TRAV35, TRAJ33)
CAGSSQDSNYQLIW

SEQ ID NO: 65480 - protein, 15 aa, Homo sapiens
  CDR3 for beta chain variable domain of TCR clone 32740 (TRBV20-1, TRBJ2-7)
CSAESGTSGEYEQYF

SEQ ID NO: 65481 - protein, 15 aa, Homo sapiens
  CDR3 for alpha chain variable domain of TCR clone 32741 (TRAV8-3, TRAJ45)
CASSYSGGGADGLTF

SEQ ID NO: 65482 - protein, 15 aa, Homo sapiens
  CDR3 for beta chain variable domain of TCR clone 32741 (TRBV25-1, TRBJ1-4)
CASSPGDSTNEKLFF

SEQ ID NO: 65483 - protein, 13 aa, Homo sapiens
  CDR3 for alpha chain variable domain of TCR clone 32742 (TRAV8-6, TRAJ49)
CAVITNTGNQFYF

SEQ ID NO: 65484 - protein, 13 aa, Homo sapiens
  CDR3 for beta chain variable domain of TCR clone 32742 (TRBV10-3, TRBJ2-7)
CASRLAVNYEQYF

SEQ ID NO: 65485 - protein, 13 aa, Homo sapiens
  CDR3 for alpha chain variable domain of TCR clone 32743 (TRAV17, TRAJ9)
CAKDYTGGFKTIF

SEQ ID NO: 65486 - protein, 16 aa, Homo sapiens
  CDR3 for beta chain variable domain of TCR clone 32743 (TRBV7-7, TRBJ2-1)
CASSLASGTSYNEQFF

SEQ ID NO: 65487 - protein, 10 aa, Homo sapiens
  CDR3 for alpha chain variable domain of TCR clone 32744 (TRAV12-1, TRAJ37)
ARGNTGKLIF

SEQ ID NO: 65488 - protein, 15 aa, Homo sapiens
  CDR3 for beta chain variable domain of TCR clone 32744 (TRBV7-2, TRBJ2-3)
CASSLEQGGHRYAVF

SEQ ID NO: 65489 - protein, 13 aa, Homo sapiens
  CDR3 for alpha chain variable domain of TCR clone 32745 (TRAV3, TRAJ21)
CAVREPDVNKFYF

SEQ ID NO: 65490 - protein, 13 aa, Homo sapiens
  CDR3 for beta chain variable domain of TCR clone 32745 (TRBV9, TRBJ2-1)
CASSPSGGNEQFF

SEQ ID NO: 65491 - protein, 14 aa, Homo sapiens
  CDR3 for alpha chain variable domain of TCR clone 32746 (TRAV12-2, TRAJ17)
CAVLFKAAGNKLTF

SEQ ID NO: 65492 - protein, 14 aa, Homo sapiens
  CDR3 for beta chain variable domain of TCR clone 32746 (TRBV7-8, TRBJ2-3)
CASSFKSSTDTQYF

SEQ ID NO: 65493 - protein, 14 aa, Homo sapiens
  CDR3 for alpha chain variable domain of TCR clone 32747 (TRAV1-2, TRAJ29)
CAVRELTSATPLVF

SEQ ID NO: 65494 - protein, 12 aa, Homo sapiens
  CDR3 for beta chain variable domain of TCR clone 32747 (TRBV11-2, TRBJ2-2)
CASSLGGGELFF

SEQ ID NO: 65495 - protein, 10 aa, Homo sapiens
  CDR3 for alpha chain variable domain of TCR clone 32748 (TRAV23/DV6, TRAJ57)
CAASSTLSQG

SEQ ID NO: 65496 - protein, 14 aa, Homo sapiens
  CDR3 for beta chain variable domain of TCR clone 32748 (TRBV7-8, TRBJ2-5)
CASSTTGGQETQYF

SEQ ID NO: 65497 - protein, 15 aa, Homo sapiens
  CDR3 for alpha chain variable domain of TCR clone 32749 (TRAV26-2, TRAJ26)
CILRDCDNYGQNFVF

SEQ ID NO: 65498 - protein, 14 aa, Homo sapiens
  CDR3 for beta chain variable domain of TCR clone 32749 (TRBV29-1, TRBJ2-5)
CSFWTPYAGETQYF

SEQ ID NO: 65499 - protein, 12 aa, Homo sapiens
  CDR3 for alpha chain variable domain of TCR clone 32750 (TRAV21, TRAJ20)
CAVRGNDYKLSS

SEQ ID NO: 65500 - protein, 14 aa, Homo sapiens
  CDR3 for beta chain variable domain of TCR clone 32750 (TRBV7-8, TRBJ2-7)
CASSQTQGADEQYF

SEQ ID NO: 65501 - protein, 11 aa, Homo sapiens
  CDR3 for alpha chain variable domain of TCR clone 32751 (TRAV3, TRAJ21)
CAVGKFNKFYF

SEQ ID NO: 65502 - protein, 12 aa, Homo sapiens
  CDR3 for beta chain variable domain of TCR clone 32751 (TRBV29-1, TRBJ2-3)
CSVTGGADTQYF

SEQ ID NO: 65503 - protein, 12 aa, Homo sapiens
  CDR3 for alpha chain variable domain of TCR clone 32752 (TRAV21, TRAJ8)
CAVNTGFQKLVF

SEQ ID NO: 65504 - protein, 16 aa, Homo sapiens
  CDR3 for beta chain variable domain of TCR clone 32752 (TRBV25-1, TRBJ1-1)
CASSGDRDRGRIEAFF

SEQ ID NO: 65505 - protein, 18 aa, Homo sapiens
  CDR3 for alpha chain variable domain of TCR clone 32753 (TRAV12-3, TRAJ52)
CAMSVGGAGGTSYVKLTF

SEQ ID NO: 65506 - protein, 15 aa, Homo sapiens
  CDR3 for beta chain variable domain of TCR clone 32753 (TRBV27, TRBJ1-6)
CASSFDRGLGSPLHF

SEQ ID NO: 65507 - protein, 12 aa, Homo sapiens
  CDR3 for alpha chain variable domain of TCR clone 32754 (TRAV13-1, TRAJ15)
CAASQAGNALIF

SEQ ID NO: 65508 - protein, 20 aa, Homo sapiens
  CDR3 for beta chain variable domain of TCR clone 32754 (TRBV7-9, TRBJ2-3)
CASSLPIGQGTHPSTDTQYF

SEQ ID NO: 65509 - protein, 12 aa, Homo sapiens
  CDR3 for alpha chain variable domain of TCR clone 32755 (TRAV3, TRAJ26)
CAVRDYGQNFVF

SEQ ID NO: 65510 - protein, 13 aa, Homo sapiens
  CDR3 for beta chain variable domain of TCR clone 32755 (TRBV19, TRBJ1-2)
CASSVPGQDGYTF

SEQ ID NO: 65511 - protein, 13 aa, Homo sapiens
  CDR3 for alpha chain variable domain of TCR clone 32756 (TRAV2, TRAJ40)
CAVVTSGTYKYIF

SEQ ID NO: 65512 - protein, 14 aa, Homo sapiens
  CDR3 for beta chain variable domain of TCR clone 32756 (TRBV19, TRBJ2-1)
CASPTFDLSGEQFF

SEQ ID NO: 65513 - protein, 14 aa, Homo sapiens
  CDR3 for alpha chain variable domain of TCR clone 32757 (TRAV9-2, TRAJ39)
CALYIYNAGNMLTF

SEQ ID NO: 65514 - protein, 15 aa, Homo sapiens
  CDR3 for beta chain variable domain of TCR clone 32757 (TRBV19, TRBJ1-5)
CASSIVWADNQPQHF

SEQ ID NO: 65515 - protein, 11 aa, Homo sapiens
  CDR3 for alpha chain variable domain of TCR clone 32758 (TRAV4, TRAJ31)
CLVGDNARLMF

SEQ ID NO: 65516 - protein, 16 aa, Homo sapiens
  CDR3 for beta chain variable domain of TCR clone 32758 (TRBV7-2, TRBJ2-5)
CASSSKWVSGQETQYF

SEQ ID NO: 65517 - protein, 11 aa, Homo sapiens
  CDR3 for alpha chain variable domain of TCR clone 32759 (TRAV17, TRAJ9)
CGFTGGFKTIF

SEQ ID NO: 65518 - protein, 14 aa, Homo sapiens
  CDR3 for beta chain variable domain of TCR clone 32759 (TRBV7-9, TRBJ2-2)
CASSLVQDTGELFF

SEQ ID NO: 65519 - protein, 13 aa, Homo sapiens
  CDR3 for alpha chain variable domain of TCR clone 32760 (TRAV30, TRAJ24)
CGTVTDSWGKLQF

SEQ ID NO: 65520 - protein, 16 aa, Homo sapiens
  CDR3 for beta chain variable domain of TCR clone 32760 (TRBV7-3, TRBJ2-2)
CASSLKRGTLSGELFL

SEQ ID NO: 65521 - protein, 16 aa, Homo sapiens
  CDR3 for alpha chain variable domain of TCR clone 32761 (TRAV26-1, TRAJ37)
CIVRGDGSGNTGKLIF

SEQ ID NO: 65522 - protein, 17 aa, Homo sapiens
  CDR3 for beta chain variable domain of TCR clone 32761 (TRBV4-1, TRBJ2-7)
CASSRDPLGVRGGERYF

SEQ ID NO: 65523 - protein, 14 aa, Homo sapiens
  CDR3 for alpha chain variable domain of TCR clone 32762 (TRAV17, TRAJ39)
CATDPVRAGNMLTF

SEQ ID NO: 65524 - protein, 15 aa, Homo sapiens
  CDR3 for beta chain variable domain of TCR clone 32762 (TRBV13, TRBJ1-5)
SASSFGQGGVQPQHF

SEQ ID NO: 65525 - protein, 14 aa, Homo sapiens
  CDR3 for alpha chain variable domain of TCR clone 32763 (TRAV35, TRAJ33)
CAGSSHDSNYQLIW

SEQ ID NO: 65526 - protein, 15 aa, Homo sapiens
  CDR3 for beta chain variable domain of TCR clone 32763 (TRBV20-1, TRBJ2-7)
CSAESGTSGAYEQYF

SEQ ID NO: 65527 - protein, 15 aa, Homo sapiens
  CDR3 for alpha chain variable domain of TCR clone 32764 (TRAV3, TRAJ4)
CAVRDGTSGYNKLIF

SEQ ID NO: 65528 - protein, 16 aa, Homo sapiens
  CDR3 for beta chain variable domain of TCR clone 32764 (TRBV27, TRBJ2-2)
CASSSSGVSNTGELFF

SEQ ID NO: 65529 - protein, 16 aa, Homo sapiens
  CDR3 for alpha chain variable domain of TCR clone 32765 (TRAV1-2, TRAJ10)
CAVRGVLTGGGNKLTF

SEQ ID NO: 65530 - protein, 12 aa, Homo sapiens
  CDR3 for beta chain variable domain of TCR clone 32765 (TRBV7-8, TRBJ2-7)
CVSSLGDREQYF

SEQ ID NO: 65531 - protein, 12 aa, Homo sapiens
  CDR3 for alpha chain variable domain of TCR clone 32766 (TRAV2, TRAJ9)
CAVGAGGFKTIF

SEQ ID NO: 65532 - protein, 16 aa, Homo sapiens
  CDR3 for beta chain variable domain of TCR clone 32766 (TRBV13, TRBJ2-2)
CASSPRTGEHNGELFF

SEQ ID NO: 65533 - protein, 14 aa, Homo sapiens
  CDR3 for alpha chain variable domain of TCR clone 32767 (TRAV16, TRAJ33)
CALSAMDSNYQLIW

SEQ ID NO: 65534 - protein, 15 aa, Homo sapiens
  CDR3 for beta chain variable domain of TCR clone 32767 (TRBV29-1, TRBJ2-1)
CSVGRHALFYNEQFF

SEQ ID NO: 65535 - protein, 16 aa, Homo sapiens
  CDR3 for alpha chain variable domain of TCR clone 32768 (TRAV30, TRAJ24)
CGTEIVDADSWGKFQF

SEQ ID NO: 65536 - protein, 13 aa, Homo sapiens
  CDR3 for beta chain variable domain of TCR clone 32768 (TRBV29-1, TRBJ2-2)
CSTTGVNTGELFF

SEQ ID NO: 65537 - protein, 15 aa, Homo sapiens
  CDR3 for alpha chain variable domain of TCR clone 32769 (TRAV3, TRAJ47)
CAVRDIGEYGNKLVF

SEQ ID NO: 65538 - protein, 17 aa, Homo sapiens
  CDR3 for beta chain variable domain of TCR clone 32769 (TRBV7-3, TRBJ2-3)
CASSLMKRMRGADTQYF

SEQ ID NO: 65539 - protein, 10 aa, Homo sapiens
  CDR3 for alpha chain variable domain of TCR clone 32770 (TRAV21, TRAJ20)
CAVNVGRLQA

SEQ ID NO: 65540 - protein, 15 aa, Homo sapiens
  CDR3 for beta chain variable domain of TCR clone 32770 (TRBV6-1, TRBJ2-5)
SASSEFPLMGETQYF

SEQ ID NO: 65541 - protein, 19 aa, Homo sapiens
  CDR3 for alpha chain variable domain of TCR clone 32771 (TRAV3, TRAJ6)
CAVRDRNPSRSVGSYIPTF

SEQ ID NO: 65542 - protein, 15 aa, Homo sapiens
  CDR3 for beta chain variable domain of TCR clone 32771 (TRBV18, TRBJ2-7)
CASSPTFMDSYEQYF

SEQ ID NO: 65543 - protein, 11 aa, Homo sapiens
  CDR3 for alpha chain variable domain of TCR clone 32772 (TRAV12-3, TRAJ27)
CAMANAGKSPF

SEQ ID NO: 65544 - protein, 13 aa, Homo sapiens
  CDR3 for beta chain variable domain of TCR clone 32772 (TRBV20-1, TRBJ1-1)
CSARVGGNTEAFF

SEQ ID NO: 65545 - protein, 15 aa, Homo sapiens
  CDR3 for alpha chain variable domain of TCR clone 32773 (TRAV2, TRAJ44)
CAVEAYTGTASKLTF

SEQ ID NO: 65546 - protein, 14 aa, Homo sapiens
  CDR3 for beta chain variable domain of TCR clone 32773 (TRBV11-2, TRBJ2-1)
CAISPGSRDNEQFF

SEQ ID NO: 65547 - protein, 14 aa, Homo sapiens
  CDR3 for alpha chain variable domain of TCR clone 32774 (TRAV3, TRAJ7)
CAVREEEGEQQTRF

SEQ ID NO: 65548 - protein, 12 aa, Homo sapiens
  CDR3 for beta chain variable domain of TCR clone 32774 (TRBV7-8, TRBJ2-7)
CASSLGDREQYF

SEQ ID NO: 65549 - protein, 14 aa, Homo sapiens
  CDR3 for alpha chain variable domain of TCR clone 32775 (TRAV20, TRAJ56)
CAVQFGGANSKLTF

SEQ ID NO: 65550 - protein, 15 aa, Homo sapiens
  CDR3 for beta chain variable domain of TCR clone 32775 (TRBV20-1, TRBJ2-7)
CSARDRVSGMDEQYF

SEQ ID NO: 65551 - protein, 14 aa, Homo sapiens
  CDR3 for alpha chain variable domain of TCR clone 32776 (TRAV8-4, TRAJ9)
CAVRINTGGFKTIF

SEQ ID NO: 65552 - protein, 15 aa, Homo sapiens
  CDR3 for beta chain variable domain of TCR clone 32776 (TRBV10-2, TRBJ2-6)
CASSEQGTGANVLSF

SEQ ID NO: 65553 - protein, 15 aa, Homo sapiens
  CDR3 for alpha chain variable domain of TCR clone 32777 (TRAV8-3, TRAJ41)
CAVGSNSTSGYALNF

SEQ ID NO: 65554 - protein, 17 aa, Homo sapiens
  CDR3 for beta chain variable domain of TCR clone 32777 (TRBV25-1, TRBJ2-1)
CASSAYGQGRGVYEQFF

SEQ ID NO: 65555 - protein, 12 aa, Homo sapiens
  CDR3 for alpha chain variable domain of TCR clone 32778 (TRAV12-3, TRAJ17)
CAMTLTGNKLTF

SEQ ID NO: 65556 - protein, 15 aa, Homo sapiens
  CDR3 for beta chain variable domain of TCR clone 32778 (TRBV28, TRBJ2-5)
CASSSGRTIQETQYF

SEQ ID NO: 65557 - protein, 16 aa, Homo sapiens
  CDR3 for alpha chain variable domain of TCR clone 32779 (TRAV20, TRAJ6)
CAVQAGGAGGSYIPTF

SEQ ID NO: 65558 - protein, 15 aa, Homo sapiens
  CDR3 for beta chain variable domain of TCR clone 32779 (TRBV7-9, TRBJ1-6)
CASSSPGRGNSPLHF

SEQ ID NO: 65559 - protein, 18 aa, Homo sapiens
  CDR3 for alpha chain variable domain of TCR clone 32780 (TRAV26-1, TRAJ48)
CTIASSDLSNFGNEKLTF

SEQ ID NO: 65560 - protein, 14 aa, Homo sapiens
  CDR3 for beta chain variable domain of TCR clone 32780 (TRBV13, TRBJ2-7)
CASSLKGASYEQYF

SEQ ID NO: 65561 - protein, 12 aa, Homo sapiens
  CDR3 for alpha chain variable domain of TCR clone 32781 (TRAV13-1, TRAJ21)
CAAKEGFNKFYF

SEQ ID NO: 65562 - protein, 15 aa, Homo sapiens
  CDR3 for beta chain variable domain of TCR clone 32781 (TRBV12-4, TRBJ2-5)
CASSPPTGLQGTQYF

SEQ ID NO: 65563 - protein, 15 aa, Homo sapiens
  CDR3 for alpha chain variable domain of TCR clone 32782 (TRAV21, TRAJ24)
CAARSLTGSWGKLQF

SEQ ID NO: 65564 - protein, 13 aa, Homo sapiens
  CDR3 for beta chain variable domain of TCR clone 32782 (TRBV10-3, TRBJ2-7)
CASKLAVNYEQYF

SEQ ID NO: 65565 - protein, 14 aa, Homo sapiens
  CDR3 for alpha chain variable domain of TCR clone 32783 (TRAV1-1, TRAJ23)
CAVSIYNQGGKLIF

SEQ ID NO: 65566 - protein, 17 aa, Homo sapiens
  CDR3 for beta chain variable domain of TCR clone 32783 (TRBV4-2, TRBJ1-1)
CASTQFGGGSGNTEAFF

SEQ ID NO: 65567 - protein, 18 aa, Homo sapiens
  CDR3 for alpha chain variable domain of TCR clone 32784 (TRAV6, TRAJ30)
CALEMTRSSLEKGHDFIF

SEQ ID NO: 65568 - protein, 15 aa, Homo sapiens
  CDR3 for beta chain variable domain of TCR clone 32784 (TRBV20-1, TRBJ2-2)
CSAIPGHSNTGELFF

SEQ ID NO: 65569 - protein, 14 aa, Homo sapiens
  CDR3 for alpha chain variable domain of TCR clone 32785 (TRAV17, TRAJ57)
CATDPQGGSEKLVF

SEQ ID NO: 65570 - protein, 15 aa, Homo sapiens
  CDR3 for beta chain variable domain of TCR clone 32785 (TRBV6-4, TRBJ1-5)
CASSASSRINQPQHF

SEQ ID NO: 65571 - protein, 13 aa, Homo sapiens
  CDR3 for alpha chain variable domain of TCR clone 32786 (TRAV12-3, TRAJ9)
CAMRNTGGFNTIF

SEQ ID NO: 65572 - protein, 14 aa, Homo sapiens
  CDR3 for beta chain variable domain of TCR clone 32786 (TRBV11-2, TRBJ2-7)
CASSSTGEGYEQYF

SEQ ID NO: 65573 - protein, 15 aa, Homo sapiens
  CDR3 for alpha chain variable domain of TCR clone 32787 (TRAV23/DV6, TRAJ38)
CAARSNAGNNRKLIW

SEQ ID NO: 65574 - protein, 16 aa, Homo sapiens
  CDR3 for beta chain variable domain of TCR clone 32787 (TRBV10-2, TRBJ1-5)
CASSRDRDYSNQPPHF

SEQ ID NO: 65575 - protein, 14 aa, Homo sapiens
  CDR3 for alpha chain variable domain of TCR clone 32788 (TRAV35, TRAJ13)
CAGSPSGGYQKVTF

SEQ ID NO: 65576 - protein, 13 aa, Homo sapiens
  CDR3 for beta chain variable domain of TCR clone 32788 (TRBV29-1, TRBJ1-1)
CSVRDSRNTEAFF

SEQ ID NO: 65577 - protein, 17 aa, Homo sapiens
  CDR3 for alpha chain variable domain of TCR clone 32789 (TRAV3, TRAJ6)
CAVRDGPRAGGSYIPTF

SEQ ID NO: 65578 - protein, 20 aa, Homo sapiens
  CDR3 for beta chain variable domain of TCR clone 32789 (TRBV28, TRBJ2-1)
CASTTIGRSPGLAGGNEQFF

SEQ ID NO: 65579 - protein, 13 aa, Homo sapiens
  CDR3 for alpha chain variable domain of TCR clone 32790 (TRAV13-2, TRAJ21)
CAENVDNFNKFYF

SEQ ID NO: 65580 - protein, 15 aa, Homo sapiens
  CDR3 for beta chain variable domain of TCR clone 32790 (TRBV20-1, TRBJ2-7)
CSARDRVSGMDEQYF

SEQ ID NO: 65581 - protein, 18 aa, Homo sapiens
  CDR3 for alpha chain variable domain of TCR clone 32791 (TRAV21, TRAJ52)
CAVRPSPAGGTSYGKLSF

SEQ ID NO: 65582 - protein, 17 aa, Homo sapiens
  CDR3 for beta chain variable domain of TCR clone 32791 (TRBV13, TRBJ2-3)
CASSLSRVAGGRNTQYF

SEQ ID NO: 65583 - protein, 14 aa, Homo sapiens
  CDR3 for alpha chain variable domain of TCR clone 32792 (TRAV12-2, TRAJ44)
CAVNPAGTASKLTF

SEQ ID NO: 65584 - protein, 16 aa, Homo sapiens
  CDR3 for beta chain variable domain of TCR clone 32792 (TRBV2, TRBJ2-6)
RASSEVGGAGANVLTF

SEQ ID NO: 65585 - protein, 16 aa, Homo sapiens
  CDR3 for alpha chain variable domain of TCR clone 32793 (TRAV3, TRAJ37)
CAVRGKGSCNTGKLIF

SEQ ID NO: 65586 - protein, 12 aa, Homo sapiens
  CDR3 for beta chain variable domain of TCR clone 32793 (TRBV11-2, TRBJ2-2)
CASSLGGGELFF

SEQ ID NO: 65587 - protein, 18 aa, Homo sapiens
  CDR3 for alpha chain variable domain of TCR clone 32794 (TRAV26-1, TRAJ23)
CIVRVGLEVWNQGGKLIF

SEQ ID NO: 65588 - protein, 16 aa, Homo sapiens
  CDR3 for beta chain variable domain of TCR clone 32794 (TRBV12-4, TRBJ2-5)
CASSFFGRGRQETQYF

SEQ ID NO: 65589 - protein, 15 aa, Homo sapiens
  CDR3 for alpha chain variable domain of TCR clone 32795 (TRAV13-1, TRAJ17)
CAASIKRAAGNKLTF

SEQ ID NO: 65590 - protein, 12 aa, Homo sapiens
  CDR3 for beta chain variable domain of TCR clone 32795 (TRBV5-7, TRBJ1-1)
CASSLGRGKAFF

SEQ ID NO: 65591 - protein, 16 aa, Homo sapiens
  CDR3 for alpha chain variable domain of TCR clone 32796 (TRAV1-2, TRAJ10)
CAVRGVLAGGGNKLTF

SEQ ID NO: 65592 - protein, 12 aa, Homo sapiens
  CDR3 for beta chain variable domain of TCR clone 32796 (TRBV7-8, TRBJ2-7)
CASSLGDREQYL

SEQ ID NO: 65593 - protein, 13 aa, Homo sapiens
  CDR3 for alpha chain variable domain of TCR clone 32797 (TRAV12-3, TRAJ7)
CAMSASGNNSLAF

SEQ ID NO: 65594 - protein, 14 aa, Homo sapiens
  CDR3 for beta chain variable domain of TCR clone 32797 (TRBV13, TRBJ2-5)
CASSLGPRGETQYF

SEQ ID NO: 65595 - protein, 14 aa, Homo sapiens
  CDR3 for alpha chain variable domain of TCR clone 32798 (TRAV12-2, TRAJ53)
CRERGGGSNYKLTF

SEQ ID NO: 65596 - protein, 12 aa, Homo sapiens
  CDR3 for beta chain variable domain of TCR clone 32798 (TRBV11-2, TRBJ2-2)
CASSLGGGELFF

SEQ ID NO: 65597 - protein, 12 aa, Homo sapiens
  CDR3 for alpha chain variable domain of TCR clone 32799 (TRAV22, TRAJ22)
CAPGGSARQLTF

SEQ ID NO: 65598 - protein, 13 aa, Homo sapiens
  CDR3 for beta chain variable domain of TCR clone 32799 (TRBV19, TRBJ2-1)
CASTNSDVGEQFF

SEQ ID NO: 65599 - protein, 17 aa, Homo sapiens
  CDR3 for alpha chain variable domain of TCR clone 32800 (TRAV3, TRAJ6)
CAVRDGPRAGGSYIPTF

SEQ ID NO: 65600 - protein, 20 aa, Homo sapiens
  CDR3 for beta chain variable domain of TCR clone 32800 (TRBV28, TRBJ2-1)
CASTPIGRSTGLAGGNEQFF

SEQ ID NO: 65601 - protein, 13 aa, Homo sapiens
  CDR3 for alpha chain variable domain of TCR clone 32801 (TRAV8-3, TRAJ36)
CAVGATGAINLFF

SEQ ID NO: 65602 - protein, 15 aa, Homo sapiens
  CDR3 for beta chain variable domain of TCR clone 32801 (TRBV7-2, TRBJ1-2)
CASSPRAGWNYGYTF

SEQ ID NO: 65603 - protein, 13 aa, Homo sapiens
  CDR3 for alpha chain variable domain of TCR clone 32802 (TRAV12-2, TRAJ13)
CREEDWGLQKVTF

SEQ ID NO: 65604 - protein, 15 aa, Homo sapiens
  CDR3 for beta chain variable domain of TCR clone 32802 (TRBV27, TRBJ2-1)
CASSNGGGSSNEQFF

SEQ ID NO: 65605 - protein, 14 aa, Homo sapiens
  CDR3 for alpha chain variable domain of TCR clone 32803 (TRAV1-2, TRAJ16)
CAANRFSDGQKLLF

SEQ ID NO: 65606 - protein, 13 aa, Homo sapiens
  CDR3 for beta chain variable domain of TCR clone 32803 (TRBV10-3, TRBJ2-7)
CASKLAVNYEQYF

SEQ ID NO: 65607 - protein, 12 aa, Homo sapiens
  CDR3 for alpha chain variable domain of TCR clone 32804 (TRAV36/DV7, TRAJ40)
CAVGKGTYKYIF

SEQ ID NO: 65608 - protein, 13 aa, Homo sapiens
  CDR3 for beta chain variable domain of TCR clone 32804 (TRBV7-7, TRBJ1-5)
CASSPGKNQPQHF

SEQ ID NO: 65609 - protein, 14 aa, Homo sapiens
  CDR3 for alpha chain variable domain of TCR clone 32805 (TRAV2, TRAJ9)
CAVEDRSGGFKTIF

SEQ ID NO: 65610 - protein, 15 aa, Homo sapiens
  CDR3 for beta chain variable domain of TCR clone 32805 (TRBV20-1, TRBJ1-1)
CSASRGVTGNTEAFF

SEQ ID NO: 65611 - protein, 16 aa, Homo sapiens
  CDR3 for alpha chain variable domain of TCR clone 32806 (TRAV30, TRAJ26)
CGTESVGDNYGQNLVF

SEQ ID NO: 65612 - protein, 13 aa, Homo sapiens
  CDR3 for beta chain variable domain of TCR clone 32806 (TRBV19, TRBJ1-2)
CASSISEDYGYTF

SEQ ID NO: 65613 - protein, 11 aa, Homo sapiens
  CDR3 for alpha chain variable domain of TCR clone 32807 (TRAV39, TRAJ49)
CAVDISTQFYF

SEQ ID NO: 65614 - protein, 11 aa, Homo sapiens
  CDR3 for beta chain variable domain of TCR clone 32807 (TRBV7-8, TRBJ2-7)
CASSLPLEQYF

SEQ ID NO: 65615 - protein, 11 aa, Homo sapiens
  CDR3 for alpha chain variable domain of TCR clone 32808 (TRAV2, TRAJ13)
CASGGYQKVTF

SEQ ID NO: 65616 - protein, 14 aa, Homo sapiens
  CDR3 for beta chain variable domain of TCR clone 32808 (TRBV5-4, TRBJ1-1)
CASSLDSRRDEAFF

SEQ ID NO: 65617 - protein, 13 aa, Homo sapiens
  CDR3 for alpha chain variable domain of TCR clone 32809 (TRAV38-2/DV8, TRAJ45)
CAYVGGGADRLTF

SEQ ID NO: 65618 - protein, 13 aa, Homo sapiens
  CDR3 for beta chain variable domain of TCR clone 32809 (TRBV29-1, TRBJ2-1)
CSVEGGRVNEQFF

SEQ ID NO: 65619 - protein, 14 aa, Homo sapiens
  CDR3 for alpha chain variable domain of TCR clone 32810 (TRAV1-2, TRAJ6)
CAVSLSGGSYIPKF

SEQ ID NO: 65620 - protein, 15 aa, Homo sapiens
  CDR3 for beta chain variable domain of TCR clone 32810 (TRBV28, TRBJ2-7)
CASSPGGRGFYEQYF

SEQ ID NO: 65621 - protein, 12 aa, Homo sapiens
  CDR3 for alpha chain variable domain of TCR clone 32811 (TRAV12-1, TRAJ40)
CVFYSGTYKYIF

SEQ ID NO: 65622 - protein, 18 aa, Homo sapiens
  CDR3 for beta chain variable domain of TCR clone 32811 (TRBV12-4, TRBJ2-2)
CARSLVAGTRGRTGELFF

SEQ ID NO: 65623 - protein, 13 aa, Homo sapiens
  CDR3 for alpha chain variable domain of TCR clone 32812 (TRAV20, TRAJ21)
CAVEGYNFNKLYF

SEQ ID NO: 65624 - protein, 14 aa, Homo sapiens
  CDR3 for beta chain variable domain of TCR clone 32812 (TRBV3-1, TRBJ2-5)
CASSQGPDQETQYF

SEQ ID NO: 65625 - protein, 16 aa, Homo sapiens
  CDR3 for alpha chain variable domain of TCR clone 32813 (TRAV1-2, TRAJ27)
CAVREPQAPMQANQPL

SEQ ID NO: 65626 - protein, 13 aa, Homo sapiens
  CDR3 for beta chain variable domain of TCR clone 32813 (TRBV6-1, TRBJ1-2)
CASSAREGYGYTF

SEQ ID NO: 65627 - protein, 13 aa, Homo sapiens
  CDR3 for alpha chain variable domain of TCR clone 32814 (TRAV3, TRAJ21)
CAVREPDFNKFYF

SEQ ID NO: 65628 - protein, 16 aa, Homo sapiens
  CDR3 for beta chain variable domain of TCR clone 32814 (TRBV7-3, TRBJ2-2)
CASSLKRGTLSGELFF

SEQ ID NO: 65629 - protein, 14 aa, Homo sapiens
  CDR3 for alpha chain variable domain of TCR clone 32815 (TRAV1-2, TRAJ16)
CAVNRFSDGQKLLL

SEQ ID NO: 65630 - protein, 16 aa, Homo sapiens
  CDR3 for beta chain variable domain of TCR clone 32815 (TRBV27, TRBJ2-2)
CASSFRGLVRTGELFF

SEQ ID NO: 65631 - protein, 12 aa, Homo sapiens
  CDR3 for alpha chain variable domain of TCR clone 32816 (TRAV4, TRAJ26)
CLVGDYGQNFVF

SEQ ID NO: 65632 - protein, 16 aa, Homo sapiens
  CDR3 for beta chain variable domain of TCR clone 32816 (TRBV7-2, TRBJ1-2)
CASSSNQDRRCHGYTF

SEQ ID NO: 65633 - protein, 11 aa, Homo sapiens
  CDR3 for alpha chain variable domain of TCR clone 32817 (TRAV35, TRAJ34)
CWARNTDKLIF

SEQ ID NO: 65634 - protein, 14 aa, Homo sapiens
  CDR3 for beta chain variable domain of TCR clone 32817 (TRBV5-1, TRBJ2-7)
CASSRGEPLYEQYF

SEQ ID NO: 65635 - protein, 12 aa, Homo sapiens
  CDR3 for alpha chain variable domain of TCR clone 32818 (TRAV3, TRAJ20)
CAVRDPAYKLSF

SEQ ID NO: 65636 - protein, 13 aa, Homo sapiens
  CDR3 for beta chain variable domain of TCR clone 32818 (TRBV9, TRBJ2-1)
CASSVGQGGEQFF

SEQ ID NO: 65637 - protein, 14 aa, Homo sapiens
  CDR3 for alpha chain variable domain of TCR clone 32819 (TRAV4, TRAJ17)
CLVGDMAAGNKLTF

SEQ ID NO: 65638 - protein, 15 aa, Homo sapiens
  CDR3 for beta chain variable domain of TCR clone 32819 (TRBV5-5, TRBJ1-5)
CANSSTPGSNQPQHF

SEQ ID NO: 65639 - protein, 13 aa, Homo sapiens
  CDR3 for alpha chain variable domain of TCR clone 32820 (TRAV12-2, TRAJ52)
CAVSGTSYGKLTF

SEQ ID NO: 65640 - protein, 16 aa, Homo sapiens
  CDR3 for beta chain variable domain of TCR clone 32820 (TRBV5-7, TRBJ2-7)
CASSPTSGRELDEQHF

SEQ ID NO: 65641 - protein, 19 aa, Homo sapiens
  CDR3 for alpha chain variable domain of TCR clone 32821 (TRAV2, TRAJ20)
IIQVREADAAVYRDCKLSF

SEQ ID NO: 65642 - protein, 12 aa, Homo sapiens
  CDR3 for beta chain variable domain of TCR clone 32821 (TRBV11-2, TRBJ2-2)
CASSLGGGELFF

SEQ ID NO: 65643 - protein, 16 aa, Homo sapiens
  CDR3 for alpha chain variable domain of TCR clone 32822 (TRAV38-1, TRAJ37)
CAFKGDGSSNTGKLIF

SEQ ID NO: 65644 - protein, 13 aa, Homo sapiens
  CDR3 for beta chain variable domain of TCR clone 32822 (TRBV12-4, TRBJ2-5)
RASSLFRRETQYF

SEQ ID NO: 65645 - protein, 14 aa, Homo sapiens
  CDR3 for alpha chain variable domain of TCR clone 32823 (TRAV35, TRAJ13)
CAGSPPGGYQKVTF

SEQ ID NO: 65646 - protein, 13 aa, Homo sapiens
  CDR3 for beta chain variable domain of TCR clone 32823 (TRBV29-1, TRBJ1-1)
CSVGDSRNTEAFF

SEQ ID NO: 65647 - protein, 14 aa, Homo sapiens
  CDR3 for alpha chain variable domain of TCR clone 32824 (TRAV26-1, TRAJ38)
CIADNAGNNRKLIW

SEQ ID NO: 65648 - protein, 17 aa, Homo sapiens
  CDR3 for beta chain variable domain of TCR clone 32824 (TRBV7-3, TRBJ2-3)
CASSLMKRMRGADTQYF

SEQ ID NO: 65649 - protein, 11 aa, Homo sapiens
  CDR3 for alpha chain variable domain of TCR clone 32825 (TRAV1-2, TRAJ31)
CAMNNNARLMF

SEQ ID NO: 65650 - protein, 15 aa, Homo sapiens
  CDR3 for beta chain variable domain of TCR clone 32825 (TRBV28, TRBJ2-1)
CASSIIAGGRSEQFF

SEQ ID NO: 65651 - protein, 13 aa, Homo sapiens
  CDR3 for alpha chain variable domain of TCR clone 32826 (TRAV12-1, TRAJ34)
CVVLPYNTDKLIF

SEQ ID NO: 65652 - protein, 15 aa, Homo sapiens
  CDR3 for beta chain variable domain of TCR clone 32826 (TRBV7-2, TRBJ1-6)
CASSLGPDRGMPLHF

SEQ ID NO: 65653 - protein, 15 aa, Homo sapiens
  CDR3 for alpha chain variable domain of TCR clone 32827 (TRAV3, TRAJ4)
CAVRDGTGGYNKLIF

SEQ ID NO: 65654 - protein, 15 aa, Homo sapiens
  CDR3 for beta chain variable domain of TCR clone 32827 (TRBV7-9, TRBJ1-6)
CASSSPGRGNSPLHF

SEQ ID NO: 65655 - protein, 13 aa, Homo sapiens
  CDR3 for alpha chain variable domain of TCR clone 32828 (TRAV17, TRAJ26)
CATVDNYGQNFVF

SEQ ID NO: 65656 - protein, 14 aa, Homo sapiens
  CDR3 for beta chain variable domain of TCR clone 32828 (TRBV7-8, TRBJ2-3)
CASSLEAGTDTQYF

SEQ ID NO: 65657 - protein, 12 aa, Homo sapiens
  CDR3 for alpha chain variable domain of TCR clone 32829 (TRAV8-3, TRAJ20)
CAVGANDYKLSF

SEQ ID NO: 65658 - protein, 16 aa, Homo sapiens
  CDR3 for beta chain variable domain of TCR clone 32829 (TRBV19, TRBJ1-5)
CASSIDRGGPRQPQHF

SEQ ID NO: 65659 - protein, 13 aa, Homo sapiens
  CDR3 for alpha chain variable domain of TCR clone 32830 (TRAV35, TRAJ44)
CAGLSGTASKLTF

SEQ ID NO: 65660 - protein, 17 aa, Homo sapiens
  CDR3 for beta chain variable domain of TCR clone 32830 (TRBV13, TRBJ2-3)
CASSLSRVAGGRNTQYF

SEQ ID NO: 65661 - protein, 11 aa, Homo sapiens
  CDR3 for alpha chain variable domain of TCR clone 32831 (TRAV12-3, TRAJ27)
CALANAGKSTF

SEQ ID NO: 65662 - protein, 13 aa, Homo sapiens
  CDR3 for beta chain variable domain of TCR clone 32831 (TRBV20-1, TRBJ1-1)
CSARVGGNTEAFF

SEQ ID NO: 65663 - protein, 12 aa, Homo sapiens
  CDR3 for alpha chain variable domain of TCR clone 32832 (TRAV12-3, TRAJ17)
CAMTLTGNKLTF

SEQ ID NO: 65664 - protein, 14 aa, Homo sapiens
  CDR3 for beta chain variable domain of TCR clone 32832 (TRBV3-1, TRBJ2-5)
CASSQGPDQETQYF

SEQ ID NO: 65665 - protein, 14 aa, Homo sapiens
  CDR3 for alpha chain variable domain of TCR clone 32833 (TRAV1-2, TRAJ16)
CAVNRFSDGQKLLF

SEQ ID NO: 65666 - protein, 15 aa, Homo sapiens
  CDR3 for beta chain variable domain of TCR clone 32833 (TRBV28, TRBJ1-3)
CASGATGNSGNTICF

SEQ ID NO: 65667 - protein, 14 aa, Homo sapiens
  CDR3 for alpha chain variable domain of TCR clone 32834 (TRAV2, TRAJ9)
CAVEDRSGGFKTIF

SEQ ID NO: 65668 - protein, 16 aa, Homo sapiens
  CDR3 for beta chain variable domain of TCR clone 32834 (TRBV13, TRBJ2-2)
CASSPRTGEHTGELFF

SEQ ID NO: 65669 - protein, 14 aa, Homo sapiens
  CDR3 for alpha chain variable domain of TCR clone 32835 (TRAV30, TRAJ33)
CGTEQRDSNYQLIW

SEQ ID NO: 65670 - protein, 13 aa, Homo sapiens
  CDR3 for beta chain variable domain of TCR clone 32835 (TRBV7-9, TRBJ1-2)
CASSLKQNYGYTF

SEQ ID NO: 65671 - protein, 12 aa, Homo sapiens
  CDR3 for alpha chain variable domain of TCR clone 32836 (TRAV12-3, TRAJ17)
CAMTLTGNKLTF

SEQ ID NO: 65672 - protein, 16 aa, Homo sapiens
  CDR3 for beta chain variable domain of TCR clone 32836 (TRBV19, TRBJ2-1)
CASSKAGPSSYSEQFF

SEQ ID NO: 65673 - protein, 11 aa, Homo sapiens
  CDR3 for alpha chain variable domain of TCR clone 32837 (TRAV2, TRAJ33)
CAVESNYQLIW

SEQ ID NO: 65674 - protein, 12 aa, Homo sapiens
  CDR3 for beta chain variable domain of TCR clone 32837 (TRBV12-5, TRBJ2-5)
CASGQGVETQYF

SEQ ID NO: 65675 - protein, 14 aa, Homo sapiens
  CDR3 for alpha chain variable domain of TCR clone 32838 (TRAV3, TRAJ9)
CAVRLNTGGFKTIF

SEQ ID NO: 65676 - protein, 16 aa, Homo sapiens
  CDR3 for beta chain variable domain of TCR clone 32838 (TRBV12-5, TRBJ2-5)
CASGPRTSGSQETQYF

SEQ ID NO: 65677 - protein, 12 aa, Homo sapiens
  CDR3 for alpha chain variable domain of TCR clone 32839 (TRAV8-4, TRAJ43)
CAVSVNNNDMRF

SEQ ID NO: 65678 - protein, 14 aa, Homo sapiens
  CDR3 for beta chain variable domain of TCR clone 32839 (TRBV11-2, TRBJ1-2)
CASSLGTANYGDTF

SEQ ID NO: 65679 - protein, 14 aa, Homo sapiens
  CDR3 for alpha chain variable domain of TCR clone 32840 (TRAV27, TRAJ12)
CAGARMDSSYKLIF

SEQ ID NO: 65680 - protein, 18 aa, Homo sapiens
  CDR3 for beta chain variable domain of TCR clone 32840 (TRBV10-3, TRBJ2-7)
CAISDSGRPSGGRVEQYF

SEQ ID NO: 65681 - protein, 12 aa, Homo sapiens
  CDR3 for alpha chain variable domain of TCR clone 32841 (TRAV12-3, TRAJ17)
CAMTLTGNKLTF

SEQ ID NO: 65682 - protein, 12 aa, Homo sapiens
  CDR3 for beta chain variable domain of TCR clone 32841 (TRBV7-9, TRBJ1-5)
CASSPQGQPQHF

SEQ ID NO: 65683 - protein, 15 aa, Homo sapiens
  CDR3 for alpha chain variable domain of TCR clone 32842 (TRAV26-1, TRAJ15)
CIVRAANQAGTALIF

SEQ ID NO: 65684 - protein, 15 aa, Homo sapiens
  CDR3 for beta chain variable domain of TCR clone 32842 (TRBV20-1, TRBJ1-1)
CSARSAATSNTEAFF

SEQ ID NO: 65685 - protein, 14 aa, Homo sapiens
  CDR3 for alpha chain variable domain of TCR clone 32843 (TRAV1-2, TRAJ16)
CAVNRFPDGQKLLF

SEQ ID NO: 65686 - protein, 20 aa, Homo sapiens
  CDR3 for beta chain variable domain of TCR clone 32843 (TRBV28, TRBJ2-1)
CASTPIGRSPGLAGGNEQFF

SEQ ID NO: 65687 - protein, 23 aa, Homo sapiens
  CDR3 for alpha chain variable domain of TCR clone 32844 (TRAV8-6, TRAJ38)
CAVRNAGNNHIQNPDPAVYQLRD

SEQ ID NO: 65688 - protein, 15 aa, Homo sapiens
  CDR3 for beta chain variable domain of TCR clone 32844 (TRBV4-1, TRBJ2-2)
CASSEGQGITEELFF

SEQ ID NO: 65689 - protein, 15 aa, Homo sapiens
  CDR3 for alpha chain variable domain of TCR clone 32845 (TRAV19, TRAJ9)
CALSEARTGGFKTIF

SEQ ID NO: 65690 - protein, 13 aa, Homo sapiens
  CDR3 for beta chain variable domain of TCR clone 32845 (TRBV7-3, TRBJ1-1)
CASSQDWGAEAFF

SEQ ID NO: 65691 - protein, 14 aa, Homo sapiens
  CDR3 for alpha chain variable domain of TCR clone 32846 (TRAV26-1, TRAJ26)
CIVRATFLCQNFVF

SEQ ID NO: 65692 - protein, 16 aa, Homo sapiens
  CDR3 for beta chain variable domain of TCR clone 32846 (TRBV12-4, TRBJ2-7)
CASRSTGTGPSYEQYF

SEQ ID NO: 65693 - protein, 12 aa, Homo sapiens
  CDR3 for alpha chain variable domain of TCR clone 32847 (TRAV9-2, TRAJ26)
CALRGYGQNFVF

SEQ ID NO: 65694 - protein, 17 aa, Homo sapiens
  CDR3 for beta chain variable domain of TCR clone 32847 (TRBV7-3, TRBJ2-5)
CASSLGSGRSGSETQYF

SEQ ID NO: 65695 - protein, 16 aa, Homo sapiens
  CDR3 for alpha chain variable domain of TCR clone 32848 (TRAV21, TRAJ52)
CAVTNAGGTSYGKLTF

SEQ ID NO: 65696 - protein, 13 aa, Homo sapiens
  CDR3 for beta chain variable domain of TCR clone 32848 (TRBV20-1, TRBJ2-3)
CSARLAGTDTQYL

SEQ ID NO: 65697 - protein, 13 aa, Homo sapiens
  CDR3 for alpha chain variable domain of TCR clone 32849 (TRAV3, TRAJ21)
CAVREPDFNKFYF

SEQ ID NO: 65698 - protein, 14 aa, Homo sapiens
  CDR3 for beta chain variable domain of TCR clone 32849 (TRBV16, TRBJ1-1)
CASSQAGPNTEAFF

SEQ ID NO: 65699 - protein, 17 aa, Homo sapiens
  CDR3 for alpha chain variable domain of TCR clone 32850 (TRAV4, TRAJ42)
CLVGILNYGGSQGNLIF

SEQ ID NO: 65700 - protein, 12 aa, Homo sapiens
  CDR3 for beta chain variable domain of TCR clone 32850 (TRBV20-1, TRBJ2-1)
CSAQYTYNEQFF

SEQ ID NO: 65701 - protein, 15 aa, Homo sapiens
  CDR3 for alpha chain variable domain of TCR clone 32851 (TRAV35, TRAJ58)
CAGRRQETSGSRLTF

SEQ ID NO: 65702 - protein, 13 aa, Homo sapiens
  CDR3 for beta chain variable domain of TCR clone 32851 (TRBV7-9, TRBJ1-2)
CASSLKQNYGYTF

SEQ ID NO: 65703 - protein, 16 aa, Homo sapiens
  CDR3 for alpha chain variable domain of TCR clone 32852 (TRAV19, TRAJ20)
CALSGWRVPNDYKLSF

SEQ ID NO: 65704 - protein, 16 aa, Homo sapiens
  CDR3 for beta chain variable domain of TCR clone 32852 (TRBV7-9, TRBJ1-2)
CASSLGFSSGEDGYTF

SEQ ID NO: 65705 - protein, 16 aa, Homo sapiens
  CDR3 for alpha chain variable domain of TCR clone 32853 (TRAV3, TRAJ21)
CAVRDIERGNFNKFYF

SEQ ID NO: 65706 - protein, 14 aa, Homo sapiens
  CDR3 for beta chain variable domain of TCR clone 32853 (TRBV12-4, TRBJ1-1)
CASSLGTGGTEAFF

SEQ ID NO: 65707 - protein, 12 aa, Homo sapiens
  CDR3 for alpha chain variable domain of TCR clone 32854 (TRAV13-2, TRAJ8)
CAHWLGFQKLVF

SEQ ID NO: 65708 - protein, 13 aa, Homo sapiens
  CDR3 for beta chain variable domain of TCR clone 32854 (TRBV12-4, TRBJ1-5)
RASSPDRAQPQHF

SEQ ID NO: 65709 - protein, 14 aa, Homo sapiens
  CDR3 for alpha chain variable domain of TCR clone 32855 (TRAV12-2, TRAJ44)
CAVNPAGTTSKLTF

SEQ ID NO: 65710 - protein, 13 aa, Homo sapiens
  CDR3 for beta chain variable domain of TCR clone 32855 (TRBV20-1, TRBJ1-6)
CSAPLGVGSPLHF

SEQ ID NO: 65711 - protein, 13 aa, Homo sapiens
  CDR3 for alpha chain variable domain of TCR clone 32856 (TRAV26-1, TRAJ34)
CIVRPWITDKLIS

SEQ ID NO: 65712 - protein, 14 aa, Homo sapiens
  CDR3 for beta chain variable domain of TCR clone 32856 (TRBV7-2, TRBJ2-7)
CASRSQGAAYEQYF

SEQ ID NO: 65713 - protein, 12 aa, Homo sapiens
  CDR3 for alpha chain variable domain of TCR clone 32857 (TRAV8-3, TRAJ26)
CACDNYGQNFVF

SEQ ID NO: 65714 - protein, 15 aa, Homo sapiens
  CDR3 for beta chain variable domain of TCR clone 32857 (TRBV9, TRBJ2-1)
CASSLAGSSYNEQFF

SEQ ID NO: 65715 - protein, 17 aa, Homo sapiens
  CDR3 for alpha chain variable domain of TCR clone 32858 (TRAV3, TRAJ42)
CAVRDRDYGGSQGNLIF

SEQ ID NO: 65716 - protein, 14 aa, Homo sapiens
  CDR3 for beta chain variable domain of TCR clone 32858 (TRBV7-2, TRBJ1-1)
CASSFLTGTTEAFF

SEQ ID NO: 65717 - protein, 13 aa, Homo sapiens
  CDR3 for alpha chain variable domain of TCR clone 32859 (TRAV8-3, TRAJ21)
CAVGAYNFNNFYF

SEQ ID NO: 65718 - protein, 16 aa, Homo sapiens
  CDR3 for beta chain variable domain of TCR clone 32859 (TRBV19, TRBJ2-1)
CASSMGGGSSYNEQFF

SEQ ID NO: 65719 - protein, 15 aa, Homo sapiens
  CDR3 for alpha chain variable domain of TCR clone 32860 (TRAV26-1, TRAJ29)
CIVRVEGSGNTPLVF

SEQ ID NO: 65720 - protein, 13 aa, Homo sapiens
  CDR3 for beta chain variable domain of TCR clone 32860 (TRBV20-1, TRBJ1-1)
CSARGGGNTEAFF

SEQ ID NO: 65721 - protein, 18 aa, Homo sapiens
  CDR3 for alpha chain variable domain of TCR clone 32861 (TRAV26-1, TRAJ23)
CIVRVGLEVWKQGGKLIF

SEQ ID NO: 65722 - protein, 16 aa, Homo sapiens
  CDR3 for beta chain variable domain of TCR clone 32861 (TRBV12-4, TRBJ2-5)
CASSFFVRGRQETQYF

SEQ ID NO: 65723 - protein, 12 aa, Homo sapiens
  CDR3 for alpha chain variable domain of TCR clone 32862 (TRAV3, TRAJ20)
CAVRDPDYKLSF

SEQ ID NO: 65724 - protein, 15 aa, Homo sapiens
  CDR3 for beta chain variable domain of TCR clone 32862 (TRBV7-9, TRBJ1-5)
CASSQGHQPNQPQHF

SEQ ID NO: 65725 - protein, 14 aa, Homo sapiens
  CDR3 for alpha chain variable domain of TCR clone 32863 (TRAV27, TRAJ15)
CAGFDNQAGTALTF

SEQ ID NO: 65726 - protein, 11 aa, Homo sapiens
  CDR3 for beta chain variable domain of TCR clone 32863 (TRBV29-1, TRBJ1-1)
CSVEVGTRTFF

SEQ ID NO: 65727 - protein, 14 aa, Homo sapiens
  CDR3 for alpha chain variable domain of TCR clone 32864 (TRAV1-2, TRAJ8)
CAVREDTGFQKPVF

SEQ ID NO: 65728 - protein, 13 aa, Homo sapiens
  CDR3 for beta chain variable domain of TCR clone 32864 (TRBV12-5, TRBJ2-3)
CASGDRQPDTQYF

SEQ ID NO: 65729 - protein, 17 aa, Homo sapiens
  CDR3 for alpha chain variable domain of TCR clone 32865 (TRAV26-2, TRAJ37)
CILRELVGSSNTGKLIF

SEQ ID NO: 65730 - protein, 13 aa, Homo sapiens
  CDR3 for beta chain variable domain of TCR clone 32865 (TRBV12-4, TRBJ1-2)
CASSLRQGKGYTF

SEQ ID NO: 65731 - protein, 14 aa, Homo sapiens
  CDR3 for alpha chain variable domain of TCR clone 32866 (TRAV35, TRAJ40)
CAGHPISGTYKYIF

SEQ ID NO: 65732 - protein, 16 aa, Homo sapiens
  CDR3 for beta chain variable domain of TCR clone 32866 (TRBV7-9, TRBJ2-6)
CASSLKGPLRANVLTF

SEQ ID NO: 65733 - protein, 14 aa, Homo sapiens
  CDR3 for alpha chain variable domain of TCR clone 32867 (TRAV2, TRAJ37)
CAVDFTSNTGKLIF

SEQ ID NO: 65734 - protein, 15 aa, Homo sapiens
  CDR3 for beta chain variable domain of TCR clone 32867 (TRBV28, TRBJ1-3)
CASSMGWASGNTIYF

SEQ ID NO: 65735 - protein, 11 aa, Homo sapiens
  CDR3 for alpha chain variable domain of TCR clone 32868 (TRAV16, TRAJ33)
CALHSNYQLIW

SEQ ID NO: 65736 - protein, 15 aa, Homo sapiens
  CDR3 for beta chain variable domain of TCR clone 32868 (TRBV4-1, TRBJ2-7)
CASSQQGQGFGEQYF

SEQ ID NO: 65737 - protein, 18 aa, Homo sapiens
  CDR3 for alpha chain variable domain of TCR clone 32869 (TRAV21, TRAJ52)
CAVRPSPAGGTSYGKLTF

SEQ ID NO: 65738 - protein, 17 aa, Homo sapiens
  CDR3 for beta chain variable domain of TCR clone 32869 (TRBV13, TRBJ2-3)
CASSLSWVAGGRNTQYF

SEQ ID NO: 65739 - protein, 13 aa, Homo sapiens
  CDR3 for alpha chain variable domain of TCR clone 32870 (TRAV27, TRAJ49)
CAPRPHTGNQFYF

SEQ ID NO: 65740 - protein, 18 aa, Homo sapiens
  CDR3 for beta chain variable domain of TCR clone 32870 (TRBV7-3, TRBJ2-5)
CASSLGGAAQGRWETQYF

SEQ ID NO: 65741 - protein, 12 aa, Homo sapiens
  CDR3 for alpha chain variable domain of TCR clone 32871 (TRAV38-1, TRAJ47)
CAFETYGDKLVF

SEQ ID NO: 65742 - protein, 15 aa, Homo sapiens
  CDR3 for beta chain variable domain of TCR clone 32871 (TRBV5-7, TRBJ2-7)
CASSGGRPVPYEQYF

SEQ ID NO: 65743 - protein, 14 aa, Homo sapiens
  CDR3 for alpha chain variable domain of TCR clone 32872 (TRAV2, TRAJ37)
CAVDFTSNTGKLIF

SEQ ID NO: 65744 - protein, 15 aa, Homo sapiens
  CDR3 for beta chain variable domain of TCR clone 32872 (TRBV20-1, TRBJ1-1)
CSASRGVTGNTEAFY

SEQ ID NO: 65745 - protein, 11 aa, Homo sapiens
  CDR3 for alpha chain variable domain of TCR clone 32873 (TRAV12-2, TRAJ31)
CAVTRWARLMF

SEQ ID NO: 65746 - protein, 15 aa, Homo sapiens
  CDR3 for beta chain variable domain of TCR clone 32873 (TRBV19, TRBJ2-7)
CASSIGGGLVNEQYF

SEQ ID NO: 65747 - protein, 12 aa, Homo sapiens
  CDR3 for alpha chain variable domain of TCR clone 32874 (TRAV12-1, TRAJ40)
CVFYSGTYKYIF

SEQ ID NO: 65748 - protein, 18 aa, Homo sapiens
  CDR3 for beta chain variable domain of TCR clone 32874 (TRBV12-4, TRBJ2-2)
CASSLVEGTRGRTGELFF

SEQ ID NO: 65749 - protein, 13 aa, Homo sapiens
  CDR3 for alpha chain variable domain of TCR clone 32875 (TRAV1-2, TRAJ9)
CAVLNTGGFKTIF

SEQ ID NO: 65750 - protein, 14 aa, Homo sapiens
  CDR3 for beta chain variable domain of TCR clone 32875 (TRBV20-1, TRBJ2-3)
CSARGGTSTDKQYF

SEQ ID NO: 65751 - protein, 14 aa, Homo sapiens
  CDR3 for alpha chain variable domain of TCR clone 32876 (TRAV13-1, TRAJ9)
CAASALTGGFNTIF

SEQ ID NO: 65752 - protein, 13 aa, Homo sapiens
  CDR3 for beta chain variable domain of TCR clone 32876 (TRBV20-1, TRBJ1-1)
CSAGTVGNTEAFF

SEQ ID NO: 65753 - protein, 12 aa, Homo sapiens
  CDR3 for alpha chain variable domain of TCR clone 32877 (TRAV21, TRAJ31)
CAVWGNNDRLMF

SEQ ID NO: 65754 - protein, 16 aa, Homo sapiens
  CDR3 for beta chain variable domain of TCR clone 32877 (TRBV27, TRBJ2-5)
CASSYGPGGQKETQYF

SEQ ID NO: 65755 - protein, 13 aa, Homo sapiens
  CDR3 for alpha chain variable domain of TCR clone 32878 (TRAV27, TRAJ6)
CAGGTRGSYIPTF

SEQ ID NO: 65756 - protein, 15 aa, Homo sapiens
  CDR3 for beta chain variable domain of TCR clone 32878 (TRBV7-9, TRBJ1-6)
CASSSPGRGNSPLHF

SEQ ID NO: 65757 - protein, 13 aa, Homo sapiens
  CDR3 for alpha chain variable domain of TCR clone 32879 (TRAV8-2, TRAJ21)
CVVSQYNFNKFYF

SEQ ID NO: 65758 - protein, 16 aa, Homo sapiens
  CDR3 for beta chain variable domain of TCR clone 32879 (TRBV7-2, TRBJ2-7)
CASSLAGLAGTYEQYF

SEQ ID NO: 65759 - protein, 14 aa, Homo sapiens
  CDR3 for alpha chain variable domain of TCR clone 32880 (TRAV27, TRAJ37)
CAGERSSNTGKLIL

SEQ ID NO: 65760 - protein, 15 aa, Homo sapiens
  CDR3 for beta chain variable domain of TCR clone 32880 (TRBV11-3, TRBJ1-6)
CASSLDWGANSPLHF

SEQ ID NO: 65761 - protein, 14 aa, Homo sapiens
  CDR3 for alpha chain variable domain of TCR clone 32881 (TRAV12-1, TRAJ17)
CVVNYKAAGNKLTF

SEQ ID NO: 65762 - protein, 17 aa, Homo sapiens
  CDR3 for beta chain variable domain of TCR clone 32881 (TRBV20-1, TRBJ2-1)
SSASSSGLAGSYNEQFF

SEQ ID NO: 65763 - protein, 13 aa, Homo sapiens
  CDR3 for alpha chain variable domain of TCR clone 32882 (TRAV1-1, TRAJ31)
CASYLNNDARLMF

SEQ ID NO: 65764 - protein, 13 aa, Homo sapiens
  CDR3 for beta chain variable domain of TCR clone 32882 (TRBV15, TRBJ1-6)
CATSGGLNSPLHF

SEQ ID NO: 65765 - protein, 14 aa, Homo sapiens
  CDR3 for alpha chain variable domain of TCR clone 32883 (TRAV17, TRAJ57)
CATDPQGGSEKLVF

SEQ ID NO: 65766 - protein, 14 aa, Homo sapiens
  CDR3 for beta chain variable domain of TCR clone 32883 (TRBV7-8, TRBJ2-7)
CASSPRNRVYEQYF

SEQ ID NO: 65767 - protein, 13 aa, Homo sapiens
  CDR3 for alpha chain variable domain of TCR clone 32884 (TRAV3, TRAJ3)
CAVRALGASKIIF

SEQ ID NO: 65768 - protein, 16 aa, Homo sapiens
  CDR3 for beta chain variable domain of TCR clone 32884 (TRBV12-4, TRBJ2-5)
CTSVPAVLRGGETQYF

SEQ ID NO: 65769 - protein, 15 aa, Homo sapiens
  CDR3 for alpha chain variable domain of TCR clone 32885 (TRAV3, TRAJ17)
CAVRDTGAAGNKLTF

SEQ ID NO: 65770 - protein, 14 aa, Homo sapiens
  CDR3 for beta chain variable domain of TCR clone 32885 (TRBV6-3, TRBJ1-1)
CASSNLLPVAEAFF

SEQ ID NO: 65771 - protein, 14 aa, Homo sapiens
  CDR3 for alpha chain variable domain of TCR clone 32886 (TRAV38-1, TRAJ45)
CAYYSGGGADGVTF

SEQ ID NO: 65772 - protein, 20 aa, Homo sapiens
  CDR3 for beta chain variable domain of TCR clone 32886 (TRBV28, TRBJ2-1)
CASTPIGRSPGLAGGNEQFF

SEQ ID NO: 65773 - protein, 12 aa, Homo sapiens
  CDR3 for alpha chain variable domain of TCR clone 32887 (TRAV13-2, TRAJ8)
CAPWLGFQKLVF

SEQ ID NO: 65774 - protein, 17 aa, Homo sapiens
  CDR3 for beta chain variable domain of TCR clone 32887 (TRBV20-1, TRBJ2-1)
CSASSSGLAGSYNEQFF

SEQ ID NO: 65775 - protein, 13 aa, Homo sapiens
  CDR3 for alpha chain variable domain of TCR clone 32888 (TRAV8-6, TRAJ21)
CAVGPSSLNKFYF

SEQ ID NO: 65776 - protein, 14 aa, Homo sapiens
  CDR3 for beta chain variable domain of TCR clone 32888 (TRBV7-9, TRBJ2-5)
CASSLDTAQETQYF

SEQ ID NO: 65777 - protein, 14 aa, Homo sapiens
  CDR3 for alpha chain variable domain of TCR clone 32889 (TRAV13-1, TRAJ28)
CAASKGAGSYQLTF

SEQ ID NO: 65778 - protein, 19 aa, Homo sapiens
  CDR3 for beta chain variable domain of TCR clone 32889 (TRBV28, TRBJ2-4)
CASSFQPGGPAHSKNIQYF

SEQ ID NO: 65779 - protein, 14 aa, Homo sapiens
  CDR3 for alpha chain variable domain of TCR clone 32890 (TRAV12-2, TRAJ13)
RAVKKTGGYQKVTF

SEQ ID NO: 65780 - protein, 14 aa, Homo sapiens
  CDR3 for beta chain variable domain of TCR clone 32890 (TRBV5-5, TRBJ2-7)
CASSLGQGTYEQYF

SEQ ID NO: 65781 - protein, 14 aa, Homo sapiens
  CDR3 for alpha chain variable domain of TCR clone 32891 (TRAV20, TRAJ42)
CAVQAGGSQGNLIF

SEQ ID NO: 65782 - protein, 14 aa, Homo sapiens
  CDR3 for beta chain variable domain of TCR clone 32891 (TRBV28, TRBJ1-2)
RASRIQGANYGYTF

SEQ ID NO: 65783 - protein, 12 aa, Homo sapiens
  CDR3 for alpha chain variable domain of TCR clone 32892 (TRAV12-3, TRAJ40)
CAMTSGTYKYIF

SEQ ID NO: 65784 - protein, 15 aa, Homo sapiens
  CDR3 for beta chain variable domain of TCR clone 32892 (TRBV7-3, TRBJ2-2)
CASRLTGQGTGELFF

SEQ ID NO: 65785 - protein, 12 aa, Homo sapiens
  CDR3 for alpha chain variable domain of TCR clone 32893 (TRAV27, TRAJ36)
ASTPAGANNLFF

SEQ ID NO: 65786 - protein, 13 aa, Homo sapiens
  CDR3 for beta chain variable domain of TCR clone 32893 (TRBV7-9, TRBJ2-3)
CASSPGSTGTQYF

SEQ ID NO: 65787 - protein, 14 aa, Homo sapiens
  CDR3 for alpha chain variable domain of TCR clone 32894 (TRAV8-2, TRAJ4)
CVVSPSGGYNKLIF

SEQ ID NO: 65788 - protein, 13 aa, Homo sapiens
  CDR3 for beta chain variable domain of TCR clone 32894 (TRBV14, TRBJ2-7)
CASSQDRRYEQYF

SEQ ID NO: 65789 - protein, 10 aa, Homo sapiens
  CDR3 for alpha chain variable domain of TCR clone 32895 (TRAV21, TRAJ43)
CAVRIGDMRF

SEQ ID NO: 65790 - protein, 13 aa, Homo sapiens
  CDR3 for beta chain variable domain of TCR clone 32895 (TRBV20-1, TRBJ2-7)
CSAPGLADYERYF

SEQ ID NO: 65791 - protein, 16 aa, Homo sapiens
  CDR3 for alpha chain variable domain of TCR clone 32896 (TRAV20, TRAJ22)
CAVQASSSGSARQLTF

SEQ ID NO: 65792 - protein, 13 aa, Homo sapiens
  CDR3 for beta chain variable domain of TCR clone 32896 (TRBV7-2, TRBJ2-5)
CASRQTSVETQYF

SEQ ID NO: 65793 - protein, 12 aa, Homo sapiens
  CDR3 for alpha chain variable domain of TCR clone 32897 (TRAV8-4, TRAJ43)
CAGSVNNNDMRF

SEQ ID NO: 65794 - protein, 14 aa, Homo sapiens
  CDR3 for beta chain variable domain of TCR clone 32897 (TRBV11-2, TRBJ1-2)
CASSLGTANYGYTF

SEQ ID NO: 65795 - protein, 13 aa, Homo sapiens
  CDR3 for alpha chain variable domain of TCR clone 32898 (TRAV1-1, TRAJ9)
CAAKNTGGFKTIF

SEQ ID NO: 65796 - protein, 14 aa, Homo sapiens
  CDR3 for beta chain variable domain of TCR clone 32898 (TRBV20-1, TRBJ2-1)
CSAQIGGSANEQFF

SEQ ID NO: 65797 - protein, 17 aa, Homo sapiens
  CDR3 for alpha chain variable domain of TCR clone 32899 (TRAV26-1, TRAJ46)
IASPESEKKSSGDKLTF

SEQ ID NO: 65798 - protein, 16 aa, Homo sapiens
  CDR3 for beta chain variable domain of TCR clone 32899 (TRBV27, TRBJ2-2)
CASSFRGLVRTGELFF

SEQ ID NO: 65799 - protein, 12 aa, Homo sapiens
  CDR3 for alpha chain variable domain of TCR clone 32900 (TRAV12-1, TRAJ40)
CVFYSGTYKYIF

SEQ ID NO: 65800 - protein, 18 aa, Homo sapiens
  CDR3 for beta chain variable domain of TCR clone 32900 (TRBV12-4, TRBJ2-2)
CASSLVAGTRGRNGELFF

SEQ ID NO: 65801 - protein, 12 aa, Homo sapiens
  CDR3 for alpha chain variable domain of TCR clone 32901 (TRAV16, TRAJ26)
FALRSYGQNFVF

SEQ ID NO: 65802 - protein, 14 aa, Homo sapiens
  CDR3 for beta chain variable domain of TCR clone 32901 (TRBV10-3, TRBJ2-1)
CAISSDLAYNEQFS

SEQ ID NO: 65803 - protein, 15 aa, Homo sapiens
  CDR3 for alpha chain variable domain of TCR clone 32902 (TRAV38-1, TRAJ37)
CAFIFGSGNTGKLIF

SEQ ID NO: 65804 - protein, 12 aa, Homo sapiens
  CDR3 for beta chain variable domain of TCR clone 32902 (TRBV7-9, TRBJ2-7)
RASSLEGYEQYF

SEQ ID NO: 65805 - protein, 15 aa, Homo sapiens
  CDR3 for alpha chain variable domain of TCR clone 32903 (TRAV17, TRAJ57)
CATGPSQGGSEKLVF

SEQ ID NO: 65806 - protein, 14 aa, Homo sapiens
  CDR3 for beta chain variable domain of TCR clone 32903 (TRBV12-5, TRBJ2-5)
CASGSRKHQETQYF

SEQ ID NO: 65807 - protein, 16 aa, Homo sapiens
  CDR3 for alpha chain variable domain of TCR clone 32904 (TRAV3, TRAJ32)
CAVRENYGGATNKLIF

SEQ ID NO: 65808 - protein, 12 aa, Homo sapiens
  CDR3 for beta chain variable domain of TCR clone 32904 (TRBV20-1, TRBJ1-2)
CSVTPEGYDYTF

SEQ ID NO: 65809 - protein, 14 aa, Homo sapiens
  CDR3 for alpha chain variable domain of TCR clone 32905 (TRAV38-1, TRAJ29)
CAFITPSGSTPLVF

SEQ ID NO: 65810 - protein, 14 aa, Homo sapiens
  CDR3 for beta chain variable domain of TCR clone 32905 (TRBV18, TRBJ2-7)
CASSPRGGAYEQYF

SEQ ID NO: 65811 - protein, 14 aa, Homo sapiens
  CDR3 for alpha chain variable domain of TCR clone 32906 (TRAV1-2, TRAJ8)
CAVREDTGFQKLVF

SEQ ID NO: 65812 - protein, 17 aa, Homo sapiens
  CDR3 for beta chain variable domain of TCR clone 32906 (TRBV10-3, TRBJ2-6)
CAISESTAPSGANVLTF

SEQ ID NO: 65813 - protein, 18 aa, Homo sapiens
  CDR3 for alpha chain variable domain of TCR clone 32907 (TRAV26-1, TRAJ23)
CIVRVGLEVWNQGGKFIF

SEQ ID NO: 65814 - protein, 16 aa, Homo sapiens
  CDR3 for beta chain variable domain of TCR clone 32907 (TRBV12-4, TRBJ2-5)
CASSFFVRGRQETQYF

SEQ ID NO: 65815 - protein, 16 aa, Homo sapiens
  CDR3 for alpha chain variable domain of TCR clone 32908 (TRAV3, TRAJ21)
CAVRDIEIGNFNKFYF

SEQ ID NO: 65816 - protein, 13 aa, Homo sapiens
  CDR3 for beta chain variable domain of TCR clone 32908 (TRBV27, TRBJ2-7)
CASSLTTGYEQYF

SEQ ID NO: 65817 - protein, 11 aa, Homo sapiens
  CDR3 for alpha chain variable domain of TCR clone 32909 (TRAV2, TRAJ33)
CAVDSNYQLIW

SEQ ID NO: 65818 - protein, 15 aa, Homo sapiens
  CDR3 for beta chain variable domain of TCR clone 32909 (TRBV19, TRBJ1-2)
CASSVGQVLNYVYTF

SEQ ID NO: 65819 - protein, 12 aa, Homo sapiens
  CDR3 for alpha chain variable domain of TCR clone 32910 (TRAV1-1, TRAJ9)
CAVDTGGFKTVF

SEQ ID NO: 65820 - protein, 14 aa, Homo sapiens
  CDR3 for beta chain variable domain of TCR clone 32910 (TRBV7-8, TRBJ2-5)
CASSATGGQETQYF

SEQ ID NO: 65821 - protein, 14 aa, Homo sapiens
  CDR3 for alpha chain variable domain of TCR clone 32911 (TRAV1-2, TRAJ16)
CAVNRFSDGQKLLF

SEQ ID NO: 65822 - protein, 14 aa, Homo sapiens
  CDR3 for beta chain variable domain of TCR clone 32911 (TRBV7-3, TRBJ1-1)
CASSLGTGYTEAFS

SEQ ID NO: 65823 - protein, 13 aa, Homo sapiens
  CDR3 for alpha chain variable domain of TCR clone 32912 (TRAV13-1, TRAJ39)
CAASIWAGNMLTF

SEQ ID NO: 65824 - protein, 15 aa, Homo sapiens
  CDR3 for beta chain variable domain of TCR clone 32912 (TRBV7-9, TRBJ1-1)
CASSLLEQGGNEAFF

SEQ ID NO: 65825 - protein, 12 aa, Homo sapiens
  CDR3 for alpha chain variable domain of TCR clone 32913 (TRAV3, TRAJ20)
CAVRDPDYKLSS

SEQ ID NO: 65826 - protein, 13 aa, Homo sapiens
  CDR3 for beta chain variable domain of TCR clone 32913 (TRBV9, TRBJ2-1)
CASSVGQGGEQFF

SEQ ID NO: 65827 - protein, 18 aa, Homo sapiens
  CDR3 for alpha chain variable domain of TCR clone 32914 (TRAV21, TRAJ52)
CAVRPSPAGGTSYGKLTF

SEQ ID NO: 65828 - protein, 15 aa, Homo sapiens
  CDR3 for beta chain variable domain of TCR clone 32914 (TRBV7-2, TRBJ2-1)
CASTHGTGIYNEQFF

SEQ ID NO: 65829 - protein, 13 aa, Homo sapiens
  CDR3 for alpha chain variable domain of TCR clone 32915 (TRAV21, TRAJ57)
CAVTQGGSEKLVF

SEQ ID NO: 65830 - protein, 16 aa, Homo sapiens
  CDR3 for beta chain variable domain of TCR clone 32915 (TRBV7-3, TRBJ2-2)
CASSLKRGTLSGELFF

SEQ ID NO: 65831 - protein, 13 aa, Homo sapiens
  CDR3 for alpha chain variable domain of TCR clone 32916 (TRAV2, TRAJ40)
CAVVTLGTYKYIF

SEQ ID NO: 65832 - protein, 12 aa, Homo sapiens
  CDR3 for beta chain variable domain of TCR clone 32916 (TRBV14, TRBJ2-7)
CASSRLKGEQYF

SEQ ID NO: 65833 - protein, 16 aa, Homo sapiens
  CDR3 for alpha chain variable domain of TCR clone 32917 (TRAV30, TRAJ24)
CGTEIVDADSWGKFKF

SEQ ID NO: 65834 - protein, 13 aa, Homo sapiens
  CDR3 for beta chain variable domain of TCR clone 32917 (TRBV7-2, TRBJ1-4)
CASSLAGLEKLFF

SEQ ID NO: 65835 - protein, 13 aa, Homo sapiens
  CDR3 for alpha chain variable domain of TCR clone 32918 (TRAV12-3, TRAJ33)
CAMSVNSSYQLIW

SEQ ID NO: 65836 - protein, 13 aa, Homo sapiens
  CDR3 for beta chain variable domain of TCR clone 32918 (TRBV7-2, TRBJ2-2)
CASSLAVTGELFF

SEQ ID NO: 65837 - protein, 15 aa, Homo sapiens
  CDR3 for alpha chain variable domain of TCR clone 32919 (TRAV16, TRAJ4)
CALEDPSGGYNKLIF

SEQ ID NO: 65838 - protein, 15 aa, Homo sapiens
  CDR3 for beta chain variable domain of TCR clone 32919 (TRBV19, TRBJ1-2)
CASSVGQVLNYGYTF

SEQ ID NO: 65839 - protein, 12 aa, Homo sapiens
  CDR3 for alpha chain variable domain of TCR clone 32920 (TRAV13-1, TRAJ48)
CAANFGNEKLTF

SEQ ID NO: 65840 - protein, 12 aa, Homo sapiens
  CDR3 for beta chain variable domain of TCR clone 32920 (TRBV7-8, TRBJ2-7)
CASSPGDREQYF

SEQ ID NO: 65841 - protein, 11 aa, Homo sapiens
  CDR3 for alpha chain variable domain of TCR clone 32921 (TRAV1-1, TRAJ23)
CAVRQGGKLIF

SEQ ID NO: 65842 - protein, 14 aa, Homo sapiens
  CDR3 for beta chain variable domain of TCR clone 32921 (TRBV7-3, TRBJ2-1)
CASSLAGGTNEQFF

SEQ ID NO: 65843 - protein, 14 aa, Homo sapiens
  CDR3 for alpha chain variable domain of TCR clone 32922 (TRAV8-4, TRAJ13)
CAVSESGGYQKVTF

SEQ ID NO: 65844 - protein, 15 aa, Homo sapiens
  CDR3 for beta chain variable domain of TCR clone 32922 (TRBV11-3, TRBJ2-1)
CASSRVADSYNEQFF

SEQ ID NO: 65845 - protein, 13 aa, Homo sapiens
  CDR3 for alpha chain variable domain of TCR clone 32923 (TRAV27, TRAJ49)
CAPRPYTGNQIYF

SEQ ID NO: 65846 - protein, 16 aa, Homo sapiens
  CDR3 for beta chain variable domain of TCR clone 32923 (TRBV4-1, TRBJ1-2)
CASSQDAGQVLYGYTF

SEQ ID NO: 65847 - protein, 12 aa, Homo sapiens
  CDR3 for alpha chain variable domain of TCR clone 32924 (TRAV12-3, TRAJ17)
CAMTLTGNKLTF

SEQ ID NO: 65848 - protein, 12 aa, Homo sapiens
  CDR3 for beta chain variable domain of TCR clone 32924 (TRBV12-4, TRBJ2-3)
CASSSTTDTQYF

SEQ ID NO: 65849 - protein, 14 aa, Homo sapiens
  CDR3 for alpha chain variable domain of TCR clone 32925 (TRAV1-2, TRAJ16)
CAVNRFSDGQKLLF

SEQ ID NO: 65850 - protein, 14 aa, Homo sapiens
  CDR3 for beta chain variable domain of TCR clone 32925 (TRBV19, TRBJ2-1)
CGSPTFVLSGEQFF

SEQ ID NO: 65851 - protein, 14 aa, Homo sapiens
  CDR3 for alpha chain variable domain of TCR clone 32926 (TRAV8-3, TRAJ4)
CAVGAAGGYNKLIF

SEQ ID NO: 65852 - protein, 15 aa, Homo sapiens
  CDR3 for beta chain variable domain of TCR clone 32926 (TRBV6-5, TRBJ2-1)
CASSDDAGAGNEQFF

SEQ ID NO: 65853 - protein, 13 aa, Homo sapiens
  CDR3 for alpha chain variable domain of TCR clone 32927 (TRAV12-3, TRAJ9)
CAMRNTGGFKTIF

SEQ ID NO: 65854 - protein, 14 aa, Homo sapiens
  CDR3 for beta chain variable domain of TCR clone 32927 (TRBV11-2, TRBJ2-7)
CASRSTGEGYEQYF

SEQ ID NO: 65855 - protein, 13 aa, Homo sapiens
  CDR3 for alpha chain variable domain of TCR clone 32928 (TRAV12-1, TRAJ6)
CVVFPGGSYIPTF

SEQ ID NO: 65856 - protein, 14 aa, Homo sapiens
  CDR3 for beta chain variable domain of TCR clone 32928 (TRBV7-2, TRBJ2-7)
CASSPKTSFYEQYF

SEQ ID NO: 65857 - protein, 14 aa, Homo sapiens
  CDR3 for alpha chain variable domain of TCR clone 32929 (TRAV12-2, TRAJ17)
CAVLFKAAGNKLTF

SEQ ID NO: 65858 - protein, 14 aa, Homo sapiens
  CDR3 for beta chain variable domain of TCR clone 32929 (TRBV15, TRBJ1-2)
CATSRDVDRVGYTF

SEQ ID NO: 65859 - protein, 13 aa, Homo sapiens
  CDR3 for alpha chain variable domain of TCR clone 32930 (TRAV12-2, TRAJ20)
CAVYPSNDDKLSF

SEQ ID NO: 65860 - protein, 15 aa, Homo sapiens
  CDR3 for beta chain variable domain of TCR clone 32930 (TRBV27, TRBJ2-5)
CASSLYPRGGETQYF

SEQ ID NO: 65861 - protein, 14 aa, Homo sapiens
  CDR3 for alpha chain variable domain of TCR clone 32931 (TRAV30, TRAJ33)
CGTERRFSNYQLIW

SEQ ID NO: 65862 - protein, 16 aa, Homo sapiens
  CDR3 for beta chain variable domain of TCR clone 32931 (TRBV7-3, TRBJ2-2)
CASSLKRGTLSWELFF

SEQ ID NO: 65863 - protein, 16 aa, Homo sapiens
  CDR3 for alpha chain variable domain of TCR clone 32932 (TRAV21, TRAJ37)
CAVRIAGSSNTGKLIF

SEQ ID NO: 65864 - protein, 13 aa, Homo sapiens
  CDR3 for beta chain variable domain of TCR clone 32932 (TRBV7-9, TRBJ2-5)
CASLPSGRETQYF

SEQ ID NO: 65865 - protein, 16 aa, Homo sapiens
  CDR3 for alpha chain variable domain of TCR clone 32933 (TRAV3, TRAJ37)
FAVRVRGSGNTGKLIF

SEQ ID NO: 65866 - protein, 11 aa, Homo sapiens
  CDR3 for beta chain variable domain of TCR clone 32933 (TRBV11-2, TRBJ2-2)
CASSLPGELFF

SEQ ID NO: 65867 - protein, 14 aa, Homo sapiens
  CDR3 for alpha chain variable domain of TCR clone 32934 (TRAV13-1, TRAJ44)
CAAKATGTVSKLTF

SEQ ID NO: 65868 - protein, 14 aa, Homo sapiens
  CDR3 for beta chain variable domain of TCR clone 32934 (TRBV19, TRBJ2-2)
CASSTLHRSGELFF

SEQ ID NO: 65869 - protein, 11 aa, Homo sapiens
  CDR3 for alpha chain variable domain of TCR clone 32935 (TRAV21, TRAJ23)
CAPQRRGRLIF

SEQ ID NO: 65870 - protein, 14 aa, Homo sapiens
  CDR3 for beta chain variable domain of TCR clone 32935 (TRBV12-4, TRBJ1-1)
CASTWTGHDTEAFF

SEQ ID NO: 65871 - protein, 11 aa, Homo sapiens
  CDR3 for alpha chain variable domain of TCR clone 32936 (TRAV38-2/DV8, TRAJ23)
CALSRKLIFGQ

SEQ ID NO: 65872 - protein, 17 aa, Homo sapiens
  CDR3 for beta chain variable domain of TCR clone 32936 (TRBV5-4, TRBJ2-1)
CASSSAGGRGPYNEQFF

SEQ ID NO: 65873 - protein, 14 aa, Homo sapiens
  CDR3 for alpha chain variable domain of TCR clone 32937 (TRAV2, TRAJ9)
CAVEDRSGGFKTIF

SEQ ID NO: 65874 - protein, 12 aa, Homo sapiens
  CDR3 for beta chain variable domain of TCR clone 32937 (TRBV11-2, TRBJ2-2)
CASSLPTGELFF

SEQ ID NO: 65875 - protein, 13 aa, Homo sapiens
  CDR3 for alpha chain variable domain of TCR clone 32938 (TRAV38-2/DV8, TRAJ34)
CAYRNYNTDKLIF

SEQ ID NO: 65876 - protein, 15 aa, Homo sapiens
  CDR3 for beta chain variable domain of TCR clone 32938 (TRBV20-1, TRBJ2-5)
CSAEGTGGRQETQYF

SEQ ID NO: 65877 - protein, 14 aa, Homo sapiens
  CDR3 for alpha chain variable domain of TCR clone 32939 (TRAV8-4, TRAJ16)
CAVSPVGRWPEAAL

SEQ ID NO: 65878 - protein, 13 aa, Homo sapiens
  CDR3 for beta chain variable domain of TCR clone 32939 (TRBV12-4, TRBJ1-2)
CASSLRQGKGYTF

SEQ ID NO: 65879 - protein, 15 aa, Homo sapiens
  CDR3 for alpha chain variable domain of TCR clone 32940 (TRAV3, TRAJ11)
CAVRDRGSGYSTLTF

SEQ ID NO: 65880 - protein, 15 aa, Homo sapiens
  CDR3 for beta chain variable domain of TCR clone 32940 (TRBV19, TRBJ1-1)
CASTSGQIQNTEAFF

SEQ ID NO: 65881 - protein, 16 aa, Homo sapiens
  CDR3 for alpha chain variable domain of TCR clone 32941 (TRAV27, TRAJ53)
CAAPEGSGGSNYKLTF

SEQ ID NO: 65882 - protein, 16 aa, Homo sapiens
  CDR3 for beta chain variable domain of TCR clone 32941 (TRBV7-3, TRBJ2-2)
CASSLKRGTLSGELFF

SEQ ID NO: 65883 - protein, 15 aa, Homo sapiens
  CDR3 for alpha chain variable domain of TCR clone 32942 (TRAV38-1, TRAJ37)
CAFIHVSGNTGKLIF

SEQ ID NO: 65884 - protein, 12 aa, Homo sapiens
  CDR3 for beta chain variable domain of TCR clone 32942 (TRBV7-9, TRBJ2-7)
CASSFGSYEQYF

SEQ ID NO: 65885 - protein, 15 aa, Homo sapiens
  CDR3 for alpha chain variable domain of TCR clone 32943 (TRAV13-1, TRAJ57)
CAASNTQGGSEKLVF

SEQ ID NO: 65886 - protein, 16 aa, Homo sapiens
  CDR3 for beta chain variable domain of TCR clone 32943 (TRBV19, TRBJ2-1)
CASSRAGPSSYNEQFF

SEQ ID NO: 65887 - protein, 13 aa, Homo sapiens
  CDR3 for alpha chain variable domain of TCR clone 32944 (TRAV13-1, TRAJ21)
CAASIYNFNKFYS

SEQ ID NO: 65888 - protein, 13 aa, Homo sapiens
  CDR3 for beta chain variable domain of TCR clone 32944 (TRBV27, TRBJ1-4)
CASSLMGDEKLFF

SEQ ID NO: 65889 - protein, 13 aa, Homo sapiens
  CDR3 for alpha chain variable domain of TCR clone 32945 (TRAV2, TRAJ40)
CAVVTSGTYKYIL

SEQ ID NO: 65890 - protein, 16 aa, Homo sapiens
  CDR3 for beta chain variable domain of TCR clone 32945 (TRBV7-3, TRBJ2-1)
CASSLEGYRSYNEQFF

SEQ ID NO: 65891 - protein, 13 aa, Homo sapiens
  CDR3 for alpha chain variable domain of TCR clone 32946 (TRAV27, TRAJ6)
CAGGTRGSYIPTF

SEQ ID NO: 65892 - protein, 15 aa, Homo sapiens
  CDR3 for beta chain variable domain of TCR clone 32946 (TRBV11-2, TRBJ1-3)
CASSLSPLVRDTVYF

SEQ ID NO: 65893 - protein, 18 aa, Homo sapiens
  CDR3 for alpha chain variable domain of TCR clone 32947 (TRAV26-2, TRAJ45)
CILRVDKYSGGGADGLTF

SEQ ID NO: 65894 - protein, 16 aa, Homo sapiens
  CDR3 for beta chain variable domain of TCR clone 32947 (TRBV2, TRBJ1-4)
CAINLLQGATNEKLFF

SEQ ID NO: 65895 - protein, 14 aa, Homo sapiens
  CDR3 for alpha chain variable domain of TCR clone 32948 (TRAV1-2, TRAJ8)
CAVREDTGFQRLVF

SEQ ID NO: 65896 - protein, 15 aa, Homo sapiens
  CDR3 for beta chain variable domain of TCR clone 32948 (TRBV12-4, TRBJ2-5)
CASSPPTGLQETQYF

SEQ ID NO: 65897 - protein, 14 aa, Homo sapiens
  CDR3 for alpha chain variable domain of TCR clone 32949 (TRAV1-2, TRAJ16)
CAVNRFSDGQKLLF

SEQ ID NO: 65898 - protein, 12 aa, Homo sapiens
  CDR3 for beta chain variable domain of TCR clone 32949 (TRBV5-1, TRBJ2-7)
CASSLDSYEQYF

SEQ ID NO: 65899 - protein, 16 aa, Homo sapiens
  CDR3 for alpha chain variable domain of TCR clone 32950 (TRAV12-2, TRAJ18)
CAVTTDRGSTLGRLYL

SEQ ID NO: 65900 - protein, 14 aa, Homo sapiens
  CDR3 for beta chain variable domain of TCR clone 32950 (TRBV4-2, TRBJ1-5)
CASSQDSINQPQHF

SEQ ID NO: 65901 - protein, 14 aa, Homo sapiens
  CDR3 for alpha chain variable domain of TCR clone 32951 (TRAV12-2, TRAJ48)
CAVNASFGNEKLTF

SEQ ID NO: 65902 - protein, 13 aa, Homo sapiens
  CDR3 for beta chain variable domain of TCR clone 32951 (TRBV28, TRBJ2-7)
CAGAQQGLDEQYF

SEQ ID NO: 65903 - protein, 12 aa, Homo sapiens
  CDR3 for alpha chain variable domain of TCR clone 32952 (TRAV13-1, TRAJ21)
CAAKEGFNKFYF

SEQ ID NO: 65904 - protein, 14 aa, Homo sapiens
  CDR3 for beta chain variable domain of TCR clone 32952 (TRBV27, TRBJ1-1)
CASSLLSGLSEAFF

SEQ ID NO: 65905 - protein, 12 aa, Homo sapiens
  CDR3 for alpha chain variable domain of TCR clone 32953 (TRAV13-1, TRAJ53)
CAAGGSNYRLTF

SEQ ID NO: 65906 - protein, 11 aa, Homo sapiens
  CDR3 for beta chain variable domain of TCR clone 32953 (TRBV2, TRBJ1-1)
CASREGTEAFF

SEQ ID NO: 65907 - protein, 13 aa, Homo sapiens
  CDR3 for alpha chain variable domain of TCR clone 32954 (TRAV13-1, TRAJ39)
CAASIWAGNILTF

SEQ ID NO: 65908 - protein, 15 aa, Homo sapiens
  CDR3 for beta chain variable domain of TCR clone 32954 (TRBV7-9, TRBJ1-1)
CASSLLEQGGTEAFF

SEQ ID NO: 65909 - protein, 11 aa, Homo sapiens
  CDR3 for alpha chain variable domain of TCR clone 32955 (TRAV12-3, TRAJ43)
CAMSVSNDMRF

SEQ ID NO: 65910 - protein, 13 aa, Homo sapiens
  CDR3 for beta chain variable domain of TCR clone 32955 (TRBV10-3, TRBJ2-7)
CASKLAVNYEQYF

SEQ ID NO: 65911 - protein, 14 aa, Homo sapiens
  CDR3 for alpha chain variable domain of TCR clone 32956 (TRAV23/DV6, TRAJ4)
RAANLSGGYNKLIF

SEQ ID NO: 65912 - protein, 11 aa, Homo sapiens
  CDR3 for beta chain variable domain of TCR clone 32956 (TRBV7-9, TRBJ2-3)
CASSPTDTQYF

SEQ ID NO: 65913 - protein, 17 aa, Homo sapiens
  CDR3 for alpha chain variable domain of TCR clone 32957 (TRAV26-2, TRAJ42)
CILRDVWYGGSQGNLIF

SEQ ID NO: 65914 - protein, 16 aa, Homo sapiens
  CDR3 for beta chain variable domain of TCR clone 32957 (TRBV12-4, TRBJ2-7)
CASSLIGGTGTYEQYF

SEQ ID NO: 65915 - protein, 17 aa, Homo sapiens
  CDR3 for alpha chain variable domain of TCR clone 32958 (TRAV36/DV7, TRAJ52)
CAVAQRAGGTSYGKLTF

SEQ ID NO: 65916 - protein, 12 aa, Homo sapiens
  CDR3 for beta chain variable domain of TCR clone 32958 (TRBV7-8, TRBJ2-7)
CASSLGDREQYF

SEQ ID NO: 65917 - protein, 13 aa, Homo sapiens
  CDR3 for alpha chain variable domain of TCR clone 32959 (TRAV13-2, TRAJ40)
CAEFTSGTYKYTF

SEQ ID NO: 65918 - protein, 14 aa, Homo sapiens
  CDR3 for beta chain variable domain of TCR clone 32959 (TRBV10-2, TRBJ1-5)
CASSSTGRNQPQHF

SEQ ID NO: 65919 - protein, 14 aa, Homo sapiens
  CDR3 for alpha chain variable domain of TCR clone 32960 (TRAV12-2, TRAJ13)
CAVKKTGGYQKVTF

SEQ ID NO: 65920 - protein, 16 aa, Homo sapiens
  CDR3 for beta chain variable domain of TCR clone 32960 (TRBV2, TRBJ2-1)
CASRGPAGGKYNEQFF

SEQ ID NO: 65921 - protein, 12 aa, Homo sapiens
  CDR3 for alpha chain variable domain of TCR clone 32961 (TRAV17, TRAJ57)
CATDGGSEKLVF

SEQ ID NO: 65922 - protein, 12 aa, Homo sapiens
  CDR3 for beta chain variable domain of TCR clone 32961 (TRBV12-4, TRBJ1-2)
CASSFIRLHLRF

SEQ ID NO: 65923 - protein, 13 aa, Homo sapiens
  CDR3 for alpha chain variable domain of TCR clone 32962 (TRAV2, TRAJ40)
CAVVTSGAYKYIF

SEQ ID NO: 65924 - protein, 14 aa, Homo sapiens
  CDR3 for beta chain variable domain of TCR clone 32962 (TRBV19, TRBJ2-1)
CASPTFALSGEQFF

SEQ ID NO: 65925 - protein, 13 aa, Homo sapiens
  CDR3 for alpha chain variable domain of TCR clone 32963 (TRAV25, TRAJ30)
CAGRVDRDDKIIF

SEQ ID NO: 65926 - protein, 17 aa, Homo sapiens
  CDR3 for beta chain variable domain of TCR clone 32963 (TRBV7-9, TRBJ2-6)
CASSFGAGYSGANVPTF

SEQ ID NO: 65927 - protein, 13 aa, Homo sapiens
  CDR3 for alpha chain variable domain of TCR clone 32964 (TRAV1-1, TRAJ9)
CAAKNTGGFKTIF

SEQ ID NO: 65928 - protein, 14 aa, Homo sapiens
  CDR3 for beta chain variable domain of TCR clone 32964 (TRBV20-1, TRBJ2-1)
CSAQTGGSANEQFF

SEQ ID NO: 65929 - protein, 15 aa, Homo sapiens
  CDR3 for alpha chain variable domain of TCR clone 32965 (TRAV3, TRAJ45)
CAVRTPWGGSDGLTF

SEQ ID NO: 65930 - protein, 16 aa, Homo sapiens
  CDR3 for beta chain variable domain of TCR clone 32965 (TRBV6-1, TRBJ2-2)
CASSFGQGANTGELFF

SEQ ID NO: 65931 - protein, 13 aa, Homo sapiens
  CDR3 for alpha chain variable domain of TCR clone 32966 (TRAV13-2, TRAJ13)
CAERPGGYQKVTF

SEQ ID NO: 65932 - protein, 12 aa, Homo sapiens
  CDR3 for beta chain variable domain of TCR clone 32966 (TRBV11-3, TRBJ1-1)
CASSHRQGEAFF

SEQ ID NO: 65933 - protein, 12 aa, Homo sapiens
  CDR3 for alpha chain variable domain of TCR clone 32967 (TRAV3, TRAJ39)
CAAIEWSNMLTF

SEQ ID NO: 65934 - protein, 14 aa, Homo sapiens
  CDR3 for beta chain variable domain of TCR clone 32967 (TRBV7-8, TRBJ2-3)
CASSFPDGQDTQYF

SEQ ID NO: 65935 - protein, 13 aa, Homo sapiens
  CDR3 for alpha chain variable domain of TCR clone 32968 (TRAV17, TRAJ9)
CATDYTGGFKTIF

SEQ ID NO: 65936 - protein, 15 aa, Homo sapiens
  CDR3 for beta chain variable domain of TCR clone 32968 (TRBV7-9, TRBJ1-6)
CASSSPGRGNSPLHF

SEQ ID NO: 65937 - protein, 16 aa, Homo sapiens
  CDR3 for alpha chain variable domain of TCR clone 32969 (TRAV1-2, TRAJ10)
CAVRGVLTGGGNKLTF

SEQ ID NO: 65938 - protein, 15 aa, Homo sapiens
  CDR3 for beta chain variable domain of TCR clone 32969 (TRBV4-1, TRBJ1-4)
CASSDTGGTNEKLFF

SEQ ID NO: 65939 - protein, 10 aa, Homo sapiens
  CDR3 for alpha chain variable domain of TCR clone 32970 (TRAV20, TRAJ22)
CAAPVRQLTF

SEQ ID NO: 65940 - protein, 14 aa, Homo sapiens
  CDR3 for beta chain variable domain of TCR clone 32970 (TRBV19, TRBJ2-1)
CASSMGSGATEQFF

SEQ ID NO: 65941 - protein, 13 aa, Homo sapiens
  CDR3 for alpha chain variable domain of TCR clone 32971 (TRAV3, TRAJ16)
CAVRDRNGQKLLF

SEQ ID NO: 65942 - protein, 15 aa, Homo sapiens
  CDR3 for beta chain variable domain of TCR clone 32971 (TRBV5-1, TRBJ1-1)
CASSLNDFKNTEAFF

SEQ ID NO: 65943 - protein, 14 aa, Homo sapiens
  CDR3 for alpha chain variable domain of TCR clone 32972 (TRAV38-1, TRAJ39)
CAFAYNNAGNMLTF

SEQ ID NO: 65944 - protein, 14 aa, Homo sapiens
  CDR3 for beta chain variable domain of TCR clone 32972 (TRBV19, TRBJ1-3)
CASNRGNSGNTIYF

SEQ ID NO: 65945 - protein, 14 aa, Homo sapiens
  CDR3 for alpha chain variable domain of TCR clone 32973 (TRAV13-2, TRAJ11)
CAETGNSGYSTLTF

SEQ ID NO: 65946 - protein, 11 aa, Homo sapiens
  CDR3 for beta chain variable domain of TCR clone 32973 (TRBV10-3, TRBJ2-7)
CAISEGLEQYF

SEQ ID NO: 65947 - protein, 11 aa, Homo sapiens
  CDR3 for alpha chain variable domain of TCR clone 32974 (TRAV21, TRAJ20)
CAVRDDYKFSF

SEQ ID NO: 65948 - protein, 14 aa, Homo sapiens
  CDR3 for beta chain variable domain of TCR clone 32974 (TRBV12-4, TRBJ1-1)
CASSFSQMNTEAFF

SEQ ID NO: 65949 - protein, 13 aa, Homo sapiens
  CDR3 for alpha chain variable domain of TCR clone 32975 (TRAV20, TRAJ49)
CAVQARTGNQFYF

SEQ ID NO: 65950 - protein, 14 aa, Homo sapiens
  CDR3 for beta chain variable domain of TCR clone 32975 (TRBV5-1, TRBJ1-1)
CAGSLQGASTEAFF

SEQ ID NO: 65951 - protein, 19 aa, Homo sapiens
  CDR3 for alpha chain variable domain of TCR clone 32976 (TRAV26-1, TRAJ52)
CFVRAHRNAGGTSYGKLTF

SEQ ID NO: 65952 - protein, 15 aa, Homo sapiens
  CDR3 for beta chain variable domain of TCR clone 32976 (TRBV29-1, TRBJ2-1)
CSGRDRKSSYNEQFF

SEQ ID NO: 65953 - protein, 11 aa, Homo sapiens
  CDR3 for alpha chain variable domain of TCR clone 32977 (TRAV1-1, TRAJ23)
CAVRQGGKLIF

SEQ ID NO: 65954 - protein, 20 aa, Homo sapiens
  CDR3 for beta chain variable domain of TCR clone 32977 (TRBV7-8, TRBJ2-2)
CASSQLFPGPTIHITGELFF

SEQ ID NO: 65955 - protein, 14 aa, Homo sapiens
  CDR3 for alpha chain variable domain of TCR clone 32978 (TRAV2, TRAJ37)
CAVDFPSNTGKLIF

SEQ ID NO: 65956 - protein, 15 aa, Homo sapiens
  CDR3 for beta chain variable domain of TCR clone 32978 (TRBV20-1, TRBJ1-1)
CSASRGVTGNTEAFF

SEQ ID NO: 65957 - protein, 14 aa, Homo sapiens
  CDR3 for alpha chain variable domain of TCR clone 32979 (TRAV25, TRAJ42)
CAGNYGGSQGNLIF

SEQ ID NO: 65958 - protein, 13 aa, Homo sapiens
  CDR3 for beta chain variable domain of TCR clone 32979 (TRBV19, TRBJ2-2)
CASSQRSTGELFF

SEQ ID NO: 65959 - protein, 15 aa, Homo sapiens
  CDR3 for alpha chain variable domain of TCR clone 32980 (TRAV3, TRAJ22)
CAVRDRGGSARQLTF

SEQ ID NO: 65960 - protein, 14 aa, Homo sapiens
  CDR3 for beta chain variable domain of TCR clone 32980 (TRBV7-9, TRBJ1-6)
CASRPGTVNSPLHF

SEQ ID NO: 65961 - protein, 15 aa, Homo sapiens
  CDR3 for alpha chain variable domain of TCR clone 32981 (TRAV13-1, TRAJ50)
CAAKGSETSYDRVIF

SEQ ID NO: 65962 - protein, 13 aa, Homo sapiens
  CDR3 for beta chain variable domain of TCR clone 32981 (TRBV20-1, TRBJ2-3)
CSARAGGRDTQYF

SEQ ID NO: 65963 - protein, 14 aa, Homo sapiens
  CDR3 for alpha chain variable domain of TCR clone 32982 (TRAV3, TRAJ9)
CAVRLNTGVFKTIF

SEQ ID NO: 65964 - protein, 15 aa, Homo sapiens
  CDR3 for beta chain variable domain of TCR clone 32982 (TRBV7-2, TRBJ2-1)
CASSLASGRVNEQFF

SEQ ID NO: 65965 - protein, 12 aa, Homo sapiens
  CDR3 for alpha chain variable domain of TCR clone 32983 (TRAV26-1, TRAJ17)
CIVRSAGNKLTF

SEQ ID NO: 65966 - protein, 15 aa, Homo sapiens
  CDR3 for beta chain variable domain of TCR clone 32983 (TRBV2, TRBJ2-1)
CASSELAGSCNEQFF

SEQ ID NO: 65967 - protein, 15 aa, Homo sapiens
  CDR3 for alpha chain variable domain of TCR clone 32984 (TRAV38-1, TRAJ37)
CAFIHGSGNTGKLIF

SEQ ID NO: 65968 - protein, 12 aa, Homo sapiens
  CDR3 for beta chain variable domain of TCR clone 32984 (TRBV7-9, TRBJ2-7)
CARSFGSYEQYF

SEQ ID NO: 65969 - protein, 13 aa, Homo sapiens
  CDR3 for alpha chain variable domain of TCR clone 32985 (TRAV13-1, TRAJ21)
CAASIYNFNKFYF

SEQ ID NO: 65970 - protein, 13 aa, Homo sapiens
  CDR3 for beta chain variable domain of TCR clone 32985 (TRBV7-3, TRBJ1-1)
CASSQDWGAEAFF

SEQ ID NO: 65971 - protein, 16 aa, Homo sapiens
  CDR3 for alpha chain variable domain of TCR clone 32986 (TRAV23/DV6, TRAJ9)
CAASIGGNTGGFKTIF

SEQ ID NO: 65972 - protein, 15 aa, Homo sapiens
  CDR3 for beta chain variable domain of TCR clone 32986 (TRBV4-1, TRBJ1-4)
CASSDTGGTNEKLFF

SEQ ID NO: 65973 - protein, 16 aa, Homo sapiens
  CDR3 for alpha chain variable domain of TCR clone 32987 (TRAV30, TRAJ24)
CGTEIVDADSWGNSSL

SEQ ID NO: 65974 - protein, 15 aa, Homo sapiens
  CDR3 for beta chain variable domain of TCR clone 32987 (TRBV7-9, TRBJ1-4)
CASSARTGGNEKLFF

SEQ ID NO: 65975 - protein, 13 aa, Homo sapiens
  CDR3 for alpha chain variable domain of TCR clone 32988 (TRAV21, TRAJ27)
CAALNTNAGKSTF

SEQ ID NO: 65976 - protein, 14 aa, Homo sapiens
  CDR3 for beta chain variable domain of TCR clone 32988 (TRBV27, TRBJ1-1)
CASSLLSGLPEAFF

SEQ ID NO: 65977 - protein, 11 aa, Homo sapiens
  CDR3 for alpha chain variable domain of TCR clone 32989 (TRAV12-2, TRAJ49)
CAVHTGNQFYF

SEQ ID NO: 65978 - protein, 15 aa, Homo sapiens
  CDR3 for beta chain variable domain of TCR clone 32989 (TRBV4-2, TRBJ1-1)
CANSQQGAGDTEAFF

SEQ ID NO: 65979 - protein, 13 aa, Homo sapiens
  CDR3 for alpha chain variable domain of TCR clone 32990 (TRAV17, TRAJ5)
CATGDTGRRALTF

SEQ ID NO: 65980 - protein, 13 aa, Homo sapiens
  CDR3 for beta chain variable domain of TCR clone 32990 (TRBV19, TRBJ1-5)
CASSIETVQPQHF

SEQ ID NO: 65981 - protein, 11 aa, Homo sapiens
  CDR3 for alpha chain variable domain of TCR clone 32991 (TRAV1-2, TRAJ40)
CAVPGTYKCIF

SEQ ID NO: 65982 - protein, 16 aa, Homo sapiens
  CDR3 for beta chain variable domain of TCR clone 32991 (TRBV29-1, TRBJ2-7)
CSVEVVGTSGSYEQYF

SEQ ID NO: 65983 - protein, 14 aa, Homo sapiens
  CDR3 for alpha chain variable domain of TCR clone 32992 (TRAV12-2, TRAJ13)
CAVKKTGGYQKVTF

SEQ ID NO: 65984 - protein, 15 aa, Homo sapiens
  CDR3 for beta chain variable domain of TCR clone 32992 (TRBV5-1, TRBJ2-7)
CASSPQGRPLDEQYF

SEQ ID NO: 65985 - protein, 13 aa, Homo sapiens
  CDR3 for alpha chain variable domain of TCR clone 32993 (TRAV12-1, TRAJ26)
CVVRRNYGQNFVF

SEQ ID NO: 65986 - protein, 15 aa, Homo sapiens
  CDR3 for beta chain variable domain of TCR clone 32993 (TRBV28, TRBJ2-1)
CAGSIIAGGRSEQFF

SEQ ID NO: 65987 - protein, 15 aa, Homo sapiens
  CDR3 for alpha chain variable domain of TCR clone 32994 (TRAV2, TRAJ15)
CAVEDREQAGTALIF

SEQ ID NO: 65988 - protein, 16 aa, Homo sapiens
  CDR3 for beta chain variable domain of TCR clone 32994 (TRBV11-2, TRBJ2-7)
CASSLGAGATSSTSGR

SEQ ID NO: 65989 - protein, 16 aa, Homo sapiens
  CDR3 for alpha chain variable domain of TCR clone 32995 (TRAV30, TRAJ24)
CGTEIVDADSWGKFHF

SEQ ID NO: 65990 - protein, 15 aa, Homo sapiens
  CDR3 for beta chain variable domain of TCR clone 32995 (TRBV5-1, TRBJ2-3)
CASSVTSGSTDTQYF

SEQ ID NO: 65991 - protein, 13 aa, Homo sapiens
  CDR3 for alpha chain variable domain of TCR clone 32996 (TRAV27, TRAJ54)
CAGAGQGAQKLVF

SEQ ID NO: 65992 - protein, 15 aa, Homo sapiens
  CDR3 for beta chain variable domain of TCR clone 32996 (TRBV18, TRBJ2-6)
CASSPSYAGANVLTS

SEQ ID NO: 65993 - protein, 13 aa, Homo sapiens
  CDR3 for alpha chain variable domain of TCR clone 32997 (TRAV17, TRAJ9)
CATGSTGGFKTIF

SEQ ID NO: 65994 - protein, 16 aa, Homo sapiens
  CDR3 for beta chain variable domain of TCR clone 32997 (TRBV7-8, TRBJ2-7)
CASTFRGGLTSSTSGR

SEQ ID NO: 65995 - protein, 14 aa, Homo sapiens
  CDR3 for alpha chain variable domain of TCR clone 32998 (TRAV1-2, TRAJ8)
CAVREDTGFQKLVF

SEQ ID NO: 65996 - protein, 13 aa, Homo sapiens
  CDR3 for beta chain variable domain of TCR clone 32998 (TRBV20-1, TRBJ2-7)
CSADPGATYEQYF

SEQ ID NO: 65997 - protein, 13 aa, Homo sapiens
  CDR3 for alpha chain variable domain of TCR clone 32999 (TRAV8-3, TRAJ36)
CALGATGANNLFF

SEQ ID NO: 65998 - protein, 15 aa, Homo sapiens
  CDR3 for beta chain variable domain of TCR clone 32999 (TRBV7-2, TRBJ1-2)
CASSPRAGWNYGYTF

SEQ ID NO: 65999 - protein, 14 aa, Homo sapiens
  CDR3 for alpha chain variable domain of TCR clone 33000 (TRAV12-3, TRAJ10)
SHLPLTGGGNKLTF

SEQ ID NO: 66000 - protein, 15 aa, Homo sapiens
  CDR3 for beta chain variable domain of TCR clone 33000 (TRBV4-1, TRBJ1-4)
CASGDTGGTNEKLFF

SEQ ID NO: 66001 - protein, 18 aa, Homo sapiens
  CDR3 for alpha chain variable domain of TCR clone 33001 (TRAV26-1, TRAJ23)
RIVRVGLEVWNQGGKLIF

SEQ ID NO: 66002 - protein, 16 aa, Homo sapiens
  CDR3 for beta chain variable domain of TCR clone 33001 (TRBV12-4, TRBJ2-5)
CASSFFVRGRQETQYF

SEQ ID NO: 66003 - protein, 16 aa, Homo sapiens
  CDR3 for alpha chain variable domain of TCR clone 33002 (TRAV16, TRAJ52)
CALSAAGGTSYGKLTF

SEQ ID NO: 66004 - protein, 12 aa, Homo sapiens
  CDR3 for beta chain variable domain of TCR clone 33002 (TRBV12-4, TRBJ1-3)
CASSFSGNTLYF

SEQ ID NO: 66005 - protein, 12 aa, Homo sapiens
  CDR3 for alpha chain variable domain of TCR clone 33003 (TRAV22, TRAJ22)
CAPGGSARQLTF

SEQ ID NO: 66006 - protein, 15 aa, Homo sapiens
  CDR3 for beta chain variable domain of TCR clone 33003 (TRBV6-3, TRBJ2-7)
CASSSPGTVFYEQYF

SEQ ID NO: 66007 - protein, 14 aa, Homo sapiens
  CDR3 for alpha chain variable domain of TCR clone 33004 (TRAV38-2/DV8, TRAJ54)
AAMYQIQGAQKLVF

SEQ ID NO: 66008 - protein, 17 aa, Homo sapiens
  CDR3 for beta chain variable domain of TCR clone 33004 (TRBV6-1, TRBJ2-3)
CASSEALRLVSTDTQYF

SEQ ID NO: 66009 - protein, 15 aa, Homo sapiens
  CDR3 for alpha chain variable domain of TCR clone 33005 (TRAV4, TRAJ39)
CLVGPNNNAGNTLTF

SEQ ID NO: 66010 - protein, 13 aa, Homo sapiens
  CDR3 for beta chain variable domain of TCR clone 33005 (TRBV11-2, TRBJ2-5)
CASSSTGEETQYF

SEQ ID NO: 66011 - protein, 13 aa, Homo sapiens
  CDR3 for alpha chain variable domain of TCR clone 33006 (TRAV27, TRAJ41)
CAGEGNSGYALNF

SEQ ID NO: 66012 - protein, 15 aa, Homo sapiens
  CDR3 for beta chain variable domain of TCR clone 33006 (TRBV7-9, TRBJ1-5)
CASSQGHQPNQPQHF

SEQ ID NO: 66013 - protein, 14 aa, Homo sapiens
  CDR3 for alpha chain variable domain of TCR clone 33007 (TRAV12-2, TRAJ17)
CAVLFKAAGNKLTF

SEQ ID NO: 66014 - protein, 12 aa, Homo sapiens
  CDR3 for beta chain variable domain of TCR clone 33007 (TRBV11-2, TRBJ2-1)
CASSPGNNEQFF

SEQ ID NO: 66015 - protein, 14 aa, Homo sapiens
  CDR3 for alpha chain variable domain of TCR clone 33008 (TRAV3, TRAJ8)
CAALMNTGFQKLVF

SEQ ID NO: 66016 - protein, 15 aa, Homo sapiens
  CDR3 for beta chain variable domain of TCR clone 33008 (TRBV28, TRBJ2-5)
CAGSLGLGNQETQYF

SEQ ID NO: 66017 - protein, 14 aa, Homo sapiens
  CDR3 for alpha chain variable domain of TCR clone 33009 (TRAV1-2, TRAJ16)
CAVNRFSYGQKLLF

SEQ ID NO: 66018 - protein, 14 aa, Homo sapiens
  CDR3 for beta chain variable domain of TCR clone 33009 (TRBV7-9, TRBJ2-3)
CASSLEDGTDTQYF

SEQ ID NO: 66019 - protein, 14 aa, Homo sapiens
  CDR3 for alpha chain variable domain of TCR clone 33010 (TRAV23/DV6, TRAJ13)
CAASETGGYQKVTF

SEQ ID NO: 66020 - protein, 13 aa, Homo sapiens
  CDR3 for beta chain variable domain of TCR clone 33010 (TRBV29-1, TRBJ2-1)
CSVEGGRVDEQFF

SEQ ID NO: 66021 - protein, 12 aa, Homo sapiens
  CDR3 for alpha chain variable domain of TCR clone 33011 (TRAV21, TRAJ33)
CAKMDSNYQLIW

SEQ ID NO: 66022 - protein, 12 aa, Homo sapiens
  CDR3 for beta chain variable domain of TCR clone 33011 (TRBV11-2, TRBJ2-1)
CASSPGNNEQFF

SEQ ID NO: 66023 - protein, 13 aa, Homo sapiens
  CDR3 for alpha chain variable domain of TCR clone 33012 (TRAV21, TRAJ37)
CAVSSGDTGKLIF

SEQ ID NO: 66024 - protein, 13 aa, Homo sapiens
  CDR3 for beta chain variable domain of TCR clone 33012 (TRBV7-6, TRBJ2-3)
CASSLRSDNTQYF

SEQ ID NO: 66025 - protein, 20 aa, Homo sapiens
  CDR3 for alpha chain variable domain of TCR clone 33013 (TRAV12-2, TRAJ52)
SPVIQPPARAGGTSYGKLTF

SEQ ID NO: 66026 - protein, 16 aa, Homo sapiens
  CDR3 for beta chain variable domain of TCR clone 33013 (TRBV15, TRBJ1-2)
CATSRGPRTGGGGDTF

SEQ ID NO: 66027 - protein, 14 aa, Homo sapiens
  CDR3 for alpha chain variable domain of TCR clone 33014 (TRAV4, TRAJ43)
CLVGPMYNNNDMRF

SEQ ID NO: 66028 - protein, 21 aa, Homo sapiens
  CDR3 for beta chain variable domain of TCR clone 33014 (TRBV11-1, TRBJ2-1)
WASSARERLRPEGPSYNEQFF

SEQ ID NO: 66029 - protein, 13 aa, Homo sapiens
  CDR3 for alpha chain variable domain of TCR clone 33015 (TRAV20, TRAJ21)
CAVEGYNFNKFYF

SEQ ID NO: 66030 - protein, 14 aa, Homo sapiens
  CDR3 for beta chain variable domain of TCR clone 33015 (TRBV3-1, TRBJ2-5)
CVSSQGPDQETQYF

SEQ ID NO: 66031 - protein, 15 aa, Homo sapiens
  CDR3 for alpha chain variable domain of TCR clone 33016 (TRAV34, TRAJ38)
CGADFTPGNNRKLIW

SEQ ID NO: 66032 - protein, 18 aa, Homo sapiens
  CDR3 for beta chain variable domain of TCR clone 33016 (TRBV11-2, TRBJ2-3)
CASSLGGASRGAPNTQYF

SEQ ID NO: 66033 - protein, 15 aa, Homo sapiens
  CDR3 for alpha chain variable domain of TCR clone 33017 (TRAV12-3, TRAJ6)
CAMSETTGGSYIPTF

SEQ ID NO: 66034 - protein, 16 aa, Homo sapiens
  CDR3 for beta chain variable domain of TCR clone 33017 (TRBV20-1, TRBJ1-2)
CSASMGQGVANYGYTF

SEQ ID NO: 66035 - protein, 11 aa, Homo sapiens
  CDR3 for alpha chain variable domain of TCR clone 33018 (TRAV21, TRAJ11)
CAVNGYSTLTV

SEQ ID NO: 66036 - protein, 11 aa, Homo sapiens
  CDR3 for beta chain variable domain of TCR clone 33018 (TRBV19, TRBJ1-1)
CASSIGSEAFF

SEQ ID NO: 66037 - protein, 14 aa, Homo sapiens
  CDR3 for alpha chain variable domain of TCR clone 33019 (TRAV12-3, TRAJ9)
CAMSPNTGGLKTIF

SEQ ID NO: 66038 - protein, 12 aa, Homo sapiens
  CDR3 for beta chain variable domain of TCR clone 33019 (TRBV11-2, TRBJ2-2)
CASSLGGGELFF

SEQ ID NO: 66039 - protein, 16 aa, Homo sapiens
  CDR3 for alpha chain variable domain of TCR clone 33020 (TRAV12-3, TRAJ53)
CAMSPGSGGSNYKLTF

SEQ ID NO: 66040 - protein, 16 aa, Homo sapiens
  CDR3 for beta chain variable domain of TCR clone 33020 (TRBV5-1, TRBJ1-1)
CASSSGGNSLNTEAFF

SEQ ID NO: 66041 - protein, 11 aa, Homo sapiens
  CDR3 for alpha chain variable domain of TCR clone 33021 (TRAV17, TRAJ36)
CAPTGANNFFF

SEQ ID NO: 66042 - protein, 12 aa, Homo sapiens
  CDR3 for beta chain variable domain of TCR clone 33021 (TRBV29-1, TRBJ2-3)
CSVTGGADTQYL

SEQ ID NO: 66043 - protein, 16 aa, Homo sapiens
  CDR3 for alpha chain variable domain of TCR clone 33022 (TRAV30, TRAJ24)
CGTEIVDADSWGKFQF

SEQ ID NO: 66044 - protein, 15 aa, Homo sapiens
  CDR3 for beta chain variable domain of TCR clone 33022 (TRBV19, TRBJ2-4)
CASRGPRRGENIQYF

SEQ ID NO: 66045 - protein, 16 aa, Homo sapiens
  CDR3 for alpha chain variable domain of TCR clone 33023 (TRAV12-1, TRAJ28)
CEVIAYSGAGSYQLTF

SEQ ID NO: 66046 - protein, 15 aa, Homo sapiens
  CDR3 for beta chain variable domain of TCR clone 33023 (TRBV14, TRBJ1-1)
CASSQEGMGFTEAFF

SEQ ID NO: 66047 - protein, 16 aa, Homo sapiens
  CDR3 for alpha chain variable domain of TCR clone 33024 (TRAV3, TRAJ37)
CAVRGKGAGNTGKLIF

SEQ ID NO: 66048 - protein, 13 aa, Homo sapiens
  CDR3 for beta chain variable domain of TCR clone 33024 (TRBV7-2, TRBJ2-2)
CASSSVRAGELFF

SEQ ID NO: 66049 - protein, 13 aa, Homo sapiens
  CDR3 for alpha chain variable domain of TCR clone 33025 (TRAV1-2, TRAJ9)
CAALNTGGFKTIF

SEQ ID NO: 66050 - protein, 14 aa, Homo sapiens
  CDR3 for beta chain variable domain of TCR clone 33025 (TRBV7-3, TRBJ2-2)
CASSSGGYTGELFF

SEQ ID NO: 66051 - protein, 11 aa, Homo sapiens
  CDR3 for alpha chain variable domain of TCR clone 33026 (TRAV23/DV6, TRAJ58)
CAARLLRGETS

SEQ ID NO: 66052 - protein, 14 aa, Homo sapiens
  CDR3 for beta chain variable domain of TCR clone 33026 (TRBV6-1, TRBJ1-3)
CASVQGGGGNTIYF

SEQ ID NO: 66053 - protein, 14 aa, Homo sapiens
  CDR3 for alpha chain variable domain of TCR clone 33027 (TRAV12-1, TRAJ12)
CVVTRMDSSYKLIF

SEQ ID NO: 66054 - protein, 13 aa, Homo sapiens
  CDR3 for beta chain variable domain of TCR clone 33027 (TRBV20-1, TRBJ1-1)
CSARGGGNTEAFL

SEQ ID NO: 66055 - protein, 12 aa, Homo sapiens
  CDR3 for alpha chain variable domain of TCR clone 33028 (TRAV12-3, TRAJ3)
CAIDSSASKIIF

SEQ ID NO: 66056 - protein, 17 aa, Homo sapiens
  CDR3 for beta chain variable domain of TCR clone 33028 (TRBV7-9, TRBJ2-3)
CASSLEEAGAYPGTQYF

SEQ ID NO: 66057 - protein, 14 aa, Homo sapiens
  CDR3 for alpha chain variable domain of TCR clone 33029 (TRAV16, TRAJ15)
CALSFNQAGTALIF

SEQ ID NO: 66058 - protein, 16 aa, Homo sapiens
  CDR3 for beta chain variable domain of TCR clone 33029 (TRBV9, TRBJ2-7)
CARSAGPDRSPYEQYF

SEQ ID NO: 66059 - protein, 13 aa, Homo sapiens
  CDR3 for alpha chain variable domain of TCR clone 33030 (TRAV26-1, TRAJ29)
CIVRRSGNTPLVF

SEQ ID NO: 66060 - protein, 16 aa, Homo sapiens
  CDR3 for beta chain variable domain of TCR clone 33030 (TRBV11-1, TRBJ1-1)
CASSPRGAHMNSEAFF

SEQ ID NO: 66061 - protein, 12 aa, Homo sapiens
  CDR3 for alpha chain variable domain of TCR clone 33031 (TRAV1-2, TRAJ29)
CAVPSGNTPLVF

SEQ ID NO: 66062 - protein, 14 aa, Homo sapiens
  CDR3 for beta chain variable domain of TCR clone 33031 (TRBV18, TRBJ2-5)
CASSPGASQETQYF

SEQ ID NO: 66063 - protein, 16 aa, Homo sapiens
  CDR3 for alpha chain variable domain of TCR clone 33032 (TRAV16, TRAJ52)
CALSAAGGTSYGKLTF

SEQ ID NO: 66064 - protein, 12 aa, Homo sapiens
  CDR3 for beta chain variable domain of TCR clone 33032 (TRBV2, TRBJ2-1)
CAYGPPGNEQFF

SEQ ID NO: 66065 - protein, 15 aa, Homo sapiens
  CDR3 for alpha chain variable domain of TCR clone 33033 (TRAV3, TRAJ23)
CAVRDRGNQGGKLIF

SEQ ID NO: 66066 - protein, 16 aa, Homo sapiens
  CDR3 for beta chain variable domain of TCR clone 33033 (TRBV7-3, TRBJ2-1)
CASSLPPAGATMSSSS

SEQ ID NO: 66067 - protein, 14 aa, Homo sapiens
  CDR3 for alpha chain variable domain of TCR clone 33034 (TRAV8-3, TRAJ4)
CAVCAAGGYNKLIF

SEQ ID NO: 66068 - protein, 15 aa, Homo sapiens
  CDR3 for beta chain variable domain of TCR clone 33034 (TRBV6-5, TRBJ2-1)
CASSYDAGAGNEQFF

SEQ ID NO: 66069 - protein, 18 aa, Homo sapiens
  CDR3 for alpha chain variable domain of TCR clone 33035 (TRAV13-1, TRAJ52)
FAASKRSAGGTSYGKLTF

SEQ ID NO: 66070 - protein, 13 aa, Homo sapiens
  CDR3 for beta chain variable domain of TCR clone 33035 (TRBV12-4, TRBJ1-2)
CASSLRQGKGYTF

SEQ ID NO: 66071 - protein, 14 aa, Homo sapiens
  CDR3 for alpha chain variable domain of TCR clone 33036 (TRAV9-2, TRAJ39)
CALYIYNAGNMLTF

SEQ ID NO: 66072 - protein, 15 aa, Homo sapiens
  CDR3 for beta chain variable domain of TCR clone 33036 (TRBV20-1, TRBJ2-5)
CSAEGTGGLQETQYF

SEQ ID NO: 66073 - protein, 14 aa, Homo sapiens
  CDR3 for alpha chain variable domain of TCR clone 33037 (TRAV12-2, TRAJ53)
CAVKGGGGNYKLTF

SEQ ID NO: 66074 - protein, 14 aa, Homo sapiens
  CDR3 for beta chain variable domain of TCR clone 33037 (TRBV19, TRBJ2-1)
CASPTFVLSGEQFF

SEQ ID NO: 66075 - protein, 14 aa, Homo sapiens
  CDR3 for alpha chain variable domain of TCR clone 33038 (TRAV8-2, TRAJ23)
CVVSGDNQGGKLIF

SEQ ID NO: 66076 - protein, 16 aa, Homo sapiens
  CDR3 for beta chain variable domain of TCR clone 33038 (TRBV4-2, TRBJ2-5)
CASSQELVGSQETQYF

SEQ ID NO: 66077 - protein, 14 aa, Homo sapiens
  CDR3 for alpha chain variable domain of TCR clone 33039 (TRAV17, TRAJ35)
RATDRPGFGNVLHC

SEQ ID NO: 66078 - protein, 19 aa, Homo sapiens
  CDR3 for beta chain variable domain of TCR clone 33039 (TRBV11-3, TRBJ2-2)
CASSTRPGAKTTNTGELFF

SEQ ID NO: 66079 - protein, 13 aa, Homo sapiens
  CDR3 for alpha chain variable domain of TCR clone 33040 (TRAV30, TRAJ24)
CGTVTDSWGKLQF

SEQ ID NO: 66080 - protein, 15 aa, Homo sapiens
  CDR3 for beta chain variable domain of TCR clone 33040 (TRBV4-1, TRBJ2-1)
CASSQDPGNYSEQFF

SEQ ID NO: 66081 - protein, 12 aa, Homo sapiens
  CDR3 for alpha chain variable domain of TCR clone 33041 (TRAV13-1, TRAJ49)
CAASPMGNRFYF

SEQ ID NO: 66082 - protein, 13 aa, Homo sapiens
  CDR3 for beta chain variable domain of TCR clone 33041 (TRBV20-1, TRBJ2-2)
CGASAAGTGKLFF

SEQ ID NO: 66083 - protein, 13 aa, Homo sapiens
  CDR3 for alpha chain variable domain of TCR clone 33042 (TRAV27, TRAJ3)
ASLRGSSASKIIF

SEQ ID NO: 66084 - protein, 15 aa, Homo sapiens
  CDR3 for beta chain variable domain of TCR clone 33042 (TRBV28, TRBJ1-3)
CASSMGWASGNTIYS

SEQ ID NO: 66085 - protein, 14 aa, Homo sapiens
  CDR3 for alpha chain variable domain of TCR clone 33043 (TRAV13-1, TRAJ40)
CAASMTSGTYKYIF

SEQ ID NO: 66086 - protein, 15 aa, Homo sapiens
  CDR3 for beta chain variable domain of TCR clone 33043 (TRBV7-3, TRBJ2-1)
CASSPTGGGAVEQFF

SEQ ID NO: 66087 - protein, 13 aa, Homo sapiens
  CDR3 for alpha chain variable domain of TCR clone 33044 (TRAV23/DV6, TRAJ15)
CAALPAGRNCSDL

SEQ ID NO: 66088 - protein, 14 aa, Homo sapiens
  CDR3 for beta chain variable domain of TCR clone 33044 (TRBV7-9, TRBJ1-2)
CASSRQGANYGYTL

SEQ ID NO: 66089 - protein, 20 aa, Homo sapiens
  CDR3 for alpha chain variable domain of TCR clone 33045 (TRAV26-1, TRAJ42)
CCVLLHRQTYYGGSQGNLIF

SEQ ID NO: 66090 - protein, 14 aa, Homo sapiens
  CDR3 for beta chain variable domain of TCR clone 33045 (TRBV19, TRBJ2-1)
CASPTFVLSGEQFF

SEQ ID NO: 66091 - protein, 13 aa, Homo sapiens
  CDR3 for alpha chain variable domain of TCR clone 33046 (TRAV27, TRAJ41)
CAGEGNSGYALNF

SEQ ID NO: 66092 - protein, 14 aa, Homo sapiens
  CDR3 for beta chain variable domain of TCR clone 33046 (TRBV7-2, TRBJ1-1)
CACSFLTGTTEAFF

SEQ ID NO: 66093 - protein, 12 aa, Homo sapiens
  CDR3 for alpha chain variable domain of TCR clone 33047 (TRAV12-3, TRAJ17)
CAMTLTGNKLTF

SEQ ID NO: 66094 - protein, 12 aa, Homo sapiens
  CDR3 for beta chain variable domain of TCR clone 33047 (TRBV7-8, TRBJ2-7)
CTSSLGDREQYF

SEQ ID NO: 66095 - protein, 15 aa, Homo sapiens
  CDR3 for alpha chain variable domain of TCR clone 33048 (TRAV12-3, TRAJ6)
CAMSATTGGSYIPTS

SEQ ID NO: 66096 - protein, 15 aa, Homo sapiens
  CDR3 for beta chain variable domain of TCR clone 33048 (TRBV5-1, TRBJ2-7)
CASSLNGGPAREQYF

SEQ ID NO: 66097 - protein, 18 aa, Homo sapiens
  CDR3 for alpha chain variable domain of TCR clone 33049 (TRAV21, TRAJ52)
CAVRPSPAGGTSYGKLTF

SEQ ID NO: 66098 - protein, 17 aa, Homo sapiens
  CDR3 for beta chain variable domain of TCR clone 33049 (TRBV13, TRBJ2-3)
RASGLSRVAGGRNTQYF

SEQ ID NO: 66099 - protein, 15 aa, Homo sapiens
  CDR3 for alpha chain variable domain of TCR clone 33050 (TRAV3, TRAJ22)
CAVRDRGGSARQLTF

SEQ ID NO: 66100 - protein, 13 aa, Homo sapiens
  CDR3 for beta chain variable domain of TCR clone 33050 (TRBV19, TRBJ2-7)
CASRKAGGSEQYF

SEQ ID NO: 66101 - protein, 14 aa, Homo sapiens
  CDR3 for alpha chain variable domain of TCR clone 33051 (TRAV1-2, TRAJ16)
CAVNRFSDGQKLLF

SEQ ID NO: 66102 - protein, 16 aa, Homo sapiens
  CDR3 for beta chain variable domain of TCR clone 33051 (TRBV20-1, TRBJ1-4)
CSAPGQGLLTNEKPFF

SEQ ID NO: 66103 - protein, 14 aa, Homo sapiens
  CDR3 for alpha chain variable domain of TCR clone 33052 (TRAV1-2, TRAJ16)
CAVNRFSDGQKLLF

SEQ ID NO: 66104 - protein, 13 aa, Homo sapiens
  CDR3 for beta chain variable domain of TCR clone 33052 (TRBV5-1, TRBJ2-1)
CASSFSGSDEQFF

SEQ ID NO: 66105 - protein, 14 aa, Homo sapiens
  CDR3 for alpha chain variable domain of TCR clone 33053 (TRAV12-3, TRAJ9)
CAMSPNTGGFKNIF

SEQ ID NO: 66106 - protein, 12 aa, Homo sapiens
  CDR3 for beta chain variable domain of TCR clone 33053 (TRBV19, TRBJ1-5)
CASSIAQQPQHF

SEQ ID NO: 66107 - protein, 14 aa, Homo sapiens
  CDR3 for alpha chain variable domain of TCR clone 33054 (TRAV35, TRAJ41)
CAGQASVRRNALDF

SEQ ID NO: 66108 - protein, 14 aa, Homo sapiens
  CDR3 for beta chain variable domain of TCR clone 33054 (TRBV20-1, TRBJ1-2)
CSASEQGAVYGYTF

SEQ ID NO: 66109 - protein, 11 aa, Homo sapiens
  CDR3 for alpha chain variable domain of TCR clone 33055 (TRAV12-1, TRAJ21)
YVVNNFNKFYF

SEQ ID NO: 66110 - protein, 17 aa, Homo sapiens
  CDR3 for beta chain variable domain of TCR clone 33055 (TRBV7-8, TRBJ2-1)
CASSPPTGTLAYNEQFF

SEQ ID NO: 66111 - protein, 13 aa, Homo sapiens
  CDR3 for alpha chain variable domain of TCR clone 33056 (TRAV1-1, TRAJ9)
CAAKNTGGFKTIF

SEQ ID NO: 66112 - protein, 14 aa, Homo sapiens
  CDR3 for beta chain variable domain of TCR clone 33056 (TRBV20-1, TRBJ2-1)
CSAQIGWSANEQFF

SEQ ID NO: 66113 - protein, 16 aa, Homo sapiens
  CDR3 for alpha chain variable domain of TCR clone 33057 (TRAV12-2, TRAJ13)
CAVKKTGGYQKVPLEL

SEQ ID NO: 66114 - protein, 15 aa, Homo sapiens
  CDR3 for beta chain variable domain of TCR clone 33057 (TRBV27, TRBJ2-1)
CASSNGGGSSNEQFF

SEQ ID NO: 66115 - protein, 13 aa, Homo sapiens
  CDR3 for alpha chain variable domain of TCR clone 33058 (TRAV12-3, TRAJ13)
CEMGTGGYQKVTF

SEQ ID NO: 66116 - protein, 14 aa, Homo sapiens
  CDR3 for beta chain variable domain of TCR clone 33058 (TRBV7-2, TRBJ2-5)
CASSTGGELKTQYF

SEQ ID NO: 66117 - protein, 14 aa, Homo sapiens
  CDR3 for alpha chain variable domain of TCR clone 33059 (TRAV1-2, TRAJ16)
CAVNRFSDGQKLPF

SEQ ID NO: 66118 - protein, 15 aa, Homo sapiens
  CDR3 for beta chain variable domain of TCR clone 33059 (TRBV27, TRBJ2-1)
CASSNGGGSSNEQFF

SEQ ID NO: 66119 - protein, 14 aa, Homo sapiens
  CDR3 for alpha chain variable domain of TCR clone 33060 (TRAV1-2, TRAJ8)
CAVREDTGFQKLVF

SEQ ID NO: 66120 - protein, 16 aa, Homo sapiens
  CDR3 for beta chain variable domain of TCR clone 33060 (TRBV27, TRBJ2-3)
CASSLQGNRGTDTQYF

SEQ ID NO: 66121 - protein, 13 aa, Homo sapiens
  CDR3 for alpha chain variable domain of TCR clone 33061 (TRAV22, TRAJ29)
CAVGGSGNTPLVF

SEQ ID NO: 66122 - protein, 16 aa, Homo sapiens
  CDR3 for beta chain variable domain of TCR clone 33061 (TRBV10-3, TRBJ2-1)
CAIRGGGRGDYNEQFF

SEQ ID NO: 66123 - protein, 12 aa, Homo sapiens
  CDR3 for alpha chain variable domain of TCR clone 33062 (TRAV17, TRAJ4)
CATDGGYNKLTF

SEQ ID NO: 66124 - protein, 13 aa, Homo sapiens
  CDR3 for beta chain variable domain of TCR clone 33062 (TRBV29-1, TRBJ2-2)
CSTTGVNTGELFF

SEQ ID NO: 66125 - protein, 16 aa, Homo sapiens
  CDR3 for alpha chain variable domain of TCR clone 33063 (TRAV3, TRAJ37)
CAVRPHGSGNTGKLIF

SEQ ID NO: 66126 - protein, 16 aa, Homo sapiens
  CDR3 for beta chain variable domain of TCR clone 33063 (TRBV9, TRBJ1-2)
CASSIEEKVSPYGYTF

SEQ ID NO: 66127 - protein, 15 aa, Homo sapiens
  CDR3 for alpha chain variable domain of TCR clone 33064 (TRAV17, TRAJ56)
CATEPFTGANSKPTF

SEQ ID NO: 66128 - protein, 15 aa, Homo sapiens
  CDR3 for beta chain variable domain of TCR clone 33064 (TRBV28, TRBJ1-5)
CASSRTGGYVQPQHF

SEQ ID NO: 66129 - protein, 14 aa, Homo sapiens
  CDR3 for alpha chain variable domain of TCR clone 33065 (TRAV9-2, TRAJ39)
CALYIYNAGNMLTF

SEQ ID NO: 66130 - protein, 11 aa, Homo sapiens
  CDR3 for beta chain variable domain of TCR clone 33065 (TRBV12-4, TRBJ2-3)
CASTATDTQYF

SEQ ID NO: 66131 - protein, 16 aa, Homo sapiens
  CDR3 for alpha chain variable domain of TCR clone 33066 (TRAV12-3, TRAJ53)
CAMSPGSGGSNYKLTF

SEQ ID NO: 66132 - protein, 15 aa, Homo sapiens
  CDR3 for beta chain variable domain of TCR clone 33066 (TRBV4-1, TRBJ1-4)
CASSDTGGTNEKLFF

SEQ ID NO: 66133 - protein, 16 aa, Homo sapiens
  CDR3 for alpha chain variable domain of TCR clone 33067 (TRAV30, TRAJ24)
CGTEIVDADSWGKFQF

SEQ ID NO: 66134 - protein, 16 aa, Homo sapiens
  CDR3 for beta chain variable domain of TCR clone 33067 (TRBV12-4, TRBJ2-7)
CASSLIGGTGTYEQYF

SEQ ID NO: 66135 - protein, 11 aa, Homo sapiens
  CDR3 for alpha chain variable domain of TCR clone 33068 (TRAV8-3, TRAJ49)
CAVNTGNQFYF

SEQ ID NO: 66136 - protein, 12 aa, Homo sapiens
  CDR3 for beta chain variable domain of TCR clone 33068 (TRBV11-3, TRBJ2-7)
CASSPPADEQYF

SEQ ID NO: 66137 - protein, 14 aa, Homo sapiens
  CDR3 for alpha chain variable domain of TCR clone 33069 (TRAV27, TRAJ15)
CAGSDNQAGTALIF

SEQ ID NO: 66138 - protein, 11 aa, Homo sapiens
  CDR3 for beta chain variable domain of TCR clone 33069 (TRBV29-1, TRBJ1-1)
CSVEVGTRTFF

SEQ ID NO: 66139 - protein, 16 aa, Homo sapiens
  CDR3 for alpha chain variable domain of TCR clone 33070 (TRAV12-2, TRAJ10)
CAVNRVLTGGGNKLTF

SEQ ID NO: 66140 - protein, 20 aa, Homo sapiens
  CDR3 for beta chain variable domain of TCR clone 33070 (TRBV7-8, TRBJ2-2)
CASSHLFPGPTIHITGELFF

SEQ ID NO: 66141 - protein, 17 aa, Homo sapiens
  CDR3 for alpha chain variable domain of TCR clone 33071 (TRAV3, TRAJ6)
CAVRDGPRAGGSYIPTF

SEQ ID NO: 66142 - protein, 15 aa, Homo sapiens
  CDR3 for beta chain variable domain of TCR clone 33071 (TRBV20-1, TRBJ1-1)
CSASWDGFLNTEAFF

SEQ ID NO: 66143 - protein, 15 aa, Homo sapiens
  CDR3 for alpha chain variable domain of TCR clone 33072 (TRAV8-4, TRAJ47)
CAVSDPEEYGNKLVF

SEQ ID NO: 66144 - protein, 15 aa, Homo sapiens
  CDR3 for beta chain variable domain of TCR clone 33072 (TRBV11-2, TRBJ2-1)
CASSLGPDSYSEQFF

SEQ ID NO: 66145 - protein, 15 aa, Homo sapiens
  CDR3 for alpha chain variable domain of TCR clone 33073 (TRAV8-3, TRAJ27)
CAVGPSKTNADKSTF

SEQ ID NO: 66146 - protein, 15 aa, Homo sapiens
  CDR3 for beta chain variable domain of TCR clone 33073 (TRBV7-2, TRBJ2-1)
CASSSGLAGGNEQFF

SEQ ID NO: 66147 - protein, 15 aa, Homo sapiens
  CDR3 for alpha chain variable domain of TCR clone 33074 (TRAV17, TRAJ22)
CATVAPSSSARQLTF

SEQ ID NO: 66148 - protein, 15 aa, Homo sapiens
  CDR3 for beta chain variable domain of TCR clone 33074 (TRBV11-3, TRBJ2-3)
CASLKDGREGDTQYF

SEQ ID NO: 66149 - protein, 16 aa, Homo sapiens
  CDR3 for alpha chain variable domain of TCR clone 33075 (TRAV27, TRAJ13)
FAGAKSDSGGYQKVTF

SEQ ID NO: 66150 - protein, 15 aa, Homo sapiens
  CDR3 for beta chain variable domain of TCR clone 33075 (TRBV29-1, TRBJ2-1)
CSVGRHALFYNEQFF

SEQ ID NO: 66151 - protein, 16 aa, Homo sapiens
  CDR3 for alpha chain variable domain of TCR clone 33076 (TRAV1-2, TRAJ10)
CAVRGVLTGGGNKLTF

SEQ ID NO: 66152 - protein, 15 aa, Homo sapiens
  CDR3 for beta chain variable domain of TCR clone 33076 (TRBV29-1, TRBJ2-1)
CSVGRHALFYDEQFF

SEQ ID NO: 66153 - protein, 14 aa, Homo sapiens
  CDR3 for alpha chain variable domain of TCR clone 33077 (TRAV35, TRAJ50)
CAGHRKTSYDNVIF

SEQ ID NO: 66154 - protein, 13 aa, Homo sapiens
  CDR3 for beta chain variable domain of TCR clone 33077 (TRBV7-7, TRBJ2-3)
CASSLSRADTQYF

SEQ ID NO: 66155 - protein, 16 aa, Homo sapiens
  CDR3 for alpha chain variable domain of TCR clone 33078 (TRAV3, TRAJ10)
CAVRDMRAGGGNKLTF

SEQ ID NO: 66156 - protein, 12 aa, Homo sapiens
  CDR3 for beta chain variable domain of TCR clone 33078 (TRBV20-1, TRBJ2-7)
CSAGLKMGEQYL

SEQ ID NO: 66157 - protein, 12 aa, Homo sapiens
  CDR3 for alpha chain variable domain of TCR clone 33079 (TRAV26-2, TRAJ48)
CILRKGDEKLTF

SEQ ID NO: 66158 - protein, 14 aa, Homo sapiens
  CDR3 for beta chain variable domain of TCR clone 33079 (TRBV28, TRBJ2-7)
CASSTLRGRFEQYF

SEQ ID NO: 66159 - protein, 11 aa, Homo sapiens
  CDR3 for alpha chain variable domain of TCR clone 33080 (TRAV12-2, TRAJ43)
CASPIGNGMRF

SEQ ID NO: 66160 - protein, 13 aa, Homo sapiens
  CDR3 for beta chain variable domain of TCR clone 33080 (TRBV7-3, TRBJ1-2)
CASSLKRGYGYTF

SEQ ID NO: 66161 - protein, 16 aa, Homo sapiens
  CDR3 for alpha chain variable domain of TCR clone 33081 (TRAV1-2, TRAJ27)
CAVREPQTPMQANQPL

SEQ ID NO: 66162 - protein, 13 aa, Homo sapiens
  CDR3 for beta chain variable domain of TCR clone 33081 (TRBV6-1, TRBJ1-2)
CASSAREGYGYAF

SEQ ID NO: 66163 - protein, 14 aa, Homo sapiens
  CDR3 for alpha chain variable domain of TCR clone 33082 (TRAV8-3, TRAJ4)
CVVGAAGGYNKLIF

SEQ ID NO: 66164 - protein, 15 aa, Homo sapiens
  CDR3 for beta chain variable domain of TCR clone 33082 (TRBV6-5, TRBJ2-1)
CASSYDAGAGNEQFF

SEQ ID NO: 66165 - protein, 16 aa, Homo sapiens
  CDR3 for alpha chain variable domain of TCR clone 33083 (TRAV3, TRAJ18)
CAVRDVRGSTLGRLYF

SEQ ID NO: 66166 - protein, 15 aa, Homo sapiens
  CDR3 for beta chain variable domain of TCR clone 33083 (TRBV7-9, TRBJ1-6)
CASSSPGRGNSPLHF

SEQ ID NO: 66167 - protein, 11 aa, Homo sapiens
  CDR3 for alpha chain variable domain of TCR clone 33084 (TRAV13-1, TRAJ43)
CAASGANDMRF

SEQ ID NO: 66168 - protein, 14 aa, Homo sapiens
  CDR3 for beta chain variable domain of TCR clone 33084 (TRBV4-1, TRBJ1-1)
CASSQPGVNTEAFF

SEQ ID NO: 66169 - protein, 16 aa, Homo sapiens
  CDR3 for alpha chain variable domain of TCR clone 33085 (TRAV30, TRAJ24)
CGTEIVDADSWGKFQF

SEQ ID NO: 66170 - protein, 13 aa, Homo sapiens
  CDR3 for beta chain variable domain of TCR clone 33085 (TRBV11-2, TRBJ1-3)
CASSLSERNTIYF

SEQ ID NO: 66171 - protein, 12 aa, Homo sapiens
  CDR3 for alpha chain variable domain of TCR clone 33086 (TRAV17, TRAJ4)
CVTDGGYNKLIF

SEQ ID NO: 66172 - protein, 13 aa, Homo sapiens
  CDR3 for beta chain variable domain of TCR clone 33086 (TRBV29-1, TRBJ2-2)
CSTTGVNTGELFF

SEQ ID NO: 66173 - protein, 14 aa, Homo sapiens
  CDR3 for alpha chain variable domain of TCR clone 33087 (TRAV13-1, TRAJ44)
CAAKATGTASKLPF

SEQ ID NO: 66174 - protein, 17 aa, Homo sapiens
  CDR3 for beta chain variable domain of TCR clone 33087 (TRBV7-3, TRBJ2-3)
RASSLMKRMRGADTQYF

SEQ ID NO: 66175 - protein, 11 aa, Homo sapiens
  CDR3 for alpha chain variable domain of TCR clone 33088 (TRAV12-1, TRAJ30)
CVVNGQDKIIF

SEQ ID NO: 66176 - protein, 14 aa, Homo sapiens
  CDR3 for beta chain variable domain of TCR clone 33088 (TRBV20-1, TRBJ2-7)
CSAKRGRSSYEQYF

SEQ ID NO: 66177 - protein, 17 aa, Homo sapiens
  CDR3 for alpha chain variable domain of TCR clone 33089 (TRAV3, TRAJ6)
CAVRDGPRAGGSYIPTL

SEQ ID NO: 66178 - protein, 13 aa, Homo sapiens
  CDR3 for beta chain variable domain of TCR clone 33089 (TRBV4-1, TRBJ2-2)
CASSQENTGELFF

SEQ ID NO: 66179 - protein, 16 aa, Homo sapiens
  CDR3 for alpha chain variable domain of TCR clone 33090 (TRAV12-3, TRAJ53)
CAMSPGSGGSNYKLTF

SEQ ID NO: 66180 - protein, 16 aa, Homo sapiens
  CDR3 for beta chain variable domain of TCR clone 33090 (TRBV7-9, TRBJ2-3)
CASSPWREVGTDTQYF

SEQ ID NO: 66181 - protein, 13 aa, Homo sapiens
  CDR3 for alpha chain variable domain of TCR clone 33091 (TRAV12-3, TRAJ43)
CAMIRPNNNDMRF

SEQ ID NO: 66182 - protein, 12 aa, Homo sapiens
  CDR3 for beta chain variable domain of TCR clone 33091 (TRBV11-2, TRBJ2-5)
CASSLGQETRYF

SEQ ID NO: 66183 - protein, 14 aa, Homo sapiens
  CDR3 for alpha chain variable domain of TCR clone 33092 (TRAV20, TRAJ17)
CAVQARAAGNKLTF

SEQ ID NO: 66184 - protein, 13 aa, Homo sapiens
  CDR3 for beta chain variable domain of TCR clone 33092 (TRBV19, TRBJ1-2)
CASSPTLNYGYTL

SEQ ID NO: 66185 - protein, 11 aa, Homo sapiens
  CDR3 for alpha chain variable domain of TCR clone 33093 (TRAV2, TRAJ13)
CASGGYQKVTF

SEQ ID NO: 66186 - protein, 15 aa, Homo sapiens
  CDR3 for beta chain variable domain of TCR clone 33093 (TRBV10-2, TRBJ2-6)
CASSEQGTGANVLTF

SEQ ID NO: 66187 - protein, 15 aa, Homo sapiens
  CDR3 for alpha chain variable domain of TCR clone 33094 (TRAV21, TRAJ53)
CATLNSGGSNYKLTF

SEQ ID NO: 66188 - protein, 13 aa, Homo sapiens
  CDR3 for beta chain variable domain of TCR clone 33094 (TRBV15, TRBJ1-6)
CATSGGLNSPLHF

SEQ ID NO: 66189 - protein, 15 aa, Homo sapiens
  CDR3 for alpha chain variable domain of TCR clone 33095 (TRAV12-2, TRAJ53)
CAVNGGGGSNYKLTF

SEQ ID NO: 66190 - protein, 13 aa, Homo sapiens
  CDR3 for beta chain variable domain of TCR clone 33095 (TRBV18, TRBJ2-7)
CQLTERGAYEQYF

SEQ ID NO: 66191 - protein, 13 aa, Homo sapiens
  CDR3 for alpha chain variable domain of TCR clone 33096 (TRAV2, TRAJ40)
CAVVTSGTYKYIF

SEQ ID NO: 66192 - protein, 15 aa, Homo sapiens
  CDR3 for beta chain variable domain of TCR clone 33096 (TRBV11-3, TRBJ2-3)
CASVKDGREGDTQYF

SEQ ID NO: 66193 - protein, 15 aa, Homo sapiens
  CDR3 for alpha chain variable domain of TCR clone 33097 (TRAV17, TRAJ57)
CATGPSQGGSKRLVF

SEQ ID NO: 66194 - protein, 16 aa, Homo sapiens
  CDR3 for beta chain variable domain of TCR clone 33097 (TRBV12-4, TRBJ1-5)
CASSRPVGGSNQPQHF

SEQ ID NO: 66195 - protein, 17 aa, Homo sapiens
  CDR3 for alpha chain variable domain of TCR clone 33098 (TRAV4, TRAJ42)
CLVGGLNYGGSQGNLIF

SEQ ID NO: 66196 - protein, 12 aa, Homo sapiens
  CDR3 for beta chain variable domain of TCR clone 33098 (TRBV20-1, TRBJ2-1)
CSAQYTYNEQFF

SEQ ID NO: 66197 - protein, 19 aa, Homo sapiens
  CDR3 for alpha chain variable domain of TCR clone 33099 (TRAV1-2, TRAJ26)
CLLPLCCERPDNYGQNFVF

SEQ ID NO: 66198 - protein, 13 aa, Homo sapiens
  CDR3 for beta chain variable domain of TCR clone 33099 (TRBV7-9, TRBJ1-2)
CASSLKQNYGYTF

SEQ ID NO: 66199 - protein, 14 aa, Homo sapiens
  CDR3 for alpha chain variable domain of TCR clone 33100 (TRAV12-2, TRAJ13)
CAVKKTGGYQKVTF

SEQ ID NO: 66200 - protein, 17 aa, Homo sapiens
  CDR3 for beta chain variable domain of TCR clone 33100 (TRBV25-1, TRBJ1-1)
CASSTPPAGAMNTEAFF

SEQ ID NO: 66201 - protein, 13 aa, Homo sapiens
  CDR3 for alpha chain variable domain of TCR clone 33101 (TRAV19, TRAJ57)
CALLQGGSEKLVF

SEQ ID NO: 66202 - protein, 16 aa, Homo sapiens
  CDR3 for beta chain variable domain of TCR clone 33101 (TRBV7-7, TRBJ2-3)
CASSPGTSGSTDTQYF

SEQ ID NO: 66203 - protein, 15 aa, Homo sapiens
  CDR3 for alpha chain variable domain of TCR clone 33102 (TRAV8-3, TRAJ21)
CAVGALPPPGVQILL

SEQ ID NO: 66204 - protein, 15 aa, Homo sapiens
  CDR3 for beta chain variable domain of TCR clone 33102 (TRBV7-8, TRBJ1-5)
CASSLERRGLEPQHF

SEQ ID NO: 66205 - protein, 12 aa, Homo sapiens
  CDR3 for alpha chain variable domain of TCR clone 33103 (TRAV27, TRAJ13)
CAGAGGYQKFTF

SEQ ID NO: 66206 - protein, 15 aa, Homo sapiens
  CDR3 for beta chain variable domain of TCR clone 33103 (TRBV20-1, TRBJ2-6)
CSARDRGPGANVLTF

SEQ ID NO: 66207 - protein, 11 aa, Homo sapiens
  CDR3 for alpha chain variable domain of TCR clone 33104 (TRAV1-2, TRAJ40)
CAVPGTYQYIF

SEQ ID NO: 66208 - protein, 16 aa, Homo sapiens
  CDR3 for beta chain variable domain of TCR clone 33104 (TRBV29-1, TRBJ2-7)
CSVEVVGTSGSYEQYF

SEQ ID NO: 66209 - protein, 17 aa, Homo sapiens
  CDR3 for alpha chain variable domain of TCR clone 33105 (TRAV26-1, TRAJ53)
CIVGVDDSGGSNYKLTF

SEQ ID NO: 66210 - protein, 15 aa, Homo sapiens
  CDR3 for beta chain variable domain of TCR clone 33105 (TRBV20-1, TRBJ2-7)
CSARVPAAYFYEQYF

SEQ ID NO: 66211 - protein, 17 aa, Homo sapiens
  CDR3 for alpha chain variable domain of TCR clone 33106 (TRAV13-2, TRAJ42)
CAEKGKNYGGSQGNPIF

SEQ ID NO: 66212 - protein, 16 aa, Homo sapiens
  CDR3 for beta chain variable domain of TCR clone 33106 (TRBV7-9, TRBJ2-1)
CASSLGTGWDYNEQFF

SEQ ID NO: 66213 - protein, 15 aa, Homo sapiens
  CDR3 for alpha chain variable domain of TCR clone 33107 (TRAV21, TRAJ38)
CAVRQDAGNNRKLIW

SEQ ID NO: 66214 - protein, 16 aa, Homo sapiens
  CDR3 for beta chain variable domain of TCR clone 33107 (TRBV4-2, TRBJ1-1)
CASRPLDGGGDTEAFF

SEQ ID NO: 66215 - protein, 14 aa, Homo sapiens
  CDR3 for alpha chain variable domain of TCR clone 33108 (TRAV20, TRAJ20)
CAVRRGYNDYKPSF

SEQ ID NO: 66216 - protein, 13 aa, Homo sapiens
  CDR3 for beta chain variable domain of TCR clone 33108 (TRBV19, TRBJ2-5)
CASSETAPETQYF

SEQ ID NO: 66217 - protein, 14 aa, Homo sapiens
  CDR3 for alpha chain variable domain of TCR clone 33109 (TRAV14/DV4, TRAJ49)
CAFNRYLTGNQFYF

SEQ ID NO: 66218 - protein, 13 aa, Homo sapiens
  CDR3 for beta chain variable domain of TCR clone 33109 (TRBV6-1, TRBJ1-1)
CASSRQGNTEAFF

SEQ ID NO: 66219 - protein, 11 aa, Homo sapiens
  CDR3 for alpha chain variable domain of TCR clone 33110 (TRAV23/DV6, TRAJ49)
CAARAGNQFYF

SEQ ID NO: 66220 - protein, 13 aa, Homo sapiens
  CDR3 for beta chain variable domain of TCR clone 33110 (TRBV20-1, TRBJ2-2)
CSASAAGTGELFF

SEQ ID NO: 66221 - protein, 14 aa, Homo sapiens
  CDR3 for alpha chain variable domain of TCR clone 33111 (TRAV26-1, TRAJ38)
CIADNAGNNRKLIW

SEQ ID NO: 66222 - protein, 13 aa, Homo sapiens
  CDR3 for beta chain variable domain of TCR clone 33111 (TRBV20-1, TRBJ1-1)
CSARVGGNTEAFF

SEQ ID NO: 66223 - protein, 15 aa, Homo sapiens
  CDR3 for alpha chain variable domain of TCR clone 33112 (TRAV26-1, TRAJ56)
CIVRVATGANSKLTF

SEQ ID NO: 66224 - protein, 15 aa, Homo sapiens
  CDR3 for beta chain variable domain of TCR clone 33112 (TRBV27, TRBJ2-7)
CAISPQREGQREQYF

SEQ ID NO: 66225 - protein, 14 aa, Homo sapiens
  CDR3 for alpha chain variable domain of TCR clone 33113 (TRAV16, TRAJ15)
CALSFNQAGTALIF

SEQ ID NO: 66226 - protein, 13 aa, Homo sapiens
  CDR3 for beta chain variable domain of TCR clone 33113 (TRBV7-9, TRBJ2-7)
CASSFAGAYEQYF

SEQ ID NO: 66227 - protein, 12 aa, Homo sapiens
  CDR3 for alpha chain variable domain of TCR clone 33114 (TRAV35, TRAJ39)
LAPNNAGNMLTL

SEQ ID NO: 66228 - protein, 13 aa, Homo sapiens
  CDR3 for beta chain variable domain of TCR clone 33114 (TRBV19, TRBJ1-3)
CASRLSLGNTIYF

SEQ ID NO: 66229 - protein, 12 aa, Homo sapiens
  CDR3 for alpha chain variable domain of TCR clone 33115 (TRAV13-2, TRAJ49)
CAETDTGNQFYF

SEQ ID NO: 66230 - protein, 13 aa, Homo sapiens
  CDR3 for beta chain variable domain of TCR clone 33115 (TRBV2, TRBJ2-1)
CASSIGTGLEQFF

SEQ ID NO: 66231 - protein, 14 aa, Homo sapiens
  CDR3 for alpha chain variable domain of TCR clone 33116 (TRAV38-1, TRAJ45)
CASHSGGGAEGLTF

SEQ ID NO: 66232 - protein, 13 aa, Homo sapiens
  CDR3 for beta chain variable domain of TCR clone 33116 (TRBV7-9, TRBJ2-2)
CASSSAGTGELFF

SEQ ID NO: 66233 - protein, 14 aa, Homo sapiens
  CDR3 for alpha chain variable domain of TCR clone 33117 (TRAV9-2, TRAJ39)
CALYIYNAGNMLTF

SEQ ID NO: 66234 - protein, 15 aa, Homo sapiens
  CDR3 for beta chain variable domain of TCR clone 33117 (TRBV28, TRBJ1-3)
CASSMGWASGNTMYF

SEQ ID NO: 66235 - protein, 12 aa, Homo sapiens
  CDR3 for alpha chain variable domain of TCR clone 33118 (TRAV12-2, TRAJ10)
CGVTGGGNKLTF

SEQ ID NO: 66236 - protein, 16 aa, Homo sapiens
  CDR3 for beta chain variable domain of TCR clone 33118 (TRBV6-4, TRBJ1-2)
CASSEAVGDPNYGYTF

SEQ ID NO: 66237 - protein, 10 aa, Homo sapiens
  CDR3 for alpha chain variable domain of TCR clone 33119 (TRAV26-1, TRAJ22)
RSSSARQLTF

SEQ ID NO: 66238 - protein, 13 aa, Homo sapiens
  CDR3 for beta chain variable domain of TCR clone 33119 (TRBV7-9, TRBJ1-2)
CASSLKQNYGYTF

SEQ ID NO: 66239 - protein, 12 aa, Homo sapiens
  CDR3 for alpha chain variable domain of TCR clone 33120 (TRAV4, TRAJ26)
CLVGDYGQNFVF

SEQ ID NO: 66240 - protein, 16 aa, Homo sapiens
  CDR3 for beta chain variable domain of TCR clone 33120 (TRBV2, TRBJ1-4)
CASNLLQGATNEKLFF

SEQ ID NO: 66241 - protein, 12 aa, Homo sapiens
  CDR3 for alpha chain variable domain of TCR clone 33121 (TRAV23/DV6, TRAJ33)
CAAEDSNYQLIW

SEQ ID NO: 66242 - protein, 15 aa, Homo sapiens
  CDR3 for beta chain variable domain of TCR clone 33121 (TRBV7-2, TRBJ2-1)
CASSSGLAGGNEQFF

SEQ ID NO: 66243 - protein, 12 aa, Homo sapiens
  CDR3 for alpha chain variable domain of TCR clone 33122 (TRAV13-1, TRAJ21)
CAAKEGFNKFYF

SEQ ID NO: 66244 - protein, 15 aa, Homo sapiens
  CDR3 for beta chain variable domain of TCR clone 33122 (TRBV2, TRBJ2-1)
CTSSELAGSYNEQFF

SEQ ID NO: 66245 - protein, 14 aa, Homo sapiens
  CDR3 for alpha chain variable domain of TCR clone 33123 (TRAV12-3, TRAJ10)
SHLPLTGGGNKLTF

SEQ ID NO: 66246 - protein, 16 aa, Homo sapiens
  CDR3 for beta chain variable domain of TCR clone 33123 (TRBV4-3, TRBJ2-2)
CASSHLQGSGTGELFF

SEQ ID NO: 66247 - protein, 13 aa, Homo sapiens
  CDR3 for alpha chain variable domain of TCR clone 33124 (TRAV21, TRAJ27)
CAARRGNAGKSTF

SEQ ID NO: 66248 - protein, 14 aa, Homo sapiens
  CDR3 for beta chain variable domain of TCR clone 33124 (TRBV7-6, TRBJ2-3)
CASSLGTVTDTQYF

SEQ ID NO: 66249 - protein, 14 aa, Homo sapiens
  CDR3 for alpha chain variable domain of TCR clone 33125 (TRAV12-3, TRAJ15)
CAMIPPQAGTALIF

SEQ ID NO: 66250 - protein, 12 aa, Homo sapiens
  CDR3 for beta chain variable domain of TCR clone 33125 (TRBV11-2, TRBJ2-2)
CASSLGGGELFL

SEQ ID NO: 66251 - protein, 16 aa, Homo sapiens
  CDR3 for alpha chain variable domain of TCR clone 33126 (TRAV8-3, TRAJ8)
CAVPRDGNTGFQKLVF

SEQ ID NO: 66252 - protein, 14 aa, Homo sapiens
  CDR3 for beta chain variable domain of TCR clone 33126 (TRBV4-1, TRBJ2-2)
CASSQAANTGELFF

SEQ ID NO: 66253 - protein, 13 aa, Homo sapiens
  CDR3 for alpha chain variable domain of TCR clone 33127 (TRAV21, TRAJ20)
CAVGLRVDYKLSF

SEQ ID NO: 66254 - protein, 13 aa, Homo sapiens
  CDR3 for beta chain variable domain of TCR clone 33127 (TRBV20-1, TRBJ1-1)
CSARGGGNTEAFF

SEQ ID NO: 66255 - protein, 14 aa, Homo sapiens
  CDR3 for alpha chain variable domain of TCR clone 33128 (TRAV30, TRAJ33)
CGTVAPRNNYQLIW

SEQ ID NO: 66256 - protein, 14 aa, Homo sapiens
  CDR3 for beta chain variable domain of TCR clone 33128 (TRBV19, TRBJ2-1)
CASPTFVLSGEQFF

SEQ ID NO: 66257 - protein, 14 aa, Homo sapiens
  CDR3 for alpha chain variable domain of TCR clone 33129 (TRAV1-2, TRAJ16)
CAVNRFSDGQKLLF

SEQ ID NO: 66258 - protein, 17 aa, Homo sapiens
  CDR3 for beta chain variable domain of TCR clone 33129 (TRBV28, TRBJ2-5)
RASSTPEGDALQETQYF

SEQ ID NO: 66259 - protein, 17 aa, Homo sapiens
  CDR3 for alpha chain variable domain of TCR clone 33130 (TRAV35, TRAJ38)
CAGQLQRNAGNNRKLIW

SEQ ID NO: 66260 - protein, 15 aa, Homo sapiens
  CDR3 for beta chain variable domain of TCR clone 33130 (TRBV7-9, TRBJ2-1)
CASSLGLAGGTEQLF

SEQ ID NO: 66261 - protein, 11 aa, Homo sapiens
  CDR3 for alpha chain variable domain of TCR clone 33131 (TRAV1-2, TRAJ31)
CAVNNNARLMF

SEQ ID NO: 66262 - protein, 15 aa, Homo sapiens
  CDR3 for beta chain variable domain of TCR clone 33131 (TRBV28, TRBJ2-1)
CASSIVAGGRSEQFF

SEQ ID NO: 66263 - protein, 15 aa, Homo sapiens
  CDR3 for alpha chain variable domain of TCR clone 33132 (TRAV21, TRAJ13)
CAVPRSFWGLPESCL

SEQ ID NO: 66264 - protein, 15 aa, Homo sapiens
  CDR3 for beta chain variable domain of TCR clone 33132 (TRBV27, TRBJ2-5)
CASSLYPRGGETQYF

SEQ ID NO: 66265 - protein, 15 aa, Homo sapiens
  CDR3 for alpha chain variable domain of TCR clone 33133 (TRAV26-1, TRAJ22)
CIVRVSFWFCKATDL

SEQ ID NO: 66266 - protein, 13 aa, Homo sapiens
  CDR3 for beta chain variable domain of TCR clone 33133 (TRBV7-9, TRBJ1-2)
CASSSKQNYGYTF

SEQ ID NO: 66267 - protein, 15 aa, Homo sapiens
  CDR3 for alpha chain variable domain of TCR clone 33134 (TRAV38-1, TRAJ37)
CAFIFGSGNTGKLIF

SEQ ID NO: 66268 - protein, 15 aa, Homo sapiens
  CDR3 for beta chain variable domain of TCR clone 33134 (TRBV7-9, TRBJ1-1)
CASSLLEQGGTEAFF

SEQ ID NO: 66269 - protein, 12 aa, Homo sapiens
  CDR3 for alpha chain variable domain of TCR clone 33135 (TRAV30, TRAJ43)
CGTEEGGSDMRF

SEQ ID NO: 66270 - protein, 11 aa, Homo sapiens
  CDR3 for beta chain variable domain of TCR clone 33135 (TRBV29-1, TRBJ2-5)
CSEDRTGTQYF

SEQ ID NO: 66271 - protein, 15 aa, Homo sapiens
  CDR3 for alpha chain variable domain of TCR clone 33136 (TRAV17, TRAJ56)
CATEPFTGANSKLTF

SEQ ID NO: 66272 - protein, 15 aa, Homo sapiens
  CDR3 for beta chain variable domain of TCR clone 33136 (TRBV28, TRBJ1-5)
CASSRTGGYAQPQHF

SEQ ID NO: 66273 - protein, 11 aa, Homo sapiens
  CDR3 for alpha chain variable domain of TCR clone 33137 (TRAV17, TRAJ9)
CGFTGGFKTIF

SEQ ID NO: 66274 - protein, 17 aa, Homo sapiens
  CDR3 for beta chain variable domain of TCR clone 33137 (TRBV7-3, TRBJ2-3)
CASSLMKRMRGADTQYF

SEQ ID NO: 66275 - protein, 16 aa, Homo sapiens
  CDR3 for alpha chain variable domain of TCR clone 33138 (TRAV21, TRAJ45)
CAVSWGSGGGADGLTF

SEQ ID NO: 66276 - protein, 14 aa, Homo sapiens
  CDR3 for beta chain variable domain of TCR clone 33138 (TRBV4-2, TRBJ1-2)
CASSPGGSNYGDTF

SEQ ID NO: 66277 - protein, 15 aa, Homo sapiens
  CDR3 for alpha chain variable domain of TCR clone 33139 (TRAV1-2, TRAJ30)
CAVRPHGNRDDKIIL

SEQ ID NO: 66278 - protein, 13 aa, Homo sapiens
  CDR3 for beta chain variable domain of TCR clone 33139 (TRBV4-1, TRBJ2-7)
CASSQGQAYEQYF

SEQ ID NO: 66279 - protein, 12 aa, Homo sapiens
  CDR3 for alpha chain variable domain of TCR clone 33140 (TRAV3, TRAJ7)
CADLLWEQQTRF

SEQ ID NO: 66280 - protein, 13 aa, Homo sapiens
  CDR3 for beta chain variable domain of TCR clone 33140 (TRBV7-3, TRBJ2-5)
CASGFRGGETQYF

SEQ ID NO: 66281 - protein, 13 aa, Homo sapiens
  CDR3 for alpha chain variable domain of TCR clone 33141 (TRAV2, TRAJ40)
CAVVTSGTYKYIF

SEQ ID NO: 66282 - protein, 14 aa, Homo sapiens
  CDR3 for beta chain variable domain of TCR clone 33141 (TRBV19, TRBJ2-1)
CASPTFVLSSEQLF

SEQ ID NO: 66283 - protein, 13 aa, Homo sapiens
  CDR3 for alpha chain variable domain of TCR clone 33142 (TRAV21, TRAJ27)
CAARPGNAGKSTL

SEQ ID NO: 66284 - protein, 14 aa, Homo sapiens
  CDR3 for beta chain variable domain of TCR clone 33142 (TRBV7-6, TRBJ2-3)
CASGLGTVTDTQYF

SEQ ID NO: 66285 - protein, 14 aa, Homo sapiens
  CDR3 for alpha chain variable domain of TCR clone 33143 (TRAV12-3, TRAJ41)
CAMSAGNSGYALNF

SEQ ID NO: 66286 - protein, 11 aa, Homo sapiens
  CDR3 for beta chain variable domain of TCR clone 33143 (TRBV7-2, TRBJ2-3)
CVSSSSDTQYF

SEQ ID NO: 66287 - protein, 15 aa, Homo sapiens
  CDR3 for alpha chain variable domain of TCR clone 33144 (TRAV14/DV4, TRAJ36)
CAMREPQTGANNLFF

SEQ ID NO: 66288 - protein, 18 aa, Homo sapiens
  CDR3 for beta chain variable domain of TCR clone 33144 (TRBV4-1, TRBJ1-5)
CASSQDPRGQGLNQPQHF

SEQ ID NO: 66289 - protein, 14 aa, Homo sapiens
  CDR3 for alpha chain variable domain of TCR clone 33145 (TRAV1-2, TRAJ8)
CAVREDTGFQKLVF

SEQ ID NO: 66290 - protein, 18 aa, Homo sapiens
  CDR3 for beta chain variable domain of TCR clone 33145 (TRBV4-1, TRBJ1-5)
CASSQDPRGQGLNQPQHF

SEQ ID NO: 66291 - protein, 14 aa, Homo sapiens
  CDR3 for alpha chain variable domain of TCR clone 33146 (TRAV2, TRAJ39)
RAVEGDNAGNMLTF

SEQ ID NO: 66292 - protein, 14 aa, Homo sapiens
  CDR3 for beta chain variable domain of TCR clone 33146 (TRBV28, TRBJ2-7)
CASSLRARGNEQYF

SEQ ID NO: 66293 - protein, 14 aa, Homo sapiens
  CDR3 for alpha chain variable domain of TCR clone 33147 (TRAV8-4, TRAJ9)
CAVRINTGGFKTIF

SEQ ID NO: 66294 - protein, 15 aa, Homo sapiens
  CDR3 for beta chain variable domain of TCR clone 33147 (TRBV10-2, TRBJ2-6)
CASSEKGTGANVLTF

SEQ ID NO: 66295 - protein, 12 aa, Homo sapiens
  CDR3 for alpha chain variable domain of TCR clone 33148 (TRAV13-1, TRAJ53)
AASGGSNYKLTL

SEQ ID NO: 66296 - protein, 15 aa, Homo sapiens
  CDR3 for beta chain variable domain of TCR clone 33148 (TRBV5-1, TRBJ2-1)
CASSPPRAPYNEQFF

SEQ ID NO: 66297 - protein, 11 aa, Homo sapiens
  CDR3 for alpha chain variable domain of TCR clone 33149 (TRAV21, TRAJ48)
CAVDGNEKLTF

SEQ ID NO: 66298 - protein, 14 aa, Homo sapiens
  CDR3 for beta chain variable domain of TCR clone 33149 (TRBV25-1, TRBJ1-1)
CASTHLGGNTEAFF

SEQ ID NO: 66299 - protein, 14 aa, Homo sapiens
  CDR3 for alpha chain variable domain of TCR clone 33150 (TRAV1-2, TRAJ16)
CAVNRFSDGQKLLF

SEQ ID NO: 66300 - protein, 13 aa, Homo sapiens
  CDR3 for beta chain variable domain of TCR clone 33150 (TRBV7-7, TRBJ2-5)
CASSRSGQETQYF

SEQ ID NO: 66301 - protein, 10 aa, Homo sapiens
  CDR3 for alpha chain variable domain of TCR clone 33151 (TRAV1-1, TRAJ26)
CAVNGQNFVF

SEQ ID NO: 66302 - protein, 15 aa, Homo sapiens
  CDR3 for beta chain variable domain of TCR clone 33151 (TRBV9, TRBJ1-6)
CACSVAGTGDSPLHF

SEQ ID NO: 66303 - protein, 18 aa, Homo sapiens
  CDR3 for alpha chain variable domain of TCR clone 33152 (TRAV13-1, TRAJ52)
CTASKRSAGGTSYGKLTF

SEQ ID NO: 66304 - protein, 13 aa, Homo sapiens
  CDR3 for beta chain variable domain of TCR clone 33152 (TRBV12-4, TRBJ1-2)
CASSLRQGKGYTF

SEQ ID NO: 66305 - protein, 14 aa, Homo sapiens
  CDR3 for alpha chain variable domain of TCR clone 33153 (TRAV12-3, TRAJ54)
CAMRGIQGAQKLVF

SEQ ID NO: 66306 - protein, 15 aa, Homo sapiens
  CDR3 for beta chain variable domain of TCR clone 33153 (TRBV6-1, TRBJ2-6)
CASSSRPSGANVLTF

SEQ ID NO: 66307 - protein, 12 aa, Homo sapiens
  CDR3 for alpha chain variable domain of TCR clone 33154 (TRAV8-3, TRAJ26)
CAGDNYGQNFVF

SEQ ID NO: 66308 - protein, 15 aa, Homo sapiens
  CDR3 for beta chain variable domain of TCR clone 33154 (TRBV9, TRBJ2-1)
CASSLAGSSYNEQFV

SEQ ID NO: 66309 - protein, 18 aa, Homo sapiens
  CDR3 for alpha chain variable domain of TCR clone 33155 (TRAV21, TRAJ52)
CAVRPSPAGGTSHGKLTF

SEQ ID NO: 66310 - protein, 13 aa, Homo sapiens
  CDR3 for beta chain variable domain of TCR clone 33155 (TRBV10-3, TRBJ2-1)
CAISEFSGREQFF

SEQ ID NO: 66311 - protein, 14 aa, Homo sapiens
  CDR3 for alpha chain variable domain of TCR clone 33156 (TRAV35, TRAJ13)
CAGSPSVGYQKVTF

SEQ ID NO: 66312 - protein, 13 aa, Homo sapiens
  CDR3 for beta chain variable domain of TCR clone 33156 (TRBV29-1, TRBJ1-1)
CSVGDSRNTEAFF

SEQ ID NO: 66313 - protein, 11 aa, Homo sapiens
  CDR3 for alpha chain variable domain of TCR clone 33157 (TRAV1-1, TRAJ23)
CAVRQGGKLIF

SEQ ID NO: 66314 - protein, 19 aa, Homo sapiens
  CDR3 for beta chain variable domain of TCR clone 33157 (TRBV7-8, TRBJ2-2)
CQQPFISRADYPYHRELFF

SEQ ID NO: 66315 - protein, 15 aa, Homo sapiens
  CDR3 for alpha chain variable domain of TCR clone 33158 (TRAV26-1, TRAJ29)
CIVRVEGSGNTPLVF

SEQ ID NO: 66316 - protein, 14 aa, Homo sapiens
  CDR3 for beta chain variable domain of TCR clone 33158 (TRBV7-9, TRBJ1-5)
CQQPRSPANQPQHF

SEQ ID NO: 66317 - protein, 13 aa, Homo sapiens
  CDR3 for alpha chain variable domain of TCR clone 33159 (TRAV12-2, TRAJ39)
CAVNNNAGNMLTF

SEQ ID NO: 66318 - protein, 13 aa, Homo sapiens
  CDR3 for beta chain variable domain of TCR clone 33159 (TRBV7-3, TRBJ2-1)
CQQPGGGGNEQFF

SEQ ID NO: 66319 - protein, 14 aa, Homo sapiens
  CDR3 for alpha chain variable domain of TCR clone 33160 (TRAV12-1, TRAJ17)
CVVNYKAAGNKLTF

SEQ ID NO: 66320 - protein, 17 aa, Homo sapiens
  CDR3 for beta chain variable domain of TCR clone 33160 (TRBV20-1, TRBJ2-1)
CSGSSSGLAGSYNEQFF

SEQ ID NO: 66321 - protein, 15 aa, Homo sapiens
  CDR3 for alpha chain variable domain of TCR clone 33161 (TRAV12-1, TRAJ5)
CVVNMLETGRRALTF

SEQ ID NO: 66322 - protein, 14 aa, Homo sapiens
  CDR3 for beta chain variable domain of TCR clone 33161 (TRBV12-4, TRBJ1-1)
CASRPGQGRTEAFF

SEQ ID NO: 66323 - protein, 11 aa, Homo sapiens
  CDR3 for alpha chain variable domain of TCR clone 33162 (TRAV12-3, TRAJ43)
SAMSVSNDMRF

SEQ ID NO: 66324 - protein, 16 aa, Homo sapiens
  CDR3 for beta chain variable domain of TCR clone 33162 (TRBV20-1, TRBJ2-1)
CSARDSLGAVYNEQFF

SEQ ID NO: 66325 - protein, 13 aa, Homo sapiens
  CDR3 for alpha chain variable domain of TCR clone 33163 (TRAV21, TRAJ27)
CAARPGNAGKSTF

SEQ ID NO: 66326 - protein, 15 aa, Homo sapiens
  CDR3 for beta chain variable domain of TCR clone 33163 (TRBV7-9, TRBJ1-5)
CASSQGHQPNQPQHF

SEQ ID NO: 66327 - protein, 13 aa, Homo sapiens
  CDR3 for alpha chain variable domain of TCR clone 33164 (TRAV8-6, TRAJ50)
CAVIKTSYDKGIF

SEQ ID NO: 66328 - protein, 15 aa, Homo sapiens
  CDR3 for beta chain variable domain of TCR clone 33164 (TRBV7-2, TRBJ2-2)
CASRRPGQNTGELFF

SEQ ID NO: 66329 - protein, 15 aa, Homo sapiens
  CDR3 for alpha chain variable domain of TCR clone 33165 (TRAV29/DV5, TRAJ29)
FAASERSSGNTPLVF

SEQ ID NO: 66330 - protein, 17 aa, Homo sapiens
  CDR3 for beta chain variable domain of TCR clone 33165 (TRBV4-1, TRBJ1-4)
CASSQEGPRGVEEKLFF

SEQ ID NO: 66331 - protein, 13 aa, Homo sapiens
  CDR3 for alpha chain variable domain of TCR clone 33166 (TRAV8-1, TRAJ28)
CAVSGAGGYQLTF

SEQ ID NO: 66332 - protein, 14 aa, Homo sapiens
  CDR3 for beta chain variable domain of TCR clone 33166 (TRBV7-2, TRBJ2-2)
CASRGQGAAGELFF

SEQ ID NO: 66333 - protein, 14 aa, Homo sapiens
  CDR3 for alpha chain variable domain of TCR clone 33167 (TRAV3, TRAJ9)
CAVRGNTGGFKTIF

SEQ ID NO: 66334 - protein, 14 aa, Homo sapiens
  CDR3 for beta chain variable domain of TCR clone 33167 (TRBV15, TRBJ2-1)
CATSGAEDYNEQFF

SEQ ID NO: 66335 - protein, 14 aa, Homo sapiens
  CDR3 for alpha chain variable domain of TCR clone 33168 (TRAV12-1, TRAJ9)
CVVNRRTGGFKTIF

SEQ ID NO: 66336 - protein, 17 aa, Homo sapiens
  CDR3 for beta chain variable domain of TCR clone 33168 (TRBV20-1, TRBJ2-1)
CSASSSGLAGSYNEQFF

SEQ ID NO: 66337 - protein, 14 aa, Homo sapiens
  CDR3 for alpha chain variable domain of TCR clone 33169 (TRAV12-1, TRAJ30)
CVVNIGGRNDKIIF

SEQ ID NO: 66338 - protein, 14 aa, Homo sapiens
  CDR3 for beta chain variable domain of TCR clone 33169 (TRBV20-1, TRBJ2-1)
CSAQIGGSANEQFF

SEQ ID NO: 66339 - protein, 15 aa, Homo sapiens
  CDR3 for alpha chain variable domain of TCR clone 33170 (TRAV3, TRAJ5)
CAVRDLDTGRRALTF

SEQ ID NO: 66340 - protein, 13 aa, Homo sapiens
  CDR3 for beta chain variable domain of TCR clone 33170 (TRBV20-1, TRBJ2-5)
CSARDSKQATQHF

SEQ ID NO: 66341 - protein, 15 aa, Homo sapiens
  CDR3 for alpha chain variable domain of TCR clone 33171 (TRAV17, TRAJ52)
CATEAGGTSYGKLTF

SEQ ID NO: 66342 - protein, 16 aa, Homo sapiens
  CDR3 for beta chain variable domain of TCR clone 33171 (TRBV20-1, TRBJ2-1)
CSAGGPAGGPYNEQFF

SEQ ID NO: 66343 - protein, 14 aa, Homo sapiens
  CDR3 for alpha chain variable domain of TCR clone 33172 (TRAV1-2, TRAJ16)
CAVNRFSDGQKLLF

SEQ ID NO: 66344 - protein, 16 aa, Homo sapiens
  CDR3 for beta chain variable domain of TCR clone 33172 (TRBV20-1, TRBJ1-4)
RSAPGQGSLTNEKLFF

SEQ ID NO: 66345 - protein, 14 aa, Homo sapiens
  CDR3 for alpha chain variable domain of TCR clone 33173 (TRAV17, TRAJ39)
CATDPVRASNMLTF

SEQ ID NO: 66346 - protein, 15 aa, Homo sapiens
  CDR3 for beta chain variable domain of TCR clone 33173 (TRBV13, TRBJ1-5)
CASSFGQGGVQPQHF

SEQ ID NO: 66347 - protein, 11 aa, Homo sapiens
  CDR3 for alpha chain variable domain of TCR clone 33174 (TRAV1-2, TRAJ31)
CAVNNNARLMF

SEQ ID NO: 66348 - protein, 15 aa, Homo sapiens
  CDR3 for beta chain variable domain of TCR clone 33174 (TRBV28, TRBJ2-1)
CTSSIIAGGRSEQFF

SEQ ID NO: 66349 - protein, 13 aa, Homo sapiens
  CDR3 for alpha chain variable domain of TCR clone 33175 (TRAV27, TRAJ45)
CRSSGGGADGLTF

SEQ ID NO: 66350 - protein, 14 aa, Homo sapiens
  CDR3 for beta chain variable domain of TCR clone 33175 (TRBV4-3, TRBJ1-5)
CASSQGGQGWPQHF

SEQ ID NO: 66351 - protein, 15 aa, Homo sapiens
  CDR3 for alpha chain variable domain of TCR clone 33176 (TRAV14/DV4, TRAJ26)
CAMREGQNYGQNFVF

SEQ ID NO: 66352 - protein, 13 aa, Homo sapiens
  CDR3 for beta chain variable domain of TCR clone 33176 (TRBV24-1, TRBJ2-2)
CATSGWSTGELFF

SEQ ID NO: 66353 - protein, 13 aa, Homo sapiens
  CDR3 for alpha chain variable domain of TCR clone 33177 (TRAV2, TRAJ15)
CAVASQAGTALIF

SEQ ID NO: 66354 - protein, 14 aa, Homo sapiens
  CDR3 for beta chain variable domain of TCR clone 33177 (TRBV5-1, TRBJ2-7)
CASSRGESLYEHYF

SEQ ID NO: 66355 - protein, 17 aa, Homo sapiens
  CDR3 for alpha chain variable domain of TCR clone 33178 (TRAV3, TRAJ6)
CAVRDGPRAGGSYIPTF

SEQ ID NO: 66356 - protein, 14 aa, Homo sapiens
  CDR3 for beta chain variable domain of TCR clone 33178 (TRBV7-2, TRBJ2-7)
CASSPKTCFYEQYF

SEQ ID NO: 66357 - protein, 12 aa, Homo sapiens
  CDR3 for alpha chain variable domain of TCR clone 33179 (TRAV1-1, TRAJ8)
CAGGAGFQKLVF

SEQ ID NO: 66358 - protein, 15 aa, Homo sapiens
  CDR3 for beta chain variable domain of TCR clone 33179 (TRBV20-1, TRBJ2-7)
CSARDRVSGMDEQYF

SEQ ID NO: 66359 - protein, 16 aa, Homo sapiens
  CDR3 for alpha chain variable domain of TCR clone 33180 (TRAV27, TRAJ13)
CAGAKSDYGGYQKVTF

SEQ ID NO: 66360 - protein, 15 aa, Homo sapiens
  CDR3 for beta chain variable domain of TCR clone 33180 (TRBV29-1, TRBJ2-1)
CSVGRHALFYNEQFF

SEQ ID NO: 66361 - protein, 12 aa, Homo sapiens
  CDR3 for alpha chain variable domain of TCR clone 33181 (TRAV21, TRAJ31)
CVLAGNNARLMF

SEQ ID NO: 66362 - protein, 15 aa, Homo sapiens
  CDR3 for beta chain variable domain of TCR clone 33181 (TRBV7-9, TRBJ1-4)
CASSARTGGNEKLFF

SEQ ID NO: 66363 - protein, 17 aa, Homo sapiens
  CDR3 for alpha chain variable domain of TCR clone 33182 (TRAV23/DV6, TRAJ57)
CAASSTLSLGGSEKLVF

SEQ ID NO: 66364 - protein, 14 aa, Homo sapiens
  CDR3 for beta chain variable domain of TCR clone 33182 (TRBV25-1, TRBJ1-1)
CASTHLGGNTEAFF

SEQ ID NO: 66365 - protein, 17 aa, Homo sapiens
  CDR3 for alpha chain variable domain of TCR clone 33183 (TRAV13-1, TRAJ52)
CAASSGAGGTSYGKLTF

SEQ ID NO: 66366 - protein, 17 aa, Homo sapiens
  CDR3 for beta chain variable domain of TCR clone 33183 (TRBV11-2, TRBJ2-1)
CASSLCPPGVEYNEQFF

SEQ ID NO: 66367 - protein, 12 aa, Homo sapiens
  CDR3 for alpha chain variable domain of TCR clone 33184 (TRAV29/DV5, TRAJ15)
CASNQAGTSLIF

SEQ ID NO: 66368 - protein, 15 aa, Homo sapiens
  CDR3 for beta chain variable domain of TCR clone 33184 (TRBV11-2, TRBJ2-2)
CASSSDRVNAGELFF

SEQ ID NO: 66369 - protein, 15 aa, Homo sapiens
  CDR3 for alpha chain variable domain of TCR clone 33185 (TRAV12-2, TRAJ53)
CAVNGGGGSNYKLTF

SEQ ID NO: 66370 - protein, 16 aa, Homo sapiens
  CDR3 for beta chain variable domain of TCR clone 33185 (TRBV2, TRBJ2-1)
CASSVGGSLSYNEQFF

SEQ ID NO: 66371 - protein, 15 aa, Homo sapiens
  CDR3 for alpha chain variable domain of TCR clone 33186 (TRAV14/DV4, TRAJ12)
CAMREGRDSSYKLIF

SEQ ID NO: 66372 - protein, 15 aa, Homo sapiens
  CDR3 for beta chain variable domain of TCR clone 33186 (TRBV4-1, TRBJ1-4)
CASSDTGGTNEKLFF

SEQ ID NO: 66373 - protein, 12 aa, Homo sapiens
  CDR3 for alpha chain variable domain of TCR clone 33187 (TRAV9-2, TRAJ36)
CALKKGANNLFF

SEQ ID NO: 66374 - protein, 13 aa, Homo sapiens
  CDR3 for beta chain variable domain of TCR clone 33187 (TRBV27, TRBJ1-1)
CAGSLSIGAEAFF

SEQ ID NO: 66375 - protein, 14 aa, Homo sapiens
  CDR3 for alpha chain variable domain of TCR clone 33188 (TRAV13-1, TRAJ26)
CAASSAHYGQNFVF

SEQ ID NO: 66376 - protein, 17 aa, Homo sapiens
  CDR3 for beta chain variable domain of TCR clone 33188 (TRBV25-1, TRBJ2-5)
CASSRGGGRGGQETQYF

SEQ ID NO: 66377 - protein, 14 aa, Homo sapiens
  CDR3 for alpha chain variable domain of TCR clone 33189 (TRAV12-2, TRAJ5)
CAVNRSTGRRVLTF

SEQ ID NO: 66378 - protein, 12 aa, Homo sapiens
  CDR3 for beta chain variable domain of TCR clone 33189 (TRBV19, TRBJ1-5)
CASSIAQQPQHF

SEQ ID NO: 66379 - protein, 15 aa, Homo sapiens
  CDR3 for alpha chain variable domain of TCR clone 33190 (TRAV17, TRAJ22)
CATVAPSGSARKLTF

SEQ ID NO: 66380 - protein, 15 aa, Homo sapiens
  CDR3 for beta chain variable domain of TCR clone 33190 (TRBV11-3, TRBJ2-3)
CASLKDGREGDTQYF

SEQ ID NO: 66381 - protein, 15 aa, Homo sapiens
  CDR3 for alpha chain variable domain of TCR clone 33191 (TRAV8-3, TRAJ41)
CAVGSSSNSGYALNF

SEQ ID NO: 66382 - protein, 17 aa, Homo sapiens
  CDR3 for beta chain variable domain of TCR clone 33191 (TRBV25-1, TRBJ2-1)
CASSAYGQGRGVYEQFF

SEQ ID NO: 66383 - protein, 14 aa, Homo sapiens
  CDR3 for alpha chain variable domain of TCR clone 33192 (TRAV1-2, TRAJ8)
CAVREDTGFQKLVF

SEQ ID NO: 66384 - protein, 15 aa, Homo sapiens
  CDR3 for beta chain variable domain of TCR clone 33192 (TRBV29-1, TRBJ2-1)
CSVPTGLALYNEQSF

SEQ ID NO: 66385 - protein, 15 aa, Homo sapiens
  CDR3 for alpha chain variable domain of TCR clone 33193 (TRAV12-1, TRAJ42)
CVGTRDGGSQGNLIF

SEQ ID NO: 66386 - protein, 14 aa, Homo sapiens
  CDR3 for beta chain variable domain of TCR clone 33193 (TRBV11-2, TRBJ2-3)
CASSLGGGANTQYF

SEQ ID NO: 66387 - protein, 15 aa, Homo sapiens
  CDR3 for alpha chain variable domain of TCR clone 33194 (TRAV12-3, TRAJ10)
CASYILTGGGNKLTF

SEQ ID NO: 66388 - protein, 15 aa, Homo sapiens
  CDR3 for beta chain variable domain of TCR clone 33194 (TRBV7-2, TRBJ1-6)
CASSLGPDRGRPLHF

SEQ ID NO: 66389 - protein, 16 aa, Homo sapiens
  CDR3 for alpha chain variable domain of TCR clone 33195 (TRAV30, TRAJ24)
CGTEIVDADSWGKLQF

SEQ ID NO: 66390 - protein, 14 aa, Homo sapiens
  CDR3 for beta chain variable domain of TCR clone 33195 (TRBV12-5, TRBJ2-5)
CASGSRTHQGTQYF

SEQ ID NO: 66391 - protein, 16 aa, Homo sapiens
  CDR3 for alpha chain variable domain of TCR clone 33196 (TRAV13-1, TRAJ37)
CAASSLGSNNTGKLIF

SEQ ID NO: 66392 - protein, 12 aa, Homo sapiens
  CDR3 for beta chain variable domain of TCR clone 33196 (TRBV6-1, TRBJ2-5)
CASSEGRETQYF

SEQ ID NO: 66393 - protein, 14 aa, Homo sapiens
  CDR3 for alpha chain variable domain of TCR clone 33197 (TRAV8-4, TRAJ9)
CAVRINTGGFKTIF

SEQ ID NO: 66394 - protein, 15 aa, Homo sapiens
  CDR3 for beta chain variable domain of TCR clone 33197 (TRBV10-2, TRBJ2-6)
CAGSEQGTGANVLTF

SEQ ID NO: 66395 - protein, 23 aa, Homo sapiens
  CDR3 for alpha chain variable domain of TCR clone 33198 (TRAV26-1, TRAJ38)
CVADNAGNNHIQNPDPAVYQLRD

SEQ ID NO: 66396 - protein, 13 aa, Homo sapiens
  CDR3 for beta chain variable domain of TCR clone 33198 (TRBV20-1, TRBJ1-1)
CSARGGGNTEAFF

SEQ ID NO: 66397 - protein, 14 aa, Homo sapiens
  CDR3 for alpha chain variable domain of TCR clone 33199 (TRAV12-2, TRAJ40)
CAVKIPSGTYKYIF

SEQ ID NO: 66398 - protein, 17 aa, Homo sapiens
  CDR3 for beta chain variable domain of TCR clone 33199 (TRBV13, TRBJ2-3)
CASSLARVAGGRNTQYF

SEQ ID NO: 66399 - protein, 12 aa, Homo sapiens
  CDR3 for alpha chain variable domain of TCR clone 33200 (TRAV12-2, TRAJ10)
WGVTGGGNKLTF

SEQ ID NO: 66400 - protein, 14 aa, Homo sapiens
  CDR3 for beta chain variable domain of TCR clone 33200 (TRBV7-6, TRBJ2-3)
CASSLGTVTDTQYF

SEQ ID NO: 66401 - protein, 15 aa, Homo sapiens
  CDR3 for alpha chain variable domain of TCR clone 33201 (TRAV12-1, TRAJ44)
CVADLPNGTASKLTF

SEQ ID NO: 66402 - protein, 13 aa, Homo sapiens
  CDR3 for beta chain variable domain of TCR clone 33201 (TRBV6-5, TRBJ2-5)
CASSPQGGETQYF

SEQ ID NO: 66403 - protein, 16 aa, Homo sapiens
  CDR3 for alpha chain variable domain of TCR clone 33202 (TRAV30, TRAJ24)
CGTEIVDAGSWGKFQF

SEQ ID NO: 66404 - protein, 14 aa, Homo sapiens
  CDR3 for beta chain variable domain of TCR clone 33202 (TRBV7-9, TRBJ2-4)
CASSLAMGGNIQYF

SEQ ID NO: 66405 - protein, 15 aa, Homo sapiens
  CDR3 for alpha chain variable domain of TCR clone 33203 (TRAV8-3, TRAJ45)
CASSYSGGGADGLTF

SEQ ID NO: 66406 - protein, 13 aa, Homo sapiens
  CDR3 for beta chain variable domain of TCR clone 33203 (TRBV10-3, TRBJ2-7)
CASKVAVNYEQYF

SEQ ID NO: 66407 - protein, 15 aa, Homo sapiens
  CDR3 for alpha chain variable domain of TCR clone 33204 (TRAV23/DV6, TRAJ18)
CAARHRGSTLGRLYF

SEQ ID NO: 66408 - protein, 13 aa, Homo sapiens
  CDR3 for beta chain variable domain of TCR clone 33204 (TRBV7-2, TRBJ2-7)
CASSSPSGSEQYF

SEQ ID NO: 66409 - protein, 17 aa, Homo sapiens
  CDR3 for alpha chain variable domain of TCR clone 33205 (TRAV3, TRAJ6)
CAVRDGPRAGGSYIPTF

SEQ ID NO: 66410 - protein, 20 aa, Homo sapiens
  CDR3 for beta chain variable domain of TCR clone 33205 (TRBV28, TRBJ2-1)
CASTPIVRSPGLAGGNEQFF

SEQ ID NO: 66411 - protein, 14 aa, Homo sapiens
  CDR3 for alpha chain variable domain of TCR clone 33206 (TRAV3, TRAJ9)
CAVRLNTGGFKTIF

SEQ ID NO: 66412 - protein, 15 aa, Homo sapiens
  CDR3 for beta chain variable domain of TCR clone 33206 (TRBV7-2, TRBJ2-1)
CASSVASGRVNEQFF

SEQ ID NO: 66413 - protein, 12 aa, Homo sapiens
  CDR3 for alpha chain variable domain of TCR clone 33207 (TRAV13-1, TRAJ49)
CAAPNTGNQFYF

SEQ ID NO: 66414 - protein, 17 aa, Homo sapiens
  CDR3 for beta chain variable domain of TCR clone 33207 (TRBV25-1, TRBJ2-7)
CASSDARVVLSSYEQYF

SEQ ID NO: 66415 - protein, 14 aa, Homo sapiens
  CDR3 for alpha chain variable domain of TCR clone 33208 (TRAV1-2, TRAJ16)
CAVNRFADGQKLLF

SEQ ID NO: 66416 - protein, 15 aa, Homo sapiens
  CDR3 for beta chain variable domain of TCR clone 33208 (TRBV9, TRBJ1-6)
CASSVAGTGDSPLHF

SEQ ID NO: 66417 - protein, 17 aa, Homo sapiens
  CDR3 for alpha chain variable domain of TCR clone 33209 (TRAV13-1, TRAJ31)
CAPRDRLMFVDGTQLVV

SEQ ID NO: 66418 - protein, 12 aa, Homo sapiens
  CDR3 for beta chain variable domain of TCR clone 33209 (TRBV7-9, TRBJ2-7)
CASSLEGYEQYF

SEQ ID NO: 66419 - protein, 16 aa, Homo sapiens
  CDR3 for alpha chain variable domain of TCR clone 33210 (TRAV3, TRAJ37)
CAVRPHGSGNTGKLIF

SEQ ID NO: 66420 - protein, 14 aa, Homo sapiens
  CDR3 for beta chain variable domain of TCR clone 33210 (TRBV25-1, TRBJ1-1)
CASTHLGGNAEAFF

SEQ ID NO: 66421 - protein, 14 aa, Homo sapiens
  CDR3 for alpha chain variable domain of TCR clone 33211 (TRAV1-2, TRAJ16)
CAVNRFSDGQKLLF

SEQ ID NO: 66422 - protein, 15 aa, Homo sapiens
  CDR3 for beta chain variable domain of TCR clone 33211 (TRBV9, TRBJ1-6)
CTSSVAGTGDSPLHF

SEQ ID NO: 66423 - protein, 13 aa, Homo sapiens
  CDR3 for alpha chain variable domain of TCR clone 33212 (TRAV27, TRAJ41)
CSGEGNSGYALNF

SEQ ID NO: 66424 - protein, 14 aa, Homo sapiens
  CDR3 for beta chain variable domain of TCR clone 33212 (TRBV7-2, TRBJ1-1)
CASSFLTGTTEAFF

SEQ ID NO: 66425 - protein, 17 aa, Homo sapiens
  CDR3 for alpha chain variable domain of TCR clone 33213 (TRAV3, TRAJ6)
CAVRDGPREGGSYIPTF

SEQ ID NO: 66426 - protein, 20 aa, Homo sapiens
  CDR3 for beta chain variable domain of TCR clone 33213 (TRBV28, TRBJ2-1)
CASTPIGRSPGLAGGNEQFF

SEQ ID NO: 66427 - protein, 13 aa, Homo sapiens
  CDR3 for alpha chain variable domain of TCR clone 33214 (TRAV21, TRAJ27)
CAALNTNAGKSTF

SEQ ID NO: 66428 - protein, 14 aa, Homo sapiens
  CDR3 for beta chain variable domain of TCR clone 33214 (TRBV27, TRBJ1-1)
CTSSLLSGLSEAFF

SEQ ID NO: 66429 - protein, 14 aa, Homo sapiens
  CDR3 for alpha chain variable domain of TCR clone 33215 (TRAV2, TRAJ9)
CAVEDRSGGFKTIF

SEQ ID NO: 66430 - protein, 15 aa, Homo sapiens
  CDR3 for beta chain variable domain of TCR clone 33215 (TRBV7-3, TRBJ2-1)
CASSPTGGGEVEQFF

SEQ ID NO: 66431 - protein, 15 aa, Homo sapiens
  CDR3 for alpha chain variable domain of TCR clone 33216 (TRAV12-3, TRAJ11)
CAMSEEDSGYSTLTF

SEQ ID NO: 66432 - protein, 13 aa, Homo sapiens
  CDR3 for beta chain variable domain of TCR clone 33216 (TRBV7-9, TRBJ1-2)
CASSLKQNYGYTF

SEQ ID NO: 66433 - protein, 18 aa, Homo sapiens
  CDR3 for alpha chain variable domain of TCR clone 33217 (TRAV29/DV5, TRAJ52)
CAAGFRGAGGTSYGKLTF

SEQ ID NO: 66434 - protein, 17 aa, Homo sapiens
  CDR3 for beta chain variable domain of TCR clone 33217 (TRBV7-3, TRBJ2-3)
CASSLMKRMRGADTQYF

SEQ ID NO: 66435 - protein, 11 aa, Homo sapiens
  CDR3 for alpha chain variable domain of TCR clone 33218 (TRAV4, TRAJ23)
CLVAPGGKLIF

SEQ ID NO: 66436 - protein, 15 aa, Homo sapiens
  CDR3 for beta chain variable domain of TCR clone 33218 (TRBV7-2, TRBJ2-1)
CASSFHADEYNEQFF

SEQ ID NO: 66437 - protein, 11 aa, Homo sapiens
  CDR3 for alpha chain variable domain of TCR clone 33219 (TRAV27, TRAJ47)
CRSNQGNKLVF

SEQ ID NO: 66438 - protein, 16 aa, Homo sapiens
  CDR3 for beta chain variable domain of TCR clone 33219 (TRBV7-9, TRBJ2-1)
CASSDVAGGSYNERFF

SEQ ID NO: 66439 - protein, 13 aa, Homo sapiens
  CDR3 for alpha chain variable domain of TCR clone 33220 (TRAV27, TRAJ39)
CAGDTPAGNMLTF

SEQ ID NO: 66440 - protein, 13 aa, Homo sapiens
  CDR3 for beta chain variable domain of TCR clone 33220 (TRBV4-1, TRBJ2-4)
CASSQVGIDSQYF

SEQ ID NO: 66441 - protein, 13 aa, Homo sapiens
  CDR3 for alpha chain variable domain of TCR clone 33221 (TRAV23/DV6, TRAJ34)
CAAIENNTDKLIF

SEQ ID NO: 66442 - protein, 13 aa, Homo sapiens
  CDR3 for beta chain variable domain of TCR clone 33221 (TRBV29-1, TRBJ2-7)
CSVGPRGGYEQYF

SEQ ID NO: 66443 - protein, 14 aa, Homo sapiens
  CDR3 for alpha chain variable domain of TCR clone 33222 (TRAV1-2, TRAJ8)
CAVREDTGFQKLVF

SEQ ID NO: 66444 - protein, 13 aa, Homo sapiens
  CDR3 for beta chain variable domain of TCR clone 33222 (TRBV7-9, TRBJ2-5)
CASLSPGQETQYF

SEQ ID NO: 66445 - protein, 11 aa, Homo sapiens
  CDR3 for alpha chain variable domain of TCR clone 33223 (TRAV12-2, TRAJ43)
CAAYNNNDIRF

SEQ ID NO: 66446 - protein, 14 aa, Homo sapiens
  CDR3 for beta chain variable domain of TCR clone 33223 (TRBV7-8, TRBJ1-2)
CASSAGTAIYGYTF

SEQ ID NO: 66447 - protein, 16 aa, Homo sapiens
  CDR3 for alpha chain variable domain of TCR clone 33224 (TRAV3, TRAJ10)
CAVRDMRAGGGNKLTF

SEQ ID NO: 66448 - protein, 15 aa, Homo sapiens
  CDR3 for beta chain variable domain of TCR clone 33224 (TRBV11-3, TRBJ2-3)
CASLKDGREGDTQYF

SEQ ID NO: 66449 - protein, 13 aa, Homo sapiens
  CDR3 for alpha chain variable domain of TCR clone 33225 (TRAV8-6, TRAJ54)
CAVSDQGAQKLVF

SEQ ID NO: 66450 - protein, 14 aa, Homo sapiens
  CDR3 for beta chain variable domain of TCR clone 33225 (TRBV28, TRBJ1-5)
CAISLFPGVQPQHF

SEQ ID NO: 66451 - protein, 13 aa, Homo sapiens
  CDR3 for alpha chain variable domain of TCR clone 33226 (TRAV26-1, )
CIVSHRVEGLWNQ

SEQ ID NO: 66452 - protein, 14 aa, Homo sapiens
  CDR3 for beta chain variable domain of TCR clone 33226 (TRBV20-1, TRBJ2-7)
CSAWTALSSYEQYF

SEQ ID NO: 66453 - protein, 13 aa, Homo sapiens
  CDR3 for alpha chain variable domain of TCR clone 33227 (TRAV21, TRAJ27)
CAARPGNADKSTF

SEQ ID NO: 66454 - protein, 16 aa, Homo sapiens
  CDR3 for beta chain variable domain of TCR clone 33227 (TRBV20-1, TRBJ1-2)
CSASMGQGVANYGYTF

SEQ ID NO: 66455 - protein, 18 aa, Homo sapiens
  CDR3 for alpha chain variable domain of TCR clone 33228 (TRAV13-1, TRAJ52)
CAASKRSAGGTSYGKLTF

SEQ ID NO: 66456 - protein, 13 aa, Homo sapiens
  CDR3 for beta chain variable domain of TCR clone 33228 (TRBV27, TRBJ1-1)
CASSLSIGAEAFF

SEQ ID NO: 66457 - protein, 11 aa, Homo sapiens
  CDR3 for alpha chain variable domain of TCR clone 33229 (TRAV12-1, TRAJ26)
CVVAYGQNFAF

SEQ ID NO: 66458 - protein, 15 aa, Homo sapiens
  CDR3 for beta chain variable domain of TCR clone 33229 (TRBV12-4, TRBJ2-5)
CASSGTGQAQETQYF

SEQ ID NO: 66459 - protein, 13 aa, Homo sapiens
  CDR3 for alpha chain variable domain of TCR clone 33230 (TRAV2, TRAJ29)
CAAGNSGNTPLVF

SEQ ID NO: 66460 - protein, 15 aa, Homo sapiens
  CDR3 for beta chain variable domain of TCR clone 33230 (TRBV7-9, TRBJ1-2)
CQQPRRGAINYGYTF

SEQ ID NO: 66461 - protein, 14 aa, Homo sapiens
  CDR3 for alpha chain variable domain of TCR clone 33231 (TRAV29/DV5, TRAJ44)
CAALLVGTASKLTF

SEQ ID NO: 66462 - protein, 15 aa, Homo sapiens
  CDR3 for beta chain variable domain of TCR clone 33231 (TRBV7-3, TRBJ2-2)
CASSETGQGTGELFF

SEQ ID NO: 66463 - protein, 17 aa, Homo sapiens
  CDR3 for alpha chain variable domain of TCR clone 33232 (TRAV13-1, TRAJ28)
CAASPPYSGAGRYQLTF

SEQ ID NO: 66464 - protein, 15 aa, Homo sapiens
  CDR3 for beta chain variable domain of TCR clone 33232 (TRBV6-3, TRBJ2-2)
CASSFLATLTGELFF

SEQ ID NO: 66465 - protein, 11 aa, Homo sapiens
  CDR3 for alpha chain variable domain of TCR clone 33233 (TRAV39, TRAJ26)
CAVDLMRHFVF

SEQ ID NO: 66466 - protein, 11 aa, Homo sapiens
  CDR3 for beta chain variable domain of TCR clone 33233 (TRBV7-9, TRBJ2-1)
CASSSQNGQFF

SEQ ID NO: 66467 - protein, 14 aa, Homo sapiens
  CDR3 for alpha chain variable domain of TCR clone 33234 (TRAV1-2, TRAJ6)
CAVSLSGGSYMPTF

SEQ ID NO: 66468 - protein, 15 aa, Homo sapiens
  CDR3 for beta chain variable domain of TCR clone 33234 (TRBV28, TRBJ2-7)
CASSPGGRGFYEQYF

SEQ ID NO: 66469 - protein, 14 aa, Homo sapiens
  CDR3 for alpha chain variable domain of TCR clone 33235 (TRAV21, TRAJ35)
CAVMPIGFGNVLPC

SEQ ID NO: 66470 - protein, 12 aa, Homo sapiens
  CDR3 for beta chain variable domain of TCR clone 33235 (TRBV7-9, TRBJ2-7)
CASSIKREEQYF

SEQ ID NO: 66471 - protein, 14 aa, Homo sapiens
  CDR3 for alpha chain variable domain of TCR clone 33236 (TRAV8-3, TRAJ36)
CAVGPITGANNIFF

SEQ ID NO: 66472 - protein, 15 aa, Homo sapiens
  CDR3 for beta chain variable domain of TCR clone 33236 (TRBV4-1, TRBJ2-1)
CASSQDPGNYNEQFF

SEQ ID NO: 66473 - protein, 12 aa, Homo sapiens
  CDR3 for alpha chain variable domain of TCR clone 33237 (TRAV12-3, TRAJ17)
CAMTLTGNKLTF

SEQ ID NO: 66474 - protein, 14 aa, Homo sapiens
  CDR3 for beta chain variable domain of TCR clone 33237 (TRBV19, TRBJ2-1)
CASGKSTQYNEQFF

SEQ ID NO: 66475 - protein, 16 aa, Homo sapiens
  CDR3 for alpha chain variable domain of TCR clone 33238 (TRAV1-2, TRAJ10)
CAVRGVLTGGGNKLTF

SEQ ID NO: 66476 - protein, 16 aa, Homo sapiens
  CDR3 for beta chain variable domain of TCR clone 33238 (TRBV9, TRBJ2-1)
CAGSVGGGGNYNEQFF

SEQ ID NO: 66477 - protein, 15 aa, Homo sapiens
  CDR3 for alpha chain variable domain of TCR clone 33239 (TRAV16, TRAJ16)
CALKGGGSDGQKLLF

SEQ ID NO: 66478 - protein, 15 aa, Homo sapiens
  CDR3 for beta chain variable domain of TCR clone 33239 (TRBV20-1, TRBJ2-7)
CSARDRVSGMDEQYF

SEQ ID NO: 66479 - protein, 15 aa, Homo sapiens
  CDR3 for alpha chain variable domain of TCR clone 33240 (TRAV17, TRAJ54)
CATTRSEQGAQKLGF

SEQ ID NO: 66480 - protein, 16 aa, Homo sapiens
  CDR3 for beta chain variable domain of TCR clone 33240 (TRBV12-4, TRBJ2-3)
CASSLRLAETTDTQYF

SEQ ID NO: 66481 - protein, 14 aa, Homo sapiens
  CDR3 for alpha chain variable domain of TCR clone 33241 (TRAV13-1, TRAJ40)
CAASMTSGTYKYIF

SEQ ID NO: 66482 - protein, 15 aa, Homo sapiens
  CDR3 for beta chain variable domain of TCR clone 33241 (TRBV7-3, TRBJ2-1)
CASSPTEGGEVEQFF

SEQ ID NO: 66483 - protein, 13 aa, Homo sapiens
  CDR3 for alpha chain variable domain of TCR clone 33242 (TRAV13-1, TRAJ39)
CSKYSNAGNMLTF

SEQ ID NO: 66484 - protein, 16 aa, Homo sapiens
  CDR3 for beta chain variable domain of TCR clone 33242 (TRBV20-1, TRBJ1-4)
CSAPGQGLLANEKLFF

SEQ ID NO: 66485 - protein, 18 aa, Homo sapiens
  CDR3 for alpha chain variable domain of TCR clone 33243 (TRAV21, TRAJ52)
CAVRPSPAGGTSYGKLTF

SEQ ID NO: 66486 - protein, 13 aa, Homo sapiens
  CDR3 for beta chain variable domain of TCR clone 33243 (TRBV7-3, TRBJ2-1)
CASSLDSYNEQFF

SEQ ID NO: 66487 - protein, 13 aa, Homo sapiens
  CDR3 for alpha chain variable domain of TCR clone 33244 (TRAV13-1, TRAJ5)
CAASDTGRRALTF

SEQ ID NO: 66488 - protein, 12 aa, Homo sapiens
  CDR3 for beta chain variable domain of TCR clone 33244 (TRBV11-2, TRBJ2-2)
CASSLGGGELFF

SEQ ID NO: 66489 - protein, 14 aa, Homo sapiens
  CDR3 for alpha chain variable domain of TCR clone 33245 (TRAV12-2, TRAJ17)
CAVLFKAAGNKLTF

SEQ ID NO: 66490 - protein, 11 aa, Homo sapiens
  CDR3 for beta chain variable domain of TCR clone 33245 (TRBV11-2, TRBJ2-2)
CASSLPGELFF

SEQ ID NO: 66491 - protein, 15 aa, Homo sapiens
  CDR3 for alpha chain variable domain of TCR clone 33246 (TRAV2, TRAJ15)
CAVEDRGQAGTALIF

SEQ ID NO: 66492 - protein, 13 aa, Homo sapiens
  CDR3 for beta chain variable domain of TCR clone 33246 (TRBV10-2, TRBJ2-7)
CASWASGGYEQYF

SEQ ID NO: 66493 - protein, 15 aa, Homo sapiens
  CDR3 for alpha chain variable domain of TCR clone 33247 (TRAV17, TRAJ16)
CATALRFPDGQKLLF

SEQ ID NO: 66494 - protein, 12 aa, Homo sapiens
  CDR3 for beta chain variable domain of TCR clone 33247 (TRBV2, TRBJ2-7)
CASSDPDYEQYF

SEQ ID NO: 66495 - protein, 15 aa, Homo sapiens
  CDR3 for alpha chain variable domain of TCR clone 33248 (TRAV3, TRAJ22)
CAVRDRGGSARRLTF

SEQ ID NO: 66496 - protein, 14 aa, Homo sapiens
  CDR3 for beta chain variable domain of TCR clone 33248 (TRBV25-1, TRBJ1-1)
CASTHLGGNTEAFF

SEQ ID NO: 66497 - protein, 15 aa, Homo sapiens
  CDR3 for alpha chain variable domain of TCR clone 33249 (TRAV1-2, TRAJ16)
CAVRARFSDGQKLLF

SEQ ID NO: 66498 - protein, 19 aa, Homo sapiens
  CDR3 for beta chain variable domain of TCR clone 33249 (TRBV11-3, TRBJ2-3)
CVSGFGTSGGPRGGGTQYF

SEQ ID NO: 66499 - protein, 15 aa, Homo sapiens
  CDR3 for alpha chain variable domain of TCR clone 33250 (TRAV27, TRAJ38)
CAARRNAGNNRKLIW

SEQ ID NO: 66500 - protein, 13 aa, Homo sapiens
  CDR3 for beta chain variable domain of TCR clone 33250 (TRBV12-5, TRBJ2-3)
CASGDRQSDTQYC

SEQ ID NO: 66501 - protein, 16 aa, Homo sapiens
  CDR3 for alpha chain variable domain of TCR clone 33251 (TRAV12-3, TRAJ53)
CAMSPGSGGSNYKLTF

SEQ ID NO: 66502 - protein, 17 aa, Homo sapiens
  CDR3 for beta chain variable domain of TCR clone 33251 (TRBV20-1, TRBJ2-1)
CSAPPRLAGTRYNEQFF

SEQ ID NO: 66503 - protein, 16 aa, Homo sapiens
  CDR3 for alpha chain variable domain of TCR clone 33252 (TRAV4, TRAJ9)
CLVGDPNRPGGFKTNF

SEQ ID NO: 66504 - protein, 16 aa, Homo sapiens
  CDR3 for beta chain variable domain of TCR clone 33252 (TRBV28, TRBJ1-4)
CASSPPYRGRSEKLFF

SEQ ID NO: 66505 - protein, 15 aa, Homo sapiens
  CDR3 for alpha chain variable domain of TCR clone 33253 (TRAV17, TRAJ16)
CAKALRFSDGQKLLF

SEQ ID NO: 66506 - protein, 15 aa, Homo sapiens
  CDR3 for beta chain variable domain of TCR clone 33253 (TRBV20-1, TRBJ1-1)
CSASRGVTGNTEAFF

SEQ ID NO: 66507 - protein, 14 aa, Homo sapiens
  CDR3 for alpha chain variable domain of TCR clone 33254 (TRAV1-2, TRAJ16)
CAVNRFSDGQKLLF

SEQ ID NO: 66508 - protein, 13 aa, Homo sapiens
  CDR3 for beta chain variable domain of TCR clone 33254 (TRBV2, TRBJ1-1)
CASSVLMNTEAFF

SEQ ID NO: 66509 - protein, 16 aa, Homo sapiens
  CDR3 for alpha chain variable domain of TCR clone 33255 (TRAV3, TRAJ21)
CAVRDIERGNFNKFYF

SEQ ID NO: 66510 - protein, 13 aa, Homo sapiens
  CDR3 for beta chain variable domain of TCR clone 33255 (TRBV27, TRBJ2-7)
CASILTTGYEQYF

SEQ ID NO: 66511 - protein, 16 aa, Homo sapiens
  CDR3 for alpha chain variable domain of TCR clone 33256 (TRAV30, TRAJ24)
CGTEIVDAGSWGKFQF

SEQ ID NO: 66512 - protein, 15 aa, Homo sapiens
  CDR3 for beta chain variable domain of TCR clone 33256 (TRBV5-1, TRBJ1-1)
CASSSTTGTNTEAFF

SEQ ID NO: 66513 - protein, 16 aa, Homo sapiens
  CDR3 for alpha chain variable domain of TCR clone 33257 (TRAV12-3, TRAJ53)
CAMSPGSGGSNYKLTF

SEQ ID NO: 66514 - protein, 16 aa, Homo sapiens
  CDR3 for beta chain variable domain of TCR clone 33257 (TRBV2, TRBJ1-5)
CASSLALGLYNQPQHF

SEQ ID NO: 66515 - protein, 14 aa, Homo sapiens
  CDR3 for alpha chain variable domain of TCR clone 33258 (TRAV12-3, TRAJ54)
CAMGGIQGAQKLVF

SEQ ID NO: 66516 - protein, 13 aa, Homo sapiens
  CDR3 for beta chain variable domain of TCR clone 33258 (TRBV19, TRBJ1-1)
CASSPSNGGEAFF

SEQ ID NO: 66517 - protein, 11 aa, Homo sapiens
  CDR3 for alpha chain variable domain of TCR clone 33259 (TRAV17, TRAJ9)
CATAGGFKTIF

SEQ ID NO: 66518 - protein, 11 aa, Homo sapiens
  CDR3 for beta chain variable domain of TCR clone 33259 (TRBV29-1, TRBJ2-5)
CSEDRTGTQYF

SEQ ID NO: 66519 - protein, 13 aa, Homo sapiens
  CDR3 for alpha chain variable domain of TCR clone 33260 (TRAV1-1, TRAJ9)
CAAKNTGGFKTIF

SEQ ID NO: 66520 - protein, 14 aa, Homo sapiens
  CDR3 for beta chain variable domain of TCR clone 33260 (TRBV20-1, TRBJ2-1)
CRAQIGGSANEQFF

SEQ ID NO: 66521 - protein, 12 aa, Homo sapiens
  CDR3 for alpha chain variable domain of TCR clone 33261 (TRAV24, TRAJ37)
CASSSNTGKLIF

SEQ ID NO: 66522 - protein, 14 aa, Homo sapiens
  CDR3 for beta chain variable domain of TCR clone 33261 (TRBV19, TRBJ2-1)
CASSKDRGQDEQFF

SEQ ID NO: 66523 - protein, 14 aa, Homo sapiens
  CDR3 for alpha chain variable domain of TCR clone 33262 (TRAV1-2, TRAJ8)
CAVREDTGFQKLVF

SEQ ID NO: 66524 - protein, 13 aa, Homo sapiens
  CDR3 for beta chain variable domain of TCR clone 33262 (TRBV24-1, TRBJ2-2)
CATSETNTGELFF

SEQ ID NO: 66525 - protein, 16 aa, Homo sapiens
  CDR3 for alpha chain variable domain of TCR clone 33263 (TRAV4, TRAJ22)
CLVGDLYSGSARQLTF

SEQ ID NO: 66526 - protein, 15 aa, Homo sapiens
  CDR3 for beta chain variable domain of TCR clone 33263 (TRBV7-9, TRBJ1-4)
CASSRTGGFNEKLLF

SEQ ID NO: 66527 - protein, 16 aa, Homo sapiens
  CDR3 for alpha chain variable domain of TCR clone 33264 (TRAV26-2, TRAJ45)
CTTASPIGGGADGLTF

SEQ ID NO: 66528 - protein, 20 aa, Homo sapiens
  CDR3 for beta chain variable domain of TCR clone 33264 (TRBV28, TRBJ2-1)
CANTPIGRSPGLAGGNEQFF

SEQ ID NO: 66529 - protein, 13 aa, Homo sapiens
  CDR3 for alpha chain variable domain of TCR clone 33265 (TRAV3, TRAJ21)
CAVREPDFNKFYF

SEQ ID NO: 66530 - protein, 18 aa, Homo sapiens
  CDR3 for beta chain variable domain of TCR clone 33265 (TRBV11-2, TRBJ2-3)
CASSFGGASRGAPNTQYF

SEQ ID NO: 66531 - protein, 11 aa, Homo sapiens
  CDR3 for alpha chain variable domain of TCR clone 33266 (TRAV21, TRAJ23)
CAPQRREKLIF

SEQ ID NO: 66532 - protein, 14 aa, Homo sapiens
  CDR3 for beta chain variable domain of TCR clone 33266 (TRBV12-4, TRBJ1-1)
CASTWTGHDTEAFF

SEQ ID NO: 66533 - protein, 14 aa, Homo sapiens
  CDR3 for alpha chain variable domain of TCR clone 33267 (TRAV12-2, TRAJ40)
CAVKIPSGTYKYIF

SEQ ID NO: 66534 - protein, 12 aa, Homo sapiens
  CDR3 for beta chain variable domain of TCR clone 33267 (TRBV12-4, TRBJ2-7)
CASSLGGYEQYF

SEQ ID NO: 66535 - protein, 10 aa, Homo sapiens
  CDR3 for alpha chain variable domain of TCR clone 33268 (TRAV12-3, TRAJ49)
CAMNDDQFYF

SEQ ID NO: 66536 - protein, 16 aa, Homo sapiens
  CDR3 for beta chain variable domain of TCR clone 33268 (TRBV7-3, TRBJ2-2)
CASSLKRGTLSGELFF

SEQ ID NO: 66537 - protein, 14 aa, Homo sapiens
  CDR3 for alpha chain variable domain of TCR clone 33269 (TRAV1-2, TRAJ8)
CAVREDTGFQKLVF

SEQ ID NO: 66538 - protein, 17 aa, Homo sapiens
  CDR3 for beta chain variable domain of TCR clone 33269 (TRBV11-2, TRBJ2-1)
CASSLCPPGVEYNEQFF

SEQ ID NO: 66539 - protein, 11 aa, Homo sapiens
  CDR3 for alpha chain variable domain of TCR clone 33270 (TRAV1-2, TRAJ40)
CAVQGTYKYIF

SEQ ID NO: 66540 - protein, 16 aa, Homo sapiens
  CDR3 for beta chain variable domain of TCR clone 33270 (TRBV29-1, TRBJ2-7)
CSVEVVGTSGSYEQYF

SEQ ID NO: 66541 - protein, 17 aa, Homo sapiens
  CDR3 for alpha chain variable domain of TCR clone 33271 (TRAV3, TRAJ6)
CAVRDGPRAGGSYIPTF

SEQ ID NO: 66542 - protein, 13 aa, Homo sapiens
  CDR3 for beta chain variable domain of TCR clone 33271 (TRBV12-4, TRBJ1-1)
CASSPGTGFEAFF

SEQ ID NO: 66543 - protein, 13 aa, Homo sapiens
  CDR3 for alpha chain variable domain of TCR clone 33272 (TRAV21, TRAJ26)
CAVLGNYGQNFVF

SEQ ID NO: 66544 - protein, 16 aa, Homo sapiens
  CDR3 for beta chain variable domain of TCR clone 33272 (TRBV29-1, TRBJ2-2)
CSVETRASGNTGELFF

SEQ ID NO: 66545 - protein, 14 aa, Homo sapiens
  CDR3 for alpha chain variable domain of TCR clone 33273 (TRAV1-2, TRAJ8)
CAVREDTGFQKLVF

SEQ ID NO: 66546 - protein, 13 aa, Homo sapiens
  CDR3 for beta chain variable domain of TCR clone 33273 (TRBV7-2, TRBJ2-5)
CASSQTSVETQYF

SEQ ID NO: 66547 - protein, 14 aa, Homo sapiens
  CDR3 for alpha chain variable domain of TCR clone 33274 (TRAV9-2, TRAJ39)
CALYIYNAGNMLTF

SEQ ID NO: 66548 - protein, 16 aa, Homo sapiens
  CDR3 for beta chain variable domain of TCR clone 33274 (TRBV2, TRBJ1-3)
CASSRTGGSTGNTIYF

SEQ ID NO: 66549 - protein, 15 aa, Homo sapiens
  CDR3 for alpha chain variable domain of TCR clone 33275 (TRAV3, TRAJ22)
CAVKDRGGSARQLTF

SEQ ID NO: 66550 - protein, 16 aa, Homo sapiens
  CDR3 for beta chain variable domain of TCR clone 33275 (TRBV5-4, TRBJ2-3)
CASQQPGAGGADTQYF

SEQ ID NO: 66551 - protein, 22 aa, Homo sapiens
  CDR3 for alpha chain variable domain of TCR clone 33276 (TRAV21, )
CAVRQDAGNNHIQNPDPAVYQL

SEQ ID NO: 66552 - protein, 16 aa, Homo sapiens
  CDR3 for beta chain variable domain of TCR clone 33276 (TRBV4-2, TRBJ1-1)
CASRPLDGGGDTGAFF

SEQ ID NO: 66553 - protein, 15 aa, Homo sapiens
  CDR3 for alpha chain variable domain of TCR clone 33277 (TRAV12-1, TRAJ44)
CVADEYTGTASKLTF

SEQ ID NO: 66554 - protein, 14 aa, Homo sapiens
  CDR3 for beta chain variable domain of TCR clone 33277 (TRBV5-1, TRBJ1-2)
CASSLEPVNYGYTF

SEQ ID NO: 66555 - protein, 16 aa, Homo sapiens
  CDR3 for alpha chain variable domain of TCR clone 33278 (TRAV3, TRAJ37)
CAVRGKWSGNTGKLIF

SEQ ID NO: 66556 - protein, 13 aa, Homo sapiens
  CDR3 for beta chain variable domain of TCR clone 33278 (TRBV7-2, TRBJ2-2)
CASSSVRAGELFF

SEQ ID NO: 66557 - protein, 15 aa, Homo sapiens
  CDR3 for alpha chain variable domain of TCR clone 33279 (TRAV3, TRAJ5)
CAVRDRKTGRRALTF

SEQ ID NO: 66558 - protein, 15 aa, Homo sapiens
  CDR3 for beta chain variable domain of TCR clone 33279 (TRBV7-8, TRBJ2-1)
CASSLADSLYNEQFF

SEQ ID NO: 66559 - protein, 16 aa, Homo sapiens
  CDR3 for alpha chain variable domain of TCR clone 33280 (TRAV21, TRAJ37)
CAVRTAGSSNTGKLIF

SEQ ID NO: 66560 - protein, 13 aa, Homo sapiens
  CDR3 for beta chain variable domain of TCR clone 33280 (TRBV7-9, TRBJ2-5)
CASLPSGQETQYF

SEQ ID NO: 66561 - protein, 20 aa, Homo sapiens
  CDR3 for alpha chain variable domain of TCR clone 33281 (TRAV12-1, TRAJ42)
SSVIQPPTSVKGGSQGNLIF

SEQ ID NO: 66562 - protein, 18 aa, Homo sapiens
  CDR3 for beta chain variable domain of TCR clone 33281 (TRBV11-2, TRBJ2-3)
WASSLGGASRGAPNTQYF

SEQ ID NO: 66563 - protein, 13 aa, Homo sapiens
  CDR3 for alpha chain variable domain of TCR clone 33282 (TRAV16, TRAJ9)
CSLRATGGFKTIF

SEQ ID NO: 66564 - protein, 16 aa, Homo sapiens
  CDR3 for beta chain variable domain of TCR clone 33282 (TRBV5-1, TRBJ1-3)
CASSRSGEDSGNTIYF

SEQ ID NO: 66565 - protein, 10 aa, Homo sapiens
  CDR3 for alpha chain variable domain of TCR clone 33283 (TRAV1-2, TRAJ20)
CALNDYKLSF

SEQ ID NO: 66566 - protein, 16 aa, Homo sapiens
  CDR3 for beta chain variable domain of TCR clone 33283 (TRBV20-1, TRBJ1-1)
CSAGALTQGMNTEAFF

SEQ ID NO: 66567 - protein, 15 aa, Homo sapiens
  CDR3 for alpha chain variable domain of TCR clone 33284 (TRAV3, TRAJ29)
CAVRAPLSGNTPLVF

SEQ ID NO: 66568 - protein, 15 aa, Homo sapiens
  CDR3 for beta chain variable domain of TCR clone 33284 (TRBV28, TRBJ1-1)
CASRIKGGLNTEAFL

SEQ ID NO: 66569 - protein, 12 aa, Homo sapiens
  CDR3 for alpha chain variable domain of TCR clone 33285 (TRAV17, TRAJ54)
CYVMGGAQKLVF

SEQ ID NO: 66570 - protein, 15 aa, Homo sapiens
  CDR3 for beta chain variable domain of TCR clone 33285 (TRBV4-3, TRBJ2-3)
CASSPSLLSTDTQYF

SEQ ID NO: 66571 - protein, 12 aa, Homo sapiens
  CDR3 for alpha chain variable domain of TCR clone 33286 (TRAV3, TRAJ43)
CCEGGRNNDMRF

SEQ ID NO: 66572 - protein, 12 aa, Homo sapiens
  CDR3 for beta chain variable domain of TCR clone 33286 (TRBV5-1, TRBJ2-7)
CASSLDSYEQYF

SEQ ID NO: 66573 - protein, 13 aa, Homo sapiens
  CDR3 for alpha chain variable domain of TCR clone 33287 (TRAV29/DV5, TRAJ43)
CAASAAPFNDMRF

SEQ ID NO: 66574 - protein, 16 aa, Homo sapiens
  CDR3 for beta chain variable domain of TCR clone 33287 (TRBV20-1, TRBJ1-4)
CSAPGQGLLTNEKLFF

SEQ ID NO: 66575 - protein, 14 aa, Homo sapiens
  CDR3 for alpha chain variable domain of TCR clone 33288 (TRAV1-2, TRAJ16)
CAVNRFSDGQKLLF

SEQ ID NO: 66576 - protein, 14 aa, Homo sapiens
  CDR3 for beta chain variable domain of TCR clone 33288 (TRBV4-1, TRBJ2-7)
CASSPVAGGDEQYF

SEQ ID NO: 66577 - protein, 16 aa, Homo sapiens
  CDR3 for alpha chain variable domain of TCR clone 33289 (TRAV30, TRAJ24)
CGTEIVDADSWGKFQF

SEQ ID NO: 66578 - protein, 14 aa, Homo sapiens
  CDR3 for beta chain variable domain of TCR clone 33289 (TRBV7-2, TRBJ2-7)
CASSPETSFYEQYF

SEQ ID NO: 66579 - protein, 13 aa, Homo sapiens
  CDR3 for alpha chain variable domain of TCR clone 33290 (TRAV12-3, TRAJ33)
CATSVNSNYQLIW

SEQ ID NO: 66580 - protein, 13 aa, Homo sapiens
  CDR3 for beta chain variable domain of TCR clone 33290 (TRBV7-2, TRBJ2-2)
CASSLAVTGELFF

SEQ ID NO: 66581 - protein, 14 aa, Homo sapiens
  CDR3 for alpha chain variable domain of TCR clone 33291 (TRAV1-1, TRAJ27)
CAVIYNTNAGKSTF

SEQ ID NO: 66582 - protein, 11 aa, Homo sapiens
  CDR3 for beta chain variable domain of TCR clone 33291 (TRBV29-1, TRBJ1-3)
CSVAIGNTIYF

SEQ ID NO: 66583 - protein, 14 aa, Homo sapiens
  CDR3 for alpha chain variable domain of TCR clone 33292 (TRAV12-3, TRAJ29)
CAMSPYSGNTPLVF

SEQ ID NO: 66584 - protein, 12 aa, Homo sapiens
  CDR3 for beta chain variable domain of TCR clone 33292 (TRBV9, TRBJ2-1)
CAGSVGGTDIFF

SEQ ID NO: 66585 - protein, 12 aa, Homo sapiens
  CDR3 for alpha chain variable domain of TCR clone 33293 (TRAV12-3, TRAJ17)
CAMTLTGNKLTF

SEQ ID NO: 66586 - protein, 15 aa, Homo sapiens
  CDR3 for beta chain variable domain of TCR clone 33293 (TRBV11-2, TRBJ2-2)
CASSSDRVNAGKLFF

SEQ ID NO: 66587 - protein, 14 aa, Homo sapiens
  CDR3 for alpha chain variable domain of TCR clone 33294 (TRAV13-1, TRAJ36)
CAASINTGAYNLFF

SEQ ID NO: 66588 - protein, 18 aa, Homo sapiens
  CDR3 for beta chain variable domain of TCR clone 33294 (TRBV20-1, TRBJ2-3)
CSARDPWGQGLSTDTQYF

SEQ ID NO: 66589 - protein, 15 aa, Homo sapiens
  CDR3 for alpha chain variable domain of TCR clone 33295 (TRAV8-3, TRAJ27)
CAVGPSKTNAGKSTY

SEQ ID NO: 66590 - protein, 15 aa, Homo sapiens
  CDR3 for beta chain variable domain of TCR clone 33295 (TRBV7-2, TRBJ2-1)
CASSSGLAGGNEQFF

SEQ ID NO: 66591 - protein, 15 aa, Homo sapiens
  CDR3 for alpha chain variable domain of TCR clone 33296 (TRAV21, TRAJ24)
CAARSSTDSWGKLQF

SEQ ID NO: 66592 - protein, 14 aa, Homo sapiens
  CDR3 for beta chain variable domain of TCR clone 33296 (TRBV7-6, TRBJ2-3)
CASSLGTVTDTQYF

SEQ ID NO: 66593 - protein, 12 aa, Homo sapiens
  CDR3 for alpha chain variable domain of TCR clone 33297 (TRAV16, TRAJ49)
CALNEGSNQFYF

SEQ ID NO: 66594 - protein, 14 aa, Homo sapiens
  CDR3 for beta chain variable domain of TCR clone 33297 (TRBV7-9, TRBJ2-1)
CASRPTGLRNEQFF

SEQ ID NO: 66595 - protein, 14 aa, Homo sapiens
  CDR3 for alpha chain variable domain of TCR clone 33298 (TRAV12-1, TRAJ15)
CLPPANQAGTALIF

SEQ ID NO: 66596 - protein, 13 aa, Homo sapiens
  CDR3 for beta chain variable domain of TCR clone 33298 (TRBV7-2, TRBJ2-4)
CASSREHANSQYF

SEQ ID NO: 66597 - protein, 13 aa, Homo sapiens
  CDR3 for alpha chain variable domain of TCR clone 33299 (TRAV13-1, TRAJ21)
CAASIYNFNKFYF

SEQ ID NO: 66598 - protein, 13 aa, Homo sapiens
  CDR3 for beta chain variable domain of TCR clone 33299 (TRBV27, TRBJ1-4)
CASSLMGDERLFF

SEQ ID NO: 66599 - protein, 11 aa, Homo sapiens
  CDR3 for alpha chain variable domain of TCR clone 33300 (TRAV12-1, TRAJ34)
CVVSKGRELIF

SEQ ID NO: 66600 - protein, 12 aa, Homo sapiens
  CDR3 for beta chain variable domain of TCR clone 33300 (TRBV2, TRBJ2-1)
CAYGPPGNEQFF

SEQ ID NO: 66601 - protein, 17 aa, Homo sapiens
  CDR3 for alpha chain variable domain of TCR clone 33301 (TRAV8-6, TRAJ58)
CAVSSWVGETSGSRLTF

SEQ ID NO: 66602 - protein, 15 aa, Homo sapiens
  CDR3 for beta chain variable domain of TCR clone 33301 (TRBV15, TRBJ1-5)
CATSRDPVSNQPQHF

SEQ ID NO: 66603 - protein, 16 aa, Homo sapiens
  CDR3 for alpha chain variable domain of TCR clone 33302 (TRAV26-1, TRAJ37)
CIVRGDGSGNTGKLIF

SEQ ID NO: 66604 - protein, 17 aa, Homo sapiens
  CDR3 for beta chain variable domain of TCR clone 33302 (TRBV4-1, TRBJ2-7)
CASSRDPRGVRGGEQYF

SEQ ID NO: 66605 - protein, 18 aa, Homo sapiens
  CDR3 for alpha chain variable domain of TCR clone 33303 (TRAV9-2, TRAJ52)
CALSRHNAGGTSYGKLTF

SEQ ID NO: 66606 - protein, 13 aa, Homo sapiens
  CDR3 for beta chain variable domain of TCR clone 33303 (TRBV7-3, TRBJ1-1)
CASSQDWGAEAFF

SEQ ID NO: 66607 - protein, 12 aa, Homo sapiens
  CDR3 for alpha chain variable domain of TCR clone 33304 (TRAV12-3, TRAJ41)
CAMSYSGYALNF

SEQ ID NO: 66608 - protein, 13 aa, Homo sapiens
  CDR3 for beta chain variable domain of TCR clone 33304 (TRBV7-3, TRBJ2-1)
CASSLDSYNERFF

SEQ ID NO: 66609 - protein, 14 aa, Homo sapiens
  CDR3 for alpha chain variable domain of TCR clone 33305 (TRAV1-2, TRAJ16)
CAVNRFSDGQKLLF

SEQ ID NO: 66610 - protein, 15 aa, Homo sapiens
  CDR3 for beta chain variable domain of TCR clone 33305 (TRBV7-9, TRBJ1-6)
CDSSSPGRGNSPLHF

SEQ ID NO: 66611 - protein, 13 aa, Homo sapiens
  CDR3 for alpha chain variable domain of TCR clone 33306 (TRAV3, TRAJ21)
CAVREPDFNKFYF

SEQ ID NO: 66612 - protein, 15 aa, Homo sapiens
  CDR3 for beta chain variable domain of TCR clone 33306 (TRBV7-2, TRBJ2-1)
CASSSGLAGGNEQFF

SEQ ID NO: 66613 - protein, 15 aa, Homo sapiens
  CDR3 for alpha chain variable domain of TCR clone 33307 (TRAV1-2, TRAJ28)
CAVQYSGAGNYQLTF

SEQ ID NO: 66614 - protein, 13 aa, Homo sapiens
  CDR3 for beta chain variable domain of TCR clone 33307 (TRBV20-1, TRBJ2-7)
CSATHTSGYEQYF

SEQ ID NO: 66615 - protein, 16 aa, Homo sapiens
  CDR3 for alpha chain variable domain of TCR clone 33308 (TRAV16, TRAJ4)
CALSRMFSGGYNKLIF

SEQ ID NO: 66616 - protein, 13 aa, Homo sapiens
  CDR3 for beta chain variable domain of TCR clone 33308 (TRBV7-3, TRBJ1-1)
CASSQDWGAEAFF

SEQ ID NO: 66617 - protein, 11 aa, Homo sapiens
  CDR3 for alpha chain variable domain of TCR clone 33309 (TRAV1-2, TRAJ31)
CAVNNNARIMF

SEQ ID NO: 66618 - protein, 15 aa, Homo sapiens
  CDR3 for beta chain variable domain of TCR clone 33309 (TRBV28, TRBJ2-1)
CASSIIAGGRSEQFF

SEQ ID NO: 66619 - protein, 16 aa, Homo sapiens
  CDR3 for alpha chain variable domain of TCR clone 33310 (TRAV3, TRAJ37)
CAVRPHGSGNTGKLIF

SEQ ID NO: 66620 - protein, 13 aa, Homo sapiens
  CDR3 for beta chain variable domain of TCR clone 33310 (TRBV7-3, TRBJ1-1)
CASSQDWGAEAFF

SEQ ID NO: 66621 - protein, 14 aa, Homo sapiens
  CDR3 for alpha chain variable domain of TCR clone 33311 (TRAV8-3, TRAJ4)
CAVGATGGYNKLIF

SEQ ID NO: 66622 - protein, 15 aa, Homo sapiens
  CDR3 for beta chain variable domain of TCR clone 33311 (TRBV5-1, TRBJ2-1)
CASSPPRAPYNEQFF

SEQ ID NO: 66623 - protein, 14 aa, Homo sapiens
  CDR3 for alpha chain variable domain of TCR clone 33312 (TRAV35, TRAJ50)
CAGHRKTSYAKVIF

SEQ ID NO: 66624 - protein, 13 aa, Homo sapiens
  CDR3 for beta chain variable domain of TCR clone 33312 (TRBV7-7, TRBJ2-3)
CASSLSRADTQYF

SEQ ID NO: 66625 - protein, 15 aa, Homo sapiens
  CDR3 for alpha chain variable domain of TCR clone 33313 (TRAV12-3, TRAJ11)
CAMSEENSGYSTLTF

SEQ ID NO: 66626 - protein, 13 aa, Homo sapiens
  CDR3 for beta chain variable domain of TCR clone 33313 (TRBV12-4, TRBJ2-1)
CASSFHSGSEQFL

SEQ ID NO: 66627 - protein, 14 aa, Homo sapiens
  CDR3 for alpha chain variable domain of TCR clone 33314 (TRAV9-2, TRAJ39)
CALYIYNAGNMLTF

SEQ ID NO: 66628 - protein, 13 aa, Homo sapiens
  CDR3 for beta chain variable domain of TCR clone 33314 (TRBV19, TRBJ2-7)
CASSAGHGYEQYF

SEQ ID NO: 66629 - protein, 16 aa, Homo sapiens
  CDR3 for alpha chain variable domain of TCR clone 33315 (TRAV8-4, TRAJ18)
CAVTANGGSTLGRRYF

SEQ ID NO: 66630 - protein, 14 aa, Homo sapiens
  CDR3 for beta chain variable domain of TCR clone 33315 (TRBV12-4, TRBJ1-2)
CASSSAGHIYGYTF

SEQ ID NO: 66631 - protein, 11 aa, Homo sapiens
  CDR3 for alpha chain variable domain of TCR clone 33316 (TRAV1-2, TRAJ31)
CAVNNNARLMF

SEQ ID NO: 66632 - protein, 12 aa, Homo sapiens
  CDR3 for beta chain variable domain of TCR clone 33316 (TRBV11-2, TRBJ2-2)
CASSLPTGELFF

SEQ ID NO: 66633 - protein, 12 aa, Homo sapiens
  CDR3 for alpha chain variable domain of TCR clone 33317 (TRAV26-1, TRAJ26)
CIVFIYGQNFFF

SEQ ID NO: 66634 - protein, 13 aa, Homo sapiens
  CDR3 for beta chain variable domain of TCR clone 33317 (TRBV27, TRBJ1-1)
CASSLSIGAEAFF

SEQ ID NO: 66635 - protein, 12 aa, Homo sapiens
  CDR3 for alpha chain variable domain of TCR clone 33318 (TRAV12-3, TRAJ17)
CAMTLTGNKLTF

SEQ ID NO: 66636 - protein, 16 aa, Homo sapiens
  CDR3 for beta chain variable domain of TCR clone 33318 (TRBV13, TRBJ2-2)
CASSLGRGYGTGELFF

SEQ ID NO: 66637 - protein, 13 aa, Homo sapiens
  CDR3 for alpha chain variable domain of TCR clone 33319 (TRAV3, TRAJ21)
CAVREPDFNKLYF

SEQ ID NO: 66638 - protein, 13 aa, Homo sapiens
  CDR3 for beta chain variable domain of TCR clone 33319 (TRBV9, TRBJ2-1)
CASSPSGGNEQFF

SEQ ID NO: 66639 - protein, 15 aa, Homo sapiens
  CDR3 for alpha chain variable domain of TCR clone 33320 (TRAV21, TRAJ37)
CAVRPTLSNTGKLIF

SEQ ID NO: 66640 - protein, 16 aa, Homo sapiens
  CDR3 for beta chain variable domain of TCR clone 33320 (TRBV24-1, TRBJ2-3)
CATSDSRQDLTDTQYF

SEQ ID NO: 66641 - protein, 15 aa, Homo sapiens
  CDR3 for alpha chain variable domain of TCR clone 33321 (TRAV26-1, TRAJ56)
CIVRVDNGANSKLTF

SEQ ID NO: 66642 - protein, 15 aa, Homo sapiens
  CDR3 for beta chain variable domain of TCR clone 33321 (TRBV20-1, TRBJ2-7)
RSARDPTEVGHEQYF

SEQ ID NO: 66643 - protein, 15 aa, Homo sapiens
  CDR3 for alpha chain variable domain of TCR clone 33322 (TRAV23/DV6, TRAJ18)
CAARYIGSTLGRLYF

SEQ ID NO: 66644 - protein, 13 aa, Homo sapiens
  CDR3 for beta chain variable domain of TCR clone 33322 (TRBV7-2, TRBJ2-7)
CASSSPSGSEQYF

SEQ ID NO: 66645 - protein, 13 aa, Homo sapiens
  CDR3 for alpha chain variable domain of TCR clone 33323 (TRAV1-2, TRAJ9)
CAALNTGGFKTIF

SEQ ID NO: 66646 - protein, 16 aa, Homo sapiens
  CDR3 for beta chain variable domain of TCR clone 33323 (TRBV28, TRBJ2-2)
CASSLEGGSNTGELFL

SEQ ID NO: 66647 - protein, 16 aa, Homo sapiens
  CDR3 for alpha chain variable domain of TCR clone 33324 (TRAV26-1, TRAJ53)
CIVRVAMGGSNYKLPF

SEQ ID NO: 66648 - protein, 12 aa, Homo sapiens
  CDR3 for beta chain variable domain of TCR clone 33324 (TRBV7-9, TRBJ1-5)
CASSPQGQPQHF

SEQ ID NO: 66649 - protein, 14 aa, Homo sapiens
  CDR3 for alpha chain variable domain of TCR clone 33325 (TRAV9-2, TRAJ39)
CALYIYNAGNMLTF

SEQ ID NO: 66650 - protein, 19 aa, Homo sapiens
  CDR3 for beta chain variable domain of TCR clone 33325 (TRBV7-3, TRBJ1-2)
CASSFPQGNDGELWLHLRF

SEQ ID NO: 66651 - protein, 18 aa, Homo sapiens
  CDR3 for alpha chain variable domain of TCR clone 33326 (TRAV26-1, TRAJ22)
CIVRVALISSGSARQLTF

SEQ ID NO: 66652 - protein, 13 aa, Homo sapiens
  CDR3 for beta chain variable domain of TCR clone 33326 (TRBV13, TRBJ2-5)
CASSPEVGDTQYF

SEQ ID NO: 66653 - protein, 15 aa, Homo sapiens
  CDR3 for alpha chain variable domain of TCR clone 33327 (TRAV12-1, TRAJ44)
CVADLPTGTASKLTF

SEQ ID NO: 66654 - protein, 13 aa, Homo sapiens
  CDR3 for beta chain variable domain of TCR clone 33327 (TRBV6-5, TRBJ2-5)
CTSSPQGGETQYF

SEQ ID NO: 66655 - protein, 17 aa, Homo sapiens
  CDR3 for alpha chain variable domain of TCR clone 33328 (TRAV13-1, TRAJ52)
CAASSGAGGTSFGKLTF

SEQ ID NO: 66656 - protein, 15 aa, Homo sapiens
  CDR3 for beta chain variable domain of TCR clone 33328 (TRBV2, TRBJ2-1)
CASSELAGSYNEQFF

SEQ ID NO: 66657 - protein, 15 aa, Homo sapiens
  CDR3 for alpha chain variable domain of TCR clone 33329 (TRAV17, TRAJ48)
CATDETNFGNEKLTF

SEQ ID NO: 66658 - protein, 14 aa, Homo sapiens
  CDR3 for beta chain variable domain of TCR clone 33329 (TRBV10-3, TRBJ1-3)
CAIRGQGAGNTIYF

SEQ ID NO: 66659 - protein, 15 aa, Homo sapiens
  CDR3 for alpha chain variable domain of TCR clone 33330 (TRAV3, TRAJ17)
CAVSPKEAAGNKLTF

SEQ ID NO: 66660 - protein, 12 aa, Homo sapiens
  CDR3 for beta chain variable domain of TCR clone 33330 (TRBV7-9, TRBJ1-6)
CASSLMTSPLHV

SEQ ID NO: 66661 - protein, 15 aa, Homo sapiens
  CDR3 for alpha chain variable domain of TCR clone 33331 (TRAV2, TRAJ15)
CAVEDRGQAGTALIF

SEQ ID NO: 66662 - protein, 13 aa, Homo sapiens
  CDR3 for beta chain variable domain of TCR clone 33331 (TRBV10-2, TRBJ2-7)
CASGASGVYEQYF

SEQ ID NO: 66663 - protein, 13 aa, Homo sapiens
  CDR3 for alpha chain variable domain of TCR clone 33332 (TRAV2, TRAJ40)
CAVVTSGTYKYIF

SEQ ID NO: 66664 - protein, 16 aa, Homo sapiens
  CDR3 for beta chain variable domain of TCR clone 33332 (TRBV13, TRBJ2-2)
CASGPRTGEHTGELFF

SEQ ID NO: 66665 - protein, 17 aa, Homo sapiens
  CDR3 for alpha chain variable domain of TCR clone 33333 (TRAV35, TRAJ47)
GLLDCRTHTEYGNKLGF

SEQ ID NO: 66666 - protein, 11 aa, Homo sapiens
  CDR3 for beta chain variable domain of TCR clone 33333 (TRBV29-1, TRBJ1-1)
CSVEVGTRTFF

SEQ ID NO: 66667 - protein, 10 aa, Homo sapiens
  CDR3 for alpha chain variable domain of TCR clone 33334 (TRAV23/DV6, TRAJ57)
CAASYTLSQG

SEQ ID NO: 66668 - protein, 14 aa, Homo sapiens
  CDR3 for beta chain variable domain of TCR clone 33334 (TRBV25-1, TRBJ1-1)
CASTHLGGNTEAFF

SEQ ID NO: 66669 - protein, 15 aa, Homo sapiens
  CDR3 for alpha chain variable domain of TCR clone 33335 (TRAV26-1, TRAJ29)
CIVRVEGSGNTPLVF

SEQ ID NO: 66670 - protein, 15 aa, Homo sapiens
  CDR3 for beta chain variable domain of TCR clone 33335 (TRBV7-9, TRBJ1-5)
CGSSQGHQPNQPQHF

SEQ ID NO: 66671 - protein, 16 aa, Homo sapiens
  CDR3 for alpha chain variable domain of TCR clone 33336 (TRAV3, TRAJ3)
CAVGDRAKSSASKIIF

SEQ ID NO: 66672 - protein, 13 aa, Homo sapiens
  CDR3 for beta chain variable domain of TCR clone 33336 (TRBV7-2, TRBJ2-4)
CASSREHANIQYF

SEQ ID NO: 66673 - protein, 14 aa, Homo sapiens
  CDR3 for alpha chain variable domain of TCR clone 33337 (TRAV13-1, TRAJ40)
CAASMTSGTYKYIF

SEQ ID NO: 66674 - protein, 15 aa, Homo sapiens
  CDR3 for beta chain variable domain of TCR clone 33337 (TRBV7-3, TRBJ2-1)
CASSTTGGGEVEQFF

SEQ ID NO: 66675 - protein, 12 aa, Homo sapiens
  CDR3 for alpha chain variable domain of TCR clone 33338 (TRAV21, TRAJ33)
CAKMDSNYQLIW

SEQ ID NO: 66676 - protein, 14 aa, Homo sapiens
  CDR3 for beta chain variable domain of TCR clone 33338 (TRBV7-3, TRBJ1-1)
CASSLKGGDTEAFF

SEQ ID NO: 66677 - protein, 18 aa, Homo sapiens
  CDR3 for alpha chain variable domain of TCR clone 33339 (TRAV21, TRAJ52)
CAVRPSPAGGTSYGKLTF

SEQ ID NO: 66678 - protein, 14 aa, Homo sapiens
  CDR3 for beta chain variable domain of TCR clone 33339 (TRBV4-1, TRBJ2-2)
CASSQAVNTGELSF

SEQ ID NO: 66679 - protein, 10 aa, Homo sapiens
  CDR3 for alpha chain variable domain of TCR clone 33340 (TRAV30, TRAJ48)
CGIGNEKLTF

SEQ ID NO: 66680 - protein, 16 aa, Homo sapiens
  CDR3 for beta chain variable domain of TCR clone 33340 (TRBV19, TRBJ1-5)
CASSTRTGGGNQPQHF

SEQ ID NO: 66681 - protein, 14 aa, Homo sapiens
  CDR3 for alpha chain variable domain of TCR clone 33341 (TRAV12-2, TRAJ17)
CAALFKAAGNTLTF

SEQ ID NO: 66682 - protein, 16 aa, Homo sapiens
  CDR3 for beta chain variable domain of TCR clone 33341 (TRBV20-1, TRBJ2-2)
CSASASGIPGAGELFF

SEQ ID NO: 66683 - protein, 14 aa, Homo sapiens
  CDR3 for alpha chain variable domain of TCR clone 33342 (TRAV2, TRAJ9)
CAVEDRSGGFKTIF

SEQ ID NO: 66684 - protein, 15 aa, Homo sapiens
  CDR3 for beta chain variable domain of TCR clone 33342 (TRBV20-1, TRBJ2-7)
CSARDRVSGTDEQYF

SEQ ID NO: 66685 - protein, 18 aa, Homo sapiens
  CDR3 for alpha chain variable domain of TCR clone 33343 (TRAV21, TRAJ52)
CAVRPSPAGGTSYGRLTF

SEQ ID NO: 66686 - protein, 14 aa, Homo sapiens
  CDR3 for beta chain variable domain of TCR clone 33343 (TRBV4-1, TRBJ2-2)
CASSQAVNTGELFF

SEQ ID NO: 66687 - protein, 11 aa, Homo sapiens
  CDR3 for alpha chain variable domain of TCR clone 33344 (TRAV1-2, TRAJ20)
CAMANDYKLSF

SEQ ID NO: 66688 - protein, 18 aa, Homo sapiens
  CDR3 for beta chain variable domain of TCR clone 33344 (TRBV20-1, TRBJ2-6)
CSAETTPTHGSGANVLTF

SEQ ID NO: 66689 - protein, 15 aa, Homo sapiens
  CDR3 for alpha chain variable domain of TCR clone 33345 (TRAV25, TRAJ52)
CAGRPGGTSYGKLTF

SEQ ID NO: 66690 - protein, 17 aa, Homo sapiens
  CDR3 for beta chain variable domain of TCR clone 33345 (TRBV7-8, TRBJ2-6)
CASSAGTGGAGANILTF

SEQ ID NO: 66691 - protein, 14 aa, Homo sapiens
  CDR3 for alpha chain variable domain of TCR clone 33346 (TRAV9-2, TRAJ39)
CALYIYNAGNMLTF

SEQ ID NO: 66692 - protein, 15 aa, Homo sapiens
  CDR3 for beta chain variable domain of TCR clone 33346 (TRBV7-2, TRBJ2-2)
CASRRPGQNTGELFF

SEQ ID NO: 66693 - protein, 14 aa, Homo sapiens
  CDR3 for alpha chain variable domain of TCR clone 33347 (TRAV12-1, TRAJ17)
CVVNYKAAGNKLTF

SEQ ID NO: 66694 - protein, 18 aa, Homo sapiens
  CDR3 for beta chain variable domain of TCR clone 33347 (TRBV7-9, TRBJ2-7)
CASSLTTSGSRTWYEQYF

SEQ ID NO: 66695 - protein, 15 aa, Homo sapiens
  CDR3 for alpha chain variable domain of TCR clone 33348 (TRAV8-3, TRAJ41)
CAVGSNSNSGYAPNF

SEQ ID NO: 66696 - protein, 17 aa, Homo sapiens
  CDR3 for beta chain variable domain of TCR clone 33348 (TRBV25-1, TRBJ2-1)
CASSAYGQGRGVYEQFF

SEQ ID NO: 66697 - protein, 13 aa, Homo sapiens
  CDR3 for alpha chain variable domain of TCR clone 33349 (TRAV13-1, TRAJ6)
CAASRGGSYIPTF

SEQ ID NO: 66698 - protein, 17 aa, Homo sapiens
  CDR3 for beta chain variable domain of TCR clone 33349 (TRBV5-5, TRBJ1-2)
CASSLGSLDGQSEGYTF

SEQ ID NO: 66699 - protein, 13 aa, Homo sapiens
  CDR3 for alpha chain variable domain of TCR clone 33350 (TRAV21, TRAJ34)
CSVSEGDTDKLIF

SEQ ID NO: 66700 - protein, 17 aa, Homo sapiens
  CDR3 for beta chain variable domain of TCR clone 33350 (TRBV20-1, TRBJ1-5)
CSARDPSAQGFNQPQHF

SEQ ID NO: 66701 - protein, 16 aa, Homo sapiens
  CDR3 for alpha chain variable domain of TCR clone 33351 (TRAV17, TRAJ22)
CATGPISSGSARQLTF

SEQ ID NO: 66702 - protein, 13 aa, Homo sapiens
  CDR3 for beta chain variable domain of TCR clone 33351 (TRBV11-2, TRBJ2-1)
CASSLGLAGGQFF

SEQ ID NO: 66703 - protein, 12 aa, Homo sapiens
  CDR3 for alpha chain variable domain of TCR clone 33352 (TRAV16, TRAJ10)
CSRTGGGNKLTF

SEQ ID NO: 66704 - protein, 15 aa, Homo sapiens
  CDR3 for beta chain variable domain of TCR clone 33352 (TRBV7-9, TRBJ1-2)
CASSLDREPNYGYTF

SEQ ID NO: 66705 - protein, 15 aa, Homo sapiens
  CDR3 for alpha chain variable domain of TCR clone 33353 (TRAV12-3, TRAJ27)
CAMRDYNTNAGKSTF

SEQ ID NO: 66706 - protein, 13 aa, Homo sapiens
  CDR3 for beta chain variable domain of TCR clone 33353 (TRBV11-2, TRBJ2-5)
CASSRGPSETQYF

SEQ ID NO: 66707 - protein, 13 aa, Homo sapiens
  CDR3 for alpha chain variable domain of TCR clone 33354 (TRAV12-3, TRAJ35)
CAMAIGFGNVLHF

SEQ ID NO: 66708 - protein, 15 aa, Homo sapiens
  CDR3 for beta chain variable domain of TCR clone 33354 (TRBV20-1, TRBJ2-1)
CSARGSGTYYNEQFF

SEQ ID NO: 66709 - protein, 18 aa, Homo sapiens
  CDR3 for alpha chain variable domain of TCR clone 33355 (TRAV13-1, TRAJ52)
CEAKNPNAGGTSYGKLTF

SEQ ID NO: 66710 - protein, 15 aa, Homo sapiens
  CDR3 for beta chain variable domain of TCR clone 33355 (TRBV6-1, TRBJ2-3)
CASSERGGITDTQYF

SEQ ID NO: 66711 - protein, 14 aa, Homo sapiens
  CDR3 for alpha chain variable domain of TCR clone 33356 (TRAV20, TRAJ56)
CAVQFGGANSKLTF

SEQ ID NO: 66712 - protein, 14 aa, Homo sapiens
  CDR3 for beta chain variable domain of TCR clone 33356 (TRBV20-1, TRBJ2-7)
CSAKRGRSSYEKYF

SEQ ID NO: 66713 - protein, 14 aa, Homo sapiens
  CDR3 for alpha chain variable domain of TCR clone 33357 (TRAV13-1, TRAJ44)
CAAKATGTASKLTF

SEQ ID NO: 66714 - protein, 17 aa, Homo sapiens
  CDR3 for beta chain variable domain of TCR clone 33357 (TRBV7-3, TRBJ2-3)
CASILMKRMRGADTQYF

SEQ ID NO: 66715 - protein, 18 aa, Homo sapiens
  CDR3 for alpha chain variable domain of TCR clone 33358 (TRAV29/DV5, TRAJ52)
QCTSVQQADGTSYGKLTF

SEQ ID NO: 66716 - protein, 13 aa, Homo sapiens
  CDR3 for beta chain variable domain of TCR clone 33358 (TRBV7-2, TRBJ1-1)
CVSNLKGAKVAFF

SEQ ID NO: 66717 - protein, 11 aa, Homo sapiens
  CDR3 for alpha chain variable domain of TCR clone 33359 (TRAV2, TRAJ40)
CAVENPGNLQI

SEQ ID NO: 66718 - protein, 14 aa, Homo sapiens
  CDR3 for beta chain variable domain of TCR clone 33359 (TRBV19, TRBJ2-2)
CASSTLHRSGELFF

SEQ ID NO: 66719 - protein, 16 aa, Homo sapiens
  CDR3 for alpha chain variable domain of TCR clone 33360 (TRAV30, TRAJ24)
CGTEIVDADGWGKFQF

SEQ ID NO: 66720 - protein, 13 aa, Homo sapiens
  CDR3 for beta chain variable domain of TCR clone 33360 (TRBV20-1, TRBJ1-1)
CSARGGGNTEAFF

SEQ ID NO: 66721 - protein, 13 aa, Homo sapiens
  CDR3 for alpha chain variable domain of TCR clone 33361 (TRAV3, TRAJ21)
CAVREPDFNKFYF

SEQ ID NO: 66722 - protein, 13 aa, Homo sapiens
  CDR3 for beta chain variable domain of TCR clone 33361 (TRBV9, TRBJ2-1)
CASSHSGGNEQFF

SEQ ID NO: 66723 - protein, 17 aa, Homo sapiens
  CDR3 for alpha chain variable domain of TCR clone 33362 (TRAV3, TRAJ6)
CAVRDGPRAGGSYIPTF

SEQ ID NO: 66724 - protein, 16 aa, Homo sapiens
  CDR3 for beta chain variable domain of TCR clone 33362 (TRBV2, TRBJ2-3)
CASSTSVEGVTDTQYF

SEQ ID NO: 66725 - protein, 16 aa, Homo sapiens
  CDR3 for alpha chain variable domain of TCR clone 33363 (TRAV3, TRAJ6)
CAVRDGMRRRKLHTYI

SEQ ID NO: 66726 - protein, 15 aa, Homo sapiens
  CDR3 for beta chain variable domain of TCR clone 33363 (TRBV9, TRBJ2-1)
CASSLAGSSYNEQFF

SEQ ID NO: 66727 - protein, 16 aa, Homo sapiens
  CDR3 for alpha chain variable domain of TCR clone 33364 (TRAV3, TRAJ3)
CAVRDRAKSSASKIIF

SEQ ID NO: 66728 - protein, 13 aa, Homo sapiens
  CDR3 for beta chain variable domain of TCR clone 33364 (TRBV10-3, TRBJ2-7)
CASRLAVNYEQYF

SEQ ID NO: 66729 - protein, 14 aa, Homo sapiens
  CDR3 for alpha chain variable domain of TCR clone 33365 (TRAV26-1, TRAJ22)
CIVRVYGSARQLTL

SEQ ID NO: 66730 - protein, 17 aa, Homo sapiens
  CDR3 for beta chain variable domain of TCR clone 33365 (TRBV7-3, TRBJ2-3)
CASSPGGLAGFGDTQYF

SEQ ID NO: 66731 - protein, 15 aa, Homo sapiens
  CDR3 for alpha chain variable domain of TCR clone 33366 (TRAV3, TRAJ13)
CAVRVYSGGYQKVTF

SEQ ID NO: 66732 - protein, 15 aa, Homo sapiens
  CDR3 for beta chain variable domain of TCR clone 33366 (TRBV20-1, TRBJ2-7)
CSARDRVSGMDEQYF

SEQ ID NO: 66733 - protein, 14 aa, Homo sapiens
  CDR3 for alpha chain variable domain of TCR clone 33367 (TRAV12-3, TRAJ10)
SHLPLTGGGNKLTF

SEQ ID NO: 66734 - protein, 13 aa, Homo sapiens
  CDR3 for beta chain variable domain of TCR clone 33367 (TRBV7-2, TRBJ2-7)
CASSSPSGSEQYF

SEQ ID NO: 66735 - protein, 12 aa, Homo sapiens
  CDR3 for alpha chain variable domain of TCR clone 33368 (TRAV13-1, TRAJ21)
CAAKEGFNKFYF

SEQ ID NO: 66736 - protein, 14 aa, Homo sapiens
  CDR3 for beta chain variable domain of TCR clone 33368 (TRBV5-4, TRBJ1-1)
CASSLDSRGDEAFF

SEQ ID NO: 66737 - protein, 14 aa, Homo sapiens
  CDR3 for alpha chain variable domain of TCR clone 33369 (TRAV1-1, TRAJ27)
CAVIHNTNAGKSTF

SEQ ID NO: 66738 - protein, 15 aa, Homo sapiens
  CDR3 for beta chain variable domain of TCR clone 33369 (TRBV7-2, TRBJ2-1)
CASSSGLAGGNEQFF

SEQ ID NO: 66739 - protein, 14 aa, Homo sapiens
  CDR3 for alpha chain variable domain of TCR clone 33370 (TRAV38-1, TRAJ45)
CASHSGGGADGLTF

SEQ ID NO: 66740 - protein, 13 aa, Homo sapiens
  CDR3 for beta chain variable domain of TCR clone 33370 (TRBV10-3, TRBJ1-2)
CAISERDSYGYTL

SEQ ID NO: 66741 - protein, 14 aa, Homo sapiens
  CDR3 for alpha chain variable domain of TCR clone 33371 (TRAV1-2, TRAJ8)
CAVREDTGFQKLVF

SEQ ID NO: 66742 - protein, 15 aa, Homo sapiens
  CDR3 for beta chain variable domain of TCR clone 33371 (TRBV6-3, TRBJ2-7)
CASSSPGTDFYEQYF

SEQ ID NO: 66743 - protein, 15 aa, Homo sapiens
  CDR3 for alpha chain variable domain of TCR clone 33372 (TRAV34, TRAJ38)
CGADFTPGNNRKLIW

SEQ ID NO: 66744 - protein, 13 aa, Homo sapiens
  CDR3 for beta chain variable domain of TCR clone 33372 (TRBV7-9, TRBJ1-2)
CASSLKQNYGYTF

SEQ ID NO: 66745 - protein, 14 aa, Homo sapiens
  CDR3 for alpha chain variable domain of TCR clone 33373 (TRAV1-2, TRAJ29)
CAVRTDSGNTPLVY

SEQ ID NO: 66746 - protein, 14 aa, Homo sapiens
  CDR3 for beta chain variable domain of TCR clone 33373 (TRBV7-2, TRBJ2-7)
CASSPKTSFYEQYF

SEQ ID NO: 66747 - protein, 16 aa, Homo sapiens
  CDR3 for alpha chain variable domain of TCR clone 33374 (TRAV27, TRAJ52)
CAGAPAGGTSYGKLTF

SEQ ID NO: 66748 - protein, 12 aa, Homo sapiens
  CDR3 for beta chain variable domain of TCR clone 33374 (TRBV27, TRBJ2-1)
CASRGVYNEQFF

SEQ ID NO: 66749 - protein, 16 aa, Homo sapiens
  CDR3 for alpha chain variable domain of TCR clone 33375 (TRAV12-3, TRAJ53)
CAMSPGSGGSIYKLTF

SEQ ID NO: 66750 - protein, 11 aa, Homo sapiens
  CDR3 for beta chain variable domain of TCR clone 33375 (TRBV29-1, TRBJ2-5)
CSEDRTGTQYF

SEQ ID NO: 66751 - protein, 14 aa, Homo sapiens
  CDR3 for alpha chain variable domain of TCR clone 33376 (TRAV1-2, TRAJ8)
YAAREDTGFQKLVF

SEQ ID NO: 66752 - protein, 13 aa, Homo sapiens
  CDR3 for beta chain variable domain of TCR clone 33376 (TRBV6-4, TRBJ2-3)
CASSVSWADTQYF

SEQ ID NO: 66753 - protein, 13 aa, Homo sapiens
  CDR3 for alpha chain variable domain of TCR clone 33377 (TRAV21, TRAJ57)
CAVTQGGSEKLVF

SEQ ID NO: 66754 - protein, 13 aa, Homo sapiens
  CDR3 for beta chain variable domain of TCR clone 33377 (TRBV19, TRBJ1-2)
CASSVPGQDGYTF

SEQ ID NO: 66755 - protein, 18 aa, Homo sapiens
  CDR3 for alpha chain variable domain of TCR clone 33378 (TRAV26-2, TRAJ45)
CILRVDKYSGGGAAGLTF

SEQ ID NO: 66756 - protein, 16 aa, Homo sapiens
  CDR3 for beta chain variable domain of TCR clone 33378 (TRBV2, TRBJ1-4)
CASNLLQGATNEKLFF

SEQ ID NO: 66757 - protein, 13 aa, Homo sapiens
  CDR3 for alpha chain variable domain of TCR clone 33379 (TRAV21, TRAJ36)
CAVIKTGANNLFF

SEQ ID NO: 66758 - protein, 13 aa, Homo sapiens
  CDR3 for beta chain variable domain of TCR clone 33379 (TRBV29-1, TRBJ2-3)
CSAARGGRDTQYF

SEQ ID NO: 66759 - protein, 13 aa, Homo sapiens
  CDR3 for alpha chain variable domain of TCR clone 33380 (TRAV21, TRAJ20)
CAVGLRVDYKLSF

SEQ ID NO: 66760 - protein, 15 aa, Homo sapiens
  CDR3 for beta chain variable domain of TCR clone 33380 (TRBV28, TRBJ2-5)
CASSPPWSYQETQYF

SEQ ID NO: 66761 - protein, 16 aa, Homo sapiens
  CDR3 for alpha chain variable domain of TCR clone 33381 (TRAV27, TRAJ13)
CAGAKSDSGGDQKVTF

SEQ ID NO: 66762 - protein, 15 aa, Homo sapiens
  CDR3 for beta chain variable domain of TCR clone 33381 (TRBV29-1, TRBJ2-1)
CSVGRHALFYNEQFF

SEQ ID NO: 66763 - protein, 13 aa, Homo sapiens
  CDR3 for alpha chain variable domain of TCR clone 33382 (TRAV2, TRAJ29)
CAAQNSGNTPLVF

SEQ ID NO: 66764 - protein, 14 aa, Homo sapiens
  CDR3 for beta chain variable domain of TCR clone 33382 (TRBV7-9, TRBJ2-4)
CASSLAVGGNIQYF

SEQ ID NO: 66765 - protein, 15 aa, Homo sapiens
  CDR3 for alpha chain variable domain of TCR clone 33383 (TRAV26-1, TRAJ22)
CIVRVSFWFCKATDL

SEQ ID NO: 66766 - protein, 13 aa, Homo sapiens
  CDR3 for beta chain variable domain of TCR clone 33383 (TRBV7-9, TRBJ1-2)
CASSLKQNHGYTF

SEQ ID NO: 66767 - protein, 14 aa, Homo sapiens
  CDR3 for alpha chain variable domain of TCR clone 33384 (TRAV1-2, TRAJ8)
CAVREDTGFQRLVF

SEQ ID NO: 66768 - protein, 15 aa, Homo sapiens
  CDR3 for beta chain variable domain of TCR clone 33384 (TRBV7-9, TRBJ1-4)
CASSARTGGNEKLFF

SEQ ID NO: 66769 - protein, 16 aa, Homo sapiens
  CDR3 for alpha chain variable domain of TCR clone 33385 (TRAV4, TRAJ9)
CLVGDPNRLGGFKTIF

SEQ ID NO: 66770 - protein, 14 aa, Homo sapiens
  CDR3 for beta chain variable domain of TCR clone 33385 (TRBV20-1, TRBJ1-1)
CSAQTRIGGTEAFF

SEQ ID NO: 66771 - protein, 10 aa, Homo sapiens
  CDR3 for alpha chain variable domain of TCR clone 33386 (TRAV2, TRAJ34)
CAVVNNKLIF

SEQ ID NO: 66772 - protein, 15 aa, Homo sapiens
  CDR3 for beta chain variable domain of TCR clone 33386 (TRBV3-1, TRBJ2-2)
CASSQDWTRAGELFF

SEQ ID NO: 66773 - protein, 16 aa, Homo sapiens
  CDR3 for alpha chain variable domain of TCR clone 33387 (TRAV8-6, TRAJ39)
CAVMSMNNNAGNMLTF

SEQ ID NO: 66774 - protein, 16 aa, Homo sapiens
  CDR3 for beta chain variable domain of TCR clone 33387 (TRBV15, TRBJ2-5)
CATSRYLETAQETQYF

SEQ ID NO: 66775 - protein, 14 aa, Homo sapiens
  CDR3 for alpha chain variable domain of TCR clone 33388 (TRAV13-1, TRAJ44)
CAAKATGTASKITF

SEQ ID NO: 66776 - protein, 17 aa, Homo sapiens
  CDR3 for beta chain variable domain of TCR clone 33388 (TRBV7-3, TRBJ2-3)
CASSLMKRMRGADTQYF

SEQ ID NO: 66777 - protein, 17 aa, Homo sapiens
  CDR3 for alpha chain variable domain of TCR clone 33389 (TRAV20, TRAJ42)
CAVQAWGYGGSQGDLIF

SEQ ID NO: 66778 - protein, 16 aa, Homo sapiens
  CDR3 for beta chain variable domain of TCR clone 33389 (TRBV29-1, TRBJ2-5)
CSVEGLAGDYQETQYF

SEQ ID NO: 66779 - protein, 12 aa, Homo sapiens
  CDR3 for alpha chain variable domain of TCR clone 33390 (TRAV12-1, TRAJ40)
CVVYSGTYKYIF

SEQ ID NO: 66780 - protein, 14 aa, Homo sapiens
  CDR3 for beta chain variable domain of TCR clone 33390 (TRBV25-1, TRBJ1-1)
CASTHLGGNTEAFF

SEQ ID NO: 66781 - protein, 14 aa, Homo sapiens
  CDR3 for alpha chain variable domain of TCR clone 33391 (TRAV9-2, TRAJ39)
CALYIYNAGNMLTF

SEQ ID NO: 66782 - protein, 14 aa, Homo sapiens
  CDR3 for beta chain variable domain of TCR clone 33391 (TRBV11-2, TRBJ1-2)
CASSLGTANYGYTF

SEQ ID NO: 66783 - protein, 16 aa, Homo sapiens
  CDR3 for alpha chain variable domain of TCR clone 33392 (TRAV21, TRAJ37)
CAVRPRGASNTGKLIF

SEQ ID NO: 66784 - protein, 13 aa, Homo sapiens
  CDR3 for beta chain variable domain of TCR clone 33392 (TRBV7-9, TRBJ2-5)
CASLSPGQETQYF

SEQ ID NO: 66785 - protein, 18 aa, Homo sapiens
  CDR3 for alpha chain variable domain of TCR clone 33393 (TRAV29/DV5, TRAJ52)
CAAGFRGTGGTSYGKLTF

SEQ ID NO: 66786 - protein, 16 aa, Homo sapiens
  CDR3 for beta chain variable domain of TCR clone 33393 (TRBV7-3, TRBJ2-2)
CASSLKRGTLSGELFF

SEQ ID NO: 66787 - protein, 11 aa, Homo sapiens
  CDR3 for alpha chain variable domain of TCR clone 33394 (TRAV30, TRAJ23)
CGTEIAGKLIS

SEQ ID NO: 66788 - protein, 16 aa, Homo sapiens
  CDR3 for beta chain variable domain of TCR clone 33394 (TRBV7-2, TRBJ2-7)
CASTSQAASGGYEQYF

SEQ ID NO: 66789 - protein, 13 aa, Homo sapiens
  CDR3 for alpha chain variable domain of TCR clone 33395 (TRAV29/DV5, TRAJ31)
CAASRNNNARLMF

SEQ ID NO: 66790 - protein, 13 aa, Homo sapiens
  CDR3 for beta chain variable domain of TCR clone 33395 (TRBV10-3, TRBJ2-7)
CASKLAVNYEQYF

SEQ ID NO: 66791 - protein, 14 aa, Homo sapiens
  CDR3 for alpha chain variable domain of TCR clone 33396 (TRAV26-1, TRAJ38)
CIADNAGHNRKLIW

SEQ ID NO: 66792 - protein, 13 aa, Homo sapiens
  CDR3 for beta chain variable domain of TCR clone 33396 (TRBV20-1, TRBJ1-1)
CSARGGGNTEAFF

SEQ ID NO: 66793 - protein, 13 aa, Homo sapiens
  CDR3 for alpha chain variable domain of TCR clone 33397 (TRAV23/DV6, TRAJ22)
CAPYSGSARQLTF

SEQ ID NO: 66794 - protein, 15 aa, Homo sapiens
  CDR3 for beta chain variable domain of TCR clone 33397 (TRBV11-2, TRBJ1-6)
CASSLDPRAVSPLHF

SEQ ID NO: 66795 - protein, 14 aa, Homo sapiens
  CDR3 for alpha chain variable domain of TCR clone 33398 (TRAV26-1, TRAJ21)
CIVRPPYNFNKFYF

SEQ ID NO: 66796 - protein, 14 aa, Homo sapiens
  CDR3 for beta chain variable domain of TCR clone 33398 (TRBV11-3, TRBJ2-1)
CASSAKTSGSIQFF

SEQ ID NO: 66797 - protein, 14 aa, Homo sapiens
  CDR3 for alpha chain variable domain of TCR clone 33399 (TRAV35, TRAJ22)
CAGLRPGSARQLTF

SEQ ID NO: 66798 - protein, 14 aa, Homo sapiens
  CDR3 for beta chain variable domain of TCR clone 33399 (TRBV5-1, TRBJ2-3)
CASSPGLAADTQYF

SEQ ID NO: 66799 - protein, 14 aa, Homo sapiens
  CDR3 for alpha chain variable domain of TCR clone 33400 (TRAV35, TRAJ56)
CAGQLTGANSKLAF

SEQ ID NO: 66800 - protein, 16 aa, Homo sapiens
  CDR3 for beta chain variable domain of TCR clone 33400 (TRBV7-2, TRBJ1-2)
CASSSNQDRRGHGYTF

SEQ ID NO: 66801 - protein, 15 aa, Homo sapiens
  CDR3 for alpha chain variable domain of TCR clone 33401 (TRAV8-4, TRAJ47)
CAVGDPEEYGNKLVF

SEQ ID NO: 66802 - protein, 15 aa, Homo sapiens
  CDR3 for beta chain variable domain of TCR clone 33401 (TRBV11-2, TRBJ2-1)
CASSLGPDSYNEQFF

SEQ ID NO: 66803 - protein, 11 aa, Homo sapiens
  CDR3 for alpha chain variable domain of TCR clone 33402 (TRAV2, TRAJ13)
CASGGYQKVTF

SEQ ID NO: 66804 - protein, 15 aa, Homo sapiens
  CDR3 for beta chain variable domain of TCR clone 33402 (TRBV20-1, TRBJ1-1)
CSASRGVTGNTEAFF

SEQ ID NO: 66805 - protein, 13 aa, Homo sapiens
  CDR3 for alpha chain variable domain of TCR clone 33403 (TRAV27, TRAJ49)
CAPRPYTGNQFYF

SEQ ID NO: 66806 - protein, 15 aa, Homo sapiens
  CDR3 for beta chain variable domain of TCR clone 33403 (TRBV27, TRBJ2-1)
CASSNGGGSSNEQFF

SEQ ID NO: 66807 - protein, 15 aa, Homo sapiens
  CDR3 for alpha chain variable domain of TCR clone 33404 (TRAV17, TRAJ52)
CATEAGGTRYGKLTF

SEQ ID NO: 66808 - protein, 14 aa, Homo sapiens
  CDR3 for beta chain variable domain of TCR clone 33404 (TRBV28, TRBJ1-5)
CASSLGVLVKPQHF

SEQ ID NO: 66809 - protein, 14 aa, Homo sapiens
  CDR3 for alpha chain variable domain of TCR clone 33405 (TRAV23/DV6, TRAJ13)
CAAMYSGGYQKVTF

SEQ ID NO: 66810 - protein, 14 aa, Homo sapiens
  CDR3 for beta chain variable domain of TCR clone 33405 (TRBV7-9, TRBJ2-1)
CASSPRDSLYGQFF

SEQ ID NO: 66811 - protein, 12 aa, Homo sapiens
  CDR3 for alpha chain variable domain of TCR clone 33406 (TRAV12-1, TRAJ40)
CVVYSGTYKYIF

SEQ ID NO: 66812 - protein, 18 aa, Homo sapiens
  CDR3 for beta chain variable domain of TCR clone 33406 (TRBV11-2, TRBJ2-3)
CASSLGGASRGDPNTQYF

SEQ ID NO: 66813 - protein, 16 aa, Homo sapiens
  CDR3 for alpha chain variable domain of TCR clone 33407 (TRAV4, TRAJ22)
CLVGDPYSGSARQLTF

SEQ ID NO: 66814 - protein, 16 aa, Homo sapiens
  CDR3 for beta chain variable domain of TCR clone 33407 (TRBV7-9, TRBJ2-3)
CASSPWREVGTDTQYF

SEQ ID NO: 66815 - protein, 13 aa, Homo sapiens
  CDR3 for alpha chain variable domain of TCR clone 33408 (TRAV36/DV7, TRAJ37)
CAVFSSNTGKPIF

SEQ ID NO: 66816 - protein, 16 aa, Homo sapiens
  CDR3 for beta chain variable domain of TCR clone 33408 (TRBV3-1, TRBJ2-5)
CASSPGQFNGFGTQYF

SEQ ID NO: 66817 - protein, 12 aa, Homo sapiens
  CDR3 for alpha chain variable domain of TCR clone 33409 (TRAV1-1, TRAJ8)
CAGGTGFQKLVF

SEQ ID NO: 66818 - protein, 15 aa, Homo sapiens
  CDR3 for beta chain variable domain of TCR clone 33409 (TRBV7-9, TRBJ1-4)
CASSWTGGFNEKLFF

SEQ ID NO: 66819 - protein, 12 aa, Homo sapiens
  CDR3 for alpha chain variable domain of TCR clone 33410 (TRAV36/DV7, TRAJ54)
CAVVRGAQKLVL

SEQ ID NO: 66820 - protein, 14 aa, Homo sapiens
  CDR3 for beta chain variable domain of TCR clone 33410 (TRBV7-3, TRBJ1-1)
CASSLKGGNTEAFF

SEQ ID NO: 66821 - protein, 14 aa, Homo sapiens
  CDR3 for alpha chain variable domain of TCR clone 33411 (TRAV1-2, TRAJ16)
CAVNRFSDGQKLPF

SEQ ID NO: 66822 - protein, 13 aa, Homo sapiens
  CDR3 for beta chain variable domain of TCR clone 33411 (TRBV10-3, TRBJ1-2)
CAISERDSYGYTF

SEQ ID NO: 66823 - protein, 16 aa, Homo sapiens
  CDR3 for alpha chain variable domain of TCR clone 33412 (TRAV12-3, TRAJ53)
CAMSLGSGGSNYKLTF

SEQ ID NO: 66824 - protein, 11 aa, Homo sapiens
  CDR3 for beta chain variable domain of TCR clone 33412 (TRBV29-1, TRBJ2-5)
CSVASGETQYF

SEQ ID NO: 66825 - protein, 12 aa, Homo sapiens
  CDR3 for alpha chain variable domain of TCR clone 33413 (TRAV36/DV7, TRAJ54)
CAVVRGAQKLVF

SEQ ID NO: 66826 - protein, 14 aa, Homo sapiens
  CDR3 for beta chain variable domain of TCR clone 33413 (TRBV7-3, TRBJ1-1)
CASSLKGGNTETFF

SEQ ID NO: 66827 - protein, 16 aa, Homo sapiens
  CDR3 for alpha chain variable domain of TCR clone 33414 (TRAV16, TRAJ4)
CALSRMFSGGYNKLIF

SEQ ID NO: 66828 - protein, 14 aa, Homo sapiens
  CDR3 for beta chain variable domain of TCR clone 33414 (TRBV6-1, TRBJ1-3)
CASVQGGGGNTIYF

SEQ ID NO: 66829 - protein, 16 aa, Homo sapiens
  CDR3 for alpha chain variable domain of TCR clone 33415 (TRAV12-3, TRAJ53)
CAMSPGRGGSNYKLTF

SEQ ID NO: 66830 - protein, 14 aa, Homo sapiens
  CDR3 for beta chain variable domain of TCR clone 33415 (TRBV7-2, TRBJ1-1)
CASSFLTGTTEAFF

SEQ ID NO: 66831 - protein, 14 aa, Homo sapiens
  CDR3 for alpha chain variable domain of TCR clone 33416 (TRAV8-2, TRAJ4)
CVVSPSGGYNKLIF

SEQ ID NO: 66832 - protein, 15 aa, Homo sapiens
  CDR3 for beta chain variable domain of TCR clone 33416 (TRBV27, TRBJ2-1)
CASSNGGGSSNEQFF

SEQ ID NO: 66833 - protein, 14 aa, Homo sapiens
  CDR3 for alpha chain variable domain of TCR clone 33417 (TRAV12-3, TRAJ10)
SHLPLTGGGKKLTF

SEQ ID NO: 66834 - protein, 11 aa, Homo sapiens
  CDR3 for beta chain variable domain of TCR clone 33417 (TRBV19, TRBJ1-1)
CASSIGSEAFF

SEQ ID NO: 66835 - protein, 12 aa, Homo sapiens
  CDR3 for alpha chain variable domain of TCR clone 33418 (TRAV3, TRAJ7)
CADLLWEQQTRF

SEQ ID NO: 66836 - protein, 13 aa, Homo sapiens
  CDR3 for beta chain variable domain of TCR clone 33418 (TRBV7-3, TRBJ2-5)
CASSCRGGETQYF

SEQ ID NO: 66837 - protein, 14 aa, Homo sapiens
  CDR3 for alpha chain variable domain of TCR clone 33419 (TRAV38-1, TRAJ40)
CALRPTSGTYKYIF

SEQ ID NO: 66838 - protein, 15 aa, Homo sapiens
  CDR3 for beta chain variable domain of TCR clone 33419 (TRBV27, TRBJ1-6)
CASSFDRGLGSPLHF

SEQ ID NO: 66839 - protein, 14 aa, Homo sapiens
  CDR3 for alpha chain variable domain of TCR clone 33420 (TRAV8-6, TRAJ29)
CAVSRASGNTPLVF

SEQ ID NO: 66840 - protein, 13 aa, Homo sapiens
  CDR3 for beta chain variable domain of TCR clone 33420 (TRBV19, TRBJ1-5)
CASSEGSSQPQHF

SEQ ID NO: 66841 - protein, 14 aa, Homo sapiens
  CDR3 for alpha chain variable domain of TCR clone 33421 (TRAV1-2, TRAJ8)
CAVREDTCFQKLVF

SEQ ID NO: 66842 - protein, 15 aa, Homo sapiens
  CDR3 for beta chain variable domain of TCR clone 33421 (TRBV20-1, TRBJ2-7)
CSARDRVSGMDEQYF

SEQ ID NO: 66843 - protein, 13 aa, Homo sapiens
  CDR3 for alpha chain variable domain of TCR clone 33422 (TRAV21, TRAJ57)
CAVTQGGSEKLVF

SEQ ID NO: 66844 - protein, 20 aa, Homo sapiens
  CDR3 for beta chain variable domain of TCR clone 33422 (TRBV7-8, TRBJ2-2)
CASSHLFPGPTIHITGELFF

SEQ ID NO: 66845 - protein, 11 aa, Homo sapiens
  CDR3 for alpha chain variable domain of TCR clone 33423 (TRAV17, TRAJ43)
CATDNNNDMRF

SEQ ID NO: 66846 - protein, 15 aa, Homo sapiens
  CDR3 for beta chain variable domain of TCR clone 33423 (TRBV20-1, TRBJ1-2)
CSAIRTGAFNYGYTS

SEQ ID NO: 66847 - protein, 18 aa, Homo sapiens
  CDR3 for alpha chain variable domain of TCR clone 33424 (TRAV21, TRAJ52)
CAVRPSPAGGTSHGKLTF

SEQ ID NO: 66848 - protein, 13 aa, Homo sapiens
  CDR3 for beta chain variable domain of TCR clone 33424 (TRBV20-1, TRBJ2-5)
CSAREAFQETQYF

SEQ ID NO: 66849 - protein, 13 aa, Homo sapiens
  CDR3 for alpha chain variable domain of TCR clone 33425 (TRAV27, TRAJ53)
CAGQGGSNYKLTF

SEQ ID NO: 66850 - protein, 13 aa, Homo sapiens
  CDR3 for beta chain variable domain of TCR clone 33425 (TRBV29-1, TRBJ1-1)
CSVESGFGTEAVF

SEQ ID NO: 66851 - protein, 15 aa, Homo sapiens
  CDR3 for alpha chain variable domain of TCR clone 33426 (TRAV13-1, TRAJ5)
CAASPRGHGQESTYF

SEQ ID NO: 66852 - protein, 15 aa, Homo sapiens
  CDR3 for beta chain variable domain of TCR clone 33426 (TRBV6-1, TRBJ2-3)
CASSERGGITDTQYF

SEQ ID NO: 66853 - protein, 12 aa, Homo sapiens
  CDR3 for alpha chain variable domain of TCR clone 33427 (TRAV1-1, TRAJ39)
CAVPVVGNMLTF

SEQ ID NO: 66854 - protein, 15 aa, Homo sapiens
  CDR3 for beta chain variable domain of TCR clone 33427 (TRBV19, TRBJ1-6)
CASSTQGAVGSPLHL

SEQ ID NO: 66855 - protein, 15 aa, Homo sapiens
  CDR3 for alpha chain variable domain of TCR clone 33428 (TRAV17, TRAJ52)
CATEAGGTSYGKLTF

SEQ ID NO: 66856 - protein, 14 aa, Homo sapiens
  CDR3 for beta chain variable domain of TCR clone 33428 (TRBV28, TRBJ1-5)
CASSLGVLVRPQHF

SEQ ID NO: 66857 - protein, 18 aa, Homo sapiens
  CDR3 for alpha chain variable domain of TCR clone 33429 (TRAV13-1, TRAJ52)
CAAKNPNAGGTSSGKLTF

SEQ ID NO: 66858 - protein, 15 aa, Homo sapiens
  CDR3 for beta chain variable domain of TCR clone 33429 (TRBV6-1, TRBJ2-3)
CASSERGGITDTQYF

SEQ ID NO: 66859 - protein, 14 aa, Homo sapiens
  CDR3 for alpha chain variable domain of TCR clone 33430 (TRAV3, TRAJ9)
CAVRLHTGGFKTIF

SEQ ID NO: 66860 - protein, 15 aa, Homo sapiens
  CDR3 for beta chain variable domain of TCR clone 33430 (TRBV7-2, TRBJ2-1)
CASSLASGRVNEQFF

SEQ ID NO: 66861 - protein, 16 aa, Homo sapiens
  CDR3 for alpha chain variable domain of TCR clone 33431 (TRAV3, TRAJ10)
CAVRDMRAGGGNKLTF

SEQ ID NO: 66862 - protein, 19 aa, Homo sapiens
  CDR3 for beta chain variable domain of TCR clone 33431 (TRBV6-3, TRBJ1-2)
CASSYSKGRTGPPNHGYTF

SEQ ID NO: 66863 - protein, 16 aa, Homo sapiens
  CDR3 for alpha chain variable domain of TCR clone 33432 (TRAV3, TRAJ37)
CAVRGKGSGNTGKLIF

SEQ ID NO: 66864 - protein, 14 aa, Homo sapiens
  CDR3 for beta chain variable domain of TCR clone 33432 (TRBV28, TRBJ1-1)
CASSFPRKNTEAFF

SEQ ID NO: 66865 - protein, 12 aa, Homo sapiens
  CDR3 for alpha chain variable domain of TCR clone 33433 (TRAV25, TRAJ7)
CAGSYGNNRLAF

SEQ ID NO: 66866 - protein, 14 aa, Homo sapiens
  CDR3 for beta chain variable domain of TCR clone 33433 (TRBV12-5, TRBJ2-5)
CASGSRTHQETQYF

SEQ ID NO: 66867 - protein, 13 aa, Homo sapiens
  CDR3 for alpha chain variable domain of TCR clone 33434 (TRAV12-3, TRAJ43)
CAMIRPNNNEMRF

SEQ ID NO: 66868 - protein, 12 aa, Homo sapiens
  CDR3 for beta chain variable domain of TCR clone 33434 (TRBV11-2, TRBJ2-5)
CASSLGQETQYF

SEQ ID NO: 66869 - protein, 14 aa, Homo sapiens
  CDR3 for alpha chain variable domain of TCR clone 33435 (TRAV1-1, TRAJ28)
CAAPSGAGSYQLTF

SEQ ID NO: 66870 - protein, 15 aa, Homo sapiens
  CDR3 for beta chain variable domain of TCR clone 33435 (TRBV7-2, TRBJ1-2)
CASSLVAGGDYGYTF

SEQ ID NO: 66871 - protein, 14 aa, Homo sapiens
  CDR3 for alpha chain variable domain of TCR clone 33436 (TRAV12-2, TRAJ13)
CAVKKTGGYQKVTF

SEQ ID NO: 66872 - protein, 13 aa, Homo sapiens
  CDR3 for beta chain variable domain of TCR clone 33436 (TRBV19, TRBJ2-7)
CASSIDRTYEQYF

SEQ ID NO: 66873 - protein, 14 aa, Homo sapiens
  CDR3 for alpha chain variable domain of TCR clone 33437 (TRAV1-2, TRAJ16)
CAVKRFSDGQKLLF

SEQ ID NO: 66874 - protein, 14 aa, Homo sapiens
  CDR3 for beta chain variable domain of TCR clone 33437 (TRBV13, TRBJ2-5)
CASSLGRGQETQYF

SEQ ID NO: 66875 - protein, 14 aa, Homo sapiens
  CDR3 for alpha chain variable domain of TCR clone 33438 (TRAV3, TRAJ24)
CCERQNDSWGKLQF

SEQ ID NO: 66876 - protein, 14 aa, Homo sapiens
  CDR3 for beta chain variable domain of TCR clone 33438 (TRBV7-2, TRBJ2-3)
CASSQTGSSYTQYF

SEQ ID NO: 66877 - protein, 14 aa, Homo sapiens
  CDR3 for alpha chain variable domain of TCR clone 33439 (TRAV12-2, TRAJ13)
CAVKKTGGYQKVTF

SEQ ID NO: 66878 - protein, 15 aa, Homo sapiens
  CDR3 for beta chain variable domain of TCR clone 33439 (TRBV27, TRBJ2-1)
CASSNGGGSSNEEFF

SEQ ID NO: 66879 - protein, 15 aa, Homo sapiens
  CDR3 for alpha chain variable domain of TCR clone 33440 (TRAV8-4, TRAJ7)
CAVSGRNYGNNRLAF

SEQ ID NO: 66880 - protein, 11 aa, Homo sapiens
  CDR3 for beta chain variable domain of TCR clone 33440 (TRBV20-1, TRBJ2-1)
CSLSSGSEQFF

SEQ ID NO: 66881 - protein, 13 aa, Homo sapiens
  CDR3 for alpha chain variable domain of TCR clone 33441 (TRAV3, TRAJ31)
CAVREGNNARLMF

SEQ ID NO: 66882 - protein, 15 aa, Homo sapiens
  CDR3 for beta chain variable domain of TCR clone 33441 (TRBV6-1, TRBJ1-1)
CASRTPGQLNTDAFF

SEQ ID NO: 66883 - protein, 14 aa, Homo sapiens
  CDR3 for alpha chain variable domain of TCR clone 33442 (TRAV1-2, TRAJ8)
CAVREVTGFQKLVF

SEQ ID NO: 66884 - protein, 15 aa, Homo sapiens
  CDR3 for beta chain variable domain of TCR clone 33442 (TRBV29-1, TRBJ2-1)
CSVPTGLALYNEQFF

SEQ ID NO: 66885 - protein, 15 aa, Homo sapiens
  CDR3 for alpha chain variable domain of TCR clone 33443 (TRAV2, TRAJ9)
CAVEDRGTGGFKTIF

SEQ ID NO: 66886 - protein, 16 aa, Homo sapiens
  CDR3 for beta chain variable domain of TCR clone 33443 (TRBV24-1, TRBJ2-3)
CVTSDPGTGATDTQYF

SEQ ID NO: 66887 - protein, 14 aa, Homo sapiens
  CDR3 for alpha chain variable domain of TCR clone 33444 (TRAV21, TRAJ35)
CAVMPIGFGNVLHC

SEQ ID NO: 66888 - protein, 12 aa, Homo sapiens
  CDR3 for beta chain variable domain of TCR clone 33444 (TRBV7-9, TRBJ2-7)
CASSIKREEEYF

SEQ ID NO: 66889 - protein, 15 aa, Homo sapiens
  CDR3 for alpha chain variable domain of TCR clone 33445 (TRAV14/DV4, TRAJ21)
CAMREEGYNFNKFYF

SEQ ID NO: 66890 - protein, 12 aa, Homo sapiens
  CDR3 for beta chain variable domain of TCR clone 33445 (TRBV13, TRBJ2-2)
CASSWAPGELFF

SEQ ID NO: 66891 - protein, 12 aa, Homo sapiens
  CDR3 for alpha chain variable domain of TCR clone 33446 (TRAV13-1, TRAJ9)
CASHTGGFKTIF

SEQ ID NO: 66892 - protein, 18 aa, Homo sapiens
  CDR3 for beta chain variable domain of TCR clone 33446 (TRBV11-2, TRBJ2-3)
CASSLGGAPRGAPNTQYF

SEQ ID NO: 66893 - protein, 14 aa, Homo sapiens
  CDR3 for alpha chain variable domain of TCR clone 33447 (TRAV20, TRAJ44)
CAVQDTGTASKHTF

SEQ ID NO: 66894 - protein, 13 aa, Homo sapiens
  CDR3 for beta chain variable domain of TCR clone 33447 (TRBV29-1, TRBJ1-3)
CSAGTGRGNTIYF

SEQ ID NO: 66895 - protein, 13 aa, Homo sapiens
  CDR3 for alpha chain variable domain of TCR clone 33448 (TRAV21, TRAJ27)
CAARPGNAGKSTF

SEQ ID NO: 66896 - protein, 17 aa, Homo sapiens
  CDR3 for beta chain variable domain of TCR clone 33448 (TRBV7-9, TRBJ2-1)
CASSLVASYPSYNEQFF

SEQ ID NO: 66897 - protein, 14 aa, Homo sapiens
  CDR3 for alpha chain variable domain of TCR clone 33449 (TRAV35, TRAJ13)
CAGSPSGGYQKVTF

SEQ ID NO: 66898 - protein, 13 aa, Homo sapiens
  CDR3 for beta chain variable domain of TCR clone 33449 (TRBV29-1, TRBJ1-1)
CIVGDSRNTEAFF

SEQ ID NO: 66899 - protein, 14 aa, Homo sapiens
  CDR3 for alpha chain variable domain of TCR clone 33450 (TRAV1-2, TRAJ16)
CAVNRFSDGQKLLF

SEQ ID NO: 66900 - protein, 11 aa, Homo sapiens
  CDR3 for beta chain variable domain of TCR clone 33450 (TRBV20-1, TRBJ2-7)
CSGRQGHEQYF

SEQ ID NO: 66901 - protein, 16 aa, Homo sapiens
  CDR3 for alpha chain variable domain of TCR clone 33451 (TRAV13-1, TRAJ37)
CAASPLGSSNTGKLIF

SEQ ID NO: 66902 - protein, 12 aa, Homo sapiens
  CDR3 for beta chain variable domain of TCR clone 33451 (TRBV6-1, TRBJ2-5)
CASSEGRETQYF

SEQ ID NO: 66903 - protein, 11 aa, Homo sapiens
  CDR3 for alpha chain variable domain of TCR clone 33452 (TRAV12-3, TRAJ43)
CAMSVSNDMRF

SEQ ID NO: 66904 - protein, 13 aa, Homo sapiens
  CDR3 for beta chain variable domain of TCR clone 33452 (TRBV20-1, TRBJ1-1)
CSAQLGGGTEAFF

SEQ ID NO: 66905 - protein, 14 aa, Homo sapiens
  CDR3 for alpha chain variable domain of TCR clone 33453 (TRAV12-1, TRAJ17)
CVVNYKAAGNKLTF

SEQ ID NO: 66906 - protein, 15 aa, Homo sapiens
  CDR3 for beta chain variable domain of TCR clone 33453 (TRBV28, TRBJ1-3)
CASSMGWASGNTIYF

SEQ ID NO: 66907 - protein, 15 aa, Homo sapiens
  CDR3 for alpha chain variable domain of TCR clone 33454 (TRAV34, TRAJ38)
CGADFTPGNNRKLIW

SEQ ID NO: 66908 - protein, 16 aa, Homo sapiens
  CDR3 for beta chain variable domain of TCR clone 33454 (TRBV12-5, TRBJ2-5)
CASGPRTRGNQETQYF

SEQ ID NO: 66909 - protein, 16 aa, Homo sapiens
  CDR3 for alpha chain variable domain of TCR clone 33455 (TRAV21, TRAJ17)
RAVRPGEEAAGNKLTF

SEQ ID NO: 66910 - protein, 16 aa, Homo sapiens
  CDR3 for beta chain variable domain of TCR clone 33455 (TRBV2, TRBJ2-7)
CASSEPWTGPSYEQYF

SEQ ID NO: 66911 - protein, 13 aa, Homo sapiens
  CDR3 for alpha chain variable domain of TCR clone 33456 (TRAV16, TRAJ34)
CALSPHNTDKLIF

SEQ ID NO: 66912 - protein, 17 aa, Homo sapiens
  CDR3 for beta chain variable domain of TCR clone 33456 (TRBV5-1, TRBJ2-1)
CASSTGTSGYSYNEQFF

SEQ ID NO: 66913 - protein, 14 aa, Homo sapiens
  CDR3 for alpha chain variable domain of TCR clone 33457 (TRAV2, TRAJ23)
CAVGLRNQGGKLIF

SEQ ID NO: 66914 - protein, 14 aa, Homo sapiens
  CDR3 for beta chain variable domain of TCR clone 33457 (TRBV19, TRBJ2-1)
CATSQGDTYNEQFF

SEQ ID NO: 66915 - protein, 17 aa, Homo sapiens
  CDR3 for alpha chain variable domain of TCR clone 33458 (TRAV36/DV7, TRAJ52)
CAVAQRAGGTSYGKLTF

SEQ ID NO: 66916 - protein, 13 aa, Homo sapiens
  CDR3 for beta chain variable domain of TCR clone 33458 (TRBV4-2, TRBJ1-1)
CASSQAGNTEAFF

SEQ ID NO: 66917 - protein, 12 aa, Homo sapiens
  CDR3 for alpha chain variable domain of TCR clone 33459 (TRAV17, TRAJ57)
CATDCGSEKLVF

SEQ ID NO: 66918 - protein, 13 aa, Homo sapiens
  CDR3 for beta chain variable domain of TCR clone 33459 (TRBV7-9, TRBJ2-7)
CASSFAGAYEQYF

SEQ ID NO: 66919 - protein, 12 aa, Homo sapiens
  CDR3 for alpha chain variable domain of TCR clone 33460 (TRAV2, TRAJ31)
CAVEDNNSRLMF

SEQ ID NO: 66920 - protein, 16 aa, Homo sapiens
  CDR3 for beta chain variable domain of TCR clone 33460 (TRBV10-3, TRBJ2-1)
CAISGVGDGGGGEQFF

SEQ ID NO: 66921 - protein, 13 aa, Homo sapiens
  CDR3 for alpha chain variable domain of TCR clone 33461 (TRAV12-2, TRAJ42)
CAVKRGSQGNLIF

SEQ ID NO: 66922 - protein, 13 aa, Homo sapiens
  CDR3 for beta chain variable domain of TCR clone 33461 (TRBV4-1, TRBJ2-1)
CASSQAGGDEQFF

SEQ ID NO: 66923 - protein, 12 aa, Homo sapiens
  CDR3 for alpha chain variable domain of TCR clone 33462 (TRAV17, TRAJ12)
CATLRSSYKLIF

SEQ ID NO: 66924 - protein, 16 aa, Homo sapiens
  CDR3 for beta chain variable domain of TCR clone 33462 (TRBV14, TRBJ2-2)
CASSRSLGDDTGELFF

SEQ ID NO: 66925 - protein, 12 aa, Homo sapiens
  CDR3 for alpha chain variable domain of TCR clone 33463 (TRAV20, TRAJ39)
CAVGNAGNMLTF

SEQ ID NO: 66926 - protein, 14 aa, Homo sapiens
  CDR3 for beta chain variable domain of TCR clone 33463 (TRBV7-2, TRBJ2-7)
CASSPKTSFYEQYF

SEQ ID NO: 66927 - protein, 14 aa, Homo sapiens
  CDR3 for alpha chain variable domain of TCR clone 33464 (TRAV12-3, TRAJ33)
CAMSVTGSNYQLIW

SEQ ID NO: 66928 - protein, 12 aa, Homo sapiens
  CDR3 for beta chain variable domain of TCR clone 33464 (TRBV7-8, TRBJ2-7)
CASSLGDREQYF

SEQ ID NO: 66929 - protein, 12 aa, Homo sapiens
  CDR3 for alpha chain variable domain of TCR clone 33465 (TRAV21, TRAJ11)
CAATSGYSTLTF

SEQ ID NO: 66930 - protein, 14 aa, Homo sapiens
  CDR3 for beta chain variable domain of TCR clone 33465 (TRBV20-1, TRBJ2-7)
CSAPELAGGGEQYF

SEQ ID NO: 66931 - protein, 12 aa, Homo sapiens
  CDR3 for alpha chain variable domain of TCR clone 33466 (TRAV21, TRAJ31)
CVLSGNNARLMF

SEQ ID NO: 66932 - protein, 16 aa, Homo sapiens
  CDR3 for beta chain variable domain of TCR clone 33466 (TRBV27, TRBJ2-5)
CASSFGPGGTKETQYF

SEQ ID NO: 66933 - protein, 12 aa, Homo sapiens
  CDR3 for alpha chain variable domain of TCR clone 33467 (TRAV12-2, TRAJ10)
RGVTGGGNKLTF

SEQ ID NO: 66934 - protein, 16 aa, Homo sapiens
  CDR3 for beta chain variable domain of TCR clone 33467 (TRBV6-4, TRBJ1-2)
CASSEAVGDPNYGYTF

SEQ ID NO: 66935 - protein, 11 aa, Homo sapiens
  CDR3 for alpha chain variable domain of TCR clone 33468 (TRAV21, TRAJ33)
CAVLSNYQLIW

SEQ ID NO: 66936 - protein, 12 aa, Homo sapiens
  CDR3 for beta chain variable domain of TCR clone 33468 (TRBV12-4, TRBJ2-4)
CASSSSGNIQYF

SEQ ID NO: 66937 - protein, 11 aa, Homo sapiens
  CDR3 for alpha chain variable domain of TCR clone 33469 (TRAV12-1, TRAJ34)
CVVNKGRELIF

SEQ ID NO: 66938 - protein, 12 aa, Homo sapiens
  CDR3 for beta chain variable domain of TCR clone 33469 (TRBV2, TRBJ2-1)
YAYGPPGNEQFF

SEQ ID NO: 66939 - protein, 13 aa, Homo sapiens
  CDR3 for alpha chain variable domain of TCR clone 33470 (TRAV13-1, TRAJ40)
CAARTSGTYKYTF

SEQ ID NO: 66940 - protein, 17 aa, Homo sapiens
  CDR3 for beta chain variable domain of TCR clone 33470 (TRBV4-1, TRBJ2-3)
CASSQGYVSGGTDTQYF

SEQ ID NO: 66941 - protein, 20 aa, Homo sapiens
  CDR3 for alpha chain variable domain of TCR clone 33471 (TRAV26-1, TRAJ42)
CCVLLHRQTYYGGSQGNLIF

SEQ ID NO: 66942 - protein, 16 aa, Homo sapiens
  CDR3 for beta chain variable domain of TCR clone 33471 (TRBV7-3, TRBJ2-2)
CASSLKRGTLPGELFF

SEQ ID NO: 66943 - protein, 14 aa, Homo sapiens
  CDR3 for alpha chain variable domain of TCR clone 33472 (TRAV2, TRAJ37)
GAVDFTSNTGKLIF

SEQ ID NO: 66944 - protein, 15 aa, Homo sapiens
  CDR3 for beta chain variable domain of TCR clone 33472 (TRBV20-1, TRBJ1-1)
CSASRGVTGNTEAFF

SEQ ID NO: 66945 - protein, 14 aa, Homo sapiens
  CDR3 for alpha chain variable domain of TCR clone 33473 (TRAV1-2, TRAJ8)
CAVREDTGFQKLVF

SEQ ID NO: 66946 - protein, 13 aa, Homo sapiens
  CDR3 for beta chain variable domain of TCR clone 33473 (TRBV13, TRBJ2-7)
CASSLERGWKKYF

SEQ ID NO: 66947 - protein, 14 aa, Homo sapiens
  CDR3 for alpha chain variable domain of TCR clone 33474 (TRAV17, TRAJ16)
CATADFSDGQKLLF

SEQ ID NO: 66948 - protein, 12 aa, Homo sapiens
  CDR3 for beta chain variable domain of TCR clone 33474 (TRBV24-1, TRBJ1-1)
CATLYPDTEAFC

SEQ ID NO: 66949 - protein, 15 aa, Homo sapiens
  CDR3 for alpha chain variable domain of TCR clone 33475 (TRAV2, TRAJ9)
CAVADRGTGGFKTIF

SEQ ID NO: 66950 - protein, 16 aa, Homo sapiens
  CDR3 for beta chain variable domain of TCR clone 33475 (TRBV24-1, TRBJ2-3)
CATSDPGTGATDTQYF

SEQ ID NO: 66951 - protein, 14 aa, Homo sapiens
  CDR3 for alpha chain variable domain of TCR clone 33476 (TRAV1-2, TRAJ8)
CAVREDTGFQKLVF

SEQ ID NO: 66952 - protein, 17 aa, Homo sapiens
  CDR3 for beta chain variable domain of TCR clone 33476 (TRBV6-3, TRBJ2-7)
CASSSPGTVSTSSTSGR

SEQ ID NO: 66953 - protein, 14 aa, Homo sapiens
  CDR3 for alpha chain variable domain of TCR clone 33477 (TRAV1-2, TRAJ16)
CAVNRFSDGQKLLF

SEQ ID NO: 66954 - protein, 15 aa, Homo sapiens
  CDR3 for beta chain variable domain of TCR clone 33477 (TRBV9, TRBJ1-6)
CASSVAGKGDSPLHF

SEQ ID NO: 66955 - protein, 20 aa, Homo sapiens
  CDR3 for alpha chain variable domain of TCR clone 33478 (TRAV21, TRAJ22)
SLVTQTPTLKSSGSARQLTF

SEQ ID NO: 66956 - protein, 16 aa, Homo sapiens
  CDR3 for beta chain variable domain of TCR clone 33478 (TRBV7-3, TRBJ2-2)
CASSLKRGTLSGELFF

SEQ ID NO: 66957 - protein, 11 aa, Homo sapiens
  CDR3 for alpha chain variable domain of TCR clone 33479 (TRAV12-1, TRAJ8)
CVVTGFQKLVF

SEQ ID NO: 66958 - protein, 14 aa, Homo sapiens
  CDR3 for beta chain variable domain of TCR clone 33479 (TRBV19, TRBJ2-1)
CASGRSTQYNEQFF

SEQ ID NO: 66959 - protein, 12 aa, Homo sapiens
  CDR3 for alpha chain variable domain of TCR clone 33480 (TRAV27, TRAJ9)
CAGESGGFKAIF

SEQ ID NO: 66960 - protein, 18 aa, Homo sapiens
  CDR3 for beta chain variable domain of TCR clone 33480 (TRBV10-2, TRBJ2-2)
CISAPAVHRQADAGELFF

SEQ ID NO: 66961 - protein, 16 aa, Homo sapiens
  CDR3 for alpha chain variable domain of TCR clone 33481 (TRAV3, TRAJ37)
CAVRPHGSGNTGKLIL

SEQ ID NO: 66962 - protein, 16 aa, Homo sapiens
  CDR3 for beta chain variable domain of TCR clone 33481 (TRBV2, TRBJ2-1)
CASSVGGSLSYNEQFF

SEQ ID NO: 66963 - protein, 13 aa, Homo sapiens
  CDR3 for alpha chain variable domain of TCR clone 33482 (TRAV20, TRAJ37)
CAGCSSNAGRLIF

SEQ ID NO: 66964 - protein, 11 aa, Homo sapiens
  CDR3 for beta chain variable domain of TCR clone 33482 (TRBV12-4, TRBJ2-3)
CASTATDTQYF

SEQ ID NO: 66965 - protein, 15 aa, Homo sapiens
  CDR3 for alpha chain variable domain of TCR clone 33483 (TRAV26-2, TRAJ54)
CILRDVGQGAQKLVF

SEQ ID NO: 66966 - protein, 13 aa, Homo sapiens
  CDR3 for beta chain variable domain of TCR clone 33483 (TRBV7-9, TRBJ1-1)
CASSVAGVTEAFF

SEQ ID NO: 66967 - protein, 14 aa, Homo sapiens
  CDR3 for alpha chain variable domain of TCR clone 33484 (TRAV35, TRAJ22)
CAWLRPGSARQLTF

SEQ ID NO: 66968 - protein, 13 aa, Homo sapiens
  CDR3 for beta chain variable domain of TCR clone 33484 (TRBV20-1, TRBJ2-7)
CSATHTSGYEQYF

SEQ ID NO: 66969 - protein, 11 aa, Homo sapiens
  CDR3 for alpha chain variable domain of TCR clone 33485 (TRAV1-1, TRAJ23)
CAVRQGGKLIF

SEQ ID NO: 66970 - protein, 20 aa, Homo sapiens
  CDR3 for beta chain variable domain of TCR clone 33485 (TRBV7-8, TRBJ2-2)
SASSHLFPGPTIHITGELFF

SEQ ID NO: 66971 - protein, 15 aa, Homo sapiens
  CDR3 for alpha chain variable domain of TCR clone 33486 (TRAV8-3, TRAJ45)
CASSYSGGGADGLTF

SEQ ID NO: 66972 - protein, 14 aa, Homo sapiens
  CDR3 for beta chain variable domain of TCR clone 33486 (TRBV5-4, TRBJ1-1)
CASSLDSRRDEAFF

SEQ ID NO: 66973 - protein, 14 aa, Homo sapiens
  CDR3 for alpha chain variable domain of TCR clone 33487 (TRAV1-2, TRAJ8)
CAVREDTGFQKLVF

SEQ ID NO: 66974 - protein, 16 aa, Homo sapiens
  CDR3 for beta chain variable domain of TCR clone 33487 (TRBV7-6, TRBJ2-6)
CASSLPGLSWANVLTF

SEQ ID NO: 66975 - protein, 13 aa, Homo sapiens
  CDR3 for alpha chain variable domain of TCR clone 33488 (TRAV38-2/DV8, TRAJ34)
CAYRTWNTDKLIF

SEQ ID NO: 66976 - protein, 15 aa, Homo sapiens
  CDR3 for beta chain variable domain of TCR clone 33488 (TRBV6-3, TRBJ2-7)
CASSSPGTVFYEQYF

SEQ ID NO: 66977 - protein, 16 aa, Homo sapiens
  CDR3 for alpha chain variable domain of TCR clone 33489 (TRAV30, TRAJ24)
CGTEIVGADSWGKFQF

SEQ ID NO: 66978 - protein, 15 aa, Homo sapiens
  CDR3 for beta chain variable domain of TCR clone 33489 (TRBV7-9, TRBJ1-4)
CASSARTGGNEELFF

SEQ ID NO: 66979 - protein, 14 aa, Homo sapiens
  CDR3 for alpha chain variable domain of TCR clone 33490 (TRAV13-1, TRAJ35)
CAASKGGFGDVLHC

SEQ ID NO: 66980 - protein, 13 aa, Homo sapiens
  CDR3 for beta chain variable domain of TCR clone 33490 (TRBV7-3, TRBJ1-1)
CASSQDWGAEAFF

SEQ ID NO: 66981 - protein, 14 aa, Homo sapiens
  CDR3 for alpha chain variable domain of TCR clone 33491 (TRAV12-2, TRAJ13)
CAVKKTGGYQKVTF

SEQ ID NO: 66982 - protein, 16 aa, Homo sapiens
  CDR3 for beta chain variable domain of TCR clone 33491 (TRBV2, TRBJ2-3)
CASSTSVEGVTDTQYF

SEQ ID NO: 66983 - protein, 16 aa, Homo sapiens
  CDR3 for alpha chain variable domain of TCR clone 33492 (TRAV38-1, TRAJ32)
CAFMKGGGGATNKLIL

SEQ ID NO: 66984 - protein, 13 aa, Homo sapiens
  CDR3 for beta chain variable domain of TCR clone 33492 (TRBV20-1, TRBJ2-5)
CSAREAFQETQYF

SEQ ID NO: 66985 - protein, 14 aa, Homo sapiens
  CDR3 for alpha chain variable domain of TCR clone 33493 (TRAV29/DV5, TRAJ44)
CAAFLVGTASKLTF

SEQ ID NO: 66986 - protein, 15 aa, Homo sapiens
  CDR3 for beta chain variable domain of TCR clone 33493 (TRBV7-3, TRBJ2-2)
CASSETGQGTGELLF

SEQ ID NO: 66987 - protein, 14 aa, Homo sapiens
  CDR3 for alpha chain variable domain of TCR clone 33494 (TRAV34, TRAJ44)
CGADGAGTASKLTF

SEQ ID NO: 66988 - protein, 17 aa, Homo sapiens
  CDR3 for beta chain variable domain of TCR clone 33494 (TRBV11-2, TRBJ2-1)
CASSLYPPGVEYNEQFF

SEQ ID NO: 66989 - protein, 13 aa, Homo sapiens
  CDR3 for alpha chain variable domain of TCR clone 33495 (TRAV2, TRAJ29)
CAVSEFRKHTSCL

SEQ ID NO: 66990 - protein, 14 aa, Homo sapiens
  CDR3 for beta chain variable domain of TCR clone 33495 (TRBV20-1, TRBJ2-3)
CSAGGRRGTDTQYF

SEQ ID NO: 66991 - protein, 15 aa, Homo sapiens
  CDR3 for alpha chain variable domain of TCR clone 33496 (TRAV3, TRAJ3)
CAVRDRDSSASKIIF

SEQ ID NO: 66992 - protein, 13 aa, Homo sapiens
  CDR3 for beta chain variable domain of TCR clone 33496 (TRBV7-3, TRBJ1-1)
CASSQDWGAEAFF

SEQ ID NO: 66993 - protein, 16 aa, Homo sapiens
  CDR3 for alpha chain variable domain of TCR clone 33497 (TRAV30, TRAJ24)
CGTEIVDADSWGKFQF

SEQ ID NO: 66994 - protein, 13 aa, Homo sapiens
  CDR3 for beta chain variable domain of TCR clone 33497 (TRBV20-1, TRBJ2-5)
CSARGDYQETQYF

SEQ ID NO: 66995 - protein, 13 aa, Homo sapiens
  CDR3 for alpha chain variable domain of TCR clone 33498 (TRAV20, TRAJ34)
CAVSSYNTDKLIF

SEQ ID NO: 66996 - protein, 13 aa, Homo sapiens
  CDR3 for beta chain variable domain of TCR clone 33498 (TRBV7-9, TRBJ1-2)
CACSLKQNYGYTF

SEQ ID NO: 66997 - protein, 11 aa, Homo sapiens
  CDR3 for alpha chain variable domain of TCR clone 33499 (TRAV13-1, TRAJ39)
CASHAGNMLTF

SEQ ID NO: 66998 - protein, 13 aa, Homo sapiens
  CDR3 for beta chain variable domain of TCR clone 33499 (TRBV4-2, TRBJ1-1)
CASSQAGNTEAFF

SEQ ID NO: 66999 - protein, 14 aa, Homo sapiens
  CDR3 for alpha chain variable domain of TCR clone 33500 (TRAV8-3, TRAJ4)
CAVGAAGGYNKLIF

SEQ ID NO: 67000 - protein, 17 aa, Homo sapiens
  CDR3 for beta chain variable domain of TCR clone 33500 (TRBV11-2, TRBJ2-1)
CASSLYPPGVEYNEQFF

SEQ ID NO: 67001 - protein, 16 aa, Homo sapiens
  CDR3 for alpha chain variable domain of TCR clone 33501 (TRAV30, TRAJ24)
CGTEIVDADSWGKFQF

SEQ ID NO: 67002 - protein, 17 aa, Homo sapiens
  CDR3 for beta chain variable domain of TCR clone 33501 (TRBV20-1, TRBJ2-2)
CSASGSGQVGLTGELFF

SEQ ID NO: 67003 - protein, 14 aa, Homo sapiens
  CDR3 for alpha chain variable domain of TCR clone 33502 (TRAV12-2, TRAJ3)
CAASLYSSASKIIF

SEQ ID NO: 67004 - protein, 14 aa, Homo sapiens
  CDR3 for beta chain variable domain of TCR clone 33502 (TRBV27, TRBJ2-1)
CAGSIAETYNEQFF

SEQ ID NO: 67005 - protein, 12 aa, Homo sapiens
  CDR3 for alpha chain variable domain of TCR clone 33503 (TRAV12-3, TRAJ17)
CAMTLTGNKLTF

SEQ ID NO: 67006 - protein, 14 aa, Homo sapiens
  CDR3 for beta chain variable domain of TCR clone 33503 (TRBV7-9, TRBJ2-2)
CASSGLADTGELFF

SEQ ID NO: 67007 - protein, 14 aa, Homo sapiens
  CDR3 for alpha chain variable domain of TCR clone 33504 (TRAV12-3, TRAJ6)
CAMSAKGGSYIPTF

SEQ ID NO: 67008 - protein, 16 aa, Homo sapiens
  CDR3 for beta chain variable domain of TCR clone 33504 (TRBV4-2, TRBJ2-1)
CASSPRAGQGANEQFF

SEQ ID NO: 67009 - protein, 14 aa, Homo sapiens
  CDR3 for alpha chain variable domain of TCR clone 33505 (TRAV12-3, TRAJ10)
SHLPLTGGGNKLTF

SEQ ID NO: 67010 - protein, 15 aa, Homo sapiens
  CDR3 for beta chain variable domain of TCR clone 33505 (TRBV29-1, TRBJ2-7)
CSVELFDRGSYEQYF

SEQ ID NO: 67011 - protein, 15 aa, Homo sapiens
  CDR3 for alpha chain variable domain of TCR clone 33506 (TRAV25, TRAJ52)
CAGTSGGTSYGKLTF

SEQ ID NO: 67012 - protein, 16 aa, Homo sapiens
  CDR3 for beta chain variable domain of TCR clone 33506 (TRBV15, TRBJ1-2)
CATSRGPRTGGGCYTF

SEQ ID NO: 67013 - protein, 14 aa, Homo sapiens
  CDR3 for alpha chain variable domain of TCR clone 33507 (TRAV14/DV4, TRAJ26)
CAMREGTYGQNFVF

SEQ ID NO: 67014 - protein, 16 aa, Homo sapiens
  CDR3 for beta chain variable domain of TCR clone 33507 (TRBV9, TRBJ1-2)
CASSVEEKVSPYGYTS

SEQ ID NO: 67015 - protein, 16 aa, Homo sapiens
  CDR3 for alpha chain variable domain of TCR clone 33508 (TRAV3, TRAJ37)
CAVRGKGSGNTGKLIL

SEQ ID NO: 67016 - protein, 16 aa, Homo sapiens
  CDR3 for beta chain variable domain of TCR clone 33508 (TRBV12-5, TRBJ2-5)
CASGPRTSGSQETQYF

SEQ ID NO: 67017 - protein, 11 aa, Homo sapiens
  CDR3 for alpha chain variable domain of TCR clone 33509 (TRAV21, TRAJ34)
CAVTNTDKLIF

SEQ ID NO: 67018 - protein, 17 aa, Homo sapiens
  CDR3 for beta chain variable domain of TCR clone 33509 (TRBV20-1, TRBJ2-1)
CSARGPSGGPPTMSSSS

SEQ ID NO: 67019 - protein, 12 aa, Homo sapiens
  CDR3 for alpha chain variable domain of TCR clone 33510 (TRAV8-3, TRAJ20)
CAVGANDYKLSF

SEQ ID NO: 67020 - protein, 16 aa, Homo sapiens
  CDR3 for beta chain variable domain of TCR clone 33510 (TRBV5-1, TRBJ2-2)
CASSFGDRPNTGELFF

SEQ ID NO: 67021 - protein, 14 aa, Homo sapiens
  CDR3 for alpha chain variable domain of TCR clone 33511 (TRAV13-1, TRAJ44)
CAAKATGTASKRTF

SEQ ID NO: 67022 - protein, 17 aa, Homo sapiens
  CDR3 for beta chain variable domain of TCR clone 33511 (TRBV7-3, TRBJ2-3)
CASSLMKRMRGADTQYF

SEQ ID NO: 67023 - protein, 12 aa, Homo sapiens
  CDR3 for alpha chain variable domain of TCR clone 33512 (TRAV12-3, TRAJ4)
CAMTGAGTRLAV

SEQ ID NO: 67024 - protein, 13 aa, Homo sapiens
  CDR3 for beta chain variable domain of TCR clone 33512 (TRBV28, TRBJ2-5)
CASSFAGGETQYF

SEQ ID NO: 67025 - protein, 15 aa, Homo sapiens
  CDR3 for alpha chain variable domain of TCR clone 33513 (TRAV2, TRAJ9)
CAVEDRGTGGFKTIF

SEQ ID NO: 67026 - protein, 19 aa, Homo sapiens
  CDR3 for beta chain variable domain of TCR clone 33513 (TRBV28, TRBJ2-7)
CVSSYSGTSRLGWVYEQYF

SEQ ID NO: 67027 - protein, 16 aa, Homo sapiens
  CDR3 for alpha chain variable domain of TCR clone 33514 (TRAV1-2, TRAJ10)
CAVRGVLTGVGNKLTF

SEQ ID NO: 67028 - protein, 12 aa, Homo sapiens
  CDR3 for beta chain variable domain of TCR clone 33514 (TRBV7-8, TRBJ2-7)
CASSLGDREQYF

SEQ ID NO: 67029 - protein, 13 aa, Homo sapiens
  CDR3 for alpha chain variable domain of TCR clone 33515 (TRAV23/DV6, TRAJ16)
CSASISDGQKLLF

SEQ ID NO: 67030 - protein, 15 aa, Homo sapiens
  CDR3 for beta chain variable domain of TCR clone 33515 (TRBV2, TRBJ2-2)
CASSRETVGTGELFF

SEQ ID NO: 67031 - protein, 14 aa, Homo sapiens
  CDR3 for alpha chain variable domain of TCR clone 33516 (TRAV17, TRAJ31)
CATVLRNNNARLMF

SEQ ID NO: 67032 - protein, 14 aa, Homo sapiens
  CDR3 for beta chain variable domain of TCR clone 33516 (TRBV12-4, TRBJ2-5)
CASSVWQKQETQYF

SEQ ID NO: 67033 - protein, 14 aa, Homo sapiens
  CDR3 for alpha chain variable domain of TCR clone 33517 (TRAV9-2, TRAJ39)
CALYIYNAGNMLTF

SEQ ID NO: 67034 - protein, 13 aa, Homo sapiens
  CDR3 for beta chain variable domain of TCR clone 33517 (TRBV14, TRBJ1-1)
CASSQEAGTEAFF

SEQ ID NO: 67035 - protein, 12 aa, Homo sapiens
  CDR3 for alpha chain variable domain of TCR clone 33518 (TRAV12-3, TRAJ20)
CAMVRGDYKLSF

SEQ ID NO: 67036 - protein, 15 aa, Homo sapiens
  CDR3 for beta chain variable domain of TCR clone 33518 (TRBV20-1, TRBJ2-7)
CSARDRVSGMDEQYF

SEQ ID NO: 67037 - protein, 10 aa, Homo sapiens
  CDR3 for alpha chain variable domain of TCR clone 33519 (TRAV12-1, TRAJ20)
CAIYFQRLQA

SEQ ID NO: 67038 - protein, 16 aa, Homo sapiens
  CDR3 for beta chain variable domain of TCR clone 33519 (TRBV3-1, TRBJ1-2)
CASSQGQGVQRDGYTF

SEQ ID NO: 67039 - protein, 16 aa, Homo sapiens
  CDR3 for alpha chain variable domain of TCR clone 33520 (TRAV21, TRAJ37)
CAVRTAGSSNTGKLIF

SEQ ID NO: 67040 - protein, 13 aa, Homo sapiens
  CDR3 for beta chain variable domain of TCR clone 33520 (TRBV7-9, TRBJ2-5)
CASLPSGRETKYF

SEQ ID NO: 67041 - protein, 16 aa, Homo sapiens
  CDR3 for alpha chain variable domain of TCR clone 33521 (TRAV30, TRAJ24)
CGTEIVDADSWGKFQF

SEQ ID NO: 67042 - protein, 19 aa, Homo sapiens
  CDR3 for beta chain variable domain of TCR clone 33521 (TRBV25-1, TRBJ2-2)
CAILVSRVDRGRKTGELFF

SEQ ID NO: 67043 - protein, 13 aa, Homo sapiens
  CDR3 for alpha chain variable domain of TCR clone 33522 (TRAV21, TRAJ47)
CAVSGLYGNKLAF

SEQ ID NO: 67044 - protein, 17 aa, Homo sapiens
  CDR3 for beta chain variable domain of TCR clone 33522 (TRBV15, TRBJ2-3)
CATSGTTSEEGTDTQYF

SEQ ID NO: 67045 - protein, 13 aa, Homo sapiens
  CDR3 for alpha chain variable domain of TCR clone 33523 (TRAV13-2, TRAJ54)
CAETFQGAQKLVF

SEQ ID NO: 67046 - protein, 13 aa, Homo sapiens
  CDR3 for beta chain variable domain of TCR clone 33523 (TRBV29-1, TRBJ2-1)
CSVEGGRVNEQFF

SEQ ID NO: 67047 - protein, 14 aa, Homo sapiens
  CDR3 for alpha chain variable domain of TCR clone 33524 (TRAV4, TRAJ17)
CLVGDMAAGNKLTF

SEQ ID NO: 67048 - protein, 17 aa, Homo sapiens
  CDR3 for beta chain variable domain of TCR clone 33524 (TRBV19, TRBJ2-1)
CASSIWSAQPTHNEQFF

SEQ ID NO: 67049 - protein, 12 aa, Homo sapiens
  CDR3 for alpha chain variable domain of TCR clone 33525 (TRAV12-3, TRAJ17)
CAMTLTGNKLTF

SEQ ID NO: 67050 - protein, 16 aa, Homo sapiens
  CDR3 for beta chain variable domain of TCR clone 33525 (TRBV7-3, TRBJ2-1)
CASSLEGYRSYNEQFL

SEQ ID NO: 67051 - protein, 12 aa, Homo sapiens
  CDR3 for alpha chain variable domain of TCR clone 33526 (TRAV21, TRAJ11)
CAATSGYSTLTF

SEQ ID NO: 67052 - protein, 15 aa, Homo sapiens
  CDR3 for beta chain variable domain of TCR clone 33526 (TRBV20-1, TRBJ2-7)
CSARDRVSGMDEQYF

SEQ ID NO: 67053 - protein, 16 aa, Homo sapiens
  CDR3 for alpha chain variable domain of TCR clone 33527 (TRAV12-3, TRAJ53)
CAMSPGSGGSNYKLKF

SEQ ID NO: 67054 - protein, 13 aa, Homo sapiens
  CDR3 for beta chain variable domain of TCR clone 33527 (TRBV7-3, TRBJ1-1)
CASSQDWGAEAFF

SEQ ID NO: 67055 - protein, 14 aa, Homo sapiens
  CDR3 for alpha chain variable domain of TCR clone 33528 (TRAV17, TRAJ22)
CATSPSGSARQLPF

SEQ ID NO: 67056 - protein, 15 aa, Homo sapiens
  CDR3 for beta chain variable domain of TCR clone 33528 (TRBV4-1, TRBJ2-5)
CASSQWDLYQETQYF

SEQ ID NO: 67057 - protein, 11 aa, Homo sapiens
  CDR3 for alpha chain variable domain of TCR clone 33529 (TRAV2, TRAJ13)
CASGGYQKATF

SEQ ID NO: 67058 - protein, 14 aa, Homo sapiens
  CDR3 for beta chain variable domain of TCR clone 33529 (TRBV28, TRBJ2-3)
CASSLTDLLDTQYF

SEQ ID NO: 67059 - protein, 12 aa, Homo sapiens
  CDR3 for alpha chain variable domain of TCR clone 33530 (TRAV12-1, TRAJ40)
CVVYSGTYKYIF

SEQ ID NO: 67060 - protein, 14 aa, Homo sapiens
  CDR3 for beta chain variable domain of TCR clone 33530 (TRBV11-3, TRBJ1-1)
CASSADRDHAEAFF

SEQ ID NO: 67061 - protein, 14 aa, Homo sapiens
  CDR3 for alpha chain variable domain of TCR clone 33531 (TRAV1-2, TRAJ8)
CAVRVDTGFQKLVF

SEQ ID NO: 67062 - protein, 13 aa, Homo sapiens
  CDR3 for beta chain variable domain of TCR clone 33531 (TRBV15, TRBJ2-7)
CATSTTGHYEQYF

SEQ ID NO: 67063 - protein, 14 aa, Homo sapiens
  CDR3 for alpha chain variable domain of TCR clone 33532 (TRAV20, TRAJ4)
CAVRLGGGYNKLIS

SEQ ID NO: 67064 - protein, 21 aa, Homo sapiens
  CDR3 for beta chain variable domain of TCR clone 33532 (TRBV15, TRBJ2-1)
AWGTQPCTCVPPAEVDTARFF

SEQ ID NO: 67065 - protein, 15 aa, Homo sapiens
  CDR3 for alpha chain variable domain of TCR clone 33533 (TRAV3, TRAJ20)
CAVRDIKLSDYKLSF

SEQ ID NO: 67066 - protein, 14 aa, Homo sapiens
  CDR3 for beta chain variable domain of TCR clone 33533 (TRBV4-2, TRBJ2-1)
CASGLDRAYNEQFF

SEQ ID NO: 67067 - protein, 11 aa, Homo sapiens
  CDR3 for alpha chain variable domain of TCR clone 33534 (TRAV12-3, TRAJ43)
CAMSVANDMRF

SEQ ID NO: 67068 - protein, 13 aa, Homo sapiens
  CDR3 for beta chain variable domain of TCR clone 33534 (TRBV20-1, TRBJ1-1)
CSAPLGGGTEAFF

SEQ ID NO: 67069 - protein, 13 aa, Homo sapiens
  CDR3 for alpha chain variable domain of TCR clone 33535 (TRAV35, TRAJ42)
CAGFLGSQGNLIF

SEQ ID NO: 67070 - protein, 13 aa, Homo sapiens
  CDR3 for beta chain variable domain of TCR clone 33535 (TRBV29-1, TRBJ2-1)
CSVEGGRVNEQFF

SEQ ID NO: 67071 - protein, 14 aa, Homo sapiens
  CDR3 for alpha chain variable domain of TCR clone 33536 (TRAV12-2, TRAJ36)
CAVKISTGANNLFF

SEQ ID NO: 67072 - protein, 14 aa, Homo sapiens
  CDR3 for beta chain variable domain of TCR clone 33536 (TRBV25-1, TRBJ1-2)
CASGDTTGVVGYTF

SEQ ID NO: 67073 - protein, 14 aa, Homo sapiens
  CDR3 for alpha chain variable domain of TCR clone 33537 (TRAV1-2, TRAJ8)
CAVREDTGFQKLVF

SEQ ID NO: 67074 - protein, 14 aa, Homo sapiens
  CDR3 for beta chain variable domain of TCR clone 33537 (TRBV29-1, TRBJ2-5)
CSIETSGSGETQYF

SEQ ID NO: 67075 - protein, 16 aa, Homo sapiens
  CDR3 for alpha chain variable domain of TCR clone 33538 (TRAV1-1, TRAJ36)
CAVRDTLLPGANNLFF

SEQ ID NO: 67076 - protein, 13 aa, Homo sapiens
  CDR3 for beta chain variable domain of TCR clone 33538 (TRBV7-9, TRBJ1-4)
CASSLPGIEKLFF

SEQ ID NO: 67077 - protein, 16 aa, Homo sapiens
  CDR3 for alpha chain variable domain of TCR clone 33539 (TRAV23/DV6, TRAJ9)
CAASIGGNTGGFKTIF

SEQ ID NO: 67078 - protein, 12 aa, Homo sapiens
  CDR3 for beta chain variable domain of TCR clone 33539 (TRBV11-2, TRBJ2-2)
CASSLGGGELFF

SEQ ID NO: 67079 - protein, 14 aa, Homo sapiens
  CDR3 for alpha chain variable domain of TCR clone 33540 (TRAV12-2, TRAJ36)
CAVKISTGANNLFF

SEQ ID NO: 67080 - protein, 14 aa, Homo sapiens
  CDR3 for beta chain variable domain of TCR clone 33540 (TRBV25-1, TRBJ1-2)
CASSDTTGVVGHTF

SEQ ID NO: 67081 - protein, 14 aa, Homo sapiens
  CDR3 for alpha chain variable domain of TCR clone 33541 (TRAV12-2, TRAJ40)
CAVKIPSGTYKYIF

SEQ ID NO: 67082 - protein, 17 aa, Homo sapiens
  CDR3 for beta chain variable domain of TCR clone 33541 (TRBV11-3, TRBJ2-1)
CASSLYPPGVEYNEQFF

SEQ ID NO: 67083 - protein, 15 aa, Homo sapiens
  CDR3 for alpha chain variable domain of TCR clone 33542 (TRAV26-1, TRAJ40)
RIVRAVPSGTYKYIF

SEQ ID NO: 67084 - protein, 14 aa, Homo sapiens
  CDR3 for beta chain variable domain of TCR clone 33542 (TRBV19, TRBJ2-1)
CASKDPGLANEQFF

SEQ ID NO: 67085 - protein, 14 aa, Homo sapiens
  CDR3 for alpha chain variable domain of TCR clone 33543 (TRAV12-3, TRAJ10)
SHLPLTGGGNKLTF

SEQ ID NO: 67086 - protein, 15 aa, Homo sapiens
  CDR3 for beta chain variable domain of TCR clone 33543 (TRBV7-9, TRBJ1-4)
CASSRTGGFNEKLSF

SEQ ID NO: 67087 - protein, 14 aa, Homo sapiens
  CDR3 for alpha chain variable domain of TCR clone 33544 (TRAV12-2, TRAJ40)
CAEKIPSGTYKYIF

SEQ ID NO: 67088 - protein, 14 aa, Homo sapiens
  CDR3 for beta chain variable domain of TCR clone 33544 (TRBV20-1, TRBJ1-1)
CSAQTRIGGTEAFF

SEQ ID NO: 67089 - protein, 11 aa, Homo sapiens
  CDR3 for alpha chain variable domain of TCR clone 33545 (TRAV3, TRAJ21)
CAVGNFNKFYF

SEQ ID NO: 67090 - protein, 16 aa, Homo sapiens
  CDR3 for beta chain variable domain of TCR clone 33545 (TRBV28, TRBJ2-7)
CASSSPQGRDVYEQYF

SEQ ID NO: 67091 - protein, 11 aa, Homo sapiens
  CDR3 for alpha chain variable domain of TCR clone 33546 (TRAV2, TRAJ13)
CASGGYQKVTS

SEQ ID NO: 67092 - protein, 17 aa, Homo sapiens
  CDR3 for beta chain variable domain of TCR clone 33546 (TRBV28, TRBJ2-5)
CASSTPEGDALQETQYF

SEQ ID NO: 67093 - protein, 14 aa, Homo sapiens
  CDR3 for alpha chain variable domain of TCR clone 33547 (TRAV17, TRAJ16)
CAAADFSDGQKLLF

SEQ ID NO: 67094 - protein, 12 aa, Homo sapiens
  CDR3 for beta chain variable domain of TCR clone 33547 (TRBV24-1, TRBJ1-1)
CATLYPDTEAFF

SEQ ID NO: 67095 - protein, 15 aa, Homo sapiens
  CDR3 for alpha chain variable domain of TCR clone 33548 (TRAV17, TRAJ16)
CATALRVSDGQKLLF

SEQ ID NO: 67096 - protein, 12 aa, Homo sapiens
  CDR3 for beta chain variable domain of TCR clone 33548 (TRBV2, TRBJ2-7)
CASSDPDYEQYF

SEQ ID NO: 67097 - protein, 14 aa, Homo sapiens
  CDR3 for alpha chain variable domain of TCR clone 33549 (TRAV12-1, TRAJ12)
CVVTRMDSSYKLIF

SEQ ID NO: 67098 - protein, 15 aa, Homo sapiens
  CDR3 for beta chain variable domain of TCR clone 33549 (TRBV20-1, TRBJ2-7)
CSARDRVSEMDEQYF

SEQ ID NO: 67099 - protein, 14 aa, Homo sapiens
  CDR3 for alpha chain variable domain of TCR clone 33550 (TRAV12-3, TRAJ43)
CAMSPGGAGTRLTV

SEQ ID NO: 67100 - protein, 13 aa, Homo sapiens
  CDR3 for beta chain variable domain of TCR clone 33550 (TRBV7-9, TRBJ1-2)
CASSLKQNYGYTF

SEQ ID NO: 67101 - protein, 13 aa, Homo sapiens
  CDR3 for alpha chain variable domain of TCR clone 33551 (TRAV13-1, TRAJ5)
CAASYTGRRALTF

SEQ ID NO: 67102 - protein, 12 aa, Homo sapiens
  CDR3 for beta chain variable domain of TCR clone 33551 (TRBV28, TRBJ2-1)
CASSVQINEQFF

SEQ ID NO: 67103 - protein, 10 aa, Homo sapiens
  CDR3 for alpha chain variable domain of TCR clone 33552 (TRAV13-1, TRAJ49)
CAVPGNQFYF

SEQ ID NO: 67104 - protein, 16 aa, Homo sapiens
  CDR3 for beta chain variable domain of TCR clone 33552 (TRBV11-3, TRBJ2-5)
CASSSVVAGSTETQYF

SEQ ID NO: 67105 - protein, 16 aa, Homo sapiens
  CDR3 for alpha chain variable domain of TCR clone 33553 (TRAV26-1, TRAJ32)
CIVRTNYGGATNKLIF

SEQ ID NO: 67106 - protein, 16 aa, Homo sapiens
  CDR3 for beta chain variable domain of TCR clone 33553 (TRBV27, TRBJ1-1)
CASSLLSGLSEASLDK

SEQ ID NO: 67107 - protein, 11 aa, Homo sapiens
  CDR3 for alpha chain variable domain of TCR clone 33554 (TRAV21, TRAJ11)
CAVNGYSTLTF

SEQ ID NO: 67108 - protein, 11 aa, Homo sapiens
  CDR3 for beta chain variable domain of TCR clone 33554 (TRBV19, TRBJ1-1)
CASSIGSDAFF

SEQ ID NO: 67109 - protein, 16 aa, Homo sapiens
  CDR3 for alpha chain variable domain of TCR clone 33555 (TRAV8-3, TRAJ13)
CAVGAYPSGGYQKVTF

SEQ ID NO: 67110 - protein, 15 aa, Homo sapiens
  CDR3 for beta chain variable domain of TCR clone 33555 (TRBV19, TRBJ1-5)
CASSIVWADNQPQQF

SEQ ID NO: 67111 - protein, 23 aa, Homo sapiens
  CDR3 for alpha chain variable domain of TCR clone 33556 (TRAV26-1, )
CIADNACNNHIQNPDPAVYQLRD

SEQ ID NO: 67112 - protein, 13 aa, Homo sapiens
  CDR3 for beta chain variable domain of TCR clone 33556 (TRBV20-1, TRBJ1-1)
CSARGGGNTEAFF

SEQ ID NO: 67113 - protein, 13 aa, Homo sapiens
  CDR3 for alpha chain variable domain of TCR clone 33557 (TRAV8-3, TRAJ21)
CAVGDYNFNKFYF

SEQ ID NO: 67114 - protein, 16 aa, Homo sapiens
  CDR3 for beta chain variable domain of TCR clone 33557 (TRBV19, TRBJ2-1)
CASSMGGGSSYNEQFF

SEQ ID NO: 67115 - protein, 13 aa, Homo sapiens
  CDR3 for alpha chain variable domain of TCR clone 33558 (TRAV35, TRAJ43)
CAGYPYNNNDMRF

SEQ ID NO: 67116 - protein, 15 aa, Homo sapiens
  CDR3 for beta chain variable domain of TCR clone 33558 (TRBV25-1, TRBJ1-4)
CASSKRIATNETLFF

SEQ ID NO: 67117 - protein, 12 aa, Homo sapiens
  CDR3 for alpha chain variable domain of TCR clone 33559 (TRAV12-3, TRAJ40)
CAMSSGTYKYIF

SEQ ID NO: 67118 - protein, 15 aa, Homo sapiens
  CDR3 for beta chain variable domain of TCR clone 33559 (TRBV7-3, TRBJ2-2)
CASSETGQGTGELSF

SEQ ID NO: 67119 - protein, 13 aa, Homo sapiens
  CDR3 for alpha chain variable domain of TCR clone 33560 (TRAV27, TRAJ45)
CRSSGGGADGLTF

SEQ ID NO: 67120 - protein, 17 aa, Homo sapiens
  CDR3 for beta chain variable domain of TCR clone 33560 (TRBV11-2, TRBJ2-1)
CASGLYPPGVEYNEQFF

SEQ ID NO: 67121 - protein, 17 aa, Homo sapiens
  CDR3 for alpha chain variable domain of TCR clone 33561 (TRAV8-6, TRAJ58)
CAVSSGVGETSGSRLTF

SEQ ID NO: 67122 - protein, 14 aa, Homo sapiens
  CDR3 for beta chain variable domain of TCR clone 33561 (TRBV4-2, TRBJ2-1)
CASGLDRAYNEQFF

SEQ ID NO: 67123 - protein, 10 aa, Homo sapiens
  CDR3 for alpha chain variable domain of TCR clone 33562 (TRAV12-3, TRAJ49)
CAMNDDQFYF

SEQ ID NO: 67124 - protein, 13 aa, Homo sapiens
  CDR3 for beta chain variable domain of TCR clone 33562 (TRBV12-4, TRBJ1-1)
CDSSPGTGFEAFF

SEQ ID NO: 67125 - protein, 15 aa, Homo sapiens
  CDR3 for alpha chain variable domain of TCR clone 33563 (TRAV3, TRAJ5)
CAVRDRKTGRRALTF

SEQ ID NO: 67126 - protein, 15 aa, Homo sapiens
  CDR3 for beta chain variable domain of TCR clone 33563 (TRBV7-8, TRBJ2-1)
CGSSLADSLYNEQFF

SEQ ID NO: 67127 - protein, 14 aa, Homo sapiens
  CDR3 for alpha chain variable domain of TCR clone 33564 (TRAV1-2, TRAJ16)
CAVNRFSDSQKLLF

SEQ ID NO: 67128 - protein, 15 aa, Homo sapiens
  CDR3 for beta chain variable domain of TCR clone 33564 (TRBV5-1, TRBJ2-1)
CASSPPRAPYNEQFF

SEQ ID NO: 67129 - protein, 14 aa, Homo sapiens
  CDR3 for alpha chain variable domain of TCR clone 33565 (TRAV14/DV4, TRAJ20)
CAMREGQSDYKLSF

SEQ ID NO: 67130 - protein, 16 aa, Homo sapiens
  CDR3 for beta chain variable domain of TCR clone 33565 (TRBV27, TRBJ2-2)
CASSFRGLVRTGELFF

SEQ ID NO: 67131 - protein, 12 aa, Homo sapiens
  CDR3 for alpha chain variable domain of TCR clone 33566 (TRAV1-1, TRAJ23)
CAVTNQGGKLIF

SEQ ID NO: 67132 - protein, 13 aa, Homo sapiens
  CDR3 for beta chain variable domain of TCR clone 33566 (TRBV7-9, TRBJ1-2)
CASSLKQNYGYTF

SEQ ID NO: 67133 - protein, 15 aa, Homo sapiens
  CDR3 for alpha chain variable domain of TCR clone 33567 (TRAV12-2, TRAJ43)
CAFDMRFGAGTRLTL

SEQ ID NO: 67134 - protein, 18 aa, Homo sapiens
  CDR3 for beta chain variable domain of TCR clone 33567 (TRBV20-1, TRBJ2-3)
CSASGLAGGPGTTDTQYF

SEQ ID NO: 67135 - protein, 14 aa, Homo sapiens
  CDR3 for alpha chain variable domain of TCR clone 33568 (TRAV17, TRAJ54)
CATDANQEAQKLVF

SEQ ID NO: 67136 - protein, 12 aa, Homo sapiens
  CDR3 for beta chain variable domain of TCR clone 33568 (TRBV6-3, TRBJ2-1)
CASSGSYNEQFF

SEQ ID NO: 67137 - protein, 13 aa, Homo sapiens
  CDR3 for alpha chain variable domain of TCR clone 33569 (TRAV13-1, TRAJ5)
CAASDTGRRALTF

SEQ ID NO: 67138 - protein, 14 aa, Homo sapiens
  CDR3 for beta chain variable domain of TCR clone 33569 (TRBV19, TRBJ2-1)
CASPTFVLSGEQFF

SEQ ID NO: 67139 - protein, 13 aa, Homo sapiens
  CDR3 for alpha chain variable domain of TCR clone 33570 (TRAV13-2, TRAJ5)
CAVMDTGRRALTL

SEQ ID NO: 67140 - protein, 12 aa, Homo sapiens
  CDR3 for beta chain variable domain of TCR clone 33570 (TRBV28, TRBJ2-7)
CASSFSSYEQYF

SEQ ID NO: 67141 - protein, 15 aa, Homo sapiens
  CDR3 for alpha chain variable domain of TCR clone 33571 (TRAV17, TRAJ16)
CATALRFSDGQKLLF

SEQ ID NO: 67142 - protein, 15 aa, Homo sapiens
  CDR3 for beta chain variable domain of TCR clone 33571 (TRBV20-1, TRBJ1-1)
RSASRGVTGNTEAFF

SEQ ID NO: 67143 - protein, 14 aa, Homo sapiens
  CDR3 for alpha chain variable domain of TCR clone 33572 (TRAV1-2, TRAJ8)
CAVRGDTGFQKLVF

SEQ ID NO: 67144 - protein, 16 aa, Homo sapiens
  CDR3 for beta chain variable domain of TCR clone 33572 (TRBV7-2, TRBJ2-5)
CASSLAVSGRGETQYF

SEQ ID NO: 67145 - protein, 14 aa, Homo sapiens
  CDR3 for alpha chain variable domain of TCR clone 33573 (TRAV12-2, TRAJ40)
CAVKIPSGTYKYIF

SEQ ID NO: 67146 - protein, 12 aa, Homo sapiens
  CDR3 for beta chain variable domain of TCR clone 33573 (TRBV28, TRBJ2-3)
CASSLYRDTQYF

SEQ ID NO: 67147 - protein, 12 aa, Homo sapiens
  CDR3 for alpha chain variable domain of TCR clone 33574 (TRAV12-1, TRAJ40)
CVFYSGTYKYIL

SEQ ID NO: 67148 - protein, 18 aa, Homo sapiens
  CDR3 for beta chain variable domain of TCR clone 33574 (TRBV12-4, TRBJ2-2)
CASSLVAGTRGRTGELFF

SEQ ID NO: 67149 - protein, 14 aa, Homo sapiens
  CDR3 for alpha chain variable domain of TCR clone 33575 (TRAV3, TRAJ9)
CAVRLNTGCFKTIF

SEQ ID NO: 67150 - protein, 15 aa, Homo sapiens
  CDR3 for beta chain variable domain of TCR clone 33575 (TRBV7-2, TRBJ2-1)
CASSLASGRVNEQFF

SEQ ID NO: 67151 - protein, 15 aa, Homo sapiens
  CDR3 for alpha chain variable domain of TCR clone 33576 (TRAV17, TRAJ57)
CATGPSKGGSEKLVF

SEQ ID NO: 67152 - protein, 16 aa, Homo sapiens
  CDR3 for beta chain variable domain of TCR clone 33576 (TRBV12-4, TRBJ1-5)
CASSRPVGGSNQPQHF

SEQ ID NO: 67153 - protein, 14 aa, Homo sapiens
  CDR3 for alpha chain variable domain of TCR clone 33577 (TRAV12-2, TRAJ13)
CAVKKTGGYQRVTF

SEQ ID NO: 67154 - protein, 15 aa, Homo sapiens
  CDR3 for beta chain variable domain of TCR clone 33577 (TRBV5-1, TRBJ2-1)
CASSPPRAPYNEQFF

SEQ ID NO: 67155 - protein, 12 aa, Homo sapiens
  CDR3 for alpha chain variable domain of TCR clone 33578 (TRAV13-1, TRAJ49)
CAAPNTGNQFYF

SEQ ID NO: 67156 - protein, 17 aa, Homo sapiens
  CDR3 for beta chain variable domain of TCR clone 33578 (TRBV25-1, TRBJ2-7)
CASSDAIVVFSSYEQYF

SEQ ID NO: 67157 - protein, 12 aa, Homo sapiens
  CDR3 for alpha chain variable domain of TCR clone 33579 (TRAV8-3, TRAJ20)
CAVDFNDYKLSF

SEQ ID NO: 67158 - protein, 13 aa, Homo sapiens
  CDR3 for beta chain variable domain of TCR clone 33579 (TRBV5-7, TRBJ2-3)
CASSVGRTDTQYF

SEQ ID NO: 67159 - protein, 12 aa, Homo sapiens
  CDR3 for alpha chain variable domain of TCR clone 33580 (TRAV13-1, TRAJ21)
CAAKEGFNKFYF

SEQ ID NO: 67160 - protein, 14 aa, Homo sapiens
  CDR3 for beta chain variable domain of TCR clone 33580 (TRBV5-4, TRBJ1-1)
CASNLDSRRDEAFF

SEQ ID NO: 67161 - protein, 12 aa, Homo sapiens
  CDR3 for alpha chain variable domain of TCR clone 33581 (TRAV8-3, TRAJ20)
CAVAANDYKLSF

SEQ ID NO: 67162 - protein, 16 aa, Homo sapiens
  CDR3 for beta chain variable domain of TCR clone 33581 (TRBV19, TRBJ2-2)
CASRSPGTGATGELFF

SEQ ID NO: 67163 - protein, 18 aa, Homo sapiens
  CDR3 for alpha chain variable domain of TCR clone 33582 (TRAV3, TRAJ17)
CAVRARRGGRSCRQQANF

SEQ ID NO: 67164 - protein, 14 aa, Homo sapiens
  CDR3 for beta chain variable domain of TCR clone 33582 (TRBV4-1, TRBJ2-2)
CASSQAVSTGELFF

SEQ ID NO: 67165 - protein, 14 aa, Homo sapiens
  CDR3 for alpha chain variable domain of TCR clone 33583 (TRAV23/DV6, TRAJ13)
CAAMYSGGYQKVTF

SEQ ID NO: 67166 - protein, 14 aa, Homo sapiens
  CDR3 for beta chain variable domain of TCR clone 33583 (TRBV7-9, TRBJ2-1)
CASSPRDSLYEQSF

SEQ ID NO: 67167 - protein, 15 aa, Homo sapiens
  CDR3 for alpha chain variable domain of TCR clone 33584 (TRAV3, TRAJ4)
CAVRDGTGGYDKLIF

SEQ ID NO: 67168 - protein, 16 aa, Homo sapiens
  CDR3 for beta chain variable domain of TCR clone 33584 (TRBV27, TRBJ2-2)
CASSSSGVSNTGELFF

SEQ ID NO: 67169 - protein, 14 aa, Homo sapiens
  CDR3 for alpha chain variable domain of TCR clone 33585 (TRAV8-4, TRAJ9)
CAVRINTGGFKTIF

SEQ ID NO: 67170 - protein, 15 aa, Homo sapiens
  CDR3 for beta chain variable domain of TCR clone 33585 (TRBV10-2, TRBJ2-6)
CANSEQGTGANVLTF

SEQ ID NO: 67171 - protein, 14 aa, Homo sapiens
  CDR3 for alpha chain variable domain of TCR clone 33586 (TRAV8-3, TRAJ44)
CAVGNTGTASKLTF

SEQ ID NO: 67172 - protein, 15 aa, Homo sapiens
  CDR3 for beta chain variable domain of TCR clone 33586 (TRBV28, TRBJ2-7)
CASSSRGQGRYEQYF

SEQ ID NO: 67173 - protein, 16 aa, Homo sapiens
  CDR3 for alpha chain variable domain of TCR clone 33587 (TRAV8-4, TRAJ16)
CAVSPVGRWPEAALCK

SEQ ID NO: 67174 - protein, 15 aa, Homo sapiens
  CDR3 for beta chain variable domain of TCR clone 33587 (TRBV11-3, TRBJ2-7)
CASSPGPASSYEQYF

SEQ ID NO: 67175 - protein, 15 aa, Homo sapiens
  CDR3 for alpha chain variable domain of TCR clone 33588 (TRAV8-3, TRAJ27)
CAVGPSKTNAGKSTF

SEQ ID NO: 67176 - protein, 14 aa, Homo sapiens
  CDR3 for beta chain variable domain of TCR clone 33588 (TRBV7-3, TRBJ2-1)
CASSLAGGTNEQFF

SEQ ID NO: 67177 - protein, 15 aa, Homo sapiens
  CDR3 for alpha chain variable domain of TCR clone 33589 (TRAV12-3, TRAJ6)
CAMSATSGGGYIPTF

SEQ ID NO: 67178 - protein, 11 aa, Homo sapiens
  CDR3 for beta chain variable domain of TCR clone 33589 (TRBV6-4, TRBJ2-1)
CASSDSYAQFF

SEQ ID NO: 67179 - protein, 13 aa, Homo sapiens
  CDR3 for alpha chain variable domain of TCR clone 33590 (TRAV24, TRAJ53)
CAFGGGSNYKLTF

SEQ ID NO: 67180 - protein, 15 aa, Homo sapiens
  CDR3 for beta chain variable domain of TCR clone 33590 (TRBV5-8, TRBJ2-2)
CASSLDRGATGELFF

SEQ ID NO: 67181 - protein, 14 aa, Homo sapiens
  CDR3 for alpha chain variable domain of TCR clone 33591 (TRAV12-2, TRAJ5)
CAVNRSTVRRALTF

SEQ ID NO: 67182 - protein, 12 aa, Homo sapiens
  CDR3 for beta chain variable domain of TCR clone 33591 (TRBV19, TRBJ1-5)
CASSIAQQPQHF

SEQ ID NO: 67183 - protein, 15 aa, Homo sapiens
  CDR3 for alpha chain variable domain of TCR clone 33592 (TRAV16, TRAJ16)
CALQGGGSDGQELLF

SEQ ID NO: 67184 - protein, 15 aa, Homo sapiens
  CDR3 for beta chain variable domain of TCR clone 33592 (TRBV20-1, TRBJ2-7)
CSARDRVSGMDEQYF

SEQ ID NO: 67185 - protein, 14 aa, Homo sapiens
  CDR3 for alpha chain variable domain of TCR clone 33593 (TRAV8-3, TRAJ4)
CAVGAAGSYNKLIF

SEQ ID NO: 67186 - protein, 16 aa, Homo sapiens
  CDR3 for beta chain variable domain of TCR clone 33593 (TRBV7-2, TRBJ1-2)
CASSRQGGGANYGYTF

SEQ ID NO: 67187 - protein, 15 aa, Homo sapiens
  CDR3 for alpha chain variable domain of TCR clone 33594 (TRAV17, TRAJ16)
CATALRFSDGQRLLF

SEQ ID NO: 67188 - protein, 12 aa, Homo sapiens
  CDR3 for beta chain variable domain of TCR clone 33594 (TRBV2, TRBJ2-7)
CASSDPDYEQYF

SEQ ID NO: 67189 - protein, 16 aa, Homo sapiens
  CDR3 for alpha chain variable domain of TCR clone 33595 (TRAV8-3, TRAJ13)
CAVGAYPSGGYQKATF

SEQ ID NO: 67190 - protein, 15 aa, Homo sapiens
  CDR3 for beta chain variable domain of TCR clone 33595 (TRBV19, TRBJ1-5)
CASSIVWADNQPQHF

SEQ ID NO: 67191 - protein, 10 aa, Homo sapiens
  CDR3 for alpha chain variable domain of TCR clone 33596 (TRAV1-2, TRAJ31)
CAFFDARLMF

SEQ ID NO: 67192 - protein, 13 aa, Homo sapiens
  CDR3 for beta chain variable domain of TCR clone 33596 (TRBV10-3, TRBJ2-7)
CASKLAVNYEQYF

SEQ ID NO: 67193 - protein, 14 aa, Homo sapiens
  CDR3 for alpha chain variable domain of TCR clone 33597 (TRAV1-2, TRAJ16)
CAVNRFSDGQKLLF

SEQ ID NO: 67194 - protein, 18 aa, Homo sapiens
  CDR3 for beta chain variable domain of TCR clone 33597 (TRBV20-1, TRBJ2-6)
CSAETTSTHGSGANVLTF

SEQ ID NO: 67195 - protein, 10 aa, Homo sapiens
  CDR3 for alpha chain variable domain of TCR clone 33598 (TRAV12-1, TRAJ43)
CVVHNNDMRF

SEQ ID NO: 67196 - protein, 13 aa, Homo sapiens
  CDR3 for beta chain variable domain of TCR clone 33598 (TRBV12-4, TRBJ1-2)
CASSSGLTVIPTF

SEQ ID NO: 67197 - protein, 15 aa, Homo sapiens
  CDR3 for alpha chain variable domain of TCR clone 33599 (TRAV1-2, TRAJ30)
CAVRPHGNRDGKIIF

SEQ ID NO: 67198 - protein, 13 aa, Homo sapiens
  CDR3 for beta chain variable domain of TCR clone 33599 (TRBV4-1, TRBJ2-7)
CASSQGQAYEQYF

SEQ ID NO: 67199 - protein, 13 aa, Homo sapiens
  CDR3 for alpha chain variable domain of TCR clone 33600 (TRAV8-3, TRAJ36)
CAVGATWANNLFF

SEQ ID NO: 67200 - protein, 15 aa, Homo sapiens
  CDR3 for beta chain variable domain of TCR clone 33600 (TRBV7-2, TRBJ1-2)
CASSPRAGWNYGYTF

SEQ ID NO: 67201 - protein, 18 aa, Homo sapiens
  CDR3 for alpha chain variable domain of TCR clone 33601 (TRAV26-2, TRAJ45)
CILRVDKYSGGGADGLTF

SEQ ID NO: 67202 - protein, 13 aa, Homo sapiens
  CDR3 for beta chain variable domain of TCR clone 33601 (TRBV7-9, TRBJ1-2)
CASSLKQNYGYTF

SEQ ID NO: 67203 - protein, 12 aa, Homo sapiens
  CDR3 for alpha chain variable domain of TCR clone 33602 (TRAV21, TRAJ39)
CAADNAGNMLTF

SEQ ID NO: 67204 - protein, 13 aa, Homo sapiens
  CDR3 for beta chain variable domain of TCR clone 33602 (TRBV12-4, TRBJ1-1)
CASSPGTGCEAFF

SEQ ID NO: 67205 - protein, 14 aa, Homo sapiens
  CDR3 for alpha chain variable domain of TCR clone 33603 (TRAV12-3, TRAJ10)
SHLPLTGGGNKLTF

SEQ ID NO: 67206 - protein, 15 aa, Homo sapiens
  CDR3 for beta chain variable domain of TCR clone 33603 (TRBV29-1, TRBJ2-6)
CSAGDRGSGANVLTF

SEQ ID NO: 67207 - protein, 15 aa, Homo sapiens
  CDR3 for alpha chain variable domain of TCR clone 33604 (TRAV2, TRAJ9)
CAVEDRGTGGFKTIF

SEQ ID NO: 67208 - protein, 15 aa, Homo sapiens
  CDR3 for beta chain variable domain of TCR clone 33604 (TRBV19, TRBJ1-5)
CASSIVWADNQPQHF

SEQ ID NO: 67209 - protein, 14 aa, Homo sapiens
  CDR3 for alpha chain variable domain of TCR clone 33605 (TRAV2, TRAJ9)
CAVEDRSGGFKTIF

SEQ ID NO: 67210 - protein, 14 aa, Homo sapiens
  CDR3 for beta chain variable domain of TCR clone 33605 (TRBV7-8, TRBJ2-3)
CASSLEAGTDTQYF

SEQ ID NO: 67211 - protein, 15 aa, Homo sapiens
  CDR3 for alpha chain variable domain of TCR clone 33606 (TRAV26-1, TRAJ53)
CIVRVEGGSNYKLTF

SEQ ID NO: 67212 - protein, 14 aa, Homo sapiens
  CDR3 for beta chain variable domain of TCR clone 33606 (TRBV4-3, TRBJ2-1)
CASSQERWRGEQFF

SEQ ID NO: 67213 - protein, 13 aa, Homo sapiens
  CDR3 for alpha chain variable domain of TCR clone 33607 (TRAV2, TRAJ29)
CAAGNSGNTPLVF

SEQ ID NO: 67214 - protein, 16 aa, Homo sapiens
  CDR3 for beta chain variable domain of TCR clone 33607 (TRBV7-9, TRBJ1-2)
CASSPGGGAINYGDTF

SEQ ID NO: 67215 - protein, 11 aa, Homo sapiens
  CDR3 for alpha chain variable domain of TCR clone 33608 (TRAV2, TRAJ33)
CAVESNYQSIW

SEQ ID NO: 67216 - protein, 15 aa, Homo sapiens
  CDR3 for beta chain variable domain of TCR clone 33608 (TRBV19, TRBJ1-1)
CASTSGQIQNTEAFF

SEQ ID NO: 67217 - protein, 12 aa, Homo sapiens
  CDR3 for alpha chain variable domain of TCR clone 33609 (TRAV30, TRAJ43)
CGTEERGNDMRF

SEQ ID NO: 67218 - protein, 13 aa, Homo sapiens
  CDR3 for beta chain variable domain of TCR clone 33609 (TRBV12-4, TRBJ1-2)
CASSSGSKDGYAF

SEQ ID NO: 67219 - protein, 13 aa, Homo sapiens
  CDR3 for alpha chain variable domain of TCR clone 33610 (TRAV17, TRAJ15)
CATVNQAGTALIF

SEQ ID NO: 67220 - protein, 13 aa, Homo sapiens
  CDR3 for beta chain variable domain of TCR clone 33610 (TRBV12-5, TRBJ2-3)
CASGDRQSDTQYF

SEQ ID NO: 67221 - protein, 12 aa, Homo sapiens
  CDR3 for alpha chain variable domain of TCR clone 33611 (TRAV17, TRAJ20)
CATDSNDYKLSF

SEQ ID NO: 67222 - protein, 11 aa, Homo sapiens
  CDR3 for beta chain variable domain of TCR clone 33611 (TRBV11-2, TRBJ1-1)
CASSIDTEAFF

SEQ ID NO: 67223 - protein, 14 aa, Homo sapiens
  CDR3 for alpha chain variable domain of TCR clone 33612 (TRAV30, TRAJ26)
CGTAIVSYGQNFVF

SEQ ID NO: 67224 - protein, 13 aa, Homo sapiens
  CDR3 for beta chain variable domain of TCR clone 33612 (TRBV19, TRBJ1-3)
CASRLSLGNTIYF

SEQ ID NO: 67225 - protein, 17 aa, Homo sapiens
  CDR3 for alpha chain variable domain of TCR clone 33613 (TRAV3, TRAJ6)
CAVRDGPRAGGSYIPTF

SEQ ID NO: 67226 - protein, 12 aa, Homo sapiens
  CDR3 for beta chain variable domain of TCR clone 33613 (TRBV11-2, TRBJ2-2)
CASSLGGGELFL

SEQ ID NO: 67227 - protein, 13 aa, Homo sapiens
  CDR3 for alpha chain variable domain of TCR clone 33614 (TRAV1-2, TRAJ9)
CAALNTGGFKTIF

SEQ ID NO: 67228 - protein, 17 aa, Homo sapiens
  CDR3 for beta chain variable domain of TCR clone 33614 (TRBV20-1, TRBJ2-2)
CSASGSGQGGLTGELFF

SEQ ID NO: 67229 - protein, 15 aa, Homo sapiens
  CDR3 for alpha chain variable domain of TCR clone 33615 (TRAV3, TRAJ5)
CAVRDRDTGRRALTF

SEQ ID NO: 67230 - protein, 13 aa, Homo sapiens
  CDR3 for beta chain variable domain of TCR clone 33615 (TRBV12-4, TRBJ2-7)
CASSPTETYEQYF

SEQ ID NO: 67231 - protein, 11 aa, Homo sapiens
  CDR3 for alpha chain variable domain of TCR clone 33616 (TRAV3, TRAJ21)
CAVGNFNKFYF

SEQ ID NO: 67232 - protein, 14 aa, Homo sapiens
  CDR3 for beta chain variable domain of TCR clone 33616 (TRBV19, TRBJ2-7)
CASSMGQGAIEQYF

SEQ ID NO: 67233 - protein, 20 aa, Homo sapiens
  CDR3 for alpha chain variable domain of TCR clone 33617 (TRAV4, TRAJ29)
CCVLLPRGCVQFSGNTPLVF

SEQ ID NO: 67234 - protein, 17 aa, Homo sapiens
  CDR3 for beta chain variable domain of TCR clone 33617 (TRBV25-1, TRBJ2-7)
CASSDARVVFSSYEQYF

SEQ ID NO: 67235 - protein, 16 aa, Homo sapiens
  CDR3 for alpha chain variable domain of TCR clone 33618 (TRAV30, TRAJ24)
CGTEIVDADSWGKFQF

SEQ ID NO: 67236 - protein, 19 aa, Homo sapiens
  CDR3 for beta chain variable domain of TCR clone 33618 (TRBV25-1, TRBJ2-2)
CAILVYRVDRGRKAGELFF

SEQ ID NO: 67237 - protein, 14 aa, Homo sapiens
  CDR3 for alpha chain variable domain of TCR clone 33619 (TRAV21, TRAJ35)
CAVMPIGFGNVLHC

SEQ ID NO: 67238 - protein, 12 aa, Homo sapiens
  CDR3 for beta chain variable domain of TCR clone 33619 (TRBV7-9, TRBJ2-7)
CASSIKQEEQYF

SEQ ID NO: 67239 - protein, 23 aa, Homo sapiens
  CDR3 for alpha chain variable domain of TCR clone 33620 (TRAV1-1, TRAJ11)
LLQEHQMKDSASYFCAGYSTLTF

SEQ ID NO: 67240 - protein, 15 aa, Homo sapiens
  CDR3 for beta chain variable domain of TCR clone 33620 (TRBV6-5, TRBJ2-1)
CASRGDFDSYNEQFF

SEQ ID NO: 67241 - protein, 18 aa, Homo sapiens
  CDR3 for alpha chain variable domain of TCR clone 33621 (TRAV21, TRAJ52)
CAVRPPPAGGTSYGKLTF

SEQ ID NO: 67242 - protein, 15 aa, Homo sapiens
  CDR3 for beta chain variable domain of TCR clone 33621 (TRBV7-9, TRBJ2-7)
CASSSSGLAVYEQYF

SEQ ID NO: 67243 - protein, 17 aa, Homo sapiens
  CDR3 for alpha chain variable domain of TCR clone 33622 (TRAV23/DV6, TRAJ57)
CAASSTLSRGGSEKLVF

SEQ ID NO: 67244 - protein, 14 aa, Homo sapiens
  CDR3 for beta chain variable domain of TCR clone 33622 (TRBV25-1, TRBJ1-1)
CASTHLGGNTEAFF

SEQ ID NO: 67245 - protein, 14 aa, Homo sapiens
  CDR3 for alpha chain variable domain of TCR clone 33623 (TRAV12-2, TRAJ9)
CAANMEGGGFKTIF

SEQ ID NO: 67246 - protein, 14 aa, Homo sapiens
  CDR3 for beta chain variable domain of TCR clone 33623 (TRBV5-1, TRBJ1-1)
CASSLAVGSGEAFF

SEQ ID NO: 67247 - protein, 13 aa, Homo sapiens
  CDR3 for alpha chain variable domain of TCR clone 33624 (TRAV8-3, TRAJ44)
CAVLPGTASKLTF

SEQ ID NO: 67248 - protein, 14 aa, Homo sapiens
  CDR3 for beta chain variable domain of TCR clone 33624 (TRBV11-2, TRBJ2-3)
CASSRLARTDTQYF

SEQ ID NO: 67249 - protein, 12 aa, Homo sapiens
  CDR3 for alpha chain variable domain of TCR clone 33625 (TRAV12-3, TRAJ17)
CAMTLTGNKLTF

SEQ ID NO: 67250 - protein, 15 aa, Homo sapiens
  CDR3 for beta chain variable domain of TCR clone 33625 (TRBV4-1, TRBJ2-7)
CASSQNTGRLYEQYF

SEQ ID NO: 67251 - protein, 12 aa, Homo sapiens
  CDR3 for alpha chain variable domain of TCR clone 33626 (TRAV21, TRAJ31)
CVLAGNNARLMF

SEQ ID NO: 67252 - protein, 16 aa, Homo sapiens
  CDR3 for beta chain variable domain of TCR clone 33626 (TRBV27, TRBJ2-5)
CASSFGPGSTKETQYF

SEQ ID NO: 67253 - protein, 16 aa, Homo sapiens
  CDR3 for alpha chain variable domain of TCR clone 33627 (TRAV26-1, TRAJ32)
CIVRTNYGGATNKLIF

SEQ ID NO: 67254 - protein, 15 aa, Homo sapiens
  CDR3 for beta chain variable domain of TCR clone 33627 (TRBV6-3, TRBJ2-7)
CASSSPGTVFYEQYF

SEQ ID NO: 67255 - protein, 15 aa, Homo sapiens
  CDR3 for alpha chain variable domain of TCR clone 33628 (TRAV12-3, TRAJ6)
CAMSATTGGSYIPTF

SEQ ID NO: 67256 - protein, 15 aa, Homo sapiens
  CDR3 for beta chain variable domain of TCR clone 33628 (TRBV2, TRBJ2-7)
CASSEGLARSYEQYF

SEQ ID NO: 67257 - protein, 16 aa, Homo sapiens
  CDR3 for alpha chain variable domain of TCR clone 33629 (TRAV4, TRAJ22)
CLVGDLYSGSAWQLTF

SEQ ID NO: 67258 - protein, 16 aa, Homo sapiens
  CDR3 for beta chain variable domain of TCR clone 33629 (TRBV7-9, TRBJ2-1)
CASSDVAGGSYNEQFF

SEQ ID NO: 67259 - protein, 14 aa, Homo sapiens
  CDR3 for alpha chain variable domain of TCR clone 33630 (TRAV12-2, TRAJ53)
CAVQGGGSNYKLTF

SEQ ID NO: 67260 - protein, 14 aa, Homo sapiens
  CDR3 for beta chain variable domain of TCR clone 33630 (TRBV7-7, TRBJ2-2)
CATRQDSDTGELFF

SEQ ID NO: 67261 - protein, 12 aa, Homo sapiens
  CDR3 for alpha chain variable domain of TCR clone 33631 (TRAV4, TRAJ6)
CLAPGGSYVPTF

SEQ ID NO: 67262 - protein, 12 aa, Homo sapiens
  CDR3 for beta chain variable domain of TCR clone 33631 (TRBV6-5, TRBJ2-3)
CASSDTTDTQYF

SEQ ID NO: 67263 - protein, 13 aa, Homo sapiens
  CDR3 for alpha chain variable domain of TCR clone 33632 (TRAV23/DV6, TRAJ15)
CAALPAGGNCSDL

SEQ ID NO: 67264 - protein, 14 aa, Homo sapiens
  CDR3 for beta chain variable domain of TCR clone 33632 (TRBV7-9, TRBJ1-2)
CASSRQGANYGYTF

SEQ ID NO: 67265 - protein, 12 aa, Homo sapiens
  CDR3 for alpha chain variable domain of TCR clone 33633 (TRAV13-2, TRAJ23)
CAERHRGGKLIF

SEQ ID NO: 67266 - protein, 16 aa, Homo sapiens
  CDR3 for beta chain variable domain of TCR clone 33633 (TRBV19, TRBJ2-2)
CASRSPGTGATGELFF

SEQ ID NO: 67267 - protein, 18 aa, Homo sapiens
  CDR3 for alpha chain variable domain of TCR clone 33634 (TRAV21, TRAJ52)
CAVRPSPAGGTSYGKLTL

SEQ ID NO: 67268 - protein, 15 aa, Homo sapiens
  CDR3 for beta chain variable domain of TCR clone 33634 (TRBV19, TRBJ1-1)
CASTSGQIQNTEAFF

SEQ ID NO: 67269 - protein, 15 aa, Homo sapiens
  CDR3 for alpha chain variable domain of TCR clone 33635 (TRAV8-3, TRAJ45)
CASSYSGGGADGFTF

SEQ ID NO: 67270 - protein, 17 aa, Homo sapiens
  CDR3 for beta chain variable domain of TCR clone 33635 (TRBV7-8, TRBJ1-2)
CASSLRPLQGHLYGYTF

SEQ ID NO: 67271 - protein, 12 aa, Homo sapiens
  CDR3 for alpha chain variable domain of TCR clone 33636 (TRAV27, TRAJ13)
CAGVRGYQKVTF

SEQ ID NO: 67272 - protein, 16 aa, Homo sapiens
  CDR3 for beta chain variable domain of TCR clone 33636 (TRBV28, TRBJ2-1)
CASSSSYSRSLNEQFF

SEQ ID NO: 67273 - protein, 11 aa, Homo sapiens
  CDR3 for alpha chain variable domain of TCR clone 33637 (TRAV1-1, TRAJ23)
CAVRQGGKLIF

SEQ ID NO: 67274 - protein, 11 aa, Homo sapiens
  CDR3 for beta chain variable domain of TCR clone 33637 (TRBV29-1, TRBJ2-5)
CSEDRTGTQYF

SEQ ID NO: 67275 - protein, 14 aa, Homo sapiens
  CDR3 for alpha chain variable domain of TCR clone 33638 (TRAV9-2, TRAJ39)
CALYIYNAGNMLTF

SEQ ID NO: 67276 - protein, 16 aa, Homo sapiens
  CDR3 for beta chain variable domain of TCR clone 33638 (TRBV12-4, TRBJ1-4)
CASSLKGIGHGEKLFF

SEQ ID NO: 67277 - protein, 12 aa, Homo sapiens
  CDR3 for alpha chain variable domain of TCR clone 33639 (TRAV12-3, TRAJ3)
CAIDSSSSKIIF

SEQ ID NO: 67278 - protein, 17 aa, Homo sapiens
  CDR3 for beta chain variable domain of TCR clone 33639 (TRBV7-9, TRBJ2-3)
CASSLEEAGAYPDTQYF

SEQ ID NO: 67279 - protein, 11 aa, Homo sapiens
  CDR3 for alpha chain variable domain of TCR clone 33640 (TRAV1-1, TRAJ23)
CAVRQGGKLIF

SEQ ID NO: 67280 - protein, 20 aa, Homo sapiens
  CDR3 for beta chain variable domain of TCR clone 33640 (TRBV7-8, TRBJ2-2)
CASSHLFPGPTVHITGGLFF

SEQ ID NO: 67281 - protein, 14 aa, Homo sapiens
  CDR3 for alpha chain variable domain of TCR clone 33641 (TRAV12-1, TRAJ30)
CVPTGTNRDEKIIF

SEQ ID NO: 67282 - protein, 11 aa, Homo sapiens
  CDR3 for beta chain variable domain of TCR clone 33641 (TRBV4-1, TRBJ2-2)
CASEHTGELFF

SEQ ID NO: 67283 - protein, 11 aa, Homo sapiens
  CDR3 for alpha chain variable domain of TCR clone 33642 (TRAV13-1, TRAJ20)
CAASNDYKLSF

SEQ ID NO: 67284 - protein, 16 aa, Homo sapiens
  CDR3 for beta chain variable domain of TCR clone 33642 (TRBV2, TRBJ1-4)
CASNLLQGATNEKLFF

SEQ ID NO: 67285 - protein, 16 aa, Homo sapiens
  CDR3 for alpha chain variable domain of TCR clone 33643 (TRAV1-2, TRAJ27)
CAVREPQTPMQANQPL

SEQ ID NO: 67286 - protein, 13 aa, Homo sapiens
  CDR3 for beta chain variable domain of TCR clone 33643 (TRBV6-1, TRBJ1-2)
CASSAREGYGDTF

SEQ ID NO: 67287 - protein, 19 aa, Homo sapiens
  CDR3 for alpha chain variable domain of TCR clone 33644 (TRAV26-1, TRAJ52)
CIARAHRNAGGTSYGKLTF

SEQ ID NO: 67288 - protein, 15 aa, Homo sapiens
  CDR3 for beta chain variable domain of TCR clone 33644 (TRBV29-1, TRBJ2-1)
CSGRDRKSSYNEQFF

SEQ ID NO: 67289 - protein, 14 aa, Homo sapiens
  CDR3 for alpha chain variable domain of TCR clone 33645 (TRAV8-2, TRAJ4)
CVVSPFGGYNKLIF

SEQ ID NO: 67290 - protein, 15 aa, Homo sapiens
  CDR3 for beta chain variable domain of TCR clone 33645 (TRBV4-1, TRBJ1-4)
CASSDTGGTNEKLFF

SEQ ID NO: 67291 - protein, 15 aa, Homo sapiens
  CDR3 for alpha chain variable domain of TCR clone 33646 (TRAV3, TRAJ15)
CAVRPANQAGTALIF

SEQ ID NO: 67292 - protein, 14 aa, Homo sapiens
  CDR3 for beta chain variable domain of TCR clone 33646 (TRBV4-1, TRBJ2-2)
CASSQAVNNGELFF

SEQ ID NO: 67293 - protein, 14 aa, Homo sapiens
  CDR3 for alpha chain variable domain of TCR clone 33647 (TRAV30, TRAJ33)
CGTVAPRSNYQLIW

SEQ ID NO: 67294 - protein, 16 aa, Homo sapiens
  CDR3 for beta chain variable domain of TCR clone 33647 (TRBV3-1, TRBJ2-5)
CASSPGQFNGFGTLYF

SEQ ID NO: 67295 - protein, 12 aa, Homo sapiens
  CDR3 for alpha chain variable domain of TCR clone 33648 (TRAV12-3, TRAJ17)
CAMTLTGNKLTF

SEQ ID NO: 67296 - protein, 16 aa, Homo sapiens
  CDR3 for beta chain variable domain of TCR clone 33648 (TRBV12-4, TRBJ2-5)
CASSFLVRGRQETQYF

SEQ ID NO: 67297 - protein, 16 aa, Homo sapiens
  CDR3 for alpha chain variable domain of TCR clone 33649 (TRAV29/DV5, TRAJ36)
CAASAHYQSGANNLFF

SEQ ID NO: 67298 - protein, 16 aa, Homo sapiens
  CDR3 for beta chain variable domain of TCR clone 33649 (TRBV4-2, TRBJ2-3)
CAGSQESAGDTDTQYF

SEQ ID NO: 67299 - protein, 11 aa, Homo sapiens
  CDR3 for alpha chain variable domain of TCR clone 33650 (TRAV12-1, TRAJ30)
CVVNGQDKIIF

SEQ ID NO: 67300 - protein, 12 aa, Homo sapiens
  CDR3 for beta chain variable domain of TCR clone 33650 (TRBV27, TRBJ2-2)
CSSKLFTGELFF

SEQ ID NO: 67301 - protein, 13 aa, Homo sapiens
  CDR3 for alpha chain variable domain of TCR clone 33651 (TRAV8-3, TRAJ28)
CAVGAVGSYQLTF

SEQ ID NO: 67302 - protein, 15 aa, Homo sapiens
  CDR3 for beta chain variable domain of TCR clone 33651 (TRBV7-9, TRBJ1-5)
CASSQGHQPNQPQHV

SEQ ID NO: 67303 - protein, 17 aa, Homo sapiens
  CDR3 for alpha chain variable domain of TCR clone 33652 (TRAV13-1, TRAJ28)
CAASPPYSGAGSYQLTF

SEQ ID NO: 67304 - protein, 16 aa, Homo sapiens
  CDR3 for beta chain variable domain of TCR clone 33652 (TRBV19, TRBJ2-1)
CASSKAGPGSYNEQFF

SEQ ID NO: 67305 - protein, 15 aa, Homo sapiens
  CDR3 for alpha chain variable domain of TCR clone 33653 (TRAV8-4, TRAJ37)
CAVTYGPSNTGKLIF

SEQ ID NO: 67306 - protein, 13 aa, Homo sapiens
  CDR3 for beta chain variable domain of TCR clone 33653 (TRBV12-4, TRBJ2-5)
CASSLGGSRTQYF

SEQ ID NO: 67307 - protein, 14 aa, Homo sapiens
  CDR3 for alpha chain variable domain of TCR clone 33654 (TRAV13-1, TRAJ35)
CAASKGGFGNVLHC

SEQ ID NO: 67308 - protein, 14 aa, Homo sapiens
  CDR3 for beta chain variable domain of TCR clone 33654 (TRBV19, TRBJ2-3)
CASSIDLGGDTQYF

SEQ ID NO: 67309 - protein, 12 aa, Homo sapiens
  CDR3 for alpha chain variable domain of TCR clone 33655 (TRAV1-1, TRAJ8)
CAGGTGFQKLVF

SEQ ID NO: 67310 - protein, 17 aa, Homo sapiens
  CDR3 for beta chain variable domain of TCR clone 33655 (TRBV13, TRBJ2-3)
CASSLSRVAGGRNTQYF

SEQ ID NO: 67311 - protein, 14 aa, Homo sapiens
  CDR3 for alpha chain variable domain of TCR clone 33656 (TRAV12-3, TRAJ10)
SHLPLTGGGNKLTF

SEQ ID NO: 67312 - protein, 14 aa, Homo sapiens
  CDR3 for beta chain variable domain of TCR clone 33656 (TRBV19, TRBJ2-2)
CASSGQGIAGELFF

SEQ ID NO: 67313 - protein, 14 aa, Homo sapiens
  CDR3 for alpha chain variable domain of TCR clone 33657 (TRAV35, TRAJ13)
CAGSPSGGYQKVTF

SEQ ID NO: 67314 - protein, 17 aa, Homo sapiens
  CDR3 for beta chain variable domain of TCR clone 33657 (TRBV7-6, TRBJ2-5)
CASSPGLAEPWGETQYF

SEQ ID NO: 67315 - protein, 13 aa, Homo sapiens
  CDR3 for alpha chain variable domain of TCR clone 33658 (TRAV3, TRAJ15)
CAVRDQAGTALIF

SEQ ID NO: 67316 - protein, 15 aa, Homo sapiens
  CDR3 for beta chain variable domain of TCR clone 33658 (TRBV11-1, TRBJ2-7)
CASSLNYGASYEQCF

SEQ ID NO: 67317 - protein, 15 aa, Homo sapiens
  CDR3 for alpha chain variable domain of TCR clone 33659 (TRAV3, TRAJ5)
CAVRDLDTDRRALTF

SEQ ID NO: 67318 - protein, 15 aa, Homo sapiens
  CDR3 for beta chain variable domain of TCR clone 33659 (TRBV20-1, TRBJ2-1)
CSARSPGGPGNEQFF

SEQ ID NO: 67319 - protein, 17 aa, Homo sapiens
  CDR3 for alpha chain variable domain of TCR clone 33660 (TRAV26-2, TRAJ42)
CILRDVRYGGSQGNLIF

SEQ ID NO: 67320 - protein, 16 aa, Homo sapiens
  CDR3 for beta chain variable domain of TCR clone 33660 (TRBV12-4, TRBJ2-7)
CASSLIGGTGTYEQYF

SEQ ID NO: 67321 - protein, 14 aa, Homo sapiens
  CDR3 for alpha chain variable domain of TCR clone 33661 (TRAV13-1, TRAJ44)
CAAKATGNASKLTF

SEQ ID NO: 67322 - protein, 17 aa, Homo sapiens
  CDR3 for beta chain variable domain of TCR clone 33661 (TRBV7-3, TRBJ2-3)
CASSLMKRMRGADTQYF

SEQ ID NO: 67323 - protein, 12 aa, Homo sapiens
  CDR3 for alpha chain variable domain of TCR clone 33662 (TRAV8-3, TRAJ26)
CAGDNYGQNFVF

SEQ ID NO: 67324 - protein, 18 aa, Homo sapiens
  CDR3 for beta chain variable domain of TCR clone 33662 (TRBV11-2, TRBJ2-3)
CASSLGGASRGAPNTQYF

SEQ ID NO: 67325 - protein, 13 aa, Homo sapiens
  CDR3 for alpha chain variable domain of TCR clone 33663 (TRAV12-2, TRAJ39)
CAVNNNAGNILTF

SEQ ID NO: 67326 - protein, 13 aa, Homo sapiens
  CDR3 for beta chain variable domain of TCR clone 33663 (TRBV2, TRBJ1-5)
CATAGPGNQPQHF

SEQ ID NO: 67327 - protein, 14 aa, Homo sapiens
  CDR3 for alpha chain variable domain of TCR clone 33664 (TRAV9-2, TRAJ39)
CALYIYNAGNMLTF

SEQ ID NO: 67328 - protein, 15 aa, Homo sapiens
  CDR3 for beta chain variable domain of TCR clone 33664 (TRBV7-2, TRBJ2-1)
CASSSGLAGGNEQFF

SEQ ID NO: 67329 - protein, 16 aa, Homo sapiens
  CDR3 for alpha chain variable domain of TCR clone 33665 (TRAV8-3, TRAJ44)
CAVGTLMTGTASKLTF

SEQ ID NO: 67330 - protein, 14 aa, Homo sapiens
  CDR3 for beta chain variable domain of TCR clone 33665 (TRBV4-1, TRBJ2-2)
CASSQAVNTGELFF

SEQ ID NO: 67331 - protein, 18 aa, Homo sapiens
  CDR3 for alpha chain variable domain of TCR clone 33666 (TRAV26-1, TRAJ52)
CIVRAEGAGGTSYGKLTF

SEQ ID NO: 67332 - protein, 13 aa, Homo sapiens
  CDR3 for beta chain variable domain of TCR clone 33666 (TRBV7-3, TRBJ1-2)
CASSLKRGYGYTF

SEQ ID NO: 67333 - protein, 12 aa, Homo sapiens
  CDR3 for alpha chain variable domain of TCR clone 33667 (TRAV16, TRAJ12)
CAHGDSSYKLIF

SEQ ID NO: 67334 - protein, 12 aa, Homo sapiens
  CDR3 for beta chain variable domain of TCR clone 33667 (TRBV28, TRBJ2-1)
CAGSRLVGEQFF

SEQ ID NO: 67335 - protein, 11 aa, Homo sapiens
  CDR3 for alpha chain variable domain of TCR clone 33668 (TRAV13-1, TRAJ49)
CACVGGNQVYF

SEQ ID NO: 67336 - protein, 16 aa, Homo sapiens
  CDR3 for beta chain variable domain of TCR clone 33668 (TRBV11-2, TRBJ2-2)
CASSLRTGNLIGELFF

SEQ ID NO: 67337 - protein, 18 aa, Homo sapiens
  CDR3 for alpha chain variable domain of TCR clone 33669 (TRAV21, TRAJ52)
CAVRPSPAGGNSYGKLTF

SEQ ID NO: 67338 - protein, 16 aa, Homo sapiens
  CDR3 for beta chain variable domain of TCR clone 33669 (TRBV19, TRBJ2-1)
CASSKAGPSSYNEQFF

SEQ ID NO: 67339 - protein, 14 aa, Homo sapiens
  CDR3 for alpha chain variable domain of TCR clone 33670 (TRAV29/DV5, TRAJ45)
CAASFRGGADGLTF

SEQ ID NO: 67340 - protein, 11 aa, Homo sapiens
  CDR3 for beta chain variable domain of TCR clone 33670 (TRBV11-2, TRBJ2-2)
CASSSPGELFF

SEQ ID NO: 67341 - protein, 12 aa, Homo sapiens
  CDR3 for alpha chain variable domain of TCR clone 33671 (TRAV2, TRAJ9)
CAVGAGGFKTIF

SEQ ID NO: 67342 - protein, 17 aa, Homo sapiens
  CDR3 for beta chain variable domain of TCR clone 33671 (TRBV13, TRBJ2-3)
CASSLSRVAGGRNTQYF

SEQ ID NO: 67343 - protein, 15 aa, Homo sapiens
  CDR3 for alpha chain variable domain of TCR clone 33672 (TRAV8-3, TRAJ11)
CAVGLLNSGYSTLTF

SEQ ID NO: 67344 - protein, 14 aa, Homo sapiens
  CDR3 for beta chain variable domain of TCR clone 33672 (TRBV4-1, TRBJ2-5)
CASNRSGSGETQYF

SEQ ID NO: 67345 - protein, 18 aa, Homo sapiens
  CDR3 for alpha chain variable domain of TCR clone 33673 (TRAV12-3, TRAJ52)
CAMSRTNAGGTSYGKLTF

SEQ ID NO: 67346 - protein, 17 aa, Homo sapiens
  CDR3 for beta chain variable domain of TCR clone 33673 (TRBV7-3, TRBJ2-3)
CASSLMKRMRGEDTQYF

SEQ ID NO: 67347 - protein, 10 aa, Homo sapiens
  CDR3 for alpha chain variable domain of TCR clone 33674 (TRAV23/DV6, TRAJ57)
CAASSTLSQG

SEQ ID NO: 67348 - protein, 14 aa, Homo sapiens
  CDR3 for beta chain variable domain of TCR clone 33674 (TRBV25-1, TRBJ1-1)
CASTNLGGNTEAFF

SEQ ID NO: 67349 - protein, 14 aa, Homo sapiens
  CDR3 for alpha chain variable domain of TCR clone 33675 (TRAV12-2, TRAJ13)
CAVEKTGGYQKVTF

SEQ ID NO: 67350 - protein, 14 aa, Homo sapiens
  CDR3 for beta chain variable domain of TCR clone 33675 (TRBV5-4, TRBJ1-1)
CASSLDSRRDEAFF

SEQ ID NO: 67351 - protein, 16 aa, Homo sapiens
  CDR3 for alpha chain variable domain of TCR clone 33676 (TRAV22, TRAJ45)
CAAERGKRGGADGLTF

SEQ ID NO: 67352 - protein, 11 aa, Homo sapiens
  CDR3 for beta chain variable domain of TCR clone 33676 (TRBV29-1, TRBJ2-5)
CSEDRTGTQYF

SEQ ID NO: 67353 - protein, 17 aa, Homo sapiens
  CDR3 for alpha chain variable domain of TCR clone 33677 (TRAV3, TRAJ12)
CAVRDGGRMDSSYKLIF

SEQ ID NO: 67354 - protein, 12 aa, Homo sapiens
  CDR3 for beta chain variable domain of TCR clone 33677 (TRBV11-2, TRBJ2-2)
CASSLGGGGLFF

SEQ ID NO: 67355 - protein, 13 aa, Homo sapiens
  CDR3 for alpha chain variable domain of TCR clone 33678 (TRAV22, TRAJ29)
CAVGGAGNTPLVF

SEQ ID NO: 67356 - protein, 13 aa, Homo sapiens
  CDR3 for beta chain variable domain of TCR clone 33678 (TRBV4-2, TRBJ1-1)
CASSQAGNTEAFF

SEQ ID NO: 67357 - protein, 14 aa, Homo sapiens
  CDR3 for alpha chain variable domain of TCR clone 33679 (TRAV17, TRAJ22)
CATSPSGSARQLTF

SEQ ID NO: 67358 - protein, 15 aa, Homo sapiens
  CDR3 for beta chain variable domain of TCR clone 33679 (TRBV4-1, TRBJ2-5)
CASSQWDLYQETHYF

SEQ ID NO: 67359 - protein, 15 aa, Homo sapiens
  CDR3 for alpha chain variable domain of TCR clone 33680 (TRAV30, TRAJ32)
CGTEILGGATNKLIF

SEQ ID NO: 67360 - protein, 13 aa, Homo sapiens
  CDR3 for beta chain variable domain of TCR clone 33680 (TRBV15, TRBJ1-6)
CATSGGLNSPLHF

SEQ ID NO: 67361 - protein, 14 aa, Homo sapiens
  CDR3 for alpha chain variable domain of TCR clone 33681 (TRAV1-2, TRAJ16)
CAVNRFSDGQKLLF

SEQ ID NO: 67362 - protein, 14 aa, Homo sapiens
  CDR3 for beta chain variable domain of TCR clone 33681 (TRBV5-1, TRBJ2-3)
CASSLFGPTDTQYF

SEQ ID NO: 67363 - protein, 11 aa, Homo sapiens
  CDR3 for alpha chain variable domain of TCR clone 33682 (TRAV2, TRAJ13)
CASGGYQKVTF

SEQ ID NO: 67364 - protein, 16 aa, Homo sapiens
  CDR3 for beta chain variable domain of TCR clone 33682 (TRBV6-1, TRBJ2-5)
CASSENLDRGAETQYF

SEQ ID NO: 67365 - protein, 15 aa, Homo sapiens
  CDR3 for alpha chain variable domain of TCR clone 33683 (TRAV25, TRAJ52)
CAGRPGGTSYGKLTF

SEQ ID NO: 67366 - protein, 17 aa, Homo sapiens
  CDR3 for beta chain variable domain of TCR clone 33683 (TRBV20-1, TRBJ2-2)
CSASGSGQGGLTGELFF

SEQ ID NO: 67367 - protein, 13 aa, Homo sapiens
  CDR3 for alpha chain variable domain of TCR clone 33684 (TRAV20, TRAJ21)
CAVEGYNFSKFYF

SEQ ID NO: 67368 - protein, 14 aa, Homo sapiens
  CDR3 for beta chain variable domain of TCR clone 33684 (TRBV3-1, TRBJ2-5)
CASSQGPDQETQYF

SEQ ID NO: 67369 - protein, 12 aa, Homo sapiens
  CDR3 for alpha chain variable domain of TCR clone 33685 (TRAV12-3, TRAJ34)
CAMGYNTDKLIF

SEQ ID NO: 67370 - protein, 14 aa, Homo sapiens
  CDR3 for beta chain variable domain of TCR clone 33685 (TRBV4-1, TRBJ2-2)
CASSQAVNTGELFS

SEQ ID NO: 67371 - protein, 17 aa, Homo sapiens
  CDR3 for alpha chain variable domain of TCR clone 33686 (TRAV13-1, TRAJ28)
CVASPPYSGAGSYQLTF

SEQ ID NO: 67372 - protein, 16 aa, Homo sapiens
  CDR3 for beta chain variable domain of TCR clone 33686 (TRBV19, TRBJ2-1)
CASSKAGPGSYNEQFF

SEQ ID NO: 67373 - protein, 14 aa, Homo sapiens
  CDR3 for alpha chain variable domain of TCR clone 33687 (TRAV12-2, TRAJ40)
CAVKIPPGTYKYIF

SEQ ID NO: 67374 - protein, 20 aa, Homo sapiens
  CDR3 for beta chain variable domain of TCR clone 33687 (TRBV28, TRBJ2-1)
CASTPIGRSPGLAGGNEQFF

SEQ ID NO: 67375 - protein, 14 aa, Homo sapiens
  CDR3 for alpha chain variable domain of TCR clone 33688 (TRAV2, TRAJ9)
CAVEDRRGGFKTIF

SEQ ID NO: 67376 - protein, 18 aa, Homo sapiens
  CDR3 for beta chain variable domain of TCR clone 33688 (TRBV20-1, TRBJ2-5)
CSQTGDSGRLGGKETQYF

SEQ ID NO: 67377 - protein, 14 aa, Homo sapiens
  CDR3 for alpha chain variable domain of TCR clone 33689 (TRAV1-1, TRAJ27)
CAVIYNANAGKSTF

SEQ ID NO: 67378 - protein, 15 aa, Homo sapiens
  CDR3 for beta chain variable domain of TCR clone 33689 (TRBV6-3, TRBJ2-7)
CASSSPGTVFYEQYF

SEQ ID NO: 67379 - protein, 14 aa, Homo sapiens
  CDR3 for alpha chain variable domain of TCR clone 33690 (TRAV1-2, TRAJ16)
CAVNRFSDGQKLLF

SEQ ID NO: 67380 - protein, 16 aa, Homo sapiens
  CDR3 for beta chain variable domain of TCR clone 33690 (TRBV28, TRBJ2-5)
CASSFSPAGGWETQYF

SEQ ID NO: 67381 - protein, 12 aa, Homo sapiens
  CDR3 for alpha chain variable domain of TCR clone 33691 (TRAV12-1, TRAJ40)
CVFYSGTYKYIF

SEQ ID NO: 67382 - protein, 18 aa, Homo sapiens
  CDR3 for beta chain variable domain of TCR clone 33691 (TRBV11-2, TRBJ2-3)
CASSLGGASRGAPNTQYF

SEQ ID NO: 67383 - protein, 13 aa, Homo sapiens
  CDR3 for alpha chain variable domain of TCR clone 33692 (TRAV16, TRAJ37)
CALRGSNTGKLTF

SEQ ID NO: 67384 - protein, 15 aa, Homo sapiens
  CDR3 for beta chain variable domain of TCR clone 33692 (TRBV20-1, TRBJ2-1)
CSARGRGLSYNEQFF

SEQ ID NO: 67385 - protein, 14 aa, Homo sapiens
  CDR3 for alpha chain variable domain of TCR clone 33693 (TRAV3, TRAJ9)
CAVRLNTGGFKTIF

SEQ ID NO: 67386 - protein, 15 aa, Homo sapiens
  CDR3 for beta chain variable domain of TCR clone 33693 (TRBV7-2, TRBJ2-1)
CASSLASGGVNEQFF

SEQ ID NO: 67387 - protein, 13 aa, Homo sapiens
  CDR3 for alpha chain variable domain of TCR clone 33694 (TRAV12-3, TRAJ47)
CAMRKEYGNKLVF

SEQ ID NO: 67388 - protein, 15 aa, Homo sapiens
  CDR3 for beta chain variable domain of TCR clone 33694 (TRBV20-1, TRBJ2-7)
CSARDRVSGMDKQYF

SEQ ID NO: 67389 - protein, 14 aa, Homo sapiens
  CDR3 for alpha chain variable domain of TCR clone 33695 (TRAV3, TRAJ21)
CAVESQANFNKFYF

SEQ ID NO: 67390 - protein, 12 aa, Homo sapiens
  CDR3 for beta chain variable domain of TCR clone 33695 (TRBV6-3, TRBJ2-7)
CASSLTPYEQYF

SEQ ID NO: 67391 - protein, 12 aa, Homo sapiens
  CDR3 for alpha chain variable domain of TCR clone 33696 (TRAV3, TRAJ20)
CAVSDGDYKLSF

SEQ ID NO: 67392 - protein, 13 aa, Homo sapiens
  CDR3 for beta chain variable domain of TCR clone 33696 (TRBV9, TRBJ2-1)
CASSVGQGGEQFF

SEQ ID NO: 67393 - protein, 10 aa, Homo sapiens
  CDR3 for alpha chain variable domain of TCR clone 33697 (TRAV14/DV4, TRAJ42)
CAMREGQLWR

SEQ ID NO: 67394 - protein, 12 aa, Homo sapiens
  CDR3 for beta chain variable domain of TCR clone 33697 (TRBV7-2, TRBJ1-6)
CASSLSSSPLHF

SEQ ID NO: 67395 - protein, 12 aa, Homo sapiens
  CDR3 for alpha chain variable domain of TCR clone 33698 (TRAV12-3, TRAJ17)
CAMTLTGNKLTF

SEQ ID NO: 67396 - protein, 16 aa, Homo sapiens
  CDR3 for beta chain variable domain of TCR clone 33698 (TRBV11-2, TRBJ2-1)
CASSLEGYRSYNEQFF

SEQ ID NO: 67397 - protein, 12 aa, Homo sapiens
  CDR3 for alpha chain variable domain of TCR clone 33699 (TRAV30, TRAJ20)
CGTESSDYKLSF

SEQ ID NO: 67398 - protein, 15 aa, Homo sapiens
  CDR3 for beta chain variable domain of TCR clone 33699 (TRBV20-1, TRBJ2-7)
CSARDRVSGMDEQYF

SEQ ID NO: 67399 - protein, 15 aa, Homo sapiens
  CDR3 for alpha chain variable domain of TCR clone 33700 (TRAV12-2, TRAJ53)
CAVNGGGGGNYKLTF

SEQ ID NO: 67400 - protein, 12 aa, Homo sapiens
  CDR3 for beta chain variable domain of TCR clone 33700 (TRBV7-6, TRBJ2-5)
CASSLSQETQYF

SEQ ID NO: 67401 - protein, 13 aa, Homo sapiens
  CDR3 for alpha chain variable domain of TCR clone 33701 (TRAV23/DV6, TRAJ22)
CAPYSGSARQLTL

SEQ ID NO: 67402 - protein, 15 aa, Homo sapiens
  CDR3 for beta chain variable domain of TCR clone 33701 (TRBV11-2, TRBJ1-6)
CASSLDPWAVSPLHF

SEQ ID NO: 67403 - protein, 13 aa, Homo sapiens
  CDR3 for alpha chain variable domain of TCR clone 33702 (TRAV27, TRAJ41)
CAGEGNSGCALNF

SEQ ID NO: 67404 - protein, 14 aa, Homo sapiens
  CDR3 for beta chain variable domain of TCR clone 33702 (TRBV7-2, TRBJ1-1)
CASSFLTGTTEAFF

SEQ ID NO: 67405 - protein, 13 aa, Homo sapiens
  CDR3 for alpha chain variable domain of TCR clone 33703 (TRAV36/DV7, TRAJ37)
CAVFSSNTGELIF

SEQ ID NO: 67406 - protein, 16 aa, Homo sapiens
  CDR3 for beta chain variable domain of TCR clone 33703 (TRBV3-1, TRBJ2-5)
CASSPGQFNGFGTQYF

SEQ ID NO: 67407 - protein, 18 aa, Homo sapiens
  CDR3 for alpha chain variable domain of TCR clone 33704 (TRAV29/DV5, TRAJ52)
CAAGFRGAGGTSYGKLTF

SEQ ID NO: 67408 - protein, 16 aa, Homo sapiens
  CDR3 for beta chain variable domain of TCR clone 33704 (TRBV7-3, TRBJ2-2)
CASSLKRGTLSGELFL

SEQ ID NO: 67409 - protein, 15 aa, Homo sapiens
  CDR3 for alpha chain variable domain of TCR clone 33705 (TRAV21, TRAJ40)
CAVRPQTSGTYKYIF

SEQ ID NO: 67410 - protein, 13 aa, Homo sapiens
  CDR3 for beta chain variable domain of TCR clone 33705 (TRBV7-2, TRBJ2-2)
CASSSVRAGELFL

SEQ ID NO: 67411 - protein, 13 aa, Homo sapiens
  CDR3 for alpha chain variable domain of TCR clone 33706 (TRAV3, TRAJ21)
CAVREPDFNKFYF

SEQ ID NO: 67412 - protein, 12 aa, Homo sapiens
  CDR3 for beta chain variable domain of TCR clone 33706 (TRBV11-2, TRBJ2-2)
CASSLPTGELFF

SEQ ID NO: 67413 - protein, 14 aa, Homo sapiens
  CDR3 for alpha chain variable domain of TCR clone 33707 (TRAV1-2, TRAJ16)
CAVNRFSDGQKLLF

SEQ ID NO: 67414 - protein, 11 aa, Homo sapiens
  CDR3 for beta chain variable domain of TCR clone 33707 (TRBV6-3, TRBJ2-3)
CATGQADTQYF

SEQ ID NO: 67415 - protein, 13 aa, Homo sapiens
  CDR3 for alpha chain variable domain of TCR clone 33708 (TRAV1-2, TRAJ26)
CAVRPNYGQNFVF

SEQ ID NO: 67416 - protein, 14 aa, Homo sapiens
  CDR3 for beta chain variable domain of TCR clone 33708 (TRBV4-1, TRBJ2-5)
CASSQDLALETQYL

SEQ ID NO: 67417 - protein, 17 aa, Homo sapiens
  CDR3 for alpha chain variable domain of TCR clone 33709 (TRAV3, TRAJ6)
CAVRDGPRAGGSYIPTF

SEQ ID NO: 67418 - protein, 14 aa, Homo sapiens
  CDR3 for beta chain variable domain of TCR clone 33709 (TRBV20-1, TRBJ2-1)
CSAQIGGSANEQFF

SEQ ID NO: 67419 - protein, 19 aa, Homo sapiens
  CDR3 for alpha chain variable domain of TCR clone 33710 (TRAV26-1, TRAJ28)
CIVRVAHAYSGAGSYQLTS

SEQ ID NO: 67420 - protein, 12 aa, Homo sapiens
  CDR3 for beta chain variable domain of TCR clone 33710 (TRBV27, TRBJ2-2)
CASKLFTGELFF

SEQ ID NO: 67421 - protein, 14 aa, Homo sapiens
  CDR3 for alpha chain variable domain of TCR clone 33711 (TRAV26-1, TRAJ38)
CIADNAGNNRKLIW

SEQ ID NO: 67422 - protein, 17 aa, Homo sapiens
  CDR3 for beta chain variable domain of TCR clone 33711 (TRBV7-9, TRBJ2-3)
CAGSPTVAGDLTDTQYF

SEQ ID NO: 67423 - protein, 16 aa, Homo sapiens
  CDR3 for alpha chain variable domain of TCR clone 33712 (TRAV30, TRAJ24)
CGTEIVDADSWGKFQF

SEQ ID NO: 67424 - protein, 15 aa, Homo sapiens
  CDR3 for beta chain variable domain of TCR clone 33712 (TRBV20-1, TRBJ2-7)
RSARDRVSGMDEQYF

SEQ ID NO: 67425 - protein, 14 aa, Homo sapiens
  CDR3 for alpha chain variable domain of TCR clone 33713 (TRAV13-1, TRAJ13)
CAASRVGGYQKVTF

SEQ ID NO: 67426 - protein, 17 aa, Homo sapiens
  CDR3 for beta chain variable domain of TCR clone 33713 (TRBV15, TRBJ1-5)
CATSRAPPGTRNQLQHF

SEQ ID NO: 67427 - protein, 12 aa, Homo sapiens
  CDR3 for alpha chain variable domain of TCR clone 33714 (TRAV17, TRAJ4)
CATDGGYNKLIF

SEQ ID NO: 67428 - protein, 13 aa, Homo sapiens
  CDR3 for beta chain variable domain of TCR clone 33714 (TRBV29-1, TRBJ2-2)
CSATGVNTGELFF

SEQ ID NO: 67429 - protein, 12 aa, Homo sapiens
  CDR3 for alpha chain variable domain of TCR clone 33715 (TRAV25, TRAJ20)
CAVRSNDYKLSF

SEQ ID NO: 67430 - protein, 15 aa, Homo sapiens
  CDR3 for beta chain variable domain of TCR clone 33715 (TRBV7-6, TRBJ2-7)
CASSGRRDTFGEQYF

SEQ ID NO: 67431 - protein, 13 aa, Homo sapiens
  CDR3 for alpha chain variable domain of TCR clone 33716 (TRAV38-1, TRAJ42)
CARWGGSQGKLIF

SEQ ID NO: 67432 - protein, 10 aa, Homo sapiens
  CDR3 for beta chain variable domain of TCR clone 33716 (TRBV2, TRBJ2-5)
CASSAATQYF

SEQ ID NO: 67433 - protein, 15 aa, Homo sapiens
  CDR3 for alpha chain variable domain of TCR clone 33717 (TRAV26-1, TRAJ22)
CIVIVSFWFCKATDL

SEQ ID NO: 67434 - protein, 13 aa, Homo sapiens
  CDR3 for beta chain variable domain of TCR clone 33717 (TRBV7-9, TRBJ1-2)
CASSLKQNYGYTF

SEQ ID NO: 67435 - protein, 15 aa, Homo sapiens
  CDR3 for alpha chain variable domain of TCR clone 33718 (TRAV23/DV6, TRAJ18)
CAARYRGSTLGRLYF

SEQ ID NO: 67436 - protein, 13 aa, Homo sapiens
  CDR3 for beta chain variable domain of TCR clone 33718 (TRBV7-2, TRBJ2-7)
CASSSPSGSEQYS

SEQ ID NO: 67437 - protein, 15 aa, Homo sapiens
  CDR3 for alpha chain variable domain of TCR clone 33719 (TRAV3, TRAJ13)
CAVRVYSGCYQKVTF

SEQ ID NO: 67438 - protein, 16 aa, Homo sapiens
  CDR3 for beta chain variable domain of TCR clone 33719 (TRBV2, TRBJ2-7)
CASSEPWTGPSYEQYF

SEQ ID NO: 67439 - protein, 13 aa, Homo sapiens
  CDR3 for alpha chain variable domain of TCR clone 33720 (TRAV12-3, TRAJ33)
CAMSVNSNYQLIW

SEQ ID NO: 67440 - protein, 12 aa, Homo sapiens
  CDR3 for beta chain variable domain of TCR clone 33720 (TRBV11-2, TRBJ2-2)
CASSLPTGELFF

SEQ ID NO: 67441 - protein, 16 aa, Homo sapiens
  CDR3 for alpha chain variable domain of TCR clone 33721 (TRAV30, TRAJ24)
CGTEIVDADSWGKFQF

SEQ ID NO: 67442 - protein, 13 aa, Homo sapiens
  CDR3 for beta chain variable domain of TCR clone 33721 (TRBV19, TRBJ1-1)
CASSGQVNTEAFF

SEQ ID NO: 67443 - protein, 14 aa, Homo sapiens
  CDR3 for alpha chain variable domain of TCR clone 33722 (TRAV13-2, TRAJ45)
CAEMSIGGADGLTF

SEQ ID NO: 67444 - protein, 14 aa, Homo sapiens
  CDR3 for beta chain variable domain of TCR clone 33722 (TRBV2, TRBJ1-4)
CASNQGGLSLGLFF

SEQ ID NO: 67445 - protein, 13 aa, Homo sapiens
  CDR3 for alpha chain variable domain of TCR clone 33723 (TRAV2, TRAJ40)
CTVVTSGTYKYIF

SEQ ID NO: 67446 - protein, 12 aa, Homo sapiens
  CDR3 for beta chain variable domain of TCR clone 33723 (TRBV6-3, TRBJ2-7)
CASSLTPYEQYF

SEQ ID NO: 67447 - protein, 16 aa, Homo sapiens
  CDR3 for alpha chain variable domain of TCR clone 33724 (TRAV30, TRAJ24)
CGTEIVNADGWGKFQF

SEQ ID NO: 67448 - protein, 14 aa, Homo sapiens
  CDR3 for beta chain variable domain of TCR clone 33724 (TRBV12-5, TRBJ2-5)
CASGSRTHQETQYF

SEQ ID NO: 67449 - protein, 14 aa, Homo sapiens
  CDR3 for alpha chain variable domain of TCR clone 33725 (TRAV3, TRAJ9)
CAVRDDTGGFKTIL

SEQ ID NO: 67450 - protein, 18 aa, Homo sapiens
  CDR3 for beta chain variable domain of TCR clone 33725 (TRBV20-1, TRBJ2-6)
CSAETTPTHGSGANVLTF

SEQ ID NO: 67451 - protein, 11 aa, Homo sapiens
  CDR3 for alpha chain variable domain of TCR clone 33726 (TRAV1-1, TRAJ23)
CAVRRGGKLIF

SEQ ID NO: 67452 - protein, 14 aa, Homo sapiens
  CDR3 for beta chain variable domain of TCR clone 33726 (TRBV19, TRBJ2-1)
CASPTFVLSGEQFF

SEQ ID NO: 67453 - protein, 14 aa, Homo sapiens
  CDR3 for alpha chain variable domain of TCR clone 33727 (TRAV12-2, TRAJ24)
CAVTPADSWGKLQF

SEQ ID NO: 67454 - protein, 13 aa, Homo sapiens
  CDR3 for beta chain variable domain of TCR clone 33727 (TRBV6-4, TRBJ1-5)
CASSADLNRPQHF

SEQ ID NO: 67455 - protein, 14 aa, Homo sapiens
  CDR3 for alpha chain variable domain of TCR clone 33728 (TRAV12-3, TRAJ29)
CAMILLSGNTPLVF

SEQ ID NO: 67456 - protein, 16 aa, Homo sapiens
  CDR3 for beta chain variable domain of TCR clone 33728 (TRBV28, TRBJ2-7)
CASSSGTSGRGYEQYL

SEQ ID NO: 67457 - protein, 11 aa, Homo sapiens
  CDR3 for alpha chain variable domain of TCR clone 33729 (TRAV21, TRAJ11)
CAVNGYSTLNF

SEQ ID NO: 67458 - protein, 11 aa, Homo sapiens
  CDR3 for beta chain variable domain of TCR clone 33729 (TRBV19, TRBJ1-1)
CASSIGSEAFF

SEQ ID NO: 67459 - protein, 14 aa, Homo sapiens
  CDR3 for alpha chain variable domain of TCR clone 33730 (TRAV2, TRAJ37)
CAVEFTSNTGKLIF

SEQ ID NO: 67460 - protein, 15 aa, Homo sapiens
  CDR3 for beta chain variable domain of TCR clone 33730 (TRBV20-1, TRBJ1-1)
CSASRGVTGNTEAFF

SEQ ID NO: 67461 - protein, 18 aa, Homo sapiens
  CDR3 for alpha chain variable domain of TCR clone 33731 (TRAV12-3, TRAJ52)
CAMSRTNAGGTSYGKLTF

SEQ ID NO: 67462 - protein, 17 aa, Homo sapiens
  CDR3 for beta chain variable domain of TCR clone 33731 (TRBV7-3, TRBJ2-3)
CASSLMKRMRGADTQYS

SEQ ID NO: 67463 - protein, 12 aa, Homo sapiens
  CDR3 for alpha chain variable domain of TCR clone 33732 (TRAV16, TRAJ22)
FALEVSARQLTF

SEQ ID NO: 67464 - protein, 14 aa, Homo sapiens
  CDR3 for beta chain variable domain of TCR clone 33732 (TRBV11-2, TRBJ2-3)
CASSSIASTDTQYF

SEQ ID NO: 67465 - protein, 14 aa, Homo sapiens
  CDR3 for alpha chain variable domain of TCR clone 33733 (TRAV12-2, TRAJ36)
CAVKISTGANNLFF

SEQ ID NO: 67466 - protein, 14 aa, Homo sapiens
  CDR3 for beta chain variable domain of TCR clone 33733 (TRBV25-1, TRBJ1-2)
CASSDTAGVVGYTF

SEQ ID NO: 67467 - protein, 14 aa, Homo sapiens
  CDR3 for alpha chain variable domain of TCR clone 33734 (TRAV38-1, TRAJ29)
CAFIPPSGNTPLVF

SEQ ID NO: 67468 - protein, 14 aa, Homo sapiens
  CDR3 for beta chain variable domain of TCR clone 33734 (TRBV18, TRBJ2-7)
CASSPRGGAYEQYF

SEQ ID NO: 67469 - protein, 15 aa, Homo sapiens
  CDR3 for alpha chain variable domain of TCR clone 33735 (TRAV3, TRAJ5)
CAVRDRKTGRRALTF

SEQ ID NO: 67470 - protein, 15 aa, Homo sapiens
  CDR3 for beta chain variable domain of TCR clone 33735 (TRBV7-8, TRBJ2-1)
CASSLADSLYNEQFV

SEQ ID NO: 67471 - protein, 17 aa, Homo sapiens
  CDR3 for alpha chain variable domain of TCR clone 33736 (TRAV26-1, TRAJ37)
CIVRVITVSSNTGKLIF

SEQ ID NO: 67472 - protein, 13 aa, Homo sapiens
  CDR3 for beta chain variable domain of TCR clone 33736 (TRBV7-9, TRBJ2-3)
CASSPGSTDTQYF

SEQ ID NO: 67473 - protein, 14 aa, Homo sapiens
  CDR3 for alpha chain variable domain of TCR clone 33737 (TRAV1-2, TRAJ16)
CAVNRFSDGQKLLF

SEQ ID NO: 67474 - protein, 17 aa, Homo sapiens
  CDR3 for beta chain variable domain of TCR clone 33737 (TRBV15, TRBJ1-4)
CATSRYGTGDPNEKLFF

SEQ ID NO: 67475 - protein, 14 aa, Homo sapiens
  CDR3 for alpha chain variable domain of TCR clone 33738 (TRAV21, TRAJ52)
CGRAGGTSYGKLTF

SEQ ID NO: 67476 - protein, 14 aa, Homo sapiens
  CDR3 for beta chain variable domain of TCR clone 33738 (TRBV19, TRBJ1-2)
CASSVLGYNYGDTF

SEQ ID NO: 67477 - protein, 14 aa, Homo sapiens
  CDR3 for alpha chain variable domain of TCR clone 33739 (TRAV8-1, TRAJ5)
CAVSMDTGRRALTF

SEQ ID NO: 67478 - protein, 15 aa, Homo sapiens
  CDR3 for beta chain variable domain of TCR clone 33739 (TRBV19, TRBJ2-4)
CASRGPRRGENSQYF

SEQ ID NO: 67479 - protein, 14 aa, Homo sapiens
  CDR3 for alpha chain variable domain of TCR clone 33740 (TRAV8-4, TRAJ9)
CAVRINTVGFKTIF

SEQ ID NO: 67480 - protein, 15 aa, Homo sapiens
  CDR3 for beta chain variable domain of TCR clone 33740 (TRBV10-2, TRBJ2-6)
CASSEQGTGANVLTF

SEQ ID NO: 67481 - protein, 14 aa, Homo sapiens
  CDR3 for alpha chain variable domain of TCR clone 33741 (TRAV38-1, TRAJ45)
CAYYSGGGADGLTF

SEQ ID NO: 67482 - protein, 20 aa, Homo sapiens
  CDR3 for beta chain variable domain of TCR clone 33741 (TRBV28, TRBJ2-1)
CASTPIGRSPGLTGGNEQFF

SEQ ID NO: 67483 - protein, 12 aa, Homo sapiens
  CDR3 for alpha chain variable domain of TCR clone 33742 (TRAV21, TRAJ33)
CAKMDSNYQLIW

SEQ ID NO: 67484 - protein, 14 aa, Homo sapiens
  CDR3 for beta chain variable domain of TCR clone 33742 (TRBV2, TRBJ2-7)
CASSLTSGGDEQYF

SEQ ID NO: 67485 - protein, 15 aa, Homo sapiens
  CDR3 for alpha chain variable domain of TCR clone 33743 (TRAV8-3, TRAJ45)
CASSYSGGGADGLTF

SEQ ID NO: 67486 - protein, 13 aa, Homo sapiens
  CDR3 for beta chain variable domain of TCR clone 33743 (TRBV10-3, TRBJ2-7)
CASKLAVNYEQSF

SEQ ID NO: 67487 - protein, 10 aa, Homo sapiens
  CDR3 for alpha chain variable domain of TCR clone 33744 (TRAV16, TRAJ22)
SAMYLRQLTF

SEQ ID NO: 67488 - protein, 15 aa, Homo sapiens
  CDR3 for beta chain variable domain of TCR clone 33744 (TRBV7-9, TRBJ1-6)
CASSSPGRGNSPLRF

SEQ ID NO: 67489 - protein, 12 aa, Homo sapiens
  CDR3 for alpha chain variable domain of TCR clone 33745 (TRAV13-1, TRAJ49)
CAASIEGDQFYF

SEQ ID NO: 67490 - protein, 20 aa, Homo sapiens
  CDR3 for beta chain variable domain of TCR clone 33745 (TRBV28, TRBJ2-1)
CASTPIGRSPGLAGGNEQFF

SEQ ID NO: 67491 - protein, 13 aa, Homo sapiens
  CDR3 for alpha chain variable domain of TCR clone 33746 (TRAV8-3, TRAJ28)
CAVGAVGSYQLTF

SEQ ID NO: 67492 - protein, 13 aa, Homo sapiens
  CDR3 for beta chain variable domain of TCR clone 33746 (TRBV29-1, TRBJ2-1)
CSVEGERVNEQFF

SEQ ID NO: 67493 - protein, 19 aa, Homo sapiens
  CDR3 for alpha chain variable domain of TCR clone 33747 (TRAV26-1, TRAJ28)
CIVRVAHAYSGAGSYQLTF

SEQ ID NO: 67494 - protein, 17 aa, Homo sapiens
  CDR3 for beta chain variable domain of TCR clone 33747 (TRBV4-1, IGLJ4)
CASSQEGPRGVEEKLFF

SEQ ID NO: 67495 - protein, 14 aa, Homo sapiens
  CDR3 for alpha chain variable domain of TCR clone 33748 (TRAV2, TRAJ16)
CAVERGSDGQKLLF

SEQ ID NO: 67496 - protein, 12 aa, Homo sapiens
  CDR3 for beta chain variable domain of TCR clone 33748 (TRBV6-5, TRBJ2-7)
CASYIYGYEQYL

SEQ ID NO: 67497 - protein, 13 aa, Homo sapiens
  CDR3 for alpha chain variable domain of TCR clone 33749 (TRAV17, TRAJ9)
CATDYTGGFKTIF

SEQ ID NO: 67498 - protein, 15 aa, Homo sapiens
  CDR3 for beta chain variable domain of TCR clone 33749 (TRBV19, TRBJ1-1)
CASTSGQIQNTEAFF

SEQ ID NO: 67499 - protein, 15 aa, Homo sapiens
  CDR3 for alpha chain variable domain of TCR clone 33750 (TRAV27, TRAJ33)
CAGADIMDSDYQLIW

SEQ ID NO: 67500 - protein, 13 aa, Homo sapiens
  CDR3 for beta chain variable domain of TCR clone 33750 (TRBV28, TRBJ1-2)
CASSLQGRGGYTF

SEQ ID NO: 67501 - protein, 11 aa, Homo sapiens
  CDR3 for alpha chain variable domain of TCR clone 33751 (TRAV23/DV6, TRAJ43)
CSASSGNDMRF

SEQ ID NO: 67502 - protein, 14 aa, Homo sapiens
  CDR3 for beta chain variable domain of TCR clone 33751 (TRBV4-1, TRBJ1-2)
CASSQDPLPYGYTF

SEQ ID NO: 67503 - protein, 18 aa, Homo sapiens
  CDR3 for alpha chain variable domain of TCR clone 33752 (TRAV16, TRAJ26)
CALSGSEFCLWSRNQLVR

SEQ ID NO: 67504 - protein, 12 aa, Homo sapiens
  CDR3 for beta chain variable domain of TCR clone 33752 (TRBV11-2, TRBJ2-1)
CASSPGNNEQFF

SEQ ID NO: 67505 - protein, 13 aa, Homo sapiens
  CDR3 for alpha chain variable domain of TCR clone 33753 (TRAV12-2, TRAJ4)
CVGFSGGYNKLIF

SEQ ID NO: 67506 - protein, 14 aa, Homo sapiens
  CDR3 for beta chain variable domain of TCR clone 33753 (TRBV24-1, TRBJ1-1)
CATSIPRGDTEAFF

SEQ ID NO: 67507 - protein, 16 aa, Homo sapiens
  CDR3 for alpha chain variable domain of TCR clone 33754 (TRAV3, TRAJ37)
CAVRGRGSGNTGKLIF

SEQ ID NO: 67508 - protein, 15 aa, Homo sapiens
  CDR3 for beta chain variable domain of TCR clone 33754 (TRBV7-3, TRBJ2-2)
CASSETGQGTGELFF

SEQ ID NO: 67509 - protein, 13 aa, Homo sapiens
  CDR3 for alpha chain variable domain of TCR clone 33755 (TRAV13-2, TRAJ48)
CAEMDFGNETLTF

SEQ ID NO: 67510 - protein, 15 aa, Homo sapiens
  CDR3 for beta chain variable domain of TCR clone 33755 (TRBV7-9, TRBJ1-6)
CASSSPGRGNSPLHF

SEQ ID NO: 67511 - protein, 14 aa, Homo sapiens
  CDR3 for alpha chain variable domain of TCR clone 33756 (TRAV1-2, TRAJ8)
CAVREDTGFQKLVF

SEQ ID NO: 67512 - protein, 16 aa, Homo sapiens
  CDR3 for beta chain variable domain of TCR clone 33756 (TRBV7-2, TRBJ2-5)
CASSLAVGGRGETQYF

SEQ ID NO: 67513 - protein, 15 aa, Homo sapiens
  CDR3 for alpha chain variable domain of TCR clone 33757 (TRAV25, TRAJ52)
CAVRPGGTSYGKLTF

SEQ ID NO: 67514 - protein, 17 aa, Homo sapiens
  CDR3 for beta chain variable domain of TCR clone 33757 (TRBV7-8, TRBJ2-6)
CASSAGTGGAGANVLTF

SEQ ID NO: 67515 - protein, 14 aa, Homo sapiens
  CDR3 for alpha chain variable domain of TCR clone 33758 (TRAV8-3, TRAJ4)
CAVGAAGGHNKLIF

SEQ ID NO: 67516 - protein, 13 aa, Homo sapiens
  CDR3 for beta chain variable domain of TCR clone 33758 (TRBV3-1, TRBJ1-1)
CASSPGVITEAFF

SEQ ID NO: 67517 - protein, 11 aa, Homo sapiens
  CDR3 for alpha chain variable domain of TCR clone 33759 (TRAV26-1, TRAJ37)
CIVRVGRKLIF

SEQ ID NO: 67518 - protein, 13 aa, Homo sapiens
  CDR3 for beta chain variable domain of TCR clone 33759 (TRBV7-9, TRBJ1-2)
CASSLKQNYGYTF

SEQ ID NO: 67519 - protein, 13 aa, Homo sapiens
  CDR3 for alpha chain variable domain of TCR clone 33760 (TRAV13-1, TRAJ5)
CAASDTGRRALTF

SEQ ID NO: 67520 - protein, 12 aa, Homo sapiens
  CDR3 for beta chain variable domain of TCR clone 33760 (TRBV28, TRBJ2-3)
CASSLYRDTQYC

SEQ ID NO: 67521 - protein, 14 aa, Homo sapiens
  CDR3 for alpha chain variable domain of TCR clone 33761 (TRAV17, TRAJ16)
CATAAFSDGQKLLF

SEQ ID NO: 67522 - protein, 15 aa, Homo sapiens
  CDR3 for beta chain variable domain of TCR clone 33761 (TRBV18, TRBJ2-1)
CASSPPSASYNEQFF

SEQ ID NO: 67523 - protein, 17 aa, Homo sapiens
  CDR3 for alpha chain variable domain of TCR clone 33762 (TRAV35, TRAJ38)
CAGQLQRNAGNNRKLIW

SEQ ID NO: 67524 - protein, 14 aa, Homo sapiens
  CDR3 for beta chain variable domain of TCR clone 33762 (TRBV7-2, TRBJ2-7)
CASSPKTSFYEQYF

SEQ ID NO: 67525 - protein, 10 aa, Homo sapiens
  CDR3 for alpha chain variable domain of TCR clone 33763 (TRAV30, TRAJ48)
CGIGNEKLTF

SEQ ID NO: 67526 - protein, 14 aa, Homo sapiens
  CDR3 for beta chain variable domain of TCR clone 33763 (TRBV7-6, TRBJ2-3)
CASSAAGGTDTQYF

SEQ ID NO: 67527 - protein, 14 aa, Homo sapiens
  CDR3 for alpha chain variable domain of TCR clone 33764 (TRAV35, TRAJ50)
CAGHRKTSYDKVIF

SEQ ID NO: 67528 - protein, 13 aa, Homo sapiens
  CDR3 for beta chain variable domain of TCR clone 33764 (TRBV7-7, TRBJ2-3)
CASSLRRADTQYF

SEQ ID NO: 67529 - protein, 13 aa, Homo sapiens
  CDR3 for alpha chain variable domain of TCR clone 33765 (TRAV1-2, TRAJ9)
CAALNTGGFKTIF

SEQ ID NO: 67530 - protein, 13 aa, Homo sapiens
  CDR3 for beta chain variable domain of TCR clone 33765 (TRBV19, TRBJ1-2)
CASSVPGKDGYTF

SEQ ID NO: 67531 - protein, 11 aa, Homo sapiens
  CDR3 for alpha chain variable domain of TCR clone 33766 (TRAV12-2, TRAJ33)
CAVTSNYQLIW

SEQ ID NO: 67532 - protein, 14 aa, Homo sapiens
  CDR3 for beta chain variable domain of TCR clone 33766 (TRBV28, TRBJ2-2)
CASRIRSGTGELSF

SEQ ID NO: 67533 - protein, 15 aa, Homo sapiens
  CDR3 for alpha chain variable domain of TCR clone 33767 (TRAV1-2, TRAJ28)
CAVQYSGTGSYQLTF

SEQ ID NO: 67534 - protein, 13 aa, Homo sapiens
  CDR3 for beta chain variable domain of TCR clone 33767 (TRBV28, TRBJ2-7)
CASKAGGVYEQYF

SEQ ID NO: 67535 - protein, 16 aa, Homo sapiens
  CDR3 for alpha chain variable domain of TCR clone 33768 (TRAV30, TRAJ24)
CGTAIVDADSWGKFQF

SEQ ID NO: 67536 - protein, 15 aa, Homo sapiens
  CDR3 for beta chain variable domain of TCR clone 33768 (TRBV20-1, TRBJ2-7)
CSARDRVSGMDEQYF

SEQ ID NO: 67537 - protein, 11 aa, Homo sapiens
  CDR3 for alpha chain variable domain of TCR clone 33769 (TRAV1-2, TRAJ40)
CAVPGTYKYIF

SEQ ID NO: 67538 - protein, 17 aa, Homo sapiens
  CDR3 for beta chain variable domain of TCR clone 33769 (TRBV13, TRBJ2-3)
CASSLSRVAGGRNTQYF

SEQ ID NO: 67539 - protein, 14 aa, Homo sapiens
  CDR3 for alpha chain variable domain of TCR clone 33770 (TRAV8-3, TRAJ39)
CAVGAWGAGNMLPF

SEQ ID NO: 67540 - protein, 16 aa, Homo sapiens
  CDR3 for beta chain variable domain of TCR clone 33770 (TRBV7-2, TRBJ1-3)
CASSSGRVLSGNTIYF

SEQ ID NO: 67541 - protein, 14 aa, Homo sapiens
  CDR3 for alpha chain variable domain of TCR clone 33771 (TRAV1-2, TRAJ16)
CAVNRFSDGQKLLF

SEQ ID NO: 67542 - protein, 16 aa, Homo sapiens
  CDR3 for beta chain variable domain of TCR clone 33771 (TRBV20-1, TRBJ2-6)
CSASSQGYDGANVLTF

SEQ ID NO: 67543 - protein, 13 aa, Homo sapiens
  CDR3 for alpha chain variable domain of TCR clone 33772 (TRAV1-2, TRAJ9)
CAALNTGRFKTIF

SEQ ID NO: 67544 - protein, 13 aa, Homo sapiens
  CDR3 for beta chain variable domain of TCR clone 33772 (TRBV19, TRBJ1-2)
CASSVPGQDGYTF

SEQ ID NO: 67545 - protein, 10 aa, Homo sapiens
  CDR3 for alpha chain variable domain of TCR clone 33773 (TRAV26-1, TRAJ40)
CIAGTHKYIF

SEQ ID NO: 67546 - protein, 15 aa, Homo sapiens
  CDR3 for beta chain variable domain of TCR clone 33773 (TRBV19, TRBJ2-1)
CASSSPGVPLDEQFF

SEQ ID NO: 67547 - protein, 14 aa, Homo sapiens
  CDR3 for alpha chain variable domain of TCR clone 33774 (TRAV26-1, TRAJ38)
CIADNAGNNRKLIC

SEQ ID NO: 67548 - protein, 15 aa, Homo sapiens
  CDR3 for beta chain variable domain of TCR clone 33774 (TRBV4-1, TRBJ1-1)
CASSQEWGHYTEAFF

SEQ ID NO: 67549 - protein, 14 aa, Homo sapiens
  CDR3 for alpha chain variable domain of TCR clone 33775 (TRAV12-1, TRAJ23)
CVVIVYNQGGKLIF

SEQ ID NO: 67550 - protein, 13 aa, Homo sapiens
  CDR3 for beta chain variable domain of TCR clone 33775 (TRBV11-2, TRBJ2-5)
CASSLSSQETQYF

SEQ ID NO: 67551 - protein, 23 aa, Homo sapiens
  CDR3 for alpha chain variable domain of TCR clone 33776 (TRAV9-2, )
CALSRAGNNHIQNPDPAVYQLRD

SEQ ID NO: 67552 - protein, 15 aa, Homo sapiens
  CDR3 for beta chain variable domain of TCR clone 33776 (TRBV27, TRBJ2-3)
CASSSLAGVIDTQYF

SEQ ID NO: 67553 - protein, 16 aa, Homo sapiens
  CDR3 for alpha chain variable domain of TCR clone 33777 (TRAV12-3, TRAJ53)
CAMSPGSGGSNYKLTF

SEQ ID NO: 67554 - protein, 15 aa, Homo sapiens
  CDR3 for beta chain variable domain of TCR clone 33777 (TRBV11-3, TRBJ2-3)
CASLKDGREGDTQYF

SEQ ID NO: 67555 - protein, 16 aa, Homo sapiens
  CDR3 for alpha chain variable domain of TCR clone 33778 (TRAV8-3, TRAJ13)
CAVGAYPSGGYQKVTF

SEQ ID NO: 67556 - protein, 15 aa, Homo sapiens
  CDR3 for beta chain variable domain of TCR clone 33778 (TRBV19, TRBJ1-5)
CANSIVWADNQPQHF

SEQ ID NO: 67557 - protein, 13 aa, Homo sapiens
  CDR3 for alpha chain variable domain of TCR clone 33779 (TRAV12-2, TRAJ20)
CAVYPSNDYKLSF

SEQ ID NO: 67558 - protein, 12 aa, Homo sapiens
  CDR3 for beta chain variable domain of TCR clone 33779 (TRBV6-3, TRBJ2-3)
CASGDWTDTQYF

SEQ ID NO: 67559 - protein, 16 aa, Homo sapiens
  CDR3 for alpha chain variable domain of TCR clone 33780 (TRAV14/DV4, TRAJ17)
CAMRPKGKAAGNKLTF

SEQ ID NO: 67560 - protein, 13 aa, Homo sapiens
  CDR3 for beta chain variable domain of TCR clone 33780 (TRBV24-1, TRBJ2-1)
CATSRGARNEQFF

SEQ ID NO: 67561 - protein, 16 aa, Homo sapiens
  CDR3 for alpha chain variable domain of TCR clone 33781 (TRAV14/DV4, TRAJ54)
CAMREGRIQGAQKLVF

SEQ ID NO: 67562 - protein, 13 aa, Homo sapiens
  CDR3 for beta chain variable domain of TCR clone 33781 (TRBV7-9, TRBJ1-2)
CASSLKQNYGYTF

SEQ ID NO: 67563 - protein, 18 aa, Homo sapiens
  CDR3 for alpha chain variable domain of TCR clone 33782 (TRAV21, TRAJ52)
CAVRPSPAGGTSYGKLTF

SEQ ID NO: 67564 - protein, 14 aa, Homo sapiens
  CDR3 for beta chain variable domain of TCR clone 33782 (TRBV11-2, TRBJ2-5)
CASRPLAGRETQYF

SEQ ID NO: 67565 - protein, 13 aa, Homo sapiens
  CDR3 for alpha chain variable domain of TCR clone 33783 (TRAV16, TRAJ4)
CAPFSGGYNKLIF

SEQ ID NO: 67566 - protein, 14 aa, Homo sapiens
  CDR3 for beta chain variable domain of TCR clone 33783 (TRBV19, TRBJ2-7)
CASSMGQGAIEQYF

SEQ ID NO: 67567 - protein, 12 aa, Homo sapiens
  CDR3 for alpha chain variable domain of TCR clone 33784 (TRAV13-1, TRAJ49)
CAASPMGNQSYF

SEQ ID NO: 67568 - protein, 13 aa, Homo sapiens
  CDR3 for beta chain variable domain of TCR clone 33784 (TRBV20-1, TRBJ2-2)
CSASAAGTGELFF

SEQ ID NO: 67569 - protein, 15 aa, Homo sapiens
  CDR3 for alpha chain variable domain of TCR clone 33785 (TRAV16, TRAJ4)
CALEDPSGGYNKLIL

SEQ ID NO: 67570 - protein, 13 aa, Homo sapiens
  CDR3 for beta chain variable domain of TCR clone 33785 (TRBV7-3, TRBJ2-7)
CASSQAGGYEQYF

SEQ ID NO: 67571 - protein, 15 aa, Homo sapiens
  CDR3 for alpha chain variable domain of TCR clone 33786 (TRAV17, TRAJ57)
CATGPSQGGSEKLVF

SEQ ID NO: 67572 - protein, 12 aa, Homo sapiens
  CDR3 for beta chain variable domain of TCR clone 33786 (TRBV12-4, TRBJ2-7)
CASSLGSYEQYF

SEQ ID NO: 67573 - protein, 15 aa, Homo sapiens
  CDR3 for alpha chain variable domain of TCR clone 33787 (TRAV26-1, TRAJ15)
CIVRAANQAGTALIF

SEQ ID NO: 67574 - protein, 15 aa, Homo sapiens
  CDR3 for beta chain variable domain of TCR clone 33787 (TRBV20-1, TRBJ1-1)
CSARSVATSNTEAFF

SEQ ID NO: 67575 - protein, 12 aa, Homo sapiens
  CDR3 for alpha chain variable domain of TCR clone 33788 (TRAV21, TRAJ8)
CAVNTGFQKLAF

SEQ ID NO: 67576 - protein, 13 aa, Homo sapiens
  CDR3 for beta chain variable domain of TCR clone 33788 (TRBV6-3, TRBJ2-1)
CASSYDNYNEQFF

SEQ ID NO: 67577 - protein, 11 aa, Homo sapiens
  CDR3 for alpha chain variable domain of TCR clone 33789 (TRAV1-2, TRAJ40)
CAVPGTYKYIF

SEQ ID NO: 67578 - protein, 16 aa, Homo sapiens
  CDR3 for beta chain variable domain of TCR clone 33789 (TRBV29-1, TRBJ2-7)
CSVEVVGTSGSYDQYF

SEQ ID NO: 67579 - protein, 14 aa, Homo sapiens
  CDR3 for alpha chain variable domain of TCR clone 33790 (TRAV38-1, TRAJ45)
CAYYSGGGADGLTF

SEQ ID NO: 67580 - protein, 20 aa, Homo sapiens
  CDR3 for beta chain variable domain of TCR clone 33790 (TRBV28, TRBJ2-1)
CASTPIGRSPGLAGGNEQSF

SEQ ID NO: 67581 - protein, 14 aa, Homo sapiens
  CDR3 for alpha chain variable domain of TCR clone 33791 (TRAV12-2, TRAJ17)
CAVLFKAAGNKLTF

SEQ ID NO: 67582 - protein, 16 aa, Homo sapiens
  CDR3 for beta chain variable domain of TCR clone 33791 (TRBV19, TRBJ2-2)
CASRSPGTGATGELFF

SEQ ID NO: 67583 - protein, 19 aa, Homo sapiens
  CDR3 for alpha chain variable domain of TCR clone 33792 (TRAV3, TRAJ6)
CAVRDRNPSRSGGSYIPTS

SEQ ID NO: 67584 - protein, 15 aa, Homo sapiens
  CDR3 for beta chain variable domain of TCR clone 33792 (TRBV18, TRBJ2-7)
CASSPTFMDSYEQYF

SEQ ID NO: 67585 - protein, 13 aa, Homo sapiens
  CDR3 for alpha chain variable domain of TCR clone 33793 (TRAV3, TRAJ27)
CAVRPLGAGKPTF

SEQ ID NO: 67586 - protein, 15 aa, Homo sapiens
  CDR3 for beta chain variable domain of TCR clone 33793 (TRBV19, TRBJ2-1)
CASSSPGVPLDEQFF

SEQ ID NO: 67587 - protein, 14 aa, Homo sapiens
  CDR3 for alpha chain variable domain of TCR clone 33794 (TRAV17, TRAJ22)
CATSPSGSARQMTF

SEQ ID NO: 67588 - protein, 15 aa, Homo sapiens
  CDR3 for beta chain variable domain of TCR clone 33794 (TRBV4-1, TRBJ2-5)
CASSQWDLYQETQYF

SEQ ID NO: 67589 - protein, 12 aa, Homo sapiens
  CDR3 for alpha chain variable domain of TCR clone 33795 (TRAV3, TRAJ20)
CAMRDPDYKLSF

SEQ ID NO: 67590 - protein, 13 aa, Homo sapiens
  CDR3 for beta chain variable domain of TCR clone 33795 (TRBV9, TRBJ2-1)
CASSVGQGGEQFF

SEQ ID NO: 67591 - protein, 12 aa, Homo sapiens
  CDR3 for alpha chain variable domain of TCR clone 33796 (TRAV27, TRAJ37)
CADSGSTGKLIF

SEQ ID NO: 67592 - protein, 18 aa, Homo sapiens
  CDR3 for beta chain variable domain of TCR clone 33796 (TRBV7-9, TRBJ1-1)
CASSKPWDTMGMNAEAFF

SEQ ID NO: 67593 - protein, 13 aa, Homo sapiens
  CDR3 for alpha chain variable domain of TCR clone 33797 (TRAV1-2, TRAJ9)
CAALNTGGFKTIL

SEQ ID NO: 67594 - protein, 15 aa, Homo sapiens
  CDR3 for beta chain variable domain of TCR clone 33797 (TRBV6-3, TRBJ2-7)
CASSSPGTVFYEQYF

SEQ ID NO: 67595 - protein, 11 aa, Homo sapiens
  CDR3 for alpha chain variable domain of TCR clone 33798 (TRAV2, TRAJ33)
CAVESNYQLIW

SEQ ID NO: 67596 - protein, 15 aa, Homo sapiens
  CDR3 for beta chain variable domain of TCR clone 33798 (TRBV19, TRBJ1-1)
CASTSGKIQNTEAFF

SEQ ID NO: 67597 - protein, 14 aa, Homo sapiens
  CDR3 for alpha chain variable domain of TCR clone 33799 (TRAV4, TRAJ26)
CLVGPHNYGQNFVF

SEQ ID NO: 67598 - protein, 17 aa, Homo sapiens
  CDR3 for beta chain variable domain of TCR clone 33799 (TRBV24-1, TRBJ2-1)
CATSDVSTSGTYNEQFV

SEQ ID NO: 67599 - protein, 12 aa, Homo sapiens
  CDR3 for alpha chain variable domain of TCR clone 33800 (TRAV21, TRAJ13)
PGPSGGYQKVTF

SEQ ID NO: 67600 - protein, 15 aa, Homo sapiens
  CDR3 for beta chain variable domain of TCR clone 33800 (TRBV27, TRBJ2-5)
CASSLYPRGGETQHF

SEQ ID NO: 67601 - protein, 12 aa, Homo sapiens
  CDR3 for alpha chain variable domain of TCR clone 33801 (TRAV1-1, TRAJ9)
CAVVTGGFKTIF

SEQ ID NO: 67602 - protein, 14 aa, Homo sapiens
  CDR3 for beta chain variable domain of TCR clone 33801 (TRBV7-8, TRBJ2-5)
CASSATGGQETQYF

SEQ ID NO: 67603 - protein, 14 aa, Homo sapiens
  CDR3 for alpha chain variable domain of TCR clone 33802 (TRAV26-1, TRAJ45)
CIELTGGGADGLTF

SEQ ID NO: 67604 - protein, 13 aa, Homo sapiens
  CDR3 for beta chain variable domain of TCR clone 33802 (TRBV7-6, TRBJ1-2)
CASSLVADYGYTF

SEQ ID NO: 67605 - protein, 14 aa, Homo sapiens
  CDR3 for alpha chain variable domain of TCR clone 33803 (TRAV1-2, TRAJ12)
CAVSGTDSSYKLIF

SEQ ID NO: 67606 - protein, 15 aa, Homo sapiens
  CDR3 for beta chain variable domain of TCR clone 33803 (TRBV2, TRBJ2-4)
CASSGTNLAKNSQYF

SEQ ID NO: 67607 - protein, 14 aa, Homo sapiens
  CDR3 for alpha chain variable domain of TCR clone 33804 (TRAV1-2, TRAJ8)
CAVREDAGFQKLVF

SEQ ID NO: 67608 - protein, 16 aa, Homo sapiens
  CDR3 for beta chain variable domain of TCR clone 33804 (TRBV5-7, TRBJ2-5)
CASTLAPAGGRETQYF

SEQ ID NO: 67609 - protein, 11 aa, Homo sapiens
  CDR3 for alpha chain variable domain of TCR clone 33805 (TRAV21, TRAJ34)
CAVTSTDNLIF

SEQ ID NO: 67610 - protein, 17 aa, Homo sapiens
  CDR3 for beta chain variable domain of TCR clone 33805 (TRBV20-1, TRBJ2-1)
CSARSPSGGPPTMSSSS

SEQ ID NO: 67611 - protein, 16 aa, Homo sapiens
  CDR3 for alpha chain variable domain of TCR clone 33806 (TRAV12-3, TRAJ53)
CAMSPGSGGSNYKLTF

SEQ ID NO: 67612 - protein, 11 aa, Homo sapiens
  CDR3 for beta chain variable domain of TCR clone 33806 (TRBV29-1, TRBJ2-5)
CSEDRTGTEYF

SEQ ID NO: 67613 - protein, 15 aa, Homo sapiens
  CDR3 for alpha chain variable domain of TCR clone 33807 (TRAV27, TRAJ38)
CAASRNAGNNRKLTW

SEQ ID NO: 67614 - protein, 13 aa, Homo sapiens
  CDR3 for beta chain variable domain of TCR clone 33807 (TRBV12-5, TRBJ2-3)
CASGDRQSDTQYF

SEQ ID NO: 67615 - protein, 18 aa, Homo sapiens
  CDR3 for alpha chain variable domain of TCR clone 33808 (TRAV13-1, TRAJ52)
CAAKNPDAGGTSYGKLTF

SEQ ID NO: 67616 - protein, 17 aa, Homo sapiens
  CDR3 for beta chain variable domain of TCR clone 33808 (TRBV11-2, TRBJ2-1)
CASSLYPPGVEYNEQFF

SEQ ID NO: 67617 - protein, 14 aa, Homo sapiens
  CDR3 for alpha chain variable domain of TCR clone 33809 (TRAV12-1, TRAJ27)
CGEHIRTNACKSTF

SEQ ID NO: 67618 - protein, 15 aa, Homo sapiens
  CDR3 for beta chain variable domain of TCR clone 33809 (TRBV19, TRBJ1-1)
CASTSGQIQNTEAFF

SEQ ID NO: 67619 - protein, 15 aa, Homo sapiens
  CDR3 for alpha chain variable domain of TCR clone 33810 (TRAV2, TRAJ9)
CAVEDRGTGGFKTIF

SEQ ID NO: 67620 - protein, 20 aa, Homo sapiens
  CDR3 for beta chain variable domain of TCR clone 33810 (TRBV7-8, TRBJ2-2)
CASSHLFPGPTIHITGELFF

SEQ ID NO: 67621 - protein, 13 aa, Homo sapiens
  CDR3 for alpha chain variable domain of TCR clone 33811 (TRAV8-6, TRAJ49)
CAVITNTGIQFYF

SEQ ID NO: 67622 - protein, 14 aa, Homo sapiens
  CDR3 for beta chain variable domain of TCR clone 33811 (TRBV5-1, TRBJ2-7)
CASSRGESLYEQYF

SEQ ID NO: 67623 - protein, 13 aa, Homo sapiens
  CDR3 for alpha chain variable domain of TCR clone 33812 (TRAV13-2, TRAJ53)
CAENMGSNYKLTF

SEQ ID NO: 67624 - protein, 13 aa, Homo sapiens
  CDR3 for beta chain variable domain of TCR clone 33812 (TRBV4-1, TRBJ2-2)
CASSQENTRELFF

SEQ ID NO: 67625 - protein, 13 aa, Homo sapiens
  CDR3 for alpha chain variable domain of TCR clone 33813 (TRAV12-2, TRAJ20)
CAVYPSNDYKLSF

SEQ ID NO: 67626 - protein, 15 aa, Homo sapiens
  CDR3 for beta chain variable domain of TCR clone 33813 (TRBV6-1, TRBJ2-5)
CASSEGRGIQETQYF

SEQ ID NO: 67627 - protein, 12 aa, Homo sapiens
  CDR3 for alpha chain variable domain of TCR clone 33814 (TRAV12-1, TRAJ40)
CVFYSGTYKYIF

SEQ ID NO: 67628 - protein, 13 aa, Homo sapiens
  CDR3 for beta chain variable domain of TCR clone 33814 (TRBV7-3, TRBJ1-1)
CASSQDWGAEAFF

SEQ ID NO: 67629 - protein, 12 aa, Homo sapiens
  CDR3 for alpha chain variable domain of TCR clone 33815 (TRAV17, TRAJ57)
CATDSGSEKLVF

SEQ ID NO: 67630 - protein, 13 aa, Homo sapiens
  CDR3 for beta chain variable domain of TCR clone 33815 (TRBV7-9, TRBJ2-7)
CASSFAGAYEQYF

SEQ ID NO: 67631 - protein, 15 aa, Homo sapiens
  CDR3 for alpha chain variable domain of TCR clone 33816 (TRAV13-1, TRAJ3)
CAASKLASSASTIIF

SEQ ID NO: 67632 - protein, 16 aa, Homo sapiens
  CDR3 for beta chain variable domain of TCR clone 33816 (TRBV25-1, TRBJ1-5)
CASGAPTVNSNQPQHF

SEQ ID NO: 67633 - protein, 19 aa, Homo sapiens
  CDR3 for alpha chain variable domain of TCR clone 33817 (TRAV26-1, TRAJ29)
CCVLLHRQSRGSGNTPLVF

SEQ ID NO: 67634 - protein, 14 aa, Homo sapiens
  CDR3 for beta chain variable domain of TCR clone 33817 (TRBV18, TRBJ2-5)
CASSPGVSQETQYF

SEQ ID NO: 67635 - protein, 13 aa, Homo sapiens
  CDR3 for alpha chain variable domain of TCR clone 33818 (TRAV6, TRAJ20)
CALAVSNDYKLSF

SEQ ID NO: 67636 - protein, 16 aa, Homo sapiens
  CDR3 for beta chain variable domain of TCR clone 33818 (TRBV7-9, TRBJ2-1)
CASSDVAGGSYNEQSF

SEQ ID NO: 67637 - protein, 13 aa, Homo sapiens
  CDR3 for alpha chain variable domain of TCR clone 33819 (TRAV20, TRAJ37)
CAGCSSNTGKLIS

SEQ ID NO: 67638 - protein, 14 aa, Homo sapiens
  CDR3 for beta chain variable domain of TCR clone 33819 (TRBV20-1, TRBJ2-5)
CSARDGRAGETQYF

SEQ ID NO: 67639 - protein, 18 aa, Homo sapiens
  CDR3 for alpha chain variable domain of TCR clone 33820 (TRAV13-1, TRAJ52)
CAAKNPNAGGTSCGKLTF

SEQ ID NO: 67640 - protein, 15 aa, Homo sapiens
  CDR3 for beta chain variable domain of TCR clone 33820 (TRBV6-1, TRBJ2-3)
CASSERGGITDTQYF

SEQ ID NO: 67641 - protein, 14 aa, Homo sapiens
  CDR3 for alpha chain variable domain of TCR clone 33821 (TRAV8-3, TRAJ6)
CAVGASGGSYISTF

SEQ ID NO: 67642 - protein, 17 aa, Homo sapiens
  CDR3 for beta chain variable domain of TCR clone 33821 (TRBV18, TRBJ2-2)
CASSPSDPWQNTGELFF

SEQ ID NO: 67643 - protein, 13 aa, Homo sapiens
  CDR3 for alpha chain variable domain of TCR clone 33822 (TRAV27, TRAJ49)
CAPRPYTGNQFYF

SEQ ID NO: 67644 - protein, 18 aa, Homo sapiens
  CDR3 for beta chain variable domain of TCR clone 33822 (TRBV7-3, TRBJ2-5)
CASSVGGAAQGRWETQYF

SEQ ID NO: 67645 - protein, 15 aa, Homo sapiens
  CDR3 for alpha chain variable domain of TCR clone 33823 (TRAV12-3, TRAJ23)
CAMNLIYNQGGKLIF

SEQ ID NO: 67646 - protein, 14 aa, Homo sapiens
  CDR3 for beta chain variable domain of TCR clone 33823 (TRBV27, TRBJ1-5)
CASSLDPRNQPQHF

SEQ ID NO: 67647 - protein, 13 aa, Homo sapiens
  CDR3 for alpha chain variable domain of TCR clone 33824 (TRAV8-3, TRAJ28)
CAVGAVGSYQLTF

SEQ ID NO: 67648 - protein, 16 aa, Homo sapiens
  CDR3 for beta chain variable domain of TCR clone 33824 (TRBV13, TRBJ2-2)
CASSPRTGEHTGELFF

SEQ ID NO: 67649 - protein, 15 aa, Homo sapiens
  CDR3 for alpha chain variable domain of TCR clone 33825 (TRAV12-1, TRAJ44)
CVVFVNTGTASKLTL

SEQ ID NO: 67650 - protein, 17 aa, Homo sapiens
  CDR3 for beta chain variable domain of TCR clone 33825 (TRBV7-8, TRBJ2-6)
CASSAGTGGAGANVLTF

SEQ ID NO: 67651 - protein, 14 aa, Homo sapiens
  CDR3 for alpha chain variable domain of TCR clone 33826 (TRAV1-2, TRAJ16)
CAVNRLSDGQKLLF

SEQ ID NO: 67652 - protein, 14 aa, Homo sapiens
  CDR3 for beta chain variable domain of TCR clone 33826 (TRBV12-5, TRBJ2-5)
CASGSRTHQETQYF

SEQ ID NO: 67653 - protein, 13 aa, Homo sapiens
  CDR3 for alpha chain variable domain of TCR clone 33827 (TRAV3, TRAJ35)
CGMRKSFGNVLHC

SEQ ID NO: 67654 - protein, 14 aa, Homo sapiens
  CDR3 for beta chain variable domain of TCR clone 33827 (TRBV6-5, TRBJ1-4)
CASSYRAAEEKLSF

SEQ ID NO: 67655 - protein, 16 aa, Homo sapiens
  CDR3 for alpha chain variable domain of TCR clone 33828 (TRAV3, TRAJ10)
CAVRDMRAGGGNKLTF

SEQ ID NO: 67656 - protein, 22 aa, Homo sapiens
  CDR3 for beta chain variable domain of TCR clone 33828 (TRBV6-1, TRBJ1-3)
CASVQGGGWKHHIFWRGKLAHC

SEQ ID NO: 67657 - protein, 14 aa, Homo sapiens
  CDR3 for alpha chain variable domain of TCR clone 33829 (TRAV13-1, TRAJ35)
CAASKGGLGNVLHC

SEQ ID NO: 67658 - protein, 13 aa, Homo sapiens
  CDR3 for beta chain variable domain of TCR clone 33829 (TRBV7-3, TRBJ1-1)
CASSQDWGAEAFF

SEQ ID NO: 67659 - protein, 11 aa, Homo sapiens
  CDR3 for alpha chain variable domain of TCR clone 33830 (TRAV29/DV5, TRAJ31)
CAASYRDRLMF

SEQ ID NO: 67660 - protein, 19 aa, Homo sapiens
  CDR3 for beta chain variable domain of TCR clone 33830 (TRBV19, TRBJ2-5)
CASSIGQVTDLFLGETQYF

SEQ ID NO: 67661 - protein, 15 aa, Homo sapiens
  CDR3 for alpha chain variable domain of TCR clone 33831 (TRAV27, TRAJ38)
CAARRNAGNNRKLIW

SEQ ID NO: 67662 - protein, 13 aa, Homo sapiens
  CDR3 for beta chain variable domain of TCR clone 33831 (TRBV12-5, TRBJ2-3)
CASGVRQSDTQYF

SEQ ID NO: 67663 - protein, 16 aa, Homo sapiens
  CDR3 for alpha chain variable domain of TCR clone 33832 (TRAV30, TRAJ24)
CGTEIVDADSWGKFKF

SEQ ID NO: 67664 - protein, 15 aa, Homo sapiens
  CDR3 for beta chain variable domain of TCR clone 33832 (TRBV20-1, TRBJ2-4)
CSARDLTGGPNIQYF

SEQ ID NO: 67665 - protein, 15 aa, Homo sapiens
  CDR3 for alpha chain variable domain of TCR clone 33833 (TRAV25, TRAJ52)
CAGTSGGTSYGKLTF

SEQ ID NO: 67666 - protein, 12 aa, Homo sapiens
  CDR3 for beta chain variable domain of TCR clone 33833 (TRBV11-3, TRBJ1-1)
CASSHRQGEAFF

SEQ ID NO: 67667 - protein, 15 aa, Homo sapiens
  CDR3 for alpha chain variable domain of TCR clone 33834 (TRAV3, TRAJ20)
CVVRDIKLSDYKLSF

SEQ ID NO: 67668 - protein, 15 aa, Homo sapiens
  CDR3 for beta chain variable domain of TCR clone 33834 (TRBV7-9, TRBJ1-6)
CASSSPGRGNSPLHF

SEQ ID NO: 67669 - protein, 10 aa, Homo sapiens
  CDR3 for alpha chain variable domain of TCR clone 33835 (TRAV38-1, TRAJ53)
CAFMKHGLES

SEQ ID NO: 67670 - protein, 13 aa, Homo sapiens
  CDR3 for beta chain variable domain of TCR clone 33835 (TRBV19, TRBJ2-7)
CASSPRQPYEQYF

SEQ ID NO: 67671 - protein, 12 aa, Homo sapiens
  CDR3 for alpha chain variable domain of TCR clone 33836 (TRAV12-3, TRAJ17)
CAMTLTGNKLTF

SEQ ID NO: 67672 - protein, 14 aa, Homo sapiens
  CDR3 for beta chain variable domain of TCR clone 33836 (TRBV20-1, TRBJ1-1)
CSAPPADMNTEAFF

SEQ ID NO: 67673 - protein, 17 aa, Homo sapiens
  CDR3 for alpha chain variable domain of TCR clone 33837 (TRAV3, TRAJ12)
CAVRDGGRMDSSYKLIF

SEQ ID NO: 67674 - protein, 16 aa, Homo sapiens
  CDR3 for beta chain variable domain of TCR clone 33837 (TRBV7-3, TRBJ2-2)
CASSLKRGTLSGELFF

SEQ ID NO: 67675 - protein, 16 aa, Homo sapiens
  CDR3 for alpha chain variable domain of TCR clone 33838 (TRAV16, TRAJ52)
FALSGVGGTSYGKLTF

SEQ ID NO: 67676 - protein, 14 aa, Homo sapiens
  CDR3 for beta chain variable domain of TCR clone 33838 (TRBV19, TRBJ1-2)
CASSLQGQAYGYTF

SEQ ID NO: 67677 - protein, 14 aa, Homo sapiens
  CDR3 for alpha chain variable domain of TCR clone 33839 (TRAV1-2, TRAJ16)
CAVNRFSDGQKLLF

SEQ ID NO: 67678 - protein, 13 aa, Homo sapiens
  CDR3 for beta chain variable domain of TCR clone 33839 (TRBV10-3, TRBJ2-7)
CASKLTVNYGQYF

SEQ ID NO: 67679 - protein, 17 aa, Homo sapiens
  CDR3 for alpha chain variable domain of TCR clone 33840 (TRAV29/DV5, TRAJ52)
CAASARAGGTSYGKLTF

SEQ ID NO: 67680 - protein, 14 aa, Homo sapiens
  CDR3 for beta chain variable domain of TCR clone 33840 (TRBV7-2, TRBJ2-7)
CASSPKTSFYEQYF

SEQ ID NO: 67681 - protein, 12 aa, Homo sapiens
  CDR3 for alpha chain variable domain of TCR clone 33841 (TRAV21, TRAJ12)
CAVMDSSYKLIF

SEQ ID NO: 67682 - protein, 16 aa, Homo sapiens
  CDR3 for beta chain variable domain of TCR clone 33841 (TRBV7-9, TRBJ2-5)
CASRREIGTRKETQYF

SEQ ID NO: 67683 - protein, 14 aa, Homo sapiens
  CDR3 for alpha chain variable domain of TCR clone 33842 (TRAV26-1, TRAJ39)
CIVRGSRAGNMLTF

SEQ ID NO: 67684 - protein, 15 aa, Homo sapiens
  CDR3 for beta chain variable domain of TCR clone 33842 (TRBV7-9, TRBJ1-5)
CASSQDHQPNQPQHF

SEQ ID NO: 67685 - protein, 16 aa, Homo sapiens
  CDR3 for alpha chain variable domain of TCR clone 33843 (TRAV3, TRAJ10)
CAVRGMRAGGGNKLTF

SEQ ID NO: 67686 - protein, 13 aa, Homo sapiens
  CDR3 for beta chain variable domain of TCR clone 33843 (TRBV4-2, TRBJ1-1)
CASSQAGNTEAFF

SEQ ID NO: 67687 - protein, 16 aa, Homo sapiens
  CDR3 for alpha chain variable domain of TCR clone 33844 (TRAV13-1, TRAJ37)
CAASSLGSSNTGKLIF

SEQ ID NO: 67688 - protein, 12 aa, Homo sapiens
  CDR3 for beta chain variable domain of TCR clone 33844 (TRBV6-1, TRBJ2-5)
CASSEGRETQHF

SEQ ID NO: 67689 - protein, 14 aa, Homo sapiens
  CDR3 for alpha chain variable domain of TCR clone 33845 (TRAV13-1, TRAJ35)
CAASKGGFGNVLHC

SEQ ID NO: 67690 - protein, 14 aa, Homo sapiens
  CDR3 for beta chain variable domain of TCR clone 33845 (TRBV7-3, TRBJ1-1)
CASSLKGGNTEAFF

SEQ ID NO: 67691 - protein, 12 aa, Homo sapiens
  CDR3 for alpha chain variable domain of TCR clone 33846 (TRAV13-1, TRAJ53)
AASGGSNYKLTF

SEQ ID NO: 67692 - protein, 15 aa, Homo sapiens
  CDR3 for beta chain variable domain of TCR clone 33846 (TRBV5-1, TRBJ2-1)
CASNPPRAPYNEQFF

SEQ ID NO: 67693 - protein, 14 aa, Homo sapiens
  CDR3 for alpha chain variable domain of TCR clone 33847 (TRAV8-3, TRAJ9)
CAVVYNTGGFKTIF

SEQ ID NO: 67694 - protein, 14 aa, Homo sapiens
  CDR3 for beta chain variable domain of TCR clone 33847 (TRBV7-3, TRBJ2-2)
CAGSSGGYTGELFF

SEQ ID NO: 67695 - protein, 13 aa, Homo sapiens
  CDR3 for alpha chain variable domain of TCR clone 33848 (TRAV12-1, TRAJ3)
CVVNPRGASKIIF

SEQ ID NO: 67696 - protein, 13 aa, Homo sapiens
  CDR3 for beta chain variable domain of TCR clone 33848 (TRBV28, TRBJ1-5)
CASSDRGNQTQHF

SEQ ID NO: 67697 - protein, 14 aa, Homo sapiens
  CDR3 for alpha chain variable domain of TCR clone 33849 (TRAV12-1, TRAJ17)
CVVNYKAAGNKLTF

SEQ ID NO: 67698 - protein, 17 aa, Homo sapiens
  CDR3 for beta chain variable domain of TCR clone 33849 (TRBV20-1, TRBJ2-1)
CSASSSGLSGSYNEQFF

SEQ ID NO: 67699 - protein, 16 aa, Homo sapiens
  CDR3 for alpha chain variable domain of TCR clone 33850 (TRAV30, TRAJ24)
CGTEIVDADSWGKFQF

SEQ ID NO: 67700 - protein, 12 aa, Homo sapiens
  CDR3 for beta chain variable domain of TCR clone 33850 (TRBV19, TRBJ2-1)
CASSMQDTEQFF

SEQ ID NO: 67701 - protein, 15 aa, Homo sapiens
  CDR3 for alpha chain variable domain of TCR clone 33851 (TRAV12-3, TRAJ5)
CAMSGLGTGRRALTS

SEQ ID NO: 67702 - protein, 16 aa, Homo sapiens
  CDR3 for beta chain variable domain of TCR clone 33851 (TRBV20-1, TRBJ2-3)
CSARLHSAGAIDTQYF

SEQ ID NO: 67703 - protein, 14 aa, Homo sapiens
  CDR3 for alpha chain variable domain of TCR clone 33852 (TRAV13-1, TRAJ9)
CAASALTGGFKTIF

SEQ ID NO: 67704 - protein, 14 aa, Homo sapiens
  CDR3 for beta chain variable domain of TCR clone 33852 (TRBV20-1, TRBJ2-1)
CSPNDEASYNEQFF

SEQ ID NO: 67705 - protein, 14 aa, Homo sapiens
  CDR3 for alpha chain variable domain of TCR clone 33853 (TRAV26-1, TRAJ5)
CIVRVRFNRRALTF

SEQ ID NO: 67706 - protein, 14 aa, Homo sapiens
  CDR3 for beta chain variable domain of TCR clone 33853 (TRBV18, TRBJ2-1)
CASSPQGRFNEQFF

SEQ ID NO: 67707 - protein, 14 aa, Homo sapiens
  CDR3 for alpha chain variable domain of TCR clone 33854 (TRAV25, TRAJ35)
CARRMEGFGNVLHC

SEQ ID NO: 67708 - protein, 13 aa, Homo sapiens
  CDR3 for beta chain variable domain of TCR clone 33854 (TRBV7-2, TRBJ1-4)
YASSLAGLEKLFF

SEQ ID NO: 67709 - protein, 11 aa, Homo sapiens
  CDR3 for alpha chain variable domain of TCR clone 33855 (TRAV1-1, TRAJ30)
CAQNRDDKTIF

SEQ ID NO: 67710 - protein, 14 aa, Homo sapiens
  CDR3 for beta chain variable domain of TCR clone 33855 (TRBV7-8, TRBJ2-7)
CASSPGLADYEQYF

SEQ ID NO: 67711 - protein, 14 aa, Homo sapiens
  CDR3 for alpha chain variable domain of TCR clone 33856 (TRAV12-3, TRAJ10)
SHLPLTGGGKKLTF

SEQ ID NO: 67712 - protein, 13 aa, Homo sapiens
  CDR3 for beta chain variable domain of TCR clone 33856 (TRBV2, TRBJ1-6)
CADSGSYNSPLHF

SEQ ID NO: 67713 - protein, 12 aa, Homo sapiens
  CDR3 for alpha chain variable domain of TCR clone 33857 (TRAV1-1, TRAJ34)
CAVRLNTDKLIF

SEQ ID NO: 67714 - protein, 16 aa, Homo sapiens
  CDR3 for beta chain variable domain of TCR clone 33857 (TRBV6-1, TRBJ2-5)
CASSETLDRGAETQYF

SEQ ID NO: 67715 - protein, 10 aa, Homo sapiens
  CDR3 for alpha chain variable domain of TCR clone 33858 (TRAV1-2, TRAJ34)
CAVNTDKLTF

SEQ ID NO: 67716 - protein, 13 aa, Homo sapiens
  CDR3 for beta chain variable domain of TCR clone 33858 (TRBV10-1, TRBJ2-1)
CASSAGPDNEQFF

SEQ ID NO: 67717 - protein, 12 aa, Homo sapiens
  CDR3 for alpha chain variable domain of TCR clone 33859 (TRAV27, TRAJ13)
CAGVRGYQKGTF

SEQ ID NO: 67718 - protein, 16 aa, Homo sapiens
  CDR3 for beta chain variable domain of TCR clone 33859 (TRBV28, TRBJ2-1)
CASSSSYSGSLNEQFF

SEQ ID NO: 67719 - protein, 12 aa, Homo sapiens
  CDR3 for alpha chain variable domain of TCR clone 33860 (TRAV13-2, TRAJ23)
CAERHRGGKLIF

SEQ ID NO: 67720 - protein, 14 aa, Homo sapiens
  CDR3 for beta chain variable domain of TCR clone 33860 (TRBV7-9, TRBJ2-1)
CASSPRDSLYEQFF

SEQ ID NO: 67721 - protein, 14 aa, Homo sapiens
  CDR3 for alpha chain variable domain of TCR clone 33861 (TRAV12-2, TRAJ13)
CAVKKTGGYQKVTF

SEQ ID NO: 67722 - protein, 15 aa, Homo sapiens
  CDR3 for beta chain variable domain of TCR clone 33861 (TRBV27, TRBJ2-1)
CASSNGGGSSNEQIF

SEQ ID NO: 67723 - protein, 17 aa, Homo sapiens
  CDR3 for alpha chain variable domain of TCR clone 33862 (TRAV4, TRAJ42)
CLVGVLNYGGSQGNLIF

SEQ ID NO: 67724 - protein, 12 aa, Homo sapiens
  CDR3 for beta chain variable domain of TCR clone 33862 (TRBV20-1, TRBJ2-1)
RSAQYTYNEQFF

SEQ ID NO: 67725 - protein, 20 aa, Homo sapiens
  CDR3 for alpha chain variable domain of TCR clone 33863 (TRAV12-1, TRAJ42)
GSVIQPPTSVKGGSQGNLIF

SEQ ID NO: 67726 - protein, 18 aa, Homo sapiens
  CDR3 for beta chain variable domain of TCR clone 33863 (TRBV11-2, TRBJ2-3)
CASSLGGASRGAPNTQYF

SEQ ID NO: 67727 - protein, 14 aa, Homo sapiens
  CDR3 for alpha chain variable domain of TCR clone 33864 (TRAV12-2, TRAJ40)
CAVKIPSGTYKYIF

SEQ ID NO: 67728 - protein, 14 aa, Homo sapiens
  CDR3 for beta chain variable domain of TCR clone 33864 (TRBV20-1, TRBJ1-1)
CSVQTRIGGTEAFF

SEQ ID NO: 67729 - protein, 14 aa, Homo sapiens
  CDR3 for alpha chain variable domain of TCR clone 33865 (TRAV12-2, TRAJ17)
CAVLFKAAGNKLTF

SEQ ID NO: 67730 - protein, 15 aa, Homo sapiens
  CDR3 for beta chain variable domain of TCR clone 33865 (TRBV20-1, TRBJ2-7)
CSARDRVSGMDGQYF

SEQ ID NO: 67731 - protein, 11 aa, Homo sapiens
  CDR3 for alpha chain variable domain of TCR clone 33866 (TRAV1-2, TRAJ20)
CAVANDYKLSF

SEQ ID NO: 67732 - protein, 18 aa, Homo sapiens
  CDR3 for beta chain variable domain of TCR clone 33866 (TRBV20-1, TRBJ2-6)
CSAETKPTHGSGANVLTF

SEQ ID NO: 67733 - protein, 17 aa, Homo sapiens
  CDR3 for alpha chain variable domain of TCR clone 33867 (TRAV12-2, TRAJ52)
CAVNKGAGGTSYGKLTF

SEQ ID NO: 67734 - protein, 13 aa, Homo sapiens
  CDR3 for beta chain variable domain of TCR clone 33867 (TRBV10-3, TRBJ2-7)
CASKLAVNYEQYF

SEQ ID NO: 67735 - protein, 17 aa, Homo sapiens
  CDR3 for alpha chain variable domain of TCR clone 33868 (TRAV23/DV6, TRAJ57)
CAASSTLSQGGSEELVF

SEQ ID NO: 67736 - protein, 14 aa, Homo sapiens
  CDR3 for beta chain variable domain of TCR clone 33868 (TRBV25-1, TRBJ1-1)
CASTHLGGNTEAFF

SEQ ID NO: 67737 - protein, 13 aa, Homo sapiens
  CDR3 for alpha chain variable domain of TCR clone 33869 (TRAV38-1, TRAJ42)
CARWGGSQGILIF

SEQ ID NO: 67738 - protein, 17 aa, Homo sapiens
  CDR3 for beta chain variable domain of TCR clone 33869 (TRBV20-1, TRBJ2-1)
CSARDPLAGVWDNEQFF

SEQ ID NO: 67739 - protein, 16 aa, Homo sapiens
  CDR3 for alpha chain variable domain of TCR clone 33870 (TRAV21, TRAJ37)
CAVRPRGSSNTGKLIF

SEQ ID NO: 67740 - protein, 12 aa, Homo sapiens
  CDR3 for beta chain variable domain of TCR clone 33870 (TRBV7-8, TRBJ2-7)
CASSLGDREQYF

SEQ ID NO: 67741 - protein, 19 aa, Homo sapiens
  CDR3 for alpha chain variable domain of TCR clone 33871 (TRAV17, TRAJ40)
TASRAADTASYFCASKYIF

SEQ ID NO: 67742 - protein, 17 aa, Homo sapiens
  CDR3 for beta chain variable domain of TCR clone 33871 (TRBV11-2, TRBJ2-4)
CASSFLALGGAGDSQYF

SEQ ID NO: 67743 - protein, 12 aa, Homo sapiens
  CDR3 for alpha chain variable domain of TCR clone 33872 (TRAV1-2, TRAJ33)
CAALDSNYQLIW

SEQ ID NO: 67744 - protein, 13 aa, Homo sapiens
  CDR3 for beta chain variable domain of TCR clone 33872 (TRBV12-4, TRBJ2-1)
CASSFQGYNEQFF

SEQ ID NO: 67745 - protein, 11 aa, Homo sapiens
  CDR3 for alpha chain variable domain of TCR clone 33873 (TRAV2, TRAJ33)
CAVDSNYQLIW

SEQ ID NO: 67746 - protein, 15 aa, Homo sapiens
  CDR3 for beta chain variable domain of TCR clone 33873 (TRBV20-1, TRBJ2-7)
CSARDRVSGMDEQYF

SEQ ID NO: 67747 - protein, 11 aa, Homo sapiens
  CDR3 for alpha chain variable domain of TCR clone 33874 (TRAV3, TRAJ21)
CAVGNFNKFYF

SEQ ID NO: 67748 - protein, 15 aa, Homo sapiens
  CDR3 for beta chain variable domain of TCR clone 33874 (TRBV19, TRBJ1-5)
CASSIVWADNQPQHF

SEQ ID NO: 67749 - protein, 14 aa, Homo sapiens
  CDR3 for alpha chain variable domain of TCR clone 33875 (TRAV26-1, TRAJ45)
CIGVTGGGADGLTF

SEQ ID NO: 67750 - protein, 13 aa, Homo sapiens
  CDR3 for beta chain variable domain of TCR clone 33875 (TRBV7-6, TRBJ1-2)
CASSLVADYGYTF

SEQ ID NO: 67751 - protein, 14 aa, Homo sapiens
  CDR3 for alpha chain variable domain of TCR clone 33876 (TRAV13-1, TRAJ35)
CAASKGGFGNVLHC

SEQ ID NO: 67752 - protein, 13 aa, Homo sapiens
  CDR3 for beta chain variable domain of TCR clone 33876 (TRBV7-3, TRBJ1-1)
CPSSQDWGAEAFF

SEQ ID NO: 67753 - protein, 11 aa, Homo sapiens
  CDR3 for alpha chain variable domain of TCR clone 33877 (TRAV2, TRAJ13)
CASGGYQKVTF

SEQ ID NO: 67754 - protein, 15 aa, Homo sapiens
  CDR3 for beta chain variable domain of TCR clone 33877 (TRBV29-1, TRBJ2-1)
CSGRDRKSSYNEQLF

SEQ ID NO: 67755 - protein, 13 aa, Homo sapiens
  CDR3 for alpha chain variable domain of TCR clone 33878 (TRAV12-3, TRAJ53)
CAMRGGSNYKLTF

SEQ ID NO: 67756 - protein, 15 aa, Homo sapiens
  CDR3 for beta chain variable domain of TCR clone 33878 (TRBV2, TRBJ2-1)
CATQARLVMSGEQFF

SEQ ID NO: 67757 - protein, 16 aa, Homo sapiens
  CDR3 for alpha chain variable domain of TCR clone 33879 (TRAV12-2, TRAJ52)
CRLANAGVTSYGKLTF

SEQ ID NO: 67758 - protein, 13 aa, Homo sapiens
  CDR3 for beta chain variable domain of TCR clone 33879 (TRBV10-3, TRBJ2-7)
CASKLAVNYEQYF

SEQ ID NO: 67759 - protein, 17 aa, Homo sapiens
  CDR3 for alpha chain variable domain of TCR clone 33880 (TRAV36/DV7, TRAJ52)
CAVAQRAGGTSYGKLTF

SEQ ID NO: 67760 - protein, 13 aa, Homo sapiens
  CDR3 for beta chain variable domain of TCR clone 33880 (TRBV7-9, TRBJ1-2)
CASSLKQNYGYTF

SEQ ID NO: 67761 - protein, 15 aa, Homo sapiens
  CDR3 for alpha chain variable domain of TCR clone 33881 (TRAV3, TRAJ5)
CAVRDRKTGRRALTF

SEQ ID NO: 67762 - protein, 15 aa, Homo sapiens
  CDR3 for beta chain variable domain of TCR clone 33881 (TRBV7-8, TRBJ2-1)
CASSLADSLYNEQSF

SEQ ID NO: 67763 - protein, 13 aa, Homo sapiens
  CDR3 for alpha chain variable domain of TCR clone 33882 (TRAV27, TRAJ45)
CRSSGGGADGLTF

SEQ ID NO: 67764 - protein, 17 aa, Homo sapiens
  CDR3 for beta chain variable domain of TCR clone 33882 (TRBV11-2, TRBJ2-1)
CASSLYPPGFEYNEQFF

SEQ ID NO: 67765 - protein, 14 aa, Homo sapiens
  CDR3 for alpha chain variable domain of TCR clone 33883 (TRAV1-2, TRAJ16)
CAVNRFSDGQKLLF

SEQ ID NO: 67766 - protein, 15 aa, Homo sapiens
  CDR3 for beta chain variable domain of TCR clone 33883 (TRBV9, TRBJ1-6)
FASSVAGTGDSPLHF

SEQ ID NO: 67767 - protein, 10 aa, Homo sapiens
  CDR3 for alpha chain variable domain of TCR clone 33884 (TRAV12-2, TRAJ43)
CAVKVLSMRF

SEQ ID NO: 67768 - protein, 14 aa, Homo sapiens
  CDR3 for beta chain variable domain of TCR clone 33884 (TRBV11-2, TRBJ2-7)
RASSLGNSLYEQYF

SEQ ID NO: 67769 - protein, 14 aa, Homo sapiens
  CDR3 for alpha chain variable domain of TCR clone 33885 (TRAV17, TRAJ31)
CATVLRNNNARLMF

SEQ ID NO: 67770 - protein, 14 aa, Homo sapiens
  CDR3 for beta chain variable domain of TCR clone 33885 (TRBV12-4, TRBJ2-5)
CASGLWQKQETQYF

SEQ ID NO: 67771 - protein, 14 aa, Homo sapiens
  CDR3 for alpha chain variable domain of TCR clone 33886 (TRAV1-2, TRAJ16)
CAVNRFSDGQKLLF

SEQ ID NO: 67772 - protein, 12 aa, Homo sapiens
  CDR3 for beta chain variable domain of TCR clone 33886 (TRBV7-6, TRBJ2-7)
CANSLADSEQYF

SEQ ID NO: 67773 - protein, 10 aa, Homo sapiens
  CDR3 for alpha chain variable domain of TCR clone 33887 (TRAV1-2, TRAJ34)
CAVNTDKLIF

SEQ ID NO: 67774 - protein, 13 aa, Homo sapiens
  CDR3 for beta chain variable domain of TCR clone 33887 (TRBV10-3, TRBJ2-7)
CASKLAVNYEQYF

SEQ ID NO: 67775 - protein, 12 aa, Homo sapiens
  CDR3 for alpha chain variable domain of TCR clone 33888 (TRAV26-1, TRAJ26)
CIVSIYGQNFVF

SEQ ID NO: 67776 - protein, 13 aa, Homo sapiens
  CDR3 for beta chain variable domain of TCR clone 33888 (TRBV27, TRBJ1-1)
CASSLSIGAEAFF

SEQ ID NO: 67777 - protein, 13 aa, Homo sapiens
  CDR3 for alpha chain variable domain of TCR clone 33889 (TRAV17, TRAJ34)
CATDLYNTDKLIF

SEQ ID NO: 67778 - protein, 12 aa, Homo sapiens
  CDR3 for beta chain variable domain of TCR clone 33889 (TRBV11-2, TRBJ2-2)
CASSLGGGGLFF

SEQ ID NO: 67779 - protein, 13 aa, Homo sapiens
  CDR3 for alpha chain variable domain of TCR clone 33890 (TRAV12-1, TRAJ23)
CVVNLMDGGKLIF

SEQ ID NO: 67780 - protein, 17 aa, Homo sapiens
  CDR3 for beta chain variable domain of TCR clone 33890 (TRBV9, TRBJ2-1)
CASSVSSGGTSYNEQFF

SEQ ID NO: 67781 - protein, 15 aa, Homo sapiens
  CDR3 for alpha chain variable domain of TCR clone 33891 (TRAV17, TRAJ57)
CATGPSQGGSEKLVS

SEQ ID NO: 67782 - protein, 13 aa, Homo sapiens
  CDR3 for beta chain variable domain of TCR clone 33891 (TRBV27, TRBJ1-4)
CASSLMGDEKLFF

SEQ ID NO: 67783 - protein, 16 aa, Homo sapiens
  CDR3 for alpha chain variable domain of TCR clone 33892 (TRAV3, TRAJ37)
CAVRPHGSGNKGKLIF

SEQ ID NO: 67784 - protein, 16 aa, Homo sapiens
  CDR3 for beta chain variable domain of TCR clone 33892 (TRBV9, TRBJ1-2)
CASSVEEKVSPYGYTF

SEQ ID NO: 67785 - protein, 11 aa, Homo sapiens
  CDR3 for alpha chain variable domain of TCR clone 33893 (TRAV12-2, TRAJ31)
CAVTRWARLMF

SEQ ID NO: 67786 - protein, 20 aa, Homo sapiens
  CDR3 for beta chain variable domain of TCR clone 33893 (TRBV19, TRBJ2-7)
CASSIGGGARQRAVLRAGHQ

SEQ ID NO: 67787 - protein, 16 aa, Homo sapiens
  CDR3 for alpha chain variable domain of TCR clone 33894 (TRAV3, TRAJ37)
CAVRGKGSGNTGKLIL

SEQ ID NO: 67788 - protein, 20 aa, Homo sapiens
  CDR3 for beta chain variable domain of TCR clone 33894 (TRBV7-8, TRBJ2-2)
CASSHLFPGPTIHITGELFF

SEQ ID NO: 67789 - protein, 15 aa, Homo sapiens
  CDR3 for alpha chain variable domain of TCR clone 33895 (TRAV25, TRAJ53)
CPTSNSGGSNYKLTF

SEQ ID NO: 67790 - protein, 14 aa, Homo sapiens
  CDR3 for beta chain variable domain of TCR clone 33895 (TRBV11-2, TRBJ2-3)
CASGRLARTDTQYF

SEQ ID NO: 67791 - protein, 18 aa, Homo sapiens
  CDR3 for alpha chain variable domain of TCR clone 33896 (TRAV26-2, TRAJ17)
CCVLLHPAIKAAGNELTF

SEQ ID NO: 67792 - protein, 12 aa, Homo sapiens
  CDR3 for beta chain variable domain of TCR clone 33896 (TRBV29-1, TRBJ2-7)
CSARDRPYEQYF

SEQ ID NO: 67793 - protein, 14 aa, Homo sapiens
  CDR3 for alpha chain variable domain of TCR clone 33897 (TRAV38-1, TRAJ40)
CALRPTSRTYKYIF

SEQ ID NO: 67794 - protein, 14 aa, Homo sapiens
  CDR3 for beta chain variable domain of TCR clone 33897 (TRBV5-4, TRBJ1-1)
CASSLDSRRDEAFF

SEQ ID NO: 67795 - protein, 14 aa, Homo sapiens
  CDR3 for alpha chain variable domain of TCR clone 33898 (TRAV1-2, TRAJ16)
CAVNRFSDGQKLLF

SEQ ID NO: 67796 - protein, 15 aa, Homo sapiens
  CDR3 for beta chain variable domain of TCR clone 33898 (TRBV9, TRBJ1-6)
CASSVAGTGDSPLHF

SEQ ID NO: 67797 - protein, 15 aa, Homo sapiens
  CDR3 for alpha chain variable domain of TCR clone 33899 (TRAV8-3, TRAJ11)
CAVGLLNSGYSTLTF

SEQ ID NO: 67798 - protein, 16 aa, Homo sapiens
  CDR3 for beta chain variable domain of TCR clone 33899 (TRBV7-9, TRBJ1-2)
CASSVGFSSGEDGYTF

SEQ ID NO: 67799 - protein, 14 aa, Homo sapiens
  CDR3 for alpha chain variable domain of TCR clone 33900 (TRAV13-2, TRAJ43)
CAEIPTYNNNGMRF

SEQ ID NO: 67800 - protein, 15 aa, Homo sapiens
  CDR3 for beta chain variable domain of TCR clone 33900 (TRBV7-9, TRBJ2-2)
CASGPLDTFPGELFF

SEQ ID NO: 67801 - protein, 14 aa, Homo sapiens
  CDR3 for alpha chain variable domain of TCR clone 33901 (TRAV1-2, TRAJ8)
CAVREDTGFQKLVF

SEQ ID NO: 67802 - protein, 15 aa, Homo sapiens
  CDR3 for beta chain variable domain of TCR clone 33901 (TRBV11-1, TRBJ2-7)
CASSLNYGASYEQYF

SEQ ID NO: 67803 - protein, 13 aa, Homo sapiens
  CDR3 for alpha chain variable domain of TCR clone 33902 (TRAV3, TRAJ27)
CAVRPLGAGKSTF

SEQ ID NO: 67804 - protein, 12 aa, Homo sapiens
  CDR3 for beta chain variable domain of TCR clone 33902 (TRBV7-9, TRBJ2-7)
CATRTDAYEQYC

SEQ ID NO: 67805 - protein, 18 aa, Homo sapiens
  CDR3 for alpha chain variable domain of TCR clone 33903 (TRAV26-1, TRAJ5)
CIVRVVPPRDTGRRALPF

SEQ ID NO: 67806 - protein, 15 aa, Homo sapiens
  CDR3 for beta chain variable domain of TCR clone 33903 (TRBV7-9, TRBJ2-7)
CASSLPMGQANEQYF

SEQ ID NO: 67807 - protein, 15 aa, Homo sapiens
  CDR3 for alpha chain variable domain of TCR clone 33904 (TRAV26-1, TRAJ29)
CIVRVEGSGNTPLVF

SEQ ID NO: 67808 - protein, 15 aa, Homo sapiens
  CDR3 for beta chain variable domain of TCR clone 33904 (TRBV7-9, TRBJ1-5)
CASSQGHQPNQPLHF

SEQ ID NO: 67809 - protein, 14 aa, Homo sapiens
  CDR3 for alpha chain variable domain of TCR clone 33905 (TRAV1-2, TRAJ16)
CAVNRFSDGQKLLF

SEQ ID NO: 67810 - protein, 14 aa, Homo sapiens
  CDR3 for beta chain variable domain of TCR clone 33905 (TRBV7-3, TRBJ2-1)
CASSLSGSYNEQFF

SEQ ID NO: 67811 - protein, 13 aa, Homo sapiens
  CDR3 for alpha chain variable domain of TCR clone 33906 (TRAV8-6, TRAJ40)
CAVSVTGTYKYIF

SEQ ID NO: 67812 - protein, 15 aa, Homo sapiens
  CDR3 for beta chain variable domain of TCR clone 33906 (TRBV4-1, TRBJ2-3)
CASSRGQGIPDTKYF

SEQ ID NO: 67813 - protein, 13 aa, Homo sapiens
  CDR3 for alpha chain variable domain of TCR clone 33907 (TRAV1-2, TRAJ9)
CAVLNTGGFKTTF

SEQ ID NO: 67814 - protein, 14 aa, Homo sapiens
  CDR3 for beta chain variable domain of TCR clone 33907 (TRBV20-1, TRBJ2-3)
CSARGGTSTDTQYF

SEQ ID NO: 67815 - protein, 15 aa, Homo sapiens
  CDR3 for alpha chain variable domain of TCR clone 33908 (TRAV35, TRAJ23)
CAGPLGNNQGGKLIF

SEQ ID NO: 67816 - protein, 14 aa, Homo sapiens
  CDR3 for beta chain variable domain of TCR clone 33908 (TRBV7-9, TRBJ1-1)
CASTPLQSYTGAFF

SEQ ID NO: 67817 - protein, 13 aa, Homo sapiens
  CDR3 for alpha chain variable domain of TCR clone 33909 (TRAV3, TRAJ27)
CAVRPLGAGKSTF

SEQ ID NO: 67818 - protein, 13 aa, Homo sapiens
  CDR3 for beta chain variable domain of TCR clone 33909 (TRBV7-9, TRBJ2-3)
CASSPGSTDTQYF

SEQ ID NO: 67819 - protein, 12 aa, Homo sapiens
  CDR3 for alpha chain variable domain of TCR clone 33910 (TRAV13-2, TRAJ23)
CAERHRGGKLIF

SEQ ID NO: 67820 - protein, 16 aa, Homo sapiens
  CDR3 for beta chain variable domain of TCR clone 33910 (TRBV20-1, TRBJ1-4)
CSAPGQGILTNEKLFF

SEQ ID NO: 67821 - protein, 14 aa, Homo sapiens
  CDR3 for alpha chain variable domain of TCR clone 33911 (TRAV8-1, TRAJ5)
CAVRTDTGRRALTF

SEQ ID NO: 67822 - protein, 14 aa, Homo sapiens
  CDR3 for beta chain variable domain of TCR clone 33911 (TRBV7-8, TRBJ2-3)
CASSFPDGQDTRYF

SEQ ID NO: 67823 - protein, 14 aa, Homo sapiens
  CDR3 for alpha chain variable domain of TCR clone 33912 (TRAV12-3, TRAJ10)
SHLPLTGGGNKLTF

SEQ ID NO: 67824 - protein, 15 aa, Homo sapiens
  CDR3 for beta chain variable domain of TCR clone 33912 (TRBV2, TRBJ2-3)
CASSDFEKATDTQYF

SEQ ID NO: 67825 - protein, 15 aa, Homo sapiens
  CDR3 for alpha chain variable domain of TCR clone 33913 (TRAV26-1, TRAJ44)
CIVRANTGTASKLTF

SEQ ID NO: 67826 - protein, 16 aa, Homo sapiens
  CDR3 for beta chain variable domain of TCR clone 33913 (TRBV7-7, TRBJ2-1)
YASSLASGTSYNEQFF

SEQ ID NO: 67827 - protein, 12 aa, Homo sapiens
  CDR3 for alpha chain variable domain of TCR clone 33914 (TRAV12-1, TRAJ40)
CVFYSGTYKYIF

SEQ ID NO: 67828 - protein, 18 aa, Homo sapiens
  CDR3 for beta chain variable domain of TCR clone 33914 (TRBV12-4, TRBJ2-2)
CASSLVAGTRGRTGELFV

SEQ ID NO: 67829 - protein, 15 aa, Homo sapiens
  CDR3 for alpha chain variable domain of TCR clone 33915 (TRAV2, TRAJ28)
CAVPYSGAGSYQLTF

SEQ ID NO: 67830 - protein, 17 aa, Homo sapiens
  CDR3 for beta chain variable domain of TCR clone 33915 (TRBV20-1, TRBJ2-4)
CSARDWASGGRENVQYF

SEQ ID NO: 67831 - protein, 14 aa, Homo sapiens
  CDR3 for alpha chain variable domain of TCR clone 33916 (TRAV12-3, TRAJ9)
CAMSVETGGFKTIF

SEQ ID NO: 67832 - protein, 14 aa, Homo sapiens
  CDR3 for beta chain variable domain of TCR clone 33916 (TRBV7-2, TRBJ2-7)
CASRSRGAAYEQYF

SEQ ID NO: 67833 - protein, 15 aa, Homo sapiens
  CDR3 for alpha chain variable domain of TCR clone 33917 (TRAV8-1, TRAJ6)
CAVNANPGGSYIPTF

SEQ ID NO: 67834 - protein, 12 aa, Homo sapiens
  CDR3 for beta chain variable domain of TCR clone 33917 (TRBV5-6, TRBJ2-7)
CASSVQGGEQYF

SEQ ID NO: 67835 - protein, 14 aa, Homo sapiens
  CDR3 for alpha chain variable domain of TCR clone 33918 (TRAV21, TRAJ11)
CAVRGNSGYSTLTF

SEQ ID NO: 67836 - protein, 11 aa, Homo sapiens
  CDR3 for beta chain variable domain of TCR clone 33918 (TRBV11-2, TRBJ1-1)
CASSINTEAFF

SEQ ID NO: 67837 - protein, 12 aa, Homo sapiens
  CDR3 for alpha chain variable domain of TCR clone 33919 (TRAV2, TRAJ31)
CAVEDNNARLMF

SEQ ID NO: 67838 - protein, 16 aa, Homo sapiens
  CDR3 for beta chain variable domain of TCR clone 33919 (TRBV12-5, TRBJ2-5)
CASGPRTSGNQETQYF

SEQ ID NO: 67839 - protein, 15 aa, Homo sapiens
  CDR3 for alpha chain variable domain of TCR clone 33920 (TRAV17, TRAJ57)
CATGPSQGRSEKLVF

SEQ ID NO: 67840 - protein, 13 aa, Homo sapiens
  CDR3 for beta chain variable domain of TCR clone 33920 (TRBV6-5, TRBJ2-5)
CASSPQGGEAQYF

SEQ ID NO: 67841 - protein, 15 aa, Homo sapiens
  CDR3 for alpha chain variable domain of TCR clone 33921 (TRAV2, TRAJ15)
CAVEDRKQAGTALIF

SEQ ID NO: 67842 - protein, 13 aa, Homo sapiens
  CDR3 for beta chain variable domain of TCR clone 33921 (TRBV10-2, TRBJ2-3)
CASSESGDHTQYF

SEQ ID NO: 67843 - protein, 14 aa, Homo sapiens
  CDR3 for alpha chain variable domain of TCR clone 33922 (TRAV35, TRAJ33)
CAGSSQVSNYQLIW

SEQ ID NO: 67844 - protein, 15 aa, Homo sapiens
  CDR3 for beta chain variable domain of TCR clone 33922 (TRBV20-1, TRBJ2-7)
CSAESGTSGAYEQYF

SEQ ID NO: 67845 - protein, 12 aa, Homo sapiens
  CDR3 for alpha chain variable domain of TCR clone 33923 (TRAV8-3, TRAJ43)
CAVGVGNNDMRF

SEQ ID NO: 67846 - protein, 14 aa, Homo sapiens
  CDR3 for beta chain variable domain of TCR clone 33923 (TRBV4-2, TRBJ1-5)
CASSRDRGNQPQHF

SEQ ID NO: 67847 - protein, 11 aa, Homo sapiens
  CDR3 for alpha chain variable domain of TCR clone 33924 (TRAV21, TRAJ34)
CAVTNTDKLIF

SEQ ID NO: 67848 - protein, 16 aa, Homo sapiens
  CDR3 for beta chain variable domain of TCR clone 33924 (TRBV18, TRBJ1-1)
CASSPGVGGRGGESFF

SEQ ID NO: 67849 - protein, 10 aa, Homo sapiens
  CDR3 for alpha chain variable domain of TCR clone 33925 (TRAV1-2, TRAJ23)
CAGQGGKLTF

SEQ ID NO: 67850 - protein, 16 aa, Homo sapiens
  CDR3 for beta chain variable domain of TCR clone 33925 (TRBV11-2, TRBJ1-1)
CASSLRQGGEHSKAFF

SEQ ID NO: 67851 - protein, 12 aa, Homo sapiens
  CDR3 for alpha chain variable domain of TCR clone 33926 (TRAV20, TRAJ56)
CAVTGANSKLTF

SEQ ID NO: 67852 - protein, 14 aa, Homo sapiens
  CDR3 for beta chain variable domain of TCR clone 33926 (TRBV20-1, TRBJ2-5)
RSALVPGYQETQYF

SEQ ID NO: 67853 - protein, 12 aa, Homo sapiens
  CDR3 for alpha chain variable domain of TCR clone 33927 (TRAV35, TRAJ49)
CAGWNTGNQSYF

SEQ ID NO: 67854 - protein, 16 aa, Homo sapiens
  CDR3 for beta chain variable domain of TCR clone 33927 (TRBV5-1, TRBJ2-2)
CASSLWDTTNTGELFF

SEQ ID NO: 67855 - protein, 11 aa, Homo sapiens
  CDR3 for alpha chain variable domain of TCR clone 33928 (TRAV17, TRAJ9)
CGFTGGFKTTF

SEQ ID NO: 67856 - protein, 14 aa, Homo sapiens
  CDR3 for beta chain variable domain of TCR clone 33928 (TRBV7-9, TRBJ2-2)
CASSLVQDTGELFF

SEQ ID NO: 67857 - protein, 14 aa, Homo sapiens
  CDR3 for alpha chain variable domain of TCR clone 33929 (TRAV12-3, TRAJ9)
CAMSPNTGGFKTIF

SEQ ID NO: 67858 - protein, 16 aa, Homo sapiens
  CDR3 for beta chain variable domain of TCR clone 33929 (TRBV19, TRBJ2-1)
CASSKAGPSSYNEQFF

SEQ ID NO: 67859 - protein, 15 aa, Homo sapiens
  CDR3 for alpha chain variable domain of TCR clone 33930 (TRAV17, TRAJ57)
CATGPSQGGSEKLVF

SEQ ID NO: 67860 - protein, 14 aa, Homo sapiens
  CDR3 for beta chain variable domain of TCR clone 33930 (TRBV12-5, TRBJ2-5)
CASGSRTHHETQYF

SEQ ID NO: 67861 - protein, 13 aa, Homo sapiens
  CDR3 for alpha chain variable domain of TCR clone 33931 (TRAV12-3, TRAJ9)
CAMRNTGGFKTIF

SEQ ID NO: 67862 - protein, 14 aa, Homo sapiens
  CDR3 for beta chain variable domain of TCR clone 33931 (TRBV11-2, TRBJ2-7)
CANSSTGEGYEQYF

SEQ ID NO: 67863 - protein, 14 aa, Homo sapiens
  CDR3 for alpha chain variable domain of TCR clone 33932 (TRAV1-2, TRAJ16)
CAVNRFSDGQKLLF

SEQ ID NO: 67864 - protein, 18 aa, Homo sapiens
  CDR3 for beta chain variable domain of TCR clone 33932 (TRBV15, TRBJ2-3)
CATSRDGARSWDTDTQYF

SEQ ID NO: 67865 - protein, 15 aa, Homo sapiens
  CDR3 for alpha chain variable domain of TCR clone 33933 (TRAV12-2, TRAJ53)
CAVNGGGGSNYKLTF

SEQ ID NO: 67866 - protein, 13 aa, Homo sapiens
  CDR3 for beta chain variable domain of TCR clone 33933 (TRBV3-1, TRBJ1-1)
CARSPGVITEAFF

SEQ ID NO: 67867 - protein, 14 aa, Homo sapiens
  CDR3 for alpha chain variable domain of TCR clone 33934 (TRAV9-2, TRAJ39)
CALYIYNAGNMLTS

SEQ ID NO: 67868 - protein, 14 aa, Homo sapiens
  CDR3 for beta chain variable domain of TCR clone 33934 (TRBV12-5, TRBJ2-5)
CASGSRTHQETQYF

SEQ ID NO: 67869 - protein, 15 aa, Homo sapiens
  CDR3 for alpha chain variable domain of TCR clone 33935 (TRAV13-2, TRAJ10)
CAENRDTGGGNKLTF

SEQ ID NO: 67870 - protein, 15 aa, Homo sapiens
  CDR3 for beta chain variable domain of TCR clone 33935 (TRBV7-3, TRBJ2-1)
CASSLDGNSYNEQFF

SEQ ID NO: 67871 - protein, 16 aa, Homo sapiens
  CDR3 for alpha chain variable domain of TCR clone 33936 (TRAV30, TRAJ24)
CGTEIMDADSWGKFQF

SEQ ID NO: 67872 - protein, 16 aa, Homo sapiens
  CDR3 for beta chain variable domain of TCR clone 33936 (TRBV6-1, TRBJ2-1)
CASILRQGSSYNEQFF

SEQ ID NO: 67873 - protein, 18 aa, Homo sapiens
  CDR3 for alpha chain variable domain of TCR clone 33937 (TRAV13-1, TRAJ52)
CAAKNPNAGGTSYGKLTF

SEQ ID NO: 67874 - protein, 13 aa, Homo sapiens
  CDR3 for beta chain variable domain of TCR clone 33937 (TRBV4-2, TRBJ1-1)
CASSQAGNTEAFF

SEQ ID NO: 67875 - protein, 14 aa, Homo sapiens
  CDR3 for alpha chain variable domain of TCR clone 33938 (TRAV17, TRAJ39)
CATDPVRAGNMLTF

SEQ ID NO: 67876 - protein, 15 aa, Homo sapiens
  CDR3 for beta chain variable domain of TCR clone 33938 (TRBV13, TRBJ1-5)
CASSCGQGGVQPQHF

SEQ ID NO: 67877 - protein, 11 aa, Homo sapiens
  CDR3 for alpha chain variable domain of TCR clone 33939 (TRAV2, TRAJ13)
CASGGYQKVTF

SEQ ID NO: 67878 - protein, 13 aa, Homo sapiens
  CDR3 for beta chain variable domain of TCR clone 33939 (TRBV12-4, TRBJ1-1)
CASSPGTGFEAFF

SEQ ID NO: 67879 - protein, 11 aa, Homo sapiens
  CDR3 for alpha chain variable domain of TCR clone 33940 (TRAV21, TRAJ11)
CAVNGYSTLTF

SEQ ID NO: 67880 - protein, 16 aa, Homo sapiens
  CDR3 for beta chain variable domain of TCR clone 33940 (TRBV12-5, TRBJ2-5)
CASGPRTSGNQETQYL

SEQ ID NO: 67881 - protein, 14 aa, Homo sapiens
  CDR3 for alpha chain variable domain of TCR clone 33941 (TRAV12-1, TRAJ17)
CVVNYKAAGNKLTF

SEQ ID NO: 67882 - protein, 18 aa, Homo sapiens
  CDR3 for beta chain variable domain of TCR clone 33941 (TRBV18, TRBJ1-3)
CASSPRGGAGPSGNTIYF

SEQ ID NO: 67883 - protein, 19 aa, Homo sapiens
  CDR3 for alpha chain variable domain of TCR clone 33942 (TRAV3, TRAJ6)
CAVRDRNPSLSGGSYIPTF

SEQ ID NO: 67884 - protein, 15 aa, Homo sapiens
  CDR3 for beta chain variable domain of TCR clone 33942 (TRBV18, TRBJ2-7)
CASSPTFMDSYEQYF

SEQ ID NO: 67885 - protein, 14 aa, Homo sapiens
  CDR3 for alpha chain variable domain of TCR clone 33943 (TRAV8-3, TRAJ26)
CAVAPGNYGQNFVF

SEQ ID NO: 67886 - protein, 16 aa, Homo sapiens
  CDR3 for beta chain variable domain of TCR clone 33943 (TRBV3-1, TRBJ2-1)
CASNQVGGTSYNEQFF

SEQ ID NO: 67887 - protein, 15 aa, Homo sapiens
  CDR3 for alpha chain variable domain of TCR clone 33944 (TRAV12-2, TRAJ43)
CAFDMRFGAGTRLTV

SEQ ID NO: 67888 - protein, 18 aa, Homo sapiens
  CDR3 for beta chain variable domain of TCR clone 33944 (TRBV20-1, TRBJ2-3)
CSASGLAGWPGTTDTQYF

SEQ ID NO: 67889 - protein, 15 aa, Homo sapiens
  CDR3 for alpha chain variable domain of TCR clone 33945 (TRAV21, TRAJ24)
CAARSSTDSWVKLQF

SEQ ID NO: 67890 - protein, 13 aa, Homo sapiens
  CDR3 for beta chain variable domain of TCR clone 33945 (TRBV11-2, TRBJ2-5)
CASSSTGEETQYF

SEQ ID NO: 67891 - protein, 14 aa, Homo sapiens
  CDR3 for alpha chain variable domain of TCR clone 33946 (TRAV8-2, TRAJ4)
CVASPSGGYNKLIF

SEQ ID NO: 67892 - protein, 14 aa, Homo sapiens
  CDR3 for beta chain variable domain of TCR clone 33946 (TRBV19, TRBJ2-5)
CASSSSGIQETQYF

SEQ ID NO: 67893 - protein, 18 aa, Homo sapiens
  CDR3 for alpha chain variable domain of TCR clone 33947 (TRAV12-3, TRAJ52)
CAMSRTNASGTSYGKLTF

SEQ ID NO: 67894 - protein, 17 aa, Homo sapiens
  CDR3 for beta chain variable domain of TCR clone 33947 (TRBV7-3, TRBJ2-3)
CASSLMKRMRGADTQYF

SEQ ID NO: 67895 - protein, 13 aa, Homo sapiens
  CDR3 for alpha chain variable domain of TCR clone 33948 (TRAV1-2, TRAJ9)
CAALNTGGFKTIF

SEQ ID NO: 67896 - protein, 17 aa, Homo sapiens
  CDR3 for beta chain variable domain of TCR clone 33948 (TRBV7-3, TRBJ2-3)
CASSLMKRMRGADTQYF

SEQ ID NO: 67897 - protein, 14 aa, Homo sapiens
  CDR3 for alpha chain variable domain of TCR clone 33949 (TRAV23/DV6, TRAJ4)
CAANLSGGYNKLIF

SEQ ID NO: 67898 - protein, 15 aa, Homo sapiens
  CDR3 for beta chain variable domain of TCR clone 33949 (TRBV20-1, TRBJ1-1)
CSASRGVTGNTEAFF

SEQ ID NO: 67899 - protein, 15 aa, Homo sapiens
  CDR3 for alpha chain variable domain of TCR clone 33950 (TRAV23/DV6, TRAJ18)
CAASYRGSTLGRLYF

SEQ ID NO: 67900 - protein, 13 aa, Homo sapiens
  CDR3 for beta chain variable domain of TCR clone 33950 (TRBV7-2, TRBJ2-7)
CASSSPSGSEQYF

SEQ ID NO: 67901 - protein, 15 aa, Homo sapiens
  CDR3 for alpha chain variable domain of TCR clone 33951 (TRAV12-2, TRAJ53)
CAVNGGGGSNSKLTF

SEQ ID NO: 67902 - protein, 17 aa, Homo sapiens
  CDR3 for beta chain variable domain of TCR clone 33951 (TRBV7-3, TRBJ2-3)
CASSLMKRMRGADTQYF

SEQ ID NO: 67903 - protein, 13 aa, Homo sapiens
  CDR3 for alpha chain variable domain of TCR clone 33952 (TRAV35, TRAJ48)
CAGHEFGNEKLTF

SEQ ID NO: 67904 - protein, 14 aa, Homo sapiens
  CDR3 for beta chain variable domain of TCR clone 33952 (TRBV19, TRBJ2-1)
CASPTFALSGEQFF

SEQ ID NO: 67905 - protein, 11 aa, Homo sapiens
  CDR3 for alpha chain variable domain of TCR clone 33953 (TRAV9-2, TRAJ42)
CALSDSVDLIF

SEQ ID NO: 67906 - protein, 16 aa, Homo sapiens
  CDR3 for beta chain variable domain of TCR clone 33953 (TRBV6-1, TRBJ2-5)
CASSETLDRGAETQYF

SEQ ID NO: 67907 - protein, 15 aa, Homo sapiens
  CDR3 for alpha chain variable domain of TCR clone 33954 (TRAV25, TRAJ53)
CPTSNSGGSNYKLTF

SEQ ID NO: 67908 - protein, 14 aa, Homo sapiens
  CDR3 for beta chain variable domain of TCR clone 33954 (TRBV5-1, TRBJ2-3)
CASSPGLAADTQYF

SEQ ID NO: 67909 - protein, 15 aa, Homo sapiens
  CDR3 for alpha chain variable domain of TCR clone 33955 (TRAV25, TRAJ52)
CAGRPGGTSYGKLTF

SEQ ID NO: 67910 - protein, 17 aa, Homo sapiens
  CDR3 for beta chain variable domain of TCR clone 33955 (TRBV7-8, TRBJ2-6)
CASSVGTGGAGANVLTF

SEQ ID NO: 67911 - protein, 15 aa, Homo sapiens
  CDR3 for alpha chain variable domain of TCR clone 33956 (TRAV4, TRAJ39)
CLVGPNNNAGNMLTF

SEQ ID NO: 67912 - protein, 14 aa, Homo sapiens
  CDR3 for beta chain variable domain of TCR clone 33956 (TRBV19, TRBJ2-1)
CASTTFVLSGEQFF

SEQ ID NO: 67913 - protein, 15 aa, Homo sapiens
  CDR3 for alpha chain variable domain of TCR clone 33957 (TRAV12-1, TRAJ5)
CVVNMLETGRRALNF

SEQ ID NO: 67914 - protein, 12 aa, Homo sapiens
  CDR3 for beta chain variable domain of TCR clone 33957 (TRBV11-2, TRBJ2-2)
CASSLGGGELFF

SEQ ID NO: 67915 - protein, 14 aa, Homo sapiens
  CDR3 for alpha chain variable domain of TCR clone 33958 (TRAV12-2, TRAJ45)
YAVNSGGGADGLTF

SEQ ID NO: 67916 - protein, 18 aa, Homo sapiens
  CDR3 for beta chain variable domain of TCR clone 33958 (TRBV7-2, TRBJ2-7)
CASSLAQGLRDSSYEQYF

SEQ ID NO: 67917 - protein, 15 aa, Homo sapiens
  CDR3 for alpha chain variable domain of TCR clone 33959 (TRAV3, TRAJ47)
CAVRDIGEYGNRLVF

SEQ ID NO: 67918 - protein, 14 aa, Homo sapiens
  CDR3 for beta chain variable domain of TCR clone 33959 (TRBV13, TRBJ2-5)
CASSLERVGETQYF

SEQ ID NO: 67919 - protein, 18 aa, Homo sapiens
  CDR3 for alpha chain variable domain of TCR clone 33960 (TRAV1-2, TRAJ18)
CAVRDMGDRGSTLGRLYF

SEQ ID NO: 67920 - protein, 16 aa, Homo sapiens
  CDR3 for beta chain variable domain of TCR clone 33960 (TRBV29-1, TRBJ1-2)
CSVEANRDIANYGYTF

SEQ ID NO: 67921 - protein, 13 aa, Homo sapiens
  CDR3 for alpha chain variable domain of TCR clone 33961 (TRAV35, TRAJ44)
CAGLSGTASKPTF

SEQ ID NO: 67922 - protein, 17 aa, Homo sapiens
  CDR3 for beta chain variable domain of TCR clone 33961 (TRBV7-8, TRBJ1-2)
CASSLRPLQGHLYGYTF

SEQ ID NO: 67923 - protein, 11 aa, Homo sapiens
  CDR3 for alpha chain variable domain of TCR clone 33962 (TRAV1-2, TRAJ20)
CAVANDYKLSF

SEQ ID NO: 67924 - protein, 18 aa, Homo sapiens
  CDR3 for beta chain variable domain of TCR clone 33962 (TRBV20-1, TRBJ2-6)
CSAETTPTHGSGANVLAF

SEQ ID NO: 67925 - protein, 14 aa, Homo sapiens
  CDR3 for alpha chain variable domain of TCR clone 33963 (TRAV12-2, TRAJ40)
CAVKIPSGTYKYIF

SEQ ID NO: 67926 - protein, 15 aa, Homo sapiens
  CDR3 for beta chain variable domain of TCR clone 33963 (TRBV7-2, TRBJ2-1)
CASSSGLAGGNEQFF

SEQ ID NO: 67927 - protein, 14 aa, Homo sapiens
  CDR3 for alpha chain variable domain of TCR clone 33964 (TRAV1-2, TRAJ8)
CAVREDTGFQKLVF

SEQ ID NO: 67928 - protein, 16 aa, Homo sapiens
  CDR3 for beta chain variable domain of TCR clone 33964 (TRBV4-1, TRBJ2-3)
CASRQSTSGAEDTQYF

SEQ ID NO: 67929 - protein, 12 aa, Homo sapiens
  CDR3 for alpha chain variable domain of TCR clone 33965 (TRAV21, TRAJ13)
PGPSGGYQKVTF

SEQ ID NO: 67930 - protein, 15 aa, Homo sapiens
  CDR3 for beta chain variable domain of TCR clone 33965 (TRBV7-9, TRBJ1-6)
CASSSPGRGNSHLHF

SEQ ID NO: 67931 - protein, 19 aa, Homo sapiens
  CDR3 for alpha chain variable domain of TCR clone 33966 (TRAV26-1, TRAJ52)
CIVRAHRNAGGTSYGKLTF

SEQ ID NO: 67932 - protein, 15 aa, Homo sapiens
  CDR3 for beta chain variable domain of TCR clone 33966 (TRBV29-1, TRBJ2-1)
CSGRDRKSSYSEQFF

SEQ ID NO: 67933 - protein, 14 aa, Homo sapiens
  CDR3 for alpha chain variable domain of TCR clone 33967 (TRAV8-2, TRAJ4)
CVVSPSGGYNELIF

SEQ ID NO: 67934 - protein, 15 aa, Homo sapiens
  CDR3 for beta chain variable domain of TCR clone 33967 (TRBV4-1, TRBJ1-4)
CASSDTGGTNEKLFF

SEQ ID NO: 67935 - protein, 14 aa, Homo sapiens
  CDR3 for alpha chain variable domain of TCR clone 33968 (TRAV34, TRAJ22)
CGADTSGSAGQLTF

SEQ ID NO: 67936 - protein, 16 aa, Homo sapiens
  CDR3 for beta chain variable domain of TCR clone 33968 (TRBV2, TRBJ2-3)
CQHRGAPRRWTDTQYF

SEQ ID NO: 67937 - protein, 14 aa, Homo sapiens
  CDR3 for alpha chain variable domain of TCR clone 33969 (TRAV1-2, TRAJ16)
CAVNRFSDGQKLLF

SEQ ID NO: 67938 - protein, 13 aa, Homo sapiens
  CDR3 for beta chain variable domain of TCR clone 33969 (TRBV20-1, TRBJ1-1)
CSARGGGNTEASF

SEQ ID NO: 67939 - protein, 17 aa, Homo sapiens
  CDR3 for alpha chain variable domain of TCR clone 33970 (TRAV8-6, TRAJ58)
CAVSSWVGETSGSRLTF

SEQ ID NO: 67940 - protein, 14 aa, Homo sapiens
  CDR3 for beta chain variable domain of TCR clone 33970 (TRBV19, TRBJ2-1)
CASPTFVLSGERFF

SEQ ID NO: 67941 - protein, 14 aa, Homo sapiens
  CDR3 for alpha chain variable domain of TCR clone 33971 (TRAV35, TRAJ40)
CWQLGTSGTYKYIF

SEQ ID NO: 67942 - protein, 14 aa, Homo sapiens
  CDR3 for beta chain variable domain of TCR clone 33971 (TRBV7-3, TRBJ2-1)
CASSLAGGTNEQFF

SEQ ID NO: 67943 - protein, 15 aa, Homo sapiens
  CDR3 for alpha chain variable domain of TCR clone 33972 (TRAV8-3, TRAJ45)
CASSYSGGGADGLTF

SEQ ID NO: 67944 - protein, 13 aa, Homo sapiens
  CDR3 for beta chain variable domain of TCR clone 33972 (TRBV10-3, TRBJ2-7)
FASKLAVNYEQYF

SEQ ID NO: 67945 - protein, 19 aa, Homo sapiens
  CDR3 for alpha chain variable domain of TCR clone 33973 (TRAV2, TRAJ20)
ILQVREADAAVYRDCKLSF

SEQ ID NO: 67946 - protein, 13 aa, Homo sapiens
  CDR3 for beta chain variable domain of TCR clone 33973 (TRBV15, TRBJ1-6)
CATSGGLNPPLHF

SEQ ID NO: 67947 - protein, 20 aa, Homo sapiens
  CDR3 for alpha chain variable domain of TCR clone 33974 (TRAV26-1, TRAJ42)
CCVLLHRQTYYGGSQGNLIF

SEQ ID NO: 67948 - protein, 15 aa, Homo sapiens
  CDR3 for beta chain variable domain of TCR clone 33974 (TRBV7-3, TRBJ2-2)
CQQLKAGDLVRGAVF

SEQ ID NO: 67949 - protein, 15 aa, Homo sapiens
  CDR3 for alpha chain variable domain of TCR clone 33975 (TRAV25, TRAJ53)
CPTSNSGGSNYKLTF

SEQ ID NO: 67950 - protein, 13 aa, Homo sapiens
  CDR3 for beta chain variable domain of TCR clone 33975 (TRBV10-3, TRBJ2-7)
CASKLAVNYEQYF

SEQ ID NO: 67951 - protein, 11 aa, Homo sapiens
  CDR3 for alpha chain variable domain of TCR clone 33976 (TRAV17, TRAJ9)
RGFTGGFKTIF

SEQ ID NO: 67952 - protein, 14 aa, Homo sapiens
  CDR3 for beta chain variable domain of TCR clone 33976 (TRBV7-9, TRBJ2-2)
CASSLVQDTGELFF

SEQ ID NO: 67953 - protein, 17 aa, Homo sapiens
  CDR3 for alpha chain variable domain of TCR clone 33977 (TRAV26-1, TRAJ37)
CIVRVITVSSNTGKLIF

SEQ ID NO: 67954 - protein, 13 aa, Homo sapiens
  CDR3 for beta chain variable domain of TCR clone 33977 (TRBV12-4, TRBJ1-1)
CASSPGTGFEAFF

SEQ ID NO: 67955 - protein, 16 aa, Homo sapiens
  CDR3 for alpha chain variable domain of TCR clone 33978 (TRAV30, TRAJ44)
CGTEDKRTGTASKLTF

SEQ ID NO: 67956 - protein, 16 aa, Homo sapiens
  CDR3 for beta chain variable domain of TCR clone 33978 (TRBV10-2, TRBJ2-7)
CASSESPGSSGCEQYF

SEQ ID NO: 67957 - protein, 13 aa, Homo sapiens
  CDR3 for alpha chain variable domain of TCR clone 33979 (TRAV16, TRAJ26)
CITVLCLGQNFVF

SEQ ID NO: 67958 - protein, 13 aa, Homo sapiens
  CDR3 for beta chain variable domain of TCR clone 33979 (TRBV6-6, TRBJ2-1)
CASSLHQGDEQFF

SEQ ID NO: 67959 - protein, 16 aa, Homo sapiens
  CDR3 for alpha chain variable domain of TCR clone 33980 (TRAV35, TRAJ28)
CAGQRYSGAGSYQLTF

SEQ ID NO: 67960 - protein, 15 aa, Homo sapiens
  CDR3 for beta chain variable domain of TCR clone 33980 (TRBV19, TRBJ1-2)
CASSVGQVLNYGYTF

SEQ ID NO: 67961 - protein, 14 aa, Homo sapiens
  CDR3 for alpha chain variable domain of TCR clone 33981 (TRAV12-2, TRAJ40)
CAVKIPSGTYKCIF

SEQ ID NO: 67962 - protein, 14 aa, Homo sapiens
  CDR3 for beta chain variable domain of TCR clone 33981 (TRBV7-9, TRBJ1-2)
CASSRQGANYGYTF

SEQ ID NO: 67963 - protein, 18 aa, Homo sapiens
  CDR3 for alpha chain variable domain of TCR clone 33982 (TRAV21, TRAJ52)
CAVRPSPAGGTSHGKLTF

SEQ ID NO: 67964 - protein, 14 aa, Homo sapiens
  CDR3 for beta chain variable domain of TCR clone 33982 (TRBV4-1, TRBJ2-2)
CASSQAVNTGELFF

SEQ ID NO: 67965 - protein, 11 aa, Homo sapiens
  CDR3 for alpha chain variable domain of TCR clone 33983 (TRAV21, TRAJ11)
CAVNGYSTFTF

SEQ ID NO: 67966 - protein, 11 aa, Homo sapiens
  CDR3 for beta chain variable domain of TCR clone 33983 (TRBV19, TRBJ1-1)
CASSIGSEAFF

SEQ ID NO: 67967 - protein, 15 aa, Homo sapiens
  CDR3 for alpha chain variable domain of TCR clone 33984 (TRAV35, TRAJ58)
RAGRRQETSGSRLTF

SEQ ID NO: 67968 - protein, 16 aa, Homo sapiens
  CDR3 for beta chain variable domain of TCR clone 33984 (TRBV2, TRBJ2-1)
CASSVGGSLSYNEQFF

SEQ ID NO: 67969 - protein, 14 aa, Homo sapiens
  CDR3 for alpha chain variable domain of TCR clone 33985 (TRAV8-3, TRAJ4)
CAVGAAGDYNKLIF

SEQ ID NO: 67970 - protein, 15 aa, Homo sapiens
  CDR3 for beta chain variable domain of TCR clone 33985 (TRBV6-5, TRBJ2-1)
CASSYDAGAGNEQFF

SEQ ID NO: 67971 - protein, 15 aa, Homo sapiens
  CDR3 for alpha chain variable domain of TCR clone 33986 (TRAV8-4, TRAJ47)
CTVSDPEEYGNKLVF

SEQ ID NO: 67972 - protein, 15 aa, Homo sapiens
  CDR3 for beta chain variable domain of TCR clone 33986 (TRBV11-2, TRBJ2-1)
CASSLGPDSYNEQFF

SEQ ID NO: 67973 - protein, 14 aa, Homo sapiens
  CDR3 for alpha chain variable domain of TCR clone 33987 (TRAV12-2, TRAJ13)
CAVKKTGGYQKVTF

SEQ ID NO: 67974 - protein, 14 aa, Homo sapiens
  CDR3 for beta chain variable domain of TCR clone 33987 (TRBV20-1, TRBJ1-1)
CSAQTRIGGTEAFF

SEQ ID NO: 67975 - protein, 11 aa, Homo sapiens
  CDR3 for alpha chain variable domain of TCR clone 33988 (TRAV21, TRAJ48)
CAVDGNEKLTF

SEQ ID NO: 67976 - protein, 13 aa, Homo sapiens
  CDR3 for beta chain variable domain of TCR clone 33988 (TRBV7-3, TRBJ1-1)
CASSQDWGAEAFF

SEQ ID NO: 67977 - protein, 14 aa, Homo sapiens
  CDR3 for alpha chain variable domain of TCR clone 33989 (TRAV1-2, TRAJ16)
CAVNRFSDGQKLLF

SEQ ID NO: 67978 - protein, 16 aa, Homo sapiens
  CDR3 for beta chain variable domain of TCR clone 33989 (TRBV2, TRBJ1-3)
CASSRTGGSTGNTIYF

SEQ ID NO: 67979 - protein, 13 aa, Homo sapiens
  CDR3 for alpha chain variable domain of TCR clone 33990 (TRAV1-1, TRAJ13)
CAVSSGGYQKVTF

SEQ ID NO: 67980 - protein, 12 aa, Homo sapiens
  CDR3 for beta chain variable domain of TCR clone 33990 (TRBV28, TRBJ2-1)
CASSVQINEQFF

SEQ ID NO: 67981 - protein, 16 aa, Homo sapiens
  CDR3 for alpha chain variable domain of TCR clone 33991 (TRAV12-3, TRAJ53)
CAMSPGSGGSNYKLTF

SEQ ID NO: 67982 - protein, 16 aa, Homo sapiens
  CDR3 for beta chain variable domain of TCR clone 33991 (TRBV4-2, TRBJ1-1)
CASSQAGFGMNTEASF

SEQ ID NO: 67983 - protein, 11 aa, Homo sapiens
  CDR3 for alpha chain variable domain of TCR clone 33992 (TRAV21, TRAJ34)
CAHYNTDKLIF

SEQ ID NO: 67984 - protein, 13 aa, Homo sapiens
  CDR3 for beta chain variable domain of TCR clone 33992 (TRBV7-6, TRBJ1-2)
CASSLVADYGYTS

SEQ ID NO: 67985 - protein, 18 aa, Homo sapiens
  CDR3 for alpha chain variable domain of TCR clone 33993 (TRAV26-1, TRAJ23)
CIVRVGLEVWNHGGKLIF

SEQ ID NO: 67986 - protein, 16 aa, Homo sapiens
  CDR3 for beta chain variable domain of TCR clone 33993 (TRBV12-4, TRBJ2-5)
CASSFFVRGRQETQYF

SEQ ID NO: 67987 - protein, 12 aa, Homo sapiens
  CDR3 for alpha chain variable domain of TCR clone 33994 (TRAV1-2, TRAJ24)
CAVGGSWGKFQF

SEQ ID NO: 67988 - protein, 15 aa, Homo sapiens
  CDR3 for beta chain variable domain of TCR clone 33994 (TRBV6-1, TRBJ2-7)
CASSEGVGNTYEQYF

SEQ ID NO: 67989 - protein, 12 aa, Homo sapiens
  CDR3 for alpha chain variable domain of TCR clone 33995 (TRAV2, TRAJ31)
CAVEDKNARLMF

SEQ ID NO: 67990 - protein, 16 aa, Homo sapiens
  CDR3 for beta chain variable domain of TCR clone 33995 (TRBV10-3, TRBJ2-1)
CAISGVGDGGGGEQFF

SEQ ID NO: 67991 - protein, 14 aa, Homo sapiens
  CDR3 for alpha chain variable domain of TCR clone 33996 (TRAV1-1, TRAJ27)
CAVIYNTNAGKSTF

SEQ ID NO: 67992 - protein, 15 aa, Homo sapiens
  CDR3 for beta chain variable domain of TCR clone 33996 (TRBV7-2, TRBJ2-1)
CASSSGLAGGNGQFF

SEQ ID NO: 67993 - protein, 10 aa, Homo sapiens
  CDR3 for alpha chain variable domain of TCR clone 33997 (TRAV8-4, TRAJ43)
CAVSADDMRF

SEQ ID NO: 67994 - protein, 15 aa, Homo sapiens
  CDR3 for beta chain variable domain of TCR clone 33997 (TRBV5-1, TRBJ2-3)
CASSVTPGSTDTQYF

SEQ ID NO: 67995 - protein, 16 aa, Homo sapiens
  CDR3 for alpha chain variable domain of TCR clone 33998 (TRAV4, TRAJ22)
CLVGDLYSGSARQLTF

SEQ ID NO: 67996 - protein, 16 aa, Homo sapiens
  CDR3 for beta chain variable domain of TCR clone 33998 (TRBV7-9, TRBJ2-1)
CASSDVAGGSYNEQFV

SEQ ID NO: 67997 - protein, 15 aa, Homo sapiens
  CDR3 for alpha chain variable domain of TCR clone 33999 (TRAV12-2, TRAJ43)
CAFDMRFGAGTRLTV

SEQ ID NO: 67998 - protein, 13 aa, Homo sapiens
  CDR3 for beta chain variable domain of TCR clone 33999 (TRBV27, TRBJ2-1)
CASRTLGVGEQFF

SEQ ID NO: 67999 - protein, 14 aa, Homo sapiens
  CDR3 for alpha chain variable domain of TCR clone 34000 (TRAV16, TRAJ33)
CALSAMDSNYQLIW

SEQ ID NO: 68000 - protein, 16 aa, Homo sapiens
  CDR3 for beta chain variable domain of TCR clone 34000 (TRBV13, TRBJ2-2)
CASSPRTGEHTGELFF

SEQ ID NO: 68001 - protein, 11 aa, Homo sapiens
  CDR3 for alpha chain variable domain of TCR clone 34001 (TRAV21, TRAJ11)
CAVKGYSTLTF

SEQ ID NO: 68002 - protein, 16 aa, Homo sapiens
  CDR3 for beta chain variable domain of TCR clone 34001 (TRBV4-3, TRBJ2-2)
CASSHLQGSGTGELFF

SEQ ID NO: 68003 - protein, 15 aa, Homo sapiens
  CDR3 for alpha chain variable domain of TCR clone 34002 (TRAV8-1, TRAJ6)
CAVNTPPGGSYIPTF

SEQ ID NO: 68004 - protein, 15 aa, Homo sapiens
  CDR3 for beta chain variable domain of TCR clone 34002 (TRBV6-3, TRBJ2-7)
CASSSPGTVFYEQYF

SEQ ID NO: 68005 - protein, 15 aa, Homo sapiens
  CDR3 for alpha chain variable domain of TCR clone 34003 (TRAV35, TRAJ40)
CAGQLGTSGTYKYIF

SEQ ID NO: 68006 - protein, 14 aa, Homo sapiens
  CDR3 for beta chain variable domain of TCR clone 34003 (TRBV7-3, TRBJ2-1)
CVSSLAGGTNEQFF

SEQ ID NO: 68007 - protein, 12 aa, Homo sapiens
  CDR3 for alpha chain variable domain of TCR clone 34004 (TRAV13-1, TRAJ49)
CAASPMGNQFYF

SEQ ID NO: 68008 - protein, 13 aa, Homo sapiens
  CDR3 for beta chain variable domain of TCR clone 34004 (TRBV20-1, TRBJ2-2)
CGASAAGTGELFF

SEQ ID NO: 68009 - protein, 14 aa, Homo sapiens
  CDR3 for alpha chain variable domain of TCR clone 34005 (TRAV17, TRAJ32)
CATEPGGATNKLIF

SEQ ID NO: 68010 - protein, 14 aa, Homo sapiens
  CDR3 for beta chain variable domain of TCR clone 34005 (TRBV2, TRBJ1-5)
CASSENRGGQPQHF

SEQ ID NO: 68011 - protein, 13 aa, Homo sapiens
  CDR3 for alpha chain variable domain of TCR clone 34006 (TRAV27, TRAJ8)
CAGGPTGLQKLVF

SEQ ID NO: 68012 - protein, 15 aa, Homo sapiens
  CDR3 for beta chain variable domain of TCR clone 34006 (TRBV6-1, TRBJ2-7)
CASSESMGDFYEQYF

SEQ ID NO: 68013 - protein, 17 aa, Homo sapiens
  CDR3 for alpha chain variable domain of TCR clone 34007 (TRAV12-3, TRAJ6)
CAMSARGGAGGSYIHTF

SEQ ID NO: 68014 - protein, 12 aa, Homo sapiens
  CDR3 for beta chain variable domain of TCR clone 34007 (TRBV12-4, TRBJ2-3)
CASSTLPDTQYF

SEQ ID NO: 68015 - protein, 15 aa, Homo sapiens
  CDR3 for alpha chain variable domain of TCR clone 34008 (TRAV35, TRAJ53)
CVGLTQAGSNYKLTF

SEQ ID NO: 68016 - protein, 13 aa, Homo sapiens
  CDR3 for beta chain variable domain of TCR clone 34008 (TRBV20-1, TRBJ1-1)
CSAVDGTLNEAFF

SEQ ID NO: 68017 - protein, 14 aa, Homo sapiens
  CDR3 for alpha chain variable domain of TCR clone 34009 (TRAV16, TRAJ54)
CALSGVQGARKLVF

SEQ ID NO: 68018 - protein, 15 aa, Homo sapiens
  CDR3 for beta chain variable domain of TCR clone 34009 (TRBV18, TRBJ2-2)
CASSTSGLHTGELFF

SEQ ID NO: 68019 - protein, 11 aa, Homo sapiens
  CDR3 for alpha chain variable domain of TCR clone 34010 (TRAV21, TRAJ48)
CAVDGNEKLTF

SEQ ID NO: 68020 - protein, 16 aa, Homo sapiens
  CDR3 for beta chain variable domain of TCR clone 34010 (TRBV12-4, TRBJ1-5)
CASSSGPRGSDQPQHF

SEQ ID NO: 68021 - protein, 14 aa, Homo sapiens
  CDR3 for alpha chain variable domain of TCR clone 34011 (TRAV1-2, TRAJ16)
CAVNRFSDGQKLPF

SEQ ID NO: 68022 - protein, 15 aa, Homo sapiens
  CDR3 for beta chain variable domain of TCR clone 34011 (TRBV5-8, TRBJ1-1)
CASSFSGTSLKGAFF

SEQ ID NO: 68023 - protein, 12 aa, Homo sapiens
  CDR3 for alpha chain variable domain of TCR clone 34012 (TRAV12-3, TRAJ17)
CAMTLTGNKLTF

SEQ ID NO: 68024 - protein, 14 aa, Homo sapiens
  CDR3 for beta chain variable domain of TCR clone 34012 (TRBV7-2, TRBJ2-5)
CASSPRGSSETQYF

SEQ ID NO: 68025 - protein, 21 aa, Homo sapiens
  CDR3 for alpha chain variable domain of TCR clone 34013 (TRAV1-1, TRAJ6)
CLLLLRCERLERTGGSYIPTF

SEQ ID NO: 68026 - protein, 14 aa, Homo sapiens
  CDR3 for beta chain variable domain of TCR clone 34013 (TRBV4-1, TRBJ2-2)
CASSQAVNTGELFF

SEQ ID NO: 68027 - protein, 15 aa, Homo sapiens
  CDR3 for alpha chain variable domain of TCR clone 34014 (TRAV12-3, TRAJ6)
CAMSATTGGSYIPTF

SEQ ID NO: 68028 - protein, 13 aa, Homo sapiens
  CDR3 for beta chain variable domain of TCR clone 34014 (TRBV7-9, TRBJ1-2)
CASSLKQNYGCTF

SEQ ID NO: 68029 - protein, 14 aa, Homo sapiens
  CDR3 for alpha chain variable domain of TCR clone 34015 (TRAV17, TRAJ54)
CATDANQGAKKLVF

SEQ ID NO: 68030 - protein, 12 aa, Homo sapiens
  CDR3 for beta chain variable domain of TCR clone 34015 (TRBV6-3, TRBJ2-1)
CASSGSYNEQFF

SEQ ID NO: 68031 - protein, 13 aa, Homo sapiens
  CDR3 for alpha chain variable domain of TCR clone 34016 (TRAV27, TRAJ41)
CAGEGHSGYALNF

SEQ ID NO: 68032 - protein, 14 aa, Homo sapiens
  CDR3 for beta chain variable domain of TCR clone 34016 (TRBV7-2, TRBJ1-1)
CASSFLTGTTEAFF

SEQ ID NO: 68033 - protein, 14 aa, Homo sapiens
  CDR3 for alpha chain variable domain of TCR clone 34017 (TRAV35, TRAJ42)
CCVHYGGSQGNLIF

SEQ ID NO: 68034 - protein, 18 aa, Homo sapiens
  CDR3 for beta chain variable domain of TCR clone 34017 (TRBV13, TRBJ2-6)
CASSPMTSGGSGANVLTF

SEQ ID NO: 68035 - protein, 12 aa, Homo sapiens
  CDR3 for alpha chain variable domain of TCR clone 34018 (TRAV13-1, TRAJ16)
CAAVSDGQKLLF

SEQ ID NO: 68036 - protein, 14 aa, Homo sapiens
  CDR3 for beta chain variable domain of TCR clone 34018 (TRBV4-2, TRBJ2-1)
CASGLDRAYNEQFF

SEQ ID NO: 68037 - protein, 14 aa, Homo sapiens
  CDR3 for alpha chain variable domain of TCR clone 34019 (TRAV3, TRAJ9)
CAVRDDTGGLKTIF

SEQ ID NO: 68038 - protein, 18 aa, Homo sapiens
  CDR3 for beta chain variable domain of TCR clone 34019 (TRBV20-1, TRBJ2-6)
CSAETTPTHGSGANVLTF

SEQ ID NO: 68039 - protein, 13 aa, Homo sapiens
  CDR3 for alpha chain variable domain of TCR clone 34020 (TRAV3, TRAJ20)
CAVRSLNEYKLSF

SEQ ID NO: 68040 - protein, 13 aa, Homo sapiens
  CDR3 for beta chain variable domain of TCR clone 34020 (TRBV6-1, TRBJ2-1)
CAGMDPTNNEQFF

SEQ ID NO: 68041 - protein, 15 aa, Homo sapiens
  CDR3 for alpha chain variable domain of TCR clone 34021 (TRAV23/DV6, TRAJ37)
CAAGEGSSNTGNLIF

SEQ ID NO: 68042 - protein, 17 aa, Homo sapiens
  CDR3 for beta chain variable domain of TCR clone 34021 (TRBV20-1, TRBJ2-7)
CSATRAGGVAGVEEQYF

SEQ ID NO: 68043 - protein, 15 aa, Homo sapiens
  CDR3 for alpha chain variable domain of TCR clone 34022 (TRAV13-2, TRAJ42)
CAENNYGGSQGNLIF

SEQ ID NO: 68044 - protein, 16 aa, Homo sapiens
  CDR3 for beta chain variable domain of TCR clone 34022 (TRBV4-1, TRBJ1-6)
CASSQEPQGVGSPLHF

SEQ ID NO: 68045 - protein, 18 aa, Homo sapiens
  CDR3 for alpha chain variable domain of TCR clone 34023 (TRAV1-2, TRAJ18)
CAVRDMGDRGSTLGRLYL

SEQ ID NO: 68046 - protein, 16 aa, Homo sapiens
  CDR3 for beta chain variable domain of TCR clone 34023 (TRBV29-1, TRBJ1-2)
CSVEANRDIANYGYTF

SEQ ID NO: 68047 - protein, 13 aa, Homo sapiens
  CDR3 for alpha chain variable domain of TCR clone 34024 (TRAV3, TRAJ20)
CAVRDTGDYKFSF

SEQ ID NO: 68048 - protein, 15 aa, Homo sapiens
  CDR3 for beta chain variable domain of TCR clone 34024 (TRBV6-1, TRBJ2-7)
CASSEGGGVSYEQYF

SEQ ID NO: 68049 - protein, 14 aa, Homo sapiens
  CDR3 for alpha chain variable domain of TCR clone 34025 (TRAV29/DV5, TRAJ36)
CAARRKTGANNLFF

SEQ ID NO: 68050 - protein, 12 aa, Homo sapiens
  CDR3 for beta chain variable domain of TCR clone 34025 (TRBV29-1, TRBJ2-3)
CSVTGGADTQYF

SEQ ID NO: 68051 - protein, 14 aa, Homo sapiens
  CDR3 for alpha chain variable domain of TCR clone 34026 (TRAV12-2, TRAJ40)
CAVKIPSGTYKYSF

SEQ ID NO: 68052 - protein, 14 aa, Homo sapiens
  CDR3 for beta chain variable domain of TCR clone 34026 (TRBV20-1, TRBJ1-1)
CSAQTRIGGTEAFF

SEQ ID NO: 68053 - protein, 15 aa, Homo sapiens
  CDR3 for alpha chain variable domain of TCR clone 34027 (TRAV23/DV6, TRAJ18)
CAARYRGSTLGRLYF

SEQ ID NO: 68054 - protein, 13 aa, Homo sapiens
  CDR3 for beta chain variable domain of TCR clone 34027 (TRBV7-2, TRBJ2-7)
CASSSPSGSERYF

SEQ ID NO: 68055 - protein, 13 aa, Homo sapiens
  CDR3 for alpha chain variable domain of TCR clone 34028 (TRAV12-2, TRAJ6)
CAVNVSRELHTYI

SEQ ID NO: 68056 - protein, 12 aa, Homo sapiens
  CDR3 for beta chain variable domain of TCR clone 34028 (TRBV29-1, TRBJ2-3)
CSVTGGADTQYF

SEQ ID NO: 68057 - protein, 16 aa, Homo sapiens
  CDR3 for alpha chain variable domain of TCR clone 34029 (TRAV23/DV6, TRAJ9)
CAASIGGNTGGFKTIF

SEQ ID NO: 68058 - protein, 13 aa, Homo sapiens
  CDR3 for beta chain variable domain of TCR clone 34029 (TRBV12-4, TRBJ1-2)
CASSLRQGKGYTF

SEQ ID NO: 68059 - protein, 15 aa, Homo sapiens
  CDR3 for alpha chain variable domain of TCR clone 34030 (TRAV26-1, TRAJ29)
CIVRVEGSGNTPLVF

SEQ ID NO: 68060 - protein, 13 aa, Homo sapiens
  CDR3 for beta chain variable domain of TCR clone 34030 (TRBV7-9, TRBJ2-7)
CASSFAGAYEQYF

SEQ ID NO: 68061 - protein, 12 aa, Homo sapiens
  CDR3 for alpha chain variable domain of TCR clone 34031 (TRAV13-1, TRAJ15)
CVASQAGTALIF

SEQ ID NO: 68062 - protein, 14 aa, Homo sapiens
  CDR3 for beta chain variable domain of TCR clone 34031 (TRBV19, TRBJ2-2)
CASSTLHRSGELFF

SEQ ID NO: 68063 - protein, 12 aa, Homo sapiens
  CDR3 for alpha chain variable domain of TCR clone 34032 (TRAV17, TRAJ57)
CDTDGGSEKLVF

SEQ ID NO: 68064 - protein, 13 aa, Homo sapiens
  CDR3 for beta chain variable domain of TCR clone 34032 (TRBV7-9, TRBJ2-7)
CASSFAGAYEQYF

SEQ ID NO: 68065 - protein, 10 aa, Homo sapiens
  CDR3 for alpha chain variable domain of TCR clone 34033 (TRAV1-2, TRAJ20)
CALNDCKLSF

SEQ ID NO: 68066 - protein, 14 aa, Homo sapiens
  CDR3 for beta chain variable domain of TCR clone 34033 (TRBV19, TRBJ2-1)
CASPTFVLSGERFF

SEQ ID NO: 68067 - protein, 17 aa, Homo sapiens
  CDR3 for alpha chain variable domain of TCR clone 34034 (TRAV27, TRAJ26)
CAGARAPLDNYGQNFAF

SEQ ID NO: 68068 - protein, 15 aa, Homo sapiens
  CDR3 for beta chain variable domain of TCR clone 34034 (TRBV11-2, TRBJ2-5)
CASSPRSGGLETQYF

SEQ ID NO: 68069 - protein, 13 aa, Homo sapiens
  CDR3 for alpha chain variable domain of TCR clone 34035 (TRAV21, TRAJ57)
CAVTQGGSEKLVF

SEQ ID NO: 68070 - protein, 16 aa, Homo sapiens
  CDR3 for beta chain variable domain of TCR clone 34035 (TRBV29-1, TRBJ2-7)
CSVEDAEYGTAYEQYF

SEQ ID NO: 68071 - protein, 12 aa, Homo sapiens
  CDR3 for alpha chain variable domain of TCR clone 34036 (TRAV16, TRAJ10)
CSRTGGGNKLTF

SEQ ID NO: 68072 - protein, 15 aa, Homo sapiens
  CDR3 for beta chain variable domain of TCR clone 34036 (TRBV6-3, TRBJ2-7)
CASSSPGTVFYEKYF

SEQ ID NO: 68073 - protein, 15 aa, Homo sapiens
  CDR3 for alpha chain variable domain of TCR clone 34037 (TRAV12-1, TRAJ44)
CVADLPTGTASKLTF

SEQ ID NO: 68074 - protein, 13 aa, Homo sapiens
  CDR3 for beta chain variable domain of TCR clone 34037 (TRBV6-5, TRBJ2-5)
CASSHQGGETQYF

SEQ ID NO: 68075 - protein, 11 aa, Homo sapiens
  CDR3 for alpha chain variable domain of TCR clone 34038 (TRAV27, TRAJ40)
SLTSGTYKYIF

SEQ ID NO: 68076 - protein, 12 aa, Homo sapiens
  CDR3 for beta chain variable domain of TCR clone 34038 (TRBV2, TRBJ2-5)
RQRDSVPRDQYF

SEQ ID NO: 68077 - protein, 11 aa, Homo sapiens
  CDR3 for alpha chain variable domain of TCR clone 34039 (TRAV35, TRAJ34)
CCARNTDKLIF

SEQ ID NO: 68078 - protein, 14 aa, Homo sapiens
  CDR3 for beta chain variable domain of TCR clone 34039 (TRBV5-1, TRBJ2-7)
CASSRGESLYEQYF

SEQ ID NO: 68079 - protein, 13 aa, Homo sapiens
  CDR3 for alpha chain variable domain of TCR clone 34040 (TRAV1-2, TRAJ9)
CAALNTGGFKTIF

SEQ ID NO: 68080 - protein, 11 aa, Homo sapiens
  CDR3 for beta chain variable domain of TCR clone 34040 (TRBV11-3, TRBJ2-1)
CASSLGNEQFF

SEQ ID NO: 68081 - protein, 12 aa, Homo sapiens
  CDR3 for alpha chain variable domain of TCR clone 34041 (TRAV12-2, TRAJ30)
CAVRNRDDRIIF

SEQ ID NO: 68082 - protein, 15 aa, Homo sapiens
  CDR3 for beta chain variable domain of TCR clone 34041 (TRBV6-3, TRBJ1-5)
CASRVDRWSNQPQHF

SEQ ID NO: 68083 - protein, 12 aa, Homo sapiens
  CDR3 for alpha chain variable domain of TCR clone 34042 (TRAV21, TRAJ11)
CAAPSGYSTLTF

SEQ ID NO: 68084 - protein, 14 aa, Homo sapiens
  CDR3 for beta chain variable domain of TCR clone 34042 (TRBV20-1, TRBJ2-7)
CSAPELAGVGEQYF

SEQ ID NO: 68085 - protein, 12 aa, Homo sapiens
  CDR3 for alpha chain variable domain of TCR clone 34043 (TRAV1-1, TRAJ39)
CAVPVVGNMLTF

SEQ ID NO: 68086 - protein, 15 aa, Homo sapiens
  CDR3 for beta chain variable domain of TCR clone 34043 (TRBV19, TRBJ1-6)
CASSTQGALGSPLHF

SEQ ID NO: 68087 - protein, 11 aa, Homo sapiens
  CDR3 for alpha chain variable domain of TCR clone 34044 (TRAV12-3, TRAJ43)
CAMSVSNDMRF

SEQ ID NO: 68088 - protein, 13 aa, Homo sapiens
  CDR3 for beta chain variable domain of TCR clone 34044 (TRBV20-1, TRBJ1-1)
CNAPLGGGTEAFF

SEQ ID NO: 68089 - protein, 13 aa, Homo sapiens
  CDR3 for alpha chain variable domain of TCR clone 34045 (TRAV13-1, TRAJ11)
CAAVLAGYSTLTF

SEQ ID NO: 68090 - protein, 17 aa, Homo sapiens
  CDR3 for beta chain variable domain of TCR clone 34045 (TRBV25-1, TRBJ2-7)
SASSDARVVFSSYEQYF

SEQ ID NO: 68091 - protein, 16 aa, Homo sapiens
  CDR3 for alpha chain variable domain of TCR clone 34046 (TRAV12-3, TRAJ53)
CAMSPGSGGSNYKLTF

SEQ ID NO: 68092 - protein, 11 aa, Homo sapiens
  CDR3 for beta chain variable domain of TCR clone 34046 (TRBV29-1, TRBJ2-5)
CSEDRTGSQYF

SEQ ID NO: 68093 - protein, 14 aa, Homo sapiens
  CDR3 for alpha chain variable domain of TCR clone 34047 (TRAV17, TRAJ6)
CATDASGGSYIPTF

SEQ ID NO: 68094 - protein, 19 aa, Homo sapiens
  CDR3 for beta chain variable domain of TCR clone 34047 (TRBV4-3, TRBJ2-7)
CASSREFIGWQVTPYEQYF

SEQ ID NO: 68095 - protein, 13 aa, Homo sapiens
  CDR3 for alpha chain variable domain of TCR clone 34048 (TRAV36/DV7, TRAJ7)
CAGTRYRNNRLAF

SEQ ID NO: 68096 - protein, 14 aa, Homo sapiens
  CDR3 for beta chain variable domain of TCR clone 34048 (TRBV19, TRBJ2-1)
CASPTFVLSGEQFF

SEQ ID NO: 68097 - protein, 16 aa, Homo sapiens
  CDR3 for alpha chain variable domain of TCR clone 34049 (TRAV30, TRAJ24)
CGTEIVDADSWGKFQF

SEQ ID NO: 68098 - protein, 13 aa, Homo sapiens
  CDR3 for beta chain variable domain of TCR clone 34049 (TRBV7-3, TRBJ1-1)
CASSQGWGAEAFF

SEQ ID NO: 68099 - protein, 12 aa, Homo sapiens
  CDR3 for alpha chain variable domain of TCR clone 34050 (TRAV2, TRAJ31)
CAVEDNNARLMF

SEQ ID NO: 68100 - protein, 14 aa, Homo sapiens
  CDR3 for beta chain variable domain of TCR clone 34050 (TRBV25-1, TRBJ1-1)
CASTHLGGNTEAFF

SEQ ID NO: 68101 - protein, 17 aa, Homo sapiens
  CDR3 for alpha chain variable domain of TCR clone 34051 (TRAV3, TRAJ6)
CAVRDGPRAGGSYIPTF

SEQ ID NO: 68102 - protein, 12 aa, Homo sapiens
  CDR3 for beta chain variable domain of TCR clone 34051 (TRBV5-7, TRBJ2-7)
CASSVQGGEQYF

SEQ ID NO: 68103 - protein, 13 aa, Homo sapiens
  CDR3 for alpha chain variable domain of TCR clone 34052 (TRAV23/DV6, TRAJ10)
ASVLTGGGNKLTF

SEQ ID NO: 68104 - protein, 13 aa, Homo sapiens
  CDR3 for beta chain variable domain of TCR clone 34052 (TRBV11-1, TRBJ1-2)
CASVGSWGYGYAF

SEQ ID NO: 68105 - protein, 14 aa, Homo sapiens
  CDR3 for alpha chain variable domain of TCR clone 34053 (TRAV12-2, TRAJ13)
CAVKKTGGYQKVTF

SEQ ID NO: 68106 - protein, 15 aa, Homo sapiens
  CDR3 for beta chain variable domain of TCR clone 34053 (TRBV2, TRBJ2-1)
CQPEPSGGKYNEQFF

SEQ ID NO: 68107 - protein, 15 aa, Homo sapiens
  CDR3 for alpha chain variable domain of TCR clone 34054 (TRAV35, TRAJ50)
CAGQLRKTSYYKVIF

SEQ ID NO: 68108 - protein, 12 aa, Homo sapiens
  CDR3 for beta chain variable domain of TCR clone 34054 (TRBV5-1, TRBJ2-5)
CASSLGLETQYF

SEQ ID NO: 68109 - protein, 16 aa, Homo sapiens
  CDR3 for alpha chain variable domain of TCR clone 34055 (TRAV13-1, TRAJ40)
CAASIATTSGTYKYIF

SEQ ID NO: 68110 - protein, 13 aa, Homo sapiens
  CDR3 for beta chain variable domain of TCR clone 34055 (TRBV19, TRBJ1-2)
CASSQGQVYGYTF

SEQ ID NO: 68111 - protein, 13 aa, Homo sapiens
  CDR3 for alpha chain variable domain of TCR clone 34056 (TRAV12-2, TRAJ10)
CAVPTGGGNKLTF

SEQ ID NO: 68112 - protein, 11 aa, Homo sapiens
  CDR3 for beta chain variable domain of TCR clone 34056 (TRBV6-1, TRBJ2-1)
CASSSSNEQFF

SEQ ID NO: 68113 - protein, 14 aa, Homo sapiens
  CDR3 for alpha chain variable domain of TCR clone 34057 (TRAV38-1, TRAJ40)
CALRPTSGTYKYIF

SEQ ID NO: 68114 - protein, 14 aa, Homo sapiens
  CDR3 for beta chain variable domain of TCR clone 34057 (TRBV12-4, TRBJ1-1)
CASSLGTGGTEAFF

SEQ ID NO: 68115 - protein, 12 aa, Homo sapiens
  CDR3 for alpha chain variable domain of TCR clone 34058 (TRAV12-2, TRAJ43)
CAVNVNNNDMRF

SEQ ID NO: 68116 - protein, 14 aa, Homo sapiens
  CDR3 for beta chain variable domain of TCR clone 34058 (TRBV25-1, TRBJ2-2)
CAGSELGLPGELFF

SEQ ID NO: 68117 - protein, 12 aa, Homo sapiens
  CDR3 for alpha chain variable domain of TCR clone 34059 (TRAV26-2, TRAJ48)
CTLRKGNEKLTF

SEQ ID NO: 68118 - protein, 14 aa, Homo sapiens
  CDR3 for beta chain variable domain of TCR clone 34059 (TRBV28, TRBJ2-7)
CASSTLRGRFEQYF

SEQ ID NO: 68119 - protein, 13 aa, Homo sapiens
  CDR3 for alpha chain variable domain of TCR clone 34060 (TRAV1-2, TRAJ9)
CAALNTRGFKTIF

SEQ ID NO: 68120 - protein, 14 aa, Homo sapiens
  CDR3 for beta chain variable domain of TCR clone 34060 (TRBV7-2, TRBJ2-1)
CASSLGVGYNEQFF

SEQ ID NO: 68121 - protein, 13 aa, Homo sapiens
  CDR3 for alpha chain variable domain of TCR clone 34061 (TRAV21, TRAJ27)
CAARPGNAGKSTF

SEQ ID NO: 68122 - protein, 13 aa, Homo sapiens
  CDR3 for beta chain variable domain of TCR clone 34061 (TRBV27, TRBJ1-1)
CASSLSIGAEAFF

SEQ ID NO: 68123 - protein, 14 aa, Homo sapiens
  CDR3 for alpha chain variable domain of TCR clone 34062 (TRAV12-2, TRAJ5)
CAVKGDTGRRALTF

SEQ ID NO: 68124 - protein, 12 aa, Homo sapiens
  CDR3 for beta chain variable domain of TCR clone 34062 (TRBV19, TRBJ1-5)
CASSIAQQPQHF

SEQ ID NO: 68125 - protein, 12 aa, Homo sapiens
  CDR3 for alpha chain variable domain of TCR clone 34063 (TRAV13-1, TRAJ49)
CAAPNTGNQFYF

SEQ ID NO: 68126 - protein, 17 aa, Homo sapiens
  CDR3 for beta chain variable domain of TCR clone 34063 (TRBV25-1, TRBJ2-7)
CASSDARVAFSSYEQYF

SEQ ID NO: 68127 - protein, 10 aa, Homo sapiens
  CDR3 for alpha chain variable domain of TCR clone 34064 (TRAV25, TRAJ21)
CLYNFNKFYF

SEQ ID NO: 68128 - protein, 18 aa, Homo sapiens
  CDR3 for beta chain variable domain of TCR clone 34064 (TRBV19, TRBJ2-6)
CASSADRAGSSGANVLTF

SEQ ID NO: 68129 - protein, 14 aa, Homo sapiens
  CDR3 for alpha chain variable domain of TCR clone 34065 (TRAV3, TRAJ9)
CAVRLNTGGFKTIF

SEQ ID NO: 68130 - protein, 15 aa, Homo sapiens
  CDR3 for beta chain variable domain of TCR clone 34065 (TRBV27, TRBJ1-4)
CASSAQRDLNEKLFF

SEQ ID NO: 68131 - protein, 11 aa, Homo sapiens
  CDR3 for alpha chain variable domain of TCR clone 34066 (TRAV29/DV5, TRAJ37)
CATSNTGKLIF

SEQ ID NO: 68132 - protein, 12 aa, Homo sapiens
  CDR3 for beta chain variable domain of TCR clone 34066 (TRBV11-2, TRBJ2-2)
CASSLPTGELFF

SEQ ID NO: 68133 - protein, 12 aa, Homo sapiens
  CDR3 for alpha chain variable domain of TCR clone 34067 (TRAV17, TRAJ4)
CATAGGYNKLIF

SEQ ID NO: 68134 - protein, 13 aa, Homo sapiens
  CDR3 for beta chain variable domain of TCR clone 34067 (TRBV29-1, TRBJ2-2)
CSTTGVNTGELFF

SEQ ID NO: 68135 - protein, 16 aa, Homo sapiens
  CDR3 for alpha chain variable domain of TCR clone 34068 (TRAV8-3, TRAJ13)
CAVGAYPSGGYQKVPF

SEQ ID NO: 68136 - protein, 15 aa, Homo sapiens
  CDR3 for beta chain variable domain of TCR clone 34068 (TRBV19, TRBJ1-5)
CASSIVWADNQPQHF

SEQ ID NO: 68137 - protein, 12 aa, Homo sapiens
  CDR3 for alpha chain variable domain of TCR clone 34069 (TRAV2, TRAJ9)
CAVGAGGFKTIF

SEQ ID NO: 68138 - protein, 13 aa, Homo sapiens
  CDR3 for beta chain variable domain of TCR clone 34069 (TRBV19, TRBJ2-7)
CASSIDRTYEQYF

SEQ ID NO: 68139 - protein, 15 aa, Homo sapiens
  CDR3 for alpha chain variable domain of TCR clone 34070 (TRAV12-3, TRAJ13)
CAMSARSGGYQKVTF

SEQ ID NO: 68140 - protein, 16 aa, Homo sapiens
  CDR3 for beta chain variable domain of TCR clone 34070 (TRBV20-1, TRBJ2-1)
CSARDLKQGMNNGQFF

SEQ ID NO: 68141 - protein, 14 aa, Homo sapiens
  CDR3 for alpha chain variable domain of TCR clone 34071 (TRAV2, TRAJ37)
CAVDFTSNTGKLIF

SEQ ID NO: 68142 - protein, 16 aa, Homo sapiens
  CDR3 for beta chain variable domain of TCR clone 34071 (TRBV19, TRBJ2-1)
CASSKAGPSSYNEQFS

SEQ ID NO: 68143 - protein, 15 aa, Homo sapiens
  CDR3 for alpha chain variable domain of TCR clone 34072 (TRAV34, TRAJ38)
CGADFTSGNNRKLIW

SEQ ID NO: 68144 - protein, 16 aa, Homo sapiens
  CDR3 for beta chain variable domain of TCR clone 34072 (TRBV12-5, TRBJ2-5)
CASGPRTNGNQETQYF

SEQ ID NO: 68145 - protein, 13 aa, Homo sapiens
  CDR3 for alpha chain variable domain of TCR clone 34073 (TRAV21, TRAJ27)
CAARPGNAGKSTF

SEQ ID NO: 68146 - protein, 14 aa, Homo sapiens
  CDR3 for beta chain variable domain of TCR clone 34073 (TRBV7-6, TRBJ2-3)
CASTLGTVTDTQYF

SEQ ID NO: 68147 - protein, 15 aa, Homo sapiens
  CDR3 for alpha chain variable domain of TCR clone 34074 (TRAV12-3, TRAJ42)
CAMSGHGGSQGNLIF

SEQ ID NO: 68148 - protein, 11 aa, Homo sapiens
  CDR3 for beta chain variable domain of TCR clone 34074 (TRBV12-4, TRBJ2-3)
CASTATDTQYF

SEQ ID NO: 68149 - protein, 12 aa, Homo sapiens
  CDR3 for alpha chain variable domain of TCR clone 34075 (TRAV13-1, TRAJ27)
CAAHTNAGKSTF

SEQ ID NO: 68150 - protein, 14 aa, Homo sapiens
  CDR3 for beta chain variable domain of TCR clone 34075 (TRBV19, TRBJ2-2)
CASSGQGIAGELSF

SEQ ID NO: 68151 - protein, 14 aa, Homo sapiens
  CDR3 for alpha chain variable domain of TCR clone 34076 (TRAV12-2, TRAJ9)
CAVNMEGGGCKTIF

SEQ ID NO: 68152 - protein, 14 aa, Homo sapiens
  CDR3 for beta chain variable domain of TCR clone 34076 (TRBV27, TRBJ2-3)
CASRKGGRTDTQYF

SEQ ID NO: 68153 - protein, 15 aa, Homo sapiens
  CDR3 for alpha chain variable domain of TCR clone 34077 (TRAV3, TRAJ3)
CAVRDGHGSASKIIF

SEQ ID NO: 68154 - protein, 14 aa, Homo sapiens
  CDR3 for beta chain variable domain of TCR clone 34077 (TRBV28, TRBJ1-4)
CASSFGTFDEKLFF

SEQ ID NO: 68155 - protein, 13 aa, Homo sapiens
  CDR3 for alpha chain variable domain of TCR clone 34078 (TRAV4, TRAJ22)
CLGGSGSARQLTF

SEQ ID NO: 68156 - protein, 15 aa, Homo sapiens
  CDR3 for beta chain variable domain of TCR clone 34078 (TRBV7-9, TRBJ1-6)
CASSSPGRGSSPLHF

SEQ ID NO: 68157 - protein, 14 aa, Homo sapiens
  CDR3 for alpha chain variable domain of TCR clone 34079 (TRAV12-2, TRAJ33)
CAVKRARSNYQLIW

SEQ ID NO: 68158 - protein, 12 aa, Homo sapiens
  CDR3 for beta chain variable domain of TCR clone 34079 (TRBV24-1, TRBJ2-3)
CATSDSTGTQYF

SEQ ID NO: 68159 - protein, 14 aa, Homo sapiens
  CDR3 for alpha chain variable domain of TCR clone 34080 (TRAV17, TRAJ54)
CATDANQGAQKLVF

SEQ ID NO: 68160 - protein, 12 aa, Homo sapiens
  CDR3 for beta chain variable domain of TCR clone 34080 (TRBV6-3, TRBJ2-1)
CASNGSYNEQFF

SEQ ID NO: 68161 - protein, 19 aa, Homo sapiens
  CDR3 for alpha chain variable domain of TCR clone 34081 (TRAV1-2, TRAJ26)
CLLPLCCERPDNYGQNFVF

SEQ ID NO: 68162 - protein, 15 aa, Homo sapiens
  CDR3 for beta chain variable domain of TCR clone 34081 (TRBV9, TRBJ1-6)
CASSVAGTGDSPLRF

SEQ ID NO: 68163 - protein, 15 aa, Homo sapiens
  CDR3 for alpha chain variable domain of TCR clone 34082 (TRAV25, TRAJ53)
CPTSNSGGSNYKLTF

SEQ ID NO: 68164 - protein, 14 aa, Homo sapiens
  CDR3 for beta chain variable domain of TCR clone 34082 (TRBV11-2, TRBJ2-3)
CASSRLVRTDTQYF

SEQ ID NO: 68165 - protein, 11 aa, Homo sapiens
  CDR3 for alpha chain variable domain of TCR clone 34083 (TRAV21, TRAJ34)
CAHYNTDKLIF

SEQ ID NO: 68166 - protein, 13 aa, Homo sapiens
  CDR3 for beta chain variable domain of TCR clone 34083 (TRBV7-6, TRBJ1-2)
CASSLAADYGYTF

SEQ ID NO: 68167 - protein, 14 aa, Homo sapiens
  CDR3 for alpha chain variable domain of TCR clone 34084 (TRAV13-1, TRAJ40)
CAASMTSGTYKYIF

SEQ ID NO: 68168 - protein, 15 aa, Homo sapiens
  CDR3 for beta chain variable domain of TCR clone 34084 (TRBV7-3, TRBJ2-1)
CVSSPTGGGEVEQFF

SEQ ID NO: 68169 - protein, 17 aa, Homo sapiens
  CDR3 for alpha chain variable domain of TCR clone 34085 (TRAV17, TRAJ7)
CATLGRLAFGKGNQVVV

SEQ ID NO: 68170 - protein, 16 aa, Homo sapiens
  CDR3 for beta chain variable domain of TCR clone 34085 (TRBV12-5, TRBJ2-5)
CASGPRTSGNQETQYY

SEQ ID NO: 68171 - protein, 15 aa, Homo sapiens
  CDR3 for alpha chain variable domain of TCR clone 34086 (TRAV8-3, TRAJ45)
CASSYSGGGADGLTF

SEQ ID NO: 68172 - protein, 16 aa, Homo sapiens
  CDR3 for beta chain variable domain of TCR clone 34086 (TRBV12-5, TRBJ2-5)
CASGPRTSGNQETQYF

SEQ ID NO: 68173 - protein, 11 aa, Homo sapiens
  CDR3 for alpha chain variable domain of TCR clone 34087 (TRAV17, TRAJ9)
CATTGGFKTIF

SEQ ID NO: 68174 - protein, 14 aa, Homo sapiens
  CDR3 for beta chain variable domain of TCR clone 34087 (TRBV7-9, TRBJ2-2)
CASSGLADNGELFF

SEQ ID NO: 68175 - protein, 13 aa, Homo sapiens
  CDR3 for alpha chain variable domain of TCR clone 34088 (TRAV20, TRAJ37)
CAGCSSNTGKLIS

SEQ ID NO: 68176 - protein, 11 aa, Homo sapiens
  CDR3 for beta chain variable domain of TCR clone 34088 (TRBV12-4, TRBJ2-3)
CASTATDTQYF

SEQ ID NO: 68177 - protein, 14 aa, Homo sapiens
  CDR3 for alpha chain variable domain of TCR clone 34089 (TRAV3, TRAJ37)
CAVKESGNTGKLIF

SEQ ID NO: 68178 - protein, 13 aa, Homo sapiens
  CDR3 for beta chain variable domain of TCR clone 34089 (TRBV7-9, TRBJ1-2)
CASSLKQNYGYTF

SEQ ID NO: 68179 - protein, 11 aa, Homo sapiens
  CDR3 for alpha chain variable domain of TCR clone 34090 (TRAV17, TRAJ43)
CATPRGNDMRF

SEQ ID NO: 68180 - protein, 15 aa, Homo sapiens
  CDR3 for beta chain variable domain of TCR clone 34090 (TRBV11-2, TRBJ2-1)
CASSLGTSGLNEQFF

SEQ ID NO: 68181 - protein, 12 aa, Homo sapiens
  CDR3 for alpha chain variable domain of TCR clone 34091 (TRAV12-3, TRAJ17)
CAMTLTGNKLTF

SEQ ID NO: 68182 - protein, 13 aa, Homo sapiens
  CDR3 for beta chain variable domain of TCR clone 34091 (TRBV7-2, TRBJ1-5)
CASSFARNQPQHF

SEQ ID NO: 68183 - protein, 16 aa, Homo sapiens
  CDR3 for alpha chain variable domain of TCR clone 34092 (TRAV16, TRAJ52)
CALSGVGGTSYGKPTF

SEQ ID NO: 68184 - protein, 14 aa, Homo sapiens
  CDR3 for beta chain variable domain of TCR clone 34092 (TRBV19, TRBJ1-2)
CASSLQGQAYGYTF

SEQ ID NO: 68185 - protein, 15 aa, Homo sapiens
  CDR3 for alpha chain variable domain of TCR clone 34093 (TRAV3, TRAJ5)
CAVRDRKTGRRALTF

SEQ ID NO: 68186 - protein, 14 aa, Homo sapiens
  CDR3 for beta chain variable domain of TCR clone 34093 (TRBV25-1, TRBJ1-1)
CASTHLGGNTEAFF

SEQ ID NO: 68187 - protein, 17 aa, Homo sapiens
  CDR3 for alpha chain variable domain of TCR clone 34094 (TRAV17, TRAJ7)
CATLGRLAFGKGNQAVV

SEQ ID NO: 68188 - protein, 13 aa, Homo sapiens
  CDR3 for beta chain variable domain of TCR clone 34094 (TRBV12-4, TRBJ2-7)
CASSLERVREQYF

SEQ ID NO: 68189 - protein, 15 aa, Homo sapiens
  CDR3 for alpha chain variable domain of TCR clone 34095 (TRAV8-3, TRAJ45)
CASSYSGGGADGLTF

SEQ ID NO: 68190 - protein, 13 aa, Homo sapiens
  CDR3 for beta chain variable domain of TCR clone 34095 (TRBV7-9, TRBJ2-7)
CASSVAGAYEQYF

SEQ ID NO: 68191 - protein, 14 aa, Homo sapiens
  CDR3 for alpha chain variable domain of TCR clone 34096 (TRAV12-2, TRAJ38)
CAPQAAGNNRKLIW

SEQ ID NO: 68192 - protein, 18 aa, Homo sapiens
  CDR3 for beta chain variable domain of TCR clone 34096 (TRBV28, TRBJ1-3)
CASKTPVGQIGSGNTIYF

SEQ ID NO: 68193 - protein, 15 aa, Homo sapiens
  CDR3 for alpha chain variable domain of TCR clone 34097 (TRAV26-1, TRAJ40)
CIVRAVPSGTYKYIF

SEQ ID NO: 68194 - protein, 14 aa, Homo sapiens
  CDR3 for beta chain variable domain of TCR clone 34097 (TRBV19, TRBJ2-1)
CASKDPGLANEQFY

SEQ ID NO: 68195 - protein, 14 aa, Homo sapiens
  CDR3 for alpha chain variable domain of TCR clone 34098 (TRAV16, TRAJ17)
CALSGRAAGNKLTF

SEQ ID NO: 68196 - protein, 17 aa, Homo sapiens
  CDR3 for beta chain variable domain of TCR clone 34098 (TRBV13, TRBJ2-3)
CASSLSRVAGGRNTQYF

SEQ ID NO: 68197 - protein, 15 aa, Homo sapiens
  CDR3 for alpha chain variable domain of TCR clone 34099 (TRAV3, TRAJ22)
CAVRDRSGSARQLTF

SEQ ID NO: 68198 - protein, 17 aa, Homo sapiens
  CDR3 for beta chain variable domain of TCR clone 34099 (TRBV13, TRBJ2-3)
CASSLSRVAGGRNTQYF

SEQ ID NO: 68199 - protein, 12 aa, Homo sapiens
  CDR3 for alpha chain variable domain of TCR clone 34100 (TRAV21, TRAJ3)
CCFYSSASEIIF

SEQ ID NO: 68200 - protein, 16 aa, Homo sapiens
  CDR3 for beta chain variable domain of TCR clone 34100 (TRBV19, TRBJ2-1)
CASSKAGPSSYNEQFF

SEQ ID NO: 68201 - protein, 13 aa, Homo sapiens
  CDR3 for alpha chain variable domain of TCR clone 34101 (TRAV8-3, TRAJ36)
CTVGATGANNLFF

SEQ ID NO: 68202 - protein, 15 aa, Homo sapiens
  CDR3 for beta chain variable domain of TCR clone 34101 (TRBV7-2, TRBJ1-2)
CASSPRAGWNYGYTF

SEQ ID NO: 68203 - protein, 12 aa, Homo sapiens
  CDR3 for alpha chain variable domain of TCR clone 34102 (TRAV3, TRAJ39)
CAVIEWSNMLTF

SEQ ID NO: 68204 - protein, 14 aa, Homo sapiens
  CDR3 for beta chain variable domain of TCR clone 34102 (TRBV7-8, TRBJ2-3)
CASSFPDGKDTQYF

SEQ ID NO: 68205 - protein, 13 aa, Homo sapiens
  CDR3 for alpha chain variable domain of TCR clone 34103 (TRAV23/DV6, TRAJ22)
CAPYSGSARQLTF

SEQ ID NO: 68206 - protein, 15 aa, Homo sapiens
  CDR3 for beta chain variable domain of TCR clone 34103 (TRBV11-2, TRBJ1-6)
CASSLDPWAVSHLHF

SEQ ID NO: 68207 - protein, 12 aa, Homo sapiens
  CDR3 for alpha chain variable domain of TCR clone 34104 (TRAV12-2, TRAJ30)
CAVRNRDEKIIF

SEQ ID NO: 68208 - protein, 15 aa, Homo sapiens
  CDR3 for beta chain variable domain of TCR clone 34104 (TRBV6-3, TRBJ1-5)
CASRVDRWSNQPQHF

SEQ ID NO: 68209 - protein, 11 aa, Homo sapiens
  CDR3 for alpha chain variable domain of TCR clone 34105 (TRAV2, TRAJ33)
CAVGSNYQLIW

SEQ ID NO: 68210 - protein, 15 aa, Homo sapiens
  CDR3 for beta chain variable domain of TCR clone 34105 (TRBV19, TRBJ1-2)
CASSVGQVLNYGYTF

SEQ ID NO: 68211 - protein, 15 aa, Homo sapiens
  CDR3 for alpha chain variable domain of TCR clone 34106 (TRAV8-3, TRAJ45)
CASSYSGGGADGLTF

SEQ ID NO: 68212 - protein, 16 aa, Homo sapiens
  CDR3 for beta chain variable domain of TCR clone 34106 (TRBV20-1, TRBJ1-4)
CSAPGQGLLTNEKLFF

SEQ ID NO: 68213 - protein, 17 aa, Homo sapiens
  CDR3 for alpha chain variable domain of TCR clone 34107 (TRAV36/DV7, TRAJ52)
CAVAQRAGGTSYGKLTF

SEQ ID NO: 68214 - protein, 13 aa, Homo sapiens
  CDR3 for beta chain variable domain of TCR clone 34107 (TRBV20-1, TRBJ1-6)
CSAPLGVGSPLHF

SEQ ID NO: 68215 - protein, 12 aa, Homo sapiens
  CDR3 for alpha chain variable domain of TCR clone 34108 (TRAV21, TRAJ29)
CAVTSGNTPLVF

SEQ ID NO: 68216 - protein, 16 aa, Homo sapiens
  CDR3 for beta chain variable domain of TCR clone 34108 (TRBV7-9, TRBJ2-1)
CASSDVAGGSYNEQFF

SEQ ID NO: 68217 - protein, 13 aa, Homo sapiens
  CDR3 for alpha chain variable domain of TCR clone 34109 (TRAV26-1, TRAJ29)
CIVRRSGNTPLVF

SEQ ID NO: 68218 - protein, 16 aa, Homo sapiens
  CDR3 for beta chain variable domain of TCR clone 34109 (TRBV11-2, TRBJ2-7)
CASSVAPTGVNYEQYF

SEQ ID NO: 68219 - protein, 13 aa, Homo sapiens
  CDR3 for alpha chain variable domain of TCR clone 34110 (TRAV9-2, TRAJ53)
CALSGGSNYKPTF

SEQ ID NO: 68220 - protein, 17 aa, Homo sapiens
  CDR3 for beta chain variable domain of TCR clone 34110 (TRBV11-2, TRBJ2-1)
CASSLYPPGVEYNEQFF

SEQ ID NO: 68221 - protein, 12 aa, Homo sapiens
  CDR3 for alpha chain variable domain of TCR clone 34111 (TRAV12-1, TRAJ23)
CVVNIPGGKLIF

SEQ ID NO: 68222 - protein, 15 aa, Homo sapiens
  CDR3 for beta chain variable domain of TCR clone 34111 (TRBV7-2, TRBJ2-7)
CASSLVASGSYEQYF

SEQ ID NO: 68223 - protein, 15 aa, Homo sapiens
  CDR3 for alpha chain variable domain of TCR clone 34112 (TRAV13-1, TRAJ32)
CAASIYGGATNKRIF

SEQ ID NO: 68224 - protein, 12 aa, Homo sapiens
  CDR3 for beta chain variable domain of TCR clone 34112 (TRBV7-6, TRBJ2-3)
CASSTGTDTQYF

SEQ ID NO: 68225 - protein, 18 aa, Homo sapiens
  CDR3 for alpha chain variable domain of TCR clone 34113 (TRAV29/DV5, TRAJ52)
CAAGFRGAGGTIYGKLTF

SEQ ID NO: 68226 - protein, 16 aa, Homo sapiens
  CDR3 for beta chain variable domain of TCR clone 34113 (TRBV7-3, TRBJ2-2)
CASSLKRGTLSGELFF

SEQ ID NO: 68227 - protein, 13 aa, Homo sapiens
  CDR3 for alpha chain variable domain of TCR clone 34114 (TRAV21, TRAJ57)
CAETQGGSEKLVF

SEQ ID NO: 68228 - protein, 17 aa, Homo sapiens
  CDR3 for beta chain variable domain of TCR clone 34114 (TRBV13, TRBJ2-3)
CASSLSRVAGGRNTQYF

SEQ ID NO: 68229 - protein, 16 aa, Homo sapiens
  CDR3 for alpha chain variable domain of TCR clone 34115 (TRAV27, TRAJ48)
TAAQPGDTGLYLPLTF

SEQ ID NO: 68230 - protein, 13 aa, Homo sapiens
  CDR3 for beta chain variable domain of TCR clone 34115 (TRBV20-1, TRBJ1-1)
CSARVGGNTEAFF

SEQ ID NO: 68231 - protein, 15 aa, Homo sapiens
  CDR3 for alpha chain variable domain of TCR clone 34116 (TRAV26-2, TRAJ13)
CILRDLSGGYQRVTF

SEQ ID NO: 68232 - protein, 14 aa, Homo sapiens
  CDR3 for beta chain variable domain of TCR clone 34116 (TRBV4-1, TRBJ2-3)
CASSQEGSTDTQYF

SEQ ID NO: 68233 - protein, 14 aa, Homo sapiens
  CDR3 for alpha chain variable domain of TCR clone 34117 (TRAV8-2, TRAJ4)
CVVSPAGGYNKLIF

SEQ ID NO: 68234 - protein, 15 aa, Homo sapiens
  CDR3 for beta chain variable domain of TCR clone 34117 (TRBV4-1, TRBJ1-4)
CASSDTGGTNEKLFF

SEQ ID NO: 68235 - protein, 12 aa, Homo sapiens
  CDR3 for alpha chain variable domain of TCR clone 34118 (TRAV12-3, TRAJ34)
CAMGYNTDKLIF

SEQ ID NO: 68236 - protein, 14 aa, Homo sapiens
  CDR3 for beta chain variable domain of TCR clone 34118 (TRBV4-1, TRBJ2-2)
CASGQAVNTGELFF

SEQ ID NO: 68237 - protein, 13 aa, Homo sapiens
  CDR3 for alpha chain variable domain of TCR clone 34119 (TRAV13-2, TRAJ48)
GAEMDFGNEELTF

SEQ ID NO: 68238 - protein, 15 aa, Homo sapiens
  CDR3 for beta chain variable domain of TCR clone 34119 (TRBV7-9, TRBJ1-6)
CASSSPGRGNSPLHF

SEQ ID NO: 68239 - protein, 17 aa, Homo sapiens
  CDR3 for alpha chain variable domain of TCR clone 34120 (TRAV3, TRAJ42)
CAVRDRDYGGSQGNPIF

SEQ ID NO: 68240 - protein, 14 aa, Homo sapiens
  CDR3 for beta chain variable domain of TCR clone 34120 (TRBV19, TRBJ2-5)
CASSMTGQQETQYF

SEQ ID NO: 68241 - protein, 14 aa, Homo sapiens
  CDR3 for alpha chain variable domain of TCR clone 34121 (TRAV1-1, TRAJ27)
CAVIYNTNSGKTTF

SEQ ID NO: 68242 - protein, 15 aa, Homo sapiens
  CDR3 for beta chain variable domain of TCR clone 34121 (TRBV7-2, TRBJ2-1)
CASSSGLAGGNEQFF

SEQ ID NO: 68243 - protein, 13 aa, Homo sapiens
  CDR3 for alpha chain variable domain of TCR clone 34122 (TRAV21, TRAJ10)
CAVPTGGGNKLTF

SEQ ID NO: 68244 - protein, 22 aa, Homo sapiens
  CDR3 for beta chain variable domain of TCR clone 34122 (TRBV19, TRBJ2-1)
RASSVRDRVTGTSGRIYNEQFF

SEQ ID NO: 68245 - protein, 15 aa, Homo sapiens
  CDR3 for alpha chain variable domain of TCR clone 34123 (TRAV25, TRAJ52)
CAGTSGGTSYGKLTF

SEQ ID NO: 68246 - protein, 13 aa, Homo sapiens
  CDR3 for beta chain variable domain of TCR clone 34123 (TRBV24-1, TRBJ2-2)
CATSDWSTGELFF

SEQ ID NO: 68247 - protein, 15 aa, Homo sapiens
  CDR3 for alpha chain variable domain of TCR clone 34124 (TRAV35, TRAJ58)
CAGRRQETSGSRLTF

SEQ ID NO: 68248 - protein, 11 aa, Homo sapiens
  CDR3 for beta chain variable domain of TCR clone 34124 (TRBV11-2, TRBJ1-1)
CASSINAEAFF

SEQ ID NO: 68249 - protein, 13 aa, Homo sapiens
  CDR3 for alpha chain variable domain of TCR clone 34125 (TRAV35, TRAJ27)
CAGQEGDAGKSTF

SEQ ID NO: 68250 - protein, 16 aa, Homo sapiens
  CDR3 for beta chain variable domain of TCR clone 34125 (TRBV7-2, TRBJ2-5)
RASSYKTGISLETQYF

SEQ ID NO: 68251 - protein, 15 aa, Homo sapiens
  CDR3 for alpha chain variable domain of TCR clone 34126 (TRAV12-3, TRAJ6)
CAMSATTGGSYIPTF

SEQ ID NO: 68252 - protein, 13 aa, Homo sapiens
  CDR3 for beta chain variable domain of TCR clone 34126 (TRBV7-9, TRBJ1-2)
CASSLKQSYGYTF

SEQ ID NO: 68253 - protein, 15 aa, Homo sapiens
  CDR3 for alpha chain variable domain of TCR clone 34127 (TRAV8-2, TRAJ40)
CVLLGTTSGTYKYIF

SEQ ID NO: 68254 - protein, 16 aa, Homo sapiens
  CDR3 for beta chain variable domain of TCR clone 34127 (TRBV7-3, TRBJ2-1)
CASSLEGYRSYNEQFF

SEQ ID NO: 68255 - protein, 15 aa, Homo sapiens
  CDR3 for alpha chain variable domain of TCR clone 34128 (TRAV21, TRAJ24)
CAARSSTDSWGRLQF

SEQ ID NO: 68256 - protein, 15 aa, Homo sapiens
  CDR3 for beta chain variable domain of TCR clone 34128 (TRBV19, TRBJ1-1)
CASTSGQIQNTEAFF

SEQ ID NO: 68257 - protein, 12 aa, Homo sapiens
  CDR3 for alpha chain variable domain of TCR clone 34129 (TRAV8-3, TRAJ40)
CAVTSGTYKYIF

SEQ ID NO: 68258 - protein, 14 aa, Homo sapiens
  CDR3 for beta chain variable domain of TCR clone 34129 (TRBV12-4, TRBJ2-3)
CASSGRGSTDTQYF

SEQ ID NO: 68259 - protein, 13 aa, Homo sapiens
  CDR3 for alpha chain variable domain of TCR clone 34130 (TRAV27, TRAJ57)
CRSAQGGSEELVF

SEQ ID NO: 68260 - protein, 11 aa, Homo sapiens
  CDR3 for beta chain variable domain of TCR clone 34130 (TRBV11-2, TRBJ1-1)
CASSINTEAFF

SEQ ID NO: 68261 - protein, 15 aa, Homo sapiens
  CDR3 for alpha chain variable domain of TCR clone 34131 (TRAV3, TRAJ22)
CAVRDRGGSARQLPF

SEQ ID NO: 68262 - protein, 13 aa, Homo sapiens
  CDR3 for beta chain variable domain of TCR clone 34131 (TRBV2, TRBJ1-5)
CATAGPGNQPQHF

SEQ ID NO: 68263 - protein, 15 aa, Homo sapiens
  CDR3 for alpha chain variable domain of TCR clone 34132 (TRAV3, TRAJ29)
CAVRDLYSGNTPLAF

SEQ ID NO: 68264 - protein, 17 aa, Homo sapiens
  CDR3 for beta chain variable domain of TCR clone 34132 (TRBV20-1, TRBJ2-1)
CSARDPLAGVWDNEQFF

SEQ ID NO: 68265 - protein, 13 aa, Homo sapiens
  CDR3 for alpha chain variable domain of TCR clone 34133 (TRAV17, TRAJ5)
CAPMDTGRRALTS

SEQ ID NO: 68266 - protein, 15 aa, Homo sapiens
  CDR3 for beta chain variable domain of TCR clone 34133 (TRBV6-6, TRBJ2-5)
CASSPGGGLEETQYF

SEQ ID NO: 68267 - protein, 13 aa, Homo sapiens
  CDR3 for alpha chain variable domain of TCR clone 34134 (TRAV13-2, TRAJ48)
CAEMDFGNEKLTF

SEQ ID NO: 68268 - protein, 13 aa, Homo sapiens
  CDR3 for beta chain variable domain of TCR clone 34134 (TRBV7-9, TRBJ1-2)
CASSLKQNYGYAF

SEQ ID NO: 68269 - protein, 14 aa, Homo sapiens
  CDR3 for alpha chain variable domain of TCR clone 34135 (TRAV12-2, TRAJ13)
CAVKKTGGYQKVTF

SEQ ID NO: 68270 - protein, 13 aa, Homo sapiens
  CDR3 for beta chain variable domain of TCR clone 34135 (TRBV7-6, TRBJ1-5)
CASSLTDNQPQHF

SEQ ID NO: 68271 - protein, 13 aa, Homo sapiens
  CDR3 for alpha chain variable domain of TCR clone 34136 (TRAV12-3, TRAJ33)
CAMSVNSNYQLIW

SEQ ID NO: 68272 - protein, 13 aa, Homo sapiens
  CDR3 for beta chain variable domain of TCR clone 34136 (TRBV7-2, TRBJ2-2)
CAGSLAVTGELFF

SEQ ID NO: 68273 - protein, 13 aa, Homo sapiens
  CDR3 for alpha chain variable domain of TCR clone 34137 (TRAV12-3, TRAJ7)
CAMTPYGNNRLAF

SEQ ID NO: 68274 - protein, 14 aa, Homo sapiens
  CDR3 for beta chain variable domain of TCR clone 34137 (TRBV12-5, TRBJ2-5)
CASGSRTHQETQYF

SEQ ID NO: 68275 - protein, 17 aa, Homo sapiens
  CDR3 for alpha chain variable domain of TCR clone 34138 (TRAV3, TRAJ38)
CAGRDCLNAGNNRKLIW

SEQ ID NO: 68276 - protein, 14 aa, Homo sapiens
  CDR3 for beta chain variable domain of TCR clone 34138 (TRBV5-5, TRBJ1-5)
CASSGQGVDQPQHF

SEQ ID NO: 68277 - protein, 12 aa, Homo sapiens
  CDR3 for alpha chain variable domain of TCR clone 34139 (TRAV13-2, TRAJ23)
CAERHRGGKLIF

SEQ ID NO: 68278 - protein, 16 aa, Homo sapiens
  CDR3 for beta chain variable domain of TCR clone 34139 (TRBV7-7, TRBJ2-1)
CASSLASGTSYNEQFF

SEQ ID NO: 68279 - protein, 17 aa, Homo sapiens
  CDR3 for alpha chain variable domain of TCR clone 34140 (TRAV3, TRAJ6)
CAVRDGPRAGGSYIPTF

SEQ ID NO: 68280 - protein, 14 aa, Homo sapiens
  CDR3 for beta chain variable domain of TCR clone 34140 (TRBV7-2, TRBJ2-7)
CASSPKASSYEQYF

SEQ ID NO: 68281 - protein, 15 aa, Homo sapiens
  CDR3 for alpha chain variable domain of TCR clone 34141 (TRAV13-1, TRAJ32)
CAASNGWWCYEQAHL

SEQ ID NO: 68282 - protein, 15 aa, Homo sapiens
  CDR3 for beta chain variable domain of TCR clone 34141 (TRBV20-1, TRBJ1-2)
CSAIRTGAFNYGYTF

SEQ ID NO: 68283 - protein, 14 aa, Homo sapiens
  CDR3 for alpha chain variable domain of TCR clone 34142 (TRAV34, TRAJ22)
CGADTSGSARQLTF

SEQ ID NO: 68284 - protein, 16 aa, Homo sapiens
  CDR3 for beta chain variable domain of TCR clone 34142 (TRBV2, TRBJ2-3)
CQHRGAPRRWTDTQYS

SEQ ID NO: 68285 - protein, 15 aa, Homo sapiens
  CDR3 for alpha chain variable domain of TCR clone 34143 (TRAV12-3, TRAJ11)
CAMSEENSGYSTLTF

SEQ ID NO: 68286 - protein, 13 aa, Homo sapiens
  CDR3 for beta chain variable domain of TCR clone 34143 (TRBV7-9, TRBJ1-2)
CASSLKQNYGYTF

SEQ ID NO: 68287 - protein, 14 aa, Homo sapiens
  CDR3 for alpha chain variable domain of TCR clone 34144 (TRAV27, TRAJ23)
CAGVDYNQGGKLIF

SEQ ID NO: 68288 - protein, 14 aa, Homo sapiens
  CDR3 for beta chain variable domain of TCR clone 34144 (TRBV15, TRBJ2-5)
CATSIGGLGETQYF

SEQ ID NO: 68289 - protein, 15 aa, Homo sapiens
  CDR3 for alpha chain variable domain of TCR clone 34145 (TRAV3, TRAJ4)
CAVRDGTGGYNKLIF

SEQ ID NO: 68290 - protein, 14 aa, Homo sapiens
  CDR3 for beta chain variable domain of TCR clone 34145 (TRBV7-2, TRBJ2-7)
CASSPKTSFYEQYF

SEQ ID NO: 68291 - protein, 16 aa, Homo sapiens
  CDR3 for alpha chain variable domain of TCR clone 34146 (TRAV30, TRAJ24)
CGTEIVDADSWGKFQF

SEQ ID NO: 68292 - protein, 14 aa, Homo sapiens
  CDR3 for beta chain variable domain of TCR clone 34146 (TRBV7-2, TRBJ1-2)
CASSRTGSTYGYTF

SEQ ID NO: 68293 - protein, 13 aa, Homo sapiens
  CDR3 for alpha chain variable domain of TCR clone 34147 (TRAV13-2, TRAJ48)
CAEMDFGNEKLTF

SEQ ID NO: 68294 - protein, 16 aa, Homo sapiens
  CDR3 for beta chain variable domain of TCR clone 34147 (TRBV12-5, TRBJ2-5)
CASGPRTSGNQETQYF

SEQ ID NO: 68295 - protein, 17 aa, Homo sapiens
  CDR3 for alpha chain variable domain of TCR clone 34148 (TRAV2, TRAJ36)
CAVEDGGNWGKQPLLWD

SEQ ID NO: 68296 - protein, 14 aa, Homo sapiens
  CDR3 for beta chain variable domain of TCR clone 34148 (TRBV7-9, TRBJ2-5)
CASSLDTAQETQYF

SEQ ID NO: 68297 - protein, 12 aa, Homo sapiens
  CDR3 for alpha chain variable domain of TCR clone 34149 (TRAV29/DV5, TRAJ49)
CAATNTGNQFYF

SEQ ID NO: 68298 - protein, 19 aa, Homo sapiens
  CDR3 for beta chain variable domain of TCR clone 34149 (TRBV25-1, TRBJ2-2)
CAILVYRVDRGRKTGELFF

SEQ ID NO: 68299 - protein, 15 aa, Homo sapiens
  CDR3 for alpha chain variable domain of TCR clone 34150 (TRAV35, TRAJ40)
CAGQLGTSGTYQYIF

SEQ ID NO: 68300 - protein, 14 aa, Homo sapiens
  CDR3 for beta chain variable domain of TCR clone 34150 (TRBV7-3, TRBJ2-1)
CASSLAGGTNEQFF

SEQ ID NO: 68301 - protein, 14 aa, Homo sapiens
  CDR3 for alpha chain variable domain of TCR clone 34151 (TRAV13-1, TRAJ45)
CAAIGGGGADGLTL

SEQ ID NO: 68302 - protein, 16 aa, Homo sapiens
  CDR3 for beta chain variable domain of TCR clone 34151 (TRBV7-2, TRBJ1-1)
CASSLGAGWTNTEAFF

SEQ ID NO: 68303 - protein, 11 aa, Homo sapiens
  CDR3 for alpha chain variable domain of TCR clone 34152 (TRAV27, TRAJ47)
CRCNQGNKLVF

SEQ ID NO: 68304 - protein, 16 aa, Homo sapiens
  CDR3 for beta chain variable domain of TCR clone 34152 (TRBV7-9, TRBJ2-1)
CASSDVAGGSYNEQFF

SEQ ID NO: 68305 - protein, 16 aa, Homo sapiens
  CDR3 for alpha chain variable domain of TCR clone 34153 (TRAV16, TRAJ4)
CALSRMFSGGYNKLTF

SEQ ID NO: 68306 - protein, 16 aa, Homo sapiens
  CDR3 for beta chain variable domain of TCR clone 34153 (TRBV24-1, TRBJ2-3)
CDTSDPGTGATDTQYF

SEQ ID NO: 68307 - protein, 12 aa, Homo sapiens
  CDR3 for alpha chain variable domain of TCR clone 34154 (TRAV13-1, TRAJ9)
CASHTGGFKTIF

SEQ ID NO: 68308 - protein, 13 aa, Homo sapiens
  CDR3 for beta chain variable domain of TCR clone 34154 (TRBV12-4, TRBJ1-2)
CASSSGSKDGDTF

SEQ ID NO: 68309 - protein, 19 aa, Homo sapiens
  CDR3 for alpha chain variable domain of TCR clone 34155 (TRAV8-6, TRAJ8)
LSTSVLWDPMNTGFQKLVF

SEQ ID NO: 68310 - protein, 13 aa, Homo sapiens
  CDR3 for beta chain variable domain of TCR clone 34155 (TRBV10-2, TRBJ2-3)
CASSESGDHTQYF

SEQ ID NO: 68311 - protein, 14 aa, Homo sapiens
  CDR3 for alpha chain variable domain of TCR clone 34156 (TRAV13-1, TRAJ9)
CSASALTGGFKTIF

SEQ ID NO: 68312 - protein, 13 aa, Homo sapiens
  CDR3 for beta chain variable domain of TCR clone 34156 (TRBV20-1, TRBJ1-1)
CSAGTVGNTEAFF

SEQ ID NO: 68313 - protein, 14 aa, Homo sapiens
  CDR3 for alpha chain variable domain of TCR clone 34157 (TRAV38-1, TRAJ45)
CAYYSGGGADGLTF

SEQ ID NO: 68314 - protein, 20 aa, Homo sapiens
  CDR3 for beta chain variable domain of TCR clone 34157 (TRBV28, TRBJ2-1)
SASTPIGRSPGLAGGNEQFF

SEQ ID NO: 68315 - protein, 12 aa, Homo sapiens
  CDR3 for alpha chain variable domain of TCR clone 34158 (TRAV13-1, TRAJ15)
CAASQAGTALIF

SEQ ID NO: 68316 - protein, 14 aa, Homo sapiens
  CDR3 for beta chain variable domain of TCR clone 34158 (TRBV19, TRBJ2-2)
CASSTFHRSGELFF

SEQ ID NO: 68317 - protein, 19 aa, Homo sapiens
  CDR3 for alpha chain variable domain of TCR clone 34159 (TRAV3, TRAJ6)
CSVRDRNPSRSGGSYIPTF

SEQ ID NO: 68318 - protein, 15 aa, Homo sapiens
  CDR3 for beta chain variable domain of TCR clone 34159 (TRBV18, TRBJ2-7)
CASSPTFMDSYEQYF

SEQ ID NO: 68319 - protein, 15 aa, Homo sapiens
  CDR3 for alpha chain variable domain of TCR clone 34160 (TRAV12-3, TRAJ6)
CAMSATTGGSYIPTF

SEQ ID NO: 68320 - protein, 11 aa, Homo sapiens
  CDR3 for beta chain variable domain of TCR clone 34160 (TRBV11-2, TRBJ2-2)
CASSLPGELFF

SEQ ID NO: 68321 - protein, 14 aa, Homo sapiens
  CDR3 for alpha chain variable domain of TCR clone 34161 (TRAV8-3, TRAJ4)
CAAGAAGGYNKLIF

SEQ ID NO: 68322 - protein, 15 aa, Homo sapiens
  CDR3 for beta chain variable domain of TCR clone 34161 (TRBV5-1, TRBJ2-1)
CASSPPRAPYNEQFF

SEQ ID NO: 68323 - protein, 14 aa, Homo sapiens
  CDR3 for alpha chain variable domain of TCR clone 34162 (TRAV12-3, TRAJ9)
CAMSGHTGGFKTIF

SEQ ID NO: 68324 - protein, 16 aa, Homo sapiens
  CDR3 for beta chain variable domain of TCR clone 34162 (TRBV4-2, TRBJ1-1)
CASRPLDGGGDTEAFF

SEQ ID NO: 68325 - protein, 15 aa, Homo sapiens
  CDR3 for alpha chain variable domain of TCR clone 34163 (TRAV3, TRAJ22)
CAVRDRGGSAMQLTF

SEQ ID NO: 68326 - protein, 16 aa, Homo sapiens
  CDR3 for beta chain variable domain of TCR clone 34163 (TRBV5-4, TRBJ2-3)
CASQQPGAGGADTQYF

SEQ ID NO: 68327 - protein, 14 aa, Homo sapiens
  CDR3 for alpha chain variable domain of TCR clone 34164 (TRAV1-2, TRAJ16)
CAVNRFSDGQKLLF

SEQ ID NO: 68328 - protein, 14 aa, Homo sapiens
  CDR3 for beta chain variable domain of TCR clone 34164 (TRBV19, TRBJ2-3)
CASSAPRGTDTQYF

SEQ ID NO: 68329 - protein, 15 aa, Homo sapiens
  CDR3 for alpha chain variable domain of TCR clone 34165 (TRAV1-2, TRAJ9)
CAVGDDGTGGFKTIF

SEQ ID NO: 68330 - protein, 17 aa, Homo sapiens
  CDR3 for beta chain variable domain of TCR clone 34165 (TRBV20-1, TRBJ2-1)
CSASSSGLAGSYNEQFF

SEQ ID NO: 68331 - protein, 18 aa, Homo sapiens
  CDR3 for alpha chain variable domain of TCR clone 34166 (TRAV29/DV5, TRAJ52)
CAAGFRGAGGTSYGKLTF

SEQ ID NO: 68332 - protein, 16 aa, Homo sapiens
  CDR3 for beta chain variable domain of TCR clone 34166 (TRBV7-3, TRBJ2-2)
CASSLKRGTLSGELFC

SEQ ID NO: 68333 - protein, 14 aa, Homo sapiens
  CDR3 for alpha chain variable domain of TCR clone 34167 (TRAV13-1, TRAJ24)
CAASRTDSWGKLQF

SEQ ID NO: 68334 - protein, 16 aa, Homo sapiens
  CDR3 for beta chain variable domain of TCR clone 34167 (TRBV9, TRBJ2-1)
CASSVMGLAGYNEQFF

SEQ ID NO: 68335 - protein, 13 aa, Homo sapiens
  CDR3 for alpha chain variable domain of TCR clone 34168 (TRAV16, TRAJ48)
RSPLNFGNEKLTF

SEQ ID NO: 68336 - protein, 11 aa, Homo sapiens
  CDR3 for beta chain variable domain of TCR clone 34168 (TRBV7-9, TRBJ2-3)
CASSPTDTQYF

SEQ ID NO: 68337 - protein, 11 aa, Homo sapiens
  CDR3 for alpha chain variable domain of TCR clone 34169 (TRAV12-3, TRAJ43)
CAMSVSNDMRF

SEQ ID NO: 68338 - protein, 17 aa, Homo sapiens
  CDR3 for beta chain variable domain of TCR clone 34169 (TRBV7-8, TRBJ2-6)
CASSAGTGGAGANVLTF

SEQ ID NO: 68339 - protein, 13 aa, Homo sapiens
  CDR3 for alpha chain variable domain of TCR clone 34170 (TRAV12-2, TRAJ20)
CAVYPSNDYKLSF

SEQ ID NO: 68340 - protein, 15 aa, Homo sapiens
  CDR3 for beta chain variable domain of TCR clone 34170 (TRBV27, TRBJ2-5)
CASSLYPRGGENQYF

SEQ ID NO: 68341 - protein, 15 aa, Homo sapiens
  CDR3 for alpha chain variable domain of TCR clone 34171 (TRAV13-1, TRAJ10)
CAATILTGGGNKPTF

SEQ ID NO: 68342 - protein, 15 aa, Homo sapiens
  CDR3 for beta chain variable domain of TCR clone 34171 (TRBV2, TRBJ2-7)
CASTLLGSGATEQYF

SEQ ID NO: 68343 - protein, 15 aa, Homo sapiens
  CDR3 for alpha chain variable domain of TCR clone 34172 (TRAV13-1, TRAJ44)
CAASRGGGTASKLTF

SEQ ID NO: 68344 - protein, 15 aa, Homo sapiens
  CDR3 for beta chain variable domain of TCR clone 34172 (TRBV27, TRBJ1-6)
CASSFDRGLGSPLHF

SEQ ID NO: 68345 - protein, 14 aa, Homo sapiens
  CDR3 for alpha chain variable domain of TCR clone 34173 (TRAV23/DV6, TRAJ8)
CAASKNTGFQKLVF

SEQ ID NO: 68346 - protein, 16 aa, Homo sapiens
  CDR3 for beta chain variable domain of TCR clone 34173 (TRBV4-1, TRBJ2-6)
CASSQVGDPGANDLTF

SEQ ID NO: 68347 - protein, 16 aa, Homo sapiens
  CDR3 for alpha chain variable domain of TCR clone 34174 (TRAV3, TRAJ37)
CAVRPHGSGNTGKLIF

SEQ ID NO: 68348 - protein, 16 aa, Homo sapiens
  CDR3 for beta chain variable domain of TCR clone 34174 (TRBV9, TRBJ1-2)
CASSVEEKVSPYGHTF

SEQ ID NO: 68349 - protein, 17 aa, Homo sapiens
  CDR3 for alpha chain variable domain of TCR clone 34175 (TRAV4, TRAJ13)
CLVGVQGSSGGYQKVTL

SEQ ID NO: 68350 - protein, 18 aa, Homo sapiens
  CDR3 for beta chain variable domain of TCR clone 34175 (TRBV15, TRBJ2-3)
CATSRDGARSWDTDTQYF

SEQ ID NO: 68351 - protein, 12 aa, Homo sapiens
  CDR3 for alpha chain variable domain of TCR clone 34176 (TRAV12-2, TRAJ10)
WGVTGGGNKLTF

SEQ ID NO: 68352 - protein, 14 aa, Homo sapiens
  CDR3 for beta chain variable domain of TCR clone 34176 (TRBV7-2, TRBJ2-7)
CASSPKTSFYEQYF

SEQ ID NO: 68353 - protein, 12 aa, Homo sapiens
  CDR3 for alpha chain variable domain of TCR clone 34177 (TRAV8-3, TRAJ26)
CAGDNYGQNFVS

SEQ ID NO: 68354 - protein, 13 aa, Homo sapiens
  CDR3 for beta chain variable domain of TCR clone 34177 (TRBV20-1, TRBJ1-1)
CSAPLGGGTEAFF

SEQ ID NO: 68355 - protein, 13 aa, Homo sapiens
  CDR3 for alpha chain variable domain of TCR clone 34178 (TRAV23/DV6, TRAJ12)
CAPRVDSSYKSIF

SEQ ID NO: 68356 - protein, 12 aa, Homo sapiens
  CDR3 for beta chain variable domain of TCR clone 34178 (TRBV7-6, TRBJ2-5)
CASSLSQETQYF

SEQ ID NO: 68357 - protein, 18 aa, Homo sapiens
  CDR3 for alpha chain variable domain of TCR clone 34179 (TRAV12-3, TRAJ52)
CAMSVVGAGGTSYGKLTF

SEQ ID NO: 68358 - protein, 15 aa, Homo sapiens
  CDR3 for beta chain variable domain of TCR clone 34179 (TRBV27, TRBJ1-6)
CASSFDRGLGSPLHF

SEQ ID NO: 68359 - protein, 14 aa, Homo sapiens
  CDR3 for alpha chain variable domain of TCR clone 34180 (TRAV1-2, TRAJ16)
CAVNRFSDGQKLLF

SEQ ID NO: 68360 - protein, 16 aa, Homo sapiens
  CDR3 for beta chain variable domain of TCR clone 34180 (TRBV28, TRBJ2-1)
RASSSSYSGSLNEQFF

SEQ ID NO: 68361 - protein, 14 aa, Homo sapiens
  CDR3 for alpha chain variable domain of TCR clone 34181 (TRAV12-2, TRAJ40)
CAVKIPSGTYKYIF

SEQ ID NO: 68362 - protein, 13 aa, Homo sapiens
  CDR3 for beta chain variable domain of TCR clone 34181 (TRBV7-9, TRBJ1-2)
CASSLEQNYGYTF

SEQ ID NO: 68363 - protein, 12 aa, Homo sapiens
  CDR3 for alpha chain variable domain of TCR clone 34182 (TRAV13-2, TRAJ23)
CAERHRGGKLIF

SEQ ID NO: 68364 - protein, 14 aa, Homo sapiens
  CDR3 for beta chain variable domain of TCR clone 34182 (TRBV7-8, TRBJ2-3)
CASSLEAGTDTQYF

SEQ ID NO: 68365 - protein, 12 aa, Homo sapiens
  CDR3 for alpha chain variable domain of TCR clone 34183 (TRAV12-2, TRAJ10)
WGVTGGGNKLTF

SEQ ID NO: 68366 - protein, 14 aa, Homo sapiens
  CDR3 for beta chain variable domain of TCR clone 34183 (TRBV27, TRBJ2-7)
CASATGTERREQCF

SEQ ID NO: 68367 - protein, 16 aa, Homo sapiens
  CDR3 for alpha chain variable domain of TCR clone 34184 (TRAV16, TRAJ4)
CALSRMFSGGYNKLIF

SEQ ID NO: 68368 - protein, 14 aa, Homo sapiens
  CDR3 for beta chain variable domain of TCR clone 34184 (TRBV28, TRBJ2-7)
CASTTDRDGFVQYF

SEQ ID NO: 68369 - protein, 15 aa, Homo sapiens
  CDR3 for alpha chain variable domain of TCR clone 34185 (TRAV23/DV6, TRAJ18)
CAARYRGSTLGGLYF

SEQ ID NO: 68370 - protein, 16 aa, Homo sapiens
  CDR3 for beta chain variable domain of TCR clone 34185 (TRBV20-1, TRBJ1-2)
CSASMGQGVANYGYTF

SEQ ID NO: 68371 - protein, 16 aa, Homo sapiens
  CDR3 for alpha chain variable domain of TCR clone 34186 (TRAV4, TRAJ22)
CLVGDLYSGSARQLTF

SEQ ID NO: 68372 - protein, 16 aa, Homo sapiens
  CDR3 for beta chain variable domain of TCR clone 34186 (TRBV11-2, TRBJ2-3)
CASSPWREVGTDTQYF

SEQ ID NO: 68373 - protein, 13 aa, Homo sapiens
  CDR3 for alpha chain variable domain of TCR clone 34187 (TRAV1-1, TRAJ9)
CAAKNTGGFKTIF

SEQ ID NO: 68374 - protein, 14 aa, Homo sapiens
  CDR3 for beta chain variable domain of TCR clone 34187 (TRBV20-1, TRBJ2-1)
CSAQIGGFANEQFF

SEQ ID NO: 68375 - protein, 18 aa, Homo sapiens
  CDR3 for alpha chain variable domain of TCR clone 34188 (TRAV21, TRAJ52)
CAVRPSPAGGTSYGKLTF

SEQ ID NO: 68376 - protein, 17 aa, Homo sapiens
  CDR3 for beta chain variable domain of TCR clone 34188 (TRBV13, TRBJ2-3)
CASSLSRVAGGWNTQYF

SEQ ID NO: 68377 - protein, 13 aa, Homo sapiens
  CDR3 for alpha chain variable domain of TCR clone 34189 (TRAV8-3, TRAJ21)
CAVGAYNSNKFYF

SEQ ID NO: 68378 - protein, 15 aa, Homo sapiens
  CDR3 for beta chain variable domain of TCR clone 34189 (TRBV19, TRBJ1-5)
CASSIVWADNQPQHF

SEQ ID NO: 68379 - protein, 13 aa, Homo sapiens
  CDR3 for alpha chain variable domain of TCR clone 34190 (TRAV8-4, TRAJ10)
CAALTGGGNKLTF

SEQ ID NO: 68380 - protein, 15 aa, Homo sapiens
  CDR3 for beta chain variable domain of TCR clone 34190 (TRBV2, TRBJ2-3)
CASSDFEKATDTQYF

SEQ ID NO: 68381 - protein, 14 aa, Homo sapiens
  CDR3 for alpha chain variable domain of TCR clone 34191 (TRAV1-2, TRAJ16)
CAVNRFSDGQKLLF

SEQ ID NO: 68382 - protein, 14 aa, Homo sapiens
  CDR3 for beta chain variable domain of TCR clone 34191 (TRBV12-4, TRBJ1-1)
CASSHGTGGTEAFF

SEQ ID NO: 68383 - protein, 14 aa, Homo sapiens
  CDR3 for alpha chain variable domain of TCR clone 34192 (TRAV29/DV5, TRAJ36)
CAAHRKTGANNLFF

SEQ ID NO: 68384 - protein, 14 aa, Homo sapiens
  CDR3 for beta chain variable domain of TCR clone 34192 (TRBV12-5, TRBJ2-5)
CASGSRTHQETQYF

SEQ ID NO: 68385 - protein, 15 aa, Homo sapiens
  CDR3 for alpha chain variable domain of TCR clone 34193 (TRAV25, TRAJ52)
CAGRPGGTSYGKLTF

SEQ ID NO: 68386 - protein, 17 aa, Homo sapiens
  CDR3 for beta chain variable domain of TCR clone 34193 (TRBV7-8, TRBJ2-6)
CASSAGTGGAWANVLTF

SEQ ID NO: 68387 - protein, 11 aa, Homo sapiens
  CDR3 for alpha chain variable domain of TCR clone 34194 (TRAV13-2, TRAJ20)
CADSNDYKLSF

SEQ ID NO: 68388 - protein, 17 aa, Homo sapiens
  CDR3 for beta chain variable domain of TCR clone 34194 (TRBV12-4, TRBJ1-1)
CASSLSGFRTMNTEAFF

SEQ ID NO: 68389 - protein, 18 aa, Homo sapiens
  CDR3 for alpha chain variable domain of TCR clone 34195 (TRAV26-1, TRAJ23)
CIVGVGLEVWNQGGKLIF

SEQ ID NO: 68390 - protein, 16 aa, Homo sapiens
  CDR3 for beta chain variable domain of TCR clone 34195 (TRBV12-4, TRBJ2-5)
CASSFFVRGRQETQYF

SEQ ID NO: 68391 - protein, 11 aa, Homo sapiens
  CDR3 for alpha chain variable domain of TCR clone 34196 (TRAV12-2, TRAJ29)
CAVTLRSPLVF

SEQ ID NO: 68392 - protein, 16 aa, Homo sapiens
  CDR3 for beta chain variable domain of TCR clone 34196 (TRBV5-1, TRBJ2-2)
CASSLGGTGSTGELSF

SEQ ID NO: 68393 - protein, 15 aa, Homo sapiens
  CDR3 for alpha chain variable domain of TCR clone 34197 (TRAV26-1, TRAJ44)
CIVRANTGTASKLAF

SEQ ID NO: 68394 - protein, 16 aa, Homo sapiens
  CDR3 for beta chain variable domain of TCR clone 34197 (TRBV7-7, TRBJ2-1)
CASSLASGTSYNEQFF

SEQ ID NO: 68395 - protein, 15 aa, Homo sapiens
  CDR3 for alpha chain variable domain of TCR clone 34198 (TRAV26-1, TRAJ29)
CIVRVEGSGNTPLVF

SEQ ID NO: 68396 - protein, 14 aa, Homo sapiens
  CDR3 for beta chain variable domain of TCR clone 34198 (TRBV18, TRBJ2-5)
CASSPGVSQKTQYF

SEQ ID NO: 68397 - protein, 13 aa, Homo sapiens
  CDR3 for alpha chain variable domain of TCR clone 34199 (TRAV12-2, TRAJ10)
CAVPTGGGNKLTF

SEQ ID NO: 68398 - protein, 13 aa, Homo sapiens
  CDR3 for beta chain variable domain of TCR clone 34199 (TRBV7-6, TRBJ2-7)
CASSLDHTHEQYF

SEQ ID NO: 68399 - protein, 15 aa, Homo sapiens
  CDR3 for alpha chain variable domain of TCR clone 34200 (TRAV25, TRAJ53)
CAATGGGGSNYKLAF

SEQ ID NO: 68400 - protein, 11 aa, Homo sapiens
  CDR3 for beta chain variable domain of TCR clone 34200 (TRBV11-3, TRBJ2-2)
CASSSGGELFF

SEQ ID NO: 68401 - protein, 16 aa, Homo sapiens
  CDR3 for alpha chain variable domain of TCR clone 34201 (TRAV12-3, TRAJ53)
CAMSPGSGGSNYKLTF

SEQ ID NO: 68402 - protein, 12 aa, Homo sapiens
  CDR3 for beta chain variable domain of TCR clone 34201 (TRBV19, TRBJ1-5)
CASSIAQQPQHF

SEQ ID NO: 68403 - protein, 13 aa, Homo sapiens
  CDR3 for alpha chain variable domain of TCR clone 34202 (TRAV3, TRAJ27)
CAVRPLRAGKSTF

SEQ ID NO: 68404 - protein, 13 aa, Homo sapiens
  CDR3 for beta chain variable domain of TCR clone 34202 (TRBV7-9, TRBJ2-3)
CASSPGSTDTQYF

SEQ ID NO: 68405 - protein, 14 aa, Homo sapiens
  CDR3 for alpha chain variable domain of TCR clone 34203 (TRAV26-1, TRAJ39)
CIVRGSRAGNMLTF

SEQ ID NO: 68406 - protein, 15 aa, Homo sapiens
  CDR3 for beta chain variable domain of TCR clone 34203 (TRBV7-9, TRBJ1-5)
CASSQCHQPNQPQHF

SEQ ID NO: 68407 - protein, 14 aa, Homo sapiens
  CDR3 for alpha chain variable domain of TCR clone 34204 (TRAV2, TRAJ37)
CAVDFTSNTGKLIF

SEQ ID NO: 68408 - protein, 15 aa, Homo sapiens
  CDR3 for beta chain variable domain of TCR clone 34204 (TRBV20-1, TRBJ1-1)
CSANRGVTGNTEAFF

SEQ ID NO: 68409 - protein, 20 aa, Homo sapiens
  CDR3 for alpha chain variable domain of TCR clone 34205 (TRAV26-1, TRAJ52)
CCVLLHRPSAGGTSYGKLTF

SEQ ID NO: 68410 - protein, 14 aa, Homo sapiens
  CDR3 for beta chain variable domain of TCR clone 34205 (TRBV7-2, TRBJ1-4)
CASSHSRTNEKLFF

SEQ ID NO: 68411 - protein, 15 aa, Homo sapiens
  CDR3 for alpha chain variable domain of TCR clone 34206 (TRAV29/DV5, TRAJ13)
CAASLNSGGYQKVTF

SEQ ID NO: 68412 - protein, 16 aa, Homo sapiens
  CDR3 for beta chain variable domain of TCR clone 34206 (TRBV28, TRBJ2-7)
CASSSSGTGGSYEQYF

SEQ ID NO: 68413 - protein, 15 aa, Homo sapiens
  CDR3 for alpha chain variable domain of TCR clone 34207 (TRAV8-3, TRAJ27)
CAVGPSKTNTGKSTF

SEQ ID NO: 68414 - protein, 15 aa, Homo sapiens
  CDR3 for beta chain variable domain of TCR clone 34207 (TRBV7-2, TRBJ2-1)
CASSSGLAGGNEQFF

SEQ ID NO: 68415 - protein, 14 aa, Homo sapiens
  CDR3 for alpha chain variable domain of TCR clone 34208 (TRAV8-2, TRAJ4)
CVVSPSGGYNKLIF

SEQ ID NO: 68416 - protein, 15 aa, Homo sapiens
  CDR3 for beta chain variable domain of TCR clone 34208 (TRBV4-1, TRBJ1-4)
CAGSDTGGTNEKLFF

SEQ ID NO: 68417 - protein, 15 aa, Homo sapiens
  CDR3 for alpha chain variable domain of TCR clone 34209 (TRAV3, TRAJ4)
CAVRDGTGGYNKLIF

SEQ ID NO: 68418 - protein, 15 aa, Homo sapiens
  CDR3 for beta chain variable domain of TCR clone 34209 (TRBV27, TRBJ2-7)
CASSPDQGRLYEQHF

SEQ ID NO: 68419 - protein, 14 aa, Homo sapiens
  CDR3 for alpha chain variable domain of TCR clone 34210 (TRAV12-2, TRAJ40)
CAVKIPSGTYKHIF

SEQ ID NO: 68420 - protein, 15 aa, Homo sapiens
  CDR3 for beta chain variable domain of TCR clone 34210 (TRBV20-1, TRBJ1-4)
CSARREWGVNEKLFF

SEQ ID NO: 68421 - protein, 14 aa, Homo sapiens
  CDR3 for alpha chain variable domain of TCR clone 34211 (TRAV26-1, TRAJ39)
CIVRGSRAGNMLTF

SEQ ID NO: 68422 - protein, 15 aa, Homo sapiens
  CDR3 for beta chain variable domain of TCR clone 34211 (TRBV7-9, TRBJ1-5)
CASSQGHKPNQPQHF

SEQ ID NO: 68423 - protein, 14 aa, Homo sapiens
  CDR3 for alpha chain variable domain of TCR clone 34212 (TRAV1-1, TRAJ27)
CAVIYNTNAGKSPF

SEQ ID NO: 68424 - protein, 15 aa, Homo sapiens
  CDR3 for beta chain variable domain of TCR clone 34212 (TRBV7-2, TRBJ2-1)
CASSSGLAGGNEQFF

SEQ ID NO: 68425 - protein, 15 aa, Homo sapiens
  CDR3 for alpha chain variable domain of TCR clone 34213 (TRAV8-3, TRAJ20)
CAVEAKGPNDYKLSF

SEQ ID NO: 68426 - protein, 12 aa, Homo sapiens
  CDR3 for beta chain variable domain of TCR clone 34213 (TRBV7-2, TRBJ1-2)
CASRDSIYGYTF

SEQ ID NO: 68427 - protein, 13 aa, Homo sapiens
  CDR3 for alpha chain variable domain of TCR clone 34214 (TRAV8-3, TRAJ28)
CAVGAVGSYQLTF

SEQ ID NO: 68428 - protein, 14 aa, Homo sapiens
  CDR3 for beta chain variable domain of TCR clone 34214 (TRBV7-3, TRBJ1-1)
CASSLKGGNTEAFF

SEQ ID NO: 68429 - protein, 14 aa, Homo sapiens
  CDR3 for alpha chain variable domain of TCR clone 34215 (TRAV1-2, TRAJ16)
CAVNRLSDGQKLLF

SEQ ID NO: 68430 - protein, 14 aa, Homo sapiens
  CDR3 for beta chain variable domain of TCR clone 34215 (TRBV7-2, TRBJ2-7)
CASSPKTSFYEQYF

SEQ ID NO: 68431 - protein, 14 aa, Homo sapiens
  CDR3 for alpha chain variable domain of TCR clone 34216 (TRAV12-2, TRAJ13)
CAVKKTGGYQKVTF

SEQ ID NO: 68432 - protein, 17 aa, Homo sapiens
  CDR3 for beta chain variable domain of TCR clone 34216 (TRBV7-9, TRBJ2-3)
CASSPTVAGDLTDTQYF

SEQ ID NO: 68433 - protein, 14 aa, Homo sapiens
  CDR3 for alpha chain variable domain of TCR clone 34217 (TRAV12-3, TRAJ10)
SHLPLTGGGNKLTF

SEQ ID NO: 68434 - protein, 16 aa, Homo sapiens
  CDR3 for beta chain variable domain of TCR clone 34217 (TRBV11-2, TRBJ1-2)
CASSLDTGGADYGYTF

SEQ ID NO: 68435 - protein, 15 aa, Homo sapiens
  CDR3 for alpha chain variable domain of TCR clone 34218 (TRAV21, TRAJ52)
CATRGGGTSYGKLTF

SEQ ID NO: 68436 - protein, 14 aa, Homo sapiens
  CDR3 for beta chain variable domain of TCR clone 34218 (TRBV28, TRBJ2-3)
CASSSAPSIDTQYF

SEQ ID NO: 68437 - protein, 11 aa, Homo sapiens
  CDR3 for alpha chain variable domain of TCR clone 34219 (TRAV17, TRAJ36)
CTPTGANNLFF

SEQ ID NO: 68438 - protein, 12 aa, Homo sapiens
  CDR3 for beta chain variable domain of TCR clone 34219 (TRBV29-1, TRBJ2-3)
CSVTGGADTQYF

SEQ ID NO: 68439 - protein, 10 aa, Homo sapiens
  CDR3 for alpha chain variable domain of TCR clone 34220 (TRAV36/DV7, TRAJ49)
CDLTGNQFYF

SEQ ID NO: 68440 - protein, 13 aa, Homo sapiens
  CDR3 for beta chain variable domain of TCR clone 34220 (TRBV4-1, TRBJ2-7)
CASSQGQAYEQYF

SEQ ID NO: 68441 - protein, 15 aa, Homo sapiens
  CDR3 for alpha chain variable domain of TCR clone 34221 (TRAV21, TRAJ40)
CAVRPQTSGTYKYIF

SEQ ID NO: 68442 - protein, 14 aa, Homo sapiens
  CDR3 for beta chain variable domain of TCR clone 34221 (TRBV6-1, TRBJ1-3)
CASVQGGGGNTIYF

SEQ ID NO: 68443 - protein, 20 aa, Homo sapiens
  CDR3 for alpha chain variable domain of TCR clone 34222 (TRAV1-1, TRAJ39)
CLLLLRCESSAYNAGNMLTF

SEQ ID NO: 68444 - protein, 13 aa, Homo sapiens
  CDR3 for beta chain variable domain of TCR clone 34222 (TRBV12-4, TRBJ1-5)
CDSSPDRAQPQHF

SEQ ID NO: 68445 - protein, 12 aa, Homo sapiens
  CDR3 for alpha chain variable domain of TCR clone 34223 (TRAV1-2, TRAJ29)
CAVPSGSTPLVF

SEQ ID NO: 68446 - protein, 13 aa, Homo sapiens
  CDR3 for beta chain variable domain of TCR clone 34223 (TRBV5-4, TRBJ1-1)
CASSVDLGTEAFF

SEQ ID NO: 68447 - protein, 15 aa, Homo sapiens
  CDR3 for alpha chain variable domain of TCR clone 34224 (TRAV8-6, TRAJ10)
CAVSDQAGGGNKLTF

SEQ ID NO: 68448 - protein, 12 aa, Homo sapiens
  CDR3 for beta chain variable domain of TCR clone 34224 (TRBV19, TRBJ1-2)
CASSPDVYGYTF

SEQ ID NO: 68449 - protein, 14 aa, Homo sapiens
  CDR3 for alpha chain variable domain of TCR clone 34225 (TRAV1-2, TRAJ16)
CAVNRFSDGQKLLF

SEQ ID NO: 68450 - protein, 14 aa, Homo sapiens
  CDR3 for beta chain variable domain of TCR clone 34225 (TRBV7-9, TRBJ2-3)
CASSLEQGTNTQYF

SEQ ID NO: 68451 - protein, 14 aa, Homo sapiens
  CDR3 for alpha chain variable domain of TCR clone 34226 (TRAV1-2, TRAJ16)
CAVNRFSDGQKLLF

SEQ ID NO: 68452 - protein, 15 aa, Homo sapiens
  CDR3 for beta chain variable domain of TCR clone 34226 (TRBV7-3, TRBJ2-1)
CASSQRGGALIEQFF

SEQ ID NO: 68453 - protein, 15 aa, Homo sapiens
  CDR3 for alpha chain variable domain of TCR clone 34227 (TRAV26-1, TRAJ40)
CVVRVTTSGTYKYIF

SEQ ID NO: 68454 - protein, 12 aa, Homo sapiens
  CDR3 for beta chain variable domain of TCR clone 34227 (TRBV7-9, TRBJ1-4)
CASSTDREKLFF

SEQ ID NO: 68455 - protein, 15 aa, Homo sapiens
  CDR3 for alpha chain variable domain of TCR clone 34228 (TRAV26-1, TRAJ22)
CIVRVSFWFCKATDL

SEQ ID NO: 68456 - protein, 13 aa, Homo sapiens
  CDR3 for beta chain variable domain of TCR clone 34228 (TRBV7-9, TRBJ1-2)
CASSLKQNYGYTC

SEQ ID NO: 68457 - protein, 11 aa, Homo sapiens
  CDR3 for alpha chain variable domain of TCR clone 34229 (TRAV21, TRAJ11)
CAVNGYSTLTF

SEQ ID NO: 68458 - protein, 16 aa, Homo sapiens
  CDR3 for beta chain variable domain of TCR clone 34229 (TRBV19, TRBJ2-1)
CASSSKGTRSYNEQFF

SEQ ID NO: 68459 - protein, 16 aa, Homo sapiens
  CDR3 for alpha chain variable domain of TCR clone 34230 (TRAV3, TRAJ10)
CAVRDMRAGGGSKLTF

SEQ ID NO: 68460 - protein, 13 aa, Homo sapiens
  CDR3 for beta chain variable domain of TCR clone 34230 (TRBV12-4, TRBJ2-7)
CASSPTETYEQYF

SEQ ID NO: 68461 - protein, 14 aa, Homo sapiens
  CDR3 for alpha chain variable domain of TCR clone 34231 (TRAV26-1, TRAJ8)
CIVRVDTGSQRLVF

SEQ ID NO: 68462 - protein, 15 aa, Homo sapiens
  CDR3 for beta chain variable domain of TCR clone 34231 (TRBV10-2, TRBJ2-7)
CASWNRGQATYERYF

SEQ ID NO: 68463 - protein, 15 aa, Homo sapiens
  CDR3 for alpha chain variable domain of TCR clone 34232 (TRAV8-4, TRAJ11)
CAVSRALSGYSTLPF

SEQ ID NO: 68464 - protein, 13 aa, Homo sapiens
  CDR3 for beta chain variable domain of TCR clone 34232 (TRBV10-3, TRBJ2-7)
CASKLAVNYEQYF

SEQ ID NO: 68465 - protein, 13 aa, Homo sapiens
  CDR3 for alpha chain variable domain of TCR clone 34233 (TRAV20, TRAJ34)
CAVSSYNTDKLIF

SEQ ID NO: 68466 - protein, 13 aa, Homo sapiens
  CDR3 for beta chain variable domain of TCR clone 34233 (TRBV7-9, TRBJ1-2)
CASSLKQNHGYTF

SEQ ID NO: 68467 - protein, 13 aa, Homo sapiens
  CDR3 for alpha chain variable domain of TCR clone 34234 (TRAV20, TRAJ37)
CAGCSSNTGKLIF

SEQ ID NO: 68468 - protein, 11 aa, Homo sapiens
  CDR3 for beta chain variable domain of TCR clone 34234 (TRBV12-4, TRBJ2-3)
CASTATDTHYF

SEQ ID NO: 68469 - protein, 14 aa, Homo sapiens
  CDR3 for alpha chain variable domain of TCR clone 34235 (TRAV8-3, TRAJ4)
CAVGAAGGYNKLIF

SEQ ID NO: 68470 - protein, 15 aa, Homo sapiens
  CDR3 for beta chain variable domain of TCR clone 34235 (TRBV6-5, TRBJ2-1)
CASSYDAGAGNGQFF

SEQ ID NO: 68471 - protein, 16 aa, Homo sapiens
  CDR3 for alpha chain variable domain of TCR clone 34236 (TRAV3, TRAJ5)
FAVRNLMDTGRRALTF

SEQ ID NO: 68472 - protein, 16 aa, Homo sapiens
  CDR3 for beta chain variable domain of TCR clone 34236 (TRBV4-2, TRBJ2-7)
CASSQEGLANSYEQYF

SEQ ID NO: 68473 - protein, 16 aa, Homo sapiens
  CDR3 for alpha chain variable domain of TCR clone 34237 (TRAV14/DV4, TRAJ21)
CAMREGPENNFNKFYF

SEQ ID NO: 68474 - protein, 12 aa, Homo sapiens
  CDR3 for beta chain variable domain of TCR clone 34237 (TRBV29-1, TRBJ2-2)
CSVDKYTGELSF

SEQ ID NO: 68475 - protein, 14 aa, Homo sapiens
  CDR3 for alpha chain variable domain of TCR clone 34238 (TRAV17, TRAJ22)
CATSPSGSARQLTF

SEQ ID NO: 68476 - protein, 15 aa, Homo sapiens
  CDR3 for beta chain variable domain of TCR clone 34238 (TRBV4-1, TRBJ2-5)
CASSQWDLYQETQYF

SEQ ID NO: 68477 - protein, 14 aa, Homo sapiens
  CDR3 for alpha chain variable domain of TCR clone 34239 (TRAV1-2, TRAJ16)
CAVNRFSDGQKLPF

SEQ ID NO: 68478 - protein, 16 aa, Homo sapiens
  CDR3 for beta chain variable domain of TCR clone 34239 (TRBV7-3, TRBJ2-2)
CASSLKRGTLSGELFF

SEQ ID NO: 68479 - protein, 14 aa, Homo sapiens
  CDR3 for alpha chain variable domain of TCR clone 34240 (TRAV1-2, TRAJ8)
CAVREDTGFQRLVF

SEQ ID NO: 68480 - protein, 12 aa, Homo sapiens
  CDR3 for beta chain variable domain of TCR clone 34240 (TRBV11-2, TRBJ2-2)
CASSLGGGELFF

SEQ ID NO: 68481 - protein, 16 aa, Homo sapiens
  CDR3 for alpha chain variable domain of TCR clone 34241 (TRAV27, TRAJ52)
CAGAGADGTSYGKLTF

SEQ ID NO: 68482 - protein, 17 aa, Homo sapiens
  CDR3 for beta chain variable domain of TCR clone 34241 (TRBV24-1, TRBJ2-3)
CATSDLPSGEDTDTQYF

SEQ ID NO: 68483 - protein, 13 aa, Homo sapiens
  CDR3 for alpha chain variable domain of TCR clone 34242 (TRAV21, TRAJ20)
CAVGLRVYYKLSF

SEQ ID NO: 68484 - protein, 13 aa, Homo sapiens
  CDR3 for beta chain variable domain of TCR clone 34242 (TRBV6-1, TRBJ1-1)
CASSRQGNTEAFF

SEQ ID NO: 68485 - protein, 18 aa, Homo sapiens
  CDR3 for alpha chain variable domain of TCR clone 34243 (TRAV21, TRAJ52)
CAVRPSPAGGTSCGKLTF

SEQ ID NO: 68486 - protein, 17 aa, Homo sapiens
  CDR3 for beta chain variable domain of TCR clone 34243 (TRBV13, TRBJ2-3)
CASSLSRVAGGRNTRYF

SEQ ID NO: 68487 - protein, 16 aa, Homo sapiens
  CDR3 for alpha chain variable domain of TCR clone 34244 (TRAV3, TRAJ42)
CAVRDIEGGSQGNLIF

SEQ ID NO: 68488 - protein, 14 aa, Homo sapiens
  CDR3 for beta chain variable domain of TCR clone 34244 (TRBV18, TRBJ1-1)
CASSPPTGRTEASF

SEQ ID NO: 68489 - protein, 16 aa, Homo sapiens
  CDR3 for alpha chain variable domain of TCR clone 34245 (TRAV30, TRAJ24)
CGTEIVDADSWGKFQF

SEQ ID NO: 68490 - protein, 19 aa, Homo sapiens
  CDR3 for beta chain variable domain of TCR clone 34245 (TRBV25-1, TRBJ2-2)
CAILVYRVDRGRKTGELFL

SEQ ID NO: 68491 - protein, 15 aa, Homo sapiens
  CDR3 for alpha chain variable domain of TCR clone 34246 (TRAV1-2, TRAJ8)
CAVRDRNTGFQKLVL

SEQ ID NO: 68492 - protein, 13 aa, Homo sapiens
  CDR3 for beta chain variable domain of TCR clone 34246 (TRBV5-7, TRBJ2-1)
CASSLVESVEQFF

SEQ ID NO: 68493 - protein, 14 aa, Homo sapiens
  CDR3 for alpha chain variable domain of TCR clone 34247 (TRAV13-1, TRAJ35)
CPASKGGFGNVLHC

SEQ ID NO: 68494 - protein, 13 aa, Homo sapiens
  CDR3 for beta chain variable domain of TCR clone 34247 (TRBV7-3, TRBJ1-1)
CASSQDWGAEAFF

SEQ ID NO: 68495 - protein, 11 aa, Homo sapiens
  CDR3 for alpha chain variable domain of TCR clone 34248 (TRAV13-2, TRAJ23)
RAESPRGKLIF

SEQ ID NO: 68496 - protein, 18 aa, Homo sapiens
  CDR3 for beta chain variable domain of TCR clone 34248 (TRBV6-5, TRBJ1-1)
CASSYSAPGGTGGTEAFF

SEQ ID NO: 68497 - protein, 15 aa, Homo sapiens
  CDR3 for alpha chain variable domain of TCR clone 34249 (TRAV12-3, TRAJ6)
CAMSATTGGGYIPTF

SEQ ID NO: 68498 - protein, 15 aa, Homo sapiens
  CDR3 for beta chain variable domain of TCR clone 34249 (TRBV28, TRBJ2-5)
CASSPPWSYQETQYF

SEQ ID NO: 68499 - protein, 17 aa, Homo sapiens
  CDR3 for alpha chain variable domain of TCR clone 34250 (TRAV3, TRAJ38)
CAVRDCLNAGNNRKLIW

SEQ ID NO: 68500 - protein, 16 aa, Homo sapiens
  CDR3 for beta chain variable domain of TCR clone 34250 (TRBV28, TRBJ2-2)
CASSLEGGSNTGELFF

SEQ ID NO: 68501 - protein, 13 aa, Homo sapiens
  CDR3 for alpha chain variable domain of TCR clone 34251 (TRAV17, TRAJ26)
CATVDNYGQDFVF

SEQ ID NO: 68502 - protein, 16 aa, Homo sapiens
  CDR3 for beta chain variable domain of TCR clone 34251 (TRBV2, TRBJ2-1)
CASSVGGSLSYNEQFF

SEQ ID NO: 68503 - protein, 11 aa, Homo sapiens
  CDR3 for alpha chain variable domain of TCR clone 34252 (TRAV4, TRAJ23)
CLVAPGGKLIF

SEQ ID NO: 68504 - protein, 15 aa, Homo sapiens
  CDR3 for beta chain variable domain of TCR clone 34252 (TRBV7-2, TRBJ2-1)
CASSFQADEYNGQFF

SEQ ID NO: 68505 - protein, 14 aa, Homo sapiens
  CDR3 for alpha chain variable domain of TCR clone 34253 (TRAV8-3, TRAJ47)
CAVGAQGRGNKLVF

SEQ ID NO: 68506 - protein, 14 aa, Homo sapiens
  CDR3 for beta chain variable domain of TCR clone 34253 (TRBV6-1, TRBJ1-3)
CASVQGGGGNTIYF

SEQ ID NO: 68507 - protein, 15 aa, Homo sapiens
  CDR3 for alpha chain variable domain of TCR clone 34254 (TRAV3, TRAJ3)
CAVRDRDSSASKIIF

SEQ ID NO: 68508 - protein, 12 aa, Homo sapiens
  CDR3 for beta chain variable domain of TCR clone 34254 (TRBV11-2, TRBJ2-2)
CASSLPTGELFF

SEQ ID NO: 68509 - protein, 13 aa, Homo sapiens
  CDR3 for alpha chain variable domain of TCR clone 34255 (TRAV20, TRAJ48)
CAVHLFGNEKLTF

SEQ ID NO: 68510 - protein, 15 aa, Homo sapiens
  CDR3 for beta chain variable domain of TCR clone 34255 (TRBV6-5, TRBJ2-6)
CASSQWEAGANVLTL

SEQ ID NO: 68511 - protein, 12 aa, Homo sapiens
  CDR3 for alpha chain variable domain of TCR clone 34256 (TRAV13-1, TRAJ48)
CAANFGNEKLTF

SEQ ID NO: 68512 - protein, 15 aa, Homo sapiens
  CDR3 for beta chain variable domain of TCR clone 34256 (TRBV7-2, TRBJ2-3)
CASSLVVRGPDTQYF

SEQ ID NO: 68513 - protein, 13 aa, Homo sapiens
  CDR3 for alpha chain variable domain of TCR clone 34257 (TRAV38-1, TRAJ42)
CARWGGSQGNLIF

SEQ ID NO: 68514 - protein, 14 aa, Homo sapiens
  CDR3 for beta chain variable domain of TCR clone 34257 (TRBV19, TRBJ2-1)
CASPTFVLSGEQFF

SEQ ID NO: 68515 - protein, 15 aa, Homo sapiens
  CDR3 for alpha chain variable domain of TCR clone 34258 (TRAV12-3, TRAJ6)
CAMSATTGGSYIPTF

SEQ ID NO: 68516 - protein, 16 aa, Homo sapiens
  CDR3 for beta chain variable domain of TCR clone 34258 (TRBV20-1, TRBJ1-2)
CSASMGQGVANYVYTF

SEQ ID NO: 68517 - protein, 13 aa, Homo sapiens
  CDR3 for alpha chain variable domain of TCR clone 34259 (TRAV13-2, TRAJ48)
CAEMDFGNEKLTF

SEQ ID NO: 68518 - protein, 15 aa, Homo sapiens
  CDR3 for beta chain variable domain of TCR clone 34259 (TRBV7-9, TRBJ1-6)
FASSSPGRGNSPLHF

SEQ ID NO: 68519 - protein, 13 aa, Homo sapiens
  CDR3 for alpha chain variable domain of TCR clone 34260 (TRAV21, TRAJ57)
CAVTQGGSEKLVF

SEQ ID NO: 68520 - protein, 16 aa, Homo sapiens
  CDR3 for beta chain variable domain of TCR clone 34260 (TRBV29-1, TRBJ2-7)
CSVEDVEDGTAYEQYF

SEQ ID NO: 68521 - protein, 16 aa, Homo sapiens
  CDR3 for alpha chain variable domain of TCR clone 34261 (TRAV21, TRAJ37)
CAARPRGSSNTGKLIF

SEQ ID NO: 68522 - protein, 16 aa, Homo sapiens
  CDR3 for beta chain variable domain of TCR clone 34261 (TRBV2, TRBJ2-1)
CASSVGGSLSYNEQFF

SEQ ID NO: 68523 - protein, 13 aa, Homo sapiens
  CDR3 for alpha chain variable domain of TCR clone 34262 (TRAV3, TRAJ21)
CAVREPDFNKFYF

SEQ ID NO: 68524 - protein, 15 aa, Homo sapiens
  CDR3 for beta chain variable domain of TCR clone 34262 (TRBV2, TRBJ2-1)
CASSELAGGYNEQLF

SEQ ID NO: 68525 - protein, 12 aa, Homo sapiens
  CDR3 for alpha chain variable domain of TCR clone 34263 (TRAV3, TRAJ31)
CAVRDGNASLMF

SEQ ID NO: 68526 - protein, 18 aa, Homo sapiens
  CDR3 for beta chain variable domain of TCR clone 34263 (TRBV7-2, TRBJ2-3)
CASSLKREGSGITDTQYF

SEQ ID NO: 68527 - protein, 13 aa, Homo sapiens
  CDR3 for alpha chain variable domain of TCR clone 34264 (TRAV26-2, TRAJ43)
CILRAVNNNDMRF

SEQ ID NO: 68528 - protein, 15 aa, Homo sapiens
  CDR3 for beta chain variable domain of TCR clone 34264 (TRBV7-2, TRBJ2-1)
CASTHGTGIYNEQSF

SEQ ID NO: 68529 - protein, 14 aa, Homo sapiens
  CDR3 for alpha chain variable domain of TCR clone 34265 (TRAV35, TRAJ42)
CAGRYGRSQGNLIF

SEQ ID NO: 68530 - protein, 15 aa, Homo sapiens
  CDR3 for beta chain variable domain of TCR clone 34265 (TRBV7-9, TRBJ2-1)
CASSLGWGRANEQFF

SEQ ID NO: 68531 - protein, 12 aa, Homo sapiens
  CDR3 for alpha chain variable domain of TCR clone 34266 (TRAV13-1, TRAJ21)
CAAKEGSNKFYF

SEQ ID NO: 68532 - protein, 14 aa, Homo sapiens
  CDR3 for beta chain variable domain of TCR clone 34266 (TRBV5-4, TRBJ1-1)
CASSLDSRRDEAFF

SEQ ID NO: 68533 - protein, 15 aa, Homo sapiens
  CDR3 for alpha chain variable domain of TCR clone 34267 (TRAV10, TRAJ22)
CVVRISSGSARQLTF

SEQ ID NO: 68534 - protein, 16 aa, Homo sapiens
  CDR3 for beta chain variable domain of TCR clone 34267 (TRBV12-4, TRBJ2-3)
CASSFISGSGTDTQYF

SEQ ID NO: 68535 - protein, 15 aa, Homo sapiens
  CDR3 for alpha chain variable domain of TCR clone 34268 (TRAV12-2, TRAJ43)
CAFDMRFGAGTRLTE

SEQ ID NO: 68536 - protein, 18 aa, Homo sapiens
  CDR3 for beta chain variable domain of TCR clone 34268 (TRBV20-1, TRBJ2-3)
CSASGLAGGPGTTDTQYF

SEQ ID NO: 68537 - protein, 13 aa, Homo sapiens
  CDR3 for alpha chain variable domain of TCR clone 34269 (TRAV29/DV5, TRAJ31)
CAASRNNNARLMF

SEQ ID NO: 68538 - protein, 16 aa, Homo sapiens
  CDR3 for beta chain variable domain of TCR clone 34269 (TRBV13, TRBJ2-2)
CASSPRTGEHTGELFF

SEQ ID NO: 68539 - protein, 15 aa, Homo sapiens
  CDR3 for alpha chain variable domain of TCR clone 34270 (TRAV12-3, TRAJ27)
CAMRAYNTNAGKSTF

SEQ ID NO: 68540 - protein, 13 aa, Homo sapiens
  CDR3 for beta chain variable domain of TCR clone 34270 (TRBV11-2, TRBJ2-5)
CASSRGPSETKYF

SEQ ID NO: 68541 - protein, 17 aa, Homo sapiens
  CDR3 for alpha chain variable domain of TCR clone 34271 (TRAV3, TRAJ38)
CAVRDCLNAGTNRKLIW

SEQ ID NO: 68542 - protein, 14 aa, Homo sapiens
  CDR3 for beta chain variable domain of TCR clone 34271 (TRBV5-5, TRBJ1-5)
CASSGQGVDQPQHF

SEQ ID NO: 68543 - protein, 16 aa, Homo sapiens
  CDR3 for alpha chain variable domain of TCR clone 34272 (TRAV3, TRAJ3)
CAVRDKAKSSASKIIF

SEQ ID NO: 68544 - protein, 16 aa, Homo sapiens
  CDR3 for beta chain variable domain of TCR clone 34272 (TRBV20-1, TRBJ2-4)
CSATSLAELAKNIQYF

SEQ ID NO: 68545 - protein, 15 aa, Homo sapiens
  CDR3 for alpha chain variable domain of TCR clone 34273 (TRAV21, TRAJ24)
CAARSSTDSWGKLHF

SEQ ID NO: 68546 - protein, 13 aa, Homo sapiens
  CDR3 for beta chain variable domain of TCR clone 34273 (TRBV11-2, TRBJ2-5)
CASSSTGEETQYF

SEQ ID NO: 68547 - protein, 14 aa, Homo sapiens
  CDR3 for alpha chain variable domain of TCR clone 34274 (TRAV38-1, TRAJ29)
CAFITPSVNTPLVF

SEQ ID NO: 68548 - protein, 14 aa, Homo sapiens
  CDR3 for beta chain variable domain of TCR clone 34274 (TRBV18, TRBJ2-7)
CASSPRGGAYEQYF

SEQ ID NO: 68549 - protein, 13 aa, Homo sapiens
  CDR3 for alpha chain variable domain of TCR clone 34275 (TRAV21, TRAJ27)
CAARPGNAGKTTF

SEQ ID NO: 68550 - protein, 14 aa, Homo sapiens
  CDR3 for beta chain variable domain of TCR clone 34275 (TRBV7-6, TRBJ2-3)
CASSLGTVTDTQYF

SEQ ID NO: 68551 - protein, 12 aa, Homo sapiens
  CDR3 for alpha chain variable domain of TCR clone 34276 (TRAV21, TRAJ33)
CAKMDSNYQLIW

SEQ ID NO: 68552 - protein, 14 aa, Homo sapiens
  CDR3 for beta chain variable domain of TCR clone 34276 (TRBV2, TRBJ2-7)
CASSLTTGGYEQYF

SEQ ID NO: 68553 - protein, 11 aa, Homo sapiens
  CDR3 for alpha chain variable domain of TCR clone 34277 (TRAV12-1, TRAJ30)
CVVNGQDKVIF

SEQ ID NO: 68554 - protein, 12 aa, Homo sapiens
  CDR3 for beta chain variable domain of TCR clone 34277 (TRBV27, TRBJ2-2)
CASKLFTGELFF

SEQ ID NO: 68555 - protein, 13 aa, Homo sapiens
  CDR3 for alpha chain variable domain of TCR clone 34278 (TRAV16, TRAJ48)
CSPLNFGNEKLTF

SEQ ID NO: 68556 - protein, 11 aa, Homo sapiens
  CDR3 for beta chain variable domain of TCR clone 34278 (TRBV7-9, TRBJ2-3)
CASRPTDTQYF

SEQ ID NO: 68557 - protein, 18 aa, Homo sapiens
  CDR3 for alpha chain variable domain of TCR clone 34279 (TRAV26-2, TRAJ54)
CILRDVEVGIQGAQKLVF

SEQ ID NO: 68558 - protein, 16 aa, Homo sapiens
  CDR3 for beta chain variable domain of TCR clone 34279 (TRBV28, TRBJ1-5)
CASSLTGQGWNQPQHF

SEQ ID NO: 68559 - protein, 15 aa, Homo sapiens
  CDR3 for alpha chain variable domain of TCR clone 34280 (TRAV3, TRAJ30)
CAVRDEYGRDDKIIF

SEQ ID NO: 68560 - protein, 16 aa, Homo sapiens
  CDR3 for beta chain variable domain of TCR clone 34280 (TRBV5-1, TRBJ2-5)
CASSWANHRGRETQYF

SEQ ID NO: 68561 - protein, 13 aa, Homo sapiens
  CDR3 for alpha chain variable domain of TCR clone 34281 (TRAV13-1, TRAJ32)
CAASNGWWCYKQA

SEQ ID NO: 68562 - protein, 17 aa, Homo sapiens
  CDR3 for beta chain variable domain of TCR clone 34281 (TRBV15, TRBJ1-2)
CATSGREIDVVNYGYTF

SEQ ID NO: 68563 - protein, 14 aa, Homo sapiens
  CDR3 for alpha chain variable domain of TCR clone 34282 (TRAV1-2, TRAJ16)
CAVNRVSDGQKLLF

SEQ ID NO: 68564 - protein, 13 aa, Homo sapiens
  CDR3 for beta chain variable domain of TCR clone 34282 (TRBV7-9, TRBJ1-2)
CASSLKQNYGYTF

SEQ ID NO: 68565 - protein, 14 aa, Homo sapiens
  CDR3 for alpha chain variable domain of TCR clone 34283 (TRAV12-3, TRAJ33)
CAMSVPGSNYQLIW

SEQ ID NO: 68566 - protein, 11 aa, Homo sapiens
  CDR3 for beta chain variable domain of TCR clone 34283 (TRBV7-9, TRBJ2-3)
CASSYTDTQYF

SEQ ID NO: 68567 - protein, 13 aa, Homo sapiens
  CDR3 for alpha chain variable domain of TCR clone 34284 (TRAV17, TRAJ5)
CALRGTGRRALTF

SEQ ID NO: 68568 - protein, 15 aa, Homo sapiens
  CDR3 for beta chain variable domain of TCR clone 34284 (TRBV9, TRBJ1-6)
CASSAAGTGDSPLHF

SEQ ID NO: 68569 - protein, 14 aa, Homo sapiens
  CDR3 for alpha chain variable domain of TCR clone 34285 (TRAV12-3, TRAJ10)
SHLPLTGGGNKLTF

SEQ ID NO: 68570 - protein, 14 aa, Homo sapiens
  CDR3 for beta chain variable domain of TCR clone 34285 (TRBV19, TRBJ2-2)
CASSTLHRSGELFF

SEQ ID NO: 68571 - protein, 11 aa, Homo sapiens
  CDR3 for alpha chain variable domain of TCR clone 34286 (TRAV17, TRAJ9)
CATTGGFKTIF

SEQ ID NO: 68572 - protein, 11 aa, Homo sapiens
  CDR3 for beta chain variable domain of TCR clone 34286 (TRBV29-1, TRBJ2-5)
CSGDRTGTQYF

SEQ ID NO: 68573 - protein, 11 aa, Homo sapiens
  CDR3 for alpha chain variable domain of TCR clone 34287 (TRAV2, TRAJ21)
CAVFNFNKFYF

SEQ ID NO: 68574 - protein, 16 aa, Homo sapiens
  CDR3 for beta chain variable domain of TCR clone 34287 (TRBV12-5, TRBJ2-5)
CASGPRTSGNQETQYF

SEQ ID NO: 68575 - protein, 14 aa, Homo sapiens
  CDR3 for alpha chain variable domain of TCR clone 34288 (TRAV21, TRAJ12)
CAVRNGDSSHKLIF

SEQ ID NO: 68576 - protein, 14 aa, Homo sapiens
  CDR3 for beta chain variable domain of TCR clone 34288 (TRBV7-6, TRBJ2-7)
CASSLTGTGNEQYF

SEQ ID NO: 68577 - protein, 15 aa, Homo sapiens
  CDR3 for alpha chain variable domain of TCR clone 34289 (TRAV13-1, TRAJ42)
CAASIAGGSQGNLIF

SEQ ID NO: 68578 - protein, 14 aa, Homo sapiens
  CDR3 for beta chain variable domain of TCR clone 34289 (TRBV19, TRBJ2-1)
CASPTFVLSGEQFF

SEQ ID NO: 68579 - protein, 15 aa, Homo sapiens
  CDR3 for alpha chain variable domain of TCR clone 34290 (TRAV3, TRAJ42)
CAVRGGTGSQGNLIF

SEQ ID NO: 68580 - protein, 14 aa, Homo sapiens
  CDR3 for beta chain variable domain of TCR clone 34290 (TRBV19, TRBJ1-2)
CASSSLFARDVYTS

SEQ ID NO: 68581 - protein, 14 aa, Homo sapiens
  CDR3 for alpha chain variable domain of TCR clone 34291 (TRAV35, TRAJ33)
CAGSSQDSNYQLIW

SEQ ID NO: 68582 - protein, 15 aa, Homo sapiens
  CDR3 for beta chain variable domain of TCR clone 34291 (TRBV20-1, TRBJ2-7)
CSAESRTSGAYEQYF

SEQ ID NO: 68583 - protein, 14 aa, Homo sapiens
  CDR3 for alpha chain variable domain of TCR clone 34292 (TRAV21, TRAJ15)
CAVSPNQAGTALIF

SEQ ID NO: 68584 - protein, 11 aa, Homo sapiens
  CDR3 for beta chain variable domain of TCR clone 34292 (TRBV20-1, TRBJ2-7)
CSARTSYEQYF

SEQ ID NO: 68585 - protein, 14 aa, Homo sapiens
  CDR3 for alpha chain variable domain of TCR clone 34293 (TRAV13-2, TRAJ17)
CAENSKAAGNKLTF

SEQ ID NO: 68586 - protein, 15 aa, Homo sapiens
  CDR3 for beta chain variable domain of TCR clone 34293 (TRBV12-4, TRBJ2-5)
CASSLSGAFQETQYF

SEQ ID NO: 68587 - protein, 16 aa, Homo sapiens
  CDR3 for alpha chain variable domain of TCR clone 34294 (TRAV16, TRAJ4)
CALSRMFSGGYNKMIF

SEQ ID NO: 68588 - protein, 16 aa, Homo sapiens
  CDR3 for beta chain variable domain of TCR clone 34294 (TRBV24-1, TRBJ2-3)
CATSDPGTGATDTQYF

SEQ ID NO: 68589 - protein, 13 aa, Homo sapiens
  CDR3 for alpha chain variable domain of TCR clone 34295 (TRAV3, TRAJ28)
CAVGAVGSYQLTF

SEQ ID NO: 68590 - protein, 16 aa, Homo sapiens
  CDR3 for beta chain variable domain of TCR clone 34295 (TRBV19, TRBJ2-1)
CASSKAGPSSYNEQFF

SEQ ID NO: 68591 - protein, 12 aa, Homo sapiens
  CDR3 for alpha chain variable domain of TCR clone 34296 (TRAV25, TRAJ38)
CAGTGNNRKLIW

SEQ ID NO: 68592 - protein, 14 aa, Homo sapiens
  CDR3 for beta chain variable domain of TCR clone 34296 (TRBV19, TRBJ1-5)
CASSKMTGPQHQHF

SEQ ID NO: 68593 - protein, 14 aa, Homo sapiens
  CDR3 for alpha chain variable domain of TCR clone 34297 (TRAV12-3, TRAJ10)
SHLPLTGGGNKLTF

SEQ ID NO: 68594 - protein, 12 aa, Homo sapiens
  CDR3 for beta chain variable domain of TCR clone 34297 (TRBV7-8, TRBJ2-7)
CASSLGDRERYF

SEQ ID NO: 68595 - protein, 14 aa, Homo sapiens
  CDR3 for alpha chain variable domain of TCR clone 34298 (TRAV17, TRAJ39)
CATDPVRAGNMFTF

SEQ ID NO: 68596 - protein, 15 aa, Homo sapiens
  CDR3 for beta chain variable domain of TCR clone 34298 (TRBV13, TRBJ1-5)
CASSFGQGGVQPQHF

SEQ ID NO: 68597 - protein, 12 aa, Homo sapiens
  CDR3 for alpha chain variable domain of TCR clone 34299 (TRAV17, TRAJ49)
CATVTTGNQFYF

SEQ ID NO: 68598 - protein, 18 aa, Homo sapiens
  CDR3 for beta chain variable domain of TCR clone 34299 (TRBV11-2, TRBJ2-6)
CASSLNPFLGTGANDLTF

SEQ ID NO: 68599 - protein, 13 aa, Homo sapiens
  CDR3 for alpha chain variable domain of TCR clone 34300 (TRAV35, TRAJ42)
CAGFPGSQGNHIF

SEQ ID NO: 68600 - protein, 14 aa, Homo sapiens
  CDR3 for beta chain variable domain of TCR clone 34300 (TRBV19, TRBJ2-1)
CASPTFVLSGEQFF

SEQ ID NO: 68601 - protein, 14 aa, Homo sapiens
  CDR3 for alpha chain variable domain of TCR clone 34301 (TRAV14/DV4, TRAJ42)
CPRGSLRSQGNLIF

SEQ ID NO: 68602 - protein, 14 aa, Homo sapiens
  CDR3 for beta chain variable domain of TCR clone 34301 (TRBV20-1, TRBJ2-3)
RTSGGPGTTDTQYF

SEQ ID NO: 68603 - protein, 13 aa, Homo sapiens
  CDR3 for alpha chain variable domain of TCR clone 34302 (TRAV21, TRAJ20)
CAMGLRVDYKLSF

SEQ ID NO: 68604 - protein, 13 aa, Homo sapiens
  CDR3 for beta chain variable domain of TCR clone 34302 (TRBV6-1, TRBJ1-1)
CASSRQGNTGAFF

SEQ ID NO: 68605 - protein, 14 aa, Homo sapiens
  CDR3 for alpha chain variable domain of TCR clone 34303 (TRAV12-2, TRAJ17)
CAVLFKAAGNKLTF

SEQ ID NO: 68606 - protein, 14 aa, Homo sapiens
  CDR3 for beta chain variable domain of TCR clone 34303 (TRBV19, TRBJ2-5)
CASSMTGQQETQYF

SEQ ID NO: 68607 - protein, 12 aa, Homo sapiens
  CDR3 for alpha chain variable domain of TCR clone 34304 (TRAV13-2, TRAJ8)
CAPWLGFQKLVF

SEQ ID NO: 68608 - protein, 15 aa, Homo sapiens
  CDR3 for beta chain variable domain of TCR clone 34304 (TRBV29-1, TRBJ2-1)
CSGRDRKSSHNEQFF

SEQ ID NO: 68609 - protein, 12 aa, Homo sapiens
  CDR3 for alpha chain variable domain of TCR clone 34305 (TRAV27, TRAJ13)
KAILGGYQKVTF

SEQ ID NO: 68610 - protein, 15 aa, Homo sapiens
  CDR3 for beta chain variable domain of TCR clone 34305 (TRBV29-1, TRBJ2-1)
CSVGRHALFYNEQFF

SEQ ID NO: 68611 - protein, 17 aa, Homo sapiens
  CDR3 for alpha chain variable domain of TCR clone 34306 (TRAV8-6, TRAJ58)
CAVSSWVGETSGSRLTC

SEQ ID NO: 68612 - protein, 14 aa, Homo sapiens
  CDR3 for beta chain variable domain of TCR clone 34306 (TRBV4-2, TRBJ2-1)
CASGLDRAYNEQFF

SEQ ID NO: 68613 - protein, 14 aa, Homo sapiens
  CDR3 for alpha chain variable domain of TCR clone 34307 (TRAV1-1, TRAJ27)
CAVIYNTNAGKSTF

SEQ ID NO: 68614 - protein, 15 aa, Homo sapiens
  CDR3 for beta chain variable domain of TCR clone 34307 (TRBV7-2, TRBJ2-1)
CASSSGLAGSNEQFF

SEQ ID NO: 68615 - protein, 13 aa, Homo sapiens
  CDR3 for alpha chain variable domain of TCR clone 34308 (TRAV29/DV5, TRAJ31)
CAASRNNNARLMF

SEQ ID NO: 68616 - protein, 12 aa, Homo sapiens
  CDR3 for beta chain variable domain of TCR clone 34308 (TRBV14, TRBJ2-4)
CASSNLKSTQYF

SEQ ID NO: 68617 - protein, 12 aa, Homo sapiens
  CDR3 for alpha chain variable domain of TCR clone 34309 (TRAV12-3, TRAJ17)
CAMTLTGNKLTF

SEQ ID NO: 68618 - protein, 14 aa, Homo sapiens
  CDR3 for beta chain variable domain of TCR clone 34309 (TRBV11-2, TRBJ2-3)
CASRRLARTDTQYF

SEQ ID NO: 68619 - protein, 15 aa, Homo sapiens
  CDR3 for alpha chain variable domain of TCR clone 34310 (TRAV3, TRAJ3)
CAVRDGHRSASKIIF

SEQ ID NO: 68620 - protein, 14 aa, Homo sapiens
  CDR3 for beta chain variable domain of TCR clone 34310 (TRBV28, TRBJ1-4)
CASSFGTFDEKLFF

SEQ ID NO: 68621 - protein, 16 aa, Homo sapiens
  CDR3 for alpha chain variable domain of TCR clone 34311 (TRAV30, TRAJ24)
CGTEIVDADSWGKFQF

SEQ ID NO: 68622 - protein, 12 aa, Homo sapiens
  CDR3 for beta chain variable domain of TCR clone 34311 (TRBV11-2, TRBJ2-1)
CASSPGNNEQLF

SEQ ID NO: 68623 - protein, 18 aa, Homo sapiens
  CDR3 for alpha chain variable domain of TCR clone 34312 (TRAV1-2, TRAJ18)
CAVRDMGDRGSTLGRLSF

SEQ ID NO: 68624 - protein, 16 aa, Homo sapiens
  CDR3 for beta chain variable domain of TCR clone 34312 (TRBV29-1, TRBJ1-2)
CSVEANRDIANYGYTF

SEQ ID NO: 68625 - protein, 14 aa, Homo sapiens
  CDR3 for alpha chain variable domain of TCR clone 34313 (TRAV21, TRAJ38)
CAVANAGNNRKLIW

SEQ ID NO: 68626 - protein, 16 aa, Homo sapiens
  CDR3 for beta chain variable domain of TCR clone 34313 (TRBV5-4, TRBJ2-1)
CASSLALAGAYSEQFF

SEQ ID NO: 68627 - protein, 13 aa, Homo sapiens
  CDR3 for alpha chain variable domain of TCR clone 34314 (TRAV2, TRAJ40)
CAVVTSGTYKYIF

SEQ ID NO: 68628 - protein, 15 aa, Homo sapiens
  CDR3 for beta chain variable domain of TCR clone 34314 (TRBV11-3, TRBJ2-3)
CASLKDGRERDTQYF

SEQ ID NO: 68629 - protein, 15 aa, Homo sapiens
  CDR3 for alpha chain variable domain of TCR clone 34315 (TRAV17, TRAJ22)
RATVAPSGSARQLTF

SEQ ID NO: 68630 - protein, 15 aa, Homo sapiens
  CDR3 for beta chain variable domain of TCR clone 34315 (TRBV11-3, TRBJ2-3)
CASLKDGREGDTQYF

SEQ ID NO: 68631 - protein, 13 aa, Homo sapiens
  CDR3 for alpha chain variable domain of TCR clone 34316 (TRAV12-3, TRAJ13)
CAMSPGGYQKVTF

SEQ ID NO: 68632 - protein, 13 aa, Homo sapiens
  CDR3 for beta chain variable domain of TCR clone 34316 (TRBV20-1, TRBJ1-1)
CSAPPGGHTEAFF

SEQ ID NO: 68633 - protein, 13 aa, Homo sapiens
  CDR3 for alpha chain variable domain of TCR clone 34317 (TRAV1-2, TRAJ9)
CAALNTGGFKTIF

SEQ ID NO: 68634 - protein, 15 aa, Homo sapiens
  CDR3 for beta chain variable domain of TCR clone 34317 (TRBV10-3, TRBJ2-3)
CAISLTSGGTDTQYF

SEQ ID NO: 68635 - protein, 13 aa, Homo sapiens
  CDR3 for alpha chain variable domain of TCR clone 34318 (TRAV8-3, TRAJ36)
CAVGATGANNLFF

SEQ ID NO: 68636 - protein, 14 aa, Homo sapiens
  CDR3 for beta chain variable domain of TCR clone 34318 (TRBV12-5, TRBJ2-5)
CASGSRTHQETQYF

SEQ ID NO: 68637 - protein, 15 aa, Homo sapiens
  CDR3 for alpha chain variable domain of TCR clone 34319 (TRAV3, TRAJ4)
CAVRDGTGGYNKLIF

SEQ ID NO: 68638 - protein, 12 aa, Homo sapiens
  CDR3 for beta chain variable domain of TCR clone 34319 (TRBV12-4, TRBJ1-2)
CASSFIWLHLRF

SEQ ID NO: 68639 - protein, 12 aa, Homo sapiens
  CDR3 for alpha chain variable domain of TCR clone 34320 (TRAV1-1, TRAJ8)
CAGGTGFEKLVF

SEQ ID NO: 68640 - protein, 15 aa, Homo sapiens
  CDR3 for beta chain variable domain of TCR clone 34320 (TRBV7-9, TRBJ1-4)
CASSRTGGFNEKLFF

SEQ ID NO: 68641 - protein, 19 aa, Homo sapiens
  CDR3 for alpha chain variable domain of TCR clone 34321 (TRAV29/DV5, TRAJ53)
CSVLLCSKPDRGSNYKLTF

SEQ ID NO: 68642 - protein, 15 aa, Homo sapiens
  CDR3 for beta chain variable domain of TCR clone 34321 (TRBV19, TRBJ2-4)
CASSIGLAGANIRYF

SEQ ID NO: 68643 - protein, 11 aa, Homo sapiens
  CDR3 for alpha chain variable domain of TCR clone 34322 (TRAV2, TRAJ21)
CAVFNFNKFYF

SEQ ID NO: 68644 - protein, 14 aa, Homo sapiens
  CDR3 for beta chain variable domain of TCR clone 34322 (TRBV15, TRBJ2-3)
CATRSGNSTDTQYF

SEQ ID NO: 68645 - protein, 13 aa, Homo sapiens
  CDR3 for alpha chain variable domain of TCR clone 34323 (TRAV17, TRAJ9)
CDTDYTGGFKTIF

SEQ ID NO: 68646 - protein, 14 aa, Homo sapiens
  CDR3 for beta chain variable domain of TCR clone 34323 (TRBV19, TRBJ2-5)
CASSMTGQQETQYF

SEQ ID NO: 68647 - protein, 16 aa, Homo sapiens
  CDR3 for alpha chain variable domain of TCR clone 34324 (TRAV26-1, )
CIDIQNPDPAVYQLRD

SEQ ID NO: 68648 - protein, 19 aa, Homo sapiens
  CDR3 for beta chain variable domain of TCR clone 34324 (TRBV19, TRBJ2-5)
CASSIGKVTDFFLGETQYF

SEQ ID NO: 68649 - protein, 14 aa, Homo sapiens
  CDR3 for alpha chain variable domain of TCR clone 34325 (TRAV35, TRAJ50)
CAGHRKTSYDKVIF

SEQ ID NO: 68650 - protein, 12 aa, Homo sapiens
  CDR3 for beta chain variable domain of TCR clone 34325 (TRBV11-2, TRBJ2-2)
CASSLGGGELFF

SEQ ID NO: 68651 - protein, 14 aa, Homo sapiens
  CDR3 for alpha chain variable domain of TCR clone 34326 (TRAV29/DV5, TRAJ36)
CAARRKTGANNLFF

SEQ ID NO: 68652 - protein, 15 aa, Homo sapiens
  CDR3 for beta chain variable domain of TCR clone 34326 (TRBV7-9, TRBJ1-5)
CASSQGHQPNQPQHF

SEQ ID NO: 68653 - protein, 15 aa, Homo sapiens
  CDR3 for alpha chain variable domain of TCR clone 34327 (TRAV3, TRAJ47)
CDVRDIGEYGNKLVF

SEQ ID NO: 68654 - protein, 14 aa, Homo sapiens
  CDR3 for beta chain variable domain of TCR clone 34327 (TRBV13, TRBJ2-5)
CASSLERVGETQYF

SEQ ID NO: 68655 - protein, 11 aa, Homo sapiens
  CDR3 for alpha chain variable domain of TCR clone 34328 (TRAV1-2, TRAJ31)
CTVNNNARLMF

SEQ ID NO: 68656 - protein, 15 aa, Homo sapiens
  CDR3 for beta chain variable domain of TCR clone 34328 (TRBV28, TRBJ2-1)
CASSIIAGGRSEQFF

SEQ ID NO: 68657 - protein, 15 aa, Homo sapiens
  CDR3 for alpha chain variable domain of TCR clone 34329 (TRAV1-2, TRAJ26)
CAVRDLITMVRILSL

SEQ ID NO: 68658 - protein, 17 aa, Homo sapiens
  CDR3 for beta chain variable domain of TCR clone 34329 (TRBV13, TRBJ2-3)
CASSLSRVAGGRNTQYF

SEQ ID NO: 68659 - protein, 11 aa, Homo sapiens
  CDR3 for alpha chain variable domain of TCR clone 34330 (TRAV2, TRAJ13)
CASGGYQKVTF

SEQ ID NO: 68660 - protein, 16 aa, Homo sapiens
  CDR3 for beta chain variable domain of TCR clone 34330 (TRBV6-1, TRBJ2-5)
CASSETLDRGAEPQYF

SEQ ID NO: 68661 - protein, 15 aa, Homo sapiens
  CDR3 for alpha chain variable domain of TCR clone 34331 (TRAV4, TRAJ39)
CLVGPNNNAGNLLTF

SEQ ID NO: 68662 - protein, 16 aa, Homo sapiens
  CDR3 for beta chain variable domain of TCR clone 34331 (TRBV13, TRBJ2-2)
CASSPRTGEHTGELFF

SEQ ID NO: 68663 - protein, 17 aa, Homo sapiens
  CDR3 for alpha chain variable domain of TCR clone 34332 (TRAV13-2, TRAJ31)
CAENARLMFGDGTRLVV

SEQ ID NO: 68664 - protein, 14 aa, Homo sapiens
  CDR3 for beta chain variable domain of TCR clone 34332 (TRBV7-9, TRBJ2-1)
CASSLGVADNEQFF

SEQ ID NO: 68665 - protein, 11 aa, Homo sapiens
  CDR3 for alpha chain variable domain of TCR clone 34333 (TRAV17, TRAJ36)
CAPTGANNLFF

SEQ ID NO: 68666 - protein, 13 aa, Homo sapiens
  CDR3 for beta chain variable domain of TCR clone 34333 (TRBV12-4, TRBJ2-7)
YASSPTETYEQYF

SEQ ID NO: 68667 - protein, 16 aa, Homo sapiens
  CDR3 for alpha chain variable domain of TCR clone 34334 (TRAV8-3, TRAJ8)
CAVPRDGSTGFQKLVF

SEQ ID NO: 68668 - protein, 14 aa, Homo sapiens
  CDR3 for beta chain variable domain of TCR clone 34334 (TRBV28, TRBJ1-1)
CASSESGRGTEAFF

SEQ ID NO: 68669 - protein, 14 aa, Homo sapiens
  CDR3 for alpha chain variable domain of TCR clone 34335 (TRAV3, TRAJ28)
CAVRRGAGSYQLTF

SEQ ID NO: 68670 - protein, 16 aa, Homo sapiens
  CDR3 for beta chain variable domain of TCR clone 34335 (TRBV4-1, TRBJ2-7)
CASSQERTSGPLEQYF

SEQ ID NO: 68671 - protein, 16 aa, Homo sapiens
  CDR3 for alpha chain variable domain of TCR clone 34336 (TRAV35, TRAJ28)
CAGQRYSGAGSYQPTF

SEQ ID NO: 68672 - protein, 13 aa, Homo sapiens
  CDR3 for beta chain variable domain of TCR clone 34336 (TRBV19, TRBJ1-2)
CASSQGQVYGYTF

SEQ ID NO: 68673 - protein, 23 aa, Homo sapiens
  CDR3 for alpha chain variable domain of TCR clone 34337 (TRAV26-1, TRAJ38)
CIVRPLNAGNNHIQNPDPAAYQL

SEQ ID NO: 68674 - protein, 13 aa, Homo sapiens
  CDR3 for beta chain variable domain of TCR clone 34337 (TRBV18, TRBJ1-1)
CASSPNGDTEAFF

SEQ ID NO: 68675 - protein, 15 aa, Homo sapiens
  CDR3 for alpha chain variable domain of TCR clone 34338 (TRAV13-2, TRAJ16)
CAENDRFSDGQKLLF

SEQ ID NO: 68676 - protein, 14 aa, Homo sapiens
  CDR3 for beta chain variable domain of TCR clone 34338 (TRBV4-2, TRBJ1-5)
CASSRDRGNQPQHL

SEQ ID NO: 68677 - protein, 13 aa, Homo sapiens
  CDR3 for alpha chain variable domain of TCR clone 34339 (TRAV17, TRAJ9)
CATDYTGGFKTLF

SEQ ID NO: 68678 - protein, 14 aa, Homo sapiens
  CDR3 for beta chain variable domain of TCR clone 34339 (TRBV19, TRBJ2-5)
CASSMTGQQETQYF

SEQ ID NO: 68679 - protein, 16 aa, Homo sapiens
  CDR3 for alpha chain variable domain of TCR clone 34340 (TRAV30, TRAJ24)
CGTEIVDADSWGKFQF

SEQ ID NO: 68680 - protein, 13 aa, Homo sapiens
  CDR3 for beta chain variable domain of TCR clone 34340 (TRBV24-1, TRBJ2-1)
CATSAGPYNEQFF

SEQ ID NO: 68681 - protein, 10 aa, Homo sapiens
  CDR3 for alpha chain variable domain of TCR clone 34341 (TRAV17, TRAJ36)
CATVAGNPFF

SEQ ID NO: 68682 - protein, 12 aa, Homo sapiens
  CDR3 for beta chain variable domain of TCR clone 34341 (TRBV11-2, TRBJ2-4)
CASSSASGSEYF

SEQ ID NO: 68683 - protein, 13 aa, Homo sapiens
  CDR3 for alpha chain variable domain of TCR clone 34342 (TRAV27, TRAJ56)
CAGRPGANSKLTF

SEQ ID NO: 68684 - protein, 15 aa, Homo sapiens
  CDR3 for beta chain variable domain of TCR clone 34342 (TRBV6-1, TRBJ2-3)
CASSERWDSTDTQYF

SEQ ID NO: 68685 - protein, 14 aa, Homo sapiens
  CDR3 for alpha chain variable domain of TCR clone 34343 (TRAV35, TRAJ22)
CAGLRPGSARQLTF

SEQ ID NO: 68686 - protein, 15 aa, Homo sapiens
  CDR3 for beta chain variable domain of TCR clone 34343 (TRBV12-4, TRBJ2-5)
CASSPPTGFQETQYF

SEQ ID NO: 68687 - protein, 12 aa, Homo sapiens
  CDR3 for alpha chain variable domain of TCR clone 34344 (TRAV13-1, TRAJ49)
CAASPMGSQFYF

SEQ ID NO: 68688 - protein, 17 aa, Homo sapiens
  CDR3 for beta chain variable domain of TCR clone 34344 (TRBV11-2, TRBJ2-1)
CASSLYPPGVEYNEQFF

SEQ ID NO: 68689 - protein, 19 aa, Homo sapiens
  CDR3 for alpha chain variable domain of TCR clone 34345 (TRAV26-1, TRAJ52)
CIVRAHRNAGGTSYGRLTF

SEQ ID NO: 68690 - protein, 15 aa, Homo sapiens
  CDR3 for beta chain variable domain of TCR clone 34345 (TRBV29-1, TRBJ2-1)
CSGRDRKSSYNEQFF

SEQ ID NO: 68691 - protein, 15 aa, Homo sapiens
  CDR3 for alpha chain variable domain of TCR clone 34346 (TRAV27, TRAJ38)
CAARRNAGNNRKRIW

SEQ ID NO: 68692 - protein, 13 aa, Homo sapiens
  CDR3 for beta chain variable domain of TCR clone 34346 (TRBV7-3, TRBJ2-1)
CASSLDSYNEQFF

SEQ ID NO: 68693 - protein, 13 aa, Homo sapiens
  CDR3 for alpha chain variable domain of TCR clone 34347 (TRAV12-2, TRAJ20)
CAVNRFDDYKLSF

SEQ ID NO: 68694 - protein, 12 aa, Homo sapiens
  CDR3 for beta chain variable domain of TCR clone 34347 (TRBV19, TRBJ2-1)
CDSSQISNEQFF

SEQ ID NO: 68695 - protein, 16 aa, Homo sapiens
  CDR3 for alpha chain variable domain of TCR clone 34348 (TRAV12-2, TRAJ45)
CAVIFLSGGGADGLTF

SEQ ID NO: 68696 - protein, 19 aa, Homo sapiens
  CDR3 for beta chain variable domain of TCR clone 34348 (TRBV28, TRBJ2-4)
CASSFQPGGPVHSKNIQYF

SEQ ID NO: 68697 - protein, 13 aa, Homo sapiens
  CDR3 for alpha chain variable domain of TCR clone 34349 (TRAV17, TRAJ39)
CATGDNAGNMLTF

SEQ ID NO: 68698 - protein, 14 aa, Homo sapiens
  CDR3 for beta chain variable domain of TCR clone 34349 (TRBV19, TRBJ1-2)
CASSPTGGAGGYTF

SEQ ID NO: 68699 - protein, 15 aa, Homo sapiens
  CDR3 for alpha chain variable domain of TCR clone 34350 (TRAV3, TRAJ22)
CAVRDRGGSARQLTF

SEQ ID NO: 68700 - protein, 14 aa, Homo sapiens
  CDR3 for beta chain variable domain of TCR clone 34350 (TRBV7-2, TRBJ2-7)
CASRSQGAAYEQYF

SEQ ID NO: 68701 - protein, 15 aa, Homo sapiens
  CDR3 for alpha chain variable domain of TCR clone 34351 (TRAV13-1, TRAJ53)
CAASNSGGSNYKLTF

SEQ ID NO: 68702 - protein, 15 aa, Homo sapiens
  CDR3 for beta chain variable domain of TCR clone 34351 (TRBV19, TRBJ2-1)
CASSIVRGPYNEQFF

SEQ ID NO: 68703 - protein, 16 aa, Homo sapiens
  CDR3 for alpha chain variable domain of TCR clone 34352 (TRAV8-3, TRAJ13)
CAVGAYPSGGYHKVTF

SEQ ID NO: 68704 - protein, 15 aa, Homo sapiens
  CDR3 for beta chain variable domain of TCR clone 34352 (TRBV19, TRBJ1-5)
CASSIVWADNQPQHF

SEQ ID NO: 68705 - protein, 22 aa, Homo sapiens
  CDR3 for alpha chain variable domain of TCR clone 34353 (TRAV8-3, TRAJ38)
CAVGASNAGNNHIQNPDPAVYQ

SEQ ID NO: 68706 - protein, 15 aa, Homo sapiens
  CDR3 for beta chain variable domain of TCR clone 34353 (TRBV11-3, TRBJ1-3)
CASSLFGPSGNTIYF

SEQ ID NO: 68707 - protein, 11 aa, Homo sapiens
  CDR3 for alpha chain variable domain of TCR clone 34354 (TRAV12-3, TRAJ27)
CAMANAGKSTF

SEQ ID NO: 68708 - protein, 15 aa, Homo sapiens
  CDR3 for beta chain variable domain of TCR clone 34354 (TRBV7-8, TRBJ1-2)
CASSLVRDGGLGYTF

SEQ ID NO: 68709 - protein, 15 aa, Homo sapiens
  CDR3 for alpha chain variable domain of TCR clone 34355 (TRAV21, TRAJ53)
CATLNSGGSNYKLTF

SEQ ID NO: 68710 - protein, 13 aa, Homo sapiens
  CDR3 for beta chain variable domain of TCR clone 34355 (TRBV11-2, TRBJ2-5)
CASSSTGEETQYL

SEQ ID NO: 68711 - protein, 13 aa, Homo sapiens
  CDR3 for alpha chain variable domain of TCR clone 34356 (TRAV6, TRAJ20)
CALAVSNDYKLSF

SEQ ID NO: 68712 - protein, 16 aa, Homo sapiens
  CDR3 for beta chain variable domain of TCR clone 34356 (TRBV7-9, TRBJ2-1)
CASSDVAGGSYSEQFF

SEQ ID NO: 68713 - protein, 14 aa, Homo sapiens
  CDR3 for alpha chain variable domain of TCR clone 34357 (TRAV1-2, TRAJ8)
CAVREDTGFQKLVF

SEQ ID NO: 68714 - protein, 14 aa, Homo sapiens
  CDR3 for beta chain variable domain of TCR clone 34357 (TRBV11-2, TRBJ2-5)
CASSRTGGIETQYF

SEQ ID NO: 68715 - protein, 16 aa, Homo sapiens
  CDR3 for alpha chain variable domain of TCR clone 34358 (TRAV38-1, TRAJ32)
CAFMKGGGGATNKLIF

SEQ ID NO: 68716 - protein, 13 aa, Homo sapiens
  CDR3 for beta chain variable domain of TCR clone 34358 (TRBV20-1, TRBJ2-5)
CSAREASQETQYF

SEQ ID NO: 68717 - protein, 12 aa, Homo sapiens
  CDR3 for alpha chain variable domain of TCR clone 34359 (TRAV1-1, TRAJ39)
CAVPVVGNMLTF

SEQ ID NO: 68718 - protein, 14 aa, Homo sapiens
  CDR3 for beta chain variable domain of TCR clone 34359 (TRBV12-5, TRBJ2-5)
CASGSRTHQETQYF

SEQ ID NO: 68719 - protein, 11 aa, Homo sapiens
  CDR3 for alpha chain variable domain of TCR clone 34360 (TRAV1-2, TRAJ20)
CAVANDYKLSF

SEQ ID NO: 68720 - protein, 18 aa, Homo sapiens
  CDR3 for beta chain variable domain of TCR clone 34360 (TRBV20-1, TRBJ2-6)
CSAETTPTHGSGANVLPF

SEQ ID NO: 68721 - protein, 23 aa, Homo sapiens
  CDR3 for alpha chain variable domain of TCR clone 34361 (TRAV26-1, TRAJ38)
CIADNAGNNHIQNPDPAVYQLRD

SEQ ID NO: 68722 - protein, 13 aa, Homo sapiens
  CDR3 for beta chain variable domain of TCR clone 34361 (TRBV20-1, TRBJ1-1)
CSARGVGNTEAFF

SEQ ID NO: 68723 - protein, 18 aa, Homo sapiens
  CDR3 for alpha chain variable domain of TCR clone 34362 (TRAV13-1, TRAJ52)
CAAKNPNAGGTSYGKLTF

SEQ ID NO: 68724 - protein, 16 aa, Homo sapiens
  CDR3 for beta chain variable domain of TCR clone 34362 (TRBV7-3, TRBJ2-2)
CASSLKRGTLSGELFF

SEQ ID NO: 68725 - protein, 13 aa, Homo sapiens
  CDR3 for alpha chain variable domain of TCR clone 34363 (TRAV13-2, TRAJ48)
CTEMDFGNEKLTF

SEQ ID NO: 68726 - protein, 15 aa, Homo sapiens
  CDR3 for beta chain variable domain of TCR clone 34363 (TRBV7-9, TRBJ1-6)
CASSSPGRGNSPLHF

SEQ ID NO: 68727 - protein, 11 aa, Homo sapiens
  CDR3 for alpha chain variable domain of TCR clone 34364 (TRAV17, TRAJ9)
CATTGGFKTIF

SEQ ID NO: 68728 - protein, 14 aa, Homo sapiens
  CDR3 for beta chain variable domain of TCR clone 34364 (TRBV7-9, TRBJ2-2)
CASSGLAYTGELFF

SEQ ID NO: 68729 - protein, 16 aa, Homo sapiens
  CDR3 for alpha chain variable domain of TCR clone 34365 (TRAV38-2/DV8, TRAJ57)
CAYRSVGQGGSEKLVF

SEQ ID NO: 68730 - protein, 13 aa, Homo sapiens
  CDR3 for beta chain variable domain of TCR clone 34365 (TRBV20-1, TRBJ2-2)
CSVRGQATGELFF

SEQ ID NO: 68731 - protein, 14 aa, Homo sapiens
  CDR3 for alpha chain variable domain of TCR clone 34366 (TRAV12-2, TRAJ17)
CAVLFKAAANKLTF

SEQ ID NO: 68732 - protein, 17 aa, Homo sapiens
  CDR3 for beta chain variable domain of TCR clone 34366 (TRBV20-1, TRBJ2-2)
CSASGSGQGGLTGELFF

SEQ ID NO: 68733 - protein, 13 aa, Homo sapiens
  CDR3 for alpha chain variable domain of TCR clone 34367 (TRAV17, TRAJ5)
CALRGTGRRALTF

SEQ ID NO: 68734 - protein, 13 aa, Homo sapiens
  CDR3 for beta chain variable domain of TCR clone 34367 (TRBV10-3, TRBJ2-7)
CASKLAVNYEQYF

SEQ ID NO: 68735 - protein, 12 aa, Homo sapiens
  CDR3 for alpha chain variable domain of TCR clone 34368 (TRAV2, TRAJ9)
CAVGAGGFKTIF

SEQ ID NO: 68736 - protein, 16 aa, Homo sapiens
  CDR3 for beta chain variable domain of TCR clone 34368 (TRBV19, TRBJ2-1)
CASSKAGPSSYNEQFF

SEQ ID NO: 68737 - protein, 14 aa, Homo sapiens
  CDR3 for alpha chain variable domain of TCR clone 34369 (TRAV12-2, TRAJ40)
CAVKIPSGTNKYIF

SEQ ID NO: 68738 - protein, 14 aa, Homo sapiens
  CDR3 for beta chain variable domain of TCR clone 34369 (TRBV20-1, TRBJ1-1)
CSAQTRIGGTEAFF

SEQ ID NO: 68739 - protein, 12 aa, Homo sapiens
  CDR3 for alpha chain variable domain of TCR clone 34370 (TRAV3, TRAJ26)
CAVRAYGQNFVF

SEQ ID NO: 68740 - protein, 16 aa, Homo sapiens
  CDR3 for beta chain variable domain of TCR clone 34370 (TRBV11-2, TRBJ1-2)
CASSPSGREANYGYTF

SEQ ID NO: 68741 - protein, 11 aa, Homo sapiens
  CDR3 for alpha chain variable domain of TCR clone 34371 (TRAV1-2, TRAJ40)
CAVPGIYKYIF

SEQ ID NO: 68742 - protein, 16 aa, Homo sapiens
  CDR3 for beta chain variable domain of TCR clone 34371 (TRBV29-1, TRBJ2-7)
CSVEVVGTSGSYEQYF

SEQ ID NO: 68743 - protein, 12 aa, Homo sapiens
  CDR3 for alpha chain variable domain of TCR clone 34372 (TRAV16, TRAJ13)
CITLRGYQKVTF

SEQ ID NO: 68744 - protein, 17 aa, Homo sapiens
  CDR3 for beta chain variable domain of TCR clone 34372 (TRBV28, TRBJ2-5)
CTSSRQGGPAGAETQYF

SEQ ID NO: 68745 - protein, 14 aa, Homo sapiens
  CDR3 for alpha chain variable domain of TCR clone 34373 (TRAV1-2, TRAJ16)
CAVNRFSDGQKLLF

SEQ ID NO: 68746 - protein, 17 aa, Homo sapiens
  CDR3 for beta chain variable domain of TCR clone 34373 (TRBV13, TRBJ2-3)
CASSLSRVAGGRSTQYF

SEQ ID NO: 68747 - protein, 17 aa, Homo sapiens
  CDR3 for alpha chain variable domain of TCR clone 34374 (TRAV12-2, TRAJ52)
CAVAQRAGGTSYGKLTF

SEQ ID NO: 68748 - protein, 14 aa, Homo sapiens
  CDR3 for beta chain variable domain of TCR clone 34374 (TRBV19, TRBJ2-1)
CASPTFVLSGEQFF

SEQ ID NO: 68749 - protein, 15 aa, Homo sapiens
  CDR3 for alpha chain variable domain of TCR clone 34375 (TRAV30, TRAJ32)
CGTEIPGGATNKLIF

SEQ ID NO: 68750 - protein, 13 aa, Homo sapiens
  CDR3 for beta chain variable domain of TCR clone 34375 (TRBV6-3, TRBJ2-7)
CASSFSGGYEQYF

SEQ ID NO: 68751 - protein, 12 aa, Homo sapiens
  CDR3 for alpha chain variable domain of TCR clone 34376 (TRAV12-3, TRAJ17)
CAMTLTGNKLTF

SEQ ID NO: 68752 - protein, 15 aa, Homo sapiens
  CDR3 for beta chain variable domain of TCR clone 34376 (TRBV6-1, TRBJ2-1)
CASSELRGQYNEQFF

SEQ ID NO: 68753 - protein, 16 aa, Homo sapiens
  CDR3 for alpha chain variable domain of TCR clone 34377 (TRAV17, TRAJ53)
CATDALSGGSNYKPTF

SEQ ID NO: 68754 - protein, 12 aa, Homo sapiens
  CDR3 for beta chain variable domain of TCR clone 34377 (TRBV5-1, TRBJ2-7)
CASSFRGYEQYF

SEQ ID NO: 68755 - protein, 14 aa, Homo sapiens
  CDR3 for alpha chain variable domain of TCR clone 34378 (TRAV2, TRAJ9)
CAVEDRSGGFKTIF

SEQ ID NO: 68756 - protein, 13 aa, Homo sapiens
  CDR3 for beta chain variable domain of TCR clone 34378 (TRBV20-1, TRBJ1-1)
CSARGGGNTEAFF

SEQ ID NO: 68757 - protein, 12 aa, Homo sapiens
  CDR3 for alpha chain variable domain of TCR clone 34379 (TRAV3, TRAJ20)
CAVRDGDYKLSF

SEQ ID NO: 68758 - protein, 13 aa, Homo sapiens
  CDR3 for beta chain variable domain of TCR clone 34379 (TRBV9, TRBJ2-1)
CASSVGQGGEQSF

SEQ ID NO: 68759 - protein, 11 aa, Homo sapiens
  CDR3 for alpha chain variable domain of TCR clone 34380 (TRAV1-2, TRAJ31)
CAVNNDARLMF

SEQ ID NO: 68760 - protein, 15 aa, Homo sapiens
  CDR3 for beta chain variable domain of TCR clone 34380 (TRBV28, TRBJ2-1)
CASSIIAGGRSEQFF

SEQ ID NO: 68761 - protein, 15 aa, Homo sapiens
  CDR3 for alpha chain variable domain of TCR clone 34381 (TRAV17, TRAJ16)
CATALRLSDGQKLLF

SEQ ID NO: 68762 - protein, 15 aa, Homo sapiens
  CDR3 for beta chain variable domain of TCR clone 34381 (TRBV20-1, TRBJ1-1)
CSASRGVTGNTEAFF

SEQ ID NO: 68763 - protein, 12 aa, Homo sapiens
  CDR3 for alpha chain variable domain of TCR clone 34382 (TRAV2, TRAJ10)
CASTGGGNKLTF

SEQ ID NO: 68764 - protein, 10 aa, Homo sapiens
  CDR3 for beta chain variable domain of TCR clone 34382 (TRBV7-2, TRBJ2-2)
CASRGQGGGW

SEQ ID NO: 68765 - protein, 12 aa, Homo sapiens
  CDR3 for alpha chain variable domain of TCR clone 34383 (TRAV12-3, TRAJ17)
CAMTLTGNKLTF

SEQ ID NO: 68766 - protein, 13 aa, Homo sapiens
  CDR3 for beta chain variable domain of TCR clone 34383 (TRBV7-2, TRBJ2-5)
CASSSDYQETQYF

SEQ ID NO: 68767 - protein, 14 aa, Homo sapiens
  CDR3 for alpha chain variable domain of TCR clone 34384 (TRAV1-2, TRAJ16)
CAVNRFSDGQKLLF

SEQ ID NO: 68768 - protein, 13 aa, Homo sapiens
  CDR3 for beta chain variable domain of TCR clone 34384 (TRBV20-1, TRBJ1-1)
CSARVGGNTEALF

SEQ ID NO: 68769 - protein, 13 aa, Homo sapiens
  CDR3 for alpha chain variable domain of TCR clone 34385 (TRAV9-2, TRAJ53)
CTLSGGSNYKLTF

SEQ ID NO: 68770 - protein, 17 aa, Homo sapiens
  CDR3 for beta chain variable domain of TCR clone 34385 (TRBV11-2, TRBJ2-1)
CASSLYPPGVEYNEQFF

SEQ ID NO: 68771 - protein, 17 aa, Homo sapiens
  CDR3 for alpha chain variable domain of TCR clone 34386 (TRAV13-1, TRAJ52)
CAASSGAGGTSYGKLTF

SEQ ID NO: 68772 - protein, 15 aa, Homo sapiens
  CDR3 for beta chain variable domain of TCR clone 34386 (TRBV6-1, TRBJ2-3)
CASSERGGITDTQYF

SEQ ID NO: 68773 - protein, 11 aa, Homo sapiens
  CDR3 for alpha chain variable domain of TCR clone 34387 (TRAV21, TRAJ11)
CAVNGYSTLTF

SEQ ID NO: 68774 - protein, 11 aa, Homo sapiens
  CDR3 for beta chain variable domain of TCR clone 34387 (TRBV19, TRBJ1-1)
CASSIGSKAFF

SEQ ID NO: 68775 - protein, 12 aa, Homo sapiens
  CDR3 for alpha chain variable domain of TCR clone 34388 (TRAV17, TRAJ57)
CATDGGSEKLVF

SEQ ID NO: 68776 - protein, 13 aa, Homo sapiens
  CDR3 for beta chain variable domain of TCR clone 34388 (TRBV7-9, TRBJ2-7)
CSSSFAGAYEQYF

SEQ ID NO: 68777 - protein, 14 aa, Homo sapiens
  CDR3 for alpha chain variable domain of TCR clone 34389 (TRAV2, TRAJ37)
CAVDFTSNTGKLIF

SEQ ID NO: 68778 - protein, 13 aa, Homo sapiens
  CDR3 for beta chain variable domain of TCR clone 34389 (TRBV10-3, TRBJ2-7)
CASKLAVNYEQYF

SEQ ID NO: 68779 - protein, 14 aa, Homo sapiens
  CDR3 for alpha chain variable domain of TCR clone 34390 (TRAV1-2, TRAJ8)
CAVREDTGFQKLVF

SEQ ID NO: 68780 - protein, 13 aa, Homo sapiens
  CDR3 for beta chain variable domain of TCR clone 34390 (TRBV7-2, TRBJ1-1)
CASNLKGAKVAFF

SEQ ID NO: 68781 - protein, 16 aa, Homo sapiens
  CDR3 for alpha chain variable domain of TCR clone 34391 (TRAV16, TRAJ52)
CALSAAGVTSYGKLTF

SEQ ID NO: 68782 - protein, 12 aa, Homo sapiens
  CDR3 for beta chain variable domain of TCR clone 34391 (TRBV12-4, TRBJ1-3)
CASSFSGNTIYF

SEQ ID NO: 68783 - protein, 16 aa, Homo sapiens
  CDR3 for alpha chain variable domain of TCR clone 34392 (TRAV1-2, TRAJ6)
CAVRDQGTGGSYIPTF

SEQ ID NO: 68784 - protein, 13 aa, Homo sapiens
  CDR3 for beta chain variable domain of TCR clone 34392 (TRBV28, TRBJ2-7)
RASTPGLAGEQYF

SEQ ID NO: 68785 - protein, 16 aa, Homo sapiens
  CDR3 for alpha chain variable domain of TCR clone 34393 (TRAV26-1, TRAJ36)
CIVRVSYQTGANNLFF

SEQ ID NO: 68786 - protein, 14 aa, Homo sapiens
  CDR3 for beta chain variable domain of TCR clone 34393 (TRBV19, TRBJ2-2)
CASSTLHRSGELFF

SEQ ID NO: 68787 - protein, 13 aa, Homo sapiens
  CDR3 for alpha chain variable domain of TCR clone 34394 (TRAV13-2, TRAJ48)
CAEMDFGNEKLTF

SEQ ID NO: 68788 - protein, 16 aa, Homo sapiens
  CDR3 for beta chain variable domain of TCR clone 34394 (TRBV6-1, TRBJ2-5)
CASSETLDRGAETQYF

SEQ ID NO: 68789 - protein, 12 aa, Homo sapiens
  CDR3 for alpha chain variable domain of TCR clone 34395 (TRAV13-1, TRAJ48)
CAANFGNEKLTF

SEQ ID NO: 68790 - protein, 13 aa, Homo sapiens
  CDR3 for beta chain variable domain of TCR clone 34395 (TRBV7-3, TRBJ1-1)
CASSQEWGAEAFF

SEQ ID NO: 68791 - protein, 14 aa, Homo sapiens
  CDR3 for alpha chain variable domain of TCR clone 34396 (TRAV12-3, TRAJ10)
SHLPLTGGGNKLTF

SEQ ID NO: 68792 - protein, 15 aa, Homo sapiens
  CDR3 for beta chain variable domain of TCR clone 34396 (TRBV7-9, TRBJ1-6)
CASSSPGSGNSPLHF

SEQ ID NO: 68793 - protein, 12 aa, Homo sapiens
  CDR3 for alpha chain variable domain of TCR clone 34397 (TRAV21, TRAJ33)
CAKMDSNYQLIW

SEQ ID NO: 68794 - protein, 11 aa, Homo sapiens
  CDR3 for beta chain variable domain of TCR clone 34397 (TRBV11-2, TRBJ2-2)
CASSLPGELFF

SEQ ID NO: 68795 - protein, 14 aa, Homo sapiens
  CDR3 for alpha chain variable domain of TCR clone 34398 (TRAV12-2, TRAJ40)
CAVKIPSGTYKYIF

SEQ ID NO: 68796 - protein, 14 aa, Homo sapiens
  CDR3 for beta chain variable domain of TCR clone 34398 (TRBV20-1, TRBJ1-1)
CSAQTRIGGTEEFF

SEQ ID NO: 68797 - protein, 13 aa, Homo sapiens
  CDR3 for alpha chain variable domain of TCR clone 34399 (TRAV26-2, TRAJ43)
CILRAVNNNDMRF

SEQ ID NO: 68798 - protein, 13 aa, Homo sapiens
  CDR3 for beta chain variable domain of TCR clone 34399 (TRBV7-3, TRBJ1-1)
CASSQDWGAEAFF

SEQ ID NO: 68799 - protein, 15 aa, Homo sapiens
  CDR3 for alpha chain variable domain of TCR clone 34400 (TRAV12-3, TRAJ11)
CAMSEENSGYSTLTF

SEQ ID NO: 68800 - protein, 15 aa, Homo sapiens
  CDR3 for beta chain variable domain of TCR clone 34400 (TRBV20-1, TRBJ2-7)
CSARDRVSGMDEQYF

SEQ ID NO: 68801 - protein, 17 aa, Homo sapiens
  CDR3 for alpha chain variable domain of TCR clone 34401 (TRAV3, TRAJ6)
CAVRDGPRAGGSYIPTF

SEQ ID NO: 68802 - protein, 12 aa, Homo sapiens
  CDR3 for beta chain variable domain of TCR clone 34401 (TRBV7-3, TRBJ2-1)
CASSFINNEQFF

SEQ ID NO: 68803 - protein, 12 aa, Homo sapiens
  CDR3 for alpha chain variable domain of TCR clone 34402 (TRAV12-3, TRAJ17)
CAMTLTGNKLTF

SEQ ID NO: 68804 - protein, 13 aa, Homo sapiens
  CDR3 for beta chain variable domain of TCR clone 34402 (TRBV12-4, TRBJ2-2)
CASSITGSGELFF

SEQ ID NO: 68805 - protein, 16 aa, Homo sapiens
  CDR3 for alpha chain variable domain of TCR clone 34403 (TRAV12-3, TRAJ56)
CAMSPGHTGANSKLTF

SEQ ID NO: 68806 - protein, 13 aa, Homo sapiens
  CDR3 for beta chain variable domain of TCR clone 34403 (TRBV6-1, TRBJ1-1)
CASSRQGNTEAFF

SEQ ID NO: 68807 - protein, 12 aa, Homo sapiens
  CDR3 for alpha chain variable domain of TCR clone 34404 (TRAV12-3, TRAJ17)
CAMTLTGNKLTF

SEQ ID NO: 68808 - protein, 12 aa, Homo sapiens
  CDR3 for beta chain variable domain of TCR clone 34404 (TRBV5-4, TRBJ2-5)
CASSSTRETQYF

SEQ ID NO: 68809 - protein, 13 aa, Homo sapiens
  CDR3 for alpha chain variable domain of TCR clone 34405 (TRAV17, TRAJ5)
CAPMDTGRRALTF

SEQ ID NO: 68810 - protein, 15 aa, Homo sapiens
  CDR3 for beta chain variable domain of TCR clone 34405 (TRBV6-6, TRBJ2-5)
CASSLGGGLEETQYF

SEQ ID NO: 68811 - protein, 12 aa, Homo sapiens
  CDR3 for alpha chain variable domain of TCR clone 34406 (TRAV13-1, TRAJ27)
CAAHTNAGKSTF

SEQ ID NO: 68812 - protein, 14 aa, Homo sapiens
  CDR3 for beta chain variable domain of TCR clone 34406 (TRBV19, TRBJ2-2)
CASSGQGIAGELFL

SEQ ID NO: 68813 - protein, 12 aa, Homo sapiens
  CDR3 for alpha chain variable domain of TCR clone 34407 (TRAV8-3, TRAJ26)
CAGDNYGQNFVF

SEQ ID NO: 68814 - protein, 14 aa, Homo sapiens
  CDR3 for beta chain variable domain of TCR clone 34407 (TRBV19, TRBJ2-1)
CASSTGTSNNEQFF

SEQ ID NO: 68815 - protein, 12 aa, Homo sapiens
  CDR3 for alpha chain variable domain of TCR clone 34408 (TRAV3, TRAJ20)
CAVRDHDYKLSF

SEQ ID NO: 68816 - protein, 14 aa, Homo sapiens
  CDR3 for beta chain variable domain of TCR clone 34408 (TRBV12-5, TRBJ2-5)
CASGSRTHQETQYF

SEQ ID NO: 68817 - protein, 12 aa, Homo sapiens
  CDR3 for alpha chain variable domain of TCR clone 34409 (TRAV2, TRAJ33)
CAFTDSNYQLIW

SEQ ID NO: 68818 - protein, 16 aa, Homo sapiens
  CDR3 for beta chain variable domain of TCR clone 34409 (TRBV2, TRBJ2-7)
CASSEPWTGPSYEQYF

SEQ ID NO: 68819 - protein, 15 aa, Homo sapiens
  CDR3 for alpha chain variable domain of TCR clone 34410 (TRAV12-2, TRAJ53)
CAVNGGGGSNYRLTF

SEQ ID NO: 68820 - protein, 13 aa, Homo sapiens
  CDR3 for beta chain variable domain of TCR clone 34410 (TRBV3-1, TRBJ1-1)
CASSPGVITEAFF

SEQ ID NO: 68821 - protein, 13 aa, Homo sapiens
  CDR3 for alpha chain variable domain of TCR clone 34411 (TRAV8-3, TRAJ28)
YAVGAVGSYQLTF

SEQ ID NO: 68822 - protein, 15 aa, Homo sapiens
  CDR3 for beta chain variable domain of TCR clone 34411 (TRBV7-9, TRBJ1-5)
CASSQGHQPNQPQHF

SEQ ID NO: 68823 - protein, 19 aa, Homo sapiens
  CDR3 for alpha chain variable domain of TCR clone 34412 (TRAV26-1, TRAJ52)
CIVRAHRNAGGTSYGKLTF

SEQ ID NO: 68824 - protein, 15 aa, Homo sapiens
  CDR3 for beta chain variable domain of TCR clone 34412 (TRBV29-1, TRBJ2-1)
CSGRDRKSSYNEQFF

SEQ ID NO: 68825 - protein, 15 aa, Homo sapiens
  CDR3 for alpha chain variable domain of TCR clone 34413 (TRAV12-3, TRAJ6)
CAMSATTGGSYIPTF

SEQ ID NO: 68826 - protein, 20 aa, Homo sapiens
  CDR3 for beta chain variable domain of TCR clone 34413 (TRBV28, TRBJ2-1)
CASTPIGRSPGLAGGNEQFF

SEQ ID NO: 68827 - protein, 11 aa, Homo sapiens
  CDR3 for alpha chain variable domain of TCR clone 34414 (TRAV1-1, TRAJ23)
CAVRQGGKLIF

SEQ ID NO: 68828 - protein, 20 aa, Homo sapiens
  CDR3 for beta chain variable domain of TCR clone 34414 (TRBV7-8, TRBJ2-2)
CASSHLFPGPTIHITVELFF

SEQ ID NO: 68829 - protein, 14 aa, Homo sapiens
  CDR3 for alpha chain variable domain of TCR clone 34415 (TRAV8-3, TRAJ10)
CAVGNAGGGNKLTF

SEQ ID NO: 68830 - protein, 16 aa, Homo sapiens
  CDR3 for beta chain variable domain of TCR clone 34415 (TRBV2, TRBJ1-6)
CASSETGEIYNSPLHF

SEQ ID NO: 68831 - protein, 11 aa, Homo sapiens
  CDR3 for alpha chain variable domain of TCR clone 34416 (TRAV1-1, TRAJ23)
CAVRQGGKLIF

SEQ ID NO: 68832 - protein, 14 aa, Homo sapiens
  CDR3 for beta chain variable domain of TCR clone 34416 (TRBV19, TRBJ2-1)
CASPTVVLSGEQFF

SEQ ID NO: 68833 - protein, 13 aa, Homo sapiens
  CDR3 for alpha chain variable domain of TCR clone 34417 (TRAV17, TRAJ5)
CATVDTGRRALTF

SEQ ID NO: 68834 - protein, 15 aa, Homo sapiens
  CDR3 for beta chain variable domain of TCR clone 34417 (TRBV20-1, TRBJ2-5)
CSATRTSGSLETQYF

SEQ ID NO: 68835 - protein, 14 aa, Homo sapiens
  CDR3 for alpha chain variable domain of TCR clone 34418 (TRAV8-1, TRAJ5)
CAVRTDTGRRALTF

SEQ ID NO: 68836 - protein, 14 aa, Homo sapiens
  CDR3 for beta chain variable domain of TCR clone 34418 (TRBV7-8, TRBJ2-3)
CASSFPDWQDTQYF

SEQ ID NO: 68837 - protein, 13 aa, Homo sapiens
  CDR3 for alpha chain variable domain of TCR clone 34419 (TRAV26-2, TRAJ43)
CILRAVNNNDMRF

SEQ ID NO: 68838 - protein, 15 aa, Homo sapiens
  CDR3 for beta chain variable domain of TCR clone 34419 (TRBV7-2, TRBJ2-1)
CASTHGTGIYDEQLF

SEQ ID NO: 68839 - protein, 15 aa, Homo sapiens
  CDR3 for alpha chain variable domain of TCR clone 34420 (TRAV13-1, TRAJ17)
CAASIHGGCRQQANF

SEQ ID NO: 68840 - protein, 14 aa, Homo sapiens
  CDR3 for beta chain variable domain of TCR clone 34420 (TRBV20-1, TRBJ2-4)
CSARDRGQGGMQYF

SEQ ID NO: 68841 - protein, 13 aa, Homo sapiens
  CDR3 for alpha chain variable domain of TCR clone 34421 (TRAV26-1, TRAJ30)
CIVRVESKDKIIF

SEQ ID NO: 68842 - protein, 17 aa, Homo sapiens
  CDR3 for beta chain variable domain of TCR clone 34421 (TRBV13, TRBJ2-3)
CASSLSRVAGGRNTQYF

SEQ ID NO: 68843 - protein, 13 aa, Homo sapiens
  CDR3 for alpha chain variable domain of TCR clone 34422 (TRAV30, TRAJ6)
CGFIEGGSYIPTL

SEQ ID NO: 68844 - protein, 13 aa, Homo sapiens
  CDR3 for beta chain variable domain of TCR clone 34422 (TRBV5-4, TRBJ2-5)
CASSPVSQETQYF

SEQ ID NO: 68845 - protein, 15 aa, Homo sapiens
  CDR3 for alpha chain variable domain of TCR clone 34423 (TRAV20, TRAJ53)
CAVQASGGRNYKLTF

SEQ ID NO: 68846 - protein, 12 aa, Homo sapiens
  CDR3 for beta chain variable domain of TCR clone 34423 (TRBV7-6, TRBJ2-5)
CASSLSQETQYF

SEQ ID NO: 68847 - protein, 14 aa, Homo sapiens
  CDR3 for alpha chain variable domain of TCR clone 34424 (TRAV12-2, TRAJ44)
CAMNPAGTASKLTF

SEQ ID NO: 68848 - protein, 12 aa, Homo sapiens
  CDR3 for beta chain variable domain of TCR clone 34424 (TRBV5-1, TRBJ2-7)
CASSFRGYEQYL

SEQ ID NO: 68849 - protein, 11 aa, Homo sapiens
  CDR3 for alpha chain variable domain of TCR clone 34425 (TRAV3, TRAJ21)
CAVGNFNKFYF

SEQ ID NO: 68850 - protein, 16 aa, Homo sapiens
  CDR3 for beta chain variable domain of TCR clone 34425 (TRBV20-1, TRBJ1-2)
CSASVGQGVANYGYTF

SEQ ID NO: 68851 - protein, 16 aa, Homo sapiens
  CDR3 for alpha chain variable domain of TCR clone 34426 (TRAV4, TRAJ9)
CLVGDPNRPGGFETIF

SEQ ID NO: 68852 - protein, 16 aa, Homo sapiens
  CDR3 for beta chain variable domain of TCR clone 34426 (TRBV28, TRBJ1-4)
CASSPPYRGRSEKLFF

SEQ ID NO: 68853 - protein, 16 aa, Homo sapiens
  CDR3 for alpha chain variable domain of TCR clone 34427 (TRAV27, TRAJ13)
CAGAKSDSGGYQKVTF

SEQ ID NO: 68854 - protein, 15 aa, Homo sapiens
  CDR3 for beta chain variable domain of TCR clone 34427 (TRBV29-1, TRBJ2-1)
CSVGRHALFYNEQSF

SEQ ID NO: 68855 - protein, 14 aa, Homo sapiens
  CDR3 for alpha chain variable domain of TCR clone 34428 (TRAV25, TRAJ35)
CARRMEGFGNVLHC

SEQ ID NO: 68856 - protein, 17 aa, Homo sapiens
  CDR3 for beta chain variable domain of TCR clone 34428 (TRBV19, TRBJ2-7)
CASSISFYDSYPYEQYF

SEQ ID NO: 68857 - protein, 12 aa, Homo sapiens
  CDR3 for alpha chain variable domain of TCR clone 34429 (TRAV13-2, TRAJ8)
CAPWLGFQKLVF

SEQ ID NO: 68858 - protein, 14 aa, Homo sapiens
  CDR3 for beta chain variable domain of TCR clone 34429 (TRBV9, TRBJ2-7)
CASSVGVGSYEQYF

SEQ ID NO: 68859 - protein, 14 aa, Homo sapiens
  CDR3 for alpha chain variable domain of TCR clone 34430 (TRAV8-4, TRAJ13)
FAVTLSGGYQKVTF

SEQ ID NO: 68860 - protein, 14 aa, Homo sapiens
  CDR3 for beta chain variable domain of TCR clone 34430 (TRBV7-2, TRBJ1-2)
CASSQTGSTYGYTF

SEQ ID NO: 68861 - protein, 11 aa, Homo sapiens
  CDR3 for alpha chain variable domain of TCR clone 34431 (TRAV2, TRAJ33)
CAVDSNYQLIW

SEQ ID NO: 68862 - protein, 13 aa, Homo sapiens
  CDR3 for beta chain variable domain of TCR clone 34431 (TRBV7-7, TRBJ2-3)
CASSLSRADTQYF

SEQ ID NO: 68863 - protein, 15 aa, Homo sapiens
  CDR3 for alpha chain variable domain of TCR clone 34432 (TRAV12-3, TRAJ6)
CAMCATTGGSYIPTF

SEQ ID NO: 68864 - protein, 16 aa, Homo sapiens
  CDR3 for beta chain variable domain of TCR clone 34432 (TRBV20-1, TRBJ1-2)
CSASMGQGVANYGYTF

SEQ ID NO: 68865 - protein, 15 aa, Homo sapiens
  CDR3 for alpha chain variable domain of TCR clone 34433 (TRAV13-1, TRAJ43)
CAATPELGGNSDMRF

SEQ ID NO: 68866 - protein, 15 aa, Homo sapiens
  CDR3 for beta chain variable domain of TCR clone 34433 (TRBV10-2, TRBJ2-6)
CASSEQGTGANVLTF

SEQ ID NO: 68867 - protein, 12 aa, Homo sapiens
  CDR3 for alpha chain variable domain of TCR clone 34434 (TRAV12-3, TRAJ5)
RAMDTGRRALTF

SEQ ID NO: 68868 - protein, 13 aa, Homo sapiens
  CDR3 for beta chain variable domain of TCR clone 34434 (TRBV7-7, TRBJ2-2)
CASSLTSAGELFF

SEQ ID NO: 68869 - protein, 13 aa, Homo sapiens
  CDR3 for alpha chain variable domain of TCR clone 34435 (TRAV12-2, TRAJ10)
CAVPTGGGSKLTF

SEQ ID NO: 68870 - protein, 14 aa, Homo sapiens
  CDR3 for beta chain variable domain of TCR clone 34435 (TRBV25-1, TRBJ1-1)
CASTHLGGNTEAFF

SEQ ID NO: 68871 - protein, 15 aa, Homo sapiens
  CDR3 for alpha chain variable domain of TCR clone 34436 (TRAV17, TRAJ13)
CATVPSSGGYQKVTF

SEQ ID NO: 68872 - protein, 13 aa, Homo sapiens
  CDR3 for beta chain variable domain of TCR clone 34436 (TRBV3-1, TRBJ1-5)
CASSQAGGQPQHF

SEQ ID NO: 68873 - protein, 16 aa, Homo sapiens
  CDR3 for alpha chain variable domain of TCR clone 34437 (TRAV21, TRAJ52)
CAVTNAGGTSYGKLTF

SEQ ID NO: 68874 - protein, 15 aa, Homo sapiens
  CDR3 for beta chain variable domain of TCR clone 34437 (TRBV20-1, TRBJ2-7)
CSARDRVSGVDEQYF

SEQ ID NO: 68875 - protein, 16 aa, Homo sapiens
  CDR3 for alpha chain variable domain of TCR clone 34438 (TRAV16, TRAJ4)
CALSRMFSGGYNKLIF

SEQ ID NO: 68876 - protein, 16 aa, Homo sapiens
  CDR3 for beta chain variable domain of TCR clone 34438 (TRBV19, TRBJ2-2)
CASRSPGTGATGELFF

SEQ ID NO: 68877 - protein, 19 aa, Homo sapiens
  CDR3 for alpha chain variable domain of TCR clone 34439 (TRAV8-4, TRAJ3)
CAVTGENLVQQCSQDNLWI

SEQ ID NO: 68878 - protein, 16 aa, Homo sapiens
  CDR3 for beta chain variable domain of TCR clone 34439 (TRBV4-2, TRBJ1-1)
CASSQAGFGMNTEAFF

SEQ ID NO: 68879 - protein, 13 aa, Homo sapiens
  CDR3 for alpha chain variable domain of TCR clone 34440 (TRAV1-2, TRAJ9)
CAALNTGGFKTIF

SEQ ID NO: 68880 - protein, 16 aa, Homo sapiens
  CDR3 for beta chain variable domain of TCR clone 34440 (TRBV11-2, TRBJ2-1)
CASSPRLAGVYNERFF

SEQ ID NO: 68881 - protein, 11 aa, Homo sapiens
  CDR3 for alpha chain variable domain of TCR clone 34441 (TRAV12-3, TRAJ43)
CAMSVSNDMRF

SEQ ID NO: 68882 - protein, 12 aa, Homo sapiens
  CDR3 for beta chain variable domain of TCR clone 34441 (TRBV11-2, TRBJ2-2)
CASSLGGGELFF

SEQ ID NO: 68883 - protein, 14 aa, Homo sapiens
  CDR3 for alpha chain variable domain of TCR clone 34442 (TRAV12-2, TRAJ45)
CALPERGGADGLTF

SEQ ID NO: 68884 - protein, 14 aa, Homo sapiens
  CDR3 for beta chain variable domain of TCR clone 34442 (TRBV18, TRBJ1-5)
CASSPGNSNQHQHF

SEQ ID NO: 68885 - protein, 12 aa, Homo sapiens
  CDR3 for alpha chain variable domain of TCR clone 34443 (TRAV1-1, TRAJ8)
CAGGTGFQKLVY

SEQ ID NO: 68886 - protein, 15 aa, Homo sapiens
  CDR3 for beta chain variable domain of TCR clone 34443 (TRBV7-9, TRBJ1-4)
CASSRTGGFNEKLFF

SEQ ID NO: 68887 - protein, 13 aa, Homo sapiens
  CDR3 for alpha chain variable domain of TCR clone 34444 (TRAV38-1, TRAJ42)
CARWGGSQGKLIF

SEQ ID NO: 68888 - protein, 17 aa, Homo sapiens
  CDR3 for beta chain variable domain of TCR clone 34444 (TRBV20-1, TRBJ2-1)
CSARDPLAGVWDNEQFF

SEQ ID NO: 68889 - protein, 12 aa, Homo sapiens
  CDR3 for alpha chain variable domain of TCR clone 34445 (TRAV8-6, TRAJ4)
CAVSDHPNTLIF

SEQ ID NO: 68890 - protein, 14 aa, Homo sapiens
  CDR3 for beta chain variable domain of TCR clone 34445 (TRBV6-6, TRBJ1-5)
CASVDSGFNQPQHF

SEQ ID NO: 68891 - protein, 15 aa, Homo sapiens
  CDR3 for alpha chain variable domain of TCR clone 34446 (TRAV3, TRAJ20)
CAVRAIKLSDYKLSF

SEQ ID NO: 68892 - protein, 15 aa, Homo sapiens
  CDR3 for beta chain variable domain of TCR clone 34446 (TRBV7-9, TRBJ1-6)
CASSSPGRGNSPLHF

SEQ ID NO: 68893 - protein, 17 aa, Homo sapiens
  CDR3 for alpha chain variable domain of TCR clone 34447 (TRAV3, TRAJ6)
CAVRDGPRAGGSYIPTF

SEQ ID NO: 68894 - protein, 14 aa, Homo sapiens
  CDR3 for beta chain variable domain of TCR clone 34447 (TRBV7-6, TRBJ2-3)
CASSVAGGTDTQYF

SEQ ID NO: 68895 - protein, 16 aa, Homo sapiens
  CDR3 for alpha chain variable domain of TCR clone 34448 (TRAV14/DV4, TRAJ15)
CAMREGPAQAGTALIF

SEQ ID NO: 68896 - protein, 12 aa, Homo sapiens
  CDR3 for beta chain variable domain of TCR clone 34448 (TRBV28, TRBJ2-6)
CAIQAGANDLTF

SEQ ID NO: 68897 - protein, 12 aa, Homo sapiens
  CDR3 for alpha chain variable domain of TCR clone 34449 (TRAV2, TRAJ36)
CADLTGANNLFF

SEQ ID NO: 68898 - protein, 18 aa, Homo sapiens
  CDR3 for beta chain variable domain of TCR clone 34449 (TRBV19, TRBJ1-1)
CASSIDGGDYTGNTEAFF

SEQ ID NO: 68899 - protein, 13 aa, Homo sapiens
  CDR3 for alpha chain variable domain of TCR clone 34450 (TRAV20, TRAJ21)
CAVEGYNFNKFYF

SEQ ID NO: 68900 - protein, 14 aa, Homo sapiens
  CDR3 for beta chain variable domain of TCR clone 34450 (TRBV3-1, TRBJ2-5)
CASCQGPDQETQYF

SEQ ID NO: 68901 - protein, 13 aa, Homo sapiens
  CDR3 for alpha chain variable domain of TCR clone 34451 (TRAV24, TRAJ42)
CAFSTGSQGNLIF

SEQ ID NO: 68902 - protein, 11 aa, Homo sapiens
  CDR3 for beta chain variable domain of TCR clone 34451 (TRBV12-4, TRBJ2-3)
CASTATDTQYF

SEQ ID NO: 68903 - protein, 12 aa, Homo sapiens
  CDR3 for alpha chain variable domain of TCR clone 34452 (TRAV12-3, TRAJ17)
CAMTLTGNKLTS

SEQ ID NO: 68904 - protein, 15 aa, Homo sapiens
  CDR3 for beta chain variable domain of TCR clone 34452 (TRBV7-9, TRBJ1-6)
CASSSPGRGNSPLHF

SEQ ID NO: 68905 - protein, 15 aa, Homo sapiens
  CDR3 for alpha chain variable domain of TCR clone 34453 (TRAV21, TRAJ38)
CAVRQDAGNNRKLIW

SEQ ID NO: 68906 - protein, 16 aa, Homo sapiens
  CDR3 for beta chain variable domain of TCR clone 34453 (TRBV4-2, TRBJ1-1)
CASRPLDGGDDTEAFF

SEQ ID NO: 68907 - protein, 12 aa, Homo sapiens
  CDR3 for alpha chain variable domain of TCR clone 34454 (TRAV26-1, TRAJ22)
CIVTGSARQLTF

SEQ ID NO: 68908 - protein, 14 aa, Homo sapiens
  CDR3 for beta chain variable domain of TCR clone 34454 (TRBV12-5, TRBJ2-5)
CASGSRTHQETQYF

SEQ ID NO: 68909 - protein, 18 aa, Homo sapiens
  CDR3 for alpha chain variable domain of TCR clone 34455 (TRAV27, TRAJ41)
CAVRTQIPDIQNPDPAVY

SEQ ID NO: 68910 - protein, 16 aa, Homo sapiens
  CDR3 for beta chain variable domain of TCR clone 34455 (TRBV5-1, TRBJ2-3)
CASSLGLAVYTDTQYF

SEQ ID NO: 68911 - protein, 12 aa, Homo sapiens
  CDR3 for alpha chain variable domain of TCR clone 34456 (TRAV27, TRAJ35)
CAGADFGNVLHC

SEQ ID NO: 68912 - protein, 16 aa, Homo sapiens
  CDR3 for beta chain variable domain of TCR clone 34456 (TRBV6-1, TRBJ2-1)
CASILRQGSSYNKQFF

SEQ ID NO: 68913 - protein, 12 aa, Homo sapiens
  CDR3 for alpha chain variable domain of TCR clone 34457 (TRAV3, TRAJ31)
CAVRDGNARLMF

SEQ ID NO: 68914 - protein, 18 aa, Homo sapiens
  CDR3 for beta chain variable domain of TCR clone 34457 (TRBV7-2, TRBJ2-3)
CASSLKREGSGVTDTQYF

SEQ ID NO: 68915 - protein, 14 aa, Homo sapiens
  CDR3 for alpha chain variable domain of TCR clone 34458 (TRAV12-3, TRAJ10)
SHLPLTGGGNKLTF

SEQ ID NO: 68916 - protein, 15 aa, Homo sapiens
  CDR3 for beta chain variable domain of TCR clone 34458 (TRBV28, TRBJ2-4)
CAAGSGTLLMGIQYF

SEQ ID NO: 68917 - protein, 17 aa, Homo sapiens
  CDR3 for alpha chain variable domain of TCR clone 34459 (TRAV13-1, TRAJ52)
CAASSGAGGTIYGKLTF

SEQ ID NO: 68918 - protein, 15 aa, Homo sapiens
  CDR3 for beta chain variable domain of TCR clone 34459 (TRBV2, TRBJ2-1)
CASSELAGSYNEQFF

SEQ ID NO: 68919 - protein, 13 aa, Homo sapiens
  CDR3 for alpha chain variable domain of TCR clone 34460 (TRAV8-4, TRAJ48)
CAVSLFGDEKLTF

SEQ ID NO: 68920 - protein, 15 aa, Homo sapiens
  CDR3 for beta chain variable domain of TCR clone 34460 (TRBV20-1, TRBJ2-7)
CSARKGLAESYEQYF

SEQ ID NO: 68921 - protein, 15 aa, Homo sapiens
  CDR3 for alpha chain variable domain of TCR clone 34461 (TRAV12-3, TRAJ42)
CAMSGHGGSQGNLTF

SEQ ID NO: 68922 - protein, 13 aa, Homo sapiens
  CDR3 for beta chain variable domain of TCR clone 34461 (TRBV19, TRBJ2-5)
CASSGRAGETQYF

SEQ ID NO: 68923 - protein, 15 aa, Homo sapiens
  CDR3 for alpha chain variable domain of TCR clone 34462 (TRAV17, TRAJ16)
CATALRFSDGQKLLF

SEQ ID NO: 68924 - protein, 15 aa, Homo sapiens
  CDR3 for beta chain variable domain of TCR clone 34462 (TRBV11-2, TRBJ2-1)
CASSLGTSGLNEQFF

SEQ ID NO: 68925 - protein, 13 aa, Homo sapiens
  CDR3 for alpha chain variable domain of TCR clone 34463 (TRAV36/DV7, TRAJ54)
CAVDIQGAQKLVF

SEQ ID NO: 68926 - protein, 14 aa, Homo sapiens
  CDR3 for beta chain variable domain of TCR clone 34463 (TRBV19, TRBJ2-7)
CASNFRETFTGMYF

SEQ ID NO: 68927 - protein, 12 aa, Homo sapiens
  CDR3 for alpha chain variable domain of TCR clone 34464 (TRAV12-3, TRAJ21)
CAMFNNFNKFYF

SEQ ID NO: 68928 - protein, 14 aa, Homo sapiens
  CDR3 for beta chain variable domain of TCR clone 34464 (TRBV28, TRBJ2-1)
CASSIQGAVGEQFF

SEQ ID NO: 68929 - protein, 15 aa, Homo sapiens
  CDR3 for alpha chain variable domain of TCR clone 34465 (TRAV17, TRAJ54)
CATEKLGQGAQKLVF

SEQ ID NO: 68930 - protein, 16 aa, Homo sapiens
  CDR3 for beta chain variable domain of TCR clone 34465 (TRBV9, TRBJ1-2)
CASSAEEKVSPYGYTF

SEQ ID NO: 68931 - protein, 12 aa, Homo sapiens
  CDR3 for alpha chain variable domain of TCR clone 34466 (TRAV13-1, TRAJ21)
CAAKEGFNKFYF

SEQ ID NO: 68932 - protein, 14 aa, Homo sapiens
  CDR3 for beta chain variable domain of TCR clone 34466 (TRBV5-4, TRBJ1-1)
CVSSLDSRRDEAFF

SEQ ID NO: 68933 - protein, 12 aa, Homo sapiens
  CDR3 for alpha chain variable domain of TCR clone 34467 (TRAV35, TRAJ39)
LAPNNAGSMLTF

SEQ ID NO: 68934 - protein, 16 aa, Homo sapiens
  CDR3 for beta chain variable domain of TCR clone 34467 (TRBV2, TRBJ2-3)
CASSTSVEGVTDTQYF

SEQ ID NO: 68935 - protein, 12 aa, Homo sapiens
  CDR3 for alpha chain variable domain of TCR clone 34468 (TRAV12-3, TRAJ17)
CAMTLTGNKLTF

SEQ ID NO: 68936 - protein, 14 aa, Homo sapiens
  CDR3 for beta chain variable domain of TCR clone 34468 (TRBV11-2, TRBJ2-3)
CASSLGGGANTQYF

SEQ ID NO: 68937 - protein, 12 aa, Homo sapiens
  CDR3 for alpha chain variable domain of TCR clone 34469 (TRAV3, TRAJ20)
CAVRDPDYKLSF

SEQ ID NO: 68938 - protein, 16 aa, Homo sapiens
  CDR3 for beta chain variable domain of TCR clone 34469 (TRBV19, TRBJ2-2)
CASRSPGTGATGELFF

SEQ ID NO: 68939 - protein, 14 aa, Homo sapiens
  CDR3 for alpha chain variable domain of TCR clone 34470 (TRAV12-2, TRAJ13)
CAVKKTGGYQKVTF

SEQ ID NO: 68940 - protein, 13 aa, Homo sapiens
  CDR3 for beta chain variable domain of TCR clone 34470 (TRBV7-9, TRBJ1-2)
CASSLKQNYGCTF

SEQ ID NO: 68941 - protein, 13 aa, Homo sapiens
  CDR3 for alpha chain variable domain of TCR clone 34471 (TRAV21, TRAJ27)
CAALNTNAGKSTF

SEQ ID NO: 68942 - protein, 16 aa, Homo sapiens
  CDR3 for beta chain variable domain of TCR clone 34471 (TRBV27, TRBJ1-1)
CASSLLSGLSEAFLDK

SEQ ID NO: 68943 - protein, 14 aa, Homo sapiens
  CDR3 for alpha chain variable domain of TCR clone 34472 (TRAV17, TRAJ22)
CATAISGSARQLTF

SEQ ID NO: 68944 - protein, 13 aa, Homo sapiens
  CDR3 for beta chain variable domain of TCR clone 34472 (TRBV6-3, TRBJ1-2)
CASSLDRSSDYTF

SEQ ID NO: 68945 - protein, 13 aa, Homo sapiens
  CDR3 for alpha chain variable domain of TCR clone 34473 (TRAV12-3, TRAJ13)
CAMTSGGYQKVTF

SEQ ID NO: 68946 - protein, 13 aa, Homo sapiens
  CDR3 for beta chain variable domain of TCR clone 34473 (TRBV7-9, TRBJ1-2)
CACSLKQNYGYTF

SEQ ID NO: 68947 - protein, 12 aa, Homo sapiens
  CDR3 for alpha chain variable domain of TCR clone 34474 (TRAV21, TRAJ11)
CATTSGYSTLTF

SEQ ID NO: 68948 - protein, 14 aa, Homo sapiens
  CDR3 for beta chain variable domain of TCR clone 34474 (TRBV20-1, TRBJ2-7)
CSAPELAGVGEQYF

SEQ ID NO: 68949 - protein, 15 aa, Homo sapiens
  CDR3 for alpha chain variable domain of TCR clone 34475 (TRAV3, TRAJ5)
CAVRDRKTGRRALTF

SEQ ID NO: 68950 - protein, 15 aa, Homo sapiens
  CDR3 for beta chain variable domain of TCR clone 34475 (TRBV7-8, TRBJ2-1)
CASSLADSLCNEQFF

SEQ ID NO: 68951 - protein, 12 aa, Homo sapiens
  CDR3 for alpha chain variable domain of TCR clone 34476 (TRAV17, TRAJ20)
CATDSNDYKLSF

SEQ ID NO: 68952 - protein, 12 aa, Homo sapiens
  CDR3 for beta chain variable domain of TCR clone 34476 (TRBV4-2, TRBJ2-5)
CASGGAQETQYF

SEQ ID NO: 68953 - protein, 16 aa, Homo sapiens
  CDR3 for alpha chain variable domain of TCR clone 34477 (TRAV14/DV4, TRAJ57)
CAMKLVGRGGSEKLVF

SEQ ID NO: 68954 - protein, 16 aa, Homo sapiens
  CDR3 for beta chain variable domain of TCR clone 34477 (TRBV29-1, TRBJ1-2)
CSVEANRDIANYGYTF

SEQ ID NO: 68955 - protein, 13 aa, Homo sapiens
  CDR3 for alpha chain variable domain of TCR clone 34478 (TRAV38-1, TRAJ57)
CSLVQGGSEKLVF

SEQ ID NO: 68956 - protein, 17 aa, Homo sapiens
  CDR3 for beta chain variable domain of TCR clone 34478 (TRBV29-1, TRBJ2-3)
CSVDSPPRGARTDTQYF

SEQ ID NO: 68957 - protein, 18 aa, Homo sapiens
  CDR3 for alpha chain variable domain of TCR clone 34479 (TRAV13-1, TRAJ10)
CAASKGRAVTGGGNKLTF

SEQ ID NO: 68958 - protein, 14 aa, Homo sapiens
  CDR3 for beta chain variable domain of TCR clone 34479 (TRBV18, TRBJ2-7)
CASSPRGGAYAQYF

SEQ ID NO: 68959 - protein, 14 aa, Homo sapiens
  CDR3 for alpha chain variable domain of TCR clone 34480 (TRAV1-2, TRAJ26)
CCERPDNYGQNFVF

SEQ ID NO: 68960 - protein, 12 aa, Homo sapiens
  CDR3 for beta chain variable domain of TCR clone 34480 (TRBV20-1, TRBJ2-1)
CSAQYTYNEQFF

SEQ ID NO: 68961 - protein, 12 aa, Homo sapiens
  CDR3 for alpha chain variable domain of TCR clone 34481 (TRAV3, TRAJ20)
CAVRDPDYKLSF

SEQ ID NO: 68962 - protein, 17 aa, Homo sapiens
  CDR3 for beta chain variable domain of TCR clone 34481 (TRBV11-2, TRBJ2-1)
CASSLYPPGVEYNEQFF

SEQ ID NO: 68963 - protein, 11 aa, Homo sapiens
  CDR3 for alpha chain variable domain of TCR clone 34482 (TRAV12-3, TRAJ43)
CAMSVSNDMRF

SEQ ID NO: 68964 - protein, 13 aa, Homo sapiens
  CDR3 for beta chain variable domain of TCR clone 34482 (TRBV20-1, TRBJ1-1)
CSAPLGGGNEAFF

SEQ ID NO: 68965 - protein, 13 aa, Homo sapiens
  CDR3 for alpha chain variable domain of TCR clone 34483 (TRAV8-6, TRAJ50)
CAVIKTSYDKLIF

SEQ ID NO: 68966 - protein, 15 aa, Homo sapiens
  CDR3 for beta chain variable domain of TCR clone 34483 (TRBV7-2, TRBJ2-2)
CASRRPGQNTGELFF

SEQ ID NO: 68967 - protein, 12 aa, Homo sapiens
  CDR3 for alpha chain variable domain of TCR clone 34484 (TRAV9-2, TRAJ26)
CALRGYGQNFVF

SEQ ID NO: 68968 - protein, 12 aa, Homo sapiens
  CDR3 for beta chain variable domain of TCR clone 34484 (TRBV29-1, TRBJ2-3)
CSVTGEADTQYF

SEQ ID NO: 68969 - protein, 14 aa, Homo sapiens
  CDR3 for alpha chain variable domain of TCR clone 34485 (TRAV8-4, TRAJ13)
CAVTLSGGYQTVTF

SEQ ID NO: 68970 - protein, 14 aa, Homo sapiens
  CDR3 for beta chain variable domain of TCR clone 34485 (TRBV7-2, TRBJ1-2)
CASSQTGSTYGYTF

SEQ ID NO: 68971 - protein, 13 aa, Homo sapiens
  CDR3 for alpha chain variable domain of TCR clone 34486 (TRAV13-2, TRAJ48)
CAEMDFGNEKLTF

SEQ ID NO: 68972 - protein, 15 aa, Homo sapiens
  CDR3 for beta chain variable domain of TCR clone 34486 (TRBV7-9, TRBJ1-6)
CASSSPRRGNSPLHF

SEQ ID NO: 68973 - protein, 13 aa, Homo sapiens
  CDR3 for alpha chain variable domain of TCR clone 34487 (TRAV35, TRAJ42)
CAGFPGSQGNLVF

SEQ ID NO: 68974 - protein, 14 aa, Homo sapiens
  CDR3 for beta chain variable domain of TCR clone 34487 (TRBV4-1, TRBJ2-2)
CASSQAVNTGELFF

SEQ ID NO: 68975 - protein, 15 aa, Homo sapiens
  CDR3 for alpha chain variable domain of TCR clone 34488 (TRAV27, TRAJ38)
CAGRLNAGNNRKLIW

SEQ ID NO: 68976 - protein, 13 aa, Homo sapiens
  CDR3 for beta chain variable domain of TCR clone 34488 (TRBV12-5, TRBJ2-3)
CASQNRGTDTQYF

SEQ ID NO: 68977 - protein, 15 aa, Homo sapiens
  CDR3 for alpha chain variable domain of TCR clone 34489 (TRAV2, TRAJ9)
CAVEDRGTGGFKTIF

SEQ ID NO: 68978 - protein, 16 aa, Homo sapiens
  CDR3 for beta chain variable domain of TCR clone 34489 (TRBV24-1, TRBJ2-3)
CATSDPGTGVTDTQYF

SEQ ID NO: 68979 - protein, 12 aa, Homo sapiens
  CDR3 for alpha chain variable domain of TCR clone 34490 (TRAV27, TRAJ35)
CAGADFGNVLHC

SEQ ID NO: 68980 - protein, 15 aa, Homo sapiens
  CDR3 for beta chain variable domain of TCR clone 34490 (TRBV4-1, TRBJ1-4)
CASSDTGGTNEKLFF

SEQ ID NO: 68981 - protein, 13 aa, Homo sapiens
  CDR3 for alpha chain variable domain of TCR clone 34491 (TRAV13-2, TRAJ48)
CAEMDFGNEKLTF

SEQ ID NO: 68982 - protein, 15 aa, Homo sapiens
  CDR3 for beta chain variable domain of TCR clone 34491 (TRBV7-9, TRBJ1-6)
CASSSPGRGNSPIHF

SEQ ID NO: 68983 - protein, 14 aa, Homo sapiens
  CDR3 for alpha chain variable domain of TCR clone 34492 (TRAV26-1, TRAJ21)
CIVRPPYNFNKFYF

SEQ ID NO: 68984 - protein, 14 aa, Homo sapiens
  CDR3 for beta chain variable domain of TCR clone 34492 (TRBV11-3, TRBJ2-1)
CASSATTSGSIQFF

SEQ ID NO: 68985 - protein, 12 aa, Homo sapiens
  CDR3 for alpha chain variable domain of TCR clone 34493 (TRAV23/DV6, TRAJ33)
CAPMDSNYQLIW

SEQ ID NO: 68986 - protein, 14 aa, Homo sapiens
  CDR3 for beta chain variable domain of TCR clone 34493 (TRBV25-1, TRBJ1-1)
CASTHLGGNTEAFF

SEQ ID NO: 68987 - protein, 14 aa, Homo sapiens
  CDR3 for alpha chain variable domain of TCR clone 34494 (TRAV9-2, TRAJ39)
CALYIYNASNMLTF

SEQ ID NO: 68988 - protein, 15 aa, Homo sapiens
  CDR3 for beta chain variable domain of TCR clone 34494 (TRBV20-1, TRBJ1-6)
CSARVQGQGVSPLHF

SEQ ID NO: 68989 - protein, 12 aa, Homo sapiens
  CDR3 for alpha chain variable domain of TCR clone 34495 (TRAV3, TRAJ39)
CAVIEWSNMLTF

SEQ ID NO: 68990 - protein, 14 aa, Homo sapiens
  CDR3 for beta chain variable domain of TCR clone 34495 (TRBV7-8, TRBJ2-3)
CASSFPDGQDTQYF

SEQ ID NO: 68991 - protein, 14 aa, Homo sapiens
  CDR3 for alpha chain variable domain of TCR clone 34496 (TRAV12-2, TRAJ53)
CRERGGGSNYKLTF

SEQ ID NO: 68992 - protein, 17 aa, Homo sapiens
  CDR3 for beta chain variable domain of TCR clone 34496 (TRBV7-3, TRBJ2-3)
CAGSLMKRMRGADTQYF

SEQ ID NO: 68993 - protein, 17 aa, Homo sapiens
  CDR3 for alpha chain variable domain of TCR clone 34497 (TRAV3, TRAJ6)
CAVRDGPRAGRSYIPTF

SEQ ID NO: 68994 - protein, 20 aa, Homo sapiens
  CDR3 for beta chain variable domain of TCR clone 34497 (TRBV28, TRBJ2-1)
CASTPIGRSPGLAGGNEQFF

SEQ ID NO: 68995 - protein, 13 aa, Homo sapiens
  CDR3 for alpha chain variable domain of TCR clone 34498 (TRAV25, TRAJ30)
CAGRVDRDDKIIL

SEQ ID NO: 68996 - protein, 17 aa, Homo sapiens
  CDR3 for beta chain variable domain of TCR clone 34498 (TRBV7-9, TRBJ2-6)
CASSFGAGYSGANVLTF

SEQ ID NO: 68997 - protein, 15 aa, Homo sapiens
  CDR3 for alpha chain variable domain of TCR clone 34499 (TRAV20, TRAJ6)
CAVRLQSGGSYIPTF

SEQ ID NO: 68998 - protein, 14 aa, Homo sapiens
  CDR3 for beta chain variable domain of TCR clone 34499 (TRBV12-4, TRBJ2-7)
CTSSASGGWYEQYF

SEQ ID NO: 68999 - protein, 16 aa, Homo sapiens
  CDR3 for alpha chain variable domain of TCR clone 34500 (TRAV30, TRAJ24)
CGTEIVDADSWGKFQF

SEQ ID NO: 69000 - protein, 15 aa, Homo sapiens
  CDR3 for beta chain variable domain of TCR clone 34500 (TRBV7-2, TRBJ2-3)
CASSSTGLETDTQYF

SEQ ID NO: 69001 - protein, 14 aa, Homo sapiens
  CDR3 for alpha chain variable domain of TCR clone 34501 (TRAV1-2, TRAJ16)
CAVNRFSDGQKLLF

SEQ ID NO: 69002 - protein, 11 aa, Homo sapiens
  CDR3 for beta chain variable domain of TCR clone 34501 (TRBV29-1, TRBJ2-5)
CSEDQTGTQYF

SEQ ID NO: 69003 - protein, 16 aa, Homo sapiens
  CDR3 for alpha chain variable domain of TCR clone 34502 (TRAV3, TRAJ37)
CAVRGKGSGNTGKLIF

SEQ ID NO: 69004 - protein, 13 aa, Homo sapiens
  CDR3 for beta chain variable domain of TCR clone 34502 (TRBV3-1, TRBJ1-1)
CASSPGVITEAFF

SEQ ID NO: 69005 - protein, 12 aa, Homo sapiens
  CDR3 for alpha chain variable domain of TCR clone 34503 (TRAV1-1, TRAJ30)
CAVRGRDDKIIF

SEQ ID NO: 69006 - protein, 14 aa, Homo sapiens
  CDR3 for beta chain variable domain of TCR clone 34503 (TRBV6-1, TRBJ1-3)
CASVQGGGGNAIYF

SEQ ID NO: 69007 - protein, 14 aa, Homo sapiens
  CDR3 for alpha chain variable domain of TCR clone 34504 (TRAV25, TRAJ27)
CAGPGNTNAGKSTF

SEQ ID NO: 69008 - protein, 16 aa, Homo sapiens
  CDR3 for beta chain variable domain of TCR clone 34504 (TRBV4-1, TRBJ2-6)
CASSQDGGPGASVLTF

SEQ ID NO: 69009 - protein, 11 aa, Homo sapiens
  CDR3 for alpha chain variable domain of TCR clone 34505 (TRAV21, TRAJ34)
CAVTNTDKLIF

SEQ ID NO: 69010 - protein, 17 aa, Homo sapiens
  CDR3 for beta chain variable domain of TCR clone 34505 (TRBV13, TRBJ2-3)
CASSLSRVAGGRNTQYF

SEQ ID NO: 69011 - protein, 11 aa, Homo sapiens
  CDR3 for alpha chain variable domain of TCR clone 34506 (TRAV2, TRAJ13)
CASGGYQKVTS

SEQ ID NO: 69012 - protein, 14 aa, Homo sapiens
  CDR3 for beta chain variable domain of TCR clone 34506 (TRBV6-3, TRBJ1-1)
CASSNLLPGAEAFF

SEQ ID NO: 69013 - protein, 12 aa, Homo sapiens
  CDR3 for alpha chain variable domain of TCR clone 34507 (TRAV1-2, TRAJ33)
CAALDSNYQLIW

SEQ ID NO: 69014 - protein, 12 aa, Homo sapiens
  CDR3 for beta chain variable domain of TCR clone 34507 (TRBV29-1, TRBJ2-3)
CSVTGGADTQYF

SEQ ID NO: 69015 - protein, 14 aa, Homo sapiens
  CDR3 for alpha chain variable domain of TCR clone 34508 (TRAV1-2, TRAJ16)
CAVNRSSDGQKLLF

SEQ ID NO: 69016 - protein, 14 aa, Homo sapiens
  CDR3 for beta chain variable domain of TCR clone 34508 (TRBV7-9, TRBJ2-3)
CASSLEDGTDTQYF

SEQ ID NO: 69017 - protein, 11 aa, Homo sapiens
  CDR3 for alpha chain variable domain of TCR clone 34509 (TRAV27, TRAJ47)
SIGEYGNKLVF

SEQ ID NO: 69018 - protein, 18 aa, Homo sapiens
  CDR3 for beta chain variable domain of TCR clone 34509 (TRBV2, TRBJ2-1)
CASRGLAGGPRTYNEQFF

SEQ ID NO: 69019 - protein, 14 aa, Homo sapiens
  CDR3 for alpha chain variable domain of TCR clone 34510 (TRAV17, TRAJ4)
CATAPLGGYNKLIF

SEQ ID NO: 69020 - protein, 13 aa, Homo sapiens
  CDR3 for beta chain variable domain of TCR clone 34510 (TRBV12-4, TRBJ1-3)
RASSLASGNTIYF

SEQ ID NO: 69021 - protein, 14 aa, Homo sapiens
  CDR3 for alpha chain variable domain of TCR clone 34511 (TRAV12-3, TRAJ56)
CAMSVTGANSKLTF

SEQ ID NO: 69022 - protein, 17 aa, Homo sapiens
  CDR3 for beta chain variable domain of TCR clone 34511 (TRBV20-1, TRBJ2-3)
CSASLLGRGGSADTRYF

SEQ ID NO: 69023 - protein, 14 aa, Homo sapiens
  CDR3 for alpha chain variable domain of TCR clone 34512 (TRAV1-2, TRAJ8)
CAVREDTGFQKLVF

SEQ ID NO: 69024 - protein, 14 aa, Homo sapiens
  CDR3 for beta chain variable domain of TCR clone 34512 (TRBV15, TRBJ2-5)
CATSGDRGQETQYF

SEQ ID NO: 69025 - protein, 21 aa, Homo sapiens
  CDR3 for alpha chain variable domain of TCR clone 34513 (TRAV6, TRAJ36)
CARQTTSSLGLERDSPLFPIS

SEQ ID NO: 69026 - protein, 14 aa, Homo sapiens
  CDR3 for beta chain variable domain of TCR clone 34513 (TRBV7-9, TRBJ1-1)
CASTPLQSYTEAFF

SEQ ID NO: 69027 - protein, 15 aa, Homo sapiens
  CDR3 for alpha chain variable domain of TCR clone 34514 (TRAV12-3, TRAJ6)
CAMSATTGGSYIPTF

SEQ ID NO: 69028 - protein, 13 aa, Homo sapiens
  CDR3 for beta chain variable domain of TCR clone 34514 (TRBV12-5, TRBJ2-3)
CASGDRQSDTQYF

SEQ ID NO: 69029 - protein, 11 aa, Homo sapiens
  CDR3 for alpha chain variable domain of TCR clone 34515 (TRAV2, TRAJ33)
CAVDSNYRLIW

SEQ ID NO: 69030 - protein, 15 aa, Homo sapiens
  CDR3 for beta chain variable domain of TCR clone 34515 (TRBV19, TRBJ1-1)
CASTSGQIQNTEAFF

SEQ ID NO: 69031 - protein, 15 aa, Homo sapiens
  CDR3 for alpha chain variable domain of TCR clone 34516 (TRAV16, TRAJ12)
CSKWPLRDSSYKLIF

SEQ ID NO: 69032 - protein, 13 aa, Homo sapiens
  CDR3 for beta chain variable domain of TCR clone 34516 (TRBV4-2, TRBJ1-1)
CASSQAGNTEAFL

SEQ ID NO: 69033 - protein, 14 aa, Homo sapiens
  CDR3 for alpha chain variable domain of TCR clone 34517 (TRAV26-1, TRAJ38)
CIADNAGNNRKLLW

SEQ ID NO: 69034 - protein, 13 aa, Homo sapiens
  CDR3 for beta chain variable domain of TCR clone 34517 (TRBV19, TRBJ1-2)
CASSVPGQDGYTF

SEQ ID NO: 69035 - protein, 11 aa, Homo sapiens
  CDR3 for alpha chain variable domain of TCR clone 34518 (TRAV13-1, TRAJ39)
CTSHAGNMLTF

SEQ ID NO: 69036 - protein, 14 aa, Homo sapiens
  CDR3 for beta chain variable domain of TCR clone 34518 (TRBV11-2, TRBJ1-5)
CASSLDRGRQPQHF

SEQ ID NO: 69037 - protein, 15 aa, Homo sapiens
  CDR3 for alpha chain variable domain of TCR clone 34519 (TRAV2, TRAJ13)
CATPSYSGGYQKVTF

SEQ ID NO: 69038 - protein, 14 aa, Homo sapiens
  CDR3 for beta chain variable domain of TCR clone 34519 (TRBV11-3, TRBJ2-3)
CASSRLARTDTQYF

SEQ ID NO: 69039 - protein, 21 aa, Homo sapiens
  CDR3 for alpha chain variable domain of TCR clone 34520 (TRAV1-1, TRAJ6)
CLLLLLCERLERTGGSYIPTF

SEQ ID NO: 69040 - protein, 13 aa, Homo sapiens
  CDR3 for beta chain variable domain of TCR clone 34520 (TRBV10-2, TRBJ2-7)
CASGASGGYEQYF

SEQ ID NO: 69041 - protein, 13 aa, Homo sapiens
  CDR3 for alpha chain variable domain of TCR clone 34521 (TRAV8-4, TRAJ22)
CAVSENSARQLTF

SEQ ID NO: 69042 - protein, 16 aa, Homo sapiens
  CDR3 for beta chain variable domain of TCR clone 34521 (TRBV19, TRBJ2-2)
CASRSPGTGATGELFF

SEQ ID NO: 69043 - protein, 12 aa, Homo sapiens
  CDR3 for alpha chain variable domain of TCR clone 34522 (TRAV27, TRAJ13)
CAGVRGYQKVTF

SEQ ID NO: 69044 - protein, 16 aa, Homo sapiens
  CDR3 for beta chain variable domain of TCR clone 34522 (TRBV28, TRBJ2-1)
CASSSSYSGSLNGQFF

SEQ ID NO: 69045 - protein, 16 aa, Homo sapiens
  CDR3 for alpha chain variable domain of TCR clone 34523 (TRAV3, TRAJ23)
CAVKIGIYNKGGKLIF

SEQ ID NO: 69046 - protein, 17 aa, Homo sapiens
  CDR3 for beta chain variable domain of TCR clone 34523 (TRBV10-3, TRBJ2-6)
CAISESTAPSGANVLTF

SEQ ID NO: 69047 - protein, 13 aa, Homo sapiens
  CDR3 for alpha chain variable domain of TCR clone 34524 (TRAV38-1, TRAJ42)
YARWGGSQGNLIF

SEQ ID NO: 69048 - protein, 17 aa, Homo sapiens
  CDR3 for beta chain variable domain of TCR clone 34524 (TRBV20-1, TRBJ2-1)
CSARDPLAGVWDNEQFF

SEQ ID NO: 69049 - protein, 15 aa, Homo sapiens
  CDR3 for alpha chain variable domain of TCR clone 34525 (TRAV12-2, TRAJ53)
CAVNGGGGSNYKLTF

SEQ ID NO: 69050 - protein, 20 aa, Homo sapiens
  CDR3 for beta chain variable domain of TCR clone 34525 (TRBV28, TRBJ2-1)
CASTPIGRSPGLAGGNEQFF

SEQ ID NO: 69051 - protein, 12 aa, Homo sapiens
  CDR3 for alpha chain variable domain of TCR clone 34526 (TRAV27, TRAJ9)
CAGEAGGFKTIF

SEQ ID NO: 69052 - protein, 18 aa, Homo sapiens
  CDR3 for beta chain variable domain of TCR clone 34526 (TRBV10-2, TRBJ2-2)
CISAPAVHRQADAGELFF

SEQ ID NO: 69053 - protein, 15 aa, Homo sapiens
  CDR3 for alpha chain variable domain of TCR clone 34527 (TRAV35, TRAJ40)
CAGQLGTSGTYKYIF

SEQ ID NO: 69054 - protein, 11 aa, Homo sapiens
  CDR3 for beta chain variable domain of TCR clone 34527 (TRBV7-3, TRBJ2-7)
SSSGTGLEQYF

SEQ ID NO: 69055 - protein, 13 aa, Homo sapiens
  CDR3 for alpha chain variable domain of TCR clone 34528 (TRAV27, TRAJ45)
CRSSGGGADGLTF

SEQ ID NO: 69056 - protein, 15 aa, Homo sapiens
  CDR3 for beta chain variable domain of TCR clone 34528 (TRBV6-3, TRBJ2-7)
CASSSPGTVFYEQYF

SEQ ID NO: 69057 - protein, 13 aa, Homo sapiens
  CDR3 for alpha chain variable domain of TCR clone 34529 (TRAV2, TRAJ21)
CAVEDLNFNKFYF

SEQ ID NO: 69058 - protein, 15 aa, Homo sapiens
  CDR3 for beta chain variable domain of TCR clone 34529 (TRBV28, TRBJ2-5)
CASSPGQGSTETQYF

SEQ ID NO: 69059 - protein, 17 aa, Homo sapiens
  CDR3 for alpha chain variable domain of TCR clone 34530 (TRAV26-2, TRAJ42)
CILRDVGYGGSQGNLIF

SEQ ID NO: 69060 - protein, 16 aa, Homo sapiens
  CDR3 for beta chain variable domain of TCR clone 34530 (TRBV12-4, TRBJ2-7)
CASSLTGGTGTYEQYF

SEQ ID NO: 69061 - protein, 14 aa, Homo sapiens
  CDR3 for alpha chain variable domain of TCR clone 34531 (TRAV12-2, TRAJ17)
CAVLFKAAGNRLTF

SEQ ID NO: 69062 - protein, 14 aa, Homo sapiens
  CDR3 for beta chain variable domain of TCR clone 34531 (TRBV19, TRBJ2-1)
CASPTFVLSGEQFF

SEQ ID NO: 69063 - protein, 15 aa, Homo sapiens
  CDR3 for alpha chain variable domain of TCR clone 34532 (TRAV1-2, TRAJ30)
CAVRPHGNRDDKIIF

SEQ ID NO: 69064 - protein, 13 aa, Homo sapiens
  CDR3 for beta chain variable domain of TCR clone 34532 (TRBV4-1, TRBJ2-7)
CASGQGQAYEQYF

SEQ ID NO: 69065 - protein, 12 aa, Homo sapiens
  CDR3 for alpha chain variable domain of TCR clone 34533 (TRAV13-1, TRAJ20)
CAASRGDYKLSF

SEQ ID NO: 69066 - protein, 16 aa, Homo sapiens
  CDR3 for beta chain variable domain of TCR clone 34533 (TRBV7-3, TRBJ2-2)
CASSLKRGTLSGELFF

SEQ ID NO: 69067 - protein, 15 aa, Homo sapiens
  CDR3 for alpha chain variable domain of TCR clone 34534 (TRAV12-2, TRAJ43)
CAFDMRFGAGTILTV

SEQ ID NO: 69068 - protein, 18 aa, Homo sapiens
  CDR3 for beta chain variable domain of TCR clone 34534 (TRBV20-1, TRBJ2-3)
CSASGLAGGPGTTDTQYF

SEQ ID NO: 69069 - protein, 14 aa, Homo sapiens
  CDR3 for alpha chain variable domain of TCR clone 34535 (TRAV8-1, TRAJ5)
CAVRTDTGRRALTF

SEQ ID NO: 69070 - protein, 14 aa, Homo sapiens
  CDR3 for beta chain variable domain of TCR clone 34535 (TRBV7-8, TRBJ2-3)
CASSFPDGKDTQYF

SEQ ID NO: 69071 - protein, 13 aa, Homo sapiens
  CDR3 for alpha chain variable domain of TCR clone 34536 (TRAV12-2, TRAJ4)
CAGFSGGYNKLIF

SEQ ID NO: 69072 - protein, 14 aa, Homo sapiens
  CDR3 for beta chain variable domain of TCR clone 34536 (TRBV24-1, TRBJ1-1)
CATIIPRGDTEAFF

SEQ ID NO: 69073 - protein, 14 aa, Homo sapiens
  CDR3 for alpha chain variable domain of TCR clone 34537 (TRAV17, TRAJ57)
CATDPQGGSEKLVF

SEQ ID NO: 69074 - protein, 13 aa, Homo sapiens
  CDR3 for beta chain variable domain of TCR clone 34537 (TRBV20-1, TRBJ2-7)
CSATHTSGYEQYF

SEQ ID NO: 69075 - protein, 14 aa, Homo sapiens
  CDR3 for alpha chain variable domain of TCR clone 34538 (TRAV12-1, TRAJ17)
CVVNYKAAGNKLTF

SEQ ID NO: 69076 - protein, 17 aa, Homo sapiens
  CDR3 for beta chain variable domain of TCR clone 34538 (TRBV20-1, TRBJ2-1)
CSARSSGLAGSYNEQFF

SEQ ID NO: 69077 - protein, 13 aa, Homo sapiens
  CDR3 for alpha chain variable domain of TCR clone 34539 (TRAV27, TRAJ3)
ASLRGSSASKIIF

SEQ ID NO: 69078 - protein, 15 aa, Homo sapiens
  CDR3 for beta chain variable domain of TCR clone 34539 (TRBV28, TRBJ1-3)
CASSMGWGSGNTIYF

SEQ ID NO: 69079 - protein, 14 aa, Homo sapiens
  CDR3 for alpha chain variable domain of TCR clone 34540 (TRAV12-3, TRAJ29)
CAMILLSGNTPLVF

SEQ ID NO: 69080 - protein, 16 aa, Homo sapiens
  CDR3 for beta chain variable domain of TCR clone 34540 (TRBV28, TRBJ2-7)
CASSSGTSGRGYEQHF

SEQ ID NO: 69081 - protein, 12 aa, Homo sapiens
  CDR3 for alpha chain variable domain of TCR clone 34541 (TRAV16, TRAJ57)
GALEGGSEKLVF

SEQ ID NO: 69082 - protein, 12 aa, Homo sapiens
  CDR3 for beta chain variable domain of TCR clone 34541 (TRBV28, TRBJ2-7)
CASSGRPYEQYF

SEQ ID NO: 69083 - protein, 16 aa, Homo sapiens
  CDR3 for alpha chain variable domain of TCR clone 34542 (TRAV27, TRAJ52)
CAGAPAGGTSYGKLTS

SEQ ID NO: 69084 - protein, 12 aa, Homo sapiens
  CDR3 for beta chain variable domain of TCR clone 34542 (TRBV27, TRBJ2-1)
CASRGFYNEQFF

SEQ ID NO: 69085 - protein, 14 aa, Homo sapiens
  CDR3 for alpha chain variable domain of TCR clone 34543 (TRAV17, TRAJ57)
CAADPQGGSEKLVF

SEQ ID NO: 69086 - protein, 14 aa, Homo sapiens
  CDR3 for beta chain variable domain of TCR clone 34543 (TRBV2, TRBJ1-1)
CASRSGTMNTEAFF

SEQ ID NO: 69087 - protein, 13 aa, Homo sapiens
  CDR3 for alpha chain variable domain of TCR clone 34544 (TRAV2, TRAJ24)
CAVTTDSWGKLQC

SEQ ID NO: 69088 - protein, 14 aa, Homo sapiens
  CDR3 for beta chain variable domain of TCR clone 34544 (TRBV13, TRBJ2-5)
CASSLGRGQETQYF

SEQ ID NO: 69089 - protein, 12 aa, Homo sapiens
  CDR3 for alpha chain variable domain of TCR clone 34545 (TRAV17, TRAJ57)
CATDGGSEKLVF

SEQ ID NO: 69090 - protein, 13 aa, Homo sapiens
  CDR3 for beta chain variable domain of TCR clone 34545 (TRBV7-9, TRBJ2-7)
CASSFAGAYEQCF

SEQ ID NO: 69091 - protein, 13 aa, Homo sapiens
  CDR3 for alpha chain variable domain of TCR clone 34546 (TRAV1-1, TRAJ9)
CAAKNTGGFKTIF

SEQ ID NO: 69092 - protein, 16 aa, Homo sapiens
  CDR3 for beta chain variable domain of TCR clone 34546 (TRBV28, TRBJ1-4)
CASSPPYRGRSEKLFF

SEQ ID NO: 69093 - protein, 14 aa, Homo sapiens
  CDR3 for alpha chain variable domain of TCR clone 34547 (TRAV12-3, TRAJ10)
SHLPLTGGGNKLTF

SEQ ID NO: 69094 - protein, 14 aa, Homo sapiens
  CDR3 for beta chain variable domain of TCR clone 34547 (TRBV6-1, TRBJ1-3)
CASVQGGGGNTVYF

SEQ ID NO: 69095 - protein, 14 aa, Homo sapiens
  CDR3 for alpha chain variable domain of TCR clone 34548 (TRAV12-3, TRAJ10)
SHLPLTGGGNKLTF

SEQ ID NO: 69096 - protein, 17 aa, Homo sapiens
  CDR3 for beta chain variable domain of TCR clone 34548 (TRBV4-1, TRBJ1-4)
CASSQEGPRGVEEKLFF

SEQ ID NO: 69097 - protein, 13 aa, Homo sapiens
  CDR3 for alpha chain variable domain of TCR clone 34549 (TRAV27, TRAJ53)
CAGQGGSNYKLTF

SEQ ID NO: 69098 - protein, 13 aa, Homo sapiens
  CDR3 for beta chain variable domain of TCR clone 34549 (TRBV29-1, TRBJ1-1)
CSVESGFVTEAFF

SEQ ID NO: 69099 - protein, 12 aa, Homo sapiens
  CDR3 for alpha chain variable domain of TCR clone 34550 (TRAV17, TRAJ57)
CATDGGSEKLVF

SEQ ID NO: 69100 - protein, 14 aa, Homo sapiens
  CDR3 for beta chain variable domain of TCR clone 34550 (TRBV25-1, TRBJ1-1)
CASTHLGGNTEAFF

SEQ ID NO: 69101 - protein, 12 aa, Homo sapiens
  CDR3 for alpha chain variable domain of TCR clone 34551 (TRAV13-2, TRAJ8)
CAPWLGFQKLVF

SEQ ID NO: 69102 - protein, 12 aa, Homo sapiens
  CDR3 for beta chain variable domain of TCR clone 34551 (TRBV11-2, TRBJ2-2)
CASSLGGGELFF

SEQ ID NO: 69103 - protein, 16 aa, Homo sapiens
  CDR3 for alpha chain variable domain of TCR clone 34552 (TRAV3, TRAJ37)
CAVRGKGSGNTGKLIF

SEQ ID NO: 69104 - protein, 12 aa, Homo sapiens
  CDR3 for beta chain variable domain of TCR clone 34552 (TRBV7-8, TRBJ2-7)
CASSLGDREQYF

SEQ ID NO: 69105 - protein, 11 aa, Homo sapiens
  CDR3 for alpha chain variable domain of TCR clone 34553 (TRAV2, TRAJ13)
CASVGYQKVTF

SEQ ID NO: 69106 - protein, 13 aa, Homo sapiens
  CDR3 for beta chain variable domain of TCR clone 34553 (TRBV12-4, TRBJ1-2)
CASSLRQGKGYTF

SEQ ID NO: 69107 - protein, 16 aa, Homo sapiens
  CDR3 for alpha chain variable domain of TCR clone 34554 (TRAV30, TRAJ24)
CGTEIVDADSWGEFQF

SEQ ID NO: 69108 - protein, 16 aa, Homo sapiens
  CDR3 for beta chain variable domain of TCR clone 34554 (TRBV19, TRBJ1-5)
CASSTWTGGGNQPQHF

SEQ ID NO: 69109 - protein, 15 aa, Homo sapiens
  CDR3 for alpha chain variable domain of TCR clone 34555 (TRAV35, TRAJ24)
CAGQSAQGSWGKLQF

SEQ ID NO: 69110 - protein, 13 aa, Homo sapiens
  CDR3 for beta chain variable domain of TCR clone 34555 (TRBV10-3, TRBJ2-7)
CASKLAVNYEQYF

SEQ ID NO: 69111 - protein, 15 aa, Homo sapiens
  CDR3 for alpha chain variable domain of TCR clone 34556 (TRAV23/DV6, TRAJ18)
CAARYRGSTLGRVYF

SEQ ID NO: 69112 - protein, 13 aa, Homo sapiens
  CDR3 for beta chain variable domain of TCR clone 34556 (TRBV7-2, TRBJ2-7)
CASSSPSGSEQYF

SEQ ID NO: 69113 - protein, 10 aa, Homo sapiens
  CDR3 for alpha chain variable domain of TCR clone 34557 (TRAV23/DV6, TRAJ15)
SQPAGTALIF

SEQ ID NO: 69114 - protein, 14 aa, Homo sapiens
  CDR3 for beta chain variable domain of TCR clone 34557 (TRBV7-9, TRBJ1-2)
CASSRQGANYGYTF

SEQ ID NO: 69115 - protein, 14 aa, Homo sapiens
  CDR3 for alpha chain variable domain of TCR clone 34558 (TRAV12-3, TRAJ58)
CAMSTKTSGSRLTF

SEQ ID NO: 69116 - protein, 13 aa, Homo sapiens
  CDR3 for beta chain variable domain of TCR clone 34558 (TRBV27, TRBJ2-3)
CASSWGRTDTQYF

SEQ ID NO: 69117 - protein, 16 aa, Homo sapiens
  CDR3 for alpha chain variable domain of TCR clone 34559 (TRAV3, TRAJ37)
CAVRPHGSGNTGKLIF

SEQ ID NO: 69118 - protein, 17 aa, Homo sapiens
  CDR3 for beta chain variable domain of TCR clone 34559 (TRBV5-1, TRBJ2-5)
CASSPVALGQNKETQYF

SEQ ID NO: 69119 - protein, 14 aa, Homo sapiens
  CDR3 for alpha chain variable domain of TCR clone 34560 (TRAV21, TRAJ37)
CAVKGSSNTGKLIF

SEQ ID NO: 69120 - protein, 17 aa, Homo sapiens
  CDR3 for beta chain variable domain of TCR clone 34560 (TRBV13, TRBJ2-3)
CASSLSRVAGGRNTQYF

SEQ ID NO: 69121 - protein, 15 aa, Homo sapiens
  CDR3 for alpha chain variable domain of TCR clone 34561 (TRAV3, TRAJ3)
CAVRDMSSSDSKIIF

SEQ ID NO: 69122 - protein, 14 aa, Homo sapiens
  CDR3 for beta chain variable domain of TCR clone 34561 (TRBV6-6, TRBJ2-7)
CASSIAGGVDEQYF

SEQ ID NO: 69123 - protein, 11 aa, Homo sapiens
  CDR3 for alpha chain variable domain of TCR clone 34562 (TRAV12-3, TRAJ27)
CAMANAGKSTF

SEQ ID NO: 69124 - protein, 13 aa, Homo sapiens
  CDR3 for beta chain variable domain of TCR clone 34562 (TRBV20-1, TRBJ1-1)
CSARMGGNTEAFF

SEQ ID NO: 69125 - protein, 14 aa, Homo sapiens
  CDR3 for alpha chain variable domain of TCR clone 34563 (TRAV17, TRAJ16)
CATADFSDGQELLF

SEQ ID NO: 69126 - protein, 15 aa, Homo sapiens
  CDR3 for beta chain variable domain of TCR clone 34563 (TRBV18, TRBJ2-1)
CASSPPSASYNEQFF

SEQ ID NO: 69127 - protein, 16 aa, Homo sapiens
  CDR3 for alpha chain variable domain of TCR clone 34564 (TRAV30, TRAJ24)
CGTEIVDADSWGKFQL

SEQ ID NO: 69128 - protein, 18 aa, Homo sapiens
  CDR3 for beta chain variable domain of TCR clone 34564 (TRBV11-2, TRBJ2-3)
CASSLGGASRGAPNTQYF

SEQ ID NO: 69129 - protein, 12 aa, Homo sapiens
  CDR3 for alpha chain variable domain of TCR clone 34565 (TRAV13-2, TRAJ54)
CGAHEGAQRLVF

SEQ ID NO: 69130 - protein, 15 aa, Homo sapiens
  CDR3 for beta chain variable domain of TCR clone 34565 (TRBV27, TRBJ2-7)
CASSPQREGQREQYF

SEQ ID NO: 69131 - protein, 14 aa, Homo sapiens
  CDR3 for alpha chain variable domain of TCR clone 34566 (TRAV1-2, TRAJ16)
CAVNRFSDGQKLLF

SEQ ID NO: 69132 - protein, 14 aa, Homo sapiens
  CDR3 for beta chain variable domain of TCR clone 34566 (TRBV7-6, TRBJ2-3)
CASSVAGGTDTQYF

SEQ ID NO: 69133 - protein, 16 aa, Homo sapiens
  CDR3 for alpha chain variable domain of TCR clone 34567 (TRAV16, TRAJ4)
CALSRMFSGGYNKLIF

SEQ ID NO: 69134 - protein, 15 aa, Homo sapiens
  CDR3 for beta chain variable domain of TCR clone 34567 (TRBV7-9, TRBJ2-2)
CASGPLDTFPGELFF

SEQ ID NO: 69135 - protein, 10 aa, Homo sapiens
  CDR3 for alpha chain variable domain of TCR clone 34568 (TRAV30, TRAJ48)
CGIGNEKSTF

SEQ ID NO: 69136 - protein, 15 aa, Homo sapiens
  CDR3 for beta chain variable domain of TCR clone 34568 (TRBV28, TRBJ2-5)
CASSPPWSYQETQYF

SEQ ID NO: 69137 - protein, 14 aa, Homo sapiens
  CDR3 for alpha chain variable domain of TCR clone 34569 (TRAV23/DV6, TRAJ4)
CSAPSSGGYNKLIF

SEQ ID NO: 69138 - protein, 16 aa, Homo sapiens
  CDR3 for beta chain variable domain of TCR clone 34569 (TRBV19, TRBJ1-1)
CASRFGGPVTGTEAFF

SEQ ID NO: 69139 - protein, 18 aa, Homo sapiens
  CDR3 for alpha chain variable domain of TCR clone 34570 (TRAV9-2, TRAJ52)
CALIRHNAGGTSYGKLTF

SEQ ID NO: 69140 - protein, 13 aa, Homo sapiens
  CDR3 for beta chain variable domain of TCR clone 34570 (TRBV7-9, TRBJ1-2)
CASSLKQNYGYTF

SEQ ID NO: 69141 - protein, 14 aa, Homo sapiens
  CDR3 for alpha chain variable domain of TCR clone 34571 (TRAV1-2, TRAJ16)
CAVNRFSDGQKLLL

SEQ ID NO: 69142 - protein, 12 aa, Homo sapiens
  CDR3 for beta chain variable domain of TCR clone 34571 (TRBV28, TRBJ2-6)
CAIQAGAYVLTF

SEQ ID NO: 69143 - protein, 17 aa, Homo sapiens
  CDR3 for alpha chain variable domain of TCR clone 34572 (TRAV13-1, TRAJ52)
CAAGRNAGGTSYGKLTF

SEQ ID NO: 69144 - protein, 16 aa, Homo sapiens
  CDR3 for beta chain variable domain of TCR clone 34572 (TRBV12-5, TRBJ2-5)
CASGPRTSGNQETQYF

SEQ ID NO: 69145 - protein, 13 aa, Homo sapiens
  CDR3 for alpha chain variable domain of TCR clone 34573 (TRAV2, TRAJ40)
CAVVTSGTYKYIF

SEQ ID NO: 69146 - protein, 14 aa, Homo sapiens
  CDR3 for beta chain variable domain of TCR clone 34573 (TRBV19, TRBJ2-1)
WASPTFVLSGEQFF

SEQ ID NO: 69147 - protein, 15 aa, Homo sapiens
  CDR3 for alpha chain variable domain of TCR clone 34574 (TRAV26-2, TRAJ57)
CILRDIRGGSEKPVF

SEQ ID NO: 69148 - protein, 15 aa, Homo sapiens
  CDR3 for beta chain variable domain of TCR clone 34574 (TRBV2, TRBJ2-1)
CASDIGLAGEGEQFF

SEQ ID NO: 69149 - protein, 18 aa, Homo sapiens
  CDR3 for alpha chain variable domain of TCR clone 34575 (TRAV12-2, )
CAVEDIQNPDPAVYQLRD

SEQ ID NO: 69150 - protein, 14 aa, Homo sapiens
  CDR3 for beta chain variable domain of TCR clone 34575 (TRBV19, TRBJ2-1)
CASPTFVLSGEQFF

SEQ ID NO: 69151 - protein, 14 aa, Homo sapiens
  CDR3 for alpha chain variable domain of TCR clone 34576 (TRAV3, TRAJ9)
CAVRLNTGGFKTIF

SEQ ID NO: 69152 - protein, 15 aa, Homo sapiens
  CDR3 for beta chain variable domain of TCR clone 34576 (TRBV7-2, TRBJ2-1)
CASSLASGRVNGQFF

SEQ ID NO: 69153 - protein, 14 aa, Homo sapiens
  CDR3 for alpha chain variable domain of TCR clone 34577 (TRAV1-2, TRAJ16)
CAVNRFSDGQKLLF

SEQ ID NO: 69154 - protein, 17 aa, Homo sapiens
  CDR3 for beta chain variable domain of TCR clone 34577 (TRBV28, TRBJ2-5)
CASSFGGEGGGQETQYF

SEQ ID NO: 69155 - protein, 14 aa, Homo sapiens
  CDR3 for alpha chain variable domain of TCR clone 34578 (TRAV12-2, TRAJ17)
CAVLFKAAGNKLTF

SEQ ID NO: 69156 - protein, 16 aa, Homo sapiens
  CDR3 for beta chain variable domain of TCR clone 34578 (TRBV15, TRBJ2-3)
CATSRDLGIVTDTQYF

SEQ ID NO: 69157 - protein, 11 aa, Homo sapiens
  CDR3 for alpha chain variable domain of TCR clone 34579 (TRAV1-2, TRAJ20)
CAVSNDYKLSL

SEQ ID NO: 69158 - protein, 16 aa, Homo sapiens
  CDR3 for beta chain variable domain of TCR clone 34579 (TRBV29-1, TRBJ2-6)
CSVEDITYSGANVLTF

SEQ ID NO: 69159 - protein, 11 aa, Homo sapiens
  CDR3 for alpha chain variable domain of TCR clone 34580 (TRAV21, TRAJ11)
CAVNGYSTLTF

SEQ ID NO: 69160 - protein, 16 aa, Homo sapiens
  CDR3 for beta chain variable domain of TCR clone 34580 (TRBV19, TRBJ2-1)
CASSRAGPSSYNEQFF

SEQ ID NO: 69161 - protein, 11 aa, Homo sapiens
  CDR3 for alpha chain variable domain of TCR clone 34581 (TRAV35, TRAJ30)
CAGPGDDKIIF

SEQ ID NO: 69162 - protein, 14 aa, Homo sapiens
  CDR3 for beta chain variable domain of TCR clone 34581 (TRBV7-6, TRBJ1-6)
CASGQAGGGSPLHF

SEQ ID NO: 69163 - protein, 13 aa, Homo sapiens
  CDR3 for alpha chain variable domain of TCR clone 34582 (TRAV20, TRAJ48)
CAVQGVRNEKLTF

SEQ ID NO: 69164 - protein, 14 aa, Homo sapiens
  CDR3 for beta chain variable domain of TCR clone 34582 (TRBV27, TRBJ2-7)
CASSFRDGPYEQYF

SEQ ID NO: 69165 - protein, 16 aa, Homo sapiens
  CDR3 for alpha chain variable domain of TCR clone 34583 (TRAV23/DV6, TRAJ9)
CAASIGGNTGGFKTIF

SEQ ID NO: 69166 - protein, 14 aa, Homo sapiens
  CDR3 for beta chain variable domain of TCR clone 34583 (TRBV12-4, TRBJ1-1)
CASSLGTGGTEAFF

SEQ ID NO: 69167 - protein, 14 aa, Homo sapiens
  CDR3 for alpha chain variable domain of TCR clone 34584 (TRAV8-2, TRAJ45)
CVVSAGGGADGLTF

SEQ ID NO: 69168 - protein, 12 aa, Homo sapiens
  CDR3 for beta chain variable domain of TCR clone 34584 (TRBV12-4, TRBJ2-1)
CVSSLVRVEQFF

SEQ ID NO: 69169 - protein, 12 aa, Homo sapiens
  CDR3 for alpha chain variable domain of TCR clone 34585 (TRAV13-1, TRAJ27)
CAAHTNAGKPTF

SEQ ID NO: 69170 - protein, 14 aa, Homo sapiens
  CDR3 for beta chain variable domain of TCR clone 34585 (TRBV19, TRBJ2-2)
CASSGQGIAGELFF

SEQ ID NO: 69171 - protein, 14 aa, Homo sapiens
  CDR3 for alpha chain variable domain of TCR clone 34586 (TRAV12-3, TRAJ10)
SHLPLTGGGNKLTF

SEQ ID NO: 69172 - protein, 14 aa, Homo sapiens
  CDR3 for beta chain variable domain of TCR clone 34586 (TRBV7-9, TRBJ2-5)
CASSSPPGTETQYF

SEQ ID NO: 69173 - protein, 14 aa, Homo sapiens
  CDR3 for alpha chain variable domain of TCR clone 34587 (TRAV13-1, TRAJ9)
CAASALTGGFKTIS

SEQ ID NO: 69174 - protein, 13 aa, Homo sapiens
  CDR3 for beta chain variable domain of TCR clone 34587 (TRBV20-1, TRBJ1-1)
CSAGTVGNTEAFF

SEQ ID NO: 69175 - protein, 10 aa, Homo sapiens
  CDR3 for alpha chain variable domain of TCR clone 34588 (TRAV1-2, TRAJ23)
CAGQGGKLIL

SEQ ID NO: 69176 - protein, 16 aa, Homo sapiens
  CDR3 for beta chain variable domain of TCR clone 34588 (TRBV11-2, TRBJ1-1)
CASSLRQGGEHSKAFF

SEQ ID NO: 69177 - protein, 16 aa, Homo sapiens
  CDR3 for alpha chain variable domain of TCR clone 34589 (TRAV12-3, TRAJ53)
CAMSVGSGGSNYKLTS

SEQ ID NO: 69178 - protein, 11 aa, Homo sapiens
  CDR3 for beta chain variable domain of TCR clone 34589 (TRBV29-1, TRBJ2-5)
CSVASGETQYF

SEQ ID NO: 69179 - protein, 14 aa, Homo sapiens
  CDR3 for alpha chain variable domain of TCR clone 34590 (TRAV8-3, TRAJ4)
CAVGAAGGYNELIF

SEQ ID NO: 69180 - protein, 15 aa, Homo sapiens
  CDR3 for beta chain variable domain of TCR clone 34590 (TRBV6-5, TRBJ2-1)
CASSYDAGAGNEQFF

SEQ ID NO: 69181 - protein, 14 aa, Homo sapiens
  CDR3 for alpha chain variable domain of TCR clone 34591 (TRAV20, TRAJ56)
CALQFGGANSKLTF

SEQ ID NO: 69182 - protein, 14 aa, Homo sapiens
  CDR3 for beta chain variable domain of TCR clone 34591 (TRBV20-1, TRBJ2-7)
CSAKRGRSSYEQYF

SEQ ID NO: 69183 - protein, 14 aa, Homo sapiens
  CDR3 for alpha chain variable domain of TCR clone 34592 (TRAV1-2, TRAJ16)
CAVNRFSDGQKLLF

SEQ ID NO: 69184 - protein, 17 aa, Homo sapiens
  CDR3 for beta chain variable domain of TCR clone 34592 (TRBV7-9, TRBJ2-3)
CASSPTVAGDLTDTQYF

SEQ ID NO: 69185 - protein, 10 aa, Homo sapiens
  CDR3 for alpha chain variable domain of TCR clone 34593 (TRAV23/DV6, TRAJ31)
CARGGARLMF

SEQ ID NO: 69186 - protein, 12 aa, Homo sapiens
  CDR3 for beta chain variable domain of TCR clone 34593 (TRBV11-2, TRBJ2-1)
CASSPGNNEQFF

SEQ ID NO: 69187 - protein, 13 aa, Homo sapiens
  CDR3 for alpha chain variable domain of TCR clone 34594 (TRAV12-2, TRAJ4)
CAGFSGGYNKLIF

SEQ ID NO: 69188 - protein, 14 aa, Homo sapiens
  CDR3 for beta chain variable domain of TCR clone 34594 (TRBV24-1, TRBJ1-1)
CATSIPRGDTEALF

SEQ ID NO: 69189 - protein, 14 aa, Homo sapiens
  CDR3 for alpha chain variable domain of TCR clone 34595 (TRAV17, TRAJ15)
CATGPNQAGTALIF

SEQ ID NO: 69190 - protein, 15 aa, Homo sapiens
  CDR3 for beta chain variable domain of TCR clone 34595 (TRBV11-2, TRBJ2-2)
CASSSDRVNAGELCF

SEQ ID NO: 69191 - protein, 14 aa, Homo sapiens
  CDR3 for alpha chain variable domain of TCR clone 34596 (TRAV12-1, TRAJ17)
CVVNYKAAGNKLTF

SEQ ID NO: 69192 - protein, 16 aa, Homo sapiens
  CDR3 for beta chain variable domain of TCR clone 34596 (TRBV27, TRBJ2-2)
CASSFRGLVRTGELFF

SEQ ID NO: 69193 - protein, 17 aa, Homo sapiens
  CDR3 for alpha chain variable domain of TCR clone 34597 (TRAV3, TRAJ42)
CAVRDRDYGGSQGNLIF

SEQ ID NO: 69194 - protein, 13 aa, Homo sapiens
  CDR3 for beta chain variable domain of TCR clone 34597 (TRBV27, TRBJ1-1)
CASSLSIGAEAFF

SEQ ID NO: 69195 - protein, 16 aa, Homo sapiens
  CDR3 for alpha chain variable domain of TCR clone 34598 (TRAV12-2, TRAJ10)
CAVNRVLTGGGNKLTF

SEQ ID NO: 69196 - protein, 15 aa, Homo sapiens
  CDR3 for beta chain variable domain of TCR clone 34598 (TRBV4-1, TRBJ1-4)
CASSDTGGTNEKLFF

SEQ ID NO: 69197 - protein, 13 aa, Homo sapiens
  CDR3 for alpha chain variable domain of TCR clone 34599 (TRAV13-1, TRAJ4)
QAYQAGGYNKLIF

SEQ ID NO: 69198 - protein, 14 aa, Homo sapiens
  CDR3 for beta chain variable domain of TCR clone 34599 (TRBV5-4, TRBJ2-7)
CASSADAGSYEQYF

SEQ ID NO: 69199 - protein, 15 aa, Homo sapiens
  CDR3 for alpha chain variable domain of TCR clone 34600 (TRAV3, TRAJ47)
CAVRDIGEYGNKLVF

SEQ ID NO: 69200 - protein, 15 aa, Homo sapiens
  CDR3 for beta chain variable domain of TCR clone 34600 (TRBV20-1, TRBJ2-7)
CSARVPAAYFYEQYF

SEQ ID NO: 69201 - protein, 16 aa, Homo sapiens
  CDR3 for alpha chain variable domain of TCR clone 34601 (TRAV12-1, TRAJ43)
CVVNPHRFGAGTRLTV

SEQ ID NO: 69202 - protein, 13 aa, Homo sapiens
  CDR3 for beta chain variable domain of TCR clone 34601 (TRBV12-4, TRBJ1-2)
CASSPGPNYGYTF

SEQ ID NO: 69203 - protein, 15 aa, Homo sapiens
  CDR3 for alpha chain variable domain of TCR clone 34602 (TRAV12-3, TRAJ27)
CAMRAYNTNAGKSTF

SEQ ID NO: 69204 - protein, 13 aa, Homo sapiens
  CDR3 for beta chain variable domain of TCR clone 34602 (TRBV11-2, TRBJ2-5)
CASSRGPSGTQYF

SEQ ID NO: 69205 - protein, 12 aa, Homo sapiens
  CDR3 for alpha chain variable domain of TCR clone 34603 (TRAV13-1, TRAJ15)
CAASQAGTALIF

SEQ ID NO: 69206 - protein, 18 aa, Homo sapiens
  CDR3 for beta chain variable domain of TCR clone 34603 (TRBV7-9, TRBJ2-3)
CASSLPINGQVSTDTQYF

SEQ ID NO: 69207 - protein, 12 aa, Homo sapiens
  CDR3 for alpha chain variable domain of TCR clone 34604 (TRAV1-2, TRAJ33)
CAALDSNYQLIW

SEQ ID NO: 69208 - protein, 17 aa, Homo sapiens
  CDR3 for beta chain variable domain of TCR clone 34604 (TRBV25-1, TRBJ1-2)
CASSEFGSATANYGYTF

SEQ ID NO: 69209 - protein, 13 aa, Homo sapiens
  CDR3 for alpha chain variable domain of TCR clone 34605 (TRAV12-3, TRAJ33)
CAMSVNSNYQLIW

SEQ ID NO: 69210 - protein, 13 aa, Homo sapiens
  CDR3 for beta chain variable domain of TCR clone 34605 (TRBV7-2, TRBJ2-2)
CASSLAVTGEMFF

SEQ ID NO: 69211 - protein, 15 aa, Homo sapiens
  CDR3 for alpha chain variable domain of TCR clone 34606 (TRAV3, TRAJ22)
CAVRDRGGSARQLTF

SEQ ID NO: 69212 - protein, 12 aa, Homo sapiens
  CDR3 for beta chain variable domain of TCR clone 34606 (TRBV7-9, TRBJ1-4)
CASSTDREKLFF

SEQ ID NO: 69213 - protein, 13 aa, Homo sapiens
  CDR3 for alpha chain variable domain of TCR clone 34607 (TRAV3, TRAJ27)
CAVRPFGAGKSTF

SEQ ID NO: 69214 - protein, 13 aa, Homo sapiens
  CDR3 for beta chain variable domain of TCR clone 34607 (TRBV7-9, TRBJ2-3)
CASSPGSTDTQYF

SEQ ID NO: 69215 - protein, 12 aa, Homo sapiens
  CDR3 for alpha chain variable domain of TCR clone 34608 (TRAV17, TRAJ20)
CATDSNDYKLSF

SEQ ID NO: 69216 - protein, 13 aa, Homo sapiens
  CDR3 for beta chain variable domain of TCR clone 34608 (TRBV7-9, TRBJ1-2)
CASSLKQNYGYTF

SEQ ID NO: 69217 - protein, 12 aa, Homo sapiens
  CDR3 for alpha chain variable domain of TCR clone 34609 (TRAV12-1, TRAJ23)
SVVNIPGGKLIF

SEQ ID NO: 69218 - protein, 15 aa, Homo sapiens
  CDR3 for beta chain variable domain of TCR clone 34609 (TRBV7-2, TRBJ2-7)
CASSLVSSGSYEQYF

SEQ ID NO: 69219 - protein, 15 aa, Homo sapiens
  CDR3 for alpha chain variable domain of TCR clone 34610 (TRAV12-1, TRAJ45)
CVVLSGGGGADGPTF

SEQ ID NO: 69220 - protein, 13 aa, Homo sapiens
  CDR3 for beta chain variable domain of TCR clone 34610 (TRBV7-3, TRBJ1-1)
CASSQDWGAEAFF

SEQ ID NO: 69221 - protein, 14 aa, Homo sapiens
  CDR3 for alpha chain variable domain of TCR clone 34611 (TRAV2, TRAJ20)
CAVDLRKHDYKLSF

SEQ ID NO: 69222 - protein, 17 aa, Homo sapiens
  CDR3 for beta chain variable domain of TCR clone 34611 (TRBV11-2, TRBJ2-1)
CASSLYPPGVEYNEQFF

SEQ ID NO: 69223 - protein, 13 aa, Homo sapiens
  CDR3 for alpha chain variable domain of TCR clone 34612 (TRAV13-1, TRAJ21)
CAASIYKFNKFYF

SEQ ID NO: 69224 - protein, 13 aa, Homo sapiens
  CDR3 for beta chain variable domain of TCR clone 34612 (TRBV27, TRBJ1-4)
CASSLMGDEKLFF

SEQ ID NO: 69225 - protein, 15 aa, Homo sapiens
  CDR3 for alpha chain variable domain of TCR clone 34613 (TRAV8-4, TRAJ3)
CAVTGENLVQQCFQD

SEQ ID NO: 69226 - protein, 16 aa, Homo sapiens
  CDR3 for beta chain variable domain of TCR clone 34613 (TRBV4-2, TRBJ1-1)
CASSQAGFRMNTEAFF

SEQ ID NO: 69227 - protein, 16 aa, Homo sapiens
  CDR3 for alpha chain variable domain of TCR clone 34614 (TRAV30, TRAJ24)
CGTEIVDADSWGKLQF

SEQ ID NO: 69228 - protein, 14 aa, Homo sapiens
  CDR3 for beta chain variable domain of TCR clone 34614 (TRBV7-2, TRBJ2-7)
CASSPKTSFYEQYF

SEQ ID NO: 69229 - protein, 13 aa, Homo sapiens
  CDR3 for alpha chain variable domain of TCR clone 34615 (TRAV13-2, TRAJ13)
CAERPGGDQKVTF

SEQ ID NO: 69230 - protein, 15 aa, Homo sapiens
  CDR3 for beta chain variable domain of TCR clone 34615 (TRBV11-3, TRBJ2-7)
CASSPGPASSYEQYF

SEQ ID NO: 69231 - protein, 14 aa, Homo sapiens
  CDR3 for alpha chain variable domain of TCR clone 34616 (TRAV12-2, TRAJ44)
CAVNPAGTASKLTF

SEQ ID NO: 69232 - protein, 13 aa, Homo sapiens
  CDR3 for beta chain variable domain of TCR clone 34616 (TRBV20-1, TRBJ1-6)
CSAPLWVGSPLHF

SEQ ID NO: 69233 - protein, 16 aa, Homo sapiens
  CDR3 for alpha chain variable domain of TCR clone 34617 (TRAV27, TRAJ13)
CAGAKSDSGSYQKVTF

SEQ ID NO: 69234 - protein, 15 aa, Homo sapiens
  CDR3 for beta chain variable domain of TCR clone 34617 (TRBV29-1, TRBJ2-1)
CSVGRHALFYNEQFF

SEQ ID NO: 69235 - protein, 13 aa, Homo sapiens
  CDR3 for alpha chain variable domain of TCR clone 34618 (TRAV12-3, TRAJ13)
CAMTSGGYQKVTF

SEQ ID NO: 69236 - protein, 13 aa, Homo sapiens
  CDR3 for beta chain variable domain of TCR clone 34618 (TRBV20-1, TRBJ2-2)
CSDLSGGAGELFF

SEQ ID NO: 69237 - protein, 14 aa, Homo sapiens
  CDR3 for alpha chain variable domain of TCR clone 34619 (TRAV38-1, TRAJ40)
CALRPTSGTYKYIF

SEQ ID NO: 69238 - protein, 16 aa, Homo sapiens
  CDR3 for beta chain variable domain of TCR clone 34619 (TRBV19, TRBJ2-1)
CASSKAGPSSYNEQFF

SEQ ID NO: 69239 - protein, 12 aa, Homo sapiens
  CDR3 for alpha chain variable domain of TCR clone 34620 (TRAV12-1, TRAJ34)
CVVAGATDKPIF

SEQ ID NO: 69240 - protein, 16 aa, Homo sapiens
  CDR3 for beta chain variable domain of TCR clone 34620 (TRBV7-2, TRBJ1-2)
CASSSNQDRRGHGYTF

SEQ ID NO: 69241 - protein, 14 aa, Homo sapiens
  CDR3 for alpha chain variable domain of TCR clone 34621 (TRAV12-2, TRAJ9)
CAVNVEGGGFKTIF

SEQ ID NO: 69242 - protein, 14 aa, Homo sapiens
  CDR3 for beta chain variable domain of TCR clone 34621 (TRBV27, TRBJ2-5)
CASSSLKGWETQYF

SEQ ID NO: 69243 - protein, 14 aa, Homo sapiens
  CDR3 for alpha chain variable domain of TCR clone 34622 (TRAV8-6, TRAJ49)
CAVSVRYTGNQFYF

SEQ ID NO: 69244 - protein, 12 aa, Homo sapiens
  CDR3 for beta chain variable domain of TCR clone 34622 (TRBV11-2, TRBJ2-2)
CASSLGGGELFF

SEQ ID NO: 69245 - protein, 14 aa, Homo sapiens
  CDR3 for alpha chain variable domain of TCR clone 34623 (TRAV1-2, TRAJ16)
CAVNRFLDGHKLLF

SEQ ID NO: 69246 - protein, 15 aa, Homo sapiens
  CDR3 for beta chain variable domain of TCR clone 34623 (TRBV7-9, TRBJ1-6)
CASSSPGRGNSPLHF

SEQ ID NO: 69247 - protein, 13 aa, Homo sapiens
  CDR3 for alpha chain variable domain of TCR clone 34624 (TRAV30, TRAJ6)
CGFIEGGSYIPTF

SEQ ID NO: 69248 - protein, 15 aa, Homo sapiens
  CDR3 for beta chain variable domain of TCR clone 34624 (TRBV28, TRBJ1-3)
CASSMGWASGNTIYF

SEQ ID NO: 69249 - protein, 13 aa, Homo sapiens
  CDR3 for alpha chain variable domain of TCR clone 34625 (TRAV35, TRAJ44)
CAGLSGTASKLTF

SEQ ID NO: 69250 - protein, 17 aa, Homo sapiens
  CDR3 for beta chain variable domain of TCR clone 34625 (TRBV7-8, TRBJ1-2)
CASSLRPLQGHLYGYAF

SEQ ID NO: 69251 - protein, 13 aa, Homo sapiens
  CDR3 for alpha chain variable domain of TCR clone 34626 (TRAV9-2, TRAJ12)
CARGEDSSYKLIF

SEQ ID NO: 69252 - protein, 13 aa, Homo sapiens
  CDR3 for beta chain variable domain of TCR clone 34626 (TRBV15, TRBJ2-7)
CATSTTGHYEQYF

SEQ ID NO: 69253 - protein, 14 aa, Homo sapiens
  CDR3 for alpha chain variable domain of TCR clone 34627 (TRAV8-2, TRAJ4)
CVVSPSGGYNKLIF

SEQ ID NO: 69254 - protein, 15 aa, Homo sapiens
  CDR3 for beta chain variable domain of TCR clone 34627 (TRBV4-1, TRBJ1-4)
CASSDIGGTNEKLFF

SEQ ID NO: 69255 - protein, 12 aa, Homo sapiens
  CDR3 for alpha chain variable domain of TCR clone 34628 (TRAV1-1, TRAJ8)
CAGGTGFQKLVS

SEQ ID NO: 69256 - protein, 16 aa, Homo sapiens
  CDR3 for beta chain variable domain of TCR clone 34628 (TRBV12-4, TRBJ1-5)
CASSRPVGGSNQPQHF

SEQ ID NO: 69257 - protein, 14 aa, Homo sapiens
  CDR3 for alpha chain variable domain of TCR clone 34629 (TRAV12-2, TRAJ5)
CAVNRSTGRRALTF

SEQ ID NO: 69258 - protein, 12 aa, Homo sapiens
  CDR3 for beta chain variable domain of TCR clone 34629 (TRBV19, TRBJ1-5)
CASSIAKQPQHF

SEQ ID NO: 69259 - protein, 14 aa, Homo sapiens
  CDR3 for alpha chain variable domain of TCR clone 34630 (TRAV12-2, TRAJ32)
CAHPERGATNKLIF

SEQ ID NO: 69260 - protein, 14 aa, Homo sapiens
  CDR3 for beta chain variable domain of TCR clone 34630 (TRBV4-2, TRBJ2-3)
CASRETRAPGMQYF

SEQ ID NO: 69261 - protein, 12 aa, Homo sapiens
  CDR3 for alpha chain variable domain of TCR clone 34631 (TRAV8-4, TRAJ37)
CAVRSNTGKLIF

SEQ ID NO: 69262 - protein, 16 aa, Homo sapiens
  CDR3 for beta chain variable domain of TCR clone 34631 (TRBV7-2, TRBJ2-3)
CASSLVGDASTDAQYF

SEQ ID NO: 69263 - protein, 16 aa, Homo sapiens
  CDR3 for alpha chain variable domain of TCR clone 34632 (TRAV20, TRAJ52)
CAVLPDGGTSYGKLTF

SEQ ID NO: 69264 - protein, 12 aa, Homo sapiens
  CDR3 for beta chain variable domain of TCR clone 34632 (TRBV19, TRBJ2-1)
CASSQVSNEQFF

SEQ ID NO: 69265 - protein, 11 aa, Homo sapiens
  CDR3 for alpha chain variable domain of TCR clone 34633 (TRAV1-1, TRAJ23)
CAVRQGGKLIF

SEQ ID NO: 69266 - protein, 14 aa, Homo sapiens
  CDR3 for beta chain variable domain of TCR clone 34633 (TRBV19, TRBJ2-1)
CASPTFVVSGEQFF

SEQ ID NO: 69267 - protein, 13 aa, Homo sapiens
  CDR3 for alpha chain variable domain of TCR clone 34634 (TRAV38-1, TRAJ52)
CAFRGTSYGKLTF

SEQ ID NO: 69268 - protein, 15 aa, Homo sapiens
  CDR3 for beta chain variable domain of TCR clone 34634 (TRBV7-8, TRBJ2-5)
CASSDAAGSQETQYL

SEQ ID NO: 69269 - protein, 17 aa, Homo sapiens
  CDR3 for alpha chain variable domain of TCR clone 34635 (TRAV8-6, TRAJ58)
CAVSSWVGETSGSRLTF

SEQ ID NO: 69270 - protein, 14 aa, Homo sapiens
  CDR3 for beta chain variable domain of TCR clone 34635 (TRBV4-2, TRBJ2-1)
CASGLDRAYNDQFF

SEQ ID NO: 69271 - protein, 15 aa, Homo sapiens
  CDR3 for alpha chain variable domain of TCR clone 34636 (TRAV17, TRAJ16)
CATALRFSDGQKLLF

SEQ ID NO: 69272 - protein, 15 aa, Homo sapiens
  CDR3 for beta chain variable domain of TCR clone 34636 (TRBV20-1, TRBJ1-1)
CCASRGVTGNTEAFF

SEQ ID NO: 69273 - protein, 17 aa, Homo sapiens
  CDR3 for alpha chain variable domain of TCR clone 34637 (TRAV20, TRAJ52)
CAVQANAGGTSYGKLTF

SEQ ID NO: 69274 - protein, 13 aa, Homo sapiens
  CDR3 for beta chain variable domain of TCR clone 34637 (TRBV11-3, TRBJ1-1)
CASSRGRGASAFF

SEQ ID NO: 69275 - protein, 13 aa, Homo sapiens
  CDR3 for alpha chain variable domain of TCR clone 34638 (TRAV27, TRAJ3)
ASLRGSSASKIIF

SEQ ID NO: 69276 - protein, 15 aa, Homo sapiens
  CDR3 for beta chain variable domain of TCR clone 34638 (TRBV28, TRBJ1-3)
CASSMGWASGNTIYL

SEQ ID NO: 69277 - protein, 18 aa, Homo sapiens
  CDR3 for alpha chain variable domain of TCR clone 34639 (TRAV13-1, TRAJ52)
CAASKRSAGGTSYGKPTF

SEQ ID NO: 69278 - protein, 13 aa, Homo sapiens
  CDR3 for beta chain variable domain of TCR clone 34639 (TRBV12-4, TRBJ1-2)
CASSLRQGEGYTF

SEQ ID NO: 69279 - protein, 15 aa, Homo sapiens
  CDR3 for alpha chain variable domain of TCR clone 34640 (TRAV8-3, TRAJ45)
CASSYSGGGADGLTF

SEQ ID NO: 69280 - protein, 13 aa, Homo sapiens
  CDR3 for beta chain variable domain of TCR clone 34640 (TRBV10-3, TRBJ2-7)
GASKLAVNYEQYF

SEQ ID NO: 69281 - protein, 14 aa, Homo sapiens
  CDR3 for alpha chain variable domain of TCR clone 34641 (TRAV12-2, TRAJ45)
CALPERGGADGLTF

SEQ ID NO: 69282 - protein, 16 aa, Homo sapiens
  CDR3 for beta chain variable domain of TCR clone 34641 (TRBV18, TRBJ1-5)
CDSSPGNSNQPSILVM

SEQ ID NO: 69283 - protein, 14 aa, Homo sapiens
  CDR3 for alpha chain variable domain of TCR clone 34642 (TRAV8-4, TRAJ54)
CAVSEVLGTQKLVF

SEQ ID NO: 69284 - protein, 13 aa, Homo sapiens
  CDR3 for beta chain variable domain of TCR clone 34642 (TRBV27, TRBJ2-7)
CASSFVSSYEQYF

SEQ ID NO: 69285 - protein, 14 aa, Homo sapiens
  CDR3 for alpha chain variable domain of TCR clone 34643 (TRAV1-2, TRAJ16)
CAVNRFSDGQKLPF

SEQ ID NO: 69286 - protein, 14 aa, Homo sapiens
  CDR3 for beta chain variable domain of TCR clone 34643 (TRBV20-1, TRBJ2-1)
CSARGGSSYNEQFF

SEQ ID NO: 69287 - protein, 18 aa, Homo sapiens
  CDR3 for alpha chain variable domain of TCR clone 34644 (TRAV12-3, TRAJ52)
CAMSRTNAGDTSYGKLTF

SEQ ID NO: 69288 - protein, 17 aa, Homo sapiens
  CDR3 for beta chain variable domain of TCR clone 34644 (TRBV7-3, TRBJ2-3)
CASSLMKRMRGADTQYF

SEQ ID NO: 69289 - protein, 12 aa, Homo sapiens
  CDR3 for alpha chain variable domain of TCR clone 34645 (TRAV25, TRAJ53)
CQSGGSNYKLTF

SEQ ID NO: 69290 - protein, 12 aa, Homo sapiens
  CDR3 for beta chain variable domain of TCR clone 34645 (TRBV14, TRBJ2-7)
CASSSLKGEQHF

SEQ ID NO: 69291 - protein, 12 aa, Homo sapiens
  CDR3 for alpha chain variable domain of TCR clone 34646 (TRAV16, TRAJ22)
CALEVSARQLTS

SEQ ID NO: 69292 - protein, 14 aa, Homo sapiens
  CDR3 for beta chain variable domain of TCR clone 34646 (TRBV11-2, TRBJ2-3)
CASSSIASTDTQYF

SEQ ID NO: 69293 - protein, 13 aa, Homo sapiens
  CDR3 for alpha chain variable domain of TCR clone 34647 (TRAV21, TRAJ27)
CAACPGNAGKSTF

SEQ ID NO: 69294 - protein, 13 aa, Homo sapiens
  CDR3 for beta chain variable domain of TCR clone 34647 (TRBV13, TRBJ2-1)
CASILGGRGEQFF

SEQ ID NO: 69295 - protein, 16 aa, Homo sapiens
  CDR3 for alpha chain variable domain of TCR clone 34648 (TRAV26-1, TRAJ37)
CIVRGDGSGNTGTLIF

SEQ ID NO: 69296 - protein, 17 aa, Homo sapiens
  CDR3 for beta chain variable domain of TCR clone 34648 (TRBV4-1, TRBJ2-7)
CASSRDPLGVRGGEQYF

SEQ ID NO: 69297 - protein, 15 aa, Homo sapiens
  CDR3 for alpha chain variable domain of TCR clone 34649 (TRAV25, TRAJ52)
CAGRPGGTSYGKLTF

SEQ ID NO: 69298 - protein, 13 aa, Homo sapiens
  CDR3 for beta chain variable domain of TCR clone 34649 (TRBV19, TRBJ2-2)
CASSIWSTGELFF

SEQ ID NO: 69299 - protein, 15 aa, Homo sapiens
  CDR3 for alpha chain variable domain of TCR clone 34650 (TRAV21, TRAJ45)
CAVSYSGGGADGLAF

SEQ ID NO: 69300 - protein, 13 aa, Homo sapiens
  CDR3 for beta chain variable domain of TCR clone 34650 (TRBV20-1, TRBJ2-5)
CSAATELQETQYF

SEQ ID NO: 69301 - protein, 13 aa, Homo sapiens
  CDR3 for alpha chain variable domain of TCR clone 34651 (TRAV13-2, TRAJ53)
CAENMGSNYKLTF

SEQ ID NO: 69302 - protein, 13 aa, Homo sapiens
  CDR3 for beta chain variable domain of TCR clone 34651 (TRBV4-1, TRBJ2-2)
CASSQENTGELLF

SEQ ID NO: 69303 - protein, 19 aa, Homo sapiens
  CDR3 for alpha chain variable domain of TCR clone 34652 (TRAV26-1, TRAJ52)
CIVRAHLNAGGTSYGKLTF

SEQ ID NO: 69304 - protein, 15 aa, Homo sapiens
  CDR3 for beta chain variable domain of TCR clone 34652 (TRBV29-1, TRBJ2-1)
CSGRDRKSSYNEQFF

SEQ ID NO: 69305 - protein, 12 aa, Homo sapiens
  CDR3 for alpha chain variable domain of TCR clone 34653 (TRAV2, TRAJ31)
CAVEDNNARLMF

SEQ ID NO: 69306 - protein, 16 aa, Homo sapiens
  CDR3 for beta chain variable domain of TCR clone 34653 (TRBV10-3, TRBJ2-1)
CAISGLGDGGGGEQFF

SEQ ID NO: 69307 - protein, 12 aa, Homo sapiens
  CDR3 for alpha chain variable domain of TCR clone 34654 (TRAV3, TRAJ39)
CAVIEWSNMLTL

SEQ ID NO: 69308 - protein, 14 aa, Homo sapiens
  CDR3 for beta chain variable domain of TCR clone 34654 (TRBV7-8, TRBJ2-3)
CASSFPDGQDTQYF

SEQ ID NO: 69309 - protein, 16 aa, Homo sapiens
  CDR3 for alpha chain variable domain of TCR clone 34655 (TRAV8-2, TRAJ48)
CVVSDVSNFGNEKLTF

SEQ ID NO: 69310 - protein, 12 aa, Homo sapiens
  CDR3 for beta chain variable domain of TCR clone 34655 (TRBV11-2, TRBJ2-2)
CASSLGGGELFF

SEQ ID NO: 69311 - protein, 17 aa, Homo sapiens
  CDR3 for alpha chain variable domain of TCR clone 34656 (TRAV4, TRAJ42)
CLVGVLSYGGSQGNLIF

SEQ ID NO: 69312 - protein, 12 aa, Homo sapiens
  CDR3 for beta chain variable domain of TCR clone 34656 (TRBV20-1, TRBJ2-1)
CSAQYTYNEQFF

SEQ ID NO: 69313 - protein, 13 aa, Homo sapiens
  CDR3 for alpha chain variable domain of TCR clone 34657 (TRAV3, TRAJ15)
CAVRDQAGTALTF

SEQ ID NO: 69314 - protein, 15 aa, Homo sapiens
  CDR3 for beta chain variable domain of TCR clone 34657 (TRBV11-1, TRBJ2-7)
CASSLNYGASYEQYF

SEQ ID NO: 69315 - protein, 17 aa, Homo sapiens
  CDR3 for alpha chain variable domain of TCR clone 34658 (TRAV8-6, TRAJ58)
CAVSSWVGETSGFRLTF

SEQ ID NO: 69316 - protein, 14 aa, Homo sapiens
  CDR3 for beta chain variable domain of TCR clone 34658 (TRBV4-2, TRBJ2-1)
CASGLDRAYNEQFF

SEQ ID NO: 69317 - protein, 11 aa, Homo sapiens
  CDR3 for alpha chain variable domain of TCR clone 34659 (TRAV17, TRAJ36)
CAPTGANNLFF

SEQ ID NO: 69318 - protein, 15 aa, Homo sapiens
  CDR3 for beta chain variable domain of TCR clone 34659 (TRBV11-3, TRBJ2-3)
CASNGGLDSTDTQYF

SEQ ID NO: 69319 - protein, 16 aa, Homo sapiens
  CDR3 for alpha chain variable domain of TCR clone 34660 (TRAV1-2, TRAJ10)
CAVRGVLTGGGNKLTF

SEQ ID NO: 69320 - protein, 12 aa, Homo sapiens
  CDR3 for beta chain variable domain of TCR clone 34660 (TRBV7-8, TRBJ2-7)
CASSLGDRDQYF

SEQ ID NO: 69321 - protein, 15 aa, Homo sapiens
  CDR3 for alpha chain variable domain of TCR clone 34661 (TRAV8-3, TRAJ45)
CASSYSGGGADGLTF

SEQ ID NO: 69322 - protein, 13 aa, Homo sapiens
  CDR3 for beta chain variable domain of TCR clone 34661 (TRBV10-3, TRBJ2-7)
CASKLAVNYDQYF

SEQ ID NO: 69323 - protein, 16 aa, Homo sapiens
  CDR3 for alpha chain variable domain of TCR clone 34662 (TRAV4, TRAJ22)
CLVGYLYSGSARQLTF

SEQ ID NO: 69324 - protein, 16 aa, Homo sapiens
  CDR3 for beta chain variable domain of TCR clone 34662 (TRBV7-9, TRBJ2-1)
CASSDVAGGSYNEQFF

SEQ ID NO: 69325 - protein, 14 aa, Homo sapiens
  CDR3 for alpha chain variable domain of TCR clone 34663 (TRAV26-1, TRAJ34)
CIVRVAYNTDKLIF

SEQ ID NO: 69326 - protein, 15 aa, Homo sapiens
  CDR3 for beta chain variable domain of TCR clone 34663 (TRBV7-9, TRBJ1-6)
CASSSPGRGNSPLHF

SEQ ID NO: 69327 - protein, 18 aa, Homo sapiens
  CDR3 for alpha chain variable domain of TCR clone 34664 (TRAV38-2/DV8, TRAJ42)
CAYRSADLTGGSQGNPIF

SEQ ID NO: 69328 - protein, 12 aa, Homo sapiens
  CDR3 for beta chain variable domain of TCR clone 34664 (TRBV11-2, TRBJ2-2)
CASSLGGGELFF

SEQ ID NO: 69329 - protein, 14 aa, Homo sapiens
  CDR3 for alpha chain variable domain of TCR clone 34665 (TRAV12-2, TRAJ45)
CVLPERGGADGLTF

SEQ ID NO: 69330 - protein, 14 aa, Homo sapiens
  CDR3 for beta chain variable domain of TCR clone 34665 (TRBV18, TRBJ1-5)
CASSPGNSNQPQHF

SEQ ID NO: 69331 - protein, 14 aa, Homo sapiens
  CDR3 for alpha chain variable domain of TCR clone 34666 (TRAV1-2, TRAJ16)
CVVNRFSDGQKLLF

SEQ ID NO: 69332 - protein, 13 aa, Homo sapiens
  CDR3 for beta chain variable domain of TCR clone 34666 (TRBV10-3, TRBJ2-7)
CASKLAVNYEQYF

SEQ ID NO: 69333 - protein, 17 aa, Homo sapiens
  CDR3 for alpha chain variable domain of TCR clone 34667 (TRAV3, TRAJ6)
CAVRDGPRAGGSYIPTV

SEQ ID NO: 69334 - protein, 14 aa, Homo sapiens
  CDR3 for beta chain variable domain of TCR clone 34667 (TRBV7-2, TRBJ2-7)
CASSPKTSFYEQYF

SEQ ID NO: 69335 - protein, 20 aa, Homo sapiens
  CDR3 for alpha chain variable domain of TCR clone 34668 (TRAV26-1, TRAJ42)
CCVLLHRQTYYGGRQGNLIF

SEQ ID NO: 69336 - protein, 16 aa, Homo sapiens
  CDR3 for beta chain variable domain of TCR clone 34668 (TRBV7-3, TRBJ2-2)
CASSLKRGTLSGELFF

SEQ ID NO: 69337 - protein, 14 aa, Homo sapiens
  CDR3 for alpha chain variable domain of TCR clone 34669 (TRAV1-2, TRAJ8)
CAVREDTGFQKLVF

SEQ ID NO: 69338 - protein, 16 aa, Homo sapiens
  CDR3 for beta chain variable domain of TCR clone 34669 (TRBV7-9, TRBJ2-1)
CAGSDVAGGSYNEQFF

SEQ ID NO: 69339 - protein, 14 aa, Homo sapiens
  CDR3 for alpha chain variable domain of TCR clone 34670 (TRAV26-1, TRAJ44)
CIVRPTGTASKLIF

SEQ ID NO: 69340 - protein, 12 aa, Homo sapiens
  CDR3 for beta chain variable domain of TCR clone 34670 (TRBV11-3, TRBJ1-1)
CASSLRDSEAFF

SEQ ID NO: 69341 - protein, 11 aa, Homo sapiens
  CDR3 for alpha chain variable domain of TCR clone 34671 (TRAV2, TRAJ16)
CAVGDGQRLLF

SEQ ID NO: 69342 - protein, 15 aa, Homo sapiens
  CDR3 for beta chain variable domain of TCR clone 34671 (TRBV11-2, TRBJ2-1)
CASSPAGQSLNEQFF

SEQ ID NO: 69343 - protein, 13 aa, Homo sapiens
  CDR3 for alpha chain variable domain of TCR clone 34672 (TRAV8-3, TRAJ28)
CAVGAVGSYQLTF

SEQ ID NO: 69344 - protein, 14 aa, Homo sapiens
  CDR3 for beta chain variable domain of TCR clone 34672 (TRBV7-2, TRBJ2-7)
CASRSQGATYEQYF

SEQ ID NO: 69345 - protein, 14 aa, Homo sapiens
  CDR3 for alpha chain variable domain of TCR clone 34673 (TRAV13-1, TRAJ13)
CAASRVGGYQKGTF

SEQ ID NO: 69346 - protein, 17 aa, Homo sapiens
  CDR3 for beta chain variable domain of TCR clone 34673 (TRBV15, TRBJ1-5)
CATSRAPPGTRNQPQHF

SEQ ID NO: 69347 - protein, 11 aa, Homo sapiens
  CDR3 for alpha chain variable domain of TCR clone 34674 (TRAV12-3, TRAJ27)
CAMANAGKSTF

SEQ ID NO: 69348 - protein, 13 aa, Homo sapiens
  CDR3 for beta chain variable domain of TCR clone 34674 (TRBV7-3, TRBJ1-1)
CASSQDWGAEAFF

SEQ ID NO: 69349 - protein, 14 aa, Homo sapiens
  CDR3 for alpha chain variable domain of TCR clone 34675 (TRAV1-2, TRAJ16)
CAVNRFSDGQKLLF

SEQ ID NO: 69350 - protein, 15 aa, Homo sapiens
  CDR3 for beta chain variable domain of TCR clone 34675 (TRBV20-1, TRBJ1-1)
CSARGGGNTEASLDK

SEQ ID NO: 69351 - protein, 13 aa, Homo sapiens
  CDR3 for alpha chain variable domain of TCR clone 34676 (TRAV26-1, TRAJ34)
CIVRPWITGKLIF

SEQ ID NO: 69352 - protein, 14 aa, Homo sapiens
  CDR3 for beta chain variable domain of TCR clone 34676 (TRBV12-4, TRBJ1-4)
CASSRQGANEKLFF

SEQ ID NO: 69353 - protein, 14 aa, Homo sapiens
  CDR3 for alpha chain variable domain of TCR clone 34677 (TRAV12-3, TRAJ10)
SHLPLTGGGNKLTF

SEQ ID NO: 69354 - protein, 15 aa, Homo sapiens
  CDR3 for beta chain variable domain of TCR clone 34677 (TRBV6-1, TRBJ2-1)
CASSEEGPSYNEQFF

SEQ ID NO: 69355 - protein, 15 aa, Homo sapiens
  CDR3 for alpha chain variable domain of TCR clone 34678 (TRAV12-3, TRAJ6)
CAMSATTGGSYIPTF

SEQ ID NO: 69356 - protein, 16 aa, Homo sapiens
  CDR3 for beta chain variable domain of TCR clone 34678 (TRBV20-1, TRBJ1-2)
CSASMGQCVANYGYTF

SEQ ID NO: 69357 - protein, 12 aa, Homo sapiens
  CDR3 for alpha chain variable domain of TCR clone 34679 (TRAV3, TRAJ27)
CAVRDKAGKSTF

SEQ ID NO: 69358 - protein, 14 aa, Homo sapiens
  CDR3 for beta chain variable domain of TCR clone 34679 (TRBV5-1, TRBJ1-2)
CASSVDSTNYGYAF

SEQ ID NO: 69359 - protein, 14 aa, Homo sapiens
  CDR3 for alpha chain variable domain of TCR clone 34680 (TRAV8-4, TRAJ13)
CDVTLSGGYQKVTF

SEQ ID NO: 69360 - protein, 14 aa, Homo sapiens
  CDR3 for beta chain variable domain of TCR clone 34680 (TRBV7-2, TRBJ1-2)
CASSQTGSTYGYTF

SEQ ID NO: 69361 - protein, 16 aa, Homo sapiens
  CDR3 for alpha chain variable domain of TCR clone 34681 (TRAV9-2, TRAJ52)
CALSGAGGTSYGKLTF

SEQ ID NO: 69362 - protein, 16 aa, Homo sapiens
  CDR3 for beta chain variable domain of TCR clone 34681 (TRBV2, TRBJ1-4)
CASNLLQGATNEKLFF

SEQ ID NO: 69363 - protein, 11 aa, Homo sapiens
  CDR3 for alpha chain variable domain of TCR clone 34682 (TRAV35, TRAJ30)
CAPGGDDKIIF

SEQ ID NO: 69364 - protein, 14 aa, Homo sapiens
  CDR3 for beta chain variable domain of TCR clone 34682 (TRBV7-6, TRBJ2-1)
GASSLGGGADEQFF

SEQ ID NO: 69365 - protein, 14 aa, Homo sapiens
  CDR3 for alpha chain variable domain of TCR clone 34683 (TRAV12-2, TRAJ36)
CAVKISTGANNLFF

SEQ ID NO: 69366 - protein, 13 aa, Homo sapiens
  CDR3 for beta chain variable domain of TCR clone 34683 (TRBV7-2, TRBJ2-5)
CASSQTSVETQYF

SEQ ID NO: 69367 - protein, 15 aa, Homo sapiens
  CDR3 for alpha chain variable domain of TCR clone 34684 (TRAV17, TRAJ45)
TSVLRTGGGADGLTF

SEQ ID NO: 69368 - protein, 15 aa, Homo sapiens
  CDR3 for beta chain variable domain of TCR clone 34684 (TRBV5-7, TRBJ1-5)
CASSYGKLWDQTQHF

SEQ ID NO: 69369 - protein, 20 aa, Homo sapiens
  CDR3 for alpha chain variable domain of TCR clone 34685 (TRAV8-3, TRAJ44)
LSTSVLWVRLYTGTASKLTF

SEQ ID NO: 69370 - protein, 14 aa, Homo sapiens
  CDR3 for beta chain variable domain of TCR clone 34685 (TRBV7-2, TRBJ2-7)
CASRSQGAAYEQYF

SEQ ID NO: 69371 - protein, 14 aa, Homo sapiens
  CDR3 for alpha chain variable domain of TCR clone 34686 (TRAV1-2, TRAJ8)
CAVREDAGFQKLVF

SEQ ID NO: 69372 - protein, 15 aa, Homo sapiens
  CDR3 for beta chain variable domain of TCR clone 34686 (TRBV10-2, TRBJ2-6)
CASSEQGTGANVLTF

SEQ ID NO: 69373 - protein, 13 aa, Homo sapiens
  CDR3 for alpha chain variable domain of TCR clone 34687 (TRAV26-1, TRAJ48)
CIVRVVGDEKLTF

SEQ ID NO: 69374 - protein, 16 aa, Homo sapiens
  CDR3 for beta chain variable domain of TCR clone 34687 (TRBV2, TRBJ1-1)
CASSPPNRGMNTEAFF

SEQ ID NO: 69375 - protein, 17 aa, Homo sapiens
  CDR3 for alpha chain variable domain of TCR clone 34688 (TRAV26-1, TRAJ37)
CIVRVITVSSNTGKLIF

SEQ ID NO: 69376 - protein, 13 aa, Homo sapiens
  CDR3 for beta chain variable domain of TCR clone 34688 (TRBV5-1, TRBJ2-1)
CASRPFGYNEQFF

SEQ ID NO: 69377 - protein, 19 aa, Homo sapiens
  CDR3 for alpha chain variable domain of TCR clone 34689 (TRAV3, TRAJ6)
CAVRDRNPSRSGGSNIPTF

SEQ ID NO: 69378 - protein, 15 aa, Homo sapiens
  CDR3 for beta chain variable domain of TCR clone 34689 (TRBV18, TRBJ2-7)
CASSPTFMDSYEQYF

SEQ ID NO: 69379 - protein, 14 aa, Homo sapiens
  CDR3 for alpha chain variable domain of TCR clone 34690 (TRAV1-2, TRAJ8)
CAVREDTGFQKLVF

SEQ ID NO: 69380 - protein, 12 aa, Homo sapiens
  CDR3 for beta chain variable domain of TCR clone 34690 (TRBV2, TRBJ2-1)
CAYGPPGNEQSF

SEQ ID NO: 69381 - protein, 12 aa, Homo sapiens
  CDR3 for alpha chain variable domain of TCR clone 34691 (TRAV1-1, TRAJ39)
CAVPVVGNMLTF

SEQ ID NO: 69382 - protein, 15 aa, Homo sapiens
  CDR3 for beta chain variable domain of TCR clone 34691 (TRBV6-3, TRBJ2-7)
CASSSPGTVFYEQYF

SEQ ID NO: 69383 - protein, 14 aa, Homo sapiens
  CDR3 for alpha chain variable domain of TCR clone 34692 (TRAV26-1, TRAJ38)
CIADNAGNNRKLIW

SEQ ID NO: 69384 - protein, 15 aa, Homo sapiens
  CDR3 for beta chain variable domain of TCR clone 34692 (TRBV11-3, TRBJ2-3)
CASLKDGREGDTQYF

SEQ ID NO: 69385 - protein, 15 aa, Homo sapiens
  CDR3 for alpha chain variable domain of TCR clone 34693 (TRAV26-1, TRAJ22)
CIVRVSFWFCKVTDL

SEQ ID NO: 69386 - protein, 13 aa, Homo sapiens
  CDR3 for beta chain variable domain of TCR clone 34693 (TRBV7-9, TRBJ1-2)
CASSLKQNYGYTF

SEQ ID NO: 69387 - protein, 17 aa, Homo sapiens
  CDR3 for alpha chain variable domain of TCR clone 34694 (TRAV13-1, TRAJ31)
CAPRYRLMFGDGTQLVV

SEQ ID NO: 69388 - protein, 12 aa, Homo sapiens
  CDR3 for beta chain variable domain of TCR clone 34694 (TRBV7-9, TRBJ2-7)
CASSLEGYEQYF

SEQ ID NO: 69389 - protein, 16 aa, Homo sapiens
  CDR3 for alpha chain variable domain of TCR clone 34695 (TRAV16, TRAJ52)
CALSGVGGTSYGKLTF

SEQ ID NO: 69390 - protein, 14 aa, Homo sapiens
  CDR3 for beta chain variable domain of TCR clone 34695 (TRBV19, TRBJ1-2)
CASSLQGQAYGYSF

SEQ ID NO: 69391 - protein, 12 aa, Homo sapiens
  CDR3 for alpha chain variable domain of TCR clone 34696 (TRAV12-1, TRAJ40)
CVVYSGTYKYIF

SEQ ID NO: 69392 - protein, 17 aa, Homo sapiens
  CDR3 for beta chain variable domain of TCR clone 34696 (TRBV11-3, TRBJ1-5)
CASSPLIGLRGNQPQHF

SEQ ID NO: 69393 - protein, 13 aa, Homo sapiens
  CDR3 for alpha chain variable domain of TCR clone 34697 (TRAV35, TRAJ42)
CAGFPGSQGNLIF

SEQ ID NO: 69394 - protein, 13 aa, Homo sapiens
  CDR3 for beta chain variable domain of TCR clone 34697 (TRBV4-2, TRBJ1-1)
CASSQAGNTEAFF

SEQ ID NO: 69395 - protein, 17 aa, Homo sapiens
  CDR3 for alpha chain variable domain of TCR clone 34698 (TRAV4, TRAJ13)
CLVGVQGSSGGYRKVTF

SEQ ID NO: 69396 - protein, 18 aa, Homo sapiens
  CDR3 for beta chain variable domain of TCR clone 34698 (TRBV15, TRBJ2-3)
CATSRDGARSWDTDTQYF

SEQ ID NO: 69397 - protein, 11 aa, Homo sapiens
  CDR3 for alpha chain variable domain of TCR clone 34699 (TRAV1-1, TRAJ23)
CAVRQGGKLIF

SEQ ID NO: 69398 - protein, 12 aa, Homo sapiens
  CDR3 for beta chain variable domain of TCR clone 34699 (TRBV7-3, TRBJ1-1)
CQQPGLGAEAFF

SEQ ID NO: 69399 - protein, 17 aa, Homo sapiens
  CDR3 for alpha chain variable domain of TCR clone 34700 (TRAV12-3, TRAJ6)
YAMSARGGAGGSYIPTF

SEQ ID NO: 69400 - protein, 12 aa, Homo sapiens
  CDR3 for beta chain variable domain of TCR clone 34700 (TRBV12-4, TRBJ2-3)
CASSTLPDTQYF

SEQ ID NO: 69401 - protein, 14 aa, Homo sapiens
  CDR3 for alpha chain variable domain of TCR clone 34701 (TRAV35, TRAJ33)
CAGSFQDSNYQLIW

SEQ ID NO: 69402 - protein, 15 aa, Homo sapiens
  CDR3 for beta chain variable domain of TCR clone 34701 (TRBV20-1, TRBJ2-7)
CSAESGTSGAYEQYF

SEQ ID NO: 69403 - protein, 12 aa, Homo sapiens
  CDR3 for alpha chain variable domain of TCR clone 34702 (TRAV29/DV5, TRAJ34)
CAARHNTDKLIF

SEQ ID NO: 69404 - protein, 14 aa, Homo sapiens
  CDR3 for beta chain variable domain of TCR clone 34702 (TRBV7-6, TRBJ2-3)
CASSLGTVTDTQYF

SEQ ID NO: 69405 - protein, 11 aa, Homo sapiens
  CDR3 for alpha chain variable domain of TCR clone 34703 (TRAV25, TRAJ47)
CAVEYGNKLVF

SEQ ID NO: 69406 - protein, 15 aa, Homo sapiens
  CDR3 for beta chain variable domain of TCR clone 34703 (TRBV28, TRBJ2-1)
CASSIIAGGRSEQFF

SEQ ID NO: 69407 - protein, 11 aa, Homo sapiens
  CDR3 for alpha chain variable domain of TCR clone 34704 (TRAV13-1, TRAJ52)
PGGTNYGKLTF

SEQ ID NO: 69408 - protein, 16 aa, Homo sapiens
  CDR3 for beta chain variable domain of TCR clone 34704 (TRBV28, TRBJ2-7)
CASSPWVATGDLSQYF

SEQ ID NO: 69409 - protein, 12 aa, Homo sapiens
  CDR3 for alpha chain variable domain of TCR clone 34705 (TRAV21, TRAJ31)
CAVLGNNARLMF

SEQ ID NO: 69410 - protein, 16 aa, Homo sapiens
  CDR3 for beta chain variable domain of TCR clone 34705 (TRBV27, TRBJ2-5)
CASSYGPGGQKETQYF

SEQ ID NO: 69411 - protein, 15 aa, Homo sapiens
  CDR3 for alpha chain variable domain of TCR clone 34706 (TRAV26-1, TRAJ40)
CIVRVTTSGPYKYIF

SEQ ID NO: 69412 - protein, 12 aa, Homo sapiens
  CDR3 for beta chain variable domain of TCR clone 34706 (TRBV7-9, TRBJ1-4)
CASSTDREKLFF

SEQ ID NO: 69413 - protein, 10 aa, Homo sapiens
  CDR3 for alpha chain variable domain of TCR clone 34707 (TRAV13-1, TRAJ7)
LIGGNNSLAF

SEQ ID NO: 69414 - protein, 14 aa, Homo sapiens
  CDR3 for beta chain variable domain of TCR clone 34707 (TRBV16, TRBJ1-1)
CASSQAGPNTEAFF

SEQ ID NO: 69415 - protein, 16 aa, Homo sapiens
  CDR3 for alpha chain variable domain of TCR clone 34708 (TRAV3, TRAJ37)
CAVRGKGSGNTGKLIF

SEQ ID NO: 69416 - protein, 14 aa, Homo sapiens
  CDR3 for beta chain variable domain of TCR clone 34708 (TRBV7-2, TRBJ2-7)
CASRSQGAAYEQYF

SEQ ID NO: 69417 - protein, 14 aa, Homo sapiens
  CDR3 for alpha chain variable domain of TCR clone 34709 (TRAV1-2, TRAJ16)
CAVNRFSDGQKLLF

SEQ ID NO: 69418 - protein, 15 aa, Homo sapiens
  CDR3 for beta chain variable domain of TCR clone 34709 (TRBV5-1, TRBJ2-5)
CASSFKGGDQETQYF

SEQ ID NO: 69419 - protein, 13 aa, Homo sapiens
  CDR3 for alpha chain variable domain of TCR clone 34710 (TRAV22, TRAJ29)
CAVRGSGNTPLVF

SEQ ID NO: 69420 - protein, 13 aa, Homo sapiens
  CDR3 for beta chain variable domain of TCR clone 34710 (TRBV4-2, TRBJ1-1)
CASSQAGNTEAFF

SEQ ID NO: 69421 - protein, 12 aa, Homo sapiens
  CDR3 for alpha chain variable domain of TCR clone 34711 (TRAV8-3, TRAJ27)
CAVGAEAGNSTF

SEQ ID NO: 69422 - protein, 14 aa, Homo sapiens
  CDR3 for beta chain variable domain of TCR clone 34711 (TRBV2, TRBJ2-1)
CASRLIVGHDEQFF

SEQ ID NO: 69423 - protein, 17 aa, Homo sapiens
  CDR3 for alpha chain variable domain of TCR clone 34712 (TRAV4, TRAJ42)
CLVGVLNYGGSQGNLIF

SEQ ID NO: 69424 - protein, 12 aa, Homo sapiens
  CDR3 for beta chain variable domain of TCR clone 34712 (TRBV20-1, TRBJ2-1)
CSAQYTYNEQFV

SEQ ID NO: 69425 - protein, 11 aa, Homo sapiens
  CDR3 for alpha chain variable domain of TCR clone 34713 (TRAV2, TRAJ13)
CASGGYQKVTF

SEQ ID NO: 69426 - protein, 15 aa, Homo sapiens
  CDR3 for beta chain variable domain of TCR clone 34713 (TRBV29-1, TRBJ2-1)
CSGGDRKSSYNEQFF

SEQ ID NO: 69427 - protein, 13 aa, Homo sapiens
  CDR3 for alpha chain variable domain of TCR clone 34714 (TRAV30, TRAJ24)
CGTVTDSWGKLQF

SEQ ID NO: 69428 - protein, 15 aa, Homo sapiens
  CDR3 for beta chain variable domain of TCR clone 34714 (TRBV20-1, TRBJ2-7)
CSARDRVSGMDEQYF

SEQ ID NO: 69429 - protein, 19 aa, Homo sapiens
  CDR3 for alpha chain variable domain of TCR clone 34715 (TRAV1-2, TRAJ26)
CLLPLCCERPDNYGQNFVF

SEQ ID NO: 69430 - protein, 13 aa, Homo sapiens
  CDR3 for beta chain variable domain of TCR clone 34715 (TRBV19, TRBJ1-2)
CASSVPGQDGYTF

SEQ ID NO: 69431 - protein, 18 aa, Homo sapiens
  CDR3 for alpha chain variable domain of TCR clone 34716 (TRAV35, TRAJ47)
LGLLDCRTHTEYGNKLVF

SEQ ID NO: 69432 - protein, 11 aa, Homo sapiens
  CDR3 for beta chain variable domain of TCR clone 34716 (TRBV29-1, TRBJ1-1)
CSVEVGTRTFF

SEQ ID NO: 69433 - protein, 14 aa, Homo sapiens
  CDR3 for alpha chain variable domain of TCR clone 34717 (TRAV17, TRAJ54)
CATDANQGAQKLVF

SEQ ID NO: 69434 - protein, 12 aa, Homo sapiens
  CDR3 for beta chain variable domain of TCR clone 34717 (TRBV7-9, TRBJ2-7)
CASSIKQEEQYF

SEQ ID NO: 69435 - protein, 11 aa, Homo sapiens
  CDR3 for alpha chain variable domain of TCR clone 34718 (TRAV12-3, TRAJ27)
CAMADAGKSTF

SEQ ID NO: 69436 - protein, 14 aa, Homo sapiens
  CDR3 for beta chain variable domain of TCR clone 34718 (TRBV4-1, TRBJ2-2)
CASSQAVNTGELFF

SEQ ID NO: 69437 - protein, 15 aa, Homo sapiens
  CDR3 for alpha chain variable domain of TCR clone 34719 (TRAV12-2, TRAJ50)
CAVNGLETSYDKVIF

SEQ ID NO: 69438 - protein, 14 aa, Homo sapiens
  CDR3 for beta chain variable domain of TCR clone 34719 (TRBV7-2, TRBJ1-1)
CASSFLTGTTEAFL

SEQ ID NO: 69439 - protein, 16 aa, Homo sapiens
  CDR3 for alpha chain variable domain of TCR clone 34720 (TRAV1-2, TRAJ10)
CAVRGVLTGGGNKLTF

SEQ ID NO: 69440 - protein, 19 aa, Homo sapiens
  CDR3 for beta chain variable domain of TCR clone 34720 (TRBV25-1, TRBJ2-2)
CAILVYRVDRGRKTGELFF

SEQ ID NO: 69441 - protein, 13 aa, Homo sapiens
  CDR3 for alpha chain variable domain of TCR clone 34721 (TRAV20, TRAJ15)
CATISQAGTALIF

SEQ ID NO: 69442 - protein, 13 aa, Homo sapiens
  CDR3 for beta chain variable domain of TCR clone 34721 (TRBV12-4, TRBJ2-1)
CASRQPSNNEQFF

SEQ ID NO: 69443 - protein, 14 aa, Homo sapiens
  CDR3 for alpha chain variable domain of TCR clone 34722 (TRAV1-2, TRAJ16)
CAVNRFSDGQKLLF

SEQ ID NO: 69444 - protein, 15 aa, Homo sapiens
  CDR3 for beta chain variable domain of TCR clone 34722 (TRBV7-9, TRBJ1-6)
CASRSPGRGNSPLHF

SEQ ID NO: 69445 - protein, 10 aa, Homo sapiens
  CDR3 for alpha chain variable domain of TCR clone 34723 (TRAV13-1, TRAJ5)
CAVSRRALTF

SEQ ID NO: 69446 - protein, 16 aa, Homo sapiens
  CDR3 for beta chain variable domain of TCR clone 34723 (TRBV4-3, TRBJ2-3)
CASSQGGLAGTDTQYF

SEQ ID NO: 69447 - protein, 17 aa, Homo sapiens
  CDR3 for alpha chain variable domain of TCR clone 34724 (TRAV4, TRAJ18)
CLVGERSVGSTLGRLYF

SEQ ID NO: 69448 - protein, 14 aa, Homo sapiens
  CDR3 for beta chain variable domain of TCR clone 34724 (TRBV6-5, TRBJ1-2)
CASSHDGTGGGYTF

SEQ ID NO: 69449 - protein, 15 aa, Homo sapiens
  CDR3 for alpha chain variable domain of TCR clone 34725 (TRAV8-2, TRAJ40)
CVVLGTTSGTHKYIF

SEQ ID NO: 69450 - protein, 16 aa, Homo sapiens
  CDR3 for beta chain variable domain of TCR clone 34725 (TRBV7-3, TRBJ2-1)
CASSLEGYRSYNEQFF

SEQ ID NO: 69451 - protein, 16 aa, Homo sapiens
  CDR3 for alpha chain variable domain of TCR clone 34726 (TRAV3, TRAJ42)
CAVRDIEGGGQGNLIF

SEQ ID NO: 69452 - protein, 14 aa, Homo sapiens
  CDR3 for beta chain variable domain of TCR clone 34726 (TRBV18, TRBJ1-1)
CASSPPTGRTEAFF

SEQ ID NO: 69453 - protein, 12 aa, Homo sapiens
  CDR3 for alpha chain variable domain of TCR clone 34727 (TRAV21, TRAJ33)
CAKMDSNYQLIW

SEQ ID NO: 69454 - protein, 15 aa, Homo sapiens
  CDR3 for beta chain variable domain of TCR clone 34727 (TRBV18, TRBJ1-2)
CASSPGNGLGYGYTF

SEQ ID NO: 69455 - protein, 12 aa, Homo sapiens
  CDR3 for alpha chain variable domain of TCR clone 34728 (TRAV30, TRAJ43)
CGTEGRGNDMRF

SEQ ID NO: 69456 - protein, 13 aa, Homo sapiens
  CDR3 for beta chain variable domain of TCR clone 34728 (TRBV27, TRBJ2-7)
CASSFSQGYEQYF

SEQ ID NO: 69457 - protein, 15 aa, Homo sapiens
  CDR3 for alpha chain variable domain of TCR clone 34729 (TRAV4, TRAJ39)
CLVGPNNNAGNMLTF

SEQ ID NO: 69458 - protein, 13 aa, Homo sapiens
  CDR3 for beta chain variable domain of TCR clone 34729 (TRBV11-2, TRBJ2-5)
CASNSTGEETQYF

SEQ ID NO: 69459 - protein, 18 aa, Homo sapiens
  CDR3 for alpha chain variable domain of TCR clone 34730 (TRAV21, TRAJ52)
CAVRPSPAGGTSYGKLTF

SEQ ID NO: 69460 - protein, 17 aa, Homo sapiens
  CDR3 for beta chain variable domain of TCR clone 34730 (TRBV20-1, TRBJ2-1)
CSASSSGLAGSYNEQFF

SEQ ID NO: 69461 - protein, 15 aa, Homo sapiens
  CDR3 for alpha chain variable domain of TCR clone 34731 (TRAV2, TRAJ9)
CAVEDRGTGGFKTIF

SEQ ID NO: 69462 - protein, 16 aa, Homo sapiens
  CDR3 for beta chain variable domain of TCR clone 34731 (TRBV24-1, TRBJ2-3)
CATSDPGTGATDTLYF

SEQ ID NO: 69463 - protein, 14 aa, Homo sapiens
  CDR3 for alpha chain variable domain of TCR clone 34732 (TRAV3, TRAJ21)
CAVESQANFNKFYF

SEQ ID NO: 69464 - protein, 18 aa, Homo sapiens
  CDR3 for beta chain variable domain of TCR clone 34732 (TRBV7-9, TRBJ2-1)
CAISLAVSGTSGRNEQFF

SEQ ID NO: 69465 - protein, 15 aa, Homo sapiens
  CDR3 for alpha chain variable domain of TCR clone 34733 (TRAV27, TRAJ38)
CAARRNAGNNRKMIW

SEQ ID NO: 69466 - protein, 13 aa, Homo sapiens
  CDR3 for beta chain variable domain of TCR clone 34733 (TRBV28, TRBJ2-5)
CAGVSRGEETQYF

SEQ ID NO: 69467 - protein, 14 aa, Homo sapiens
  CDR3 for alpha chain variable domain of TCR clone 34734 (TRAV35, TRAJ13)
CAGRSPGGYKKVTF

SEQ ID NO: 69468 - protein, 14 aa, Homo sapiens
  CDR3 for beta chain variable domain of TCR clone 34734 (TRBV19, TRBJ2-2)
CASSMVGLSGELFF

SEQ ID NO: 69469 - protein, 11 aa, Homo sapiens
  CDR3 for alpha chain variable domain of TCR clone 34735 (TRAV13-1, TRAJ39)
CASNAGNMLTF

SEQ ID NO: 69470 - protein, 14 aa, Homo sapiens
  CDR3 for beta chain variable domain of TCR clone 34735 (TRBV11-2, TRBJ1-5)
CASSLDRGRQPQHF

SEQ ID NO: 69471 - protein, 16 aa, Homo sapiens
  CDR3 for alpha chain variable domain of TCR clone 34736 (TRAV30, TRAJ24)
CGTEIVDADSWGKFQF

SEQ ID NO: 69472 - protein, 14 aa, Homo sapiens
  CDR3 for beta chain variable domain of TCR clone 34736 (TRBV13, TRBJ2-5)
CASSLGPRGETQYF

SEQ ID NO: 69473 - protein, 16 aa, Homo sapiens
  CDR3 for alpha chain variable domain of TCR clone 34737 (TRAV3, TRAJ21)
CAVRDIERGNFNKFYF

SEQ ID NO: 69474 - protein, 15 aa, Homo sapiens
  CDR3 for beta chain variable domain of TCR clone 34737 (TRBV28, TRBJ2-5)
CASSSGRTIQETQYF

SEQ ID NO: 69475 - protein, 15 aa, Homo sapiens
  CDR3 for alpha chain variable domain of TCR clone 34738 (TRAV25, TRAJ53)
CPTSNSGGSNYKLTF

SEQ ID NO: 69476 - protein, 14 aa, Homo sapiens
  CDR3 for beta chain variable domain of TCR clone 34738 (TRBV7-2, TRBJ2-7)
CASSPKTSFYEQYF

SEQ ID NO: 69477 - protein, 11 aa, Homo sapiens
  CDR3 for alpha chain variable domain of TCR clone 34739 (TRAV3, TRAJ21)
CAVGNFNKFYF

SEQ ID NO: 69478 - protein, 12 aa, Homo sapiens
  CDR3 for beta chain variable domain of TCR clone 34739 (TRBV12-4, TRBJ2-7)
CASSLGGYEQYF

SEQ ID NO: 69479 - protein, 16 aa, Homo sapiens
  CDR3 for alpha chain variable domain of TCR clone 34740 (TRAV12-3, TRAJ53)
CAMSVGSEGSNYKLTF

SEQ ID NO: 69480 - protein, 11 aa, Homo sapiens
  CDR3 for beta chain variable domain of TCR clone 34740 (TRBV29-1, TRBJ2-5)
CSVASGETQYF

SEQ ID NO: 69481 - protein, 17 aa, Homo sapiens
  CDR3 for alpha chain variable domain of TCR clone 34741 (TRAV1-2, TRAJ8)
CAVRDPDENTSFQKLVF

SEQ ID NO: 69482 - protein, 11 aa, Homo sapiens
  CDR3 for beta chain variable domain of TCR clone 34741 (TRBV7-9, TRBJ2-2)
CASSGFGGANT

SEQ ID NO: 69483 - protein, 19 aa, Homo sapiens
  CDR3 for alpha chain variable domain of TCR clone 34742 (TRAV2, TRAJ20)
ILQVREADAAVYRDCKLSF

SEQ ID NO: 69484 - protein, 13 aa, Homo sapiens
  CDR3 for beta chain variable domain of TCR clone 34742 (TRBV15, TRBJ1-6)
CATSGGLNSTLHF

SEQ ID NO: 69485 - protein, 15 aa, Homo sapiens
  CDR3 for alpha chain variable domain of TCR clone 34743 (TRAV40, TRAJ45)
CLLGDLGGGADGLTL

SEQ ID NO: 69486 - protein, 13 aa, Homo sapiens
  CDR3 for beta chain variable domain of TCR clone 34743 (TRBV7-9, TRBJ1-2)
CASSLKQNYGYTF

SEQ ID NO: 69487 - protein, 15 aa, Homo sapiens
  CDR3 for alpha chain variable domain of TCR clone 34744 (TRAV3, TRAJ22)
CAVRDRGGSARQLTF

SEQ ID NO: 69488 - protein, 16 aa, Homo sapiens
  CDR3 for beta chain variable domain of TCR clone 34744 (TRBV5-1, TRBJ2-7)
CASKPSFSNNPYEQYF

SEQ ID NO: 69489 - protein, 11 aa, Homo sapiens
  CDR3 for alpha chain variable domain of TCR clone 34745 (TRAV2, TRAJ33)
CAVDSNHQLIW

SEQ ID NO: 69490 - protein, 15 aa, Homo sapiens
  CDR3 for beta chain variable domain of TCR clone 34745 (TRBV19, TRBJ1-2)
CASSVGQVLNYGYTF

SEQ ID NO: 69491 - protein, 13 aa, Homo sapiens
  CDR3 for alpha chain variable domain of TCR clone 34746 (TRAV12-3, TRAJ7)
CAMTPYGNNRLAF

SEQ ID NO: 69492 - protein, 13 aa, Homo sapiens
  CDR3 for beta chain variable domain of TCR clone 34746 (TRBV19, TRBJ1-2)
CASSVPGQDGYTF

SEQ ID NO: 69493 - protein, 18 aa, Homo sapiens
  CDR3 for alpha chain variable domain of TCR clone 34747 (TRAV26-1, )
CIVSHRVEGFWNQIPDIQ

SEQ ID NO: 69494 - protein, 14 aa, Homo sapiens
  CDR3 for beta chain variable domain of TCR clone 34747 (TRBV20-1, TRBJ2-7)
CSAWTALSSYEQYF

SEQ ID NO: 69495 - protein, 15 aa, Homo sapiens
  CDR3 for alpha chain variable domain of TCR clone 34748 (TRAV12-2, TRAJ53)
CAVNGGGGSNYKLTF

SEQ ID NO: 69496 - protein, 15 aa, Homo sapiens
  CDR3 for beta chain variable domain of TCR clone 34748 (TRBV11-3, TRBJ2-3)
CASLKDGREGDTQYF

SEQ ID NO: 69497 - protein, 14 aa, Homo sapiens
  CDR3 for alpha chain variable domain of TCR clone 34749 (TRAV12-1, TRAJ30)
CAVNIGGRDDKIIF

SEQ ID NO: 69498 - protein, 13 aa, Homo sapiens
  CDR3 for beta chain variable domain of TCR clone 34749 (TRBV12-5, TRBJ2-1)
CASGLGRGNEQFF

SEQ ID NO: 69499 - protein, 14 aa, Homo sapiens
  CDR3 for alpha chain variable domain of TCR clone 34750 (TRAV8-6, TRAJ29)
CAVSGWAGNTPLVF

SEQ ID NO: 69500 - protein, 15 aa, Homo sapiens
  CDR3 for beta chain variable domain of TCR clone 34750 (TRBV6-3, TRBJ2-2)
RASRGMTVDTGELFF

SEQ ID NO: 69501 - protein, 11 aa, Homo sapiens
  CDR3 for alpha chain variable domain of TCR clone 34751 (TRAV16, TRAJ33)
FALHSNYQLIW

SEQ ID NO: 69502 - protein, 15 aa, Homo sapiens
  CDR3 for beta chain variable domain of TCR clone 34751 (TRBV4-1, TRBJ2-7)
CASSQQGQGFDEQYF

SEQ ID NO: 69503 - protein, 13 aa, Homo sapiens
  CDR3 for alpha chain variable domain of TCR clone 34752 (TRAV1-1, TRAJ9)
CAAKNTGGFKTIF

SEQ ID NO: 69504 - protein, 11 aa, Homo sapiens
  CDR3 for beta chain variable domain of TCR clone 34752 (TRBV11-2, TRBJ2-2)
CASSLPGELFF

SEQ ID NO: 69505 - protein, 16 aa, Homo sapiens
  CDR3 for alpha chain variable domain of TCR clone 34753 (TRAV3, TRAJ37)
CAVRPHGSGNTGKLIF

SEQ ID NO: 69506 - protein, 12 aa, Homo sapiens
  CDR3 for beta chain variable domain of TCR clone 34753 (TRBV11-2, TRBJ2-1)
CASSPGNNEQFF

SEQ ID NO: 69507 - protein, 14 aa, Homo sapiens
  CDR3 for alpha chain variable domain of TCR clone 34754 (TRAV38-1, TRAJ29)
FAFITPSGNTPLVF

SEQ ID NO: 69508 - protein, 14 aa, Homo sapiens
  CDR3 for beta chain variable domain of TCR clone 34754 (TRBV18, TRBJ2-7)
CASSPRGGAYEQYF

SEQ ID NO: 69509 - protein, 14 aa, Homo sapiens
  CDR3 for alpha chain variable domain of TCR clone 34755 (TRAV3, TRAJ7)
CAVRDEEREQQTRF

SEQ ID NO: 69510 - protein, 12 aa, Homo sapiens
  CDR3 for beta chain variable domain of TCR clone 34755 (TRBV7-8, TRBJ2-7)
CASSLGDREQYF

SEQ ID NO: 69511 - protein, 13 aa, Homo sapiens
  CDR3 for alpha chain variable domain of TCR clone 34756 (TRAV12-3, TRAJ9)
CAMRNTEGFKTIF

SEQ ID NO: 69512 - protein, 13 aa, Homo sapiens
  CDR3 for beta chain variable domain of TCR clone 34756 (TRBV27, TRBJ2-1)
CASRTLGVGEQFF

SEQ ID NO: 69513 - protein, 16 aa, Homo sapiens
  CDR3 for alpha chain variable domain of TCR clone 34757 (TRAV3, TRAJ10)
CAVRDMRAGGGNKLTF

SEQ ID NO: 69514 - protein, 13 aa, Homo sapiens
  CDR3 for beta chain variable domain of TCR clone 34757 (TRBV15, TRBJ1-6)
CATSGGLNSPLHF

SEQ ID NO: 69515 - protein, 12 aa, Homo sapiens
  CDR3 for alpha chain variable domain of TCR clone 34758 (TRAV12-2, TRAJ47)
CAVAAYGNKLVF

SEQ ID NO: 69516 - protein, 14 aa, Homo sapiens
  CDR3 for beta chain variable domain of TCR clone 34758 (TRBV20-1, TRBJ1-1)
CSAMGGTANTEAFF

SEQ ID NO: 69517 - protein, 15 aa, Homo sapiens
  CDR3 for alpha chain variable domain of TCR clone 34759 (TRAV25, TRAJ53)
CPTSNSGGSNYKLTF

SEQ ID NO: 69518 - protein, 14 aa, Homo sapiens
  CDR3 for beta chain variable domain of TCR clone 34759 (TRBV11-2, TRBJ2-3)
CASSRLARTDTQYV

SEQ ID NO: 69519 - protein, 13 aa, Homo sapiens
  CDR3 for alpha chain variable domain of TCR clone 34760 (TRAV17, TRAJ9)
CATDYTGGFKNIF

SEQ ID NO: 69520 - protein, 14 aa, Homo sapiens
  CDR3 for beta chain variable domain of TCR clone 34760 (TRBV19, TRBJ2-5)
CASSMTGQQETQYF

SEQ ID NO: 69521 - protein, 15 aa, Homo sapiens
  CDR3 for alpha chain variable domain of TCR clone 34761 (TRAV8-4, TRAJ3)
CAVTGENLVQQCFQD

SEQ ID NO: 69522 - protein, 16 aa, Homo sapiens
  CDR3 for beta chain variable domain of TCR clone 34761 (TRBV4-2, TRBJ1-1)
CASSQAGFGMNTEALF

SEQ ID NO: 69523 - protein, 13 aa, Homo sapiens
  CDR3 for alpha chain variable domain of TCR clone 34762 (TRAV2, TRAJ40)
CAVVTSGTYKYIF

SEQ ID NO: 69524 - protein, 15 aa, Homo sapiens
  CDR3 for beta chain variable domain of TCR clone 34762 (TRBV2, TRBJ2-7)
CASSEGLARSYEQYF

SEQ ID NO: 69525 - protein, 13 aa, Homo sapiens
  CDR3 for alpha chain variable domain of TCR clone 34763 (TRAV12-1, TRAJ34)
CVVTGYNTDKLIF

SEQ ID NO: 69526 - protein, 13 aa, Homo sapiens
  CDR3 for beta chain variable domain of TCR clone 34763 (TRBV28, TRBJ2-7)
CASKAGGVYEQYL

SEQ ID NO: 69527 - protein, 14 aa, Homo sapiens
  CDR3 for alpha chain variable domain of TCR clone 34764 (TRAV23/DV6, TRAJ37)
CAASTSSNTGKLIF

SEQ ID NO: 69528 - protein, 13 aa, Homo sapiens
  CDR3 for beta chain variable domain of TCR clone 34764 (TRBV2, TRBJ1-1)
CARNPTGGFHAFF

SEQ ID NO: 69529 - protein, 13 aa, Homo sapiens
  CDR3 for alpha chain variable domain of TCR clone 34765 (TRAV12-2, TRAJ50)
CAVIVTSYDKVIF

SEQ ID NO: 69530 - protein, 13 aa, Homo sapiens
  CDR3 for beta chain variable domain of TCR clone 34765 (TRBV7-9, TRBJ1-2)
CASSLKQNYGYTF

SEQ ID NO: 69531 - protein, 13 aa, Homo sapiens
  CDR3 for alpha chain variable domain of TCR clone 34766 (TRAV25, TRAJ26)
CAGMDNYGQNFAF

SEQ ID NO: 69532 - protein, 15 aa, Homo sapiens
  CDR3 for beta chain variable domain of TCR clone 34766 (TRBV10-3, TRBJ2-1)
CAIRNGTSGHNEQFL

SEQ ID NO: 69533 - protein, 11 aa, Homo sapiens
  CDR3 for alpha chain variable domain of TCR clone 34767 (TRAV13-1, TRAJ49)
CACVGGNQFYF

SEQ ID NO: 69534 - protein, 16 aa, Homo sapiens
  CDR3 for beta chain variable domain of TCR clone 34767 (TRBV11-2, TRBJ2-2)
CASSLRTGNLTGELFF

SEQ ID NO: 69535 - protein, 12 aa, Homo sapiens
  CDR3 for alpha chain variable domain of TCR clone 34768 (TRAV22, TRAJ29)
CAPPSGNTPLVF

SEQ ID NO: 69536 - protein, 14 aa, Homo sapiens
  CDR3 for beta chain variable domain of TCR clone 34768 (TRBV11-3, TRBJ2-7)
CASSLGAGAYEQYF

SEQ ID NO: 69537 - protein, 14 aa, Homo sapiens
  CDR3 for alpha chain variable domain of TCR clone 34769 (TRAV35, TRAJ42)
CAGRYGGSQGNLIF

SEQ ID NO: 69538 - protein, 15 aa, Homo sapiens
  CDR3 for beta chain variable domain of TCR clone 34769 (TRBV7-9, TRBJ2-1)
CASSLGWGRDNEQFF

SEQ ID NO: 69539 - protein, 17 aa, Homo sapiens
  CDR3 for alpha chain variable domain of TCR clone 34770 (TRAV26-2, TRAJ42)
CILRDVGYGGSHGNLIF

SEQ ID NO: 69540 - protein, 16 aa, Homo sapiens
  CDR3 for beta chain variable domain of TCR clone 34770 (TRBV12-4, TRBJ2-7)
CASSLIGGTGTYEQYF

SEQ ID NO: 69541 - protein, 15 aa, Homo sapiens
  CDR3 for alpha chain variable domain of TCR clone 34771 (TRAV35, TRAJ40)
CAGQLGTSGTYKYIF

SEQ ID NO: 69542 - protein, 14 aa, Homo sapiens
  CDR3 for beta chain variable domain of TCR clone 34771 (TRBV7-6, TRBJ2-3)
CASSVAGGTDTQYF

SEQ ID NO: 69543 - protein, 16 aa, Homo sapiens
  CDR3 for alpha chain variable domain of TCR clone 34772 (TRAV12-3, TRAJ53)
CAMSPGSGGSNYKLTF

SEQ ID NO: 69544 - protein, 11 aa, Homo sapiens
  CDR3 for beta chain variable domain of TCR clone 34772 (TRBV11-2, TRBJ1-1)
CASSINTEAFF

SEQ ID NO: 69545 - protein, 11 aa, Homo sapiens
  CDR3 for alpha chain variable domain of TCR clone 34773 (TRAV2, TRAJ21)
CAVFNFSKFYF

SEQ ID NO: 69546 - protein, 14 aa, Homo sapiens
  CDR3 for beta chain variable domain of TCR clone 34773 (TRBV15, TRBJ2-3)
CATRSGTSTDTQYF

SEQ ID NO: 69547 - protein, 18 aa, Homo sapiens
  CDR3 for alpha chain variable domain of TCR clone 34774 (TRAV26-2, TRAJ45)
CILRVDKYSGGGADGLPF

SEQ ID NO: 69548 - protein, 16 aa, Homo sapiens
  CDR3 for beta chain variable domain of TCR clone 34774 (TRBV2, TRBJ1-4)
CASNLLQGATNEKLFF

SEQ ID NO: 69549 - protein, 15 aa, Homo sapiens
  CDR3 for alpha chain variable domain of TCR clone 34775 (TRAV21, TRAJ53)
CATLNRGGSNYKLTF

SEQ ID NO: 69550 - protein, 16 aa, Homo sapiens
  CDR3 for beta chain variable domain of TCR clone 34775 (TRBV9, TRBJ2-1)
CASSVGGGGNYNEQFF

SEQ ID NO: 69551 - protein, 10 aa, Homo sapiens
  CDR3 for alpha chain variable domain of TCR clone 34776 (TRAV12-1, TRAJ43)
CVVHNNDMRF

SEQ ID NO: 69552 - protein, 13 aa, Homo sapiens
  CDR3 for beta chain variable domain of TCR clone 34776 (TRBV12-4, TRBJ1-2)
CASSSGLAVISTF

SEQ ID NO: 69553 - protein, 14 aa, Homo sapiens
  CDR3 for alpha chain variable domain of TCR clone 34777 (TRAV12-1, TRAJ43)
CVVNGRSNNNGMRF

SEQ ID NO: 69554 - protein, 13 aa, Homo sapiens
  CDR3 for beta chain variable domain of TCR clone 34777 (TRBV27, TRBJ1-1)
CASSLSIGAEAFF

SEQ ID NO: 69555 - protein, 12 aa, Homo sapiens
  CDR3 for alpha chain variable domain of TCR clone 34778 (TRAV9-2, TRAJ26)
CALRGYGQDFVF

SEQ ID NO: 69556 - protein, 12 aa, Homo sapiens
  CDR3 for beta chain variable domain of TCR clone 34778 (TRBV29-1, TRBJ2-3)
CSVTGGADTQYF

SEQ ID NO: 69557 - protein, 14 aa, Homo sapiens
  CDR3 for alpha chain variable domain of TCR clone 34779 (TRAV23/DV6, TRAJ57)
CAASNQGGSKKLVF

SEQ ID NO: 69558 - protein, 13 aa, Homo sapiens
  CDR3 for beta chain variable domain of TCR clone 34779 (TRBV11-2, TRBJ2-7)
CASSSYPSYEQYF

SEQ ID NO: 69559 - protein, 10 aa, Homo sapiens
  CDR3 for alpha chain variable domain of TCR clone 34780 (TRAV30, TRAJ48)
CGIGNEKLTF

SEQ ID NO: 69560 - protein, 18 aa, Homo sapiens
  CDR3 for beta chain variable domain of TCR clone 34780 (TRBV20-1, TRBJ2-6)
CSAETTPTHGSGANVLTF

SEQ ID NO: 69561 - protein, 12 aa, Homo sapiens
  CDR3 for alpha chain variable domain of TCR clone 34781 (TRAV27, TRAJ36)
ASTPAGANNLFF

SEQ ID NO: 69562 - protein, 13 aa, Homo sapiens
  CDR3 for beta chain variable domain of TCR clone 34781 (TRBV7-9, TRBJ2-3)
CDSSPGSTDTQYF

SEQ ID NO: 69563 - protein, 14 aa, Homo sapiens
  CDR3 for alpha chain variable domain of TCR clone 34782 (TRAV38-1, TRAJ45)
CAYYSGGGADGLTF

SEQ ID NO: 69564 - protein, 15 aa, Homo sapiens
  CDR3 for beta chain variable domain of TCR clone 34782 (TRBV6-3, TRBJ2-7)
CASSSPGTVFYEQYF

SEQ ID NO: 69565 - protein, 14 aa, Homo sapiens
  CDR3 for alpha chain variable domain of TCR clone 34783 (TRAV16, TRAJ42)
CALLAGGSQGNLIF

SEQ ID NO: 69566 - protein, 14 aa, Homo sapiens
  CDR3 for beta chain variable domain of TCR clone 34783 (TRBV19, TRBJ2-1)
CASPTFVLSGEQFF

SEQ ID NO: 69567 - protein, 15 aa, Homo sapiens
  CDR3 for alpha chain variable domain of TCR clone 34784 (TRAV26-1, TRAJ22)
CIVRVSFWFCKTTDL

SEQ ID NO: 69568 - protein, 13 aa, Homo sapiens
  CDR3 for beta chain variable domain of TCR clone 34784 (TRBV7-9, TRBJ1-2)
CASSLKQNYGYTF

SEQ ID NO: 69569 - protein, 17 aa, Homo sapiens
  CDR3 for alpha chain variable domain of TCR clone 34785 (TRAV35, TRAJ28)
CAGLQVYSGAGSYQLTF

SEQ ID NO: 69570 - protein, 15 aa, Homo sapiens
  CDR3 for beta chain variable domain of TCR clone 34785 (TRBV2, TRBJ1-2)
CASSEIGGANYGDTF

SEQ ID NO: 69571 - protein, 17 aa, Homo sapiens
  CDR3 for alpha chain variable domain of TCR clone 34786 (TRAV8-3, TRAJ34)
CAIPGKLIFGTGTRLQV

SEQ ID NO: 69572 - protein, 17 aa, Homo sapiens
  CDR3 for beta chain variable domain of TCR clone 34786 (TRBV7-3, TRBJ2-3)
CASSLMKRMRGADTQYF

SEQ ID NO: 69573 - protein, 14 aa, Homo sapiens
  CDR3 for alpha chain variable domain of TCR clone 34787 (TRAV13-2, TRAJ4)
CAEKGPKGYNKLIF

SEQ ID NO: 69574 - protein, 13 aa, Homo sapiens
  CDR3 for beta chain variable domain of TCR clone 34787 (TRBV18, TRBJ2-5)
CASSPPGKETQYL

SEQ ID NO: 69575 - protein, 10 aa, Homo sapiens
  CDR3 for alpha chain variable domain of TCR clone 34788 (TRAV1-2, TRAJ20)
CALNDYKLSF

SEQ ID NO: 69576 - protein, 12 aa, Homo sapiens
  CDR3 for beta chain variable domain of TCR clone 34788 (TRBV11-2, TRBJ2-2)
CASSLGGGELFF

SEQ ID NO: 69577 - protein, 13 aa, Homo sapiens
  CDR3 for alpha chain variable domain of TCR clone 34789 (TRAV13-2, TRAJ5)
CAVMDTGRRALTF

SEQ ID NO: 69578 - protein, 15 aa, Homo sapiens
  CDR3 for beta chain variable domain of TCR clone 34789 (TRBV2, TRBJ2-1)
CASSELAGSYNEQFF

SEQ ID NO: 69579 - protein, 12 aa, Homo sapiens
  CDR3 for alpha chain variable domain of TCR clone 34790 (TRAV38-2/DV8, TRAJ57)
CAWKGGSEKLVF

SEQ ID NO: 69580 - protein, 13 aa, Homo sapiens
  CDR3 for beta chain variable domain of TCR clone 34790 (TRBV5-1, TRBJ1-5)
CASGLAQDQPQHF

SEQ ID NO: 69581 - protein, 14 aa, Homo sapiens
  CDR3 for alpha chain variable domain of TCR clone 34791 (TRAV12-1, TRAJ17)
CVVNYKAAGNKLTF

SEQ ID NO: 69582 - protein, 15 aa, Homo sapiens
  CDR3 for beta chain variable domain of TCR clone 34791 (TRBV19, TRBJ2-1)
CASSSPGVPLDEQFF

SEQ ID NO: 69583 - protein, 14 aa, Homo sapiens
  CDR3 for alpha chain variable domain of TCR clone 34792 (TRAV23/DV6, TRAJ11)
CAASLESGYSTLTF

SEQ ID NO: 69584 - protein, 15 aa, Homo sapiens
  CDR3 for beta chain variable domain of TCR clone 34792 (TRBV28, TRBJ2-7)
CASSSPGTEPCEQYF

SEQ ID NO: 69585 - protein, 14 aa, Homo sapiens
  CDR3 for alpha chain variable domain of TCR clone 34793 (TRAV8-4, TRAJ13)
CAVTLSGGYPKVTF

SEQ ID NO: 69586 - protein, 14 aa, Homo sapiens
  CDR3 for beta chain variable domain of TCR clone 34793 (TRBV7-2, TRBJ1-2)
CASSQTGSTYGYTF

SEQ ID NO: 69587 - protein, 13 aa, Homo sapiens
  CDR3 for alpha chain variable domain of TCR clone 34794 (TRAV12-2, TRAJ20)
CAVNRFDDYKLSF

SEQ ID NO: 69588 - protein, 17 aa, Homo sapiens
  CDR3 for beta chain variable domain of TCR clone 34794 (TRBV13, TRBJ2-3)
CASSLSRVTGGRNTQYF

SEQ ID NO: 69589 - protein, 12 aa, Homo sapiens
  CDR3 for alpha chain variable domain of TCR clone 34795 (TRAV13-2, TRAJ8)
CAPWLGFQKLVF

SEQ ID NO: 69590 - protein, 12 aa, Homo sapiens
  CDR3 for beta chain variable domain of TCR clone 34795 (TRBV11-2, TRBJ2-3)
GASRGAPNTQYF

SEQ ID NO: 69591 - protein, 14 aa, Homo sapiens
  CDR3 for alpha chain variable domain of TCR clone 34796 (TRAV1-2, TRAJ8)
CAVREDTGFQKLVF

SEQ ID NO: 69592 - protein, 17 aa, Homo sapiens
  CDR3 for beta chain variable domain of TCR clone 34796 (TRBV20-1, TRBJ2-1)
CSAPPRLAGTRYNEQFF

SEQ ID NO: 69593 - protein, 13 aa, Homo sapiens
  CDR3 for alpha chain variable domain of TCR clone 34797 (TRAV25, TRAJ30)
CAGRVDRDDKIIF

SEQ ID NO: 69594 - protein, 17 aa, Homo sapiens
  CDR3 for beta chain variable domain of TCR clone 34797 (TRBV7-9, TRBJ2-6)
CASSFGAGYSGANGLTF

SEQ ID NO: 69595 - protein, 12 aa, Homo sapiens
  CDR3 for alpha chain variable domain of TCR clone 34798 (TRAV8-4, TRAJ43)
CAVSVDNNDMRF

SEQ ID NO: 69596 - protein, 14 aa, Homo sapiens
  CDR3 for beta chain variable domain of TCR clone 34798 (TRBV11-2, TRBJ1-2)
CASSLGTANYGYTF

SEQ ID NO: 69597 - protein, 11 aa, Homo sapiens
  CDR3 for alpha chain variable domain of TCR clone 34799 (TRAV3, TRAJ21)
CAVGNFNKFYF

SEQ ID NO: 69598 - protein, 13 aa, Homo sapiens
  CDR3 for beta chain variable domain of TCR clone 34799 (TRBV19, TRBJ1-4)
CASPTQGNEKLLF

SEQ ID NO: 69599 - protein, 15 aa, Homo sapiens
  CDR3 for alpha chain variable domain of TCR clone 34800 (TRAV3, TRAJ29)
CAVRAWNSGNTPLVF

SEQ ID NO: 69600 - protein, 14 aa, Homo sapiens
  CDR3 for beta chain variable domain of TCR clone 34800 (TRBV25-1, TRBJ1-1)
CASTHLGGNTEAFF

SEQ ID NO: 69601 - protein, 13 aa, Homo sapiens
  CDR3 for alpha chain variable domain of TCR clone 34801 (TRAV12-1, TRAJ40)
CVVPTSGTYNYIF

SEQ ID NO: 69602 - protein, 18 aa, Homo sapiens
  CDR3 for beta chain variable domain of TCR clone 34801 (TRBV7-6, TRBJ2-1)
CASSPRTSGMSSYNEQFF

SEQ ID NO: 69603 - protein, 14 aa, Homo sapiens
  CDR3 for alpha chain variable domain of TCR clone 34802 (TRAV29/DV5, TRAJ36)
CAARRKTGANNLFF

SEQ ID NO: 69604 - protein, 13 aa, Homo sapiens
  CDR3 for beta chain variable domain of TCR clone 34802 (TRBV11-2, TRBJ2-7)
CASSGTRPYEQYF

SEQ ID NO: 69605 - protein, 16 aa, Homo sapiens
  CDR3 for alpha chain variable domain of TCR clone 34803 (TRAV21, TRAJ45)
CAVSWGSGGGADGLPF

SEQ ID NO: 69606 - protein, 14 aa, Homo sapiens
  CDR3 for beta chain variable domain of TCR clone 34803 (TRBV4-2, TRBJ1-2)
CASSPGGSNYGYTF

SEQ ID NO: 69607 - protein, 14 aa, Homo sapiens
  CDR3 for alpha chain variable domain of TCR clone 34804 (TRAV8-1, TRAJ5)
CAVRTDTGRRALTF

SEQ ID NO: 69608 - protein, 13 aa, Homo sapiens
  CDR3 for beta chain variable domain of TCR clone 34804 (TRBV7-9, TRBJ1-2)
CASSLKQNYGYTF

SEQ ID NO: 69609 - protein, 14 aa, Homo sapiens
  CDR3 for alpha chain variable domain of TCR clone 34805 (TRAV27, TRAJ22)
CAGVSVLGKRQLTF

SEQ ID NO: 69610 - protein, 17 aa, Homo sapiens
  CDR3 for beta chain variable domain of TCR clone 34805 (TRBV14, TRBJ2-1)
CASSQDRRVTGYNEQFF

SEQ ID NO: 69611 - protein, 20 aa, Homo sapiens
  CDR3 for alpha chain variable domain of TCR clone 34806 (TRAV12-1, TRAJ42)
SSVIQPPTSGKGGSQGNLIF

SEQ ID NO: 69612 - protein, 18 aa, Homo sapiens
  CDR3 for beta chain variable domain of TCR clone 34806 (TRBV11-2, TRBJ2-3)
CASSLGGASRGAPNTQYF

SEQ ID NO: 69613 - protein, 10 aa, Homo sapiens
  CDR3 for alpha chain variable domain of TCR clone 34807 (TRAV1-2, TRAJ31)
CALFDARLMF

SEQ ID NO: 69614 - protein, 14 aa, Homo sapiens
  CDR3 for beta chain variable domain of TCR clone 34807 (TRBV10-3, TRBJ2-7)
CHQCGTSETYEQYF

SEQ ID NO: 69615 - protein, 11 aa, Homo sapiens
  CDR3 for alpha chain variable domain of TCR clone 34808 (TRAV35, TRAJ30)
CAPGGDDKIIF

SEQ ID NO: 69616 - protein, 14 aa, Homo sapiens
  CDR3 for beta chain variable domain of TCR clone 34808 (TRBV7-6, TRBJ2-1)
CASSLGGGADGQFF

SEQ ID NO: 69617 - protein, 15 aa, Homo sapiens
  CDR3 for alpha chain variable domain of TCR clone 34809 (TRAV4, TRAJ39)
CLVGPNNNAGNMLTF

SEQ ID NO: 69618 - protein, 13 aa, Homo sapiens
  CDR3 for beta chain variable domain of TCR clone 34809 (TRBV11-2, TRBJ2-5)
CASSSTGEETQYF

SEQ ID NO: 69619 - protein, 14 aa, Homo sapiens
  CDR3 for alpha chain variable domain of TCR clone 34810 (TRAV1-2, TRAJ8)
CAVREDTGFQKLVF

SEQ ID NO: 69620 - protein, 17 aa, Homo sapiens
  CDR3 for beta chain variable domain of TCR clone 34810 (TRBV7-3, TRBJ2-2)
CASSLSGTSGGTGELFF

SEQ ID NO: 69621 - protein, 10 aa, Homo sapiens
  CDR3 for alpha chain variable domain of TCR clone 34811 (TRAV12-1, TRAJ37)
AWGNTGELIF

SEQ ID NO: 69622 - protein, 15 aa, Homo sapiens
  CDR3 for beta chain variable domain of TCR clone 34811 (TRBV7-2, TRBJ2-3)
CASSLEQGGTDTQYF

SEQ ID NO: 69623 - protein, 15 aa, Homo sapiens
  CDR3 for alpha chain variable domain of TCR clone 34812 (TRAV3, TRAJ4)
CAVRDGTGGYNKLIF

SEQ ID NO: 69624 - protein, 14 aa, Homo sapiens
  CDR3 for beta chain variable domain of TCR clone 34812 (TRBV20-1, TRBJ1-1)
CSAQTRIGGTEAFF

SEQ ID NO: 69625 - protein, 16 aa, Homo sapiens
  CDR3 for alpha chain variable domain of TCR clone 34813 (TRAV23/DV6, TRAJ9)
CAASIGGNTGGFKTTF

SEQ ID NO: 69626 - protein, 14 aa, Homo sapiens
  CDR3 for beta chain variable domain of TCR clone 34813 (TRBV9, TRBJ2-7)
CASSVGVGSYEQYF

SEQ ID NO: 69627 - protein, 18 aa, Homo sapiens
  CDR3 for alpha chain variable domain of TCR clone 34814 (TRAV13-1, TRAJ52)
CAAKNPNADGTSYGKLTF

SEQ ID NO: 69628 - protein, 11 aa, Homo sapiens
  CDR3 for beta chain variable domain of TCR clone 34814 (TRBV29-1, TRBJ2-5)
CSEDRTGTQYF

SEQ ID NO: 69629 - protein, 19 aa, Homo sapiens
  CDR3 for alpha chain variable domain of TCR clone 34815 (TRAV29/DV5, TRAJ49)
CSVLLCSKLTVDTGNQFYF

SEQ ID NO: 69630 - protein, 14 aa, Homo sapiens
  CDR3 for beta chain variable domain of TCR clone 34815 (TRBV7-2, TRBJ1-1)
CASSFLTGTTEAFF

SEQ ID NO: 69631 - protein, 14 aa, Homo sapiens
  CDR3 for alpha chain variable domain of TCR clone 34816 (TRAV12-2, TRAJ13)
CAVKKTGGYQKVTF

SEQ ID NO: 69632 - protein, 14 aa, Homo sapiens
  CDR3 for beta chain variable domain of TCR clone 34816 (TRBV7-2, TRBJ1-2)
CASSQTGSTYGYTF

SEQ ID NO: 69633 - protein, 14 aa, Homo sapiens
  CDR3 for alpha chain variable domain of TCR clone 34817 (TRAV12-2, TRAJ9)
CAVNMEGGGFKTIF

SEQ ID NO: 69634 - protein, 14 aa, Homo sapiens
  CDR3 for beta chain variable domain of TCR clone 34817 (TRBV2, TRBJ2-5)
CASSGVLAQETQYF

SEQ ID NO: 69635 - protein, 10 aa, Homo sapiens
  CDR3 for alpha chain variable domain of TCR clone 34818 (TRAV8-4, TRAJ43)
CAVSAADMRF

SEQ ID NO: 69636 - protein, 15 aa, Homo sapiens
  CDR3 for beta chain variable domain of TCR clone 34818 (TRBV5-1, TRBJ2-3)
CASSVTSGSTDTQYF

SEQ ID NO: 69637 - protein, 12 aa, Homo sapiens
  CDR3 for alpha chain variable domain of TCR clone 34819 (TRAV22, TRAJ22)
CAPGGFCKATDL

SEQ ID NO: 69638 - protein, 13 aa, Homo sapiens
  CDR3 for beta chain variable domain of TCR clone 34819 (TRBV15, TRBJ1-6)
CATSGGLNSPLHF

SEQ ID NO: 69639 - protein, 12 aa, Homo sapiens
  CDR3 for alpha chain variable domain of TCR clone 34820 (TRAV12-3, TRAJ41)
CAMSYSGYALSF

SEQ ID NO: 69640 - protein, 13 aa, Homo sapiens
  CDR3 for beta chain variable domain of TCR clone 34820 (TRBV7-3, TRBJ2-1)
CASSLDSYNEQFF

SEQ ID NO: 69641 - protein, 14 aa, Homo sapiens
  CDR3 for alpha chain variable domain of TCR clone 34821 (TRAV26-1, TRAJ29)
CIVRVEPGNTPLVF

SEQ ID NO: 69642 - protein, 16 aa, Homo sapiens
  CDR3 for beta chain variable domain of TCR clone 34821 (TRBV12-5, TRBJ2-5)
CASGPRTSGNQETQYF

SEQ ID NO: 69643 - protein, 15 aa, Homo sapiens
  CDR3 for alpha chain variable domain of TCR clone 34822 (TRAV26-1, TRAJ29)
CIVRVEGSGNAPLVF

SEQ ID NO: 69644 - protein, 18 aa, Homo sapiens
  CDR3 for beta chain variable domain of TCR clone 34822 (TRBV5-5, TRBJ1-5)
CASSLRQVKGSSNQPQHF

SEQ ID NO: 69645 - protein, 14 aa, Homo sapiens
  CDR3 for alpha chain variable domain of TCR clone 34823 (TRAV12-1, TRAJ17)
YVVNYKAAGNKLTF

SEQ ID NO: 69646 - protein, 13 aa, Homo sapiens
  CDR3 for beta chain variable domain of TCR clone 34823 (TRBV7-6, TRBJ1-1)
CASSLKLGTEAFF

SEQ ID NO: 69647 - protein, 17 aa, Homo sapiens
  CDR3 for alpha chain variable domain of TCR clone 34824 (TRAV3, TRAJ6)
CAVRDGPRAGGSYIPTF

SEQ ID NO: 69648 - protein, 15 aa, Homo sapiens
  CDR3 for beta chain variable domain of TCR clone 34824 (TRBV19, TRBJ2-7)
CASSPAGSGEALRYF

SEQ ID NO: 69649 - protein, 16 aa, Homo sapiens
  CDR3 for alpha chain variable domain of TCR clone 34825 (TRAV8-3, TRAJ13)
CAVGAYPSGGYQKVTF

SEQ ID NO: 69650 - protein, 15 aa, Homo sapiens
  CDR3 for beta chain variable domain of TCR clone 34825 (TRBV19, TRBJ1-5)
CASSIVWADNQPQHC

SEQ ID NO: 69651 - protein, 14 aa, Homo sapiens
  CDR3 for alpha chain variable domain of TCR clone 34826 (TRAV30, TRAJ26)
CGTEIVSYGQNFVF

SEQ ID NO: 69652 - protein, 13 aa, Homo sapiens
  CDR3 for beta chain variable domain of TCR clone 34826 (TRBV19, TRBJ1-3)
CASRLSLGNTLYF

SEQ ID NO: 69653 - protein, 17 aa, Homo sapiens
  CDR3 for alpha chain variable domain of TCR clone 34827 (TRAV23/DV6, TRAJ57)
CAASSTLSQGGSEKLVF

SEQ ID NO: 69654 - protein, 13 aa, Homo sapiens
  CDR3 for beta chain variable domain of TCR clone 34827 (TRBV11-3, TRBJ2-3)
CASSHDTKDTQYF

SEQ ID NO: 69655 - protein, 12 aa, Homo sapiens
  CDR3 for alpha chain variable domain of TCR clone 34828 (TRAV2, TRAJ31)
CAVEEGNARLMF

SEQ ID NO: 69656 - protein, 18 aa, Homo sapiens
  CDR3 for beta chain variable domain of TCR clone 34828 (TRBV7-9, TRBJ2-3)
GASSLDLAGLATPDTQYF

SEQ ID NO: 69657 - protein, 15 aa, Homo sapiens
  CDR3 for alpha chain variable domain of TCR clone 34829 (TRAV3, TRAJ5)
CAVRDRKTGRRGLTF

SEQ ID NO: 69658 - protein, 15 aa, Homo sapiens
  CDR3 for beta chain variable domain of TCR clone 34829 (TRBV7-8, TRBJ2-1)
CASSLADSLYNEQFF

SEQ ID NO: 69659 - protein, 13 aa, Homo sapiens
  CDR3 for alpha chain variable domain of TCR clone 34830 (TRAV2, TRAJ15)
CAVASQAGTALIF

SEQ ID NO: 69660 - protein, 16 aa, Homo sapiens
  CDR3 for beta chain variable domain of TCR clone 34830 (TRBV5-1, TRBJ1-1)
CAGSSGGNSLNTEAFF

SEQ ID NO: 69661 - protein, 14 aa, Homo sapiens
  CDR3 for alpha chain variable domain of TCR clone 34831 (TRAV3, TRAJ34)
CAVRAPGNTAKLIF

SEQ ID NO: 69662 - protein, 17 aa, Homo sapiens
  CDR3 for beta chain variable domain of TCR clone 34831 (TRBV20-1, TRBJ2-7)
CSAAPGLARGISYEQYF

SEQ ID NO: 69663 - protein, 13 aa, Homo sapiens
  CDR3 for alpha chain variable domain of TCR clone 34832 (TRAV2, TRAJ12)
CAVGADSSCKLIF

SEQ ID NO: 69664 - protein, 13 aa, Homo sapiens
  CDR3 for beta chain variable domain of TCR clone 34832 (TRBV20-1, TRBJ2-1)
CSARSSPRDEQFF

SEQ ID NO: 69665 - protein, 13 aa, Homo sapiens
  CDR3 for alpha chain variable domain of TCR clone 34833 (TRAV13-2, TRAJ48)
CAEMDFGNEKLTF

SEQ ID NO: 69666 - protein, 13 aa, Homo sapiens
  CDR3 for beta chain variable domain of TCR clone 34833 (TRBV10-3, TRBJ2-7)
CASKLAVNYEQYF

SEQ ID NO: 69667 - protein, 15 aa, Homo sapiens
  CDR3 for alpha chain variable domain of TCR clone 34834 (TRAV12-3, TRAJ6)
CAMSATTGGSYIPTV

SEQ ID NO: 69668 - protein, 16 aa, Homo sapiens
  CDR3 for beta chain variable domain of TCR clone 34834 (TRBV20-1, TRBJ1-2)
CSASMGQGVANYGYTF

SEQ ID NO: 69669 - protein, 14 aa, Homo sapiens
  CDR3 for alpha chain variable domain of TCR clone 34835 (TRAV17, TRAJ32)
CATDPGGATNKLIF

SEQ ID NO: 69670 - protein, 14 aa, Homo sapiens
  CDR3 for beta chain variable domain of TCR clone 34835 (TRBV25-1, TRBJ1-1)
CASTHLGGNTEAFF

SEQ ID NO: 69671 - protein, 13 aa, Homo sapiens
  CDR3 for alpha chain variable domain of TCR clone 34836 (TRAV17, TRAJ54)
CATSWGGTQKLVF

SEQ ID NO: 69672 - protein, 15 aa, Homo sapiens
  CDR3 for beta chain variable domain of TCR clone 34836 (TRBV4-3, TRBJ2-3)
CASSPSLLSTDTQYF

SEQ ID NO: 69673 - protein, 15 aa, Homo sapiens
  CDR3 for alpha chain variable domain of TCR clone 34837 (TRAV23/DV6, TRAJ18)
CAARYRGSTLGRLYF

SEQ ID NO: 69674 - protein, 13 aa, Homo sapiens
  CDR3 for beta chain variable domain of TCR clone 34837 (TRBV7-2, TRBJ2-7)
CASSSPSGSDQYF

SEQ ID NO: 69675 - protein, 12 aa, Homo sapiens
  CDR3 for alpha chain variable domain of TCR clone 34838 (TRAV29/DV5, TRAJ49)
CAETDTGNQFYF

SEQ ID NO: 69676 - protein, 12 aa, Homo sapiens
  CDR3 for beta chain variable domain of TCR clone 34838 (TRBV12-4, TRBJ2-7)
CASSLGGYEQYF

SEQ ID NO: 69677 - protein, 10 aa, Homo sapiens
  CDR3 for alpha chain variable domain of TCR clone 34839 (TRAV12-3, TRAJ49)
CAMSDDQFYF

SEQ ID NO: 69678 - protein, 16 aa, Homo sapiens
  CDR3 for beta chain variable domain of TCR clone 34839 (TRBV20-1, TRBJ1-4)
CSAPGQGLLTNEKLFF

SEQ ID NO: 69679 - protein, 13 aa, Homo sapiens
  CDR3 for alpha chain variable domain of TCR clone 34840 (TRAV3, TRAJ43)
CAVKARNNSDMRF

SEQ ID NO: 69680 - protein, 16 aa, Homo sapiens
  CDR3 for beta chain variable domain of TCR clone 34840 (TRBV7-9, TRBJ2-3)
CASSFSVAGGTDTQYF

SEQ ID NO: 69681 - protein, 14 aa, Homo sapiens
  CDR3 for alpha chain variable domain of TCR clone 34841 (TRAV35, TRAJ22)
CAGLRPGSARQLTF

SEQ ID NO: 69682 - protein, 15 aa, Homo sapiens
  CDR3 for beta chain variable domain of TCR clone 34841 (TRBV12-4, TRBJ2-5)
CDSSPPTGLQETQYF

SEQ ID NO: 69683 - protein, 14 aa, Homo sapiens
  CDR3 for alpha chain variable domain of TCR clone 34842 (TRAV12-3, TRAJ10)
SHLPLTGGGNKLTF

SEQ ID NO: 69684 - protein, 13 aa, Homo sapiens
  CDR3 for beta chain variable domain of TCR clone 34842 (TRBV12-4, TRBJ1-5)
CASSPDRAQPQHF

SEQ ID NO: 69685 - protein, 15 aa, Homo sapiens
  CDR3 for alpha chain variable domain of TCR clone 34843 (TRAV3, TRAJ22)
CAVRDRGGSARQLTF

SEQ ID NO: 69686 - protein, 16 aa, Homo sapiens
  CDR3 for beta chain variable domain of TCR clone 34843 (TRBV5-8, TRBJ2-3)
CASQQPGAGGADTQYF

SEQ ID NO: 69687 - protein, 21 aa, Homo sapiens
  CDR3 for alpha chain variable domain of TCR clone 34844 (TRAV12-3, TRAJ18)
CAMSAEAQPWGGYTLEEELSC

SEQ ID NO: 69688 - protein, 13 aa, Homo sapiens
  CDR3 for beta chain variable domain of TCR clone 34844 (TRBV15, TRBJ1-6)
CATSGGLNSPLHF

SEQ ID NO: 69689 - protein, 12 aa, Homo sapiens
  CDR3 for alpha chain variable domain of TCR clone 34845 (TRAV21, TRAJ33)
CAKMDSNYQLIW

SEQ ID NO: 69690 - protein, 14 aa, Homo sapiens
  CDR3 for beta chain variable domain of TCR clone 34845 (TRBV2, TRBJ2-7)
YASSLTSGGYEQYF

SEQ ID NO: 69691 - protein, 19 aa, Homo sapiens
  CDR3 for alpha chain variable domain of TCR clone 34846 (TRAV26-1, TRAJ23)
CCVLLHRQSRGIPGRKLIF

SEQ ID NO: 69692 - protein, 18 aa, Homo sapiens
  CDR3 for beta chain variable domain of TCR clone 34846 (TRBV28, TRBJ2-1)
CASSSTSGRANSYNEQFF

SEQ ID NO: 69693 - protein, 15 aa, Homo sapiens
  CDR3 for alpha chain variable domain of TCR clone 34847 (TRAV20, TRAJ53)
CAVQAGGGSNYKLTF

SEQ ID NO: 69694 - protein, 12 aa, Homo sapiens
  CDR3 for beta chain variable domain of TCR clone 34847 (TRBV7-6, TRBJ2-5)
CASSLSQETQYF

SEQ ID NO: 69695 - protein, 14 aa, Homo sapiens
  CDR3 for alpha chain variable domain of TCR clone 34848 (TRAV12-2, TRAJ40)
CAVKIPSGTYKYIF

SEQ ID NO: 69696 - protein, 14 aa, Homo sapiens
  CDR3 for beta chain variable domain of TCR clone 34848 (TRBV12-4, TRBJ1-1)
CASSLGTGGTEAFF

SEQ ID NO: 69697 - protein, 13 aa, Homo sapiens
  CDR3 for alpha chain variable domain of TCR clone 34849 (TRAV3, TRAJ21)
SAVREPDFNKFYF

SEQ ID NO: 69698 - protein, 13 aa, Homo sapiens
  CDR3 for beta chain variable domain of TCR clone 34849 (TRBV9, TRBJ2-1)
CASSPSGGNEQFF

SEQ ID NO: 69699 - protein, 12 aa, Homo sapiens
  CDR3 for alpha chain variable domain of TCR clone 34850 (TRAV13-1, TRAJ15)
CAASQARTALIF

SEQ ID NO: 69700 - protein, 14 aa, Homo sapiens
  CDR3 for beta chain variable domain of TCR clone 34850 (TRBV19, TRBJ2-2)
CASSTLHRSGELFF

SEQ ID NO: 69701 - protein, 14 aa, Homo sapiens
  CDR3 for alpha chain variable domain of TCR clone 34851 (TRAV1-2, TRAJ16)
CAVRSASDGQKLLF

SEQ ID NO: 69702 - protein, 16 aa, Homo sapiens
  CDR3 for beta chain variable domain of TCR clone 34851 (TRBV19, TRBJ1-1)
CASSPTRFWPGTEAFF

SEQ ID NO: 69703 - protein, 12 aa, Homo sapiens
  CDR3 for alpha chain variable domain of TCR clone 34852 (TRAV13-1, TRAJ48)
RAANFGNEKLTF

SEQ ID NO: 69704 - protein, 12 aa, Homo sapiens
  CDR3 for beta chain variable domain of TCR clone 34852 (TRBV7-8, TRBJ2-7)
CASSLGDREQYF

SEQ ID NO: 69705 - protein, 14 aa, Homo sapiens
  CDR3 for alpha chain variable domain of TCR clone 34853 (TRAV12-2, TRAJ5)
CAVNRFTGRRALTF

SEQ ID NO: 69706 - protein, 14 aa, Homo sapiens
  CDR3 for beta chain variable domain of TCR clone 34853 (TRBV6-6, TRBJ1-4)
CASRTDREYEKLFF

SEQ ID NO: 69707 - protein, 14 aa, Homo sapiens
  CDR3 for alpha chain variable domain of TCR clone 34854 (TRAV12-2, TRAJ17)
CAVLFKAAGNKLTF

SEQ ID NO: 69708 - protein, 17 aa, Homo sapiens
  CDR3 for beta chain variable domain of TCR clone 34854 (TRBV20-1, TRBJ2-2)
CSASGLGQGGLTGELFF

SEQ ID NO: 69709 - protein, 15 aa, Homo sapiens
  CDR3 for alpha chain variable domain of TCR clone 34855 (TRAV29/DV5, TRAJ29)
CTASERSSGNTPLVF

SEQ ID NO: 69710 - protein, 17 aa, Homo sapiens
  CDR3 for beta chain variable domain of TCR clone 34855 (TRBV4-1, TRBJ1-4)
CASSQEGPRGVEEKLFF

SEQ ID NO: 69711 - protein, 16 aa, Homo sapiens
  CDR3 for alpha chain variable domain of TCR clone 34856 (TRAV38-1, TRAJ37)
CAFKGDGSSNTGKLIF

SEQ ID NO: 69712 - protein, 13 aa, Homo sapiens
  CDR3 for beta chain variable domain of TCR clone 34856 (TRBV12-4, TRBJ2-5)
CASSLFGRETQYF

SEQ ID NO: 69713 - protein, 13 aa, Homo sapiens
  CDR3 for alpha chain variable domain of TCR clone 34857 (TRAV12-3, TRAJ13)
CAMSSGGYQKVTF

SEQ ID NO: 69714 - protein, 15 aa, Homo sapiens
  CDR3 for beta chain variable domain of TCR clone 34857 (TRBV4-1, TRBJ1-4)
CASSDTGGTNEKLFF

SEQ ID NO: 69715 - protein, 16 aa, Homo sapiens
  CDR3 for alpha chain variable domain of TCR clone 34858 (TRAV12-3, TRAJ53)
FAMSPGSGGSNYKLTS

SEQ ID NO: 69716 - protein, 13 aa, Homo sapiens
  CDR3 for beta chain variable domain of TCR clone 34858 (TRBV7-3, TRBJ1-1)
CASSQDWGAEAFF

SEQ ID NO: 69717 - protein, 15 aa, Homo sapiens
  CDR3 for alpha chain variable domain of TCR clone 34859 (TRAV8-3, TRAJ15)
CAVGAPNQAGTALIF

SEQ ID NO: 69718 - protein, 14 aa, Homo sapiens
  CDR3 for beta chain variable domain of TCR clone 34859 (TRBV20-1, TRBJ2-1)
CSPNNEASYNEQFF

SEQ ID NO: 69719 - protein, 12 aa, Homo sapiens
  CDR3 for alpha chain variable domain of TCR clone 34860 (TRAV12-3, TRAJ40)
CAMTSGTYKYIF

SEQ ID NO: 69720 - protein, 15 aa, Homo sapiens
  CDR3 for beta chain variable domain of TCR clone 34860 (TRBV7-3, TRBJ2-2)
CASSLTGQRTGELFF

SEQ ID NO: 69721 - protein, 15 aa, Homo sapiens
  CDR3 for alpha chain variable domain of TCR clone 34861 (TRAV21, TRAJ53)
CATLNSGGSNYKLTF

SEQ ID NO: 69722 - protein, 12 aa, Homo sapiens
  CDR3 for beta chain variable domain of TCR clone 34861 (TRBV11-2, TRBJ2-2)
CASSLPTGELFF

SEQ ID NO: 69723 - protein, 12 aa, Homo sapiens
  CDR3 for alpha chain variable domain of TCR clone 34862 (TRAV26-1, TRAJ54)
CIGGWGAQRLVF

SEQ ID NO: 69724 - protein, 14 aa, Homo sapiens
  CDR3 for beta chain variable domain of TCR clone 34862 (TRBV11-2, TRBJ1-2)
CASSSGQAGDGYTF

SEQ ID NO: 69725 - protein, 22 aa, Homo sapiens
  CDR3 for alpha chain variable domain of TCR clone 34863 (TRAV2, TRAJ22)
SSSLPILQVREADAAEQRQLTF

SEQ ID NO: 69726 - protein, 16 aa, Homo sapiens
  CDR3 for beta chain variable domain of TCR clone 34863 (TRBV2, TRBJ2-5)
CASSETQGVGEETQYF

SEQ ID NO: 69727 - protein, 14 aa, Homo sapiens
  CDR3 for alpha chain variable domain of TCR clone 34864 (TRAV13-1, TRAJ35)
CAASKGGFGNVLHC

SEQ ID NO: 69728 - protein, 13 aa, Homo sapiens
  CDR3 for beta chain variable domain of TCR clone 34864 (TRBV7-3, TRBJ1-1)
CASSQDWGAEGFF

SEQ ID NO: 69729 - protein, 15 aa, Homo sapiens
  CDR3 for alpha chain variable domain of TCR clone 34865 (TRAV3, TRAJ5)
CAVRDLDTGRRALTF

SEQ ID NO: 69730 - protein, 13 aa, Homo sapiens
  CDR3 for beta chain variable domain of TCR clone 34865 (TRBV12-4, TRBJ2-7)
SASSPTETYEQYF

SEQ ID NO: 69731 - protein, 13 aa, Homo sapiens
  CDR3 for alpha chain variable domain of TCR clone 34866 (TRAV8-1, TRAJ28)
CAVSGAGSYQLTF

SEQ ID NO: 69732 - protein, 15 aa, Homo sapiens
  CDR3 for beta chain variable domain of TCR clone 34866 (TRBV7-3, TRBJ2-1)
CASSASGTGFNEQFF

SEQ ID NO: 69733 - protein, 16 aa, Homo sapiens
  CDR3 for alpha chain variable domain of TCR clone 34867 (TRAV30, TRAJ24)
CGTEIVDADSRGKFQF

SEQ ID NO: 69734 - protein, 14 aa, Homo sapiens
  CDR3 for beta chain variable domain of TCR clone 34867 (TRBV7-2, TRBJ2-7)
CASSPKTSFYEQYF

SEQ ID NO: 69735 - protein, 11 aa, Homo sapiens
  CDR3 for alpha chain variable domain of TCR clone 34868 (TRAV21, TRAJ11)
CAVNGYSTLTF

SEQ ID NO: 69736 - protein, 13 aa, Homo sapiens
  CDR3 for beta chain variable domain of TCR clone 34868 (TRBV2, TRBJ1-1)
CASSVLMNTEAFF

SEQ ID NO: 69737 - protein, 15 aa, Homo sapiens
  CDR3 for alpha chain variable domain of TCR clone 34869 (TRAV12-3, TRAJ27)
CAMRACNTNAGKSTF

SEQ ID NO: 69738 - protein, 13 aa, Homo sapiens
  CDR3 for beta chain variable domain of TCR clone 34869 (TRBV11-2, TRBJ2-5)
CASSRGPSETQYF

SEQ ID NO: 69739 - protein, 12 aa, Homo sapiens
  CDR3 for alpha chain variable domain of TCR clone 34870 (TRAV12-1, TRAJ40)
CVFYSGTYKYIF

SEQ ID NO: 69740 - protein, 18 aa, Homo sapiens
  CDR3 for beta chain variable domain of TCR clone 34870 (TRBV12-4, TRBJ2-2)
CASNLVAGTRGRTGELFF

SEQ ID NO: 69741 - protein, 12 aa, Homo sapiens
  CDR3 for alpha chain variable domain of TCR clone 34871 (TRAV12-1, TRAJ40)
CVFYSGTYKYIF

SEQ ID NO: 69742 - protein, 18 aa, Homo sapiens
  CDR3 for beta chain variable domain of TCR clone 34871 (TRBV12-4, TRBJ2-2)
CASSLAAGTRGRTGELFF

SEQ ID NO: 69743 - protein, 15 aa, Homo sapiens
  CDR3 for alpha chain variable domain of TCR clone 34872 (TRAV35, TRAJ40)
CAGQLGTSGTYKYIF

SEQ ID NO: 69744 - protein, 16 aa, Homo sapiens
  CDR3 for beta chain variable domain of TCR clone 34872 (TRBV19, TRBJ2-1)
CASSKAGPSSYNEQFF

SEQ ID NO: 69745 - protein, 12 aa, Homo sapiens
  CDR3 for alpha chain variable domain of TCR clone 34873 (TRAV21, TRAJ33)
CAKMDSNYQLIW

SEQ ID NO: 69746 - protein, 14 aa, Homo sapiens
  CDR3 for beta chain variable domain of TCR clone 34873 (TRBV2, TRBJ2-7)
CASSLTSGGYEQCF

SEQ ID NO: 69747 - protein, 11 aa, Homo sapiens
  CDR3 for alpha chain variable domain of TCR clone 34874 (TRAV12-1, TRAJ8)
CVVTGFQKLVF

SEQ ID NO: 69748 - protein, 14 aa, Homo sapiens
  CDR3 for beta chain variable domain of TCR clone 34874 (TRBV19, TRBJ2-1)
CASGESTQYNEQFF

SEQ ID NO: 69749 - protein, 11 aa, Homo sapiens
  CDR3 for alpha chain variable domain of TCR clone 34875 (TRAV1-2, TRAJ40)
CAVPGTYKYIF

SEQ ID NO: 69750 - protein, 18 aa, Homo sapiens
  CDR3 for beta chain variable domain of TCR clone 34875 (TRBV29-1, TRBJ2-7)
CSVEVVGLAGATSSTSGR

SEQ ID NO: 69751 - protein, 13 aa, Homo sapiens
  CDR3 for alpha chain variable domain of TCR clone 34876 (TRAV36/DV7, TRAJ49)
CAVEANTGNQVYF

SEQ ID NO: 69752 - protein, 13 aa, Homo sapiens
  CDR3 for beta chain variable domain of TCR clone 34876 (TRBV10-3, TRBJ2-7)
CASKLAVNYEQYF

SEQ ID NO: 69753 - protein, 14 aa, Homo sapiens
  CDR3 for alpha chain variable domain of TCR clone 34877 (TRAV8-1, TRAJ24)
CAVNAADSWGKLQL

SEQ ID NO: 69754 - protein, 16 aa, Homo sapiens
  CDR3 for beta chain variable domain of TCR clone 34877 (TRBV4-3, TRBJ2-1)
CASSPALDRGVNEQFF

SEQ ID NO: 69755 - protein, 15 aa, Homo sapiens
  CDR3 for alpha chain variable domain of TCR clone 34878 (TRAV38-1, TRAJ37)
CAFIPGSGNTGKLIF

SEQ ID NO: 69756 - protein, 12 aa, Homo sapiens
  CDR3 for beta chain variable domain of TCR clone 34878 (TRBV7-9, TRBJ2-7)
CASSFGSYEQYF

SEQ ID NO: 69757 - protein, 14 aa, Homo sapiens
  CDR3 for alpha chain variable domain of TCR clone 34879 (TRAV12-2, TRAJ53)
CAVKGGGSNYKLTF

SEQ ID NO: 69758 - protein, 17 aa, Homo sapiens
  CDR3 for beta chain variable domain of TCR clone 34879 (TRBV7-2, TRBJ1-4)
CASSFKAGPTTNEKLVF

SEQ ID NO: 69759 - protein, 17 aa, Homo sapiens
  CDR3 for alpha chain variable domain of TCR clone 34880 (TRAV23/DV6, TRAJ57)
CAASSTLSQGGSEKLVF

SEQ ID NO: 69760 - protein, 14 aa, Homo sapiens
  CDR3 for beta chain variable domain of TCR clone 34880 (TRBV25-1, TRBJ1-1)
CASTHLGGNTEAFL

SEQ ID NO: 69761 - protein, 20 aa, Homo sapiens
  CDR3 for alpha chain variable domain of TCR clone 34881 (TRAV26-1, TRAJ42)
CCVLLHRQTYYGGSQGNLIF

SEQ ID NO: 69762 - protein, 16 aa, Homo sapiens
  CDR3 for beta chain variable domain of TCR clone 34881 (TRBV7-3, TRBJ2-2)
CASSLKRWTLSGELFF

SEQ ID NO: 69763 - protein, 15 aa, Homo sapiens
  CDR3 for alpha chain variable domain of TCR clone 34882 (TRAV12-2, TRAJ4)
CAGFSGGYNKLILEQ

SEQ ID NO: 69764 - protein, 14 aa, Homo sapiens
  CDR3 for beta chain variable domain of TCR clone 34882 (TRBV24-1, TRBJ1-1)
CATSIPRGDTEAFF

SEQ ID NO: 69765 - protein, 13 aa, Homo sapiens
  CDR3 for alpha chain variable domain of TCR clone 34883 (TRAV2, TRAJ24)
CAVTADSWGKLQF

SEQ ID NO: 69766 - protein, 14 aa, Homo sapiens
  CDR3 for beta chain variable domain of TCR clone 34883 (TRBV13, TRBJ2-5)
CASSLGREQETQYF

SEQ ID NO: 69767 - protein, 15 aa, Homo sapiens
  CDR3 for alpha chain variable domain of TCR clone 34884 (TRAV8-3, TRAJ11)
CAVGLLNSGYSTLTF

SEQ ID NO: 69768 - protein, 13 aa, Homo sapiens
  CDR3 for beta chain variable domain of TCR clone 34884 (TRBV4-2, TRBJ2-3)
CASSLTTTDTQYF

SEQ ID NO: 69769 - protein, 14 aa, Homo sapiens
  CDR3 for alpha chain variable domain of TCR clone 34885 (TRAV1-2, TRAJ8)
CAVREDTGFQKLVF

SEQ ID NO: 69770 - protein, 15 aa, Homo sapiens
  CDR3 for beta chain variable domain of TCR clone 34885 (TRBV10-2, TRBJ2-6)
CASSEQGTGANALTF

SEQ ID NO: 69771 - protein, 13 aa, Homo sapiens
  CDR3 for alpha chain variable domain of TCR clone 34886 (TRAV3, TRAJ21)
CAVREPDFNKFYF

SEQ ID NO: 69772 - protein, 17 aa, Homo sapiens
  CDR3 for beta chain variable domain of TCR clone 34886 (TRBV7-8, TRBJ2-6)
CASSAGTGGAGANVLTF

SEQ ID NO: 69773 - protein, 14 aa, Homo sapiens
  CDR3 for alpha chain variable domain of TCR clone 34887 (TRAV12-3, TRAJ13)
CAMKNSGGYQKVTF

SEQ ID NO: 69774 - protein, 13 aa, Homo sapiens
  CDR3 for beta chain variable domain of TCR clone 34887 (TRBV29-1, TRBJ2-5)
CSARDRAEETQYF

SEQ ID NO: 69775 - protein, 14 aa, Homo sapiens
  CDR3 for alpha chain variable domain of TCR clone 34888 (TRAV1-2, TRAJ16)
CAVNRFSDGQKLLF

SEQ ID NO: 69776 - protein, 14 aa, Homo sapiens
  CDR3 for beta chain variable domain of TCR clone 34888 (TRBV10-3, TRBJ2-2)
CAISETLNTGELFF

SEQ ID NO: 69777 - protein, 17 aa, Homo sapiens
  CDR3 for alpha chain variable domain of TCR clone 34889 (TRAV4, TRAJ42)
CLVGVLNYGGSQGNLIF

SEQ ID NO: 69778 - protein, 12 aa, Homo sapiens
  CDR3 for beta chain variable domain of TCR clone 34889 (TRBV20-1, TRBJ2-1)
CSAQHTYNEQFF

SEQ ID NO: 69779 - protein, 11 aa, Homo sapiens
  CDR3 for alpha chain variable domain of TCR clone 34890 (TRAV2, TRAJ33)
CAVDNNYQLIW

SEQ ID NO: 69780 - protein, 15 aa, Homo sapiens
  CDR3 for beta chain variable domain of TCR clone 34890 (TRBV19, TRBJ1-2)
CASSVGQVLNYGYTF

SEQ ID NO: 69781 - protein, 16 aa, Homo sapiens
  CDR3 for alpha chain variable domain of TCR clone 34891 (TRAV21, TRAJ37)
CVVRTAGSSNTGKLIF

SEQ ID NO: 69782 - protein, 13 aa, Homo sapiens
  CDR3 for beta chain variable domain of TCR clone 34891 (TRBV7-9, TRBJ2-5)
CASLPSGRETQYF

SEQ ID NO: 69783 - protein, 14 aa, Homo sapiens
  CDR3 for alpha chain variable domain of TCR clone 34892 (TRAV12-2, TRAJ13)
CAVKKTGGYQKVTF

SEQ ID NO: 69784 - protein, 15 aa, Homo sapiens
  CDR3 for beta chain variable domain of TCR clone 34892 (TRBV19, TRBJ1-6)
CASSTQGVVGSPLHF

SEQ ID NO: 69785 - protein, 14 aa, Homo sapiens
  CDR3 for alpha chain variable domain of TCR clone 34893 (TRAV1-2, TRAJ16)
CAVNRFSDGQKLLF

SEQ ID NO: 69786 - protein, 15 aa, Homo sapiens
  CDR3 for beta chain variable domain of TCR clone 34893 (TRBV7-9, TRBJ1-6)
CASSYPGRGNSPLHF

SEQ ID NO: 69787 - protein, 10 aa, Homo sapiens
  CDR3 for alpha chain variable domain of TCR clone 34894 (TRAV23/DV6, TRAJ57)
CAASSTLSQG

SEQ ID NO: 69788 - protein, 14 aa, Homo sapiens
  CDR3 for beta chain variable domain of TCR clone 34894 (TRBV25-1, TRBJ1-1)
CASTHLGGNTEAFV

SEQ ID NO: 69789 - protein, 14 aa, Homo sapiens
  CDR3 for alpha chain variable domain of TCR clone 34895 (TRAV12-2, TRAJ40)
CAVKIPSGTYKYIF

SEQ ID NO: 69790 - protein, 13 aa, Homo sapiens
  CDR3 for beta chain variable domain of TCR clone 34895 (TRBV7-9, TRBJ1-2)
CASSLKRNYGYTF

SEQ ID NO: 69791 - protein, 14 aa, Homo sapiens
  CDR3 for alpha chain variable domain of TCR clone 34896 (TRAV2, TRAJ37)
CAVDFTSNTGKLIF

SEQ ID NO: 69792 - protein, 14 aa, Homo sapiens
  CDR3 for beta chain variable domain of TCR clone 34896 (TRBV20-1, TRBJ1-1)
CSAQTRIGGTEAFS

SEQ ID NO: 69793 - protein, 13 aa, Homo sapiens
  CDR3 for alpha chain variable domain of TCR clone 34897 (TRAV21, TRAJ20)
CAVGLRVDYKLSF

SEQ ID NO: 69794 - protein, 16 aa, Homo sapiens
  CDR3 for beta chain variable domain of TCR clone 34897 (TRBV20-1, TRBJ1-4)
CSAPGQGLLTNEKLFF

SEQ ID NO: 69795 - protein, 14 aa, Homo sapiens
  CDR3 for alpha chain variable domain of TCR clone 34898 (TRAV21, TRAJ37)
CAVKGSSNTGRLIF

SEQ ID NO: 69796 - protein, 14 aa, Homo sapiens
  CDR3 for beta chain variable domain of TCR clone 34898 (TRBV7-2, TRBJ2-1)
CASSRGGARNEQFF

SEQ ID NO: 69797 - protein, 12 aa, Homo sapiens
  CDR3 for alpha chain variable domain of TCR clone 34899 (TRAV12-1, TRAJ26)
CGEKNHGQNFVF

SEQ ID NO: 69798 - protein, 15 aa, Homo sapiens
  CDR3 for beta chain variable domain of TCR clone 34899 (TRBV28, TRBJ2-1)
CASSIIAGGRSEQFF

SEQ ID NO: 69799 - protein, 16 aa, Homo sapiens
  CDR3 for alpha chain variable domain of TCR clone 34900 (TRAV26-1, TRAJ32)
SIVRTNYGGATNKLIF

SEQ ID NO: 69800 - protein, 14 aa, Homo sapiens
  CDR3 for beta chain variable domain of TCR clone 34900 (TRBV27, TRBJ1-1)
CASSLLSGLSEAFF

SEQ ID NO: 69801 - protein, 11 aa, Homo sapiens
  CDR3 for alpha chain variable domain of TCR clone 34901 (TRAV21, TRAJ34)
CAVTNTDKLIF

SEQ ID NO: 69802 - protein, 12 aa, Homo sapiens
  CDR3 for beta chain variable domain of TCR clone 34901 (TRBV19, TRBJ2-5)
CATSRGGETQYF

SEQ ID NO: 69803 - protein, 12 aa, Homo sapiens
  CDR3 for alpha chain variable domain of TCR clone 34902 (TRAV27, TRAJ36)
CAGMTGANNPFF

SEQ ID NO: 69804 - protein, 14 aa, Homo sapiens
  CDR3 for beta chain variable domain of TCR clone 34902 (TRBV12-4, TRBJ2-3)
CASSLVPSTDTQYF

SEQ ID NO: 69805 - protein, 14 aa, Homo sapiens
  CDR3 for alpha chain variable domain of TCR clone 34903 (TRAV16, TRAJ37)
CALDISGNTGKLIF

SEQ ID NO: 69806 - protein, 14 aa, Homo sapiens
  CDR3 for beta chain variable domain of TCR clone 34903 (TRBV7-6, TRBJ2-7)
CASSSRQGADEQYF

SEQ ID NO: 69807 - protein, 14 aa, Homo sapiens
  CDR3 for alpha chain variable domain of TCR clone 34904 (TRAV20, TRAJ42)
CAVQAGGSQGNLIF

SEQ ID NO: 69808 - protein, 14 aa, Homo sapiens
  CDR3 for beta chain variable domain of TCR clone 34904 (TRBV28, TRBJ1-2)
CASRIQGANYGCTF

SEQ ID NO: 69809 - protein, 13 aa, Homo sapiens
  CDR3 for alpha chain variable domain of TCR clone 34905 (TRAV1-2, TRAJ9)
CAALNTGGFKTIF

SEQ ID NO: 69810 - protein, 15 aa, Homo sapiens
  CDR3 for beta chain variable domain of TCR clone 34905 (TRBV20-1, TRBJ2-7)
CSAESGTSGAYEQYF

SEQ ID NO: 69811 - protein, 15 aa, Homo sapiens
  CDR3 for alpha chain variable domain of TCR clone 34906 (TRAV26-1, TRAJ22)
CIVRVSFWFCKETDL

SEQ ID NO: 69812 - protein, 13 aa, Homo sapiens
  CDR3 for beta chain variable domain of TCR clone 34906 (TRBV7-9, TRBJ1-2)
CASSLKQNYGYTF

SEQ ID NO: 69813 - protein, 14 aa, Homo sapiens
  CDR3 for alpha chain variable domain of TCR clone 34907 (TRAV26-2, TRAJ45)
CILRTGGGADGLTF

SEQ ID NO: 69814 - protein, 15 aa, Homo sapiens
  CDR3 for beta chain variable domain of TCR clone 34907 (TRBV19, TRBJ1-2)
CASSVGQVLNYGYTF

SEQ ID NO: 69815 - protein, 14 aa, Homo sapiens
  CDR3 for alpha chain variable domain of TCR clone 34908 (TRAV1-1, TRAJ27)
CAVIYNTSAGKSTF

SEQ ID NO: 69816 - protein, 15 aa, Homo sapiens
  CDR3 for beta chain variable domain of TCR clone 34908 (TRBV7-2, TRBJ2-1)
CASSSGLAGGNEQFF

SEQ ID NO: 69817 - protein, 12 aa, Homo sapiens
  CDR3 for alpha chain variable domain of TCR clone 34909 (TRAV12-3, TRAJ20)
CAMVRGDYKLSF

SEQ ID NO: 69818 - protein, 16 aa, Homo sapiens
  CDR3 for beta chain variable domain of TCR clone 34909 (TRBV5-1, TRBJ2-3)
RASSLGLAVYTDTQYF

SEQ ID NO: 69819 - protein, 13 aa, Homo sapiens
  CDR3 for alpha chain variable domain of TCR clone 34910 (TRAV20, TRAJ11)
CAVQARGYSTLTF

SEQ ID NO: 69820 - protein, 16 aa, Homo sapiens
  CDR3 for beta chain variable domain of TCR clone 34910 (TRBV20-1, TRBJ2-5)
CSPGGTSGGYMETQYF

SEQ ID NO: 69821 - protein, 11 aa, Homo sapiens
  CDR3 for alpha chain variable domain of TCR clone 34911 (TRAV17, TRAJ43)
CATDVTGDIRF

SEQ ID NO: 69822 - protein, 14 aa, Homo sapiens
  CDR3 for beta chain variable domain of TCR clone 34911 (TRBV12-4, TRBJ1-1)
CASRPGQGRTEAFF

SEQ ID NO: 69823 - protein, 15 aa, Homo sapiens
  CDR3 for alpha chain variable domain of TCR clone 34912 (TRAV23/DV6, TRAJ13)
CAAWPGGGGYQKVTF

SEQ ID NO: 69824 - protein, 17 aa, Homo sapiens
  CDR3 for beta chain variable domain of TCR clone 34912 (TRBV19, TRBJ2-7)
CASSISSYDSYPYEQYF

SEQ ID NO: 69825 - protein, 18 aa, Homo sapiens
  CDR3 for alpha chain variable domain of TCR clone 34913 (TRAV13-1, TRAJ52)
CAAKNPNAGGTSYGKLTF

SEQ ID NO: 69826 - protein, 15 aa, Homo sapiens
  CDR3 for beta chain variable domain of TCR clone 34913 (TRBV6-1, TRBJ2-3)
CASSERGRITDTQYF

SEQ ID NO: 69827 - protein, 13 aa, Homo sapiens
  CDR3 for alpha chain variable domain of TCR clone 34914 (TRAV17, TRAJ29)
CATDAFRKHTSCL

SEQ ID NO: 69828 - protein, 13 aa, Homo sapiens
  CDR3 for beta chain variable domain of TCR clone 34914 (TRBV5-7, TRBJ2-6)
CASTASGANVLTF

SEQ ID NO: 69829 - protein, 14 aa, Homo sapiens
  CDR3 for alpha chain variable domain of TCR clone 34915 (TRAV38-1, TRAJ39)
CAFAYNNAGNVLTF

SEQ ID NO: 69830 - protein, 15 aa, Homo sapiens
  CDR3 for beta chain variable domain of TCR clone 34915 (TRBV19, TRBJ2-6)
CASSIGPSGANVLTF

SEQ ID NO: 69831 - protein, 15 aa, Homo sapiens
  CDR3 for alpha chain variable domain of TCR clone 34916 (TRAV25, TRAJ52)
CAGRPGGTSYGKLTF

SEQ ID NO: 69832 - protein, 17 aa, Homo sapiens
  CDR3 for beta chain variable domain of TCR clone 34916 (TRBV7-8, TRBJ2-6)
CASSAGTVGAGANVLTF

SEQ ID NO: 69833 - protein, 14 aa, Homo sapiens
  CDR3 for alpha chain variable domain of TCR clone 34917 (TRAV1-2, TRAJ8)
CAVREDTGFQKLVF

SEQ ID NO: 69834 - protein, 13 aa, Homo sapiens
  CDR3 for beta chain variable domain of TCR clone 34917 (TRBV7-7, TRBJ2-5)
CASSRSGQETQYF

SEQ ID NO: 69835 - protein, 14 aa, Homo sapiens
  CDR3 for alpha chain variable domain of TCR clone 34918 (TRAV1-1, TRAJ28)
CAAPSGAGRYQLTF

SEQ ID NO: 69836 - protein, 15 aa, Homo sapiens
  CDR3 for beta chain variable domain of TCR clone 34918 (TRBV7-2, TRBJ1-2)
CASSLVSGGDYGYTF

SEQ ID NO: 69837 - protein, 16 aa, Homo sapiens
  CDR3 for alpha chain variable domain of TCR clone 34919 (TRAV3, TRAJ18)
CALRDGRGSTLGRLYF

SEQ ID NO: 69838 - protein, 15 aa, Homo sapiens
  CDR3 for beta chain variable domain of TCR clone 34919 (TRBV7-9, TRBJ1-6)
CASSSPGRGNSPLHF

SEQ ID NO: 69839 - protein, 10 aa, Homo sapiens
  CDR3 for alpha chain variable domain of TCR clone 34920 (TRAV23/DV6, TRAJ9)
CAASIGGNTG

SEQ ID NO: 69840 - protein, 13 aa, Homo sapiens
  CDR3 for beta chain variable domain of TCR clone 34920 (TRBV7-9, TRBJ1-2)
CASSLKQNYGYTF

SEQ ID NO: 69841 - protein, 12 aa, Homo sapiens
  CDR3 for alpha chain variable domain of TCR clone 34921 (TRAV2, TRAJ9)
CAVGAGGFKTIF

SEQ ID NO: 69842 - protein, 16 aa, Homo sapiens
  CDR3 for beta chain variable domain of TCR clone 34921 (TRBV13, TRBJ2-2)
CASSPRTGELTGELFF

SEQ ID NO: 69843 - protein, 13 aa, Homo sapiens
  CDR3 for alpha chain variable domain of TCR clone 34922 (TRAV13-2, TRAJ53)
CAENMGSNYKLTF

SEQ ID NO: 69844 - protein, 16 aa, Homo sapiens
  CDR3 for beta chain variable domain of TCR clone 34922 (TRBV6-1, TRBJ2-5)
CASSETLDRGAETQYF

SEQ ID NO: 69845 - protein, 15 aa, Homo sapiens
  CDR3 for alpha chain variable domain of TCR clone 34923 (TRAV16, TRAJ16)
CALQGGGADGQKLLF

SEQ ID NO: 69846 - protein, 15 aa, Homo sapiens
  CDR3 for beta chain variable domain of TCR clone 34923 (TRBV20-1, TRBJ2-7)
CSARDRVSGMDEQYF

SEQ ID NO: 69847 - protein, 15 aa, Homo sapiens
  CDR3 for alpha chain variable domain of TCR clone 34924 (TRAV12-2, TRAJ43)
CAFDMRFGAGTRLTV

SEQ ID NO: 69848 - protein, 16 aa, Homo sapiens
  CDR3 for beta chain variable domain of TCR clone 34924 (TRBV13, TRBJ2-3)
CQQPLQGSGGRNTQYF

SEQ ID NO: 69849 - protein, 12 aa, Homo sapiens
  CDR3 for alpha chain variable domain of TCR clone 34925 (TRAV1-1, TRAJ8)
CAGGTGFQKLVF

SEQ ID NO: 69850 - protein, 15 aa, Homo sapiens
  CDR3 for beta chain variable domain of TCR clone 34925 (TRBV7-9, TRBJ1-4)
CAISRTGGFNEKLFF

SEQ ID NO: 69851 - protein, 14 aa, Homo sapiens
  CDR3 for alpha chain variable domain of TCR clone 34926 (TRAV12-3, TRAJ22)
CAMSLFGSARQLTF

SEQ ID NO: 69852 - protein, 14 aa, Homo sapiens
  CDR3 for beta chain variable domain of TCR clone 34926 (TRBV19, TRBJ2-1)
CASPTFVLSGEQFF

SEQ ID NO: 69853 - protein, 21 aa, Homo sapiens
  CDR3 for alpha chain variable domain of TCR clone 34927 (TRAV1-1, TRAJ6)
CLLLLRCERLERTGGSYIPTF

SEQ ID NO: 69854 - protein, 14 aa, Homo sapiens
  CDR3 for beta chain variable domain of TCR clone 34927 (TRBV12-5, TRBJ2-5)
CASGSRTHQETQYF

SEQ ID NO: 69855 - protein, 15 aa, Homo sapiens
  CDR3 for alpha chain variable domain of TCR clone 34928 (TRAV26-1, TRAJ9)
CIVRESNTGGFKTIF

SEQ ID NO: 69856 - protein, 11 aa, Homo sapiens
  CDR3 for beta chain variable domain of TCR clone 34928 (TRBV7-6, TRBJ2-5)
CASSFQEAQYF

SEQ ID NO: 69857 - protein, 16 aa, Homo sapiens
  CDR3 for alpha chain variable domain of TCR clone 34929 (TRAV30, TRAJ24)
CGTEIVDADSWGKFQF

SEQ ID NO: 69858 - protein, 14 aa, Homo sapiens
  CDR3 for beta chain variable domain of TCR clone 34929 (TRBV7-9, TRBJ2-5)
CASSLDTAQETQYF

SEQ ID NO: 69859 - protein, 11 aa, Homo sapiens
  CDR3 for alpha chain variable domain of TCR clone 34930 (TRAV1-1, TRAJ23)
CAVRQGGKLIF

SEQ ID NO: 69860 - protein, 20 aa, Homo sapiens
  CDR3 for beta chain variable domain of TCR clone 34930 (TRBV7-8, TRBJ2-2)
CASSHLFPGPTTHITGELSF

SEQ ID NO: 69861 - protein, 18 aa, Homo sapiens
  CDR3 for alpha chain variable domain of TCR clone 34931 (TRAV26-1, TRAJ23)
CIVRVGLEVWNQGGKLIF

SEQ ID NO: 69862 - protein, 21 aa, Homo sapiens
  CDR3 for beta chain variable domain of TCR clone 34931 (TRBV12-4, TRBJ2-5)
CASSFFCQGAPRDPVLRARHA

SEQ ID NO: 69863 - protein, 11 aa, Homo sapiens
  CDR3 for alpha chain variable domain of TCR clone 34932 (TRAV21, TRAJ34)
CAPLDTDKLIF

SEQ ID NO: 69864 - protein, 16 aa, Homo sapiens
  CDR3 for beta chain variable domain of TCR clone 34932 (TRBV5-1, TRBJ2-3)
CASSLAGDRGIDTQYF

SEQ ID NO: 69865 - protein, 14 aa, Homo sapiens
  CDR3 for alpha chain variable domain of TCR clone 34933 (TRAV9-2, TRAJ39)
CALYIYNAGNMLTF

SEQ ID NO: 69866 - protein, 14 aa, Homo sapiens
  CDR3 for beta chain variable domain of TCR clone 34933 (TRBV7-2, TRBJ2-7)
CASSLYPGRYEQYF

SEQ ID NO: 69867 - protein, 15 aa, Homo sapiens
  CDR3 for alpha chain variable domain of TCR clone 34934 (TRAV26-1, TRAJ44)
CTARVPFGTASKLTF

SEQ ID NO: 69868 - protein, 15 aa, Homo sapiens
  CDR3 for beta chain variable domain of TCR clone 34934 (TRBV20-1, TRBJ1-1)
CSASRGVTGNTEAFF

SEQ ID NO: 69869 - protein, 15 aa, Homo sapiens
  CDR3 for alpha chain variable domain of TCR clone 34935 (TRAV2, TRAJ9)
CAVEDRGTGGFKTIF

SEQ ID NO: 69870 - protein, 14 aa, Homo sapiens
  CDR3 for beta chain variable domain of TCR clone 34935 (TRBV7-2, TRBJ2-7)
CASRSQGAAYEQYF

SEQ ID NO: 69871 - protein, 14 aa, Homo sapiens
  CDR3 for alpha chain variable domain of TCR clone 34936 (TRAV35, TRAJ33)
CAGSSQDSNYQLIW

SEQ ID NO: 69872 - protein, 15 aa, Homo sapiens
  CDR3 for beta chain variable domain of TCR clone 34936 (TRBV20-1, TRBJ2-7)
GSAESGTSGAYEQYF

SEQ ID NO: 69873 - protein, 20 aa, Homo sapiens
  CDR3 for alpha chain variable domain of TCR clone 34937 (TRAV26-1, TRAJ42)
CCVLLHRQTYYGGSQGSPIF

SEQ ID NO: 69874 - protein, 16 aa, Homo sapiens
  CDR3 for beta chain variable domain of TCR clone 34937 (TRBV7-3, TRBJ2-2)
CASSLKRGTLSGELFF

SEQ ID NO: 69875 - protein, 13 aa, Homo sapiens
  CDR3 for alpha chain variable domain of TCR clone 34938 (TRAV8-3, TRAJ36)
CAVGATGANNLFF

SEQ ID NO: 69876 - protein, 12 aa, Homo sapiens
  CDR3 for beta chain variable domain of TCR clone 34938 (TRBV11-2, TRBJ2-2)
CASSLGGGELFF

SEQ ID NO: 69877 - protein, 13 aa, Homo sapiens
  CDR3 for alpha chain variable domain of TCR clone 34939 (TRAV13-1, TRAJ5)
CAASDTGRRALPF

SEQ ID NO: 69878 - protein, 12 aa, Homo sapiens
  CDR3 for beta chain variable domain of TCR clone 34939 (TRBV28, TRBJ2-3)
CASSLYRDTQYF

SEQ ID NO: 69879 - protein, 11 aa, Homo sapiens
  CDR3 for alpha chain variable domain of TCR clone 34940 (TRAV2, TRAJ13)
CASGGYQKVTF

SEQ ID NO: 69880 - protein, 13 aa, Homo sapiens
  CDR3 for beta chain variable domain of TCR clone 34940 (TRBV15, TRBJ1-6)
CATSGGLNSPLHF

SEQ ID NO: 69881 - protein, 16 aa, Homo sapiens
  CDR3 for alpha chain variable domain of TCR clone 34941 (TRAV3, TRAJ10)
CAVRDMNAGGGDKLTF

SEQ ID NO: 69882 - protein, 16 aa, Homo sapiens
  CDR3 for beta chain variable domain of TCR clone 34941 (TRBV6-3, TRBJ1-2)
CASSYSRRASNYGYTF

SEQ ID NO: 69883 - protein, 15 aa, Homo sapiens
  CDR3 for alpha chain variable domain of TCR clone 34942 (TRAV8-3, TRAJ45)
CASSYSGGGADGLTF

SEQ ID NO: 69884 - protein, 15 aa, Homo sapiens
  CDR3 for beta chain variable domain of TCR clone 34942 (TRBV4-1, TRBJ2-5)
CASSQWDLYQETQYF

SEQ ID NO: 69885 - protein, 11 aa, Homo sapiens
  CDR3 for alpha chain variable domain of TCR clone 34943 (TRAV1-2, TRAJ20)
CAVSNDYKLSF

SEQ ID NO: 69886 - protein, 16 aa, Homo sapiens
  CDR3 for beta chain variable domain of TCR clone 34943 (TRBV29-1, TRBJ2-6)
CSIEDITYSGANVLTF

SEQ ID NO: 69887 - protein, 13 aa, Homo sapiens
  CDR3 for alpha chain variable domain of TCR clone 34944 (TRAV27, TRAJ45)
CRSSGGGADALTF

SEQ ID NO: 69888 - protein, 17 aa, Homo sapiens
  CDR3 for beta chain variable domain of TCR clone 34944 (TRBV11-2, TRBJ2-1)
CASSLYPPGVEYNEQFF

SEQ ID NO: 69889 - protein, 11 aa, Homo sapiens
  CDR3 for alpha chain variable domain of TCR clone 34945 (TRAV1-2, TRAJ20)
CAVSNDYKHSF

SEQ ID NO: 69890 - protein, 16 aa, Homo sapiens
  CDR3 for beta chain variable domain of TCR clone 34945 (TRBV29-1, TRBJ2-6)
CSVEDITYSGANVLTF

SEQ ID NO: 69891 - protein, 14 aa, Homo sapiens
  CDR3 for alpha chain variable domain of TCR clone 34946 (TRAV8-3, TRAJ4)
CAVGAAGGYNKLIF

SEQ ID NO: 69892 - protein, 13 aa, Homo sapiens
  CDR3 for beta chain variable domain of TCR clone 34946 (TRBV19, TRBJ1-2)
CASSVPGQDGYTF

SEQ ID NO: 69893 - protein, 14 aa, Homo sapiens
  CDR3 for alpha chain variable domain of TCR clone 34947 (TRAV17, TRAJ22)
CATGPSGSARQLTF

SEQ ID NO: 69894 - protein, 15 aa, Homo sapiens
  CDR3 for beta chain variable domain of TCR clone 34947 (TRBV4-1, TRBJ2-5)
CASSQWDLYQETQYF

SEQ ID NO: 69895 - protein, 13 aa, Homo sapiens
  CDR3 for alpha chain variable domain of TCR clone 34948 (TRAV13-1, TRAJ39)
CAASIWAGNMLTF

SEQ ID NO: 69896 - protein, 15 aa, Homo sapiens
  CDR3 for beta chain variable domain of TCR clone 34948 (TRBV7-9, TRBJ1-1)
CASSLLEQGGTEAFF

SEQ ID NO: 69897 - protein, 15 aa, Homo sapiens
  CDR3 for alpha chain variable domain of TCR clone 34949 (TRAV25, TRAJ52)
CAGRPSGTSYGKLTF

SEQ ID NO: 69898 - protein, 17 aa, Homo sapiens
  CDR3 for beta chain variable domain of TCR clone 34949 (TRBV7-8, TRBJ2-6)
CASSAGTGGAGANVLTF

SEQ ID NO: 69899 - protein, 13 aa, Homo sapiens
  CDR3 for alpha chain variable domain of TCR clone 34950 (TRAV3, TRAJ21)
CAVREPDFNKFYF

SEQ ID NO: 69900 - protein, 14 aa, Homo sapiens
  CDR3 for beta chain variable domain of TCR clone 34950 (TRBV20-1, TRBJ1-1)
CSAQTRIGGTEAFF

SEQ ID NO: 69901 - protein, 18 aa, Homo sapiens
  CDR3 for alpha chain variable domain of TCR clone 34951 (TRAV13-2, TRAJ52)
CVETPLNAGGTSYGKLTF

SEQ ID NO: 69902 - protein, 14 aa, Homo sapiens
  CDR3 for beta chain variable domain of TCR clone 34951 (TRBV7-9, TRBJ2-1)
CASSSMVGFGEQFF

SEQ ID NO: 69903 - protein, 14 aa, Homo sapiens
  CDR3 for alpha chain variable domain of TCR clone 34952 (TRAV17, TRAJ16)
CATADFSDGQKLLF

SEQ ID NO: 69904 - protein, 12 aa, Homo sapiens
  CDR3 for beta chain variable domain of TCR clone 34952 (TRBV24-1, TRBJ1-1)
CATPYPDTEAFF

SEQ ID NO: 69905 - protein, 12 aa, Homo sapiens
  CDR3 for alpha chain variable domain of TCR clone 34953 (TRAV1-2, TRAJ33)
CAALDSNYQLIW

SEQ ID NO: 69906 - protein, 16 aa, Homo sapiens
  CDR3 for beta chain variable domain of TCR clone 34953 (TRBV6-4, TRBJ1-2)
CASSGAVGDPNYGYTF

SEQ ID NO: 69907 - protein, 16 aa, Homo sapiens
  CDR3 for alpha chain variable domain of TCR clone 34954 (TRAV20, TRAJ53)
CAVRRGSGGSNYKLTF

SEQ ID NO: 69908 - protein, 12 aa, Homo sapiens
  CDR3 for beta chain variable domain of TCR clone 34954 (TRBV29-1, TRBJ2-3)
CSVVLGVDTQYF

SEQ ID NO: 69909 - protein, 14 aa, Homo sapiens
  CDR3 for alpha chain variable domain of TCR clone 34955 (TRAV16, TRAJ42)
CALLAGGSQGNLIF

SEQ ID NO: 69910 - protein, 15 aa, Homo sapiens
  CDR3 for beta chain variable domain of TCR clone 34955 (TRBV9, TRBJ1-6)
CASSVAGTGDSPLHF

SEQ ID NO: 69911 - protein, 14 aa, Homo sapiens
  CDR3 for alpha chain variable domain of TCR clone 34956 (TRAV17, TRAJ6)
CATDAPGGSYIPTF

SEQ ID NO: 69912 - protein, 19 aa, Homo sapiens
  CDR3 for beta chain variable domain of TCR clone 34956 (TRBV4-3, TRBJ2-7)
CASSQEFIGWQVTPYEQYF

SEQ ID NO: 69913 - protein, 15 aa, Homo sapiens
  CDR3 for alpha chain variable domain of TCR clone 34957 (TRAV23/DV6, TRAJ33)
CAASNSGGGNYQLIC

SEQ ID NO: 69914 - protein, 14 aa, Homo sapiens
  CDR3 for beta chain variable domain of TCR clone 34957 (TRBV7-2, TRBJ2-7)
CASSLYPGRYEQYF

SEQ ID NO: 69915 - protein, 14 aa, Homo sapiens
  CDR3 for alpha chain variable domain of TCR clone 34958 (TRAV12-2, TRAJ44)
CAVNPAGTASKLTF

SEQ ID NO: 69916 - protein, 16 aa, Homo sapiens
  CDR3 for beta chain variable domain of TCR clone 34958 (TRBV2, TRBJ2-6)
CASSEAGGAGANVLTF

SEQ ID NO: 69917 - protein, 10 aa, Homo sapiens
  CDR3 for alpha chain variable domain of TCR clone 34959 (TRAV21, TRAJ31)
CAVDNARLMF

SEQ ID NO: 69918 - protein, 13 aa, Homo sapiens
  CDR3 for beta chain variable domain of TCR clone 34959 (TRBV4-1, TRBJ1-1)
CASSREMNTEAFF

SEQ ID NO: 69919 - protein, 14 aa, Homo sapiens
  CDR3 for alpha chain variable domain of TCR clone 34960 (TRAV9-2, TRAJ39)
CALYIYNAGNMLTF

SEQ ID NO: 69920 - protein, 16 aa, Homo sapiens
  CDR3 for beta chain variable domain of TCR clone 34960 (TRBV7-3, TRBJ2-2)
CASSLKRGTLSGELFL

SEQ ID NO: 69921 - protein, 23 aa, Homo sapiens
  CDR3 for alpha chain variable domain of TCR clone 34961 (TRAV26-1, TRAJ38)
CIADNAGNNHIQNPDPAVYQLRD

SEQ ID NO: 69922 - protein, 13 aa, Homo sapiens
  CDR3 for beta chain variable domain of TCR clone 34961 (TRBV20-1, TRBJ1-1)
CSARGGVNTEAFF

SEQ ID NO: 69923 - protein, 12 aa, Homo sapiens
  CDR3 for alpha chain variable domain of TCR clone 34962 (TRAV8-4, TRAJ37)
CAKSSNTGKLIF

SEQ ID NO: 69924 - protein, 15 aa, Homo sapiens
  CDR3 for beta chain variable domain of TCR clone 34962 (TRBV7-9, TRBJ2-7)
CASSSAGLAVYEQYF

SEQ ID NO: 69925 - protein, 13 aa, Homo sapiens
  CDR3 for alpha chain variable domain of TCR clone 34963 (TRAV21, TRAJ20)
CAVWVFADYKLSF

SEQ ID NO: 69926 - protein, 16 aa, Homo sapiens
  CDR3 for beta chain variable domain of TCR clone 34963 (TRBV28, TRBJ1-4)
CASSSRTGAANEKLFF

SEQ ID NO: 69927 - protein, 12 aa, Homo sapiens
  CDR3 for alpha chain variable domain of TCR clone 34964 (TRAV13-1, TRAJ27)
CAAHTNAGKSTF

SEQ ID NO: 69928 - protein, 14 aa, Homo sapiens
  CDR3 for beta chain variable domain of TCR clone 34964 (TRBV19, TRBJ2-2)
CASSGQGIAGELFS

SEQ ID NO: 69929 - protein, 17 aa, Homo sapiens
  CDR3 for alpha chain variable domain of TCR clone 34965 (TRAV3, TRAJ6)
CAVRDGPRAGGSYIPTF

SEQ ID NO: 69930 - protein, 14 aa, Homo sapiens
  CDR3 for beta chain variable domain of TCR clone 34965 (TRBV13, TRBJ2-7)
CASSLKGASYEQYF

SEQ ID NO: 69931 - protein, 14 aa, Homo sapiens
  CDR3 for alpha chain variable domain of TCR clone 34966 (TRAV17, TRAJ11)
CATDTSRGYSTLTF

SEQ ID NO: 69932 - protein, 15 aa, Homo sapiens
  CDR3 for beta chain variable domain of TCR clone 34966 (TRBV9, TRBJ1-6)
CASSVAGTGDSPLHF

SEQ ID NO: 69933 - protein, 15 aa, Homo sapiens
  CDR3 for alpha chain variable domain of TCR clone 34967 (TRAV26-1, TRAJ44)
CIVRANTGTSSKLTF

SEQ ID NO: 69934 - protein, 16 aa, Homo sapiens
  CDR3 for beta chain variable domain of TCR clone 34967 (TRBV7-7, TRBJ2-1)
CASSLASGTSYNEQFF

SEQ ID NO: 69935 - protein, 14 aa, Homo sapiens
  CDR3 for alpha chain variable domain of TCR clone 34968 (TRAV3, TRAJ9)
CAVRLNTGGFKPIF

SEQ ID NO: 69936 - protein, 15 aa, Homo sapiens
  CDR3 for beta chain variable domain of TCR clone 34968 (TRBV7-2, TRBJ2-1)
CASSLASGRVNEQFF

SEQ ID NO: 69937 - protein, 14 aa, Homo sapiens
  CDR3 for alpha chain variable domain of TCR clone 34969 (TRAV16, TRAJ57)
CALPTQGGSEKLAF

SEQ ID NO: 69938 - protein, 15 aa, Homo sapiens
  CDR3 for beta chain variable domain of TCR clone 34969 (TRBV28, TRBJ1-3)
CASWGGHLSGNTIYF

SEQ ID NO: 69939 - protein, 16 aa, Homo sapiens
  CDR3 for alpha chain variable domain of TCR clone 34970 (TRAV1-2, TRAJ10)
CAVRGVLTGGGNKLTF

SEQ ID NO: 69940 - protein, 12 aa, Homo sapiens
  CDR3 for beta chain variable domain of TCR clone 34970 (TRBV7-8, TRBJ2-7)
CASSLGDRKQYF

SEQ ID NO: 69941 - protein, 13 aa, Homo sapiens
  CDR3 for alpha chain variable domain of TCR clone 34971 (TRAV3, TRAJ27)
CAVRPLGAGKPTV

SEQ ID NO: 69942 - protein, 13 aa, Homo sapiens
  CDR3 for beta chain variable domain of TCR clone 34971 (TRBV7-9, TRBJ2-3)
CASSPGSTDTQYF

SEQ ID NO: 69943 - protein, 14 aa, Homo sapiens
  CDR3 for alpha chain variable domain of TCR clone 34972 (TRAV12-1, TRAJ23)
CVVIVYNQGGKLIF

SEQ ID NO: 69944 - protein, 15 aa, Homo sapiens
  CDR3 for beta chain variable domain of TCR clone 34972 (TRBV20-1, TRBJ1-5)
CSAKPPGHGPQPQHF

SEQ ID NO: 69945 - protein, 17 aa, Homo sapiens
  CDR3 for alpha chain variable domain of TCR clone 34973 (TRAV3, TRAJ6)
CAVRDGPRAGGSYIPTF

SEQ ID NO: 69946 - protein, 12 aa, Homo sapiens
  CDR3 for beta chain variable domain of TCR clone 34973 (TRBV29-1, TRBJ2-3)
CSVTGGADTQYF

SEQ ID NO: 69947 - protein, 11 aa, Homo sapiens
  CDR3 for alpha chain variable domain of TCR clone 34974 (TRAV2, TRAJ33)
CAVDSNYQLIW

SEQ ID NO: 69948 - protein, 12 aa, Homo sapiens
  CDR3 for beta chain variable domain of TCR clone 34974 (TRBV11-2, TRBJ2-2)
CASSLPTGELFF

SEQ ID NO: 69949 - protein, 15 aa, Homo sapiens
  CDR3 for alpha chain variable domain of TCR clone 34975 (TRAV13-1, )
CAANIQNPDPAVYQL

SEQ ID NO: 69950 - protein, 14 aa, Homo sapiens
  CDR3 for beta chain variable domain of TCR clone 34975 (TRBV19, TRBJ2-7)
CASSIGPNSYEQYF

SEQ ID NO: 69951 - protein, 16 aa, Homo sapiens
  CDR3 for alpha chain variable domain of TCR clone 34976 (TRAV23/DV6, TRAJ3)
CAARAPQQCFQDNLLI

SEQ ID NO: 69952 - protein, 17 aa, Homo sapiens
  CDR3 for beta chain variable domain of TCR clone 34976 (TRBV7-9, TRBJ2-3)
CASSPTVAGDLTDTQYF

SEQ ID NO: 69953 - protein, 11 aa, Homo sapiens
  CDR3 for alpha chain variable domain of TCR clone 34977 (TRAV17, TRAJ39)
CATGAGNMLTF

SEQ ID NO: 69954 - protein, 16 aa, Homo sapiens
  CDR3 for beta chain variable domain of TCR clone 34977 (TRBV5-1, TRBJ2-1)
CASSFDVSGSYNEQFF

SEQ ID NO: 69955 - protein, 18 aa, Homo sapiens
  CDR3 for alpha chain variable domain of TCR clone 34978 (TRAV12-3, TRAJ52)
CAMSVGGAGGTSYGKLTF

SEQ ID NO: 69956 - protein, 16 aa, Homo sapiens
  CDR3 for beta chain variable domain of TCR clone 34978 (TRBV13, TRBJ2-2)
CASSPRTGEHTGELFF

SEQ ID NO: 69957 - protein, 12 aa, Homo sapiens
  CDR3 for alpha chain variable domain of TCR clone 34979 (TRAV26-1, TRAJ43)
CIVRGNNNDIRF

SEQ ID NO: 69958 - protein, 13 aa, Homo sapiens
  CDR3 for beta chain variable domain of TCR clone 34979 (TRBV20-1, TRBJ2-3)
CSAIYPGADTQYF

SEQ ID NO: 69959 - protein, 13 aa, Homo sapiens
  CDR3 for alpha chain variable domain of TCR clone 34980 (TRAV8-3, TRAJ36)
CAVGATGANNLFF

SEQ ID NO: 69960 - protein, 15 aa, Homo sapiens
  CDR3 for beta chain variable domain of TCR clone 34980 (TRBV7-2, TRBJ1-2)
CASSPRAGWSYGHTF

SEQ ID NO: 69961 - protein, 12 aa, Homo sapiens
  CDR3 for alpha chain variable domain of TCR clone 34981 (TRAV4, TRAJ26)
CLVGDYGQNFVF

SEQ ID NO: 69962 - protein, 16 aa, Homo sapiens
  CDR3 for beta chain variable domain of TCR clone 34981 (TRBV7-2, TRBJ1-2)
CASSSNQDRRGRGYTF

SEQ ID NO: 69963 - protein, 14 aa, Homo sapiens
  CDR3 for alpha chain variable domain of TCR clone 34982 (TRAV35, TRAJ33)
CAGSSQDSNYQLIW

SEQ ID NO: 69964 - protein, 23 aa, Homo sapiens
  CDR3 for beta chain variable domain of TCR clone 34982 (TRBV5-1, TRBJ1-4)
CASSLEGRKRKTVFWQWNPALCL

SEQ ID NO: 69965 - protein, 12 aa, Homo sapiens
  CDR3 for alpha chain variable domain of TCR clone 34983 (TRAV12-1, TRAJ40)
CVFYSGTYKDIF

SEQ ID NO: 69966 - protein, 18 aa, Homo sapiens
  CDR3 for beta chain variable domain of TCR clone 34983 (TRBV12-4, TRBJ2-2)
CASSLVAGTRGRTGELFF

SEQ ID NO: 69967 - protein, 12 aa, Homo sapiens
  CDR3 for alpha chain variable domain of TCR clone 34984 (TRAV3, TRAJ20)
CAVRDPDYKLSF

SEQ ID NO: 69968 - protein, 16 aa, Homo sapiens
  CDR3 for beta chain variable domain of TCR clone 34984 (TRBV20-1, TRBJ1-4)
CSAPGQGLLTNEKLFF

SEQ ID NO: 69969 - protein, 11 aa, Homo sapiens
  CDR3 for alpha chain variable domain of TCR clone 34985 (TRAV13-1, TRAJ33)
CAVDSNYQLIW

SEQ ID NO: 69970 - protein, 13 aa, Homo sapiens
  CDR3 for beta chain variable domain of TCR clone 34985 (TRBV7-2, TRBJ2-7)
CASSSPSGSEQYF

SEQ ID NO: 69971 - protein, 16 aa, Homo sapiens
  CDR3 for alpha chain variable domain of TCR clone 34986 (TRAV14/DV4, TRAJ53)
CAMREGGGGSNYKLTF

SEQ ID NO: 69972 - protein, 15 aa, Homo sapiens
  CDR3 for beta chain variable domain of TCR clone 34986 (TRBV7-3, TRBJ2-1)
CASSLSSGSFDEQFF

SEQ ID NO: 69973 - protein, 19 aa, Homo sapiens
  CDR3 for alpha chain variable domain of TCR clone 34987 (TRAV30, TRAJ43)
PAQLLRNPLPIIELNDMRF

SEQ ID NO: 69974 - protein, 14 aa, Homo sapiens
  CDR3 for beta chain variable domain of TCR clone 34987 (TRBV27, TRBJ2-1)
CASRHLGGGKEQFF

SEQ ID NO: 69975 - protein, 14 aa, Homo sapiens
  CDR3 for alpha chain variable domain of TCR clone 34988 (TRAV12-2, TRAJ44)
CAVNPAGTASELTF

SEQ ID NO: 69976 - protein, 13 aa, Homo sapiens
  CDR3 for beta chain variable domain of TCR clone 34988 (TRBV20-1, TRBJ1-6)
CSAPLGVGSPLHF

SEQ ID NO: 69977 - protein, 17 aa, Homo sapiens
  CDR3 for alpha chain variable domain of TCR clone 34989 (TRAV8-6, TRAJ58)
CAVSSWVGETSSSRLTF

SEQ ID NO: 69978 - protein, 14 aa, Homo sapiens
  CDR3 for beta chain variable domain of TCR clone 34989 (TRBV4-2, TRBJ2-1)
CASGLDRAYNEQFF

SEQ ID NO: 69979 - protein, 14 aa, Homo sapiens
  CDR3 for alpha chain variable domain of TCR clone 34990 (TRAV38-1, TRAJ40)
CALRPTSGTYKYIF

SEQ ID NO: 69980 - protein, 14 aa, Homo sapiens
  CDR3 for beta chain variable domain of TCR clone 34990 (TRBV25-1, TRBJ1-1)
CSSTHLGGNTEAFF

SEQ ID NO: 69981 - protein, 17 aa, Homo sapiens
  CDR3 for alpha chain variable domain of TCR clone 34991 (TRAV23/DV6, TRAJ58)
CAARLLRGETNGSRLTF

SEQ ID NO: 69982 - protein, 15 aa, Homo sapiens
  CDR3 for beta chain variable domain of TCR clone 34991 (TRBV9, TRBJ1-6)
CASSVAGTGDSPLHF

SEQ ID NO: 69983 - protein, 13 aa, Homo sapiens
  CDR3 for alpha chain variable domain of TCR clone 34992 (TRAV1-2, TRAJ9)
CSVLNTGGFKTIF

SEQ ID NO: 69984 - protein, 14 aa, Homo sapiens
  CDR3 for beta chain variable domain of TCR clone 34992 (TRBV20-1, TRBJ2-3)
CSARGGTSTDTQYF

SEQ ID NO: 69985 - protein, 20 aa, Homo sapiens
  CDR3 for alpha chain variable domain of TCR clone 34993 (TRAV25, TRAJ21)
TATQTTDVGTYPLSFNKFYF

SEQ ID NO: 69986 - protein, 14 aa, Homo sapiens
  CDR3 for beta chain variable domain of TCR clone 34993 (TRBV19, TRBJ2-1)
CASPTFVLSGEQFF

SEQ ID NO: 69987 - protein, 13 aa, Homo sapiens
  CDR3 for alpha chain variable domain of TCR clone 34994 (TRAV21, TRAJ27)
CAARPGNAGKPTF

SEQ ID NO: 69988 - protein, 14 aa, Homo sapiens
  CDR3 for beta chain variable domain of TCR clone 34994 (TRBV7-6, TRBJ2-3)
CASSSGTVTDTQYF

SEQ ID NO: 69989 - protein, 12 aa, Homo sapiens
  CDR3 for alpha chain variable domain of TCR clone 34995 (TRAV27, TRAJ35)
CAGADFGNLLHC

SEQ ID NO: 69990 - protein, 16 aa, Homo sapiens
  CDR3 for beta chain variable domain of TCR clone 34995 (TRBV6-1, TRBJ2-1)
CASILRQGSSYNEQFF

SEQ ID NO: 69991 - protein, 16 aa, Homo sapiens
  CDR3 for alpha chain variable domain of TCR clone 34996 (TRAV12-2, TRAJ18)
CAVFAGRGSTLGRLYF

SEQ ID NO: 69992 - protein, 17 aa, Homo sapiens
  CDR3 for beta chain variable domain of TCR clone 34996 (TRBV20-1, TRBJ1-5)
CSASLSPGQGGNQPQHF

SEQ ID NO: 69993 - protein, 13 aa, Homo sapiens
  CDR3 for alpha chain variable domain of TCR clone 34997 (TRAV12-2, TRAJ42)
CAVKRGSQGNPIF

SEQ ID NO: 69994 - protein, 16 aa, Homo sapiens
  CDR3 for beta chain variable domain of TCR clone 34997 (TRBV9, TRBJ2-2)
CASSAMGKGNTGELFF

SEQ ID NO: 69995 - protein, 14 aa, Homo sapiens
  CDR3 for alpha chain variable domain of TCR clone 34998 (TRAV35, TRAJ50)
CAGHRKTSYDKVIF

SEQ ID NO: 69996 - protein, 13 aa, Homo sapiens
  CDR3 for beta chain variable domain of TCR clone 34998 (TRBV7-7, TRBJ2-3)
CACSLSRADTQYF

SEQ ID NO: 69997 - protein, 17 aa, Homo sapiens
  CDR3 for alpha chain variable domain of TCR clone 34999 (TRAV3, TRAJ42)
CAVRDRDYGGSQGNLIF

SEQ ID NO: 69998 - protein, 12 aa, Homo sapiens
  CDR3 for beta chain variable domain of TCR clone 34999 (TRBV11-2, TRBJ2-2)
CASSLPTGELFF

SEQ ID NO: 69999 - protein, 11 aa, Homo sapiens
  CDR3 for alpha chain variable domain of TCR clone 35000 (TRAV21, TRAJ11)
CAVNGYSTLTF

SEQ ID NO: 70000 - protein, 16 aa, Homo sapiens
  CDR3 for beta chain variable domain of TCR clone 35000 (TRBV24-1, TRBJ2-3)
CATSDPGTGATDTQYF

SEQ ID NO: 70001 - protein, 13 aa, Homo sapiens
  CDR3 for alpha chain variable domain of TCR clone 35001 (TRAV27, TRAJ6)
CAGGTRGSYIPTF

SEQ ID NO: 70002 - protein, 15 aa, Homo sapiens
  CDR3 for beta chain variable domain of TCR clone 35001 (TRBV9, TRBJ1-6)
CASSVAGTGDSPLHF

SEQ ID NO: 70003 - protein, 16 aa, Homo sapiens
  CDR3 for alpha chain variable domain of TCR clone 35002 (TRAV23/DV6, TRAJ9)
CAASIRGNTGGFKTIF

SEQ ID NO: 70004 - protein, 14 aa, Homo sapiens
  CDR3 for beta chain variable domain of TCR clone 35002 (TRBV9, TRBJ2-7)
CASSVGVGSYEQYF

SEQ ID NO: 70005 - protein, 15 aa, Homo sapiens
  CDR3 for alpha chain variable domain of TCR clone 35003 (TRAV13-1, TRAJ52)
CAATSPRTSYGKLTF

SEQ ID NO: 70006 - protein, 16 aa, Homo sapiens
  CDR3 for beta chain variable domain of TCR clone 35003 (TRBV27, TRBJ2-2)
CASSFRGLVRTGELFF

SEQ ID NO: 70007 - protein, 12 aa, Homo sapiens
  CDR3 for alpha chain variable domain of TCR clone 35004 (TRAV38-2/DV8, TRAJ47)
CVLMEYGSKLVF

SEQ ID NO: 70008 - protein, 14 aa, Homo sapiens
  CDR3 for beta chain variable domain of TCR clone 35004 (TRBV20-1, TRBJ1-5)
CSATDRGSNQPQHF

SEQ ID NO: 70009 - protein, 14 aa, Homo sapiens
  CDR3 for alpha chain variable domain of TCR clone 35005 (TRAV1-2, TRAJ16)
CAVRSASDGQKLLF

SEQ ID NO: 70010 - protein, 17 aa, Homo sapiens
  CDR3 for beta chain variable domain of TCR clone 35005 (TRBV7-3, TRBJ2-3)
CANSLMKRMRGADTQYF

SEQ ID NO: 70011 - protein, 14 aa, Homo sapiens
  CDR3 for alpha chain variable domain of TCR clone 35006 (TRAV4, TRAJ17)
CLVGDMAAGNKLTF

SEQ ID NO: 70012 - protein, 13 aa, Homo sapiens
  CDR3 for beta chain variable domain of TCR clone 35006 (TRBV18, TRBJ2-7)
CASQAGGGYEQYF

SEQ ID NO: 70013 - protein, 12 aa, Homo sapiens
  CDR3 for alpha chain variable domain of TCR clone 35007 (TRAV1-1, TRAJ39)
CAVPVVGNMLTF

SEQ ID NO: 70014 - protein, 15 aa, Homo sapiens
  CDR3 for beta chain variable domain of TCR clone 35007 (TRBV19, TRBJ1-6)
CASSTRGAVGSPLHF

SEQ ID NO: 70015 - protein, 13 aa, Homo sapiens
  CDR3 for alpha chain variable domain of TCR clone 35008 (TRAV20, TRAJ37)
CAGCSSNTGKLIF

SEQ ID NO: 70016 - protein, 11 aa, Homo sapiens
  CDR3 for beta chain variable domain of TCR clone 35008 (TRBV12-4, TRBJ2-3)
CASTATDMQYF

SEQ ID NO: 70017 - protein, 11 aa, Homo sapiens
  CDR3 for alpha chain variable domain of TCR clone 35009 (TRAV12-3, TRAJ27)
CAMANAGKSTF

SEQ ID NO: 70018 - protein, 13 aa, Homo sapiens
  CDR3 for beta chain variable domain of TCR clone 35009 (TRBV5-5, TRBJ1-2)
CASSFWRGEDYTF

SEQ ID NO: 70019 - protein, 12 aa, Homo sapiens
  CDR3 for alpha chain variable domain of TCR clone 35010 (TRAV2, TRAJ36)
CAELTGANNLFF

SEQ ID NO: 70020 - protein, 18 aa, Homo sapiens
  CDR3 for beta chain variable domain of TCR clone 35010 (TRBV19, TRBJ1-1)
CASGIDGGDYTGNTEAFF

SEQ ID NO: 70021 - protein, 14 aa, Homo sapiens
  CDR3 for alpha chain variable domain of TCR clone 35011 (TRAV35, TRAJ22)
CAGLRPGSARQLPF

SEQ ID NO: 70022 - protein, 15 aa, Homo sapiens
  CDR3 for beta chain variable domain of TCR clone 35011 (TRBV12-4, TRBJ2-5)
CASSPPTGLQETQYF

SEQ ID NO: 70023 - protein, 15 aa, Homo sapiens
  CDR3 for alpha chain variable domain of TCR clone 35012 (TRAV27, TRAJ38)
CAARRNAGNNRKLIW

SEQ ID NO: 70024 - protein, 14 aa, Homo sapiens
  CDR3 for beta chain variable domain of TCR clone 35012 (TRBV20-1, TRBJ2-1)
CSAQIGGSANEQFF

SEQ ID NO: 70025 - protein, 11 aa, Homo sapiens
  CDR3 for alpha chain variable domain of TCR clone 35013 (TRAV12-3, TRAJ27)
CAMANAGKSTF

SEQ ID NO: 70026 - protein, 13 aa, Homo sapiens
  CDR3 for beta chain variable domain of TCR clone 35013 (TRBV7-9, TRBJ1-2)
CASSLKQNYGYTF

SEQ ID NO: 70027 - protein, 14 aa, Homo sapiens
  CDR3 for alpha chain variable domain of TCR clone 35014 (TRAV12-2, TRAJ40)
CAVKIPSGTYKYIF

SEQ ID NO: 70028 - protein, 14 aa, Homo sapiens
  CDR3 for beta chain variable domain of TCR clone 35014 (TRBV7-3, TRBJ2-1)
CASSLSGSYNEQFF

SEQ ID NO: 70029 - protein, 14 aa, Homo sapiens
  CDR3 for alpha chain variable domain of TCR clone 35015 (TRAV12-2, TRAJ13)
CAVRKTGGYQKVTF

SEQ ID NO: 70030 - protein, 13 aa, Homo sapiens
  CDR3 for beta chain variable domain of TCR clone 35015 (TRBV20-1, TRBJ1-1)
CSARGGGNTEAFF

SEQ ID NO: 70031 - protein, 13 aa, Homo sapiens
  CDR3 for alpha chain variable domain of TCR clone 35016 (TRAV12-3, TRAJ13)
CAMTSGGYQKVTF

SEQ ID NO: 70032 - protein, 13 aa, Homo sapiens
  CDR3 for beta chain variable domain of TCR clone 35016 (TRBV7-9, TRBJ1-2)
CASSLKQNYGHTF

SEQ ID NO: 70033 - protein, 14 aa, Homo sapiens
  CDR3 for alpha chain variable domain of TCR clone 35017 (TRAV13-1, TRAJ53)
CAANSGGINYKLTF

SEQ ID NO: 70034 - protein, 12 aa, Homo sapiens
  CDR3 for beta chain variable domain of TCR clone 35017 (TRBV5-1, TRBJ2-7)
CASRGGGLEQYF

SEQ ID NO: 70035 - protein, 17 aa, Homo sapiens
  CDR3 for alpha chain variable domain of TCR clone 35018 (TRAV36/DV7, TRAJ52)
CAVAQRAGGTSYGKLTF

SEQ ID NO: 70036 - protein, 16 aa, Homo sapiens
  CDR3 for beta chain variable domain of TCR clone 35018 (TRBV12-5, TRBJ2-5)
CASGPRTSGNQETQYF

SEQ ID NO: 70037 - protein, 17 aa, Homo sapiens
  CDR3 for alpha chain variable domain of TCR clone 35019 (TRAV3, TRAJ6)
CAVRDGPRAGGSYIPTF

SEQ ID NO: 70038 - protein, 15 aa, Homo sapiens
  CDR3 for beta chain variable domain of TCR clone 35019 (TRBV9, TRBJ1-6)
CASSVSGTGDSPLHF

SEQ ID NO: 70039 - protein, 13 aa, Homo sapiens
  CDR3 for alpha chain variable domain of TCR clone 35020 (TRAV3, TRAJ21)
CAVGNLTNFTLDL

SEQ ID NO: 70040 - protein, 16 aa, Homo sapiens
  CDR3 for beta chain variable domain of TCR clone 35020 (TRBV19, TRBJ2-1)
CASSKAGPSSYNEQFF

SEQ ID NO: 70041 - protein, 11 aa, Homo sapiens
  CDR3 for alpha chain variable domain of TCR clone 35021 (TRAV1-2, TRAJ20)
CAVANDYQLSF

SEQ ID NO: 70042 - protein, 18 aa, Homo sapiens
  CDR3 for beta chain variable domain of TCR clone 35021 (TRBV20-1, TRBJ2-6)
CSAETTPTHGSGANVLTF

SEQ ID NO: 70043 - protein, 12 aa, Homo sapiens
  CDR3 for alpha chain variable domain of TCR clone 35022 (TRAV12-1, TRAJ40)
CVVYSGTYKYIF

SEQ ID NO: 70044 - protein, 18 aa, Homo sapiens
  CDR3 for beta chain variable domain of TCR clone 35022 (TRBV11-2, TRBJ2-3)
CASSLGGASRGAANTQYF

SEQ ID NO: 70045 - protein, 15 aa, Homo sapiens
  CDR3 for alpha chain variable domain of TCR clone 35023 (TRAV26-1, TRAJ29)
CIVRVEGSGNTPLVF

SEQ ID NO: 70046 - protein, 15 aa, Homo sapiens
  CDR3 for beta chain variable domain of TCR clone 35023 (TRBV5-1, TRBJ2-1)
CASSPPRAPYNEQFF

SEQ ID NO: 70047 - protein, 16 aa, Homo sapiens
  CDR3 for alpha chain variable domain of TCR clone 35024 (TRAV20, TRAJ22)
CAVQASSSGSARQLTF

SEQ ID NO: 70048 - protein, 15 aa, Homo sapiens
  CDR3 for beta chain variable domain of TCR clone 35024 (TRBV6-3, TRBJ2-7)
CASSSPGTVFYEQYF

SEQ ID NO: 70049 - protein, 10 aa, Homo sapiens
  CDR3 for alpha chain variable domain of TCR clone 35025 (TRAV1-2, TRAJ18)
CAVRGEAQPW

SEQ ID NO: 70050 - protein, 19 aa, Homo sapiens
  CDR3 for beta chain variable domain of TCR clone 35025 (TRBV6-3, TRBJ1-2)
CASSYSRGRTGPPNYGYTF

SEQ ID NO: 70051 - protein, 14 aa, Homo sapiens
  CDR3 for alpha chain variable domain of TCR clone 35026 (TRAV35, TRAJ42)
CAGRYGGSQGNLIF

SEQ ID NO: 70052 - protein, 15 aa, Homo sapiens
  CDR3 for beta chain variable domain of TCR clone 35026 (TRBV7-9, TRBJ2-1)
CASSLGWGRASEQFF

SEQ ID NO: 70053 - protein, 18 aa, Homo sapiens
  CDR3 for alpha chain variable domain of TCR clone 35027 (TRAV26-1, TRAJ52)
CIVRVEGAGGTSYGKLTF

SEQ ID NO: 70054 - protein, 13 aa, Homo sapiens
  CDR3 for beta chain variable domain of TCR clone 35027 (TRBV7-3, TRBJ1-2)
RASSLKRGYGYTF

SEQ ID NO: 70055 - protein, 13 aa, Homo sapiens
  CDR3 for alpha chain variable domain of TCR clone 35028 (TRAV2, TRAJ40)
GAVVTSGTYKYIF

SEQ ID NO: 70056 - protein, 14 aa, Homo sapiens
  CDR3 for beta chain variable domain of TCR clone 35028 (TRBV19, TRBJ2-1)
CASPTFVLSGEQFF

SEQ ID NO: 70057 - protein, 16 aa, Homo sapiens
  CDR3 for alpha chain variable domain of TCR clone 35029 (TRAV12-3, TRAJ53)
CAMSVGSGGSNYKLTF

SEQ ID NO: 70058 - protein, 11 aa, Homo sapiens
  CDR3 for beta chain variable domain of TCR clone 35029 (TRBV29-1, TRBJ2-5)
CSVASGGTQYF

SEQ ID NO: 70059 - protein, 13 aa, Homo sapiens
  CDR3 for alpha chain variable domain of TCR clone 35030 (TRAV17, TRAJ34)
CATDLYNTDKPIF

SEQ ID NO: 70060 - protein, 15 aa, Homo sapiens
  CDR3 for beta chain variable domain of TCR clone 35030 (TRBV20-1, TRBJ2-3)
CSATGTSGFTDTQYF

SEQ ID NO: 70061 - protein, 13 aa, Homo sapiens
  CDR3 for alpha chain variable domain of TCR clone 35031 (TRAV3, TRAJ27)
CAVRPLGAGKSTF

SEQ ID NO: 70062 - protein, 14 aa, Homo sapiens
  CDR3 for beta chain variable domain of TCR clone 35031 (TRBV7-2, TRBJ2-7)
CASSPKTSFYEQYF

SEQ ID NO: 70063 - protein, 14 aa, Homo sapiens
  CDR3 for alpha chain variable domain of TCR clone 35032 (TRAV3, TRAJ9)
CAVRLNTGGFKTIF

SEQ ID NO: 70064 - protein, 13 aa, Homo sapiens
  CDR3 for beta chain variable domain of TCR clone 35032 (TRBV3-1, TRBJ2-2)
CASLARGSGELFF

SEQ ID NO: 70065 - protein, 13 aa, Homo sapiens
  CDR3 for alpha chain variable domain of TCR clone 35033 (TRAV27, TRAJ54)
CAGAGQGAQKLVF

SEQ ID NO: 70066 - protein, 15 aa, Homo sapiens
  CDR3 for beta chain variable domain of TCR clone 35033 (TRBV18, TRBJ2-6)
CASSLSYAGANVLTF

SEQ ID NO: 70067 - protein, 23 aa, Homo sapiens
  CDR3 for alpha chain variable domain of TCR clone 35034 (TRAV8-4, )
CAVTPGGAGNNHIQNPDPAVYQL

SEQ ID NO: 70068 - protein, 12 aa, Homo sapiens
  CDR3 for beta chain variable domain of TCR clone 35034 (TRBV6-3, TRBJ2-1)
CASSGSYNEQFF

SEQ ID NO: 70069 - protein, 15 aa, Homo sapiens
  CDR3 for alpha chain variable domain of TCR clone 35035 (TRAV8-3, TRAJ41)
CAVGSNSNSGYALNF

SEQ ID NO: 70070 - protein, 17 aa, Homo sapiens
  CDR3 for beta chain variable domain of TCR clone 35035 (TRBV25-1, TRBJ2-1)
CASSAYGQGRGVYEQFL

SEQ ID NO: 70071 - protein, 18 aa, Homo sapiens
  CDR3 for alpha chain variable domain of TCR clone 35036 (TRAV13-1, TRAJ52)
CVAKNPNAGGTSYGKLTF

SEQ ID NO: 70072 - protein, 15 aa, Homo sapiens
  CDR3 for beta chain variable domain of TCR clone 35036 (TRBV6-1, TRBJ2-3)
CASSERGGITDTQYF

SEQ ID NO: 70073 - protein, 14 aa, Homo sapiens
  CDR3 for alpha chain variable domain of TCR clone 35037 (TRAV12-1, TRAJ17)
CVVHYKAAGNKLTF

SEQ ID NO: 70074 - protein, 17 aa, Homo sapiens
  CDR3 for beta chain variable domain of TCR clone 35037 (TRBV20-1, TRBJ2-1)
CSASSSGLAGSYNEQFF

SEQ ID NO: 70075 - protein, 16 aa, Homo sapiens
  CDR3 for alpha chain variable domain of TCR clone 35038 (TRAV26-1, TRAJ43)
CCVLLHRQTSGDDMRF

SEQ ID NO: 70076 - protein, 16 aa, Homo sapiens
  CDR3 for beta chain variable domain of TCR clone 35038 (TRBV3-1, TRBJ2-1)
CASSQGGRRSFDEQFF

SEQ ID NO: 70077 - protein, 13 aa, Homo sapiens
  CDR3 for alpha chain variable domain of TCR clone 35039 (TRAV12-2, TRAJ52)
CAVSGTSYGKLTF

SEQ ID NO: 70078 - protein, 17 aa, Homo sapiens
  CDR3 for beta chain variable domain of TCR clone 35039 (TRBV11-2, TRBJ2-1)
CASSLYPPGVEYNEQFS

SEQ ID NO: 70079 - protein, 11 aa, Homo sapiens
  CDR3 for alpha chain variable domain of TCR clone 35040 (TRAV12-1, TRAJ34)
CVVNKGRELIF

SEQ ID NO: 70080 - protein, 15 aa, Homo sapiens
  CDR3 for beta chain variable domain of TCR clone 35040 (TRBV6-3, TRBJ2-7)
CASSSPGTVFYEQYF

SEQ ID NO: 70081 - protein, 16 aa, Homo sapiens
  CDR3 for alpha chain variable domain of TCR clone 35041 (TRAV12-2, TRAJ32)
CAVNLGQGGATNKLIF

SEQ ID NO: 70082 - protein, 15 aa, Homo sapiens
  CDR3 for beta chain variable domain of TCR clone 35041 (TRBV20-1, TRBJ2-7)
CSARGPLAGGGEQYF

SEQ ID NO: 70083 - protein, 11 aa, Homo sapiens
  CDR3 for alpha chain variable domain of TCR clone 35042 (TRAV27, TRAJ57)
SAQGGSEKLVF

SEQ ID NO: 70084 - protein, 11 aa, Homo sapiens
  CDR3 for beta chain variable domain of TCR clone 35042 (TRBV11-2, TRBJ1-1)
CASSINTEAFF

SEQ ID NO: 70085 - protein, 15 aa, Homo sapiens
  CDR3 for alpha chain variable domain of TCR clone 35043 (TRAV26-1, TRAJ37)
CIVKTGSSNTGKLIF

SEQ ID NO: 70086 - protein, 12 aa, Homo sapiens
  CDR3 for beta chain variable domain of TCR clone 35043 (TRBV7-8, TRBJ2-7)
CASSLGDSEQYF

SEQ ID NO: 70087 - protein, 12 aa, Homo sapiens
  CDR3 for alpha chain variable domain of TCR clone 35044 (TRAV8-3, TRAJ26)
CAGDNYGQNFVF

SEQ ID NO: 70088 - protein, 15 aa, Homo sapiens
  CDR3 for beta chain variable domain of TCR clone 35044 (TRBV9, TRBJ2-1)
CASGLAGSSYNEQFF

SEQ ID NO: 70089 - protein, 16 aa, Homo sapiens
  CDR3 for alpha chain variable domain of TCR clone 35045 (TRAV21, TRAJ37)
CAVRTACSSNTGKLIF

SEQ ID NO: 70090 - protein, 13 aa, Homo sapiens
  CDR3 for beta chain variable domain of TCR clone 35045 (TRBV7-9, TRBJ2-5)
CASLPSGRETQYF

SEQ ID NO: 70091 - protein, 13 aa, Homo sapiens
  CDR3 for alpha chain variable domain of TCR clone 35046 (TRAV29/DV5, TRAJ31)
CAASRNNNARLTF

SEQ ID NO: 70092 - protein, 12 aa, Homo sapiens
  CDR3 for beta chain variable domain of TCR clone 35046 (TRBV14, TRBJ2-7)
CASSSLKGEQYF

SEQ ID NO: 70093 - protein, 14 aa, Homo sapiens
  CDR3 for alpha chain variable domain of TCR clone 35047 (TRAV1-2, TRAJ16)
CAVNRFSDGQKLLV

SEQ ID NO: 70094 - protein, 15 aa, Homo sapiens
  CDR3 for beta chain variable domain of TCR clone 35047 (TRBV7-9, TRBJ1-6)
CASSSPGRGNSPLHF

SEQ ID NO: 70095 - protein, 15 aa, Homo sapiens
  CDR3 for alpha chain variable domain of TCR clone 35048 (TRAV17, TRAJ4)
CATGTWYGGYNKLIF

SEQ ID NO: 70096 - protein, 13 aa, Homo sapiens
  CDR3 for beta chain variable domain of TCR clone 35048 (TRBV6-6, TRBJ2-7)
CASSPKHLAEQYF

SEQ ID NO: 70097 - protein, 23 aa, Homo sapiens
  CDR3 for alpha chain variable domain of TCR clone 35049 (TRAV8-3, TRAJ6)
CAVGGEEATYLHLEEEPALLFIL

SEQ ID NO: 70098 - protein, 14 aa, Homo sapiens
  CDR3 for beta chain variable domain of TCR clone 35049 (TRBV5-1, TRBJ2-7)
CASSRGESLYEQYF

SEQ ID NO: 70099 - protein, 15 aa, Homo sapiens
  CDR3 for alpha chain variable domain of TCR clone 35050 (TRAV25, TRAJ52)
CAGRSGGTSYGKLTF

SEQ ID NO: 70100 - protein, 17 aa, Homo sapiens
  CDR3 for beta chain variable domain of TCR clone 35050 (TRBV7-8, TRBJ2-6)
CASSAGTGGAGANVLTF

SEQ ID NO: 70101 - protein, 14 aa, Homo sapiens
  CDR3 for alpha chain variable domain of TCR clone 35051 (TRAV1-2, TRAJ8)
CAVREDTGFQKLVF

SEQ ID NO: 70102 - protein, 12 aa, Homo sapiens
  CDR3 for beta chain variable domain of TCR clone 35051 (TRBV11-2, TRBJ2-5)
CASSLVGETQYF

SEQ ID NO: 70103 - protein, 11 aa, Homo sapiens
  CDR3 for alpha chain variable domain of TCR clone 35052 (TRAV21, TRAJ34)
CAHYNTDKLIF

SEQ ID NO: 70104 - protein, 13 aa, Homo sapiens
  CDR3 for beta chain variable domain of TCR clone 35052 (TRBV7-6, TRBJ1-2)
CASSLVADYGYTL

SEQ ID NO: 70105 - protein, 14 aa, Homo sapiens
  CDR3 for alpha chain variable domain of TCR clone 35053 (TRAV13-1, TRAJ44)
CAAKATGTASKLTF

SEQ ID NO: 70106 - protein, 17 aa, Homo sapiens
  CDR3 for beta chain variable domain of TCR clone 35053 (TRBV28, TRBJ2-5)
CASSRQGGLAGAETQYF

SEQ ID NO: 70107 - protein, 21 aa, Homo sapiens
  CDR3 for alpha chain variable domain of TCR clone 35054 (TRAV12-2, TRAJ53)
PVIQPPTSVPPILSSNYKLTF

SEQ ID NO: 70108 - protein, 13 aa, Homo sapiens
  CDR3 for beta chain variable domain of TCR clone 35054 (TRBV7-7, TRBJ2-3)
CASSLSRADTQYF

SEQ ID NO: 70109 - protein, 17 aa, Homo sapiens
  CDR3 for alpha chain variable domain of TCR clone 35055 (TRAV8-6, TRAJ8)
CAVKEGIENKGFQKLVF

SEQ ID NO: 70110 - protein, 12 aa, Homo sapiens
  CDR3 for beta chain variable domain of TCR clone 35055 (TRBV19, TRBJ1-4)
CASKDWPGGLFF

SEQ ID NO: 70111 - protein, 11 aa, Homo sapiens
  CDR3 for alpha chain variable domain of TCR clone 35056 (TRAV4, TRAJ31)
CLVGLNARLMF

SEQ ID NO: 70112 - protein, 16 aa, Homo sapiens
  CDR3 for beta chain variable domain of TCR clone 35056 (TRBV15, TRBJ2-6)
CATSVNGGLLANVLTF

SEQ ID NO: 70113 - protein, 12 aa, Homo sapiens
  CDR3 for alpha chain variable domain of TCR clone 35057 (TRAV8-3, TRAJ40)
CAVTSGTYKYTF

SEQ ID NO: 70114 - protein, 14 aa, Homo sapiens
  CDR3 for beta chain variable domain of TCR clone 35057 (TRBV12-4, TRBJ2-3)
CASSGQGSTDTQYF

SEQ ID NO: 70115 - protein, 12 aa, Homo sapiens
  CDR3 for alpha chain variable domain of TCR clone 35058 (TRAV12-3, TRAJ17)
CAMTLTGNKLTF

SEQ ID NO: 70116 - protein, 15 aa, Homo sapiens
  CDR3 for beta chain variable domain of TCR clone 35058 (TRBV20-1, TRBJ2-7)
CSARDWVPGMDEQYF

SEQ ID NO: 70117 - protein, 15 aa, Homo sapiens
  CDR3 for alpha chain variable domain of TCR clone 35059 (TRAV9-2, TRAJ49)
CALSPPDHTGNQLYF

SEQ ID NO: 70118 - protein, 14 aa, Homo sapiens
  CDR3 for beta chain variable domain of TCR clone 35059 (TRBV12-4, TRBJ1-1)
CASSLGTGGTEAFF

SEQ ID NO: 70119 - protein, 15 aa, Homo sapiens
  CDR3 for alpha chain variable domain of TCR clone 35060 (TRAV3, TRAJ9)
CAVRDINTGGFKTIF

SEQ ID NO: 70120 - protein, 13 aa, Homo sapiens
  CDR3 for beta chain variable domain of TCR clone 35060 (TRBV19, TRBJ2-7)
RASSIPSVREQYF

SEQ ID NO: 70121 - protein, 17 aa, Homo sapiens
  CDR3 for alpha chain variable domain of TCR clone 35061 (TRAV3, TRAJ42)
CAVRDRDYGGSQGNLIF

SEQ ID NO: 70122 - protein, 16 aa, Homo sapiens
  CDR3 for beta chain variable domain of TCR clone 35061 (TRBV13, TRBJ2-2)
CASSPRTGEHTGELFF

SEQ ID NO: 70123 - protein, 19 aa, Homo sapiens
  CDR3 for alpha chain variable domain of TCR clone 35062 (TRAV26-1, TRAJ52)
CIVRAHRNAGGTSYGKLTF

SEQ ID NO: 70124 - protein, 13 aa, Homo sapiens
  CDR3 for beta chain variable domain of TCR clone 35062 (TRBV7-9, TRBJ1-2)
CASSLKQNYGYTF

SEQ ID NO: 70125 - protein, 15 aa, Homo sapiens
  CDR3 for alpha chain variable domain of TCR clone 35063 (TRAV17, TRAJ57)
CSTGPSQGGSEKLVF

SEQ ID NO: 70126 - protein, 14 aa, Homo sapiens
  CDR3 for beta chain variable domain of TCR clone 35063 (TRBV12-5, TRBJ2-5)
CASGSRTHQETQYF

SEQ ID NO: 70127 - protein, 16 aa, Homo sapiens
  CDR3 for alpha chain variable domain of TCR clone 35064 (TRAV4, TRAJ22)
CLVGALYSGSARQLTF

SEQ ID NO: 70128 - protein, 16 aa, Homo sapiens
  CDR3 for beta chain variable domain of TCR clone 35064 (TRBV7-9, TRBJ2-1)
CASSDVAGGSYNEQFF

SEQ ID NO: 70129 - protein, 15 aa, Homo sapiens
  CDR3 for alpha chain variable domain of TCR clone 35065 (TRAV3, TRAJ22)
CAVRDRGGSARQLTF

SEQ ID NO: 70130 - protein, 17 aa, Homo sapiens
  CDR3 for beta chain variable domain of TCR clone 35065 (TRBV13, TRBJ2-3)
CASSLSRVAGGRNTQYS

SEQ ID NO: 70131 - protein, 13 aa, Homo sapiens
  CDR3 for alpha chain variable domain of TCR clone 35066 (TRAV12-3, TRAJ33)
CAMSVNSNYQLIW

SEQ ID NO: 70132 - protein, 13 aa, Homo sapiens
  CDR3 for beta chain variable domain of TCR clone 35066 (TRBV7-2, TRBJ2-2)
CDSSLAVTGELFF

SEQ ID NO: 70133 - protein, 14 aa, Homo sapiens
  CDR3 for alpha chain variable domain of TCR clone 35067 (TRAV1-1, TRAJ27)
CAVIYNTNASKSTF

SEQ ID NO: 70134 - protein, 15 aa, Homo sapiens
  CDR3 for beta chain variable domain of TCR clone 35067 (TRBV7-2, TRBJ2-1)
CASSSGLAGGNEQFF

SEQ ID NO: 70135 - protein, 15 aa, Homo sapiens
  CDR3 for alpha chain variable domain of TCR clone 35068 (TRAV2, TRAJ15)
CAVEDRGQAGTALIF

SEQ ID NO: 70136 - protein, 14 aa, Homo sapiens
  CDR3 for beta chain variable domain of TCR clone 35068 (TRBV19, TRBJ2-1)
CASPTFVLSGEQFF

SEQ ID NO: 70137 - protein, 12 aa, Homo sapiens
  CDR3 for alpha chain variable domain of TCR clone 35069 (TRAV12-2, TRAJ43)
CAVNVNNSDMRF

SEQ ID NO: 70138 - protein, 14 aa, Homo sapiens
  CDR3 for beta chain variable domain of TCR clone 35069 (TRBV12-5, TRBJ2-5)
CASGSRTHQETQYF

SEQ ID NO: 70139 - protein, 14 aa, Homo sapiens
  CDR3 for alpha chain variable domain of TCR clone 35070 (TRAV13-2, TRAJ43)
CAGIPTYNNNDMRF

SEQ ID NO: 70140 - protein, 15 aa, Homo sapiens
  CDR3 for beta chain variable domain of TCR clone 35070 (TRBV7-9, TRBJ2-2)
CASGPLDTFPGELFF

SEQ ID NO: 70141 - protein, 15 aa, Homo sapiens
  CDR3 for alpha chain variable domain of TCR clone 35071 (TRAV3, TRAJ37)
CAVIRSSSNTGKLIF

SEQ ID NO: 70142 - protein, 15 aa, Homo sapiens
  CDR3 for beta chain variable domain of TCR clone 35071 (TRBV7-2, TRBJ1-2)
CASSLVSGGDYGYTF

SEQ ID NO: 70143 - protein, 14 aa, Homo sapiens
  CDR3 for alpha chain variable domain of TCR clone 35072 (TRAV35, TRAJ42)
CAGPKGGSQGNLIF

SEQ ID NO: 70144 - protein, 15 aa, Homo sapiens
  CDR3 for beta chain variable domain of TCR clone 35072 (TRBV7-3, TRBJ2-1)
CASSPTGGGEVEQFF

SEQ ID NO: 70145 - protein, 13 aa, Homo sapiens
  CDR3 for alpha chain variable domain of TCR clone 35073 (TRAV38-1, TRAJ42)
CARWGGSQGNLIF

SEQ ID NO: 70146 - protein, 10 aa, Homo sapiens
  CDR3 for beta chain variable domain of TCR clone 35073 (TRBV2, TRBJ2-5)
CASSAATQYL

SEQ ID NO: 70147 - protein, 13 aa, Homo sapiens
  CDR3 for alpha chain variable domain of TCR clone 35074 (TRAV35, TRAJ21)
CAGQLSNFNKFYF

SEQ ID NO: 70148 - protein, 11 aa, Homo sapiens
  CDR3 for beta chain variable domain of TCR clone 35074 (TRBV7-6, TRBJ2-5)
YASSSQETQYF

SEQ ID NO: 70149 - protein, 16 aa, Homo sapiens
  CDR3 for alpha chain variable domain of TCR clone 35075 (TRAV4, TRAJ5)
CLVGPDHGHGQEGTYF

SEQ ID NO: 70150 - protein, 17 aa, Homo sapiens
  CDR3 for beta chain variable domain of TCR clone 35075 (TRBV11-2, TRBJ2-1)
CASSLYPPGVEYNEQFF

SEQ ID NO: 70151 - protein, 14 aa, Homo sapiens
  CDR3 for alpha chain variable domain of TCR clone 35076 (TRAV12-1, TRAJ17)
CVVNYKAAGNKLTF

SEQ ID NO: 70152 - protein, 13 aa, Homo sapiens
  CDR3 for beta chain variable domain of TCR clone 35076 (TRBV19, TRBJ1-2)
CASSVPGQDGYTF

SEQ ID NO: 70153 - protein, 22 aa, Homo sapiens
  CDR3 for alpha chain variable domain of TCR clone 35077 (TRAV8-3, TRAJ32)
CAVEVVLQTSSSLELALCLLSS

SEQ ID NO: 70154 - protein, 15 aa, Homo sapiens
  CDR3 for beta chain variable domain of TCR clone 35077 (TRBV7-8, TRBJ2-1)
CASSSRTSREDEQFF

SEQ ID NO: 70155 - protein, 23 aa, Homo sapiens
  CDR3 for alpha chain variable domain of TCR clone 35078 (TRAV26-1, )
CIADNADNNHIQNPDPAVYQLRD

SEQ ID NO: 70156 - protein, 13 aa, Homo sapiens
  CDR3 for beta chain variable domain of TCR clone 35078 (TRBV20-1, TRBJ1-1)
CSARGGGNTEAFF

SEQ ID NO: 70157 - protein, 14 aa, Homo sapiens
  CDR3 for alpha chain variable domain of TCR clone 35079 (TRAV12-2, TRAJ40)
CAVKIASGTYKYIF

SEQ ID NO: 70158 - protein, 14 aa, Homo sapiens
  CDR3 for beta chain variable domain of TCR clone 35079 (TRBV20-1, TRBJ1-1)
CSAQTRIGGTEAFF

SEQ ID NO: 70159 - protein, 16 aa, Homo sapiens
  CDR3 for alpha chain variable domain of TCR clone 35080 (TRAV26-2, TRAJ22)
CILRDGASGSARQLTF

SEQ ID NO: 70160 - protein, 15 aa, Homo sapiens
  CDR3 for beta chain variable domain of TCR clone 35080 (TRBV9, TRBJ1-1)
CASSVALGQTYEAFF

SEQ ID NO: 70161 - protein, 13 aa, Homo sapiens
  CDR3 for alpha chain variable domain of TCR clone 35081 (TRAV13-1, TRAJ43)
CAASLSNNNDMRF

SEQ ID NO: 70162 - protein, 14 aa, Homo sapiens
  CDR3 for beta chain variable domain of TCR clone 35081 (TRBV5-1, TRBJ2-5)
CASSLAGEQETQYF

SEQ ID NO: 70163 - protein, 10 aa, Homo sapiens
  CDR3 for alpha chain variable domain of TCR clone 35082 (TRAV1-2, TRAJ18)
CAVRGEAQPW

SEQ ID NO: 70164 - protein, 14 aa, Homo sapiens
  CDR3 for beta chain variable domain of TCR clone 35082 (TRBV7-2, TRBJ2-7)
CASSFKGQDHEQCF

SEQ ID NO: 70165 - protein, 17 aa, Homo sapiens
  CDR3 for alpha chain variable domain of TCR clone 35083 (TRAV13-1, TRAJ28)
CAASPPYSGAGSYQPTF

SEQ ID NO: 70166 - protein, 12 aa, Homo sapiens
  CDR3 for beta chain variable domain of TCR clone 35083 (TRBV11-2, TRBJ2-2)
CASSLPTGELFF

SEQ ID NO: 70167 - protein, 15 aa, Homo sapiens
  CDR3 for alpha chain variable domain of TCR clone 35084 (TRAV21, TRAJ24)
CAARSSTDSWGKSQF

SEQ ID NO: 70168 - protein, 13 aa, Homo sapiens
  CDR3 for beta chain variable domain of TCR clone 35084 (TRBV11-2, TRBJ2-5)
CASSSTGEETQYF

SEQ ID NO: 70169 - protein, 19 aa, Homo sapiens
  CDR3 for alpha chain variable domain of TCR clone 35085 (TRAV2, TRAJ20)
ILQVREADAAVHRDCKLSF

SEQ ID NO: 70170 - protein, 16 aa, Homo sapiens
  CDR3 for beta chain variable domain of TCR clone 35085 (TRBV5-1, TRBJ2-5)
CASSLALLRAGETQYF

SEQ ID NO: 70171 - protein, 15 aa, Homo sapiens
  CDR3 for alpha chain variable domain of TCR clone 35086 (TRAV3, TRAJ22)
CAVRDRGDSARQLTF

SEQ ID NO: 70172 - protein, 17 aa, Homo sapiens
  CDR3 for beta chain variable domain of TCR clone 35086 (TRBV13, TRBJ2-3)
CASSLSRVAGGRNTQYF

SEQ ID NO: 70173 - protein, 12 aa, Homo sapiens
  CDR3 for alpha chain variable domain of TCR clone 35087 (TRAV3, TRAJ20)
CAVRDHDYKLSF

SEQ ID NO: 70174 - protein, 15 aa, Homo sapiens
  CDR3 for beta chain variable domain of TCR clone 35087 (TRBV9, TRBJ1-6)
CASSIAGTGDSPLHF

SEQ ID NO: 70175 - protein, 15 aa, Homo sapiens
  CDR3 for alpha chain variable domain of TCR clone 35088 (TRAV8-4, TRAJ48)
CAVSAAYFGNEKSTF

SEQ ID NO: 70176 - protein, 12 aa, Homo sapiens
  CDR3 for beta chain variable domain of TCR clone 35088 (TRBV3-1, TRBJ2-5)
CASSQRGETQYF

SEQ ID NO: 70177 - protein, 12 aa, Homo sapiens
  CDR3 for alpha chain variable domain of TCR clone 35089 (TRAV1-1, TRAJ8)
CAGGTGFQKLVF

SEQ ID NO: 70178 - protein, 14 aa, Homo sapiens
  CDR3 for beta chain variable domain of TCR clone 35089 (TRBV19, TRBJ2-1)
CASPTFVLSGEQFF

SEQ ID NO: 70179 - protein, 13 aa, Homo sapiens
  CDR3 for alpha chain variable domain of TCR clone 35090 (TRAV8-6, TRAJ40)
CAVSVTGTYKYIF

SEQ ID NO: 70180 - protein, 15 aa, Homo sapiens
  CDR3 for beta chain variable domain of TCR clone 35090 (TRBV12-4, TRBJ2-5)
CASSPPTGLQETQYF

SEQ ID NO: 70181 - protein, 13 aa, Homo sapiens
  CDR3 for alpha chain variable domain of TCR clone 35091 (TRAV12-2, TRAJ52)
CNAGGTSYGKLTF

SEQ ID NO: 70182 - protein, 14 aa, Homo sapiens
  CDR3 for beta chain variable domain of TCR clone 35091 (TRBV6-1, TRBJ1-3)
CASVQGGGGNTIYF

SEQ ID NO: 70183 - protein, 16 aa, Homo sapiens
  CDR3 for alpha chain variable domain of TCR clone 35092 (TRAV38-1, TRAJ37)
CALKGDGSSNTGKLIF

SEQ ID NO: 70184 - protein, 13 aa, Homo sapiens
  CDR3 for beta chain variable domain of TCR clone 35092 (TRBV12-4, TRBJ2-5)
CASSLFRRETQYF

SEQ ID NO: 70185 - protein, 16 aa, Homo sapiens
  CDR3 for alpha chain variable domain of TCR clone 35093 (TRAV3, TRAJ10)
CAVRDMRAGGGNKLTF

SEQ ID NO: 70186 - protein, 11 aa, Homo sapiens
  CDR3 for beta chain variable domain of TCR clone 35093 (TRBV19, TRBJ1-1)
CASSIGSEAFF

SEQ ID NO: 70187 - protein, 16 aa, Homo sapiens
  CDR3 for alpha chain variable domain of TCR clone 35094 (TRAV16, TRAJ4)
CALSRMFSGGYNKLIF

SEQ ID NO: 70188 - protein, 14 aa, Homo sapiens
  CDR3 for beta chain variable domain of TCR clone 35094 (TRBV19, TRBJ2-1)
CASPTFVLSGEQFF

SEQ ID NO: 70189 - protein, 14 aa, Homo sapiens
  CDR3 for alpha chain variable domain of TCR clone 35095 (TRAV12-3, TRAJ10)
SHLPLTGGGNKLTF

SEQ ID NO: 70190 - protein, 15 aa, Homo sapiens
  CDR3 for beta chain variable domain of TCR clone 35095 (TRBV27, TRBJ1-6)
CASSFDRGLGSPLHF

SEQ ID NO: 70191 - protein, 16 aa, Homo sapiens
  CDR3 for alpha chain variable domain of TCR clone 35096 (TRAV2, TRAJ36)
CAVEDRGNWGKQPLLW

SEQ ID NO: 70192 - protein, 14 aa, Homo sapiens
  CDR3 for beta chain variable domain of TCR clone 35096 (TRBV7-9, TRBJ2-5)
CASSLDTAQETQYF

SEQ ID NO: 70193 - protein, 12 aa, Homo sapiens
  CDR3 for alpha chain variable domain of TCR clone 35097 (TRAV17, TRAJ57)
CATDGGSEKLVF

SEQ ID NO: 70194 - protein, 13 aa, Homo sapiens
  CDR3 for beta chain variable domain of TCR clone 35097 (TRBV7-9, TRBJ2-7)
CASSFVGAYEQYF

SEQ ID NO: 70195 - protein, 12 aa, Homo sapiens
  CDR3 for alpha chain variable domain of TCR clone 35098 (TRAV21, TRAJ8)
CAVNTDFQKLVF

SEQ ID NO: 70196 - protein, 13 aa, Homo sapiens
  CDR3 for beta chain variable domain of TCR clone 35098 (TRBV6-3, TRBJ2-1)
CASSYDNYNEQFF

SEQ ID NO: 70197 - protein, 12 aa, Homo sapiens
  CDR3 for alpha chain variable domain of TCR clone 35099 (TRAV13-1, TRAJ20)
SVQQVNGYKLSF

SEQ ID NO: 70198 - protein, 14 aa, Homo sapiens
  CDR3 for beta chain variable domain of TCR clone 35099 (TRBV7-6, TRBJ2-3)
CASSLTGGTDTQYF

SEQ ID NO: 70199 - protein, 15 aa, Homo sapiens
  CDR3 for alpha chain variable domain of TCR clone 35100 (TRAV12-2, TRAJ43)
CAFDMRFGAGTRLTV

SEQ ID NO: 70200 - protein, 18 aa, Homo sapiens
  CDR3 for beta chain variable domain of TCR clone 35100 (TRBV20-1, TRBJ2-3)
CSAAGLAGGPGTTDTQYF

SEQ ID NO: 70201 - protein, 12 aa, Homo sapiens
  CDR3 for alpha chain variable domain of TCR clone 35101 (TRAV13-1, TRAJ9)
CASHTGGFKAIF

SEQ ID NO: 70202 - protein, 18 aa, Homo sapiens
  CDR3 for beta chain variable domain of TCR clone 35101 (TRBV11-2, TRBJ2-3)
CASSLGGASRGAPNTQYF

SEQ ID NO: 70203 - protein, 13 aa, Homo sapiens
  CDR3 for alpha chain variable domain of TCR clone 35102 (TRAV21, TRAJ27)
CAARPAMQANQPL

SEQ ID NO: 70204 - protein, 14 aa, Homo sapiens
  CDR3 for beta chain variable domain of TCR clone 35102 (TRBV7-6, TRBJ2-3)
CASSLGTVTDTQYF

SEQ ID NO: 70205 - protein, 17 aa, Homo sapiens
  CDR3 for alpha chain variable domain of TCR clone 35103 (TRAV26-2, TRAJ42)
CILRDVGYGGSQGNLVF

SEQ ID NO: 70206 - protein, 16 aa, Homo sapiens
  CDR3 for beta chain variable domain of TCR clone 35103 (TRBV12-4, TRBJ2-7)
CASSLIGGTGTYEQYF

SEQ ID NO: 70207 - protein, 13 aa, Homo sapiens
  CDR3 for alpha chain variable domain of TCR clone 35104 (TRAV13-2, TRAJ53)
CAEHMGSNYKLTF

SEQ ID NO: 70208 - protein, 13 aa, Homo sapiens
  CDR3 for beta chain variable domain of TCR clone 35104 (TRBV4-1, TRBJ2-2)
CASSQENTGELFF

SEQ ID NO: 70209 - protein, 15 aa, Homo sapiens
  CDR3 for alpha chain variable domain of TCR clone 35105 (TRAV3, TRAJ4)
CAQNMFSGGYSKLIF

SEQ ID NO: 70210 - protein, 16 aa, Homo sapiens
  CDR3 for beta chain variable domain of TCR clone 35105 (TRBV3-1, TRBJ1-6)
CASSQEFQGSYSPLHF

SEQ ID NO: 70211 - protein, 13 aa, Homo sapiens
  CDR3 for alpha chain variable domain of TCR clone 35106 (TRAV8-3, TRAJ21)
CAVGAYNFNKFYF

SEQ ID NO: 70212 - protein, 16 aa, Homo sapiens
  CDR3 for beta chain variable domain of TCR clone 35106 (TRBV19, TRBJ2-1)
CAGSMGGGSSYNEQFF

SEQ ID NO: 70213 - protein, 12 aa, Homo sapiens
  CDR3 for alpha chain variable domain of TCR clone 35107 (TRAV21, TRAJ3)
CCFYSSASKIIF

SEQ ID NO: 70214 - protein, 16 aa, Homo sapiens
  CDR3 for beta chain variable domain of TCR clone 35107 (TRBV19, TRBJ2-1)
CASSKAGPSSYNEQFS

SEQ ID NO: 70215 - protein, 14 aa, Homo sapiens
  CDR3 for alpha chain variable domain of TCR clone 35108 (TRAV3, TRAJ40)
CAVRDRRGTYKYIF

SEQ ID NO: 70216 - protein, 15 aa, Homo sapiens
  CDR3 for beta chain variable domain of TCR clone 35108 (TRBV11-1, TRBJ1-3)
CASTDPRAFGNTTYF

SEQ ID NO: 70217 - protein, 11 aa, Homo sapiens
  CDR3 for alpha chain variable domain of TCR clone 35109 (TRAV38-1, TRAJ35)
CAFMSLDRLWE

SEQ ID NO: 70218 - protein, 13 aa, Homo sapiens
  CDR3 for beta chain variable domain of TCR clone 35109 (TRBV4-1, TRBJ2-5)
CASSQEVQETRYF

SEQ ID NO: 70219 - protein, 14 aa, Homo sapiens
  CDR3 for alpha chain variable domain of TCR clone 35110 (TRAV20, TRAJ56)
CAGQFGGANSKLTF

SEQ ID NO: 70220 - protein, 14 aa, Homo sapiens
  CDR3 for beta chain variable domain of TCR clone 35110 (TRBV20-1, TRBJ2-7)
CSAKRGRSSYEQYF

SEQ ID NO: 70221 - protein, 14 aa, Homo sapiens
  CDR3 for alpha chain variable domain of TCR clone 35111 (TRAV12-3, TRAJ42)
CAMNYGGSQGNLIF

SEQ ID NO: 70222 - protein, 15 aa, Homo sapiens
  CDR3 for beta chain variable domain of TCR clone 35111 (TRBV5-7, TRBJ1-5)
CASRYGKLWDQPQHF

SEQ ID NO: 70223 - protein, 16 aa, Homo sapiens
  CDR3 for alpha chain variable domain of TCR clone 35112 (TRAV30, TRAJ24)
CGTEIVDADSWGKFQF

SEQ ID NO: 70224 - protein, 13 aa, Homo sapiens
  CDR3 for beta chain variable domain of TCR clone 35112 (TRBV12-4, TRBJ1-1)
CASSPGTGFEAFF

SEQ ID NO: 70225 - protein, 13 aa, Homo sapiens
  CDR3 for alpha chain variable domain of TCR clone 35113 (TRAV29/DV5, TRAJ31)
CAASRNNNARLMF

SEQ ID NO: 70226 - protein, 15 aa, Homo sapiens
  CDR3 for beta chain variable domain of TCR clone 35113 (TRBV6-1, TRBJ2-3)
CATWTGTSSTDTQYF

SEQ ID NO: 70227 - protein, 13 aa, Homo sapiens
  CDR3 for alpha chain variable domain of TCR clone 35114 (TRAV1-2, TRAJ9)
CAALNTGGCKTIF

SEQ ID NO: 70228 - protein, 13 aa, Homo sapiens
  CDR3 for beta chain variable domain of TCR clone 35114 (TRBV19, TRBJ1-2)
CASSVPGQDGYTF

SEQ ID NO: 70229 - protein, 14 aa, Homo sapiens
  CDR3 for alpha chain variable domain of TCR clone 35115 (TRAV26-1, TRAJ39)
CIVMGSRAGNMLTF

SEQ ID NO: 70230 - protein, 15 aa, Homo sapiens
  CDR3 for beta chain variable domain of TCR clone 35115 (TRBV7-9, TRBJ1-5)
CASSQGHQPNQPQHF

SEQ ID NO: 70231 - protein, 13 aa, Homo sapiens
  CDR3 for alpha chain variable domain of TCR clone 35116 (TRAV2, TRAJ40)
CAVVTAGTYKYIF

SEQ ID NO: 70232 - protein, 15 aa, Homo sapiens
  CDR3 for beta chain variable domain of TCR clone 35116 (TRBV11-3, TRBJ2-3)
CASLKDGREGDTQYF

SEQ ID NO: 70233 - protein, 13 aa, Homo sapiens
  CDR3 for alpha chain variable domain of TCR clone 35117 (TRAV12-3, TRAJ33)
CAMSVNSNYQLIW

SEQ ID NO: 70234 - protein, 13 aa, Homo sapiens
  CDR3 for beta chain variable domain of TCR clone 35117 (TRBV7-2, TRBJ2-2)
CARSLAVTGELFF

SEQ ID NO: 70235 - protein, 14 aa, Homo sapiens
  CDR3 for alpha chain variable domain of TCR clone 35118 (TRAV12-2, TRAJ13)
CAVKKTGGYQKVTF

SEQ ID NO: 70236 - protein, 15 aa, Homo sapiens
  CDR3 for beta chain variable domain of TCR clone 35118 (TRBV27, TRBJ2-1)
CASSNGGGSCNEQFF

SEQ ID NO: 70237 - protein, 14 aa, Homo sapiens
  CDR3 for alpha chain variable domain of TCR clone 35119 (TRAV17, TRAJ35)
CATDRPGFGDVLHC

SEQ ID NO: 70238 - protein, 15 aa, Homo sapiens
  CDR3 for beta chain variable domain of TCR clone 35119 (TRBV28, TRBJ2-5)
CASSSGRVIQETQYF

SEQ ID NO: 70239 - protein, 13 aa, Homo sapiens
  CDR3 for alpha chain variable domain of TCR clone 35120 (TRAV27, TRAJ3)
ASLRGSSASKIIF

SEQ ID NO: 70240 - protein, 15 aa, Homo sapiens
  CDR3 for beta chain variable domain of TCR clone 35120 (TRBV28, TRBJ1-3)
CASSMGWASGNTKYF

SEQ ID NO: 70241 - protein, 12 aa, Homo sapiens
  CDR3 for alpha chain variable domain of TCR clone 35121 (TRAV1-1, TRAJ8)
CAGGTGFQKLVF

SEQ ID NO: 70242 - protein, 15 aa, Homo sapiens
  CDR3 for beta chain variable domain of TCR clone 35121 (TRBV7-9, TRBJ1-4)
CASSRAGGFNEKLFF

SEQ ID NO: 70243 - protein, 13 aa, Homo sapiens
  CDR3 for alpha chain variable domain of TCR clone 35122 (TRAV2, TRAJ15)
CAAASQAGTALIF

SEQ ID NO: 70244 - protein, 14 aa, Homo sapiens
  CDR3 for beta chain variable domain of TCR clone 35122 (TRBV5-1, TRBJ1-1)
CASSLERVGTEAFF

SEQ ID NO: 70245 - protein, 12 aa, Homo sapiens
  CDR3 for alpha chain variable domain of TCR clone 35123 (TRAV12-3, TRAJ3)
CAIDSSASKIIF

SEQ ID NO: 70246 - protein, 17 aa, Homo sapiens
  CDR3 for beta chain variable domain of TCR clone 35123 (TRBV7-9, TRBJ2-3)
CASSLGEAGAYPDTQYF

SEQ ID NO: 70247 - protein, 18 aa, Homo sapiens
  CDR3 for alpha chain variable domain of TCR clone 35124 (TRAV16, TRAJ45)
CAQASYPSSGGGADGLTF

SEQ ID NO: 70248 - protein, 12 aa, Homo sapiens
  CDR3 for beta chain variable domain of TCR clone 35124 (TRBV11-2, TRBJ2-2)
CASSLPTGELFF

SEQ ID NO: 70249 - protein, 14 aa, Homo sapiens
  CDR3 for alpha chain variable domain of TCR clone 35125 (TRAV29/DV5, TRAJ20)
CAATIRSNDYKLSF

SEQ ID NO: 70250 - protein, 15 aa, Homo sapiens
  CDR3 for beta chain variable domain of TCR clone 35125 (TRBV20-1, TRBJ2-1)
CSASSAGSSYNEQSF

SEQ ID NO: 70251 - protein, 13 aa, Homo sapiens
  CDR3 for alpha chain variable domain of TCR clone 35126 (TRAV17, TRAJ26)
CATVDNYGQNFVF

SEQ ID NO: 70252 - protein, 16 aa, Homo sapiens
  CDR3 for beta chain variable domain of TCR clone 35126 (TRBV2, TRBJ2-1)
CASSVGGALSYNEQFF

SEQ ID NO: 70253 - protein, 12 aa, Homo sapiens
  CDR3 for alpha chain variable domain of TCR clone 35127 (TRAV12-3, TRAJ17)
CAMTLTGNKLTF

SEQ ID NO: 70254 - protein, 15 aa, Homo sapiens
  CDR3 for beta chain variable domain of TCR clone 35127 (TRBV20-1, TRBJ2-7)
CSARKGLAESYEQYF

SEQ ID NO: 70255 - protein, 15 aa, Homo sapiens
  CDR3 for alpha chain variable domain of TCR clone 35128 (TRAV3, TRAJ3)
CAVRDRDSSASKIIF

SEQ ID NO: 70256 - protein, 16 aa, Homo sapiens
  CDR3 for beta chain variable domain of TCR clone 35128 (TRBV12-5, TRBJ2-5)
CASGPRTSGNQETQYF

SEQ ID NO: 70257 - protein, 13 aa, Homo sapiens
  CDR3 for alpha chain variable domain of TCR clone 35129 (TRAV2, TRAJ16)
CAMEFRDGQKLLF

SEQ ID NO: 70258 - protein, 14 aa, Homo sapiens
  CDR3 for beta chain variable domain of TCR clone 35129 (TRBV6-3, TRBJ2-5)
CASSYSLREKTQYF

SEQ ID NO: 70259 - protein, 16 aa, Homo sapiens
  CDR3 for alpha chain variable domain of TCR clone 35130 (TRAV30, TRAJ24)
CGTEIVDADSWGKFQF

SEQ ID NO: 70260 - protein, 10 aa, Homo sapiens
  CDR3 for beta chain variable domain of TCR clone 35130 (TRBV23-1, TRBJ2-1)
KWSSYNEQFF

SEQ ID NO: 70261 - protein, 12 aa, Homo sapiens
  CDR3 for alpha chain variable domain of TCR clone 35131 (TRAV3, TRAJ20)
CAVRDGDYKLSF

SEQ ID NO: 70262 - protein, 11 aa, Homo sapiens
  CDR3 for beta chain variable domain of TCR clone 35131 (TRBV19, TRBJ1-1)
CASSIGSEAFF

SEQ ID NO: 70263 - protein, 18 aa, Homo sapiens
  CDR3 for alpha chain variable domain of TCR clone 35132 (TRAV21, TRAJ52)
CAVRPSPAGGTSYGKLTF

SEQ ID NO: 70264 - protein, 18 aa, Homo sapiens
  CDR3 for beta chain variable domain of TCR clone 35132 (TRBV6-6, TRBJ1-3)
CASGYSKWDSISGNTIYF

SEQ ID NO: 70265 - protein, 11 aa, Homo sapiens
  CDR3 for alpha chain variable domain of TCR clone 35133 (TRAV1-2, TRAJ20)
CAVSNDYKLSF

SEQ ID NO: 70266 - protein, 16 aa, Homo sapiens
  CDR3 for beta chain variable domain of TCR clone 35133 (TRBV29-1, TRBJ2-6)
CSVEDISYSGANVLTF

SEQ ID NO: 70267 - protein, 12 aa, Homo sapiens
  CDR3 for alpha chain variable domain of TCR clone 35134 (TRAV12-3, TRAJ17)
CAMTLTGNKLTF

SEQ ID NO: 70268 - protein, 13 aa, Homo sapiens
  CDR3 for beta chain variable domain of TCR clone 35134 (TRBV7-2, TRBJ2-7)
CASSSPSGSEQYF

SEQ ID NO: 70269 - protein, 12 aa, Homo sapiens
  CDR3 for alpha chain variable domain of TCR clone 35135 (TRAV16, TRAJ27)
CALNTNAGKSTF

SEQ ID NO: 70270 - protein, 14 aa, Homo sapiens
  CDR3 for beta chain variable domain of TCR clone 35135 (TRBV5-1, TRBJ2-7)
CASSFGVRAYEQYF

SEQ ID NO: 70271 - protein, 16 aa, Homo sapiens
  CDR3 for alpha chain variable domain of TCR clone 35136 (TRAV20, TRAJ22)
CAVQASPSGSARQLTF

SEQ ID NO: 70272 - protein, 13 aa, Homo sapiens
  CDR3 for beta chain variable domain of TCR clone 35136 (TRBV7-2, TRBJ2-5)
CASSQTSVETQYF

SEQ ID NO: 70273 - protein, 16 aa, Homo sapiens
  CDR3 for alpha chain variable domain of TCR clone 35137 (TRAV23/DV6, TRAJ7)
CAASRVASMGTTDSLL

SEQ ID NO: 70274 - protein, 13 aa, Homo sapiens
  CDR3 for beta chain variable domain of TCR clone 35137 (TRBV19, TRBJ1-2)
CASSQGQVYGYTF

SEQ ID NO: 70275 - protein, 14 aa, Homo sapiens
  CDR3 for alpha chain variable domain of TCR clone 35138 (TRAV17, TRAJ56)
CATVPAGANSKPTF

SEQ ID NO: 70276 - protein, 13 aa, Homo sapiens
  CDR3 for beta chain variable domain of TCR clone 35138 (TRBV12-4, TRBJ2-2)
CASSITGSGELFF

SEQ ID NO: 70277 - protein, 14 aa, Homo sapiens
  CDR3 for alpha chain variable domain of TCR clone 35139 (TRAV16, TRAJ33)
CALSAMGSNYQLIW

SEQ ID NO: 70278 - protein, 12 aa, Homo sapiens
  CDR3 for beta chain variable domain of TCR clone 35139 (TRBV5-1, TRBJ1-2)
CASSQDTYGYTF

SEQ ID NO: 70279 - protein, 12 aa, Homo sapiens
  CDR3 for alpha chain variable domain of TCR clone 35140 (TRAV8-3, TRAJ26)
CAGDNYGRNFVF

SEQ ID NO: 70280 - protein, 13 aa, Homo sapiens
  CDR3 for beta chain variable domain of TCR clone 35140 (TRBV20-1, TRBJ1-1)
CSAGTVGNTEAFF

SEQ ID NO: 70281 - protein, 15 aa, Homo sapiens
  CDR3 for alpha chain variable domain of TCR clone 35141 (TRAV3, TRAJ22)
CAVRDRGGSARQLTF

SEQ ID NO: 70282 - protein, 13 aa, Homo sapiens
  CDR3 for beta chain variable domain of TCR clone 35141 (TRBV12-4, TRBJ1-2)
CASSLRQGKGDTF

SEQ ID NO: 70283 - protein, 12 aa, Homo sapiens
  CDR3 for alpha chain variable domain of TCR clone 35142 (TRAV13-1, TRAJ21)
CAAKEGFNKFYF

SEQ ID NO: 70284 - protein, 14 aa, Homo sapiens
  CDR3 for beta chain variable domain of TCR clone 35142 (TRBV5-4, TRBJ1-1)
CASSLDRRRDEAFF

SEQ ID NO: 70285 - protein, 11 aa, Homo sapiens
  CDR3 for alpha chain variable domain of TCR clone 35143 (TRAV3, TRAJ21)
CAVGNFNKFYF

SEQ ID NO: 70286 - protein, 15 aa, Homo sapiens
  CDR3 for beta chain variable domain of TCR clone 35143 (TRBV28, TRBJ2-1)
CASSIIAGGRSEQFF

SEQ ID NO: 70287 - protein, 12 aa, Homo sapiens
  CDR3 for alpha chain variable domain of TCR clone 35144 (TRAV12-1, TRAJ40)
CVVYSGTYKYIF

SEQ ID NO: 70288 - protein, 15 aa, Homo sapiens
  CDR3 for beta chain variable domain of TCR clone 35144 (TRBV5-1, TRBJ2-1)
CASSPPRAPYNEQFF

SEQ ID NO: 70289 - protein, 14 aa, Homo sapiens
  CDR3 for alpha chain variable domain of TCR clone 35145 (TRAV12-2, TRAJ6)
CASKWGGGSYMPTF

SEQ ID NO: 70290 - protein, 13 aa, Homo sapiens
  CDR3 for beta chain variable domain of TCR clone 35145 (TRBV2, TRBJ1-1)
CASSEGGNTEAFF

SEQ ID NO: 70291 - protein, 17 aa, Homo sapiens
  CDR3 for alpha chain variable domain of TCR clone 35146 (TRAV9-2, TRAJ45)
CALSGYYSGGGADGLTF

SEQ ID NO: 70292 - protein, 16 aa, Homo sapiens
  CDR3 for beta chain variable domain of TCR clone 35146 (TRBV3-1, TRBJ2-7)
CASSQGATGVAYEQYF

SEQ ID NO: 70293 - protein, 14 aa, Homo sapiens
  CDR3 for alpha chain variable domain of TCR clone 35147 (TRAV13-2, TRAJ43)
CAEIPTYNNNDMRF

SEQ ID NO: 70294 - protein, 15 aa, Homo sapiens
  CDR3 for beta chain variable domain of TCR clone 35147 (TRBV7-9, TRBJ2-2)
CASGPLDTVPGELFF

SEQ ID NO: 70295 - protein, 11 aa, Homo sapiens
  CDR3 for alpha chain variable domain of TCR clone 35148 (TRAV3, TRAJ21)
CAVGNFNNFYF

SEQ ID NO: 70296 - protein, 14 aa, Homo sapiens
  CDR3 for beta chain variable domain of TCR clone 35148 (TRBV29-1, TRBJ2-2)
CSGRGSGNTGELFF

SEQ ID NO: 70297 - protein, 15 aa, Homo sapiens
  CDR3 for alpha chain variable domain of TCR clone 35149 (TRAV26-1, TRAJ48)
CIARWSWLGNEKLTF

SEQ ID NO: 70298 - protein, 12 aa, Homo sapiens
  CDR3 for beta chain variable domain of TCR clone 35149 (TRBV19, TRBJ2-5)
CASSISEETQYF

SEQ ID NO: 70299 - protein, 15 aa, Homo sapiens
  CDR3 for alpha chain variable domain of TCR clone 35150 (TRAV3, TRAJ29)
CAVRDSPSGNTPLVF

SEQ ID NO: 70300 - protein, 14 aa, Homo sapiens
  CDR3 for beta chain variable domain of TCR clone 35150 (TRBV19, TRBJ2-1)
CASPTFVLSGEQFF

SEQ ID NO: 70301 - protein, 14 aa, Homo sapiens
  CDR3 for alpha chain variable domain of TCR clone 35151 (TRAV12-3, TRAJ22)
CAMSLFGSARQLTF

SEQ ID NO: 70302 - protein, 14 aa, Homo sapiens
  CDR3 for beta chain variable domain of TCR clone 35151 (TRBV7-2, TRBJ2-7)
CASSPKTSFYERYF

SEQ ID NO: 70303 - protein, 14 aa, Homo sapiens
  CDR3 for alpha chain variable domain of TCR clone 35152 (TRAV35, TRAJ50)
CAGHRKTSYDKVIF

SEQ ID NO: 70304 - protein, 13 aa, Homo sapiens
  CDR3 for beta chain variable domain of TCR clone 35152 (TRBV7-7, TRBJ2-3)
CASSLSRADTRYF

SEQ ID NO: 70305 - protein, 15 aa, Homo sapiens
  CDR3 for alpha chain variable domain of TCR clone 35153 (TRAV8-3, TRAJ27)
CAVGPLRPMQANQPL

SEQ ID NO: 70306 - protein, 15 aa, Homo sapiens
  CDR3 for beta chain variable domain of TCR clone 35153 (TRBV7-2, TRBJ2-1)
CASSSGLAGGNEQFF

SEQ ID NO: 70307 - protein, 12 aa, Homo sapiens
  CDR3 for alpha chain variable domain of TCR clone 35154 (TRAV30, TRAJ20)
CGTESNDYKLSF

SEQ ID NO: 70308 - protein, 15 aa, Homo sapiens
  CDR3 for beta chain variable domain of TCR clone 35154 (TRBV20-1, TRBJ2-7)
CGARDRVSGMDEQYF

SEQ ID NO: 70309 - protein, 13 aa, Homo sapiens
  CDR3 for alpha chain variable domain of TCR clone 35155 (TRAV13-2, TRAJ48)
CAEIDFGNEKLTF

SEQ ID NO: 70310 - protein, 15 aa, Homo sapiens
  CDR3 for beta chain variable domain of TCR clone 35155 (TRBV7-9, TRBJ1-6)
CASSSPGRRNSPLHF

SEQ ID NO: 70311 - protein, 13 aa, Homo sapiens
  CDR3 for alpha chain variable domain of TCR clone 35156 (TRAV17, TRAJ5)
CAPMDTGRRALTF

SEQ ID NO: 70312 - protein, 16 aa, Homo sapiens
  CDR3 for beta chain variable domain of TCR clone 35156 (TRBV7-3, TRBJ2-2)
CASSLKRGTLSGELFF

SEQ ID NO: 70313 - protein, 10 aa, Homo sapiens
  CDR3 for alpha chain variable domain of TCR clone 35157 (TRAV27, TRAJ37)
CAGGVGKLTF

SEQ ID NO: 70314 - protein, 13 aa, Homo sapiens
  CDR3 for beta chain variable domain of TCR clone 35157 (TRBV27, TRBJ1-2)
CASSRGLVYGYTF

SEQ ID NO: 70315 - protein, 11 aa, Homo sapiens
  CDR3 for alpha chain variable domain of TCR clone 35158 (TRAV1-2, TRAJ20)
CAVANDYKLSF

SEQ ID NO: 70316 - protein, 18 aa, Homo sapiens
  CDR3 for beta chain variable domain of TCR clone 35158 (TRBV20-1, TRBJ2-6)
CSSETTPTHGSGANVLTF

SEQ ID NO: 70317 - protein, 15 aa, Homo sapiens
  CDR3 for alpha chain variable domain of TCR clone 35159 (TRAV12-2, TRAJ53)
CAVNGGGGSNYKLTF

SEQ ID NO: 70318 - protein, 17 aa, Homo sapiens
  CDR3 for beta chain variable domain of TCR clone 35159 (TRBV7-3, TRBJ2-3)
CDSSLMKRMRGADTQYF

SEQ ID NO: 70319 - protein, 15 aa, Homo sapiens
  CDR3 for alpha chain variable domain of TCR clone 35160 (TRAV1-2, TRAJ30)
CAVRPHGNRDDKIIF

SEQ ID NO: 70320 - protein, 13 aa, Homo sapiens
  CDR3 for beta chain variable domain of TCR clone 35160 (TRBV4-1, TRBJ2-7)
CAISQGQAYEQYF

SEQ ID NO: 70321 - protein, 16 aa, Homo sapiens
  CDR3 for alpha chain variable domain of TCR clone 35161 (TRAV17, TRAJ53)
CATDALRGGSNYKLTF

SEQ ID NO: 70322 - protein, 12 aa, Homo sapiens
  CDR3 for beta chain variable domain of TCR clone 35161 (TRBV5-1, TRBJ2-7)
CASSFRGYEQYF

SEQ ID NO: 70323 - protein, 13 aa, Homo sapiens
  CDR3 for alpha chain variable domain of TCR clone 35162 (TRAV38-1, TRAJ42)
CARWGGSQGSLIF

SEQ ID NO: 70324 - protein, 10 aa, Homo sapiens
  CDR3 for beta chain variable domain of TCR clone 35162 (TRBV2, TRBJ2-5)
CASSAATQYF

SEQ ID NO: 70325 - protein, 15 aa, Homo sapiens
  CDR3 for alpha chain variable domain of TCR clone 35163 (TRAV3, TRAJ22)
CAVRDRGGSARQLTF

SEQ ID NO: 70326 - protein, 14 aa, Homo sapiens
  CDR3 for beta chain variable domain of TCR clone 35163 (TRBV7-9, TRBJ2-2)
CASSLVQDTGELFF

SEQ ID NO: 70327 - protein, 12 aa, Homo sapiens
  CDR3 for alpha chain variable domain of TCR clone 35164 (TRAV1-1, TRAJ39)
CAVPVVGNMLTF

SEQ ID NO: 70328 - protein, 15 aa, Homo sapiens
  CDR3 for beta chain variable domain of TCR clone 35164 (TRBV7-3, TRBJ2-2)
CASSETGQGTGGLFF

SEQ ID NO: 70329 - protein, 13 aa, Homo sapiens
  CDR3 for alpha chain variable domain of TCR clone 35165 (TRAV27, TRAJ57)
CRSAQGGYEKLVF

SEQ ID NO: 70330 - protein, 11 aa, Homo sapiens
  CDR3 for beta chain variable domain of TCR clone 35165 (TRBV11-2, TRBJ1-1)
CASSINTEAFF

SEQ ID NO: 70331 - protein, 11 aa, Homo sapiens
  CDR3 for alpha chain variable domain of TCR clone 35166 (TRAV2, TRAJ13)
CASGGYQKVTF

SEQ ID NO: 70332 - protein, 13 aa, Homo sapiens
  CDR3 for beta chain variable domain of TCR clone 35166 (TRBV12-4, TRBJ1-2)
CASSLRQGKGDTF

SEQ ID NO: 70333 - protein, 14 aa, Homo sapiens
  CDR3 for alpha chain variable domain of TCR clone 35167 (TRAV12-2, TRAJ6)
CASKWGGGSYIPTF

SEQ ID NO: 70334 - protein, 13 aa, Homo sapiens
  CDR3 for beta chain variable domain of TCR clone 35167 (TRBV2, TRBJ1-1)
CASSEGGNTEAFL

SEQ ID NO: 70335 - protein, 13 aa, Homo sapiens
  CDR3 for alpha chain variable domain of TCR clone 35168 (TRAV26-2, TRAJ43)
CILRAVNNNDMRF

SEQ ID NO: 70336 - protein, 16 aa, Homo sapiens
  CDR3 for beta chain variable domain of TCR clone 35168 (TRBV19, TRBJ2-2)
CASRSPGTGATGELFF

SEQ ID NO: 70337 - protein, 13 aa, Homo sapiens
  CDR3 for alpha chain variable domain of TCR clone 35169 (TRAV25, TRAJ54)
CAGTIQGAQKLVF

SEQ ID NO: 70338 - protein, 15 aa, Homo sapiens
  CDR3 for beta chain variable domain of TCR clone 35169 (TRBV19, TRBJ1-5)
CASSILTGENQLQHF

SEQ ID NO: 70339 - protein, 15 aa, Homo sapiens
  CDR3 for alpha chain variable domain of TCR clone 35170 (TRAV25, TRAJ53)
CAATGGGGSNYKLTF

SEQ ID NO: 70340 - protein, 15 aa, Homo sapiens
  CDR3 for beta chain variable domain of TCR clone 35170 (TRBV7-3, TRBJ2-1)
CASSPTGGGEVEQFF

SEQ ID NO: 70341 - protein, 15 aa, Homo sapiens
  CDR3 for alpha chain variable domain of TCR clone 35171 (TRAV35, TRAJ40)
CAGQLGTSGTYKYIF

SEQ ID NO: 70342 - protein, 12 aa, Homo sapiens
  CDR3 for beta chain variable domain of TCR clone 35171 (TRBV27, TRBJ2-7)
CASSGGFYEQYF

SEQ ID NO: 70343 - protein, 14 aa, Homo sapiens
  CDR3 for alpha chain variable domain of TCR clone 35172 (TRAV23/DV6, TRAJ22)
CAASVSGSARQLTF

SEQ ID NO: 70344 - protein, 16 aa, Homo sapiens
  CDR3 for beta chain variable domain of TCR clone 35172 (TRBV19, TRBJ2-2)
CASSFPGKGLAGELFF

SEQ ID NO: 70345 - protein, 16 aa, Homo sapiens
  CDR3 for alpha chain variable domain of TCR clone 35173 (TRAV30, TRAJ24)
CGTEIVDADSWGKFQF

SEQ ID NO: 70346 - protein, 14 aa, Homo sapiens
  CDR3 for beta chain variable domain of TCR clone 35173 (TRBV11-2, TRBJ2-7)
CASSSTGEGYEQYF

SEQ ID NO: 70347 - protein, 18 aa, Homo sapiens
  CDR3 for alpha chain variable domain of TCR clone 35174 (TRAV12-3, TRAJ52)
CAMSVGGAGGTSYEKLTF

SEQ ID NO: 70348 - protein, 15 aa, Homo sapiens
  CDR3 for beta chain variable domain of TCR clone 35174 (TRBV27, TRBJ1-6)
CASSFDRGLGSPLHF

SEQ ID NO: 70349 - protein, 13 aa, Homo sapiens
  CDR3 for alpha chain variable domain of TCR clone 35175 (TRAV2, TRAJ15)
CAVASQAGTALIF

SEQ ID NO: 70350 - protein, 16 aa, Homo sapiens
  CDR3 for beta chain variable domain of TCR clone 35175 (TRBV12-4, TRBJ1-4)
CASSLATGPRNEKLFF

SEQ ID NO: 70351 - protein, 13 aa, Homo sapiens
  CDR3 for alpha chain variable domain of TCR clone 35176 (TRAV3, TRAJ29)
CAVSDIIDTPLVF

SEQ ID NO: 70352 - protein, 14 aa, Homo sapiens
  CDR3 for beta chain variable domain of TCR clone 35176 (TRBV27, TRBJ2-1)
CASSATGGYNEQFF

SEQ ID NO: 70353 - protein, 11 aa, Homo sapiens
  CDR3 for alpha chain variable domain of TCR clone 35177 (TRAV20, TRAJ23)
CACNQRGKLIF

SEQ ID NO: 70354 - protein, 16 aa, Homo sapiens
  CDR3 for beta chain variable domain of TCR clone 35177 (TRBV7-8, TRBJ2-5)
CASSFGGQPAQETQYF

SEQ ID NO: 70355 - protein, 10 aa, Homo sapiens
  CDR3 for alpha chain variable domain of TCR clone 35178 (TRAV12-1, TRAJ41)
CVVLELKFRV

SEQ ID NO: 70356 - protein, 12 aa, Homo sapiens
  CDR3 for beta chain variable domain of TCR clone 35178 (TRBV14, TRBJ2-5)
CASSQLKETQYF

SEQ ID NO: 70357 - protein, 12 aa, Homo sapiens
  CDR3 for alpha chain variable domain of TCR clone 35179 (TRAV16, TRAJ10)
CSRTGGGDKLTF

SEQ ID NO: 70358 - protein, 19 aa, Homo sapiens
  CDR3 for beta chain variable domain of TCR clone 35179 (TRBV25-1, TRBJ2-2)
CAILVYRVDRGRKTGELFF

SEQ ID NO: 70359 - protein, 11 aa, Homo sapiens
  CDR3 for alpha chain variable domain of TCR clone 35180 (TRAV21, TRAJ11)
CAANGYSTLTF

SEQ ID NO: 70360 - protein, 16 aa, Homo sapiens
  CDR3 for beta chain variable domain of TCR clone 35180 (TRBV19, TRBJ2-1)
CASSKAGPSSYNEQFF

SEQ ID NO: 70361 - protein, 15 aa, Homo sapiens
  CDR3 for alpha chain variable domain of TCR clone 35181 (TRAV26-1, TRAJ56)
CIVRVATRANSKLTF

SEQ ID NO: 70362 - protein, 15 aa, Homo sapiens
  CDR3 for beta chain variable domain of TCR clone 35181 (TRBV27, TRBJ2-7)
CASSPQREGQREQYF

SEQ ID NO: 70363 - protein, 14 aa, Homo sapiens
  CDR3 for alpha chain variable domain of TCR clone 35182 (TRAV26-1, TRAJ39)
CIVRGSRAGNMLTF

SEQ ID NO: 70364 - protein, 15 aa, Homo sapiens
  CDR3 for beta chain variable domain of TCR clone 35182 (TRBV7-9, TRBJ1-5)
CASSQGHQTNQPQHF

SEQ ID NO: 70365 - protein, 16 aa, Homo sapiens
  CDR3 for alpha chain variable domain of TCR clone 35183 (TRAV1-2, TRAJ10)
CAVRGVLTGGGYKLTF

SEQ ID NO: 70366 - protein, 12 aa, Homo sapiens
  CDR3 for beta chain variable domain of TCR clone 35183 (TRBV7-8, TRBJ2-7)
CASSLGDREQYF

SEQ ID NO: 70367 - protein, 15 aa, Homo sapiens
  CDR3 for alpha chain variable domain of TCR clone 35184 (TRAV38-1, TRAJ57)
CAFMDSQCGSEKLVF

SEQ ID NO: 70368 - protein, 16 aa, Homo sapiens
  CDR3 for beta chain variable domain of TCR clone 35184 (TRBV10-3, TRBJ2-1)
CAIRGGGRGDYNEQFF

SEQ ID NO: 70369 - protein, 12 aa, Homo sapiens
  CDR3 for alpha chain variable domain of TCR clone 35185 (TRAV13-1, TRAJ21)
CAAKEGFNKFYF

SEQ ID NO: 70370 - protein, 18 aa, Homo sapiens
  CDR3 for beta chain variable domain of TCR clone 35185 (TRBV11-2, TRBJ2-3)
CASSLGGASRGAPNTQYF

SEQ ID NO: 70371 - protein, 14 aa, Homo sapiens
  CDR3 for alpha chain variable domain of TCR clone 35186 (TRAV1-2, TRAJ8)
CAVREDTGFQKLVF

SEQ ID NO: 70372 - protein, 12 aa, Homo sapiens
  CDR3 for beta chain variable domain of TCR clone 35186 (TRBV11-2, TRBJ2-2)
RASSLPTGELFF

SEQ ID NO: 70373 - protein, 15 aa, Homo sapiens
  CDR3 for alpha chain variable domain of TCR clone 35187 (TRAV25, TRAJ52)
CAGRPGGTSYGKLTF

SEQ ID NO: 70374 - protein, 17 aa, Homo sapiens
  CDR3 for beta chain variable domain of TCR clone 35187 (TRBV7-8, TRBJ2-6)
CANSAGTGGAGANVLTF

SEQ ID NO: 70375 - protein, 21 aa, Homo sapiens
  CDR3 for alpha chain variable domain of TCR clone 35188 (TRAV12-1, TRAJ32)
SSVIQPPTFMNYGGATNKLIF

SEQ ID NO: 70376 - protein, 18 aa, Homo sapiens
  CDR3 for beta chain variable domain of TCR clone 35188 (TRBV20-1, TRBJ2-3)
CSASGLAGGPGTTDTQYF

SEQ ID NO: 70377 - protein, 13 aa, Homo sapiens
  CDR3 for alpha chain variable domain of TCR clone 35189 (TRAV12-2, TRAJ20)
CAVYPSNDYKLSF

SEQ ID NO: 70378 - protein, 16 aa, Homo sapiens
  CDR3 for beta chain variable domain of TCR clone 35189 (TRBV27, TRBJ2-2)
CASSSSGVSNTGELFF

SEQ ID NO: 70379 - protein, 14 aa, Homo sapiens
  CDR3 for alpha chain variable domain of TCR clone 35190 (TRAV12-3, TRAJ22)
CAMSLFGSARKLTF

SEQ ID NO: 70380 - protein, 11 aa, Homo sapiens
  CDR3 for beta chain variable domain of TCR clone 35190 (TRBV12-4, TRBJ2-2)
CASSSAGELFF

SEQ ID NO: 70381 - protein, 14 aa, Homo sapiens
  CDR3 for alpha chain variable domain of TCR clone 35191 (TRAV13-1, TRAJ44)
CAAKAPGTASKLTF

SEQ ID NO: 70382 - protein, 17 aa, Homo sapiens
  CDR3 for beta chain variable domain of TCR clone 35191 (TRBV7-3, TRBJ2-3)
CASSLMKRMRGADTQYF

SEQ ID NO: 70383 - protein, 14 aa, Homo sapiens
  CDR3 for alpha chain variable domain of TCR clone 35192 (TRAV13-1, TRAJ9)
CAASALTGGFKTIF

SEQ ID NO: 70384 - protein, 16 aa, Homo sapiens
  CDR3 for beta chain variable domain of TCR clone 35192 (TRBV7-8, TRBJ2-4)
CASSAERTLAKNSQYF

SEQ ID NO: 70385 - protein, 16 aa, Homo sapiens
  CDR3 for alpha chain variable domain of TCR clone 35193 (TRAV8-4, TRAJ5)
CAVSPLTDTGRRALTF

SEQ ID NO: 70386 - protein, 14 aa, Homo sapiens
  CDR3 for beta chain variable domain of TCR clone 35193 (TRBV19, TRBJ1-6)
CASSTDWWNSPLHF

SEQ ID NO: 70387 - protein, 14 aa, Homo sapiens
  CDR3 for alpha chain variable domain of TCR clone 35194 (TRAV12-1, TRAJ24)
CVVRSTDSWGKFQF

SEQ ID NO: 70388 - protein, 13 aa, Homo sapiens
  CDR3 for beta chain variable domain of TCR clone 35194 (TRBV2, TRBJ2-3)
CARILAGGQGQYF

SEQ ID NO: 70389 - protein, 14 aa, Homo sapiens
  CDR3 for alpha chain variable domain of TCR clone 35195 (TRAV9-2, TRAJ39)
CALYIYNAGNMLTF

SEQ ID NO: 70390 - protein, 15 aa, Homo sapiens
  CDR3 for beta chain variable domain of TCR clone 35195 (TRBV13, TRBJ1-5)
CASSFGQGGVQPQHF

SEQ ID NO: 70391 - protein, 12 aa, Homo sapiens
  CDR3 for alpha chain variable domain of TCR clone 35196 (TRAV29/DV5, TRAJ15)
CASNQAGTALIF

SEQ ID NO: 70392 - protein, 15 aa, Homo sapiens
  CDR3 for beta chain variable domain of TCR clone 35196 (TRBV11-3, TRBJ2-2)
CASSSDRVNAGELFF

SEQ ID NO: 70393 - protein, 16 aa, Homo sapiens
  CDR3 for alpha chain variable domain of TCR clone 35197 (TRAV12-2, TRAJ10)
CAMNRVLTGGGNKLTF

SEQ ID NO: 70394 - protein, 12 aa, Homo sapiens
  CDR3 for beta chain variable domain of TCR clone 35197 (TRBV28, TRBJ2-7)
CASSFSSYEQYF

SEQ ID NO: 70395 - protein, 15 aa, Homo sapiens
  CDR3 for alpha chain variable domain of TCR clone 35198 (TRAV17, TRAJ54)
CATEKLGQGAQKLVF

SEQ ID NO: 70396 - protein, 22 aa, Homo sapiens
  CDR3 for beta chain variable domain of TCR clone 35198 (TRBV7-3, TRBJ1-1)
GGTQPCISVPAARGQMNTEAFF

SEQ ID NO: 70397 - protein, 13 aa, Homo sapiens
  CDR3 for alpha chain variable domain of TCR clone 35199 (TRAV2, TRAJ40)
CAVVTSGTYKYIF

SEQ ID NO: 70398 - protein, 15 aa, Homo sapiens
  CDR3 for beta chain variable domain of TCR clone 35199 (TRBV19, TRBJ2-7)
CASSPAGSGEALRYF

SEQ ID NO: 70399 - protein, 14 aa, Homo sapiens
  CDR3 for alpha chain variable domain of TCR clone 35200 (TRAV16, TRAJ33)
CALSAMDSNYQLIW

SEQ ID NO: 70400 - protein, 14 aa, Homo sapiens
  CDR3 for beta chain variable domain of TCR clone 35200 (TRBV7-6, TRBJ2-3)
CASSLGTVTDTQYF

SEQ ID NO: 70401 - protein, 10 aa, Homo sapiens
  CDR3 for alpha chain variable domain of TCR clone 35201 (TRAV8-4, TRAJ43)
WAVSADDMRF

SEQ ID NO: 70402 - protein, 15 aa, Homo sapiens
  CDR3 for beta chain variable domain of TCR clone 35201 (TRBV5-1, TRBJ2-3)
CASSVTSGSTDTQYF

SEQ ID NO: 70403 - protein, 15 aa, Homo sapiens
  CDR3 for alpha chain variable domain of TCR clone 35202 (TRAV3, TRAJ22)
CAVRDRGGSARQLTF

SEQ ID NO: 70404 - protein, 15 aa, Homo sapiens
  CDR3 for beta chain variable domain of TCR clone 35202 (TRBV11-3, TRBJ2-3)
CASLKDGREGDTQYF

SEQ ID NO: 70405 - protein, 16 aa, Homo sapiens
  CDR3 for alpha chain variable domain of TCR clone 35203 (TRAV8-3, TRAJ44)
CAVGASNTGPASKLTF

SEQ ID NO: 70406 - protein, 15 aa, Homo sapiens
  CDR3 for beta chain variable domain of TCR clone 35203 (TRBV27, TRBJ1-5)
CASTFNRGSNQPQHF

SEQ ID NO: 70407 - protein, 14 aa, Homo sapiens
  CDR3 for alpha chain variable domain of TCR clone 35204 (TRAV9-2, TRAJ6)
CALSDPGGSYIPTF

SEQ ID NO: 70408 - protein, 14 aa, Homo sapiens
  CDR3 for beta chain variable domain of TCR clone 35204 (TRBV12-4, TRBJ1-1)
CASSLGTGGTEAFF

SEQ ID NO: 70409 - protein, 14 aa, Homo sapiens
  CDR3 for alpha chain variable domain of TCR clone 35205 (TRAV2, TRAJ22)
CAVGRGGSAGQLTF

SEQ ID NO: 70410 - protein, 12 aa, Homo sapiens
  CDR3 for beta chain variable domain of TCR clone 35205 (TRBV19, TRBJ2-1)
CASSMQDTEQFF

SEQ ID NO: 70411 - protein, 12 aa, Homo sapiens
  CDR3 for alpha chain variable domain of TCR clone 35206 (TRAV6, TRAJ4)
NMFSGGYNKLIF

SEQ ID NO: 70412 - protein, 13 aa, Homo sapiens
  CDR3 for beta chain variable domain of TCR clone 35206 (TRBV4-1, TRBJ2-1)
CASGQEVQYEQFF

SEQ ID NO: 70413 - protein, 12 aa, Homo sapiens
  CDR3 for alpha chain variable domain of TCR clone 35207 (TRAV1-1, TRAJ39)
CAVPVLGNMLTF

SEQ ID NO: 70414 - protein, 15 aa, Homo sapiens
  CDR3 for beta chain variable domain of TCR clone 35207 (TRBV19, TRBJ1-6)
CASSTQGAVGSPLHF

SEQ ID NO: 70415 - protein, 14 aa, Homo sapiens
  CDR3 for alpha chain variable domain of TCR clone 35208 (TRAV2, TRAJ9)
CAVEDRSGGLKTIF

SEQ ID NO: 70416 - protein, 14 aa, Homo sapiens
  CDR3 for beta chain variable domain of TCR clone 35208 (TRBV7-9, TRBJ2-7)
CASSPSGGQNEQYF

SEQ ID NO: 70417 - protein, 14 aa, Homo sapiens
  CDR3 for alpha chain variable domain of TCR clone 35209 (TRAV12-2, TRAJ17)
CAVNIKAAGNKRTF

SEQ ID NO: 70418 - protein, 16 aa, Homo sapiens
  CDR3 for beta chain variable domain of TCR clone 35209 (TRBV20-1, TRBJ2-6)
CSASSQGYDGANVLTF

SEQ ID NO: 70419 - protein, 13 aa, Homo sapiens
  CDR3 for alpha chain variable domain of TCR clone 35210 (TRAV8-3, TRAJ28)
CAVGAVGSYQLTF

SEQ ID NO: 70420 - protein, 15 aa, Homo sapiens
  CDR3 for beta chain variable domain of TCR clone 35210 (TRBV7-9, TRBJ1-5)
CASSQGHQPNQSQHF

SEQ ID NO: 70421 - protein, 14 aa, Homo sapiens
  CDR3 for alpha chain variable domain of TCR clone 35211 (TRAV12-3, TRAJ10)
SHLPLTGGGNRLTF

SEQ ID NO: 70422 - protein, 17 aa, Homo sapiens
  CDR3 for beta chain variable domain of TCR clone 35211 (TRBV20-1, TRBJ2-1)
CSASSSGLAGSYNEQFF

SEQ ID NO: 70423 - protein, 12 aa, Homo sapiens
  CDR3 for alpha chain variable domain of TCR clone 35212 (TRAV8-3, TRAJ20)
CAVGANDYKLSF

SEQ ID NO: 70424 - protein, 16 aa, Homo sapiens
  CDR3 for beta chain variable domain of TCR clone 35212 (TRBV19, TRBJ2-2)
CASRSPGTGSTGELFF

SEQ ID NO: 70425 - protein, 12 aa, Homo sapiens
  CDR3 for alpha chain variable domain of TCR clone 35213 (TRAV8-3, TRAJ20)
CAVGANDYKLSF

SEQ ID NO: 70426 - protein, 16 aa, Homo sapiens
  CDR3 for beta chain variable domain of TCR clone 35213 (TRBV19, TRBJ2-2)
CASRSPGTGATRELFF

SEQ ID NO: 70427 - protein, 11 aa, Homo sapiens
  CDR3 for alpha chain variable domain of TCR clone 35214 (TRAV4, TRAJ23)
CLVAPGGKLVF

SEQ ID NO: 70428 - protein, 13 aa, Homo sapiens
  CDR3 for beta chain variable domain of TCR clone 35214 (TRBV7-9, TRBJ1-2)
CASSLKQNYGYTF

SEQ ID NO: 70429 - protein, 11 aa, Homo sapiens
  CDR3 for alpha chain variable domain of TCR clone 35215 (TRAV2, TRAJ13)
CASGGYQKVTF

SEQ ID NO: 70430 - protein, 16 aa, Homo sapiens
  CDR3 for beta chain variable domain of TCR clone 35215 (TRBV6-1, TRBJ2-5)
SASSETLDRGAETQYF

SEQ ID NO: 70431 - protein, 14 aa, Homo sapiens
  CDR3 for alpha chain variable domain of TCR clone 35216 (TRAV8-4, TRAJ9)
CAVSINTGGFKTIF

SEQ ID NO: 70432 - protein, 15 aa, Homo sapiens
  CDR3 for beta chain variable domain of TCR clone 35216 (TRBV10-2, TRBJ2-6)
CASSEQGTGANVLTF

SEQ ID NO: 70433 - protein, 13 aa, Homo sapiens
  CDR3 for alpha chain variable domain of TCR clone 35217 (TRAV8-6, TRAJ8)
CAVSNTGFQKLVF

SEQ ID NO: 70434 - protein, 14 aa, Homo sapiens
  CDR3 for beta chain variable domain of TCR clone 35217 (TRBV5-1, TRBJ2-7)
CASSRGESLYEQYF

SEQ ID NO: 70435 - protein, 19 aa, Homo sapiens
  CDR3 for alpha chain variable domain of TCR clone 35218 (TRAV8-3, TRAJ8)
LSTSVLWDPMNTGFQKLVF

SEQ ID NO: 70436 - protein, 13 aa, Homo sapiens
  CDR3 for beta chain variable domain of TCR clone 35218 (TRBV7-9, TRBJ2-1)
CASSWESYNEQFF

SEQ ID NO: 70437 - protein, 17 aa, Homo sapiens
  CDR3 for alpha chain variable domain of TCR clone 35219 (TRAV36/DV7, TRAJ52)
CAVAQRAGGTSYGKLTF

SEQ ID NO: 70438 - protein, 12 aa, Homo sapiens
  CDR3 for beta chain variable domain of TCR clone 35219 (TRBV11-2, TRBJ2-2)
CASSLGGGELFF

SEQ ID NO: 70439 - protein, 13 aa, Homo sapiens
  CDR3 for alpha chain variable domain of TCR clone 35220 (TRAV21, TRAJ57)
CAVIEGGSEKLVF

SEQ ID NO: 70440 - protein, 15 aa, Homo sapiens
  CDR3 for beta chain variable domain of TCR clone 35220 (TRBV10-3, TRBJ2-5)
CAISELGRGQETQYF

SEQ ID NO: 70441 - protein, 18 aa, Homo sapiens
  CDR3 for alpha chain variable domain of TCR clone 35221 (TRAV2, TRAJ32)
CCLLLCFHYGGATNKLIF

SEQ ID NO: 70442 - protein, 16 aa, Homo sapiens
  CDR3 for beta chain variable domain of TCR clone 35221 (TRBV7-9, TRBJ2-7)
CASSYPDREGGYEQYL

SEQ ID NO: 70443 - protein, 15 aa, Homo sapiens
  CDR3 for alpha chain variable domain of TCR clone 35222 (TRAV25, TRAJ52)
CAGTSGGASYGKLTF

SEQ ID NO: 70444 - protein, 13 aa, Homo sapiens
  CDR3 for beta chain variable domain of TCR clone 35222 (TRBV6-5, TRBJ2-5)
CASSPQGGETQYF

SEQ ID NO: 70445 - protein, 15 aa, Homo sapiens
  CDR3 for alpha chain variable domain of TCR clone 35223 (TRAV12-1, TRAJ44)
CVVFVNTGTASKLTF

SEQ ID NO: 70446 - protein, 17 aa, Homo sapiens
  CDR3 for beta chain variable domain of TCR clone 35223 (TRBV7-8, TRBJ2-6)
CASSAGTGGAEANVLTF

SEQ ID NO: 70447 - protein, 16 aa, Homo sapiens
  CDR3 for alpha chain variable domain of TCR clone 35224 (TRAV23/DV6, TRAJ48)
CAASGVVNFGNEKLTF

SEQ ID NO: 70448 - protein, 16 aa, Homo sapiens
  CDR3 for beta chain variable domain of TCR clone 35224 (TRBV4-2, TRBJ2-5)
CASSQELVGSQETQYF

SEQ ID NO: 70449 - protein, 15 aa, Homo sapiens
  CDR3 for alpha chain variable domain of TCR clone 35225 (TRAV21, TRAJ53)
YATLNSGGSNYKLTF

SEQ ID NO: 70450 - protein, 16 aa, Homo sapiens
  CDR3 for beta chain variable domain of TCR clone 35225 (TRBV29-1, TRBJ1-2)
CSVEANRDIANYGYTF

SEQ ID NO: 70451 - protein, 12 aa, Homo sapiens
  CDR3 for alpha chain variable domain of TCR clone 35226 (TRAV25, TRAJ29)
CAGHSGNTPHVF

SEQ ID NO: 70452 - protein, 14 aa, Homo sapiens
  CDR3 for beta chain variable domain of TCR clone 35226 (TRBV6-1, TRBJ2-7)
CASTRTGDYYEQYF

SEQ ID NO: 70453 - protein, 14 aa, Homo sapiens
  CDR3 for alpha chain variable domain of TCR clone 35227 (TRAV13-1, TRAJ40)
CAASMTSGTYKYIF

SEQ ID NO: 70454 - protein, 13 aa, Homo sapiens
  CDR3 for beta chain variable domain of TCR clone 35227 (TRBV7-9, TRBJ1-2)
CASSLKQNYGYTF

SEQ ID NO: 70455 - protein, 14 aa, Homo sapiens
  CDR3 for alpha chain variable domain of TCR clone 35228 (TRAV1-2, TRAJ16)
CAVNRFSDGQKLLF

SEQ ID NO: 70456 - protein, 15 aa, Homo sapiens
  CDR3 for beta chain variable domain of TCR clone 35228 (TRBV7-9, TRBJ1-6)
CASSSPGRGYSPLHF

SEQ ID NO: 70457 - protein, 16 aa, Homo sapiens
  CDR3 for alpha chain variable domain of TCR clone 35229 (TRAV30, TRAJ24)
CGTEIVDADSWGKFKL

SEQ ID NO: 70458 - protein, 14 aa, Homo sapiens
  CDR3 for beta chain variable domain of TCR clone 35229 (TRBV12-5, TRBJ2-5)
CASGSRTHQETQYF

SEQ ID NO: 70459 - protein, 14 aa, Homo sapiens
  CDR3 for alpha chain variable domain of TCR clone 35230 (TRAV12-3, TRAJ21)
CTATDLYNFNKFYF

SEQ ID NO: 70460 - protein, 13 aa, Homo sapiens
  CDR3 for beta chain variable domain of TCR clone 35230 (TRBV19, TRBJ2-2)
CASSSKNTGELFF

SEQ ID NO: 70461 - protein, 14 aa, Homo sapiens
  CDR3 for alpha chain variable domain of TCR clone 35231 (TRAV17, TRAJ40)
CATALTSGTYKYIF

SEQ ID NO: 70462 - protein, 19 aa, Homo sapiens
  CDR3 for beta chain variable domain of TCR clone 35231 (TRBV25-1, TRBJ2-2)
CAILVYRVDRGRKTGELFF

SEQ ID NO: 70463 - protein, 14 aa, Homo sapiens
  CDR3 for alpha chain variable domain of TCR clone 35232 (TRAV13-1, TRAJ9)
CAARALTGGFKTIF

SEQ ID NO: 70464 - protein, 13 aa, Homo sapiens
  CDR3 for beta chain variable domain of TCR clone 35232 (TRBV20-1, TRBJ1-1)
CSAGTVGNTEAFF

SEQ ID NO: 70465 - protein, 13 aa, Homo sapiens
  CDR3 for alpha chain variable domain of TCR clone 35233 (TRAV3, TRAJ27)
CAVRPLGAGKSTF

SEQ ID NO: 70466 - protein, 12 aa, Homo sapiens
  CDR3 for beta chain variable domain of TCR clone 35233 (TRBV7-8, TRBJ2-7)
CASSLGDREQYF

SEQ ID NO: 70467 - protein, 12 aa, Homo sapiens
  CDR3 for alpha chain variable domain of TCR clone 35234 (TRAV21, TRAJ11)
CAATSGYSTLTF

SEQ ID NO: 70468 - protein, 14 aa, Homo sapiens
  CDR3 for beta chain variable domain of TCR clone 35234 (TRBV20-1, TRBJ2-7)
CSVPELAGVGEQYF

SEQ ID NO: 70469 - protein, 14 aa, Homo sapiens
  CDR3 for alpha chain variable domain of TCR clone 35235 (TRAV12-3, TRAJ12)
CAMSEVDSSYKLIF

SEQ ID NO: 70470 - protein, 12 aa, Homo sapiens
  CDR3 for beta chain variable domain of TCR clone 35235 (TRBV18, TRBJ1-4)
CASSPSREKLSF

SEQ ID NO: 70471 - protein, 14 aa, Homo sapiens
  CDR3 for alpha chain variable domain of TCR clone 35236 (TRAV13-1, TRAJ35)
CAASKGGFGNVLHC

SEQ ID NO: 70472 - protein, 15 aa, Homo sapiens
  CDR3 for beta chain variable domain of TCR clone 35236 (TRBV20-1, TRBJ1-1)
CSASRGVTGNTEAFF

SEQ ID NO: 70473 - protein, 14 aa, Homo sapiens
  CDR3 for alpha chain variable domain of TCR clone 35237 (TRAV21, TRAJ23)
CAIMIYNQGGKLIS

SEQ ID NO: 70474 - protein, 18 aa, Homo sapiens
  CDR3 for beta chain variable domain of TCR clone 35237 (TRBV20-1, TRBJ2-6)
CSAETTPTHGSGANVLTF

SEQ ID NO: 70475 - protein, 13 aa, Homo sapiens
  CDR3 for alpha chain variable domain of TCR clone 35238 (TRAV36/DV7, TRAJ37)
CAVFSSNTGKLIF

SEQ ID NO: 70476 - protein, 14 aa, Homo sapiens
  CDR3 for beta chain variable domain of TCR clone 35238 (TRBV7-6, TRBJ2-3)
CASSLGTVTDTQYF

SEQ ID NO: 70477 - protein, 13 aa, Homo sapiens
  CDR3 for alpha chain variable domain of TCR clone 35239 (TRAV27, TRAJ6)
CAGGTRGSYIPTF

SEQ ID NO: 70478 - protein, 15 aa, Homo sapiens
  CDR3 for beta chain variable domain of TCR clone 35239 (TRBV19, TRBJ1-1)
CASTSGQIQNTEAFF

SEQ ID NO: 70479 - protein, 14 aa, Homo sapiens
  CDR3 for alpha chain variable domain of TCR clone 35240 (TRAV8-3, TRAJ7)
CAAIELYENNRLAF

SEQ ID NO: 70480 - protein, 15 aa, Homo sapiens
  CDR3 for beta chain variable domain of TCR clone 35240 (TRBV3-1, TRBJ2-1)
CASSTGDTNYNEQFF

SEQ ID NO: 70481 - protein, 14 aa, Homo sapiens
  CDR3 for alpha chain variable domain of TCR clone 35241 (TRAV20, TRAJ32)
CCGRYGGATNKLIF

SEQ ID NO: 70482 - protein, 16 aa, Homo sapiens
  CDR3 for beta chain variable domain of TCR clone 35241 (TRBV19, TRBJ2-2)
CASRSPGTGATRELFF

SEQ ID NO: 70483 - protein, 13 aa, Homo sapiens
  CDR3 for alpha chain variable domain of TCR clone 35242 (TRAV20, TRAJ48)
CAVQGVGNEKLTF

SEQ ID NO: 70484 - protein, 19 aa, Homo sapiens
  CDR3 for beta chain variable domain of TCR clone 35242 (TRBV2, TRBJ2-2)
CASSHPGLAGGGNTGELFF

SEQ ID NO: 70485 - protein, 13 aa, Homo sapiens
  CDR3 for alpha chain variable domain of TCR clone 35243 (TRAV27, TRAJ6)
CAGGTRGSYIPTF

SEQ ID NO: 70486 - protein, 15 aa, Homo sapiens
  CDR3 for beta chain variable domain of TCR clone 35243 (TRBV19, TRBJ2-1)
CASIKGRGPYNEQFF

SEQ ID NO: 70487 - protein, 14 aa, Homo sapiens
  CDR3 for alpha chain variable domain of TCR clone 35244 (TRAV1-2, TRAJ16)
CAVNRLSDGQKLLF

SEQ ID NO: 70488 - protein, 16 aa, Homo sapiens
  CDR3 for beta chain variable domain of TCR clone 35244 (TRBV19, TRBJ2-3)
CASSPEWDRGTDTQYF

SEQ ID NO: 70489 - protein, 14 aa, Homo sapiens
  CDR3 for alpha chain variable domain of TCR clone 35245 (TRAV13-1, TRAJ44)
CAAKATGTASKLTF

SEQ ID NO: 70490 - protein, 17 aa, Homo sapiens
  CDR3 for beta chain variable domain of TCR clone 35245 (TRBV7-3, TRBJ2-3)
RASSLMKRMRGADTQYL

SEQ ID NO: 70491 - protein, 14 aa, Homo sapiens
  CDR3 for alpha chain variable domain of TCR clone 35246 (TRAV12-2, TRAJ44)
CAVNPASTASKLTF

SEQ ID NO: 70492 - protein, 14 aa, Homo sapiens
  CDR3 for beta chain variable domain of TCR clone 35246 (TRBV23-1, TRBJ2-5)
CASSFLRSQETQYF

SEQ ID NO: 70493 - protein, 12 aa, Homo sapiens
  CDR3 for alpha chain variable domain of TCR clone 35247 (TRAV16, TRAJ10)
CSRTGGGNKLTF

SEQ ID NO: 70494 - protein, 15 aa, Homo sapiens
  CDR3 for beta chain variable domain of TCR clone 35247 (TRBV6-3, TRBJ2-7)
CASGSPGTVFYEQYF

SEQ ID NO: 70495 - protein, 21 aa, Homo sapiens
  CDR3 for alpha chain variable domain of TCR clone 35248 (TRAV16, TRAJ22)
HLKKPFAQEEDSSMYLRQLTF

SEQ ID NO: 70496 - protein, 15 aa, Homo sapiens
  CDR3 for beta chain variable domain of TCR clone 35248 (TRBV7-9, TRBJ1-6)
CASSSPGRGNSPLHF

SEQ ID NO: 70497 - protein, 10 aa, Homo sapiens
  CDR3 for alpha chain variable domain of TCR clone 35249 (TRAV26-1, TRAJ40)
CIAGTYKYIF

SEQ ID NO: 70498 - protein, 15 aa, Homo sapiens
  CDR3 for beta chain variable domain of TCR clone 35249 (TRBV19, TRBJ2-1)
CACSSPGVPLDEQFF

SEQ ID NO: 70499 - protein, 14 aa, Homo sapiens
  CDR3 for alpha chain variable domain of TCR clone 35250 (TRAV12-3, TRAJ10)
RHLPLTGGGNKLTF

SEQ ID NO: 70500 - protein, 15 aa, Homo sapiens
  CDR3 for beta chain variable domain of TCR clone 35250 (TRBV7-3, TRBJ2-2)
CASSETGQGTGELFF

SEQ ID NO: 70501 - protein, 17 aa, Homo sapiens
  CDR3 for alpha chain variable domain of TCR clone 35251 (TRAV3, TRAJ6)
CAVRDGPRAGGSYIPTF

SEQ ID NO: 70502 - protein, 12 aa, Homo sapiens
  CDR3 for beta chain variable domain of TCR clone 35251 (TRBV28, TRBJ2-3)
CASSLYRDTQYF

SEQ ID NO: 70503 - protein, 13 aa, Homo sapiens
  CDR3 for alpha chain variable domain of TCR clone 35252 (TRAV8-6, TRAJ49)
CAVITNTGNQFYF

SEQ ID NO: 70504 - protein, 15 aa, Homo sapiens
  CDR3 for beta chain variable domain of TCR clone 35252 (TRBV18, TRBJ2-1)
CASSPPSASYNEQFS

SEQ ID NO: 70505 - protein, 16 aa, Homo sapiens
  CDR3 for alpha chain variable domain of TCR clone 35253 (TRAV12-2, TRAJ10)
CAVDRVLTGGGNKLTF

SEQ ID NO: 70506 - protein, 12 aa, Homo sapiens
  CDR3 for beta chain variable domain of TCR clone 35253 (TRBV28, TRBJ2-7)
CASSFSSYEQYF

SEQ ID NO: 70507 - protein, 15 aa, Homo sapiens
  CDR3 for alpha chain variable domain of TCR clone 35254 (TRAV4, TRAJ39)
CLVGPNNNAGNMLTF

SEQ ID NO: 70508 - protein, 14 aa, Homo sapiens
  CDR3 for beta chain variable domain of TCR clone 35254 (TRBV6-1, TRBJ1-3)
CASVQGGGGNTIYF

SEQ ID NO: 70509 - protein, 13 aa, Homo sapiens
  CDR3 for alpha chain variable domain of TCR clone 35255 (TRAV26-2, TRAJ43)
CILRAVNNNDMRF

SEQ ID NO: 70510 - protein, 15 aa, Homo sapiens
  CDR3 for beta chain variable domain of TCR clone 35255 (TRBV7-2, TRBJ2-1)
CARTHGTGIYNEQFF

SEQ ID NO: 70511 - protein, 14 aa, Homo sapiens
  CDR3 for alpha chain variable domain of TCR clone 35256 (TRAV12-2, TRAJ6)
CASKWGGGSYIPTL

SEQ ID NO: 70512 - protein, 13 aa, Homo sapiens
  CDR3 for beta chain variable domain of TCR clone 35256 (TRBV2, TRBJ1-1)
CASSEGGNTEAFF

SEQ ID NO: 70513 - protein, 14 aa, Homo sapiens
  CDR3 for alpha chain variable domain of TCR clone 35257 (TRAV1-2, TRAJ8)
CAVREDTGFQKLVF

SEQ ID NO: 70514 - protein, 12 aa, Homo sapiens
  CDR3 for beta chain variable domain of TCR clone 35257 (TRBV7-9, TRBJ1-4)
CASSTDREKLFF

SEQ ID NO: 70515 - protein, 13 aa, Homo sapiens
  CDR3 for alpha chain variable domain of TCR clone 35258 (TRAV8-3, TRAJ28)
CAVGAVGSYQLTF

SEQ ID NO: 70516 - protein, 14 aa, Homo sapiens
  CDR3 for beta chain variable domain of TCR clone 35258 (TRBV4-1, TRBJ2-2)
CASSQAVNTGELFF

SEQ ID NO: 70517 - protein, 15 aa, Homo sapiens
  CDR3 for alpha chain variable domain of TCR clone 35259 (TRAV13-2, TRAJ10)
CAENKIEGGGNKLTF

SEQ ID NO: 70518 - protein, 15 aa, Homo sapiens
  CDR3 for beta chain variable domain of TCR clone 35259 (TRBV5-1, TRBJ1-2)
CASSPGDRGSYGYTF

SEQ ID NO: 70519 - protein, 12 aa, Homo sapiens
  CDR3 for alpha chain variable domain of TCR clone 35260 (TRAV8-3, TRAJ26)
CAGDNYGQNFVF

SEQ ID NO: 70520 - protein, 13 aa, Homo sapiens
  CDR3 for beta chain variable domain of TCR clone 35260 (TRBV20-1, TRBJ1-1)
CSAPLRGGTEAFF

SEQ ID NO: 70521 - protein, 14 aa, Homo sapiens
  CDR3 for alpha chain variable domain of TCR clone 35261 (TRAV8-3, TRAJ9)
CAVVYNTGGFKTIF

SEQ ID NO: 70522 - protein, 14 aa, Homo sapiens
  CDR3 for beta chain variable domain of TCR clone 35261 (TRBV7-3, TRBJ2-2)
CASSSRGYTGELFF

SEQ ID NO: 70523 - protein, 16 aa, Homo sapiens
  CDR3 for alpha chain variable domain of TCR clone 35262 (TRAV1-2, TRAJ10)
CAVRGVLTGGGNKLTF

SEQ ID NO: 70524 - protein, 15 aa, Homo sapiens
  CDR3 for beta chain variable domain of TCR clone 35262 (TRBV20-1, TRBJ2-5)
CSAEGTGGLQETQYF

SEQ ID NO: 70525 - protein, 15 aa, Homo sapiens
  CDR3 for alpha chain variable domain of TCR clone 35263 (TRAV12-3, TRAJ6)
CAMSATTGGSYIPTF

SEQ ID NO: 70526 - protein, 12 aa, Homo sapiens
  CDR3 for beta chain variable domain of TCR clone 35263 (TRBV11-2, TRBJ2-1)
CASSPGNNEQFF

SEQ ID NO: 70527 - protein, 18 aa, Homo sapiens
  CDR3 for alpha chain variable domain of TCR clone 35264 (TRAV26-1, TRAJ52)
CIVRVAGAGGTSYGKLTF

SEQ ID NO: 70528 - protein, 13 aa, Homo sapiens
  CDR3 for beta chain variable domain of TCR clone 35264 (TRBV7-8, TRBJ1-2)
CASSAQSYYGYTS

SEQ ID NO: 70529 - protein, 16 aa, Homo sapiens
  CDR3 for alpha chain variable domain of TCR clone 35265 (TRAV30, TRAJ24)
CGTEIVDADSRGKFQF

SEQ ID NO: 70530 - protein, 16 aa, Homo sapiens
  CDR3 for beta chain variable domain of TCR clone 35265 (TRBV2, TRBJ1-3)
CASSGGAGRSGNTIYF

SEQ ID NO: 70531 - protein, 14 aa, Homo sapiens
  CDR3 for alpha chain variable domain of TCR clone 35266 (TRAV26-1, TRAJ45)
CIVRVVGGADGLTF

SEQ ID NO: 70532 - protein, 16 aa, Homo sapiens
  CDR3 for beta chain variable domain of TCR clone 35266 (TRBV7-9, TRBJ1-1)
CASSLTQVRANTEAFF

SEQ ID NO: 70533 - protein, 16 aa, Homo sapiens
  CDR3 for alpha chain variable domain of TCR clone 35267 (TRAV8-3, TRAJ10)
CAVGPGVTGGGNKLTF

SEQ ID NO: 70534 - protein, 13 aa, Homo sapiens
  CDR3 for beta chain variable domain of TCR clone 35267 (TRBV18, TRBJ1-1)
CASSPGPPGEAFF

SEQ ID NO: 70535 - protein, 11 aa, Homo sapiens
  CDR3 for alpha chain variable domain of TCR clone 35268 (TRAV1-2, TRAJ40)
CAVPGTYKYIF

SEQ ID NO: 70536 - protein, 16 aa, Homo sapiens
  CDR3 for beta chain variable domain of TCR clone 35268 (TRBV29-1, TRBJ2-7)
CSVEVVGTSGSYEQCF

SEQ ID NO: 70537 - protein, 14 aa, Homo sapiens
  CDR3 for alpha chain variable domain of TCR clone 35269 (TRAV13-1, TRAJ12)
CSNYPMDSSYKLIF

SEQ ID NO: 70538 - protein, 11 aa, Homo sapiens
  CDR3 for beta chain variable domain of TCR clone 35269 (TRBV20-1, TRBJ2-1)
CGLSSGSEQFF

SEQ ID NO: 70539 - protein, 16 aa, Homo sapiens
  CDR3 for alpha chain variable domain of TCR clone 35270 (TRAV30, TRAJ24)
CGTEIVDADSWGKFQF

SEQ ID NO: 70540 - protein, 17 aa, Homo sapiens
  CDR3 for beta chain variable domain of TCR clone 35270 (TRBV24-1, TRBJ2-1)
CATSDVSTSGTYNEQFF

SEQ ID NO: 70541 - protein, 14 aa, Homo sapiens
  CDR3 for alpha chain variable domain of TCR clone 35271 (TRAV35, TRAJ33)
CAGSSQDSNYQLIW

SEQ ID NO: 70542 - protein, 16 aa, Homo sapiens
  CDR3 for beta chain variable domain of TCR clone 35271 (TRBV12-5, TRBJ2-5)
CASGPRTSGNQETQYF

SEQ ID NO: 70543 - protein, 11 aa, Homo sapiens
  CDR3 for alpha chain variable domain of TCR clone 35272 (TRAV35, TRAJ30)
CAPGGDDKITF

SEQ ID NO: 70544 - protein, 16 aa, Homo sapiens
  CDR3 for beta chain variable domain of TCR clone 35272 (TRBV7-6, TRBJ2-1)
CIAVPAAWGGSDEQFF

SEQ ID NO: 70545 - protein, 15 aa, Homo sapiens
  CDR3 for alpha chain variable domain of TCR clone 35273 (TRAV12-2, TRAJ53)
CAVNGGGGSNYKLTS

SEQ ID NO: 70546 - protein, 15 aa, Homo sapiens
  CDR3 for beta chain variable domain of TCR clone 35273 (TRBV20-1, TRBJ2-7)
CSARDRVSGMDEQYF

SEQ ID NO: 70547 - protein, 11 aa, Homo sapiens
  CDR3 for alpha chain variable domain of TCR clone 35274 (TRAV35, TRAJ30)
CAPGGDDKIIF

SEQ ID NO: 70548 - protein, 15 aa, Homo sapiens
  CDR3 for beta chain variable domain of TCR clone 35274 (TRBV9, TRBJ1-6)
CASSIAGTGDSPLHF

SEQ ID NO: 70549 - protein, 15 aa, Homo sapiens
  CDR3 for alpha chain variable domain of TCR clone 35275 (TRAV8-3, TRAJ11)
CAVGLLNSGYSTLTF

SEQ ID NO: 70550 - protein, 15 aa, Homo sapiens
  CDR3 for beta chain variable domain of TCR clone 35275 (TRBV20-1, TRBJ2-7)
CSARDRVSGMDEQYF

SEQ ID NO: 70551 - protein, 11 aa, Homo sapiens
  CDR3 for alpha chain variable domain of TCR clone 35276 (TRAV39, TRAJ33)
CAGDRWIATIS

SEQ ID NO: 70552 - protein, 14 aa, Homo sapiens
  CDR3 for beta chain variable domain of TCR clone 35276 (TRBV28, TRBJ2-3)
CASRSRDSTDTQYF

SEQ ID NO: 70553 - protein, 11 aa, Homo sapiens
  CDR3 for alpha chain variable domain of TCR clone 35277 (TRAV2, TRAJ33)
CAVESNHQLIW

SEQ ID NO: 70554 - protein, 16 aa, Homo sapiens
  CDR3 for beta chain variable domain of TCR clone 35277 (TRBV20-1, TRBJ1-4)
CSAPGQGLLTNEKLFF

SEQ ID NO: 70555 - protein, 16 aa, Homo sapiens
  CDR3 for alpha chain variable domain of TCR clone 35278 (TRAV23/DV6, TRAJ9)
CAASIGGNTGGFKTIF

SEQ ID NO: 70556 - protein, 14 aa, Homo sapiens
  CDR3 for beta chain variable domain of TCR clone 35278 (TRBV9, TRBJ2-7)
CASRVGVGSYEQYF

SEQ ID NO: 70557 - protein, 11 aa, Homo sapiens
  CDR3 for alpha chain variable domain of TCR clone 35279 (TRAV2, TRAJ13)
CASGGYQKVTF

SEQ ID NO: 70558 - protein, 20 aa, Homo sapiens
  CDR3 for beta chain variable domain of TCR clone 35279 (TRBV6-1, TRBJ2-5)
CASSETLDRERRPSTSGQAR

SEQ ID NO: 70559 - protein, 15 aa, Homo sapiens
  CDR3 for alpha chain variable domain of TCR clone 35280 (TRAV8-6, TRAJ10)
CAVSDQAGGGNKLTF

SEQ ID NO: 70560 - protein, 15 aa, Homo sapiens
  CDR3 for beta chain variable domain of TCR clone 35280 (TRBV3-1, TRBJ2-5)
CASSANLGGLETQYF

SEQ ID NO: 70561 - protein, 12 aa, Homo sapiens
  CDR3 for alpha chain variable domain of TCR clone 35281 (TRAV3, TRAJ37)
CAVRSNTGKLIF

SEQ ID NO: 70562 - protein, 16 aa, Homo sapiens
  CDR3 for beta chain variable domain of TCR clone 35281 (TRBV7-2, TRBJ2-3)
CASSLVGDASTDTQYF

SEQ ID NO: 70563 - protein, 12 aa, Homo sapiens
  CDR3 for alpha chain variable domain of TCR clone 35282 (TRAV17, TRAJ39)
CATGAAGNMLTF

SEQ ID NO: 70564 - protein, 14 aa, Homo sapiens
  CDR3 for beta chain variable domain of TCR clone 35282 (TRBV7-9, TRBJ1-2)
CASSRQGANYGYNF

SEQ ID NO: 70565 - protein, 15 aa, Homo sapiens
  CDR3 for alpha chain variable domain of TCR clone 35283 (TRAV35, TRAJ50)
CAGQLRKTSYDKVIS

SEQ ID NO: 70566 - protein, 12 aa, Homo sapiens
  CDR3 for beta chain variable domain of TCR clone 35283 (TRBV5-1, TRBJ2-5)
CASSLGLETQYF

SEQ ID NO: 70567 - protein, 14 aa, Homo sapiens
  CDR3 for alpha chain variable domain of TCR clone 35284 (TRAV12-2, TRAJ13)
CAVKKTGGYQRVTF

SEQ ID NO: 70568 - protein, 16 aa, Homo sapiens
  CDR3 for beta chain variable domain of TCR clone 35284 (TRBV12-5, TRBJ2-5)
CASGPRTSGNQETQYF

SEQ ID NO: 70569 - protein, 14 aa, Homo sapiens
  CDR3 for alpha chain variable domain of TCR clone 35285 (TRAV8-1, TRAJ15)
CAVNGQQAGTALIF

SEQ ID NO: 70570 - protein, 14 aa, Homo sapiens
  CDR3 for beta chain variable domain of TCR clone 35285 (TRBV12-4, TRBJ1-1)
CASSFSQMNTEAFF

SEQ ID NO: 70571 - protein, 10 aa, Homo sapiens
  CDR3 for alpha chain variable domain of TCR clone 35286 (TRAV12-3, TRAJ49)
CAMNDDQFYF

SEQ ID NO: 70572 - protein, 13 aa, Homo sapiens
  CDR3 for beta chain variable domain of TCR clone 35286 (TRBV7-3, TRBJ1-1)
CASSQDWGAEAFF

SEQ ID NO: 70573 - protein, 13 aa, Homo sapiens
  CDR3 for alpha chain variable domain of TCR clone 35287 (TRAV13-1, TRAJ21)
CAASIYNFNKFYF

SEQ ID NO: 70574 - protein, 16 aa, Homo sapiens
  CDR3 for beta chain variable domain of TCR clone 35287 (TRBV7-2, TRBJ2-3)
CASSLVALYSTDTQYF

SEQ ID NO: 70575 - protein, 16 aa, Homo sapiens
  CDR3 for alpha chain variable domain of TCR clone 35288 (TRAV21, TRAJ37)
CAVRPRGSSNTGKLIF

SEQ ID NO: 70576 - protein, 13 aa, Homo sapiens
  CDR3 for beta chain variable domain of TCR clone 35288 (TRBV7-9, TRBJ2-5)
CASLSPGKETQYF

SEQ ID NO: 70577 - protein, 13 aa, Homo sapiens
  CDR3 for alpha chain variable domain of TCR clone 35289 (TRAV35, TRAJ32)
CAGVGGATNKLIF

SEQ ID NO: 70578 - protein, 17 aa, Homo sapiens
  CDR3 for beta chain variable domain of TCR clone 35289 (TRBV4-3, TRBJ2-1)
CASSQFSSGRAPGEQFF

SEQ ID NO: 70579 - protein, 10 aa, Homo sapiens
  CDR3 for alpha chain variable domain of TCR clone 35290 (TRAV1-2, TRAJ20)
CALNDYKLSF

SEQ ID NO: 70580 - protein, 16 aa, Homo sapiens
  CDR3 for beta chain variable domain of TCR clone 35290 (TRBV20-1, TRBJ1-1)
CSARALTQGMNTEASF

SEQ ID NO: 70581 - protein, 14 aa, Homo sapiens
  CDR3 for alpha chain variable domain of TCR clone 35291 (TRAV12-3, TRAJ9)
CAMSPNTGGFKTIF

SEQ ID NO: 70582 - protein, 12 aa, Homo sapiens
  CDR3 for beta chain variable domain of TCR clone 35291 (TRBV19, TRBJ1-5)
CASSIAQQPQLF

SEQ ID NO: 70583 - protein, 15 aa, Homo sapiens
  CDR3 for alpha chain variable domain of TCR clone 35292 (TRAV8-3, TRAJ45)
CASSYSGGGADGLTF

SEQ ID NO: 70584 - protein, 16 aa, Homo sapiens
  CDR3 for beta chain variable domain of TCR clone 35292 (TRBV13, TRBJ2-2)
CASSPRTGEHTGELFF

SEQ ID NO: 70585 - protein, 19 aa, Homo sapiens
  CDR3 for alpha chain variable domain of TCR clone 35293 (TRAV29/DV5, TRAJ49)
CSVLLCSKLTVDTGNQFYF

SEQ ID NO: 70586 - protein, 14 aa, Homo sapiens
  CDR3 for beta chain variable domain of TCR clone 35293 (TRBV7-2, TRBJ2-5)
CASSPRGSSETQYF

SEQ ID NO: 70587 - protein, 14 aa, Homo sapiens
  CDR3 for alpha chain variable domain of TCR clone 35294 (TRAV17, TRAJ57)
CATDPQGGSEKLVF

SEQ ID NO: 70588 - protein, 16 aa, Homo sapiens
  CDR3 for beta chain variable domain of TCR clone 35294 (TRBV19, TRBJ2-2)
CASRSPGTGATGELFF

SEQ ID NO: 70589 - protein, 15 aa, Homo sapiens
  CDR3 for alpha chain variable domain of TCR clone 35295 (TRAV35, TRAJ40)
CAGQRGTSGTYKYIF

SEQ ID NO: 70590 - protein, 14 aa, Homo sapiens
  CDR3 for beta chain variable domain of TCR clone 35295 (TRBV7-3, TRBJ2-1)
CASSLAGGTNEQFF

SEQ ID NO: 70591 - protein, 13 aa, Homo sapiens
  CDR3 for alpha chain variable domain of TCR clone 35296 (TRAV1-1, TRAJ13)
CAVDSGGYQKVTF

SEQ ID NO: 70592 - protein, 12 aa, Homo sapiens
  CDR3 for beta chain variable domain of TCR clone 35296 (TRBV28, TRBJ2-1)
CASSVQINEQFF

SEQ ID NO: 70593 - protein, 15 aa, Homo sapiens
  CDR3 for alpha chain variable domain of TCR clone 35297 (TRAV17, TRAJ57)
CATGPSQGGSEKLVF

SEQ ID NO: 70594 - protein, 14 aa, Homo sapiens
  CDR3 for beta chain variable domain of TCR clone 35297 (TRBV7-3, TRBJ1-1)
CASSLKGGNTEAFF

SEQ ID NO: 70595 - protein, 10 aa, Homo sapiens
  CDR3 for alpha chain variable domain of TCR clone 35298 (TRAV20, TRAJ22)
CAAPARQLTF

SEQ ID NO: 70596 - protein, 14 aa, Homo sapiens
  CDR3 for beta chain variable domain of TCR clone 35298 (TRBV19, TRBJ2-1)
YASSMGSGATEQFF

SEQ ID NO: 70597 - protein, 11 aa, Homo sapiens
  CDR3 for alpha chain variable domain of TCR clone 35299 (TRAV3, TRAJ17)
PRGAAGNKLTF

SEQ ID NO: 70598 - protein, 16 aa, Homo sapiens
  CDR3 for beta chain variable domain of TCR clone 35299 (TRBV7-6, TRBJ2-1)
CASSTPGPSSYNEQFF

SEQ ID NO: 70599 - protein, 12 aa, Homo sapiens
  CDR3 for alpha chain variable domain of TCR clone 35300 (TRAV27, TRAJ35)
CAGADFGNMLHC

SEQ ID NO: 70600 - protein, 16 aa, Homo sapiens
  CDR3 for beta chain variable domain of TCR clone 35300 (TRBV6-1, TRBJ2-1)
CASILRQGSSYNEQFF

SEQ ID NO: 70601 - protein, 11 aa, Homo sapiens
  CDR3 for alpha chain variable domain of TCR clone 35301 (TRAV2, TRAJ33)
CAVDSNYQLIW

SEQ ID NO: 70602 - protein, 15 aa, Homo sapiens
  CDR3 for beta chain variable domain of TCR clone 35301 (TRBV19, TRBJ1-1)
CASTSGQIQSTEAFF

SEQ ID NO: 70603 - protein, 14 aa, Homo sapiens
  CDR3 for alpha chain variable domain of TCR clone 35302 (TRAV1-1, TRAJ27)
CAVSYNTNAGKSTF

SEQ ID NO: 70604 - protein, 15 aa, Homo sapiens
  CDR3 for beta chain variable domain of TCR clone 35302 (TRBV7-2, TRBJ2-1)
CASSSGLAGGNEQFF

SEQ ID NO: 70605 - protein, 12 aa, Homo sapiens
  CDR3 for alpha chain variable domain of TCR clone 35303 (TRAV12-1, TRAJ40)
GVVYSGTYKYIF

SEQ ID NO: 70606 - protein, 18 aa, Homo sapiens
  CDR3 for beta chain variable domain of TCR clone 35303 (TRBV11-2, TRBJ2-3)
CASSLGGASRGAPNTQYF

SEQ ID NO: 70607 - protein, 13 aa, Homo sapiens
  CDR3 for alpha chain variable domain of TCR clone 35304 (TRAV8-6, TRAJ49)
CAVITNTGNQFYF

SEQ ID NO: 70608 - protein, 13 aa, Homo sapiens
  CDR3 for beta chain variable domain of TCR clone 35304 (TRBV4-2, TRBJ1-1)
CASSQAGNTEAFF

SEQ ID NO: 70609 - protein, 15 aa, Homo sapiens
  CDR3 for alpha chain variable domain of TCR clone 35305 (TRAV25, TRAJ52)
CAGRPGGTSYGQLTF

SEQ ID NO: 70610 - protein, 17 aa, Homo sapiens
  CDR3 for beta chain variable domain of TCR clone 35305 (TRBV7-8, TRBJ2-6)
CASSAGTGGAGANVLTF

SEQ ID NO: 70611 - protein, 14 aa, Homo sapiens
  CDR3 for alpha chain variable domain of TCR clone 35306 (TRAV1-2, TRAJ16)
CAVNRFSNGQKLLF

SEQ ID NO: 70612 - protein, 14 aa, Homo sapiens
  CDR3 for beta chain variable domain of TCR clone 35306 (TRBV7-2, TRBJ1-5)
CASSTQGAGQPQHF

SEQ ID NO: 70613 - protein, 14 aa, Homo sapiens
  CDR3 for alpha chain variable domain of TCR clone 35307 (TRAV12-1, TRAJ17)
CVVNYKAAGNKLTF

SEQ ID NO: 70614 - protein, 16 aa, Homo sapiens
  CDR3 for beta chain variable domain of TCR clone 35307 (TRBV12-4, TRBJ1-5)
CASSRLVGGSNQPQHF

SEQ ID NO: 70615 - protein, 17 aa, Homo sapiens
  CDR3 for alpha chain variable domain of TCR clone 35308 (TRAV4, TRAJ42)
CLVGVLTYGGSQGNLIF

SEQ ID NO: 70616 - protein, 12 aa, Homo sapiens
  CDR3 for beta chain variable domain of TCR clone 35308 (TRBV20-1, TRBJ2-1)
CSAQYTYNEQFF

SEQ ID NO: 70617 - protein, 11 aa, Homo sapiens
  CDR3 for alpha chain variable domain of TCR clone 35309 (TRAV1-2, TRAJ20)
CAVANDYKLSF

SEQ ID NO: 70618 - protein, 16 aa, Homo sapiens
  CDR3 for beta chain variable domain of TCR clone 35309 (TRBV7-3, TRBJ2-2)
CASSLKRGTLSGELFF

SEQ ID NO: 70619 - protein, 14 aa, Homo sapiens
  CDR3 for alpha chain variable domain of TCR clone 35310 (TRAV1-2, TRAJ16)
CAVNRFSDCQKLLF

SEQ ID NO: 70620 - protein, 14 aa, Homo sapiens
  CDR3 for beta chain variable domain of TCR clone 35310 (TRBV7-9, TRBJ2-3)
CASSLEDGTDTQYF

SEQ ID NO: 70621 - protein, 16 aa, Homo sapiens
  CDR3 for alpha chain variable domain of TCR clone 35311 (TRAV1-2, TRAJ10)
CAVRGVLTGGGNKLTF

SEQ ID NO: 70622 - protein, 16 aa, Homo sapiens
  CDR3 for beta chain variable domain of TCR clone 35311 (TRBV19, TRBJ2-1)
CASSKAGPSSYNEQFF

SEQ ID NO: 70623 - protein, 15 aa, Homo sapiens
  CDR3 for alpha chain variable domain of TCR clone 35312 (TRAV25, TRAJ53)
CPTSDSGGSNYKLTF

SEQ ID NO: 70624 - protein, 14 aa, Homo sapiens
  CDR3 for beta chain variable domain of TCR clone 35312 (TRBV11-2, TRBJ2-3)
CASSRLARTDTQYF

SEQ ID NO: 70625 - protein, 14 aa, Homo sapiens
  CDR3 for alpha chain variable domain of TCR clone 35313 (TRAV13-1, TRAJ9)
CAASALNGGFKTIF

SEQ ID NO: 70626 - protein, 13 aa, Homo sapiens
  CDR3 for beta chain variable domain of TCR clone 35313 (TRBV20-1, TRBJ1-1)
CSAGTVGNTEAFF

SEQ ID NO: 70627 - protein, 14 aa, Homo sapiens
  CDR3 for alpha chain variable domain of TCR clone 35314 (TRAV9-2, TRAJ39)
CALYIYNAGNMLTF

SEQ ID NO: 70628 - protein, 15 aa, Homo sapiens
  CDR3 for beta chain variable domain of TCR clone 35314 (TRBV28, TRBJ1-5)
CASSRPRTGNQPQHF

SEQ ID NO: 70629 - protein, 16 aa, Homo sapiens
  CDR3 for alpha chain variable domain of TCR clone 35315 (TRAV12-3, TRAJ53)
CAMSPGSGGSNHKLTF

SEQ ID NO: 70630 - protein, 13 aa, Homo sapiens
  CDR3 for beta chain variable domain of TCR clone 35315 (TRBV19, TRBJ1-2)
CASSVPGQDGYTF

SEQ ID NO: 70631 - protein, 13 aa, Homo sapiens
  CDR3 for alpha chain variable domain of TCR clone 35316 (TRAV3, TRAJ21)
RAVREPDFNKFYF

SEQ ID NO: 70632 - protein, 16 aa, Homo sapiens
  CDR3 for beta chain variable domain of TCR clone 35316 (TRBV5-1, TRBJ2-3)
CASSLGLAVYTDTQYF

SEQ ID NO: 70633 - protein, 11 aa, Homo sapiens
  CDR3 for alpha chain variable domain of TCR clone 35317 (TRAV12-3, TRAJ27)
FAMANAGKSTF

SEQ ID NO: 70634 - protein, 13 aa, Homo sapiens
  CDR3 for beta chain variable domain of TCR clone 35317 (TRBV20-1, TRBJ1-1)
CSARVGGNTEAFF

SEQ ID NO: 70635 - protein, 16 aa, Homo sapiens
  CDR3 for alpha chain variable domain of TCR clone 35318 (TRAV3, TRAJ37)
CAVRPHGSGNTGKLIF

SEQ ID NO: 70636 - protein, 16 aa, Homo sapiens
  CDR3 for beta chain variable domain of TCR clone 35318 (TRBV9, TRBJ1-2)
CASSVEEKVSLYGYTF

SEQ ID NO: 70637 - protein, 13 aa, Homo sapiens
  CDR3 for alpha chain variable domain of TCR clone 35319 (TRAV8-4, TRAJ34)
CAVTLYNTDELIF

SEQ ID NO: 70638 - protein, 17 aa, Homo sapiens
  CDR3 for beta chain variable domain of TCR clone 35319 (TRBV7-2, TRBJ2-2)
CASSPSWRGGGTGELFF

SEQ ID NO: 70639 - protein, 11 aa, Homo sapiens
  CDR3 for alpha chain variable domain of TCR clone 35320 (TRAV2, TRAJ13)
CASGGYQKVTF

SEQ ID NO: 70640 - protein, 16 aa, Homo sapiens
  CDR3 for beta chain variable domain of TCR clone 35320 (TRBV6-1, TRBJ2-5)
CASSATLDRGAETQYF

SEQ ID NO: 70641 - protein, 12 aa, Homo sapiens
  CDR3 for alpha chain variable domain of TCR clone 35321 (TRAV30, TRAJ39)
CGRGSAGNMLTF

SEQ ID NO: 70642 - protein, 15 aa, Homo sapiens
  CDR3 for beta chain variable domain of TCR clone 35321 (TRBV5-1, TRBJ1-1)
CASSWTGRGNTEAFF

SEQ ID NO: 70643 - protein, 16 aa, Homo sapiens
  CDR3 for alpha chain variable domain of TCR clone 35322 (TRAV35, TRAJ20)
CLADPSSGFNDYKLSF

SEQ ID NO: 70644 - protein, 14 aa, Homo sapiens
  CDR3 for beta chain variable domain of TCR clone 35322 (TRBV10-3, TRBJ2-2)
CAISEVSHSGELFF

SEQ ID NO: 70645 - protein, 14 aa, Homo sapiens
  CDR3 for alpha chain variable domain of TCR clone 35323 (TRAV1-2, TRAJ8)
CAVREDTGFQKLVF

SEQ ID NO: 70646 - protein, 13 aa, Homo sapiens
  CDR3 for beta chain variable domain of TCR clone 35323 (TRBV9, TRBJ2-1)
CASSPSGGSEQFF

SEQ ID NO: 70647 - protein, 15 aa, Homo sapiens
  CDR3 for alpha chain variable domain of TCR clone 35324 (TRAV27, TRAJ38)
CAARRNAGNNRKLLW

SEQ ID NO: 70648 - protein, 13 aa, Homo sapiens
  CDR3 for beta chain variable domain of TCR clone 35324 (TRBV20-1, TRBJ1-1)
CSARAGGNTEAFF

SEQ ID NO: 70649 - protein, 14 aa, Homo sapiens
  CDR3 for alpha chain variable domain of TCR clone 35325 (TRAV8-1, TRAJ22)
CAAPSSGSARQLTF

SEQ ID NO: 70650 - protein, 14 aa, Homo sapiens
  CDR3 for beta chain variable domain of TCR clone 35325 (TRBV9, TRBJ2-2)
CASGVGQGAGELFF

SEQ ID NO: 70651 - protein, 15 aa, Homo sapiens
  CDR3 for alpha chain variable domain of TCR clone 35326 (TRAV8-2, TRAJ9)
CVVSDPGTGGFKTIF

SEQ ID NO: 70652 - protein, 15 aa, Homo sapiens
  CDR3 for beta chain variable domain of TCR clone 35326 (TRBV28, TRBJ1-3)
CASSMGWASGNTIYF

SEQ ID NO: 70653 - protein, 12 aa, Homo sapiens
  CDR3 for alpha chain variable domain of TCR clone 35327 (TRAV2, TRAJ33)
CAVPDSTYQLIW

SEQ ID NO: 70654 - protein, 15 aa, Homo sapiens
  CDR3 for beta chain variable domain of TCR clone 35327 (TRBV10-2, TRBJ2-6)
CASSEQGTGANVLTF

SEQ ID NO: 70655 - protein, 18 aa, Homo sapiens
  CDR3 for alpha chain variable domain of TCR clone 35328 (TRAV26-2, TRAJ45)
CILRVDKYSGGGADGLTF

SEQ ID NO: 70656 - protein, 12 aa, Homo sapiens
  CDR3 for beta chain variable domain of TCR clone 35328 (TRBV29-1, TRBJ2-3)
CSVIGGGRYAVF

SEQ ID NO: 70657 - protein, 15 aa, Homo sapiens
  CDR3 for alpha chain variable domain of TCR clone 35329 (TRAV8-3, TRAJ27)
CAVGPPKTNAGKSTF

SEQ ID NO: 70658 - protein, 15 aa, Homo sapiens
  CDR3 for beta chain variable domain of TCR clone 35329 (TRBV7-2, TRBJ2-1)
CASSSGLEGGNEQFF

SEQ ID NO: 70659 - protein, 12 aa, Homo sapiens
  CDR3 for alpha chain variable domain of TCR clone 35330 (TRAV17, TRAJ13)
CATDGGYQKVTF

SEQ ID NO: 70660 - protein, 13 aa, Homo sapiens
  CDR3 for beta chain variable domain of TCR clone 35330 (TRBV20-1, TRBJ1-5)
CSARILGNQPQHF

SEQ ID NO: 70661 - protein, 14 aa, Homo sapiens
  CDR3 for alpha chain variable domain of TCR clone 35331 (TRAV12-2, TRAJ13)
CAVKKTGGYQKVTF

SEQ ID NO: 70662 - protein, 14 aa, Homo sapiens
  CDR3 for beta chain variable domain of TCR clone 35331 (TRBV28, TRBJ1-1)
CASSPRTRWAEAFF

SEQ ID NO: 70663 - protein, 12 aa, Homo sapiens
  CDR3 for alpha chain variable domain of TCR clone 35332 (TRAV3, TRAJ43)
CAVRDPNNDMRF

SEQ ID NO: 70664 - protein, 16 aa, Homo sapiens
  CDR3 for beta chain variable domain of TCR clone 35332 (TRBV7-9, TRBJ2-1)
CASSLALAGSYNEQFF

SEQ ID NO: 70665 - protein, 14 aa, Homo sapiens
  CDR3 for alpha chain variable domain of TCR clone 35333 (TRAV8-4, TRAJ27)
RAVSKGTNAGKSTF

SEQ ID NO: 70666 - protein, 16 aa, Homo sapiens
  CDR3 for beta chain variable domain of TCR clone 35333 (TRBV2, TRBJ2-7)
CASSSTRRGSSYEQYF

SEQ ID NO: 70667 - protein, 13 aa, Homo sapiens
  CDR3 for alpha chain variable domain of TCR clone 35334 (TRAV12-1, TRAJ6)
CVVFPGGSYIPTF

SEQ ID NO: 70668 - protein, 12 aa, Homo sapiens
  CDR3 for beta chain variable domain of TCR clone 35334 (TRBV12-4, TRBJ1-2)
CASSFIWLHLRF

SEQ ID NO: 70669 - protein, 14 aa, Homo sapiens
  CDR3 for alpha chain variable domain of TCR clone 35335 (TRAV8-2, TRAJ11)
CVVSEKSGYSTLTF

SEQ ID NO: 70670 - protein, 16 aa, Homo sapiens
  CDR3 for beta chain variable domain of TCR clone 35335 (TRBV28, TRBJ2-1)
CARSSPEYPRDNEQFF

SEQ ID NO: 70671 - protein, 12 aa, Homo sapiens
  CDR3 for alpha chain variable domain of TCR clone 35336 (TRAV2, TRAJ31)
CAVEDSNARLMF

SEQ ID NO: 70672 - protein, 16 aa, Homo sapiens
  CDR3 for beta chain variable domain of TCR clone 35336 (TRBV10-3, TRBJ2-1)
CAISGVGDGGGGEQFF

SEQ ID NO: 70673 - protein, 14 aa, Homo sapiens
  CDR3 for alpha chain variable domain of TCR clone 35337 (TRAV23/DV6, TRAJ4)
CAANLSGCYNKLIF

SEQ ID NO: 70674 - protein, 11 aa, Homo sapiens
  CDR3 for beta chain variable domain of TCR clone 35337 (TRBV7-9, TRBJ2-3)
CASSPTDTQYF

SEQ ID NO: 70675 - protein, 12 aa, Homo sapiens
  CDR3 for alpha chain variable domain of TCR clone 35338 (TRAV12-3, TRAJ17)
RAMTLTGNKLTF

SEQ ID NO: 70676 - protein, 15 aa, Homo sapiens
  CDR3 for beta chain variable domain of TCR clone 35338 (TRBV20-1, TRBJ2-7)
CSARDLVSGMDEQYF

SEQ ID NO: 70677 - protein, 15 aa, Homo sapiens
  CDR3 for alpha chain variable domain of TCR clone 35339 (TRAV17, TRAJ23)
CATDAEDNQGGKLIF

SEQ ID NO: 70678 - protein, 12 aa, Homo sapiens
  CDR3 for beta chain variable domain of TCR clone 35339 (TRBV2, TRBJ2-1)
CAKRGGYNEQFF

SEQ ID NO: 70679 - protein, 17 aa, Homo sapiens
  CDR3 for alpha chain variable domain of TCR clone 35340 (TRAV23/DV6, TRAJ57)
CAASSTLSQGGSGKLVF

SEQ ID NO: 70680 - protein, 14 aa, Homo sapiens
  CDR3 for beta chain variable domain of TCR clone 35340 (TRBV25-1, TRBJ1-1)
CASTHLGGNTEAFF

SEQ ID NO: 70681 - protein, 16 aa, Homo sapiens
  CDR3 for alpha chain variable domain of TCR clone 35341 (TRAV35, TRAJ18)
CAGLADRGSTLGRLYF

SEQ ID NO: 70682 - protein, 15 aa, Homo sapiens
  CDR3 for beta chain variable domain of TCR clone 35341 (TRBV5-4, TRBJ2-3)
CASSLYRGRTDTQYF

SEQ ID NO: 70683 - protein, 13 aa, Homo sapiens
  CDR3 for alpha chain variable domain of TCR clone 35342 (TRAV3, TRAJ29)
CDVRDIIDTPLVF

SEQ ID NO: 70684 - protein, 14 aa, Homo sapiens
  CDR3 for beta chain variable domain of TCR clone 35342 (TRBV27, TRBJ2-1)
CASSATGGYNEQFF

SEQ ID NO: 70685 - protein, 14 aa, Homo sapiens
  CDR3 for alpha chain variable domain of TCR clone 35343 (TRAV1-2, TRAJ16)
CAVNRFSDGQKLLF

SEQ ID NO: 70686 - protein, 14 aa, Homo sapiens
  CDR3 for beta chain variable domain of TCR clone 35343 (TRBV19, TRBJ1-1)
CASTGHRLNTEAFF

SEQ ID NO: 70687 - protein, 16 aa, Homo sapiens
  CDR3 for alpha chain variable domain of TCR clone 35344 (TRAV3, TRAJ37)
CVVRGKGSGNTGKLIF

SEQ ID NO: 70688 - protein, 15 aa, Homo sapiens
  CDR3 for beta chain variable domain of TCR clone 35344 (TRBV7-9, TRBJ2-2)
CASGPLDTFPGELFF

SEQ ID NO: 70689 - protein, 15 aa, Homo sapiens
  CDR3 for alpha chain variable domain of TCR clone 35345 (TRAV34, TRAJ38)
RGADFTPGNNRKLIW

SEQ ID NO: 70690 - protein, 14 aa, Homo sapiens
  CDR3 for beta chain variable domain of TCR clone 35345 (TRBV11-2, TRBJ2-3)
CASSLGGGANTQYF

SEQ ID NO: 70691 - protein, 14 aa, Homo sapiens
  CDR3 for alpha chain variable domain of TCR clone 35346 (TRAV12-2, TRAJ40)
CAVKLPSGTYKYIF

SEQ ID NO: 70692 - protein, 14 aa, Homo sapiens
  CDR3 for beta chain variable domain of TCR clone 35346 (TRBV20-1, TRBJ1-1)
CSAQTRIGGTEAFF

SEQ ID NO: 70693 - protein, 11 aa, Homo sapiens
  CDR3 for alpha chain variable domain of TCR clone 35347 (TRAV13-1, TRAJ20)
CAASNDYKLSF

SEQ ID NO: 70694 - protein, 15 aa, Homo sapiens
  CDR3 for beta chain variable domain of TCR clone 35347 (TRBV19, TRBJ2-1)
CASSSPGVPLDEQFF

SEQ ID NO: 70695 - protein, 16 aa, Homo sapiens
  CDR3 for alpha chain variable domain of TCR clone 35348 (TRAV3, TRAJ10)
CAVRDMRAGGGNKLTF

SEQ ID NO: 70696 - protein, 14 aa, Homo sapiens
  CDR3 for beta chain variable domain of TCR clone 35348 (TRBV28, TRBJ1-2)
CASRIQGANYGYTF

SEQ ID NO: 70697 - protein, 16 aa, Homo sapiens
  CDR3 for alpha chain variable domain of TCR clone 35349 (TRAV30, TRAJ24)
CGTEIVDADSWGKFQF

SEQ ID NO: 70698 - protein, 15 aa, Homo sapiens
  CDR3 for beta chain variable domain of TCR clone 35349 (TRBV20-1, TRBJ2-7)
CSARDRVSGTDEQYF

SEQ ID NO: 70699 - protein, 13 aa, Homo sapiens
  CDR3 for alpha chain variable domain of TCR clone 35350 (TRAV2, TRAJ40)
CAVVTSGSYKYIF

SEQ ID NO: 70700 - protein, 15 aa, Homo sapiens
  CDR3 for beta chain variable domain of TCR clone 35350 (TRBV9, TRBJ1-6)
CASSVAGTGDSPLHF

SEQ ID NO: 70701 - protein, 14 aa, Homo sapiens
  CDR3 for alpha chain variable domain of TCR clone 35351 (TRAV12-3, TRAJ29)
CAMSPYSGNAPLVF

SEQ ID NO: 70702 - protein, 16 aa, Homo sapiens
  CDR3 for beta chain variable domain of TCR clone 35351 (TRBV2, TRBJ2-1)
CASRGPAGGKYNEQFF

SEQ ID NO: 70703 - protein, 11 aa, Homo sapiens
  CDR3 for alpha chain variable domain of TCR clone 35352 (TRAV4, TRAJ23)
CLMAPGGKLIF

SEQ ID NO: 70704 - protein, 15 aa, Homo sapiens
  CDR3 for beta chain variable domain of TCR clone 35352 (TRBV7-2, TRBJ2-1)
CASSFQADEYNEQFF

SEQ ID NO: 70705 - protein, 12 aa, Homo sapiens
  CDR3 for alpha chain variable domain of TCR clone 35353 (TRAV1-1, TRAJ12)
CAVGYSSYKLIF

SEQ ID NO: 70706 - protein, 14 aa, Homo sapiens
  CDR3 for beta chain variable domain of TCR clone 35353 (TRBV20-1, TRBJ2-7)
CSAPELAGVGEQYF

SEQ ID NO: 70707 - protein, 14 aa, Homo sapiens
  CDR3 for alpha chain variable domain of TCR clone 35354 (TRAV26-1, TRAJ45)
CIVVTGGGADGLTF

SEQ ID NO: 70708 - protein, 13 aa, Homo sapiens
  CDR3 for beta chain variable domain of TCR clone 35354 (TRBV7-6, TRBJ1-2)
CASSLVADYGYTF

SEQ ID NO: 70709 - protein, 14 aa, Homo sapiens
  CDR3 for alpha chain variable domain of TCR clone 35355 (TRAV1-2, TRAJ16)
CAVNRFSDGQKLLF

SEQ ID NO: 70710 - protein, 15 aa, Homo sapiens
  CDR3 for beta chain variable domain of TCR clone 35355 (TRBV9, TRBJ1-6)
CSSSVAGTGDSPLHF

SEQ ID NO: 70711 - protein, 14 aa, Homo sapiens
  CDR3 for alpha chain variable domain of TCR clone 35356 (TRAV8-2, TRAJ45)
CVVSAGGGADGLPF

SEQ ID NO: 70712 - protein, 12 aa, Homo sapiens
  CDR3 for beta chain variable domain of TCR clone 35356 (TRBV12-4, TRBJ2-1)
CASSLVRVEQFF

SEQ ID NO: 70713 - protein, 14 aa, Homo sapiens
  CDR3 for alpha chain variable domain of TCR clone 35357 (TRAV13-1, TRAJ3)
CAASKSSSASKIIF

SEQ ID NO: 70714 - protein, 13 aa, Homo sapiens
  CDR3 for beta chain variable domain of TCR clone 35357 (TRBV25-1, TRBJ2-5)
CASSESGRGTQYF

SEQ ID NO: 70715 - protein, 13 aa, Homo sapiens
  CDR3 for alpha chain variable domain of TCR clone 35358 (TRAV21, TRAJ27)
CAARPSNAGKSTF

SEQ ID NO: 70716 - protein, 15 aa, Homo sapiens
  CDR3 for beta chain variable domain of TCR clone 35358 (TRBV11-3, TRBJ2-7)
CASSPGPASSYEQYF

SEQ ID NO: 70717 - protein, 14 aa, Homo sapiens
  CDR3 for alpha chain variable domain of TCR clone 35359 (TRAV17, TRAJ22)
CATSPSGYARQLTF

SEQ ID NO: 70718 - protein, 15 aa, Homo sapiens
  CDR3 for beta chain variable domain of TCR clone 35359 (TRBV4-1, TRBJ2-5)
CASSQWDLYQETQYF

SEQ ID NO: 70719 - protein, 12 aa, Homo sapiens
  CDR3 for alpha chain variable domain of TCR clone 35360 (TRAV4, TRAJ26)
CLVGDYGQTFVF

SEQ ID NO: 70720 - protein, 16 aa, Homo sapiens
  CDR3 for beta chain variable domain of TCR clone 35360 (TRBV7-2, TRBJ1-2)
CASSSNQDRRGHGYTF

SEQ ID NO: 70721 - protein, 13 aa, Homo sapiens
  CDR3 for alpha chain variable domain of TCR clone 35361 (TRAV29/DV5, TRAJ31)
CAASRNNNARLMF

SEQ ID NO: 70722 - protein, 14 aa, Homo sapiens
  CDR3 for beta chain variable domain of TCR clone 35361 (TRBV20-1, TRBJ1-5)
CSARDVTGFQPRHF

SEQ ID NO: 70723 - protein, 12 aa, Homo sapiens
  CDR3 for alpha chain variable domain of TCR clone 35362 (TRAV16, TRAJ9)
CALSSGGFKTIF

SEQ ID NO: 70724 - protein, 14 aa, Homo sapiens
  CDR3 for beta chain variable domain of TCR clone 35362 (TRBV7-9, TRBJ2-1)
CVSSLAGPYNEQFF

SEQ ID NO: 70725 - protein, 14 aa, Homo sapiens
  CDR3 for alpha chain variable domain of TCR clone 35363 (TRAV26-1, TRAJ34)
CIVRVAYNTDKLIS

SEQ ID NO: 70726 - protein, 15 aa, Homo sapiens
  CDR3 for beta chain variable domain of TCR clone 35363 (TRBV20-1, TRBJ2-7)
CSARVPAAYFYEQYF

SEQ ID NO: 70727 - protein, 14 aa, Homo sapiens
  CDR3 for alpha chain variable domain of TCR clone 35364 (TRAV12-2, TRAJ24)
CAVTPADSWGKLQF

SEQ ID NO: 70728 - protein, 13 aa, Homo sapiens
  CDR3 for beta chain variable domain of TCR clone 35364 (TRBV7-9, TRBJ1-2)
CASSLKQNYGYTF

SEQ ID NO: 70729 - protein, 18 aa, Homo sapiens
  CDR3 for alpha chain variable domain of TCR clone 35365 (TRAV26-2, TRAJ45)
CILRVAKYSGGGADGLTF

SEQ ID NO: 70730 - protein, 16 aa, Homo sapiens
  CDR3 for beta chain variable domain of TCR clone 35365 (TRBV2, TRBJ1-4)
CASNLLQGATNEKLFF

SEQ ID NO: 70731 - protein, 15 aa, Homo sapiens
  CDR3 for alpha chain variable domain of TCR clone 35366 (TRAV14/DV4, TRAJ33)
CAMREGRDSNHQLIW

SEQ ID NO: 70732 - protein, 16 aa, Homo sapiens
  CDR3 for beta chain variable domain of TCR clone 35366 (TRBV12-5, TRBJ2-5)
CASGPRTSGNQETQYF

SEQ ID NO: 70733 - protein, 14 aa, Homo sapiens
  CDR3 for alpha chain variable domain of TCR clone 35367 (TRAV8-4, TRAJ17)
CAVSDQAAGNKLTF

SEQ ID NO: 70734 - protein, 15 aa, Homo sapiens
  CDR3 for beta chain variable domain of TCR clone 35367 (TRBV7-2, TRBJ1-2)
CASGLAPDRGLGYTF

SEQ ID NO: 70735 - protein, 15 aa, Homo sapiens
  CDR3 for alpha chain variable domain of TCR clone 35368 (TRAV13-1, TRAJ5)
CAASPRGHGQESTYF

SEQ ID NO: 70736 - protein, 14 aa, Homo sapiens
  CDR3 for beta chain variable domain of TCR clone 35368 (TRBV6-5, TRBJ1-2)
CASTRGGGSDGYTF

SEQ ID NO: 70737 - protein, 11 aa, Homo sapiens
  CDR3 for alpha chain variable domain of TCR clone 35369 (TRAV2, TRAJ13)
CASGGYQKVTF

SEQ ID NO: 70738 - protein, 11 aa, Homo sapiens
  CDR3 for beta chain variable domain of TCR clone 35369 (TRBV5-6, TRBJ2-5)
CASSLEQTQYF

SEQ ID NO: 70739 - protein, 20 aa, Homo sapiens
  CDR3 for alpha chain variable domain of TCR clone 35370 (TRAV26-1, TRAJ42)
CCVLLHRQTYYGGSQGNLIF

SEQ ID NO: 70740 - protein, 16 aa, Homo sapiens
  CDR3 for beta chain variable domain of TCR clone 35370 (TRBV7-3, TRBJ2-2)
RASSLKRGTLSGELFF

SEQ ID NO: 70741 - protein, 12 aa, Homo sapiens
  CDR3 for alpha chain variable domain of TCR clone 35371 (TRAV1-1, TRAJ8)
CAGGTGFQKLVF

SEQ ID NO: 70742 - protein, 15 aa, Homo sapiens
  CDR3 for beta chain variable domain of TCR clone 35371 (TRBV7-9, TRBJ1-4)
CASSRTGGFNEKPFF

SEQ ID NO: 70743 - protein, 16 aa, Homo sapiens
  CDR3 for alpha chain variable domain of TCR clone 35372 (TRAV3, TRAJ18)
CAVRDGRGSTLGRLYF

SEQ ID NO: 70744 - protein, 13 aa, Homo sapiens
  CDR3 for beta chain variable domain of TCR clone 35372 (TRBV7-9, TRBJ2-5)
CASLPSGRETQYF

SEQ ID NO: 70745 - protein, 14 aa, Homo sapiens
  CDR3 for alpha chain variable domain of TCR clone 35373 (TRAV27, TRAJ21)
CAGVRQLQQILLRI

SEQ ID NO: 70746 - protein, 14 aa, Homo sapiens
  CDR3 for beta chain variable domain of TCR clone 35373 (TRBV7-9, TRBJ1-4)
CASSLEGQSEKLFF

SEQ ID NO: 70747 - protein, 13 aa, Homo sapiens
  CDR3 for alpha chain variable domain of TCR clone 35374 (TRAV8-3, TRAJ28)
CAVGAVGSYQLTF

SEQ ID NO: 70748 - protein, 15 aa, Homo sapiens
  CDR3 for beta chain variable domain of TCR clone 35374 (TRBV7-9, TRBJ1-5)
FASSQGHQPNQPQHF

SEQ ID NO: 70749 - protein, 15 aa, Homo sapiens
  CDR3 for alpha chain variable domain of TCR clone 35375 (TRAV2, TRAJ9)
CAVAALNTGGFKTIF

SEQ ID NO: 70750 - protein, 14 aa, Homo sapiens
  CDR3 for beta chain variable domain of TCR clone 35375 (TRBV7-8, TRBJ2-5)
CASSATGGQENQYF

SEQ ID NO: 70751 - protein, 11 aa, Homo sapiens
  CDR3 for alpha chain variable domain of TCR clone 35376 (TRAV35, TRAJ30)
CAPGGDDKIIS

SEQ ID NO: 70752 - protein, 13 aa, Homo sapiens
  CDR3 for beta chain variable domain of TCR clone 35376 (TRBV7-9, TRBJ2-3)
CASSPGSTDTQYF

SEQ ID NO: 70753 - protein, 14 aa, Homo sapiens
  CDR3 for alpha chain variable domain of TCR clone 35377 (TRAV1-1, TRAJ35)
CAVRSIGFGNVLHF

SEQ ID NO: 70754 - protein, 14 aa, Homo sapiens
  CDR3 for beta chain variable domain of TCR clone 35377 (TRBV5-7, TRBJ2-7)
CASSGGLSSYEQYF

SEQ ID NO: 70755 - protein, 14 aa, Homo sapiens
  CDR3 for alpha chain variable domain of TCR clone 35378 (TRAV23/DV6, TRAJ4)
CAAPSSGCYNKLIF

SEQ ID NO: 70756 - protein, 16 aa, Homo sapiens
  CDR3 for beta chain variable domain of TCR clone 35378 (TRBV19, TRBJ1-1)
CASRFGGPVTGTEAFF

SEQ ID NO: 70757 - protein, 13 aa, Homo sapiens
  CDR3 for alpha chain variable domain of TCR clone 35379 (TRAV1-2, TRAJ9)
CAALNTGGFKTIF

SEQ ID NO: 70758 - protein, 13 aa, Homo sapiens
  CDR3 for beta chain variable domain of TCR clone 35379 (TRBV19, TRBJ1-2)
CASSVPGQDGNTF

SEQ ID NO: 70759 - protein, 14 aa, Homo sapiens
  CDR3 for alpha chain variable domain of TCR clone 35380 (TRAV8-4, TRAJ48)
CAVKGNFGNEKLTF

SEQ ID NO: 70760 - protein, 14 aa, Homo sapiens
  CDR3 for beta chain variable domain of TCR clone 35380 (TRBV24-1, TRBJ1-1)
CATSIPRGDTEAFF

SEQ ID NO: 70761 - protein, 12 aa, Homo sapiens
  CDR3 for alpha chain variable domain of TCR clone 35381 (TRAV8-3, TRAJ26)
CAGDNYGQNFVF

SEQ ID NO: 70762 - protein, 16 aa, Homo sapiens
  CDR3 for beta chain variable domain of TCR clone 35381 (TRBV19, TRBJ2-3)
CASSPGAASRTDTQYF

SEQ ID NO: 70763 - protein, 16 aa, Homo sapiens
  CDR3 for alpha chain variable domain of TCR clone 35382 (TRAV23/DV6, TRAJ9)
CAASIGGNTGGLKTIF

SEQ ID NO: 70764 - protein, 18 aa, Homo sapiens
  CDR3 for beta chain variable domain of TCR clone 35382 (TRBV7-9, TRBJ2-7)
CASSLTTSGSRTWYEQYF

SEQ ID NO: 70765 - protein, 16 aa, Homo sapiens
  CDR3 for alpha chain variable domain of TCR clone 35383 (TRAV30, TRAJ24)
CGTKIVDADSWGKFQF

SEQ ID NO: 70766 - protein, 15 aa, Homo sapiens
  CDR3 for beta chain variable domain of TCR clone 35383 (TRBV20-1, TRBJ2-7)
CSARDRVSGMDEQYF

SEQ ID NO: 70767 - protein, 13 aa, Homo sapiens
  CDR3 for alpha chain variable domain of TCR clone 35384 (TRAV2, TRAJ21)
CAVEDLNLNKFYF

SEQ ID NO: 70768 - protein, 15 aa, Homo sapiens
  CDR3 for beta chain variable domain of TCR clone 35384 (TRBV28, TRBJ2-5)
CASSPGQGSIETQYF

SEQ ID NO: 70769 - protein, 12 aa, Homo sapiens
  CDR3 for alpha chain variable domain of TCR clone 35385 (TRAV38-2/DV8, TRAJ48)
CALLSGNEKLTF

SEQ ID NO: 70770 - protein, 15 aa, Homo sapiens
  CDR3 for beta chain variable domain of TCR clone 35385 (TRBV7-3, TRBJ2-1)
CQQLQTSGRYNEQFF

SEQ ID NO: 70771 - protein, 13 aa, Homo sapiens
  CDR3 for alpha chain variable domain of TCR clone 35386 (TRAV12-3, TRAJ53)
CVMRGGSNYKLTF

SEQ ID NO: 70772 - protein, 15 aa, Homo sapiens
  CDR3 for beta chain variable domain of TCR clone 35386 (TRBV2, TRBJ2-1)
CATQARLVMIGEQFF

SEQ ID NO: 70773 - protein, 13 aa, Homo sapiens
  CDR3 for alpha chain variable domain of TCR clone 35387 (TRAV12-2, TRAJ10)
CAVPMGGGNKLTF

SEQ ID NO: 70774 - protein, 11 aa, Homo sapiens
  CDR3 for beta chain variable domain of TCR clone 35387 (TRBV6-1, TRBJ2-1)
CASISSNEQFF

SEQ ID NO: 70775 - protein, 15 aa, Homo sapiens
  CDR3 for alpha chain variable domain of TCR clone 35388 (TRAV2, TRAJ9)
CAVEDRGTGGFKTIF

SEQ ID NO: 70776 - protein, 14 aa, Homo sapiens
  CDR3 for beta chain variable domain of TCR clone 35388 (TRBV7-3, TRBJ2-1)
CASSLAGGTNEQFF

SEQ ID NO: 70777 - protein, 18 aa, Homo sapiens
  CDR3 for alpha chain variable domain of TCR clone 35389 (TRAV21, TRAJ52)
CAVRPPPAGGTSYGKLTF

SEQ ID NO: 70778 - protein, 15 aa, Homo sapiens
  CDR3 for beta chain variable domain of TCR clone 35389 (TRBV27, TRBJ2-1)
CASSNGGGSSNEQFF

SEQ ID NO: 70779 - protein, 15 aa, Homo sapiens
  CDR3 for alpha chain variable domain of TCR clone 35390 (TRAV35, TRAJ50)
CAGQLRKTSYDKVIF

SEQ ID NO: 70780 - protein, 12 aa, Homo sapiens
  CDR3 for beta chain variable domain of TCR clone 35390 (TRBV5-1, TRBJ2-5)
CSSSLGLETQYF

SEQ ID NO: 70781 - protein, 14 aa, Homo sapiens
  CDR3 for alpha chain variable domain of TCR clone 35391 (TRAV12-1, TRAJ17)
CVVNYKAAGNKLTF

SEQ ID NO: 70782 - protein, 14 aa, Homo sapiens
  CDR3 for beta chain variable domain of TCR clone 35391 (TRBV18, TRBJ2-7)
CASSPRGGAYEQYF

SEQ ID NO: 70783 - protein, 15 aa, Homo sapiens
  CDR3 for alpha chain variable domain of TCR clone 35392 (TRAV1-2, TRAJ23)
CAVQAVRNQGGKLIF

SEQ ID NO: 70784 - protein, 16 aa, Homo sapiens
  CDR3 for beta chain variable domain of TCR clone 35392 (TRBV27, TRBJ2-7)
CASSKQGRGWAYEQYF

SEQ ID NO: 70785 - protein, 14 aa, Homo sapiens
  CDR3 for alpha chain variable domain of TCR clone 35393 (TRAV36/DV7, TRAJ13)
WGSGENGGYQKVTF

SEQ ID NO: 70786 - protein, 15 aa, Homo sapiens
  CDR3 for beta chain variable domain of TCR clone 35393 (TRBV19, TRBJ2-1)
CASGTGTSSYNEQFF

SEQ ID NO: 70787 - protein, 17 aa, Homo sapiens
  CDR3 for alpha chain variable domain of TCR clone 35394 (TRAV3, TRAJ6)
CAVRDGPRAGGSYIPTF

SEQ ID NO: 70788 - protein, 13 aa, Homo sapiens
  CDR3 for beta chain variable domain of TCR clone 35394 (TRBV18, TRBJ1-1)
CASSGGRNTEAFF

SEQ ID NO: 70789 - protein, 15 aa, Homo sapiens
  CDR3 for alpha chain variable domain of TCR clone 35395 (TRAV29/DV5, TRAJ24)
CSASGATDSWGKFQF

SEQ ID NO: 70790 - protein, 12 aa, Homo sapiens
  CDR3 for beta chain variable domain of TCR clone 35395 (TRBV11-2, TRBJ2-2)
CASSLPTGELFF

SEQ ID NO: 70791 - protein, 14 aa, Homo sapiens
  CDR3 for alpha chain variable domain of TCR clone 35396 (TRAV26-1, TRAJ38)
CIADNAGNNRKLIW

SEQ ID NO: 70792 - protein, 12 aa, Homo sapiens
  CDR3 for beta chain variable domain of TCR clone 35396 (TRBV11-2, TRBJ2-1)
CASSPGNNEQFF

SEQ ID NO: 70793 - protein, 13 aa, Homo sapiens
  CDR3 for alpha chain variable domain of TCR clone 35397 (TRAV27, TRAJ11)
CAGARSGYSTLTF

SEQ ID NO: 70794 - protein, 14 aa, Homo sapiens
  CDR3 for beta chain variable domain of TCR clone 35397 (TRBV12-4, TRBJ1-4)
CASRTTGRSEKLFF

SEQ ID NO: 70795 - protein, 11 aa, Homo sapiens
  CDR3 for alpha chain variable domain of TCR clone 35398 (TRAV3, TRAJ21)
CAVGNFNKFYF

SEQ ID NO: 70796 - protein, 11 aa, Homo sapiens
  CDR3 for beta chain variable domain of TCR clone 35398 (TRBV19, TRBJ1-2)
CASSISSGYTF

SEQ ID NO: 70797 - protein, 13 aa, Homo sapiens
  CDR3 for alpha chain variable domain of TCR clone 35399 (TRAV13-2, TRAJ53)
CAENMGSNYKLTF

SEQ ID NO: 70798 - protein, 13 aa, Homo sapiens
  CDR3 for beta chain variable domain of TCR clone 35399 (TRBV4-1, TRBJ2-2)
CARSQENTGELFF

SEQ ID NO: 70799 - protein, 23 aa, Homo sapiens
  CDR3 for alpha chain variable domain of TCR clone 35400 (TRAV26-1, TRAJ38)
CIADNAGNNHTQNPDPAVYQLRD

SEQ ID NO: 70800 - protein, 13 aa, Homo sapiens
  CDR3 for beta chain variable domain of TCR clone 35400 (TRBV20-1, TRBJ1-1)
CSARGGGNTEAFF

SEQ ID NO: 70801 - protein, 15 aa, Homo sapiens
  CDR3 for alpha chain variable domain of TCR clone 35401 (TRAV12-3, TRAJ6)
CAMSATSGGSYIPTF

SEQ ID NO: 70802 - protein, 15 aa, Homo sapiens
  CDR3 for beta chain variable domain of TCR clone 35401 (TRBV6-3, TRBJ2-7)
CASSSPGTVFYEQYF

SEQ ID NO: 70803 - protein, 14 aa, Homo sapiens
  CDR3 for alpha chain variable domain of TCR clone 35402 (TRAV3, TRAJ37)
CAVKESGNTGKLIF

SEQ ID NO: 70804 - protein, 16 aa, Homo sapiens
  CDR3 for beta chain variable domain of TCR clone 35402 (TRBV12-4, TRBJ2-3)
CASSFGTGGISDTQYF

SEQ ID NO: 70805 - protein, 14 aa, Homo sapiens
  CDR3 for alpha chain variable domain of TCR clone 35403 (TRAV29/DV5, TRAJ36)
CAARRKAGANNLFF

SEQ ID NO: 70806 - protein, 14 aa, Homo sapiens
  CDR3 for beta chain variable domain of TCR clone 35403 (TRBV12-5, TRBJ2-5)
CASGSRTHQETQYF

SEQ ID NO: 70807 - protein, 11 aa, Homo sapiens
  CDR3 for alpha chain variable domain of TCR clone 35404 (TRAV2, TRAJ13)
CASGGYQKVTF

SEQ ID NO: 70808 - protein, 13 aa, Homo sapiens
  CDR3 for beta chain variable domain of TCR clone 35404 (TRBV7-9, TRBJ2-7)
CASSFAGAYEQYF

SEQ ID NO: 70809 - protein, 11 aa, Homo sapiens
  CDR3 for alpha chain variable domain of TCR clone 35405 (TRAV1-2, TRAJ43)
CAVANDYKLSF

SEQ ID NO: 70810 - protein, 12 aa, Homo sapiens
  CDR3 for beta chain variable domain of TCR clone 35405 (TRBV7-2, TRBJ1-6)
CASSLSSSPLHF

SEQ ID NO: 70811 - protein, 13 aa, Homo sapiens
  CDR3 for alpha chain variable domain of TCR clone 35406 (TRAV13-1, TRAJ5)
CAARVTGRRALTF

SEQ ID NO: 70812 - protein, 15 aa, Homo sapiens
  CDR3 for beta chain variable domain of TCR clone 35406 (TRBV7-9, TRBJ2-7)
CASSPGGGLAYEQYF

SEQ ID NO: 70813 - protein, 17 aa, Homo sapiens
  CDR3 for alpha chain variable domain of TCR clone 35407 (TRAV1-1, TRAJ32)
CAVRVDELWWCYKQAHL

SEQ ID NO: 70814 - protein, 15 aa, Homo sapiens
  CDR3 for beta chain variable domain of TCR clone 35407 (TRBV27, TRBJ1-4)
CASSAQQDLNEKLFF

SEQ ID NO: 70815 - protein, 16 aa, Homo sapiens
  CDR3 for alpha chain variable domain of TCR clone 35408 (TRAV3, TRAJ37)
CAVRPHGSGNTGKLIF

SEQ ID NO: 70816 - protein, 17 aa, Homo sapiens
  CDR3 for beta chain variable domain of TCR clone 35408 (TRBV13, TRBJ2-3)
CASSLSRVAGGRNTQYF

SEQ ID NO: 70817 - protein, 15 aa, Homo sapiens
  CDR3 for alpha chain variable domain of TCR clone 35409 (TRAV25, TRAJ52)
CAGASGGTSYGKLTF

SEQ ID NO: 70818 - protein, 16 aa, Homo sapiens
  CDR3 for beta chain variable domain of TCR clone 35409 (TRBV15, TRBJ1-2)
CATSRGPRTGGGGYTF

SEQ ID NO: 70819 - protein, 14 aa, Homo sapiens
  CDR3 for alpha chain variable domain of TCR clone 35410 (TRAV17, TRAJ31)
CATVLRNNNARLLF

SEQ ID NO: 70820 - protein, 14 aa, Homo sapiens
  CDR3 for beta chain variable domain of TCR clone 35410 (TRBV12-4, TRBJ2-5)
CASSLWQKQETQYF

SEQ ID NO: 70821 - protein, 16 aa, Homo sapiens
  CDR3 for alpha chain variable domain of TCR clone 35411 (TRAV4, TRAJ9)
CLVGDPNRPGGFKTIF

SEQ ID NO: 70822 - protein, 16 aa, Homo sapiens
  CDR3 for beta chain variable domain of TCR clone 35411 (TRBV28, TRBJ1-4)
CASSPPYRERSEKLFF

SEQ ID NO: 70823 - protein, 15 aa, Homo sapiens
  CDR3 for alpha chain variable domain of TCR clone 35412 (TRAV26-1, TRAJ44)
CIVRANTGTASKLTF

SEQ ID NO: 70824 - protein, 16 aa, Homo sapiens
  CDR3 for beta chain variable domain of TCR clone 35412 (TRBV7-7, TRBJ2-1)
CASSLASGTPYNEQFF

SEQ ID NO: 70825 - protein, 14 aa, Homo sapiens
  CDR3 for alpha chain variable domain of TCR clone 35413 (TRAV12-1, TRAJ3)
CVVSGYSSASKIIF

SEQ ID NO: 70826 - protein, 14 aa, Homo sapiens
  CDR3 for beta chain variable domain of TCR clone 35413 (TRBV6-6, TRBJ1-3)
CASSRQGSGNTMYF

SEQ ID NO: 70827 - protein, 18 aa, Homo sapiens
  CDR3 for alpha chain variable domain of TCR clone 35414 (TRAV13-1, TRAJ52)
CAASKRGAGGTSYGKLTF

SEQ ID NO: 70828 - protein, 14 aa, Homo sapiens
  CDR3 for beta chain variable domain of TCR clone 35414 (TRBV19, TRBJ2-1)
CASPTFVLSGEQFF

SEQ ID NO: 70829 - protein, 14 aa, Homo sapiens
  CDR3 for alpha chain variable domain of TCR clone 35415 (TRAV2, TRAJ37)
CAVDFTSNTGKLIF

SEQ ID NO: 70830 - protein, 15 aa, Homo sapiens
  CDR3 for beta chain variable domain of TCR clone 35415 (TRBV20-1, TRBJ1-1)
CSASRGVTGNTVAFF

SEQ ID NO: 70831 - protein, 13 aa, Homo sapiens
  CDR3 for alpha chain variable domain of TCR clone 35416 (TRAV20, TRAJ37)
CAGCSSNTGKLIF

SEQ ID NO: 70832 - protein, 11 aa, Homo sapiens
  CDR3 for beta chain variable domain of TCR clone 35416 (TRBV12-4, TRBJ2-3)
CASTATNTQYF

SEQ ID NO: 70833 - protein, 16 aa, Homo sapiens
  CDR3 for alpha chain variable domain of TCR clone 35417 (TRAV23/DV6, TRAJ9)
CAASIGGNTGGFKTIF

SEQ ID NO: 70834 - protein, 11 aa, Homo sapiens
  CDR3 for beta chain variable domain of TCR clone 35417 (TRBV11-2, TRBJ1-1)
CASSINTEAFF

SEQ ID NO: 70835 - protein, 16 aa, Homo sapiens
  CDR3 for alpha chain variable domain of TCR clone 35418 (TRAV12-2, TRAJ37)
CAVRTAGSSNTGKLIF

SEQ ID NO: 70836 - protein, 13 aa, Homo sapiens
  CDR3 for beta chain variable domain of TCR clone 35418 (TRBV7-9, TRBJ2-5)
CASLPSGRETQYF

SEQ ID NO: 70837 - protein, 14 aa, Homo sapiens
  CDR3 for alpha chain variable domain of TCR clone 35419 (TRAV1-2, TRAJ16)
CAVNRFSDGQKLLF

SEQ ID NO: 70838 - protein, 12 aa, Homo sapiens
  CDR3 for beta chain variable domain of TCR clone 35419 (TRBV29-1, TRBJ2-2)
CSVDKYTGELFF

SEQ ID NO: 70839 - protein, 16 aa, Homo sapiens
  CDR3 for alpha chain variable domain of TCR clone 35420 (TRAV3, TRAJ37)
CAVRGKGSGNTGKLIF

SEQ ID NO: 70840 - protein, 13 aa, Homo sapiens
  CDR3 for beta chain variable domain of TCR clone 35420 (TRBV14, TRBJ2-7)
CVSSQDRRYEQYF

SEQ ID NO: 70841 - protein, 13 aa, Homo sapiens
  CDR3 for alpha chain variable domain of TCR clone 35421 (TRAV8-3, TRAJ6)
CAARRGGSYIPTF

SEQ ID NO: 70842 - protein, 15 aa, Homo sapiens
  CDR3 for beta chain variable domain of TCR clone 35421 (TRBV4-1, TRBJ2-3)
CASSNRAGGRDTQYF

SEQ ID NO: 70843 - protein, 14 aa, Homo sapiens
  CDR3 for alpha chain variable domain of TCR clone 35422 (TRAV12-2, TRAJ6)
CASKWGGGSYIPTF

SEQ ID NO: 70844 - protein, 13 aa, Homo sapiens
  CDR3 for beta chain variable domain of TCR clone 35422 (TRBV2, TRBJ1-1)
CASSEGGNTEAVF

SEQ ID NO: 70845 - protein, 14 aa, Homo sapiens
  CDR3 for alpha chain variable domain of TCR clone 35423 (TRAV26-1, TRAJ45)
CIEVTGGGADGLTS

SEQ ID NO: 70846 - protein, 13 aa, Homo sapiens
  CDR3 for beta chain variable domain of TCR clone 35423 (TRBV7-6, TRBJ1-2)
CASSLVADYGYTF

SEQ ID NO: 70847 - protein, 15 aa, Homo sapiens
  CDR3 for alpha chain variable domain of TCR clone 35424 (TRAV3, TRAJ22)
CAVRDRGGSARQLTF

SEQ ID NO: 70848 - protein, 16 aa, Homo sapiens
  CDR3 for beta chain variable domain of TCR clone 35424 (TRBV13, TRBJ2-3)
CQQPLQGSGGRNTQYF

SEQ ID NO: 70849 - protein, 17 aa, Homo sapiens
  CDR3 for alpha chain variable domain of TCR clone 35425 (TRAV26-1, TRAJ53)
CIVRDDDSGGSNYKLTF

SEQ ID NO: 70850 - protein, 15 aa, Homo sapiens
  CDR3 for beta chain variable domain of TCR clone 35425 (TRBV20-1, TRBJ2-7)
CSARVPAAYFYEQYF

SEQ ID NO: 70851 - protein, 14 aa, Homo sapiens
  CDR3 for alpha chain variable domain of TCR clone 35426 (TRAV26-1, TRAJ38)
CIADNAGNNRKLTW

SEQ ID NO: 70852 - protein, 17 aa, Homo sapiens
  CDR3 for beta chain variable domain of TCR clone 35426 (TRBV15, TRBJ1-1)
CATSRVGGADGDTEAFF

SEQ ID NO: 70853 - protein, 14 aa, Homo sapiens
  CDR3 for alpha chain variable domain of TCR clone 35427 (TRAV4, TRAJ26)
CLVGPHNYGQNFVF

SEQ ID NO: 70854 - protein, 17 aa, Homo sapiens
  CDR3 for beta chain variable domain of TCR clone 35427 (TRBV24-1, TRBJ2-1)
CATSAVSTSGTYNEQFF

SEQ ID NO: 70855 - protein, 14 aa, Homo sapiens
  CDR3 for alpha chain variable domain of TCR clone 35428 (TRAV12-3, TRAJ33)
CAMSVPGSNYQLIW

SEQ ID NO: 70856 - protein, 14 aa, Homo sapiens
  CDR3 for beta chain variable domain of TCR clone 35428 (TRBV7-2, TRBJ2-7)
CASRSQGAAYEQYF

SEQ ID NO: 70857 - protein, 16 aa, Homo sapiens
  CDR3 for alpha chain variable domain of TCR clone 35429 (TRAV3, TRAJ37)
CAVRPHGSGDTGKLIF

SEQ ID NO: 70858 - protein, 14 aa, Homo sapiens
  CDR3 for beta chain variable domain of TCR clone 35429 (TRBV20-1, TRBJ2-1)
CSARGGSSYNEQFF

SEQ ID NO: 70859 - protein, 13 aa, Homo sapiens
  CDR3 for alpha chain variable domain of TCR clone 35430 (TRAV3, TRAJ20)
CAVRLSNDYKLSF

SEQ ID NO: 70860 - protein, 15 aa, Homo sapiens
  CDR3 for beta chain variable domain of TCR clone 35430 (TRBV27, TRBJ2-1)
CASSNGGGSSNEQFF

SEQ ID NO: 70861 - protein, 16 aa, Homo sapiens
  CDR3 for alpha chain variable domain of TCR clone 35431 (TRAV35, TRAJ37)
CWAFPRGSSNTGKLIF

SEQ ID NO: 70862 - protein, 13 aa, Homo sapiens
  CDR3 for beta chain variable domain of TCR clone 35431 (TRBV2, TRBJ1-2)
CASSVRGNYGYTF

SEQ ID NO: 70863 - protein, 13 aa, Homo sapiens
  CDR3 for alpha chain variable domain of TCR clone 35432 (TRAV8-6, TRAJ21)
CAVSPSSFNKFYF

SEQ ID NO: 70864 - protein, 14 aa, Homo sapiens
  CDR3 for beta chain variable domain of TCR clone 35432 (TRBV7-9, TRBJ2-5)
CASSLDTAQETQYF

SEQ ID NO: 70865 - protein, 11 aa, Homo sapiens
  CDR3 for alpha chain variable domain of TCR clone 35433 (TRAV2, TRAJ33)
CAVESNYQLIW

SEQ ID NO: 70866 - protein, 15 aa, Homo sapiens
  CDR3 for beta chain variable domain of TCR clone 35433 (TRBV19, TRBJ1-1)
CASTSGQIQNTEAFY

SEQ ID NO: 70867 - protein, 15 aa, Homo sapiens
  CDR3 for alpha chain variable domain of TCR clone 35434 (TRAV26-1, TRAJ29)
CIVRVEGSGNTPLVF

SEQ ID NO: 70868 - protein, 15 aa, Homo sapiens
  CDR3 for beta chain variable domain of TCR clone 35434 (TRBV12-4, TRBJ2-5)
CASSPPTGLQETQYF

SEQ ID NO: 70869 - protein, 11 aa, Homo sapiens
  CDR3 for alpha chain variable domain of TCR clone 35435 (TRAV3, TRAJ21)
CAVGNFNKFYF

SEQ ID NO: 70870 - protein, 14 aa, Homo sapiens
  CDR3 for beta chain variable domain of TCR clone 35435 (TRBV29-1, TRBJ2-2)
CSGRGSGNTGELFF

SEQ ID NO: 70871 - protein, 14 aa, Homo sapiens
  CDR3 for alpha chain variable domain of TCR clone 35436 (TRAV2, TRAJ9)
CAVEDRSGGFKTIF

SEQ ID NO: 70872 - protein, 14 aa, Homo sapiens
  CDR3 for beta chain variable domain of TCR clone 35436 (TRBV4-2, TRBJ2-1)
CASGLDRAYNEQFF

SEQ ID NO: 70873 - protein, 14 aa, Homo sapiens
  CDR3 for alpha chain variable domain of TCR clone 35437 (TRAV26-1, TRAJ40)
CIVRVARGTYKYIF

SEQ ID NO: 70874 - protein, 14 aa, Homo sapiens
  CDR3 for beta chain variable domain of TCR clone 35437 (TRBV7-3, TRBJ2-7)
CASSLKADSYEQYL

SEQ ID NO: 70875 - protein, 15 aa, Homo sapiens
  CDR3 for alpha chain variable domain of TCR clone 35438 (TRAV2, TRAJ15)
CAVEDRGQAGTALIF

SEQ ID NO: 70876 - protein, 13 aa, Homo sapiens
  CDR3 for beta chain variable domain of TCR clone 35438 (TRBV10-2, TRBJ2-7)
CASGASGGYERYF

SEQ ID NO: 70877 - protein, 18 aa, Homo sapiens
  CDR3 for alpha chain variable domain of TCR clone 35439 (TRAV12-3, TRAJ52)
CAMSVGGAGGTSYGKLTF

SEQ ID NO: 70878 - protein, 14 aa, Homo sapiens
  CDR3 for beta chain variable domain of TCR clone 35439 (TRBV7-2, TRBJ2-7)
CASSPKTSFYEQYF

SEQ ID NO: 70879 - protein, 16 aa, Homo sapiens
  CDR3 for alpha chain variable domain of TCR clone 35440 (TRAV26-1, TRAJ53)
CIVRVAMGGSNHKLTF

SEQ ID NO: 70880 - protein, 12 aa, Homo sapiens
  CDR3 for beta chain variable domain of TCR clone 35440 (TRBV7-9, TRBJ1-5)
CASSPQGQPQHF

SEQ ID NO: 70881 - protein, 16 aa, Homo sapiens
  CDR3 for alpha chain variable domain of TCR clone 35441 (TRAV3, TRAJ3)
CAVRDRAKSSASKIIF

SEQ ID NO: 70882 - protein, 13 aa, Homo sapiens
  CDR3 for beta chain variable domain of TCR clone 35441 (TRBV10-3, TRBJ2-7)
CASKLAVNYGQYF

SEQ ID NO: 70883 - protein, 12 aa, Homo sapiens
  CDR3 for alpha chain variable domain of TCR clone 35442 (TRAV23/DV6, TRAJ31)
CAARRIGARPMF

SEQ ID NO: 70884 - protein, 13 aa, Homo sapiens
  CDR3 for beta chain variable domain of TCR clone 35442 (TRBV28, TRBJ2-7)
CASKAGGVYEQYF

SEQ ID NO: 70885 - protein, 13 aa, Homo sapiens
  CDR3 for alpha chain variable domain of TCR clone 35443 (TRAV26-2, TRAJ54)
CIPRVGGAQKLVF

SEQ ID NO: 70886 - protein, 16 aa, Homo sapiens
  CDR3 for beta chain variable domain of TCR clone 35443 (TRBV4-1, TRBJ1-1)
CASSSMSERPDTEAFF

SEQ ID NO: 70887 - protein, 12 aa, Homo sapiens
  CDR3 for alpha chain variable domain of TCR clone 35444 (TRAV23/DV6, TRAJ53)
CAANKLGSGGSN

SEQ ID NO: 70888 - protein, 14 aa, Homo sapiens
  CDR3 for beta chain variable domain of TCR clone 35444 (TRBV7-9, TRBJ2-3)
CASSLEQGTNTQYF

SEQ ID NO: 70889 - protein, 20 aa, Homo sapiens
  CDR3 for alpha chain variable domain of TCR clone 35445 (TRAV26-1, TRAJ42)
CCVLLHRQNYYGGSQGNLIF

SEQ ID NO: 70890 - protein, 16 aa, Homo sapiens
  CDR3 for beta chain variable domain of TCR clone 35445 (TRBV7-3, TRBJ2-2)
CASSLKRGTLSGELFF

SEQ ID NO: 70891 - protein, 14 aa, Homo sapiens
  CDR3 for alpha chain variable domain of TCR clone 35446 (TRAV1-2, TRAJ16)
CAVNRFSDGQKLLF

SEQ ID NO: 70892 - protein, 16 aa, Homo sapiens
  CDR3 for beta chain variable domain of TCR clone 35446 (TRBV27, TRBJ2-2)
CASSCRGLVRTGELFF

SEQ ID NO: 70893 - protein, 16 aa, Homo sapiens
  CDR3 for alpha chain variable domain of TCR clone 35447 (TRAV17, TRAJ28)
CATASVSGAGSYQLTF

SEQ ID NO: 70894 - protein, 11 aa, Homo sapiens
  CDR3 for beta chain variable domain of TCR clone 35447 (TRBV7-9, TRBJ2-5)
CASSLGETQCF

SEQ ID NO: 70895 - protein, 16 aa, Homo sapiens
  CDR3 for alpha chain variable domain of TCR clone 35448 (TRAV30, TRAJ24)
CGTEIVDADSWGKFQF

SEQ ID NO: 70896 - protein, 14 aa, Homo sapiens
  CDR3 for beta chain variable domain of TCR clone 35448 (TRBV2, TRBJ2-3)
CASSEGQNTDTQYF

SEQ ID NO: 70897 - protein, 14 aa, Homo sapiens
  CDR3 for alpha chain variable domain of TCR clone 35449 (TRAV12-2, TRAJ45)
CSLPERGGADGLTF

SEQ ID NO: 70898 - protein, 14 aa, Homo sapiens
  CDR3 for beta chain variable domain of TCR clone 35449 (TRBV18, TRBJ1-5)
CASSPGNSNQPQHF

SEQ ID NO: 70899 - protein, 14 aa, Homo sapiens
  CDR3 for alpha chain variable domain of TCR clone 35450 (TRAV1-2, TRAJ8)
CAVREDTGSQKLVF

SEQ ID NO: 70900 - protein, 14 aa, Homo sapiens
  CDR3 for beta chain variable domain of TCR clone 35450 (TRBV20-1, TRBJ1-1)
CSAQTRIGGTEAFF

SEQ ID NO: 70901 - protein, 13 aa, Homo sapiens
  CDR3 for alpha chain variable domain of TCR clone 35451 (TRAV12-3, TRAJ9)
CAMRNTVGFKTIF

SEQ ID NO: 70902 - protein, 14 aa, Homo sapiens
  CDR3 for beta chain variable domain of TCR clone 35451 (TRBV11-2, TRBJ2-7)
CASSSTGEGYEQYF

SEQ ID NO: 70903 - protein, 16 aa, Homo sapiens
  CDR3 for alpha chain variable domain of TCR clone 35452 (TRAV12-3, TRAJ53)
RAMSPGSGGSNYKLTF

SEQ ID NO: 70904 - protein, 15 aa, Homo sapiens
  CDR3 for beta chain variable domain of TCR clone 35452 (TRBV27, TRBJ2-1)
CASSNGGGSSNEQFF

SEQ ID NO: 70905 - protein, 20 aa, Homo sapiens
  CDR3 for alpha chain variable domain of TCR clone 35453 (TRAV26-1, TRAJ42)
CCVLLHRQTYYGGSQGNLIF

SEQ ID NO: 70906 - protein, 16 aa, Homo sapiens
  CDR3 for beta chain variable domain of TCR clone 35453 (TRBV4-1, TRBJ1-1)
CASSSMSERPNTGAFF

SEQ ID NO: 70907 - protein, 17 aa, Homo sapiens
  CDR3 for alpha chain variable domain of TCR clone 35454 (TRAV14/DV4, TRAJ28)
CAMREGYSGAGSYQLTF

SEQ ID NO: 70908 - protein, 14 aa, Homo sapiens
  CDR3 for beta chain variable domain of TCR clone 35454 (TRBV5-7, TRBJ1-1)
CASSLAGDWTEAFF

SEQ ID NO: 70909 - protein, 23 aa, Homo sapiens
  CDR3 for alpha chain variable domain of TCR clone 35455 (TRAV26-1, TRAJ38)
CIADNAGNNHIQNPDPAVYQLRD

SEQ ID NO: 70910 - protein, 13 aa, Homo sapiens
  CDR3 for beta chain variable domain of TCR clone 35455 (TRBV12-4, TRBJ1-1)
CASSPGTGFEAFF

SEQ ID NO: 70911 - protein, 12 aa, Homo sapiens
  CDR3 for alpha chain variable domain of TCR clone 35456 (TRAV12-3, TRAJ17)
CAMTLTGNKLTF

SEQ ID NO: 70912 - protein, 16 aa, Homo sapiens
  CDR3 for beta chain variable domain of TCR clone 35456 (TRBV7-2, TRBJ2-3)
CASSLVALYSTDTQYF

SEQ ID NO: 70913 - protein, 13 aa, Homo sapiens
  CDR3 for alpha chain variable domain of TCR clone 35457 (TRAV13-2, TRAJ53)
CAKNMGSNYKLTF

SEQ ID NO: 70914 - protein, 13 aa, Homo sapiens
  CDR3 for beta chain variable domain of TCR clone 35457 (TRBV4-1, TRBJ2-2)
CASSQENTGELFF

SEQ ID NO: 70915 - protein, 15 aa, Homo sapiens
  CDR3 for alpha chain variable domain of TCR clone 35458 (TRAV3, TRAJ29)
CAVRDINSGNTPLVF

SEQ ID NO: 70916 - protein, 16 aa, Homo sapiens
  CDR3 for beta chain variable domain of TCR clone 35458 (TRBV4-1, TRBJ2-5)
CASSQTFYGNQETQYF

SEQ ID NO: 70917 - protein, 14 aa, Homo sapiens
  CDR3 for alpha chain variable domain of TCR clone 35459 (TRAV20, TRAJ56)
CAVQFGGANSKLTF

SEQ ID NO: 70918 - protein, 14 aa, Homo sapiens
  CDR3 for beta chain variable domain of TCR clone 35459 (TRBV20-1, TRBJ2-7)
CSAKRGRSTYEQYF

SEQ ID NO: 70919 - protein, 13 aa, Homo sapiens
  CDR3 for alpha chain variable domain of TCR clone 35460 (TRAV3, TRAJ29)
CAVRDIIDTPLIF

SEQ ID NO: 70920 - protein, 14 aa, Homo sapiens
  CDR3 for beta chain variable domain of TCR clone 35460 (TRBV27, TRBJ2-1)
CASSATGGYNEQFF

SEQ ID NO: 70921 - protein, 14 aa, Homo sapiens
  CDR3 for alpha chain variable domain of TCR clone 35461 (TRAV21, TRAJ35)
CAVMPIGFGNVLDC

SEQ ID NO: 70922 - protein, 12 aa, Homo sapiens
  CDR3 for beta chain variable domain of TCR clone 35461 (TRBV7-9, TRBJ2-7)
CASSIKREEQYF

SEQ ID NO: 70923 - protein, 13 aa, Homo sapiens
  CDR3 for alpha chain variable domain of TCR clone 35462 (TRAV21, TRAJ57)
RAVTQGGSGKLVF

SEQ ID NO: 70924 - protein, 11 aa, Homo sapiens
  CDR3 for beta chain variable domain of TCR clone 35462 (TRBV11-2, TRBJ2-2)
CASSLPGELFF

SEQ ID NO: 70925 - protein, 13 aa, Homo sapiens
  CDR3 for alpha chain variable domain of TCR clone 35463 (TRAV25, TRAJ26)
CAGMDNHGQNFVF

SEQ ID NO: 70926 - protein, 15 aa, Homo sapiens
  CDR3 for beta chain variable domain of TCR clone 35463 (TRBV10-3, TRBJ2-1)
CAIRNGTSGHNEQFF

SEQ ID NO: 70927 - protein, 16 aa, Homo sapiens
  CDR3 for alpha chain variable domain of TCR clone 35464 (TRAV30, TRAJ24)
CGTEIVDADSWDKFQF

SEQ ID NO: 70928 - protein, 14 aa, Homo sapiens
  CDR3 for beta chain variable domain of TCR clone 35464 (TRBV12-5, TRBJ2-5)
CASGSRTHQETQYF

SEQ ID NO: 70929 - protein, 17 aa, Homo sapiens
  CDR3 for alpha chain variable domain of TCR clone 35465 (TRAV8-6, TRAJ58)
CAVSSWVGETSGSMLTF

SEQ ID NO: 70930 - protein, 14 aa, Homo sapiens
  CDR3 for beta chain variable domain of TCR clone 35465 (TRBV4-2, TRBJ2-1)
CASGLDRAYNEQFF

SEQ ID NO: 70931 - protein, 16 aa, Homo sapiens
  CDR3 for alpha chain variable domain of TCR clone 35466 (TRAV12-1, TRAJ12)
CVVNTLLMDSSYKLIF

SEQ ID NO: 70932 - protein, 13 aa, Homo sapiens
  CDR3 for beta chain variable domain of TCR clone 35466 (TRBV11-2, TRBJ2-1)
CASSSEAYNERFF

SEQ ID NO: 70933 - protein, 12 aa, Homo sapiens
  CDR3 for alpha chain variable domain of TCR clone 35467 (TRAV21, TRAJ49)
CAVNDGGNQFYF

SEQ ID NO: 70934 - protein, 16 aa, Homo sapiens
  CDR3 for beta chain variable domain of TCR clone 35467 (TRBV20-1, TRBJ1-4)
CSAPGQGLLTNEKLFF

SEQ ID NO: 70935 - protein, 14 aa, Homo sapiens
  CDR3 for alpha chain variable domain of TCR clone 35468 (TRAV2, TRAJ11)
CAVVPNSGYSTLTF

SEQ ID NO: 70936 - protein, 15 aa, Homo sapiens
  CDR3 for beta chain variable domain of TCR clone 35468 (TRBV4-1, TRBJ1-3)
CAGSQDLRVGNTIYF

SEQ ID NO: 70937 - protein, 14 aa, Homo sapiens
  CDR3 for alpha chain variable domain of TCR clone 35469 (TRAV26-1, TRAJ34)
CIVRVAYNTDKLIF

SEQ ID NO: 70938 - protein, 15 aa, Homo sapiens
  CDR3 for beta chain variable domain of TCR clone 35469 (TRBV20-1, TRBJ2-7)
CSARGPAAYFYEQYF

SEQ ID NO: 70939 - protein, 17 aa, Homo sapiens
  CDR3 for alpha chain variable domain of TCR clone 35470 (TRAV26-2, TRAJ42)
CILRDVGNGGSQGNLIF

SEQ ID NO: 70940 - protein, 16 aa, Homo sapiens
  CDR3 for beta chain variable domain of TCR clone 35470 (TRBV12-4, TRBJ2-7)
CASSLIGGTGTYEQYF

SEQ ID NO: 70941 - protein, 14 aa, Homo sapiens
  CDR3 for alpha chain variable domain of TCR clone 35471 (TRAV1-2, TRAJ16)
CAVNRFSDGQKLLF

SEQ ID NO: 70942 - protein, 13 aa, Homo sapiens
  CDR3 for beta chain variable domain of TCR clone 35471 (TRBV3-1, TRBJ1-1)
CASSPGVITEAFF

SEQ ID NO: 70943 - protein, 12 aa, Homo sapiens
  CDR3 for alpha chain variable domain of TCR clone 35472 (TRAV12-1, TRAJ40)
CVVYSGTYKYIF

SEQ ID NO: 70944 - protein, 18 aa, Homo sapiens
  CDR3 for beta chain variable domain of TCR clone 35472 (TRBV11-2, TRBJ2-3)
CASSSGGASRGAPNTQYF

SEQ ID NO: 70945 - protein, 15 aa, Homo sapiens
  CDR3 for alpha chain variable domain of TCR clone 35473 (TRAV25, TRAJ52)
CAGRPGGTSYGKLTF

SEQ ID NO: 70946 - protein, 14 aa, Homo sapiens
  CDR3 for beta chain variable domain of TCR clone 35473 (TRBV12-5, TRBJ2-5)
CASGSRTHQETQYF

SEQ ID NO: 70947 - protein, 14 aa, Homo sapiens
  CDR3 for alpha chain variable domain of TCR clone 35474 (TRAV1-2, TRAJ16)
CAVNRFSDGQKLLF

SEQ ID NO: 70948 - protein, 13 aa, Homo sapiens
  CDR3 for beta chain variable domain of TCR clone 35474 (TRBV12-4, TRBJ2-1)
CASSLVPGNEQFF

SEQ ID NO: 70949 - protein, 14 aa, Homo sapiens
  CDR3 for alpha chain variable domain of TCR clone 35475 (TRAV16, TRAJ54)
CALSLIQGAQKPVF

SEQ ID NO: 70950 - protein, 17 aa, Homo sapiens
  CDR3 for beta chain variable domain of TCR clone 35475 (TRBV11-2, TRBJ2-4)
CASSSVGPGGHRNIQYF

SEQ ID NO: 70951 - protein, 18 aa, Homo sapiens
  CDR3 for alpha chain variable domain of TCR clone 35476 (TRAV26-1, TRAJ22)
CIVRVALISSGSARQLNF

SEQ ID NO: 70952 - protein, 13 aa, Homo sapiens
  CDR3 for beta chain variable domain of TCR clone 35476 (TRBV13, TRBJ2-5)
CASSPEVGETQYF

SEQ ID NO: 70953 - protein, 14 aa, Homo sapiens
  CDR3 for alpha chain variable domain of TCR clone 35477 (TRAV17, TRAJ35)
CATDRPGFGNVLHF

SEQ ID NO: 70954 - protein, 15 aa, Homo sapiens
  CDR3 for beta chain variable domain of TCR clone 35477 (TRBV28, TRBJ2-5)
CASSSGRVIQETQYF

SEQ ID NO: 70955 - protein, 12 aa, Homo sapiens
  CDR3 for alpha chain variable domain of TCR clone 35478 (TRAV13-1, TRAJ15)
CAASQAGTALIF

SEQ ID NO: 70956 - protein, 14 aa, Homo sapiens
  CDR3 for beta chain variable domain of TCR clone 35478 (TRBV19, TRBJ2-2)
CASSTLHRSGEPFF

SEQ ID NO: 70957 - protein, 11 aa, Homo sapiens
  CDR3 for alpha chain variable domain of TCR clone 35479 (TRAV17, TRAJ43)
CATSRSNDMRF

SEQ ID NO: 70958 - protein, 15 aa, Homo sapiens
  CDR3 for beta chain variable domain of TCR clone 35479 (TRBV11-2, TRBJ2-1)
CASSLGTSGLNEQFF

SEQ ID NO: 70959 - protein, 11 aa, Homo sapiens
  CDR3 for alpha chain variable domain of TCR clone 35480 (TRAV12-3, TRAJ27)
CAMANAGKSTF

SEQ ID NO: 70960 - protein, 15 aa, Homo sapiens
  CDR3 for beta chain variable domain of TCR clone 35480 (TRBV7-9, TRBJ1-6)
CASSSPGRGNSPLHF

SEQ ID NO: 70961 - protein, 15 aa, Homo sapiens
  CDR3 for alpha chain variable domain of TCR clone 35481 (TRAV3, TRAJ45)
CAVRTPWGGADGLTF

SEQ ID NO: 70962 - protein, 11 aa, Homo sapiens
  CDR3 for beta chain variable domain of TCR clone 35481 (TRBV6-1, TRBJ2-2)
CASSFGQGANT

SEQ ID NO: 70963 - protein, 16 aa, Homo sapiens
  CDR3 for alpha chain variable domain of TCR clone 35482 (TRAV26-1, TRAJ56)
CIVRARERGANSKLTF

SEQ ID NO: 70964 - protein, 15 aa, Homo sapiens
  CDR3 for beta chain variable domain of TCR clone 35482 (TRBV7-9, TRBJ2-2)
CASGPLDTFPGELFF

SEQ ID NO: 70965 - protein, 14 aa, Homo sapiens
  CDR3 for alpha chain variable domain of TCR clone 35483 (TRAV1-2, TRAJ16)
CAVNRFSDGQKLLF

SEQ ID NO: 70966 - protein, 12 aa, Homo sapiens
  CDR3 for beta chain variable domain of TCR clone 35483 (TRBV11-2, TRBJ2-2)
CASSLGGGELFS

SEQ ID NO: 70967 - protein, 10 aa, Homo sapiens
  CDR3 for alpha chain variable domain of TCR clone 35484 (TRAV1-2, TRAJ20)
CVPNDYKLRF

SEQ ID NO: 70968 - protein, 14 aa, Homo sapiens
  CDR3 for beta chain variable domain of TCR clone 35484 (TRBV12-5, TRBJ2-5)
CASGSRTHQETQYF

SEQ ID NO: 70969 - protein, 11 aa, Homo sapiens
  CDR3 for alpha chain variable domain of TCR clone 35485 (TRAV39, TRAJ49)
CAVDISTQFYF

SEQ ID NO: 70970 - protein, 11 aa, Homo sapiens
  CDR3 for beta chain variable domain of TCR clone 35485 (TRBV7-8, TRBJ2-7)
CVSSLSLEQYF

SEQ ID NO: 70971 - protein, 16 aa, Homo sapiens
  CDR3 for alpha chain variable domain of TCR clone 35486 (TRAV30, TRAJ24)
CGTEIVDADSWGKFQF

SEQ ID NO: 70972 - protein, 14 aa, Homo sapiens
  CDR3 for beta chain variable domain of TCR clone 35486 (TRBV12-5, TRBJ2-5)
CPSGSRTHQETQYF

SEQ ID NO: 70973 - protein, 14 aa, Homo sapiens
  CDR3 for alpha chain variable domain of TCR clone 35487 (TRAV2, TRAJ22)
CAVGQGGSARQLTF

SEQ ID NO: 70974 - protein, 12 aa, Homo sapiens
  CDR3 for beta chain variable domain of TCR clone 35487 (TRBV19, TRBJ2-1)
CASSMQDTEQFF

SEQ ID NO: 70975 - protein, 12 aa, Homo sapiens
  CDR3 for alpha chain variable domain of TCR clone 35488 (TRAV2, TRAJ10)
CASTGGGNKLTL

SEQ ID NO: 70976 - protein, 14 aa, Homo sapiens
  CDR3 for beta chain variable domain of TCR clone 35488 (TRBV19, TRBJ2-5)
CASSMTGQQETQYF

SEQ ID NO: 70977 - protein, 12 aa, Homo sapiens
  CDR3 for alpha chain variable domain of TCR clone 35489 (TRAV36/DV7, TRAJ54)
CAVVRGAQKLVF

SEQ ID NO: 70978 - protein, 14 aa, Homo sapiens
  CDR3 for beta chain variable domain of TCR clone 35489 (TRBV7-3, TRBJ1-1)
CASSLKRGNTEAFF

SEQ ID NO: 70979 - protein, 14 aa, Homo sapiens
  CDR3 for alpha chain variable domain of TCR clone 35490 (TRAV26-1, TRAJ48)
CIAKSNFGNEKLTF

SEQ ID NO: 70980 - protein, 13 aa, Homo sapiens
  CDR3 for beta chain variable domain of TCR clone 35490 (TRBV5-1, TRBJ2-5)
CASSVPPAETQYF

SEQ ID NO: 70981 - protein, 14 aa, Homo sapiens
  CDR3 for alpha chain variable domain of TCR clone 35491 (TRAV12-2, TRAJ5)
CAVNRSTGRRALTF

SEQ ID NO: 70982 - protein, 12 aa, Homo sapiens
  CDR3 for beta chain variable domain of TCR clone 35491 (TRBV19, TRBJ1-5)
CASSIAQHPQHF

SEQ ID NO: 70983 - protein, 14 aa, Homo sapiens
  CDR3 for alpha chain variable domain of TCR clone 35492 (TRAV35, TRAJ33)
CAGSSQDINYQLIW

SEQ ID NO: 70984 - protein, 15 aa, Homo sapiens
  CDR3 for beta chain variable domain of TCR clone 35492 (TRBV20-1, TRBJ2-7)
CSAESGTSGAYEQYF

SEQ ID NO: 70985 - protein, 13 aa, Homo sapiens
  CDR3 for alpha chain variable domain of TCR clone 35493 (TRAV13-1, TRAJ13)
CAASKGGYQKVTF

SEQ ID NO: 70986 - protein, 16 aa, Homo sapiens
  CDR3 for beta chain variable domain of TCR clone 35493 (TRBV18, TRBJ1-2)
FASSPPERVTIYGYTF

SEQ ID NO: 70987 - protein, 14 aa, Homo sapiens
  CDR3 for alpha chain variable domain of TCR clone 35494 (TRAV2, TRAJ9)
CAVEDRSGGFKTIF

SEQ ID NO: 70988 - protein, 13 aa, Homo sapiens
  CDR3 for beta chain variable domain of TCR clone 35494 (TRBV7-6, TRBJ1-2)
CASSLVADYGYTF

SEQ ID NO: 70989 - protein, 14 aa, Homo sapiens
  CDR3 for alpha chain variable domain of TCR clone 35495 (TRAV12-2, TRAJ44)
CAVNPAGTASKLTF

SEQ ID NO: 70990 - protein, 15 aa, Homo sapiens
  CDR3 for beta chain variable domain of TCR clone 35495 (TRBV28, TRBJ2-7)
CASSVRQVSPYEQYF

SEQ ID NO: 70991 - protein, 11 aa, Homo sapiens
  CDR3 for alpha chain variable domain of TCR clone 35496 (TRAV12-2, TRAJ31)
CAVTRWARLTF

SEQ ID NO: 70992 - protein, 15 aa, Homo sapiens
  CDR3 for beta chain variable domain of TCR clone 35496 (TRBV19, TRBJ2-7)
CASSIGGGLVNEQYF

SEQ ID NO: 70993 - protein, 14 aa, Homo sapiens
  CDR3 for alpha chain variable domain of TCR clone 35497 (TRAV29/DV5, TRAJ36)
CAARRKTGANNLFF

SEQ ID NO: 70994 - protein, 14 aa, Homo sapiens
  CDR3 for beta chain variable domain of TCR clone 35497 (TRBV7-2, TRBJ2-7)
CASRSQGAAYEQYF

SEQ ID NO: 70995 - protein, 14 aa, Homo sapiens
  CDR3 for alpha chain variable domain of TCR clone 35498 (TRAV12-2, TRAJ53)
CAVKGGGSNYKLTF

SEQ ID NO: 70996 - protein, 14 aa, Homo sapiens
  CDR3 for beta chain variable domain of TCR clone 35498 (TRBV19, TRBJ2-1)
CASPTVVLSGEQFF

SEQ ID NO: 70997 - protein, 13 aa, Homo sapiens
  CDR3 for alpha chain variable domain of TCR clone 35499 (TRAV12-3, TRAJ7)
CSMTPYGNNRLAF

SEQ ID NO: 70998 - protein, 16 aa, Homo sapiens
  CDR3 for beta chain variable domain of TCR clone 35499 (TRBV20-1, TRBJ1-4)
CSARPYGGELNEKLFF

SEQ ID NO: 70999 - protein, 14 aa, Homo sapiens
  CDR3 for alpha chain variable domain of TCR clone 35500 (TRAV38-1, TRAJ45)
CAYSSGGGADGLTF

SEQ ID NO: 71000 - protein, 20 aa, Homo sapiens
  CDR3 for beta chain variable domain of TCR clone 35500 (TRBV28, TRBJ2-1)
CASTPIGRSPGLAGGNEQFF

SEQ ID NO: 71001 - protein, 14 aa, Homo sapiens
  CDR3 for alpha chain variable domain of TCR clone 35501 (TRAV17, TRAJ39)
CATDPVRAGNMLTF

SEQ ID NO: 71002 - protein, 15 aa, Homo sapiens
  CDR3 for beta chain variable domain of TCR clone 35501 (TRBV13, TRBJ1-5)
CASSFGQGGVQPHHF

SEQ ID NO: 71003 - protein, 15 aa, Homo sapiens
  CDR3 for alpha chain variable domain of TCR clone 35502 (TRAV1-1, TRAJ5)
CAVRHMDTGRRALTF

SEQ ID NO: 71004 - protein, 17 aa, Homo sapiens
  CDR3 for beta chain variable domain of TCR clone 35502 (TRBV13, TRBJ2-3)
CASSLSRVAGGRNTQYF

SEQ ID NO: 71005 - protein, 11 aa, Homo sapiens
  CDR3 for alpha chain variable domain of TCR clone 35503 (TRAV23/DV6, TRAJ48)
CAPRCGEKLTF

SEQ ID NO: 71006 - protein, 13 aa, Homo sapiens
  CDR3 for beta chain variable domain of TCR clone 35503 (TRBV12-4, TRBJ2-5)
CASSPGTEETQYF

SEQ ID NO: 71007 - protein, 14 aa, Homo sapiens
  CDR3 for alpha chain variable domain of TCR clone 35504 (TRAV1-2, TRAJ8)
CAVREDTGFQKLVF

SEQ ID NO: 71008 - protein, 15 aa, Homo sapiens
  CDR3 for beta chain variable domain of TCR clone 35504 (TRBV6-3, TRBJ2-7)
CASSSRGTVFYEQYF

SEQ ID NO: 71009 - protein, 13 aa, Homo sapiens
  CDR3 for alpha chain variable domain of TCR clone 35505 (TRAV27, TRAJ49)
CAPRPYTGNQFYF

SEQ ID NO: 71010 - protein, 18 aa, Homo sapiens
  CDR3 for beta chain variable domain of TCR clone 35505 (TRBV7-3, TRBJ2-5)
CASDLGGAAQGRWETQYF

SEQ ID NO: 71011 - protein, 13 aa, Homo sapiens
  CDR3 for alpha chain variable domain of TCR clone 35506 (TRAV1-2, TRAJ9)
CAVLNTGGFKTIF

SEQ ID NO: 71012 - protein, 19 aa, Homo sapiens
  CDR3 for beta chain variable domain of TCR clone 35506 (TRBV25-1, TRBJ2-2)
CAILVYRVDRGRKTGELFF

SEQ ID NO: 71013 - protein, 13 aa, Homo sapiens
  CDR3 for alpha chain variable domain of TCR clone 35507 (TRAV35, TRAJ42)
CAGFPGRQGNLIF

SEQ ID NO: 71014 - protein, 13 aa, Homo sapiens
  CDR3 for beta chain variable domain of TCR clone 35507 (TRBV29-1, TRBJ2-1)
CSVEGGRVNEQFF

SEQ ID NO: 71015 - protein, 13 aa, Homo sapiens
  CDR3 for alpha chain variable domain of TCR clone 35508 (TRAV3, TRAJ15)
CAVRDKAGTALIF

SEQ ID NO: 71016 - protein, 15 aa, Homo sapiens
  CDR3 for beta chain variable domain of TCR clone 35508 (TRBV11-1, TRBJ2-7)
CASSLNYGASYEQYF

SEQ ID NO: 71017 - protein, 14 aa, Homo sapiens
  CDR3 for alpha chain variable domain of TCR clone 35509 (TRAV9-2, TRAJ20)
CALSDTSNDYKLSF

SEQ ID NO: 71018 - protein, 12 aa, Homo sapiens
  CDR3 for beta chain variable domain of TCR clone 35509 (TRBV18, TRBJ2-1)
CASSLQGNEQFF

SEQ ID NO: 71019 - protein, 14 aa, Homo sapiens
  CDR3 for alpha chain variable domain of TCR clone 35510 (TRAV17, TRAJ15)
CATTTNQAGTALIF

SEQ ID NO: 71020 - protein, 16 aa, Homo sapiens
  CDR3 for beta chain variable domain of TCR clone 35510 (TRBV4-1, TRBJ2-7)
CASSRGDILNSYEQYL

SEQ ID NO: 71021 - protein, 14 aa, Homo sapiens
  CDR3 for alpha chain variable domain of TCR clone 35511 (TRAV12-2, TRAJ40)
CAVKIPSGAYKYVF

SEQ ID NO: 71022 - protein, 14 aa, Homo sapiens
  CDR3 for beta chain variable domain of TCR clone 35511 (TRBV20-1, TRBJ1-1)
CSAQTWIGGTEAFF

SEQ ID NO: 71023 - protein, 13 aa, Homo sapiens
  CDR3 for alpha chain variable domain of TCR clone 35512 (TRAV16, TRAJ34)
CALALYNTDKLIF

SEQ ID NO: 71024 - protein, 12 aa, Homo sapiens
  CDR3 for beta chain variable domain of TCR clone 35512 (TRBV29-1, TRBJ2-3)
CSVTGGADTQYF

SEQ ID NO: 71025 - protein, 14 aa, Homo sapiens
  CDR3 for alpha chain variable domain of TCR clone 35513 (TRAV8-4, TRAJ13)
CAVTRSGGYQKVTF

SEQ ID NO: 71026 - protein, 14 aa, Homo sapiens
  CDR3 for beta chain variable domain of TCR clone 35513 (TRBV7-2, TRBJ1-2)
CASSQTGSTYGYTF

SEQ ID NO: 71027 - protein, 11 aa, Homo sapiens
  CDR3 for alpha chain variable domain of TCR clone 35514 (TRAV12-1, TRAJ43)
CVEYDNNDMRF

SEQ ID NO: 71028 - protein, 16 aa, Homo sapiens
  CDR3 for beta chain variable domain of TCR clone 35514 (TRBV5-4, TRBJ2-1)
CASSLVGSGQDNGQFF

SEQ ID NO: 71029 - protein, 13 aa, Homo sapiens
  CDR3 for alpha chain variable domain of TCR clone 35515 (TRAV6, TRAJ20)
CALAVSNDYKLSF

SEQ ID NO: 71030 - protein, 16 aa, Homo sapiens
  CDR3 for beta chain variable domain of TCR clone 35515 (TRBV7-9, TRBJ2-1)
CASSDVAGGSCNEQFF

SEQ ID NO: 71031 - protein, 13 aa, Homo sapiens
  CDR3 for alpha chain variable domain of TCR clone 35516 (TRAV27, TRAJ41)
CAGEGNSGYALDF

SEQ ID NO: 71032 - protein, 14 aa, Homo sapiens
  CDR3 for beta chain variable domain of TCR clone 35516 (TRBV25-1, TRBJ1-1)
CASTHLGGNTEAFF

SEQ ID NO: 71033 - protein, 12 aa, Homo sapiens
  CDR3 for alpha chain variable domain of TCR clone 35517 (TRAV13-2, TRAJ23)
CAERHRGGKLIF

SEQ ID NO: 71034 - protein, 15 aa, Homo sapiens
  CDR3 for beta chain variable domain of TCR clone 35517 (TRBV7-9, TRBJ1-5)
CASSQGHQPNQPQHF

SEQ ID NO: 71035 - protein, 16 aa, Homo sapiens
  CDR3 for alpha chain variable domain of TCR clone 35518 (TRAV3, TRAJ21)
CAVRDMERGNFNKFYF

SEQ ID NO: 71036 - protein, 13 aa, Homo sapiens
  CDR3 for beta chain variable domain of TCR clone 35518 (TRBV27, TRBJ2-7)
CASSLTTGYEQYF

SEQ ID NO: 71037 - protein, 14 aa, Homo sapiens
  CDR3 for alpha chain variable domain of TCR clone 35519 (TRAV16, TRAJ44)
RALSTTGTASKLTF

SEQ ID NO: 71038 - protein, 14 aa, Homo sapiens
  CDR3 for beta chain variable domain of TCR clone 35519 (TRBV20-1, TRBJ2-7)
CSAISREASYEQYF

SEQ ID NO: 71039 - protein, 13 aa, Homo sapiens
  CDR3 for alpha chain variable domain of TCR clone 35520 (TRAV2, TRAJ40)
CAVFTSGTYKYIF

SEQ ID NO: 71040 - protein, 12 aa, Homo sapiens
  CDR3 for beta chain variable domain of TCR clone 35520 (TRBV14, TRBJ2-7)
CASSSLKGEQYF

SEQ ID NO: 71041 - protein, 13 aa, Homo sapiens
  CDR3 for alpha chain variable domain of TCR clone 35521 (TRAV12-3, TRAJ9)
CAMRNTGGFETIF

SEQ ID NO: 71042 - protein, 14 aa, Homo sapiens
  CDR3 for beta chain variable domain of TCR clone 35521 (TRBV11-2, TRBJ2-7)
CASSSTGEGYEQYF

SEQ ID NO: 71043 - protein, 12 aa, Homo sapiens
  CDR3 for alpha chain variable domain of TCR clone 35522 (TRAV29/DV5, TRAJ49)
CAATDTGNQFYF

SEQ ID NO: 71044 - protein, 14 aa, Homo sapiens
  CDR3 for beta chain variable domain of TCR clone 35522 (TRBV7-2, TRBJ1-2)
CASSQTGSTYGYTF

SEQ ID NO: 71045 - protein, 13 aa, Homo sapiens
  CDR3 for alpha chain variable domain of TCR clone 35523 (TRAV13-1, TRAJ21)
CAASIYNFNKFYF

SEQ ID NO: 71046 - protein, 13 aa, Homo sapiens
  CDR3 for beta chain variable domain of TCR clone 35523 (TRBV27, TRBJ1-4)
CASSLIGDEKLFF

SEQ ID NO: 71047 - protein, 14 aa, Homo sapiens
  CDR3 for alpha chain variable domain of TCR clone 35524 (TRAV21, TRAJ35)
CAVMPIGFGNMLHC

SEQ ID NO: 71048 - protein, 12 aa, Homo sapiens
  CDR3 for beta chain variable domain of TCR clone 35524 (TRBV7-9, TRBJ2-7)
CASSIKREEQYF

SEQ ID NO: 71049 - protein, 10 aa, Homo sapiens
  CDR3 for alpha chain variable domain of TCR clone 35525 (TRAV30, TRAJ48)
CGIGNEKLTF

SEQ ID NO: 71050 - protein, 14 aa, Homo sapiens
  CDR3 for beta chain variable domain of TCR clone 35525 (TRBV7-6, TRBJ2-3)
YASSVAGGTDTQYF

SEQ ID NO: 71051 - protein, 14 aa, Homo sapiens
  CDR3 for alpha chain variable domain of TCR clone 35526 (TRAV12-2, TRAJ40)
CAVKIPSGTYKYIF

SEQ ID NO: 71052 - protein, 20 aa, Homo sapiens
  CDR3 for beta chain variable domain of TCR clone 35526 (TRBV28, TRBJ2-1)
CASTPVGRSPGLAGGNEQFF

SEQ ID NO: 71053 - protein, 13 aa, Homo sapiens
  CDR3 for alpha chain variable domain of TCR clone 35527 (TRAV12-3, TRAJ53)
CAMRGGSKYKLTF

SEQ ID NO: 71054 - protein, 15 aa, Homo sapiens
  CDR3 for beta chain variable domain of TCR clone 35527 (TRBV2, TRBJ2-1)
CATQARLVMIGEQFF

SEQ ID NO: 71055 - protein, 14 aa, Homo sapiens
  CDR3 for alpha chain variable domain of TCR clone 35528 (TRAV3, TRAJ9)
CAVRLNTGGFETIF

SEQ ID NO: 71056 - protein, 16 aa, Homo sapiens
  CDR3 for beta chain variable domain of TCR clone 35528 (TRBV12-5, TRBJ2-5)
CASGPRTSGNQETQYF

SEQ ID NO: 71057 - protein, 13 aa, Homo sapiens
  CDR3 for alpha chain variable domain of TCR clone 35529 (TRAV35, TRAJ22)
CWARPGSARQLTF

SEQ ID NO: 71058 - protein, 13 aa, Homo sapiens
  CDR3 for beta chain variable domain of TCR clone 35529 (TRBV20-1, TRBJ2-7)
CSATHTSGYEQYF

SEQ ID NO: 71059 - protein, 14 aa, Homo sapiens
  CDR3 for alpha chain variable domain of TCR clone 35530 (TRAV21, TRAJ35)
CAVMPIGFGNVLHC

SEQ ID NO: 71060 - protein, 15 aa, Homo sapiens
  CDR3 for beta chain variable domain of TCR clone 35530 (TRBV7-9, TRBJ1-6)
CASSSPGRGNSPLHF

SEQ ID NO: 71061 - protein, 12 aa, Homo sapiens
  CDR3 for alpha chain variable domain of TCR clone 35531 (TRAV3, TRAJ31)
CAVRPRGPRPMF

SEQ ID NO: 71062 - protein, 17 aa, Homo sapiens
  CDR3 for beta chain variable domain of TCR clone 35531 (TRBV7-9, TRBJ1-5)
CASSASQGGYSNQPQHF

SEQ ID NO: 71063 - protein, 14 aa, Homo sapiens
  CDR3 for alpha chain variable domain of TCR clone 35532 (TRAV38-1, TRAJ45)
CASHSGGGAYGLTF

SEQ ID NO: 71064 - protein, 13 aa, Homo sapiens
  CDR3 for beta chain variable domain of TCR clone 35532 (TRBV10-3, TRBJ1-2)
CAISERDSYGYTF

SEQ ID NO: 71065 - protein, 11 aa, Homo sapiens
  CDR3 for alpha chain variable domain of TCR clone 35533 (TRAV3, TRAJ21)
CAVGNFNKFYF

SEQ ID NO: 71066 - protein, 13 aa, Homo sapiens
  CDR3 for beta chain variable domain of TCR clone 35533 (TRBV2, TRBJ1-1)
CASSEGGNTEAFF

SEQ ID NO: 71067 - protein, 16 aa, Homo sapiens
  CDR3 for alpha chain variable domain of TCR clone 35534 (TRAV17, TRAJ52)
CATDPMGGTSYGKLTF

SEQ ID NO: 71068 - protein, 13 aa, Homo sapiens
  CDR3 for beta chain variable domain of TCR clone 35534 (TRBV20-1, TRBJ1-1)
CSARGGGNTEAFF

SEQ ID NO: 71069 - protein, 14 aa, Homo sapiens
  CDR3 for alpha chain variable domain of TCR clone 35535 (TRAV12-3, TRAJ12)
CAMSEVDSSYKLIF

SEQ ID NO: 71070 - protein, 12 aa, Homo sapiens
  CDR3 for beta chain variable domain of TCR clone 35535 (TRBV18, TRBJ1-4)
CASSPSRDKLFF

SEQ ID NO: 71071 - protein, 11 aa, Homo sapiens
  CDR3 for alpha chain variable domain of TCR clone 35536 (TRAV35, TRAJ30)
CAGERDDKIIF

SEQ ID NO: 71072 - protein, 14 aa, Homo sapiens
  CDR3 for beta chain variable domain of TCR clone 35536 (TRBV15, TRBJ2-5)
CATSGDRGRETQYF

SEQ ID NO: 71073 - protein, 13 aa, Homo sapiens
  CDR3 for alpha chain variable domain of TCR clone 35537 (TRAV27, TRAJ41)
CAGEGNSGYALNF

SEQ ID NO: 71074 - protein, 11 aa, Homo sapiens
  CDR3 for beta chain variable domain of TCR clone 35537 (TRBV7-8, TRBJ2-7)
CASSLSLEQYF

SEQ ID NO: 71075 - protein, 14 aa, Homo sapiens
  CDR3 for alpha chain variable domain of TCR clone 35538 (TRAV12-2, TRAJ53)
CAVRGGGSNYKLTF

SEQ ID NO: 71076 - protein, 14 aa, Homo sapiens
  CDR3 for beta chain variable domain of TCR clone 35538 (TRBV19, TRBJ2-1)
CASPTFVLSGEQFF

SEQ ID NO: 71077 - protein, 19 aa, Homo sapiens
  CDR3 for alpha chain variable domain of TCR clone 35539 (TRAV1-2, TRAJ26)
CLLPLCCERPDNYGQNFVF

SEQ ID NO: 71078 - protein, 12 aa, Homo sapiens
  CDR3 for beta chain variable domain of TCR clone 35539 (TRBV7-8, TRBJ2-7)
CASSLGDREQYF

SEQ ID NO: 71079 - protein, 14 aa, Homo sapiens
  CDR3 for alpha chain variable domain of TCR clone 35540 (TRAV29/DV5, TRAJ36)
CAARRKTGANNLLF

SEQ ID NO: 71080 - protein, 14 aa, Homo sapiens
  CDR3 for beta chain variable domain of TCR clone 35540 (TRBV12-5, TRBJ2-5)
CASGSRTHQEAQYF

SEQ ID NO: 71081 - protein, 15 aa, Homo sapiens
  CDR3 for alpha chain variable domain of TCR clone 35541 (TRAV12-1, TRAJ9)
CVASFGDTGGFKTIF

SEQ ID NO: 71082 - protein, 13 aa, Homo sapiens
  CDR3 for beta chain variable domain of TCR clone 35541 (TRBV2, TRBJ1-4)
CASSERAGEKLFF

SEQ ID NO: 71083 - protein, 12 aa, Homo sapiens
  CDR3 for alpha chain variable domain of TCR clone 35542 (TRAV12-2, TRAJ31)
CAVNTPDARLMF

SEQ ID NO: 71084 - protein, 17 aa, Homo sapiens
  CDR3 for beta chain variable domain of TCR clone 35542 (TRBV20-1, TRBJ1-6)
CSARGGYTFSYNSPPHF

SEQ ID NO: 71085 - protein, 13 aa, Homo sapiens
  CDR3 for alpha chain variable domain of TCR clone 35543 (TRAV2, TRAJ40)
CAVVTSGTYKYIF

SEQ ID NO: 71086 - protein, 15 aa, Homo sapiens
  CDR3 for beta chain variable domain of TCR clone 35543 (TRBV11-3, TRBJ2-3)
CASLKDGQEGDTQYF

SEQ ID NO: 71087 - protein, 13 aa, Homo sapiens
  CDR3 for alpha chain variable domain of TCR clone 35544 (TRAV27, TRAJ49)
CAPRPYTGNQFYF

SEQ ID NO: 71088 - protein, 16 aa, Homo sapiens
  CDR3 for beta chain variable domain of TCR clone 35544 (TRBV4-1, TRBJ1-2)
CASSHDAGQVLYGYTF

SEQ ID NO: 71089 - protein, 14 aa, Homo sapiens
  CDR3 for alpha chain variable domain of TCR clone 35545 (TRAV12-2, TRAJ13)
CAVKKTGGYQKVTF

SEQ ID NO: 71090 - protein, 15 aa, Homo sapiens
  CDR3 for beta chain variable domain of TCR clone 35545 (TRBV27, TRBJ2-1)
CANSNGGGSSNEQFF

SEQ ID NO: 71091 - protein, 11 aa, Homo sapiens
  CDR3 for alpha chain variable domain of TCR clone 35546 (TRAV12-1, TRAJ6)
PASGGSYIPTF

SEQ ID NO: 71092 - protein, 15 aa, Homo sapiens
  CDR3 for beta chain variable domain of TCR clone 35546 (TRBV7-3, TRBJ2-1)
CASSLKASEYNERFF

SEQ ID NO: 71093 - protein, 13 aa, Homo sapiens
  CDR3 for alpha chain variable domain of TCR clone 35547 (TRAV3, TRAJ21)
CAVREPDFNKFYF

SEQ ID NO: 71094 - protein, 13 aa, Homo sapiens
  CDR3 for beta chain variable domain of TCR clone 35547 (TRBV9, TRBJ2-1)
CASRPSGGNEQFF

SEQ ID NO: 71095 - protein, 11 aa, Homo sapiens
  CDR3 for alpha chain variable domain of TCR clone 35548 (TRAV12-3, TRAJ43)
CAMSVSNDMRL

SEQ ID NO: 71096 - protein, 13 aa, Homo sapiens
  CDR3 for beta chain variable domain of TCR clone 35548 (TRBV20-1, TRBJ1-1)
CSAPLGGGTEAFF

SEQ ID NO: 71097 - protein, 18 aa, Homo sapiens
  CDR3 for alpha chain variable domain of TCR clone 35549 (TRAV26-1, TRAJ22)
CIVRVALISSGSARQLTF

SEQ ID NO: 71098 - protein, 12 aa, Homo sapiens
  CDR3 for beta chain variable domain of TCR clone 35549 (TRBV13, TRBJ2-5)
CQQPRGGETQYF

SEQ ID NO: 71099 - protein, 10 aa, Homo sapiens
  CDR3 for alpha chain variable domain of TCR clone 35550 (TRAV25, TRAJ17)
CQAAGNKLTF

SEQ ID NO: 71100 - protein, 13 aa, Homo sapiens
  CDR3 for beta chain variable domain of TCR clone 35550 (TRBV6-5, TRBJ2-2)
CASSLPGVRELFF

SEQ ID NO: 71101 - protein, 16 aa, Homo sapiens
  CDR3 for alpha chain variable domain of TCR clone 35551 (TRAV3, TRAJ28)
CAVLPRSGAGSYQRTF

SEQ ID NO: 71102 - protein, 13 aa, Homo sapiens
  CDR3 for beta chain variable domain of TCR clone 35551 (TRBV12-4, TRBJ2-5)
CASRLAVQETQYF

SEQ ID NO: 71103 - protein, 13 aa, Homo sapiens
  CDR3 for alpha chain variable domain of TCR clone 35552 (TRAV12-3, TRAJ7)
CAMAPYGNNRLAF

SEQ ID NO: 71104 - protein, 16 aa, Homo sapiens
  CDR3 for beta chain variable domain of TCR clone 35552 (TRBV20-1, TRBJ1-4)
CSARPYGGELNEKLFF

SEQ ID NO: 71105 - protein, 16 aa, Homo sapiens
  CDR3 for alpha chain variable domain of TCR clone 35553 (TRAV29/DV5, TRAJ36)
CAASAGVETGANNLFF

SEQ ID NO: 71106 - protein, 16 aa, Homo sapiens
  CDR3 for beta chain variable domain of TCR clone 35553 (TRBV5-1, TRBJ2-3)
CASSLGLAVYTDTQYY

SEQ ID NO: 71107 - protein, 15 aa, Homo sapiens
  CDR3 for alpha chain variable domain of TCR clone 35554 (TRAV17, TRAJ57)
CATGPSQGGSEKLVF

SEQ ID NO: 71108 - protein, 15 aa, Homo sapiens
  CDR3 for beta chain variable domain of TCR clone 35554 (TRBV25-1, TRBJ1-4)
CASSPGDSANEKLFF

SEQ ID NO: 71109 - protein, 16 aa, Homo sapiens
  CDR3 for alpha chain variable domain of TCR clone 35555 (TRAV3, TRAJ37)
CAVRGKGSGNTGKLIF

SEQ ID NO: 71110 - protein, 14 aa, Homo sapiens
  CDR3 for beta chain variable domain of TCR clone 35555 (TRBV7-8, TRBJ2-3)
CASSLEAGTDTQYF

SEQ ID NO: 71111 - protein, 16 aa, Homo sapiens
  CDR3 for alpha chain variable domain of TCR clone 35556 (TRAV3, TRAJ10)
CAVRDMRAGGGNKLTL

SEQ ID NO: 71112 - protein, 13 aa, Homo sapiens
  CDR3 for beta chain variable domain of TCR clone 35556 (TRBV6-1, TRBJ1-1)
CASSRQGNTEAFF

SEQ ID NO: 71113 - protein, 12 aa, Homo sapiens
  CDR3 for alpha chain variable domain of TCR clone 35557 (TRAV4, TRAJ6)
CLAPGGSYIPTF

SEQ ID NO: 71114 - protein, 12 aa, Homo sapiens
  CDR3 for beta chain variable domain of TCR clone 35557 (TRBV6-5, TRBJ2-3)
CASSDTADTQYF

SEQ ID NO: 71115 - protein, 17 aa, Homo sapiens
  CDR3 for alpha chain variable domain of TCR clone 35558 (TRAV27, TRAJ26)
CAGARAPLDNYGQNFVF

SEQ ID NO: 71116 - protein, 14 aa, Homo sapiens
  CDR3 for beta chain variable domain of TCR clone 35558 (TRBV11-2, TRBJ2-5)
CQQPSFGGLETQYF

SEQ ID NO: 71117 - protein, 13 aa, Homo sapiens
  CDR3 for alpha chain variable domain of TCR clone 35559 (TRAV38-2/DV8, TRAJ34)
CSYRNYNTDKLIF

SEQ ID NO: 71118 - protein, 15 aa, Homo sapiens
  CDR3 for beta chain variable domain of TCR clone 35559 (TRBV20-1, TRBJ2-5)
CSAEGTGGLQETQYF

SEQ ID NO: 71119 - protein, 14 aa, Homo sapiens
  CDR3 for alpha chain variable domain of TCR clone 35560 (TRAV2, TRAJ37)
CAVDFTSNTGKLIF

SEQ ID NO: 71120 - protein, 15 aa, Homo sapiens
  CDR3 for beta chain variable domain of TCR clone 35560 (TRBV20-1, TRBJ1-1)
CIASRGVTGNTEAFF

SEQ ID NO: 71121 - protein, 22 aa, Homo sapiens
  CDR3 for alpha chain variable domain of TCR clone 35561 (TRAV23/DV6, TRAJ43)
CISWIPSLETQPPLLCSRRCSF

SEQ ID NO: 71122 - protein, 13 aa, Homo sapiens
  CDR3 for beta chain variable domain of TCR clone 35561 (TRBV12-4, TRBJ1-2)
CASSLRQGKGYTF

SEQ ID NO: 71123 - protein, 16 aa, Homo sapiens
  CDR3 for alpha chain variable domain of TCR clone 35562 (TRAV3, TRAJ21)
CAVRDIEGGNFNKFYF

SEQ ID NO: 71124 - protein, 16 aa, Homo sapiens
  CDR3 for beta chain variable domain of TCR clone 35562 (TRBV12-4, TRBJ1-5)
CASSRPVGGSNQPQHF

SEQ ID NO: 71125 - protein, 13 aa, Homo sapiens
  CDR3 for alpha chain variable domain of TCR clone 35563 (TRAV12-3, TRAJ41)
CAIAPSSGYALNF

SEQ ID NO: 71126 - protein, 14 aa, Homo sapiens
  CDR3 for beta chain variable domain of TCR clone 35563 (TRBV7-2, TRBJ1-3)
CASSLGTAGNTIYF

SEQ ID NO: 71127 - protein, 14 aa, Homo sapiens
  CDR3 for alpha chain variable domain of TCR clone 35564 (TRAV1-2, TRAJ8)
CAVREDTGFQKLVF

SEQ ID NO: 71128 - protein, 17 aa, Homo sapiens
  CDR3 for beta chain variable domain of TCR clone 35564 (TRBV6-3, TRBJ2-7)
CTSVPAVPGTVFYEQYF

SEQ ID NO: 71129 - protein, 15 aa, Homo sapiens
  CDR3 for alpha chain variable domain of TCR clone 35565 (TRAV21, TRAJ40)
SAVRPQTSGTYKYIF

SEQ ID NO: 71130 - protein, 13 aa, Homo sapiens
  CDR3 for beta chain variable domain of TCR clone 35565 (TRBV7-2, TRBJ2-2)
CASSSVRAGELFF

SEQ ID NO: 71131 - protein, 13 aa, Homo sapiens
  CDR3 for alpha chain variable domain of TCR clone 35566 (TRAV8-3, TRAJ36)
CAVGATGANNLFF

SEQ ID NO: 71132 - protein, 14 aa, Homo sapiens
  CDR3 for beta chain variable domain of TCR clone 35566 (TRBV6-1, TRBJ1-3)
CASVQGGGGNTIYF

SEQ ID NO: 71133 - protein, 15 aa, Homo sapiens
  CDR3 for alpha chain variable domain of TCR clone 35567 (TRAV8-6, TRAJ6)
CAVSGGSGGSYIPTF

SEQ ID NO: 71134 - protein, 14 aa, Homo sapiens
  CDR3 for beta chain variable domain of TCR clone 35567 (TRBV7-9, TRBJ2-1)
CASSSMVGFGEQFF

SEQ ID NO: 71135 - protein, 13 aa, Homo sapiens
  CDR3 for alpha chain variable domain of TCR clone 35568 (TRAV21, TRAJ57)
CAVTQGGSEKLVF

SEQ ID NO: 71136 - protein, 16 aa, Homo sapiens
  CDR3 for beta chain variable domain of TCR clone 35568 (TRBV27, TRBJ1-5)
CASSLSGGASNQPQHF

SEQ ID NO: 71137 - protein, 12 aa, Homo sapiens
  CDR3 for alpha chain variable domain of TCR clone 35569 (TRAV30, TRAJ43)
CGTEERGNDMRF

SEQ ID NO: 71138 - protein, 13 aa, Homo sapiens
  CDR3 for beta chain variable domain of TCR clone 35569 (TRBV7-9, TRBJ2-3)
CDSSPGSTDTQYF

SEQ ID NO: 71139 - protein, 15 aa, Homo sapiens
  CDR3 for alpha chain variable domain of TCR clone 35570 (TRAV38-1, TRAJ37)
CAFIFGSGNTGKLIF

SEQ ID NO: 71140 - protein, 12 aa, Homo sapiens
  CDR3 for beta chain variable domain of TCR clone 35570 (TRBV7-9, TRBJ2-7)
CASSLEGYEHYF

SEQ ID NO: 71141 - protein, 16 aa, Homo sapiens
  CDR3 for alpha chain variable domain of TCR clone 35571 (TRAV30, TRAJ24)
CGTEIVDADSWGKFQF

SEQ ID NO: 71142 - protein, 17 aa, Homo sapiens
  CDR3 for beta chain variable domain of TCR clone 35571 (TRBV7-3, TRBJ2-2)
CASSLSGTSGGTGELFF

SEQ ID NO: 71143 - protein, 14 aa, Homo sapiens
  CDR3 for alpha chain variable domain of TCR clone 35572 (TRAV12-2, TRAJ40)
CAVKIPSGTYKYIF

SEQ ID NO: 71144 - protein, 12 aa, Homo sapiens
  CDR3 for beta chain variable domain of TCR clone 35572 (TRBV14, TRBJ2-5)
CASSQLKETQYF

SEQ ID NO: 71145 - protein, 14 aa, Homo sapiens
  CDR3 for alpha chain variable domain of TCR clone 35573 (TRAV34, TRAJ44)
CGADGTGTASKLTF

SEQ ID NO: 71146 - protein, 15 aa, Homo sapiens
  CDR3 for beta chain variable domain of TCR clone 35573 (TRBV5-1, TRBJ2-1)
CASSPPRAPYNGQFF

SEQ ID NO: 71147 - protein, 16 aa, Homo sapiens
  CDR3 for alpha chain variable domain of TCR clone 35574 (TRAV1-2, TRAJ10)
CAVRGVLTGGGNKLTF

SEQ ID NO: 71148 - protein, 13 aa, Homo sapiens
  CDR3 for beta chain variable domain of TCR clone 35574 (TRBV12-5, TRBJ2-3)
CASGDRQSDTQYF

SEQ ID NO: 71149 - protein, 10 aa, Homo sapiens
  CDR3 for alpha chain variable domain of TCR clone 35575 (TRAV21, TRAJ31)
CAVDNARLMF

SEQ ID NO: 71150 - protein, 15 aa, Homo sapiens
  CDR3 for beta chain variable domain of TCR clone 35575 (TRBV28, TRBJ2-1)
CASSIIAGGRSEQFF

SEQ ID NO: 71151 - protein, 15 aa, Homo sapiens
  CDR3 for alpha chain variable domain of TCR clone 35576 (TRAV13-2, TRAJ45)
YAEHHSGGGADGLTF

SEQ ID NO: 71152 - protein, 15 aa, Homo sapiens
  CDR3 for beta chain variable domain of TCR clone 35576 (TRBV7-2, TRBJ2-7)
CASSLALGSAYEQYF

SEQ ID NO: 71153 - protein, 14 aa, Homo sapiens
  CDR3 for alpha chain variable domain of TCR clone 35577 (TRAV12-3, TRAJ10)
SHLPLTGGGNKLTF

SEQ ID NO: 71154 - protein, 16 aa, Homo sapiens
  CDR3 for beta chain variable domain of TCR clone 35577 (TRBV11-2, TRBJ2-7)
CASSTVTAPKTYEQYF

SEQ ID NO: 71155 - protein, 13 aa, Homo sapiens
  CDR3 for alpha chain variable domain of TCR clone 35578 (TRAV27, TRAJ3)
ASLRGSSASKIIF

SEQ ID NO: 71156 - protein, 15 aa, Homo sapiens
  CDR3 for beta chain variable domain of TCR clone 35578 (TRBV28, TRBJ1-3)
CASSMGWAAGNTIYF

SEQ ID NO: 71157 - protein, 14 aa, Homo sapiens
  CDR3 for alpha chain variable domain of TCR clone 35579 (TRAV1-2, TRAJ16)
CAVNRFSDGQKLLF

SEQ ID NO: 71158 - protein, 14 aa, Homo sapiens
  CDR3 for beta chain variable domain of TCR clone 35579 (TRBV13, TRBJ2-5)
CASSLGRGRETQYF

SEQ ID NO: 71159 - protein, 12 aa, Homo sapiens
  CDR3 for alpha chain variable domain of TCR clone 35580 (TRAV29/DV5, TRAJ49)
CAATDTGNQSYF

SEQ ID NO: 71160 - protein, 12 aa, Homo sapiens
  CDR3 for beta chain variable domain of TCR clone 35580 (TRBV12-4, TRBJ2-7)
CASSLGGYEQYF

SEQ ID NO: 71161 - protein, 11 aa, Homo sapiens
  CDR3 for alpha chain variable domain of TCR clone 35581 (TRAV3, TRAJ21)
CAVGNFNKFYF

SEQ ID NO: 71162 - protein, 13 aa, Homo sapiens
  CDR3 for beta chain variable domain of TCR clone 35581 (TRBV20-1, TRBJ1-1)
CSAPPGGHTEAFF

SEQ ID NO: 71163 - protein, 18 aa, Homo sapiens
  CDR3 for alpha chain variable domain of TCR clone 35582 (TRAV21, TRAJ52)
CAVRPSPAGGTSYGKLTF

SEQ ID NO: 71164 - protein, 16 aa, Homo sapiens
  CDR3 for beta chain variable domain of TCR clone 35582 (TRBV28, TRBJ2-1)
CASSSPEYPRDNEQFF

SEQ ID NO: 71165 - protein, 13 aa, Homo sapiens
  CDR3 for alpha chain variable domain of TCR clone 35583 (TRAV8-3, TRAJ36)
CAVGATGANNLFF

SEQ ID NO: 71166 - protein, 15 aa, Homo sapiens
  CDR3 for beta chain variable domain of TCR clone 35583 (TRBV7-2, TRBJ1-2)
CASSPRAGWNYGYTS

SEQ ID NO: 71167 - protein, 12 aa, Homo sapiens
  CDR3 for alpha chain variable domain of TCR clone 35584 (TRAV8-3, TRAJ26)
CAGDNYGQNFVS

SEQ ID NO: 71168 - protein, 12 aa, Homo sapiens
  CDR3 for beta chain variable domain of TCR clone 35584 (TRBV11-2, TRBJ2-1)
CAGSPGNNEQFF

SEQ ID NO: 71169 - protein, 12 aa, Homo sapiens
  CDR3 for alpha chain variable domain of TCR clone 35585 (TRAV3, TRAJ7)
CADLLWEQQTRF

SEQ ID NO: 71170 - protein, 13 aa, Homo sapiens
  CDR3 for beta chain variable domain of TCR clone 35585 (TRBV7-3, TRBJ2-5)
CAGSFRGGETQYF

SEQ ID NO: 71171 - protein, 12 aa, Homo sapiens
  CDR3 for alpha chain variable domain of TCR clone 35586 (TRAV29/DV5, TRAJ34)
CAASGNTDKLIF

SEQ ID NO: 71172 - protein, 15 aa, Homo sapiens
  CDR3 for beta chain variable domain of TCR clone 35586 (TRBV10-2, TRBJ2-6)
CASSEQGAGANVLTF

SEQ ID NO: 71173 - protein, 17 aa, Homo sapiens
  CDR3 for alpha chain variable domain of TCR clone 35587 (TRAV8-6, TRAJ58)
CAVSSWVGETSGSRLAF

SEQ ID NO: 71174 - protein, 14 aa, Homo sapiens
  CDR3 for beta chain variable domain of TCR clone 35587 (TRBV4-2, TRBJ2-1)
CASGLDRAYNEQFF

SEQ ID NO: 71175 - protein, 14 aa, Homo sapiens
  CDR3 for alpha chain variable domain of TCR clone 35588 (TRAV8-3, TRAJ4)
CAVGAAGGYNKLIF

SEQ ID NO: 71176 - protein, 15 aa, Homo sapiens
  CDR3 for beta chain variable domain of TCR clone 35588 (TRBV6-5, TRBJ2-1)
CASSYEAGAGNEQFF

SEQ ID NO: 71177 - protein, 22 aa, Homo sapiens
  CDR3 for alpha chain variable domain of TCR clone 35589 (TRAV8-6, TRAJ6)
CAVTLGEEATYLHLEEEPALLS

SEQ ID NO: 71178 - protein, 15 aa, Homo sapiens
  CDR3 for beta chain variable domain of TCR clone 35589 (TRBV7-2, TRBJ1-1)
CASSPQGGANTEAFF

SEQ ID NO: 71179 - protein, 15 aa, Homo sapiens
  CDR3 for alpha chain variable domain of TCR clone 35590 (TRAV8-3, TRAJ45)
CASSYSGGGADGLTF

SEQ ID NO: 71180 - protein, 13 aa, Homo sapiens
  CDR3 for beta chain variable domain of TCR clone 35590 (TRBV10-3, TRBJ2-7)
CASKLAVNYEQYI

SEQ ID NO: 71181 - protein, 12 aa, Homo sapiens
  CDR3 for alpha chain variable domain of TCR clone 35591 (TRAV26-1, TRAJ36)
CIVRVRADNLFF

SEQ ID NO: 71182 - protein, 13 aa, Homo sapiens
  CDR3 for beta chain variable domain of TCR clone 35591 (TRBV11-2, TRBJ2-5)
CASNRGPSETQYF

SEQ ID NO: 71183 - protein, 13 aa, Homo sapiens
  CDR3 for alpha chain variable domain of TCR clone 35592 (TRAV8-6, TRAJ49)
CAVITNTGNQFYF

SEQ ID NO: 71184 - protein, 14 aa, Homo sapiens
  CDR3 for beta chain variable domain of TCR clone 35592 (TRBV7-6, TRBJ2-3)
CASSLGTVTDTQYF

SEQ ID NO: 71185 - protein, 14 aa, Homo sapiens
  CDR3 for alpha chain variable domain of TCR clone 35593 (TRAV12-3, TRAJ10)
SHLPLTGGGTKLTF

SEQ ID NO: 71186 - protein, 16 aa, Homo sapiens
  CDR3 for beta chain variable domain of TCR clone 35593 (TRBV10-3, TRBJ2-1)
CAISGVGDGGGGEQFF

SEQ ID NO: 71187 - protein, 17 aa, Homo sapiens
  CDR3 for alpha chain variable domain of TCR clone 35594 (TRAV8-6, TRAJ8)
CAVKEGIENTGFQKLVF

SEQ ID NO: 71188 - protein, 16 aa, Homo sapiens
  CDR3 for beta chain variable domain of TCR clone 35594 (TRBV19, TRBJ2-1)
CASSKAGPSSYNEQFF

SEQ ID NO: 71189 - protein, 15 aa, Homo sapiens
  CDR3 for alpha chain variable domain of TCR clone 35595 (TRAV26-1, TRAJ29)
CIVRVEGSGNTPLVF

SEQ ID NO: 71190 - protein, 17 aa, Homo sapiens
  CDR3 for beta chain variable domain of TCR clone 35595 (TRBV7-8, TRBJ2-6)
CASSAGTGGAGANVLTF

SEQ ID NO: 71191 - protein, 12 aa, Homo sapiens
  CDR3 for alpha chain variable domain of TCR clone 35596 (TRAV12-3, TRAJ17)
CAMTLTGSKLTF

SEQ ID NO: 71192 - protein, 20 aa, Homo sapiens
  CDR3 for beta chain variable domain of TCR clone 35596 (TRBV28, TRBJ2-1)
CASTPIGRSPGLAGGNEQFF

SEQ ID NO: 71193 - protein, 14 aa, Homo sapiens
  CDR3 for alpha chain variable domain of TCR clone 35597 (TRAV1-1, TRAJ27)
CAVIYNTNAGNSTF

SEQ ID NO: 71194 - protein, 15 aa, Homo sapiens
  CDR3 for beta chain variable domain of TCR clone 35597 (TRBV7-2, TRBJ2-1)
CASSSGLAGGNEQFF

SEQ ID NO: 71195 - protein, 11 aa, Homo sapiens
  CDR3 for alpha chain variable domain of TCR clone 35598 (TRAV2, TRAJ13)
CASGGYQKATF

SEQ ID NO: 71196 - protein, 14 aa, Homo sapiens
  CDR3 for beta chain variable domain of TCR clone 35598 (TRBV12-4, TRBJ1-4)
CASRMTGRSEKLFF

SEQ ID NO: 71197 - protein, 15 aa, Homo sapiens
  CDR3 for alpha chain variable domain of TCR clone 35599 (TRAV2, TRAJ28)
RAVPYSGAGSYQLTF

SEQ ID NO: 71198 - protein, 17 aa, Homo sapiens
  CDR3 for beta chain variable domain of TCR clone 35599 (TRBV20-1, TRBJ2-4)
CSARDWASGGRENIQYF

SEQ ID NO: 71199 - protein, 11 aa, Homo sapiens
  CDR3 for alpha chain variable domain of TCR clone 35600 (TRAV12-2, TRAJ29)
CAVTLRSPLVF

SEQ ID NO: 71200 - protein, 16 aa, Homo sapiens
  CDR3 for beta chain variable domain of TCR clone 35600 (TRBV19, TRBJ2-1)
CASSKAGPSSYNEQFF

SEQ ID NO: 71201 - protein, 13 aa, Homo sapiens
  CDR3 for alpha chain variable domain of TCR clone 35601 (TRAV27, TRAJ8)
CAGGPTGFPKLVF

SEQ ID NO: 71202 - protein, 15 aa, Homo sapiens
  CDR3 for beta chain variable domain of TCR clone 35601 (TRBV6-1, TRBJ2-7)
CASSESMGDFYEQYF

SEQ ID NO: 71203 - protein, 12 aa, Homo sapiens
  CDR3 for alpha chain variable domain of TCR clone 35602 (TRAV13-1, TRAJ21)
CAAKEGFNKFYF

SEQ ID NO: 71204 - protein, 13 aa, Homo sapiens
  CDR3 for beta chain variable domain of TCR clone 35602 (TRBV12-5, TRBJ2-3)
CASGDRQSDTQYF

SEQ ID NO: 71205 - protein, 11 aa, Homo sapiens
  CDR3 for alpha chain variable domain of TCR clone 35603 (TRAV4, TRAJ31)
CLVGDNARLMF

SEQ ID NO: 71206 - protein, 16 aa, Homo sapiens
  CDR3 for beta chain variable domain of TCR clone 35603 (TRBV7-2, TRBJ2-5)
CASSSKWLSGQETQYF

SEQ ID NO: 71207 - protein, 15 aa, Homo sapiens
  CDR3 for alpha chain variable domain of TCR clone 35604 (TRAV25, TRAJ52)
FAGRPGGTSYGKLTF

SEQ ID NO: 71208 - protein, 17 aa, Homo sapiens
  CDR3 for beta chain variable domain of TCR clone 35604 (TRBV7-8, TRBJ2-6)
CASSAGTGGAGANVLTF

SEQ ID NO: 71209 - protein, 14 aa, Homo sapiens
  CDR3 for alpha chain variable domain of TCR clone 35605 (TRAV26-2, TRAJ27)
CILRDISDAGKSTF

SEQ ID NO: 71210 - protein, 15 aa, Homo sapiens
  CDR3 for beta chain variable domain of TCR clone 35605 (TRBV10-3, TRBJ2-7)
CATRERGLRSYEQYF

SEQ ID NO: 71211 - protein, 15 aa, Homo sapiens
  CDR3 for alpha chain variable domain of TCR clone 35606 (TRAV12-1, TRAJ44)
CVVFVNTGAASKLTF

SEQ ID NO: 71212 - protein, 17 aa, Homo sapiens
  CDR3 for beta chain variable domain of TCR clone 35606 (TRBV7-8, TRBJ2-6)
CASSAGTGGAGANVLTF

SEQ ID NO: 71213 - protein, 15 aa, Homo sapiens
  CDR3 for alpha chain variable domain of TCR clone 35607 (TRAV12-3, TRAJ13)
CAMSARSGGYQKVTF

SEQ ID NO: 71214 - protein, 14 aa, Homo sapiens
  CDR3 for beta chain variable domain of TCR clone 35607 (TRBV25-1, TRBJ1-1)
CASTHLGGNTEAFF

SEQ ID NO: 71215 - protein, 11 aa, Homo sapiens
  CDR3 for alpha chain variable domain of TCR clone 35608 (TRAV3, TRAJ21)
CAVGNFNKFYF

SEQ ID NO: 71216 - protein, 16 aa, Homo sapiens
  CDR3 for beta chain variable domain of TCR clone 35608 (TRBV3-1, TRBJ2-5)
CASSPGQFNGFGTQYF

SEQ ID NO: 71217 - protein, 15 aa, Homo sapiens
  CDR3 for alpha chain variable domain of TCR clone 35609 (TRAV12-3, TRAJ17)
CAMSPSLAAGNKLTF

SEQ ID NO: 71218 - protein, 20 aa, Homo sapiens
  CDR3 for beta chain variable domain of TCR clone 35609 (TRBV7-8, TRBJ2-2)
CASSHLFPGPTIHITGELFF

SEQ ID NO: 71219 - protein, 12 aa, Homo sapiens
  CDR3 for alpha chain variable domain of TCR clone 35610 (TRAV13-2, TRAJ23)
CAERHRGGKLIF

SEQ ID NO: 71220 - protein, 16 aa, Homo sapiens
  CDR3 for beta chain variable domain of TCR clone 35610 (TRBV20-1, TRBJ1-4)
CSAPGQGLLTNEQLFF

SEQ ID NO: 71221 - protein, 14 aa, Homo sapiens
  CDR3 for alpha chain variable domain of TCR clone 35611 (TRAV1-2, TRAJ8)
CAVREDTGFQKLVF

SEQ ID NO: 71222 - protein, 14 aa, Homo sapiens
  CDR3 for beta chain variable domain of TCR clone 35611 (TRBV19, TRBJ2-7)
CASSIFAGTYEQYF

SEQ ID NO: 71223 - protein, 14 aa, Homo sapiens
  CDR3 for alpha chain variable domain of TCR clone 35612 (TRAV13-1, TRAJ35)
CAASKGGFGNVLHC

SEQ ID NO: 71224 - protein, 17 aa, Homo sapiens
  CDR3 for beta chain variable domain of TCR clone 35612 (TRBV20-1, TRBJ2-2)
CSASGSGQGGLTGELFF

SEQ ID NO: 71225 - protein, 17 aa, Homo sapiens
  CDR3 for alpha chain variable domain of TCR clone 35613 (TRAV4, TRAJ13)
CLVGVQGSSRGYQKVTF

SEQ ID NO: 71226 - protein, 18 aa, Homo sapiens
  CDR3 for beta chain variable domain of TCR clone 35613 (TRBV15, TRBJ2-3)
CATSRDGARSWDTDTQYF

SEQ ID NO: 71227 - protein, 14 aa, Homo sapiens
  CDR3 for alpha chain variable domain of TCR clone 35614 (TRAV12-3, TRAJ54)
CAMRGIQGAQKLVF

SEQ ID NO: 71228 - protein, 13 aa, Homo sapiens
  CDR3 for beta chain variable domain of TCR clone 35614 (TRBV19, TRBJ1-1)
CASSPSNGGEDFF

SEQ ID NO: 71229 - protein, 13 aa, Homo sapiens
  CDR3 for alpha chain variable domain of TCR clone 35615 (TRAV5, TRAJ30)
CAEIANRDDKIIF

SEQ ID NO: 71230 - protein, 13 aa, Homo sapiens
  CDR3 for beta chain variable domain of TCR clone 35615 (TRBV29-1, TRBJ2-1)
CSVEGGRVNEQFF

SEQ ID NO: 71231 - protein, 12 aa, Homo sapiens
  CDR3 for alpha chain variable domain of TCR clone 35616 (TRAV13-1, TRAJ20)
SVQQVNDYKLSF

SEQ ID NO: 71232 - protein, 14 aa, Homo sapiens
  CDR3 for beta chain variable domain of TCR clone 35616 (TRBV7-6, TRBJ2-3)
CASSLTGGTDTQYS

SEQ ID NO: 71233 - protein, 17 aa, Homo sapiens
  CDR3 for alpha chain variable domain of TCR clone 35617 (TRAV8-6, TRAJ58)
CAVSSWVGETSGSRLNF

SEQ ID NO: 71234 - protein, 14 aa, Homo sapiens
  CDR3 for beta chain variable domain of TCR clone 35617 (TRBV4-2, TRBJ2-1)
CASGLDRAYNEQFF

SEQ ID NO: 71235 - protein, 15 aa, Homo sapiens
  CDR3 for alpha chain variable domain of TCR clone 35618 (TRAV8-4, TRAJ47)
CAVSDPGEYGNKLVF

SEQ ID NO: 71236 - protein, 15 aa, Homo sapiens
  CDR3 for beta chain variable domain of TCR clone 35618 (TRBV11-2, TRBJ2-1)
CASSLGPDSYNEQFF

SEQ ID NO: 71237 - protein, 14 aa, Homo sapiens
  CDR3 for alpha chain variable domain of TCR clone 35619 (TRAV35, TRAJ22)
CAGLRPGSARQLTY

SEQ ID NO: 71238 - protein, 15 aa, Homo sapiens
  CDR3 for beta chain variable domain of TCR clone 35619 (TRBV12-4, TRBJ2-5)
CASSPPTGLQETQYF

SEQ ID NO: 71239 - protein, 15 aa, Homo sapiens
  CDR3 for alpha chain variable domain of TCR clone 35620 (TRAV3, TRAJ30)
CAVRDEYGRDDKIIF

SEQ ID NO: 71240 - protein, 16 aa, Homo sapiens
  CDR3 for beta chain variable domain of TCR clone 35620 (TRBV5-1, TRBJ2-5)
CASSLANHRGRGTQYF

SEQ ID NO: 71241 - protein, 13 aa, Homo sapiens
  CDR3 for alpha chain variable domain of TCR clone 35621 (TRAV22, TRAJ44)
CALNPGTASKLTF

SEQ ID NO: 71242 - protein, 14 aa, Homo sapiens
  CDR3 for beta chain variable domain of TCR clone 35621 (TRBV4-2, TRBJ2-5)
RASSQDRGRETQYF

SEQ ID NO: 71243 - protein, 18 aa, Homo sapiens
  CDR3 for alpha chain variable domain of TCR clone 35622 (TRAV13-1, TRAJ52)
CATSKRSAGGTSYGKLTF

SEQ ID NO: 71244 - protein, 13 aa, Homo sapiens
  CDR3 for beta chain variable domain of TCR clone 35622 (TRBV12-4, TRBJ1-2)
CASSLRQGKGYTF

SEQ ID NO: 71245 - protein, 13 aa, Homo sapiens
  CDR3 for alpha chain variable domain of TCR clone 35623 (TRAV12-3, TRAJ53)
CAMRGGSNYKLTF

SEQ ID NO: 71246 - protein, 15 aa, Homo sapiens
  CDR3 for beta chain variable domain of TCR clone 35623 (TRBV2, TRBJ2-1)
CAIQARLVMIGEQFF

SEQ ID NO: 71247 - protein, 16 aa, Homo sapiens
  CDR3 for alpha chain variable domain of TCR clone 35624 (TRAV17, TRAJ28)
CAAASVSGAGSYQLTF

SEQ ID NO: 71248 - protein, 11 aa, Homo sapiens
  CDR3 for beta chain variable domain of TCR clone 35624 (TRBV7-9, TRBJ2-5)
CASSLGETQYF

SEQ ID NO: 71249 - protein, 13 aa, Homo sapiens
  CDR3 for alpha chain variable domain of TCR clone 35625 (TRAV27, TRAJ29)
CAGAHSGNTPLIF

SEQ ID NO: 71250 - protein, 14 aa, Homo sapiens
  CDR3 for beta chain variable domain of TCR clone 35625 (TRBV7-9, TRBJ2-7)
CASSIGQGAGEQYF

SEQ ID NO: 71251 - protein, 13 aa, Homo sapiens
  CDR3 for alpha chain variable domain of TCR clone 35626 (TRAV8-3, TRAJ28)
CAVDAVGSYQLTF

SEQ ID NO: 71252 - protein, 14 aa, Homo sapiens
  CDR3 for beta chain variable domain of TCR clone 35626 (TRBV7-2, TRBJ2-7)
CASRSQGAAYEQYF

SEQ ID NO: 71253 - protein, 16 aa, Homo sapiens
  CDR3 for alpha chain variable domain of TCR clone 35627 (TRAV8-1, TRAJ42)
CAVTSRYGGSQGNLIS

SEQ ID NO: 71254 - protein, 12 aa, Homo sapiens
  CDR3 for beta chain variable domain of TCR clone 35627 (TRBV6-3, TRBJ2-7)
CASSLGRRGLYF

SEQ ID NO: 71255 - protein, 11 aa, Homo sapiens
  CDR3 for alpha chain variable domain of TCR clone 35628 (TRAV12-3, TRAJ43)
CAMSVSNDMRF

SEQ ID NO: 71256 - protein, 20 aa, Homo sapiens
  CDR3 for beta chain variable domain of TCR clone 35628 (TRBV28, TRBJ2-1)
WASTPIGRSPGLAGGNEQFF

SEQ ID NO: 71257 - protein, 12 aa, Homo sapiens
  CDR3 for alpha chain variable domain of TCR clone 35629 (TRAV3, TRAJ27)
CAVRDGAGKSTF

SEQ ID NO: 71258 - protein, 13 aa, Homo sapiens
  CDR3 for beta chain variable domain of TCR clone 35629 (TRBV10-3, TRBJ1-2)
CAISADLNYGYTF

SEQ ID NO: 71259 - protein, 12 aa, Homo sapiens
  CDR3 for alpha chain variable domain of TCR clone 35630 (TRAV12-2, TRAJ31)
CAVNAPDARLMF

SEQ ID NO: 71260 - protein, 12 aa, Homo sapiens
  CDR3 for beta chain variable domain of TCR clone 35630 (TRBV7-8, TRBJ2-7)
CASSLGDREQYF

SEQ ID NO: 71261 - protein, 23 aa, Homo sapiens
  CDR3 for alpha chain variable domain of TCR clone 35631 (TRAV26-1, TRAJ38)
CIADNAGNNHIQNPDPAVYQLID

SEQ ID NO: 71262 - protein, 12 aa, Homo sapiens
  CDR3 for beta chain variable domain of TCR clone 35631 (TRBV11-2, TRBJ2-2)
CASSLGGGELFF

SEQ ID NO: 71263 - protein, 18 aa, Homo sapiens
  CDR3 for alpha chain variable domain of TCR clone 35632 (TRAV21, TRAJ52)
CAVRPSPAGGTSYGKLTF

SEQ ID NO: 71264 - protein, 17 aa, Homo sapiens
  CDR3 for beta chain variable domain of TCR clone 35632 (TRBV13, TRBJ2-3)
CASSLSRVAGGRNTPYF

SEQ ID NO: 71265 - protein, 11 aa, Homo sapiens
  CDR3 for alpha chain variable domain of TCR clone 35633 (TRAV12-3, TRAJ27)
CAMANAGKSTF

SEQ ID NO: 71266 - protein, 13 aa, Homo sapiens
  CDR3 for beta chain variable domain of TCR clone 35633 (TRBV20-1, TRBJ1-1)
CSARAGGNTEAFF

SEQ ID NO: 71267 - protein, 13 aa, Homo sapiens
  CDR3 for alpha chain variable domain of TCR clone 35634 (TRAV12-2, TRAJ3)
CAFQYSSASKIIF

SEQ ID NO: 71268 - protein, 11 aa, Homo sapiens
  CDR3 for beta chain variable domain of TCR clone 35634 (TRBV20-1, TRBJ2-3)
RSGTSSTTQYF

SEQ ID NO: 71269 - protein, 14 aa, Homo sapiens
  CDR3 for alpha chain variable domain of TCR clone 35635 (TRAV17, TRAJ54)
CATDANQGAQKLVF

SEQ ID NO: 71270 - protein, 12 aa, Homo sapiens
  CDR3 for beta chain variable domain of TCR clone 35635 (TRBV7-8, TRBJ2-7)
CASSLGDREQYF

SEQ ID NO: 71271 - protein, 13 aa, Homo sapiens
  CDR3 for alpha chain variable domain of TCR clone 35636 (TRAV12-2, TRAJ45)
CPPGRGGADGLTF

SEQ ID NO: 71272 - protein, 14 aa, Homo sapiens
  CDR3 for beta chain variable domain of TCR clone 35636 (TRBV18, TRBJ1-5)
CASSPGNSNQPQHF

SEQ ID NO: 71273 - protein, 18 aa, Homo sapiens
  CDR3 for alpha chain variable domain of TCR clone 35637 (TRAV9-2, TRAJ52)
CALSRHNAGGTSYGKLTF

SEQ ID NO: 71274 - protein, 13 aa, Homo sapiens
  CDR3 for beta chain variable domain of TCR clone 35637 (TRBV7-9, TRBJ1-2)
CASSLKQNYGYSF

SEQ ID NO: 71275 - protein, 14 aa, Homo sapiens
  CDR3 for alpha chain variable domain of TCR clone 35638 (TRAV26-1, TRAJ34)
CIVIVAYNTDRLIF

SEQ ID NO: 71276 - protein, 15 aa, Homo sapiens
  CDR3 for beta chain variable domain of TCR clone 35638 (TRBV20-1, TRBJ2-7)
CSARVPAAYFYEQYF

SEQ ID NO: 71277 - protein, 13 aa, Homo sapiens
  CDR3 for alpha chain variable domain of TCR clone 35639 (TRAV20, TRAJ37)
CAGCSSNTGKLIF

SEQ ID NO: 71278 - protein, 11 aa, Homo sapiens
  CDR3 for beta chain variable domain of TCR clone 35639 (TRBV12-4, TRBJ2-3)
CASTATYTQYF

SEQ ID NO: 71279 - protein, 13 aa, Homo sapiens
  CDR3 for alpha chain variable domain of TCR clone 35640 (TRAV17, TRAJ26)
CATVDNYGQNFVF

SEQ ID NO: 71280 - protein, 14 aa, Homo sapiens
  CDR3 for beta chain variable domain of TCR clone 35640 (TRBV25-1, TRBJ1-1)
CASTHLGGNTEAFF

SEQ ID NO: 71281 - protein, 14 aa, Homo sapiens
  CDR3 for alpha chain variable domain of TCR clone 35641 (TRAV20, TRAJ56)
CAVPFGGANSKLTF

SEQ ID NO: 71282 - protein, 14 aa, Homo sapiens
  CDR3 for beta chain variable domain of TCR clone 35641 (TRBV20-1, TRBJ2-7)
CSAKRGRSSYEQYF

SEQ ID NO: 71283 - protein, 15 aa, Homo sapiens
  CDR3 for alpha chain variable domain of TCR clone 35642 (TRAV17, TRAJ23)
CATDAEANQGGKLIF

SEQ ID NO: 71284 - protein, 12 aa, Homo sapiens
  CDR3 for beta chain variable domain of TCR clone 35642 (TRBV2, TRBJ2-1)
CAKREGYNEQFF

SEQ ID NO: 71285 - protein, 13 aa, Homo sapiens
  CDR3 for alpha chain variable domain of TCR clone 35643 (TRAV12-2, TRAJ7)
CAGPIYGNNRLAF

SEQ ID NO: 71286 - protein, 14 aa, Homo sapiens
  CDR3 for beta chain variable domain of TCR clone 35643 (TRBV6-1, TRBJ2-1)
CATFTSGQNNEQFF

SEQ ID NO: 71287 - protein, 16 aa, Homo sapiens
  CDR3 for alpha chain variable domain of TCR clone 35644 (TRAV14/DV4, TRAJ53)
CAMREGGGGSNYKLTF

SEQ ID NO: 71288 - protein, 16 aa, Homo sapiens
  CDR3 for beta chain variable domain of TCR clone 35644 (TRBV13, TRBJ2-3)
CQQPLQGSGGRNTQYF

SEQ ID NO: 71289 - protein, 16 aa, Homo sapiens
  CDR3 for alpha chain variable domain of TCR clone 35645 (TRAV26-1, TRAJ37)
CIVRGDGYGNTGKLIF

SEQ ID NO: 71290 - protein, 15 aa, Homo sapiens
  CDR3 for beta chain variable domain of TCR clone 35645 (TRBV7-3, TRBJ2-1)
CASSPTGGGEVEQFF

SEQ ID NO: 71291 - protein, 11 aa, Homo sapiens
  CDR3 for alpha chain variable domain of TCR clone 35646 (TRAV1-2, TRAJ40)
CAVPGTYKYIF

SEQ ID NO: 71292 - protein, 12 aa, Homo sapiens
  CDR3 for beta chain variable domain of TCR clone 35646 (TRBV18, TRBJ2-5)
CASSPSKETQYF

SEQ ID NO: 71293 - protein, 13 aa, Homo sapiens
  CDR3 for alpha chain variable domain of TCR clone 35647 (TRAV12-1, TRAJ43)
CVVSHHNNNDMRF

SEQ ID NO: 71294 - protein, 14 aa, Homo sapiens
  CDR3 for beta chain variable domain of TCR clone 35647 (TRBV5-5, TRBJ2-2)
CANSLLGDTGELFF

SEQ ID NO: 71295 - protein, 14 aa, Homo sapiens
  CDR3 for alpha chain variable domain of TCR clone 35648 (TRAV12-1, TRAJ54)
CVVNIYQGAQKLVF

SEQ ID NO: 71296 - protein, 14 aa, Homo sapiens
  CDR3 for beta chain variable domain of TCR clone 35648 (TRBV12-5, TRBJ2-5)
CASGSRTHQETQYF

SEQ ID NO: 71297 - protein, 17 aa, Homo sapiens
  CDR3 for alpha chain variable domain of TCR clone 35649 (TRAV23/DV6, TRAJ53)
CAASKLGSGGSNYKLAF

SEQ ID NO: 71298 - protein, 14 aa, Homo sapiens
  CDR3 for beta chain variable domain of TCR clone 35649 (TRBV7-9, TRBJ2-3)
CASSLEQGTNTQYF

SEQ ID NO: 71299 - protein, 13 aa, Homo sapiens
  CDR3 for alpha chain variable domain of TCR clone 35650 (TRAV12-1, TRAJ6)
CVVFPGGSYIPTF

SEQ ID NO: 71300 - protein, 14 aa, Homo sapiens
  CDR3 for beta chain variable domain of TCR clone 35650 (TRBV20-1, TRBJ1-3)
CSASPTGAGNTIYV

SEQ ID NO: 71301 - protein, 14 aa, Homo sapiens
  CDR3 for alpha chain variable domain of TCR clone 35651 (TRAV1-2, TRAJ16)
CAANRFSDGQKLLF

SEQ ID NO: 71302 - protein, 14 aa, Homo sapiens
  CDR3 for beta chain variable domain of TCR clone 35651 (TRBV19, TRBJ2-1)
CASPTFVLSGEQFF

SEQ ID NO: 71303 - protein, 13 aa, Homo sapiens
  CDR3 for alpha chain variable domain of TCR clone 35652 (TRAV2, TRAJ40)
CAVVTSGTYKYIF

SEQ ID NO: 71304 - protein, 13 aa, Homo sapiens
  CDR3 for beta chain variable domain of TCR clone 35652 (TRBV27, TRBJ1-1)
CASSLSIGAEAFF

SEQ ID NO: 71305 - protein, 16 aa, Homo sapiens
  CDR3 for alpha chain variable domain of TCR clone 35653 (TRAV1-2, TRAJ40)
CAVRGSRTSGTYKYIF

SEQ ID NO: 71306 - protein, 14 aa, Homo sapiens
  CDR3 for beta chain variable domain of TCR clone 35653 (TRBV4-1, TRBJ2-3)
FSSSQDSGTDTQYF

SEQ ID NO: 71307 - protein, 14 aa, Homo sapiens
  CDR3 for alpha chain variable domain of TCR clone 35654 (TRAV12-3, TRAJ10)
SHLPLTGGGNKLTF

SEQ ID NO: 71308 - protein, 14 aa, Homo sapiens
  CDR3 for beta chain variable domain of TCR clone 35654 (TRBV6-1, TRBJ1-3)
CASVRGGGGNTIYF

SEQ ID NO: 71309 - protein, 14 aa, Homo sapiens
  CDR3 for alpha chain variable domain of TCR clone 35655 (TRAV23/DV6, TRAJ22)
CTASVSGSARQLTF

SEQ ID NO: 71310 - protein, 16 aa, Homo sapiens
  CDR3 for beta chain variable domain of TCR clone 35655 (TRBV19, TRBJ2-2)
CASSFPGQGLAGELFF

SEQ ID NO: 71311 - protein, 13 aa, Homo sapiens
  CDR3 for alpha chain variable domain of TCR clone 35656 (TRAV9-2, TRAJ53)
CALSGGSNYELTF

SEQ ID NO: 71312 - protein, 17 aa, Homo sapiens
  CDR3 for beta chain variable domain of TCR clone 35656 (TRBV11-2, TRBJ2-1)
CASSLYPPGVEYNEQFF

SEQ ID NO: 71313 - protein, 14 aa, Homo sapiens
  CDR3 for alpha chain variable domain of TCR clone 35657 (TRAV8-2, TRAJ45)
CVVSAGGGADGLTF

SEQ ID NO: 71314 - protein, 12 aa, Homo sapiens
  CDR3 for beta chain variable domain of TCR clone 35657 (TRBV12-4, TRBJ2-1)
CASSLVQVEQFF

SEQ ID NO: 71315 - protein, 14 aa, Homo sapiens
  CDR3 for alpha chain variable domain of TCR clone 35658 (TRAV13-1, TRAJ40)
CAARSTSGTYKYIF

SEQ ID NO: 71316 - protein, 14 aa, Homo sapiens
  CDR3 for beta chain variable domain of TCR clone 35658 (TRBV18, TRBJ1-5)
CQLRNRGNNQPQHF

SEQ ID NO: 71317 - protein, 11 aa, Homo sapiens
  CDR3 for alpha chain variable domain of TCR clone 35659 (TRAV2, TRAJ13)
CASGGYQKVTF

SEQ ID NO: 71318 - protein, 16 aa, Homo sapiens
  CDR3 for beta chain variable domain of TCR clone 35659 (TRBV6-1, TRBJ2-5)
CASSETLDRGVETQYF

SEQ ID NO: 71319 - protein, 14 aa, Homo sapiens
  CDR3 for alpha chain variable domain of TCR clone 35660 (TRAV38-1, TRAJ45)
CAYYSGGGANGLTF

SEQ ID NO: 71320 - protein, 20 aa, Homo sapiens
  CDR3 for beta chain variable domain of TCR clone 35660 (TRBV28, TRBJ2-1)
CASTPIGRSPGLAGGNEQFF

SEQ ID NO: 71321 - protein, 13 aa, Homo sapiens
  CDR3 for alpha chain variable domain of TCR clone 35661 (TRAV17, TRAJ9)
CATDYTGVFKTIF

SEQ ID NO: 71322 - protein, 16 aa, Homo sapiens
  CDR3 for beta chain variable domain of TCR clone 35661 (TRBV7-7, TRBJ2-1)
CASSLASGTSYNEQFF

SEQ ID NO: 71323 - protein, 15 aa, Homo sapiens
  CDR3 for alpha chain variable domain of TCR clone 35662 (TRAV3, TRAJ20)
CAVRDIKLSNYKLSF

SEQ ID NO: 71324 - protein, 15 aa, Homo sapiens
  CDR3 for beta chain variable domain of TCR clone 35662 (TRBV7-9, TRBJ1-6)
CASSSPGRGNSPLHF

SEQ ID NO: 71325 - protein, 15 aa, Homo sapiens
  CDR3 for alpha chain variable domain of TCR clone 35663 (TRAV26-1, TRAJ48)
CIARVGDFGNEKLTF

SEQ ID NO: 71326 - protein, 16 aa, Homo sapiens
  CDR3 for beta chain variable domain of TCR clone 35663 (TRBV4-1, TRBJ2-3)
CASSQRAGGLTDTQYF

SEQ ID NO: 71327 - protein, 13 aa, Homo sapiens
  CDR3 for alpha chain variable domain of TCR clone 35664 (TRAV2, TRAJ15)
CAVASQAGTALIF

SEQ ID NO: 71328 - protein, 15 aa, Homo sapiens
  CDR3 for beta chain variable domain of TCR clone 35664 (TRBV19, TRBJ1-1)
CASTSGQIQNTEAFF

SEQ ID NO: 71329 - protein, 12 aa, Homo sapiens
  CDR3 for alpha chain variable domain of TCR clone 35665 (TRAV1-1, TRAJ8)
CAGGTGFQKLVF

SEQ ID NO: 71330 - protein, 15 aa, Homo sapiens
  CDR3 for beta chain variable domain of TCR clone 35665 (TRBV7-9, TRBJ1-4)
CASSRTGGFNEKLFL

SEQ ID NO: 71331 - protein, 13 aa, Homo sapiens
  CDR3 for alpha chain variable domain of TCR clone 35666 (TRAV25, TRAJ10)
CAGRTGGGNKLTF

SEQ ID NO: 71332 - protein, 15 aa, Homo sapiens
  CDR3 for beta chain variable domain of TCR clone 35666 (TRBV19, TRBJ2-1)
CTSSSPGVPLDEQFF

SEQ ID NO: 71333 - protein, 13 aa, Homo sapiens
  CDR3 for alpha chain variable domain of TCR clone 35667 (TRAV2, TRAJ29)
CAAGNPGNTPLVF

SEQ ID NO: 71334 - protein, 16 aa, Homo sapiens
  CDR3 for beta chain variable domain of TCR clone 35667 (TRBV7-9, TRBJ1-2)
CASSPGGGAINYGYTF

SEQ ID NO: 71335 - protein, 16 aa, Homo sapiens
  CDR3 for alpha chain variable domain of TCR clone 35668 (TRAV3, TRAJ10)
CAVRDMRAGGGNKLTF

SEQ ID NO: 71336 - protein, 13 aa, Homo sapiens
  CDR3 for beta chain variable domain of TCR clone 35668 (TRBV7-9, TRBJ2-3)
CASSPGSTDTQYF

SEQ ID NO: 71337 - protein, 15 aa, Homo sapiens
  CDR3 for alpha chain variable domain of TCR clone 35669 (TRAV23/DV6, TRAJ13)
CAAWPGGGGYQKATF

SEQ ID NO: 71338 - protein, 17 aa, Homo sapiens
  CDR3 for beta chain variable domain of TCR clone 35669 (TRBV19, TRBJ2-7)
CASSISFYDSYPYEQYF

SEQ ID NO: 71339 - protein, 14 aa, Homo sapiens
  CDR3 for alpha chain variable domain of TCR clone 35670 (TRAV12-2, TRAJ40)
CAVKIPSGTYKYIF

SEQ ID NO: 71340 - protein, 13 aa, Homo sapiens
  CDR3 for beta chain variable domain of TCR clone 35670 (TRBV10-2, TRBJ2-7)
CASGASGGYEQYF

SEQ ID NO: 71341 - protein, 16 aa, Homo sapiens
  CDR3 for alpha chain variable domain of TCR clone 35671 (TRAV16, TRAJ4)
CALSRMFSGGYNKLIF

SEQ ID NO: 71342 - protein, 16 aa, Homo sapiens
  CDR3 for beta chain variable domain of TCR clone 35671 (TRBV24-1, TRBJ2-3)
CATSDPGTGATDTQHF

SEQ ID NO: 71343 - protein, 14 aa, Homo sapiens
  CDR3 for alpha chain variable domain of TCR clone 35672 (TRAV12-2, TRAJ13)
CAVKKTGGYQKVTF

SEQ ID NO: 71344 - protein, 12 aa, Homo sapiens
  CDR3 for beta chain variable domain of TCR clone 35672 (TRBV6-3, TRBJ2-1)
CASSGSYNEQFF

SEQ ID NO: 71345 - protein, 16 aa, Homo sapiens
  CDR3 for alpha chain variable domain of TCR clone 35673 (TRAV30, TRAJ24)
CGTEIVDADSWGKFRF

SEQ ID NO: 71346 - protein, 19 aa, Homo sapiens
  CDR3 for beta chain variable domain of TCR clone 35673 (TRBV7-2, TRBJ2-3)
CASSFLSRNWGGGTDTQYF

SEQ ID NO: 71347 - protein, 11 aa, Homo sapiens
  CDR3 for alpha chain variable domain of TCR clone 35674 (TRAV12-1, TRAJ8)
CVVTGFQKLVF

SEQ ID NO: 71348 - protein, 14 aa, Homo sapiens
  CDR3 for beta chain variable domain of TCR clone 35674 (TRBV19, TRBJ2-1)
CASGKSTQYNEQLF

SEQ ID NO: 71349 - protein, 15 aa, Homo sapiens
  CDR3 for alpha chain variable domain of TCR clone 35675 (TRAV4, TRAJ39)
CLVGPNNNAGNMLTF

SEQ ID NO: 71350 - protein, 14 aa, Homo sapiens
  CDR3 for beta chain variable domain of TCR clone 35675 (TRBV19, TRBJ2-1)
CASPTVVLSGEQFF

SEQ ID NO: 71351 - protein, 22 aa, Homo sapiens
  CDR3 for alpha chain variable domain of TCR clone 35676 (TRAV12-2, TRAJ53)
SQVIQPPTSVPPILSSNYKLTF

SEQ ID NO: 71352 - protein, 13 aa, Homo sapiens
  CDR3 for beta chain variable domain of TCR clone 35676 (TRBV7-7, TRBJ2-3)
CASSLSRADTQYF

SEQ ID NO: 71353 - protein, 15 aa, Homo sapiens
  CDR3 for alpha chain variable domain of TCR clone 35677 (TRAV8-3, TRAJ27)
CAVGPSKTNSGKSTF

SEQ ID NO: 71354 - protein, 15 aa, Homo sapiens
  CDR3 for beta chain variable domain of TCR clone 35677 (TRBV7-2, TRBJ2-1)
CASSSGLAGGNEQFF

SEQ ID NO: 71355 - protein, 14 aa, Homo sapiens
  CDR3 for alpha chain variable domain of TCR clone 35678 (TRAV12-2, TRAJ40)
CAVKIPSGTYKYIF

SEQ ID NO: 71356 - protein, 15 aa, Homo sapiens
  CDR3 for beta chain variable domain of TCR clone 35678 (TRBV20-1, TRBJ1-4)
RSARREWGVNEKLFF

SEQ ID NO: 71357 - protein, 12 aa, Homo sapiens
  CDR3 for alpha chain variable domain of TCR clone 35679 (TRAV16, TRAJ26)
CALRSYGQNFVF

SEQ ID NO: 71358 - protein, 14 aa, Homo sapiens
  CDR3 for beta chain variable domain of TCR clone 35679 (TRBV20-1, TRBJ2-4)
CSASGRVGENIQYF

SEQ ID NO: 71359 - protein, 11 aa, Homo sapiens
  CDR3 for alpha chain variable domain of TCR clone 35680 (TRAV6, TRAJ35)
CALGFGNVLHC

SEQ ID NO: 71360 - protein, 15 aa, Homo sapiens
  CDR3 for beta chain variable domain of TCR clone 35680 (TRBV20-1, TRBJ2-7)
CSARDRVSGMDEQYF

SEQ ID NO: 71361 - protein, 15 aa, Homo sapiens
  CDR3 for alpha chain variable domain of TCR clone 35681 (TRAV20, TRAJ53)
CAVQASGGSNYKLTF

SEQ ID NO: 71362 - protein, 12 aa, Homo sapiens
  CDR3 for beta chain variable domain of TCR clone 35681 (TRBV7-8, TRBJ2-7)
CASSLGDREQHF

SEQ ID NO: 71363 - protein, 13 aa, Homo sapiens
  CDR3 for alpha chain variable domain of TCR clone 35682 (TRAV8-6, TRAJ41)
CAVSENSGYALNF

SEQ ID NO: 71364 - protein, 17 aa, Homo sapiens
  CDR3 for beta chain variable domain of TCR clone 35682 (TRBV7-2, TRBJ2-3)
CASSLGARGTSTDTQYF

SEQ ID NO: 71365 - protein, 16 aa, Homo sapiens
  CDR3 for alpha chain variable domain of TCR clone 35683 (TRAV4, TRAJ22)
CLVGDLYSGSARQLTF

SEQ ID NO: 71366 - protein, 16 aa, Homo sapiens
  CDR3 for beta chain variable domain of TCR clone 35683 (TRBV7-9, TRBJ2-1)
CASSDVAGGSYNEQVF

SEQ ID NO: 71367 - protein, 14 aa, Homo sapiens
  CDR3 for alpha chain variable domain of TCR clone 35684 (TRAV17, TRAJ5)
CATVALTGRRALTF

SEQ ID NO: 71368 - protein, 14 aa, Homo sapiens
  CDR3 for beta chain variable domain of TCR clone 35684 (TRBV28, TRBJ2-7)
CASSPDGMAYEQYF

SEQ ID NO: 71369 - protein, 19 aa, Homo sapiens
  CDR3 for alpha chain variable domain of TCR clone 35685 (TRAV17, TRAJ17)
CATDGRPGVIKAAGNKLTF

SEQ ID NO: 71370 - protein, 17 aa, Homo sapiens
  CDR3 for beta chain variable domain of TCR clone 35685 (TRBV12-4, TRBJ1-1)
CASSLSGFRTMNTEALF

SEQ ID NO: 71371 - protein, 15 aa, Homo sapiens
  CDR3 for alpha chain variable domain of TCR clone 35686 (TRAV25, TRAJ52)
CAGRPGGTSYGKLTF

SEQ ID NO: 71372 - protein, 16 aa, Homo sapiens
  CDR3 for beta chain variable domain of TCR clone 35686 (TRBV11-2, TRBJ1-2)
CASSLDTGGADYGYTF

SEQ ID NO: 71373 - protein, 15 aa, Homo sapiens
  CDR3 for alpha chain variable domain of TCR clone 35687 (TRAV17, TRAJ57)
CATGPSQGGTEKLVF

SEQ ID NO: 71374 - protein, 14 aa, Homo sapiens
  CDR3 for beta chain variable domain of TCR clone 35687 (TRBV12-5, TRBJ2-5)
CASGSRTHQETQYF

SEQ ID NO: 71375 - protein, 13 aa, Homo sapiens
  CDR3 for alpha chain variable domain of TCR clone 35688 (TRAV13-1, TRAJ20)
CAAMVSNDYKLSF

SEQ ID NO: 71376 - protein, 12 aa, Homo sapiens
  CDR3 for beta chain variable domain of TCR clone 35688 (TRBV20-1, TRBJ2-1)
CSARLGTDEQFF

SEQ ID NO: 71377 - protein, 11 aa, Homo sapiens
  CDR3 for alpha chain variable domain of TCR clone 35689 (TRAV12-3, TRAJ17)
CMTLTGNKLTF

SEQ ID NO: 71378 - protein, 15 aa, Homo sapiens
  CDR3 for beta chain variable domain of TCR clone 35689 (TRBV20-1, TRBJ2-7)
CSARDRVSGMDEQYF

SEQ ID NO: 71379 - protein, 14 aa, Homo sapiens
  CDR3 for alpha chain variable domain of TCR clone 35690 (TRAV13-2, TRAJ39)
GDSVRNNAGNLLTF

SEQ ID NO: 71380 - protein, 13 aa, Homo sapiens
  CDR3 for beta chain variable domain of TCR clone 35690 (TRBV20-1, TRBJ2-7)
CSAPGLADYEQYF

SEQ ID NO: 71381 - protein, 15 aa, Homo sapiens
  CDR3 for alpha chain variable domain of TCR clone 35691 (TRAV17, TRAJ57)
CATGPSQRGSEKLVF

SEQ ID NO: 71382 - protein, 16 aa, Homo sapiens
  CDR3 for beta chain variable domain of TCR clone 35691 (TRBV12-4, TRBJ1-5)
CASSRPVGGSNQPQHF

SEQ ID NO: 71383 - protein, 13 aa, Homo sapiens
  CDR3 for alpha chain variable domain of TCR clone 35692 (TRAV12-3, TRAJ7)
CAMTPYGNNRLAF

SEQ ID NO: 71384 - protein, 16 aa, Homo sapiens
  CDR3 for beta chain variable domain of TCR clone 35692 (TRBV20-1, TRBJ1-4)
CSARPYWGELNEKLFF

SEQ ID NO: 71385 - protein, 14 aa, Homo sapiens
  CDR3 for alpha chain variable domain of TCR clone 35693 (TRAV1-1, TRAJ27)
CAVLYNTNAGKSTF

SEQ ID NO: 71386 - protein, 15 aa, Homo sapiens
  CDR3 for beta chain variable domain of TCR clone 35693 (TRBV7-2, TRBJ2-1)
CASSSGLAGGNEQFF

SEQ ID NO: 71387 - protein, 12 aa, Homo sapiens
  CDR3 for alpha chain variable domain of TCR clone 35694 (TRAV25, TRAJ30)
CAGKNRDDKTIF

SEQ ID NO: 71388 - protein, 11 aa, Homo sapiens
  CDR3 for beta chain variable domain of TCR clone 35694 (TRBV12-4, TRBJ2-7)
CATPEKGEQYF

SEQ ID NO: 71389 - protein, 11 aa, Homo sapiens
  CDR3 for alpha chain variable domain of TCR clone 35695 (TRAV8-6, TRAJ42)
CGGGSQGNLIF

SEQ ID NO: 71390 - protein, 13 aa, Homo sapiens
  CDR3 for beta chain variable domain of TCR clone 35695 (TRBV7-3, TRBJ1-1)
CASSQDWGAEAFF

SEQ ID NO: 71391 - protein, 12 aa, Homo sapiens
  CDR3 for alpha chain variable domain of TCR clone 35696 (TRAV36/DV7, TRAJ54)
CTVVRGAQKLVF

SEQ ID NO: 71392 - protein, 13 aa, Homo sapiens
  CDR3 for beta chain variable domain of TCR clone 35696 (TRBV20-1, TRBJ1-1)
CSARGGGNTEAFF

SEQ ID NO: 71393 - protein, 10 aa, Homo sapiens
  CDR3 for alpha chain variable domain of TCR clone 35697 (TRAV13-1, TRAJ27)
CAPLARQINL

SEQ ID NO: 71394 - protein, 13 aa, Homo sapiens
  CDR3 for beta chain variable domain of TCR clone 35697 (TRBV28, TRBJ1-1)
CASSKQGRTEAFF

SEQ ID NO: 71395 - protein, 11 aa, Homo sapiens
  CDR3 for alpha chain variable domain of TCR clone 35698 (TRAV21, TRAJ11)
RAVDGYSTLTF

SEQ ID NO: 71396 - protein, 11 aa, Homo sapiens
  CDR3 for beta chain variable domain of TCR clone 35698 (TRBV19, TRBJ1-1)
CASSIGSEAFF

SEQ ID NO: 71397 - protein, 15 aa, Homo sapiens
  CDR3 for alpha chain variable domain of TCR clone 35699 (TRAV21, TRAJ53)
CATLNSGGSNYKLTF

SEQ ID NO: 71398 - protein, 16 aa, Homo sapiens
  CDR3 for beta chain variable domain of TCR clone 35699 (TRBV29-1, TRBJ1-2)
CSVEANRDIANYSYTF

SEQ ID NO: 71399 - protein, 12 aa, Homo sapiens
  CDR3 for alpha chain variable domain of TCR clone 35700 (TRAV12-3, TRAJ20)
CAMVGGDYKLSF

SEQ ID NO: 71400 - protein, 19 aa, Homo sapiens
  CDR3 for beta chain variable domain of TCR clone 35700 (TRBV7-2, TRBJ2-3)
CASSFLSRNWGGGTDTQYF

SEQ ID NO: 71401 - protein, 14 aa, Homo sapiens
  CDR3 for alpha chain variable domain of TCR clone 35701 (TRAV3, TRAJ17)
CAVRDAAAGNKLTF

SEQ ID NO: 71402 - protein, 15 aa, Homo sapiens
  CDR3 for beta chain variable domain of TCR clone 35701 (TRBV9, TRBJ1-6)
RASSVAGTGDSPLHF

SEQ ID NO: 71403 - protein, 15 aa, Homo sapiens
  CDR3 for alpha chain variable domain of TCR clone 35702 (TRAV27, TRAJ38)
CAARRNAGNNRKLIW

SEQ ID NO: 71404 - protein, 13 aa, Homo sapiens
  CDR3 for beta chain variable domain of TCR clone 35702 (TRBV12-5, TRBJ2-3)
CASVDRQSDTQYF

SEQ ID NO: 71405 - protein, 14 aa, Homo sapiens
  CDR3 for alpha chain variable domain of TCR clone 35703 (TRAV29/DV5, TRAJ36)
CAARRKTGANNLFF

SEQ ID NO: 71406 - protein, 18 aa, Homo sapiens
  CDR3 for beta chain variable domain of TCR clone 35703 (TRBV7-2, TRBJ2-3)
CASSLKREGSGITDTQYF

SEQ ID NO: 71407 - protein, 14 aa, Homo sapiens
  CDR3 for alpha chain variable domain of TCR clone 35704 (TRAV38-1, TRAJ40)
CALRPTSGTYKYIF

SEQ ID NO: 71408 - protein, 13 aa, Homo sapiens
  CDR3 for beta chain variable domain of TCR clone 35704 (TRBV20-1, TRBJ1-1)
CSAGTVGNTEAFF

SEQ ID NO: 71409 - protein, 13 aa, Homo sapiens
  CDR3 for alpha chain variable domain of TCR clone 35705 (TRAV27, TRAJ49)
CAGVVGTGNQFYF

SEQ ID NO: 71410 - protein, 14 aa, Homo sapiens
  CDR3 for beta chain variable domain of TCR clone 35705 (TRBV7-8, TRBJ2-2)
CASSLKGPSGELFF

SEQ ID NO: 71411 - protein, 15 aa, Homo sapiens
  CDR3 for alpha chain variable domain of TCR clone 35706 (TRAV3, TRAJ20)
CAVRDIKLSDYKPSF

SEQ ID NO: 71412 - protein, 18 aa, Homo sapiens
  CDR3 for beta chain variable domain of TCR clone 35706 (TRBV20-1, TRBJ2-5)
CSQTGDSGRLGGKETQYF

SEQ ID NO: 71413 - protein, 14 aa, Homo sapiens
  CDR3 for alpha chain variable domain of TCR clone 35707 (TRAV13-2, TRAJ4)
CAEKGPKGYNKLIF

SEQ ID NO: 71414 - protein, 13 aa, Homo sapiens
  CDR3 for beta chain variable domain of TCR clone 35707 (TRBV18, TRBJ2-5)
CASSPPGKGTQYF

SEQ ID NO: 71415 - protein, 15 aa, Homo sapiens
  CDR3 for alpha chain variable domain of TCR clone 35708 (TRAV21, TRAJ53)
CATLNSGGSNYKPTF

SEQ ID NO: 71416 - protein, 16 aa, Homo sapiens
  CDR3 for beta chain variable domain of TCR clone 35708 (TRBV29-1, TRBJ1-2)
CSVEADRDIANYGYTF

SEQ ID NO: 71417 - protein, 14 aa, Homo sapiens
  CDR3 for alpha chain variable domain of TCR clone 35709 (TRAV38-1, TRAJ45)
CAYYSGGGADGLTF

SEQ ID NO: 71418 - protein, 20 aa, Homo sapiens
  CDR3 for beta chain variable domain of TCR clone 35709 (TRBV28, TRBJ2-1)
CASTPIGRSPGRAGGNEQFF

SEQ ID NO: 71419 - protein, 13 aa, Homo sapiens
  CDR3 for alpha chain variable domain of TCR clone 35710 (TRAV13-1, TRAJ21)
CAASIYNFNTFYF

SEQ ID NO: 71420 - protein, 13 aa, Homo sapiens
  CDR3 for beta chain variable domain of TCR clone 35710 (TRBV27, TRBJ1-4)
CASSLMGDEKLFF

SEQ ID NO: 71421 - protein, 10 aa, Homo sapiens
  CDR3 for alpha chain variable domain of TCR clone 35711 (TRAV23/DV6, TRAJ57)
CAASSTLSQG

SEQ ID NO: 71422 - protein, 14 aa, Homo sapiens
  CDR3 for beta chain variable domain of TCR clone 35711 (TRBV25-1, TRBJ1-1)
CASTHLGGNTDAFF

SEQ ID NO: 71423 - protein, 13 aa, Homo sapiens
  CDR3 for alpha chain variable domain of TCR clone 35712 (TRAV12-2, TRAJ20)
CAVYPSNDYKLSF

SEQ ID NO: 71424 - protein, 15 aa, Homo sapiens
  CDR3 for beta chain variable domain of TCR clone 35712 (TRBV5-7, TRBJ1-2)
CASSLGVAANYGYTF

SEQ ID NO: 71425 - protein, 12 aa, Homo sapiens
  CDR3 for alpha chain variable domain of TCR clone 35713 (TRAV27, TRAJ9)
CAGESGGSKTIF

SEQ ID NO: 71426 - protein, 14 aa, Homo sapiens
  CDR3 for beta chain variable domain of TCR clone 35713 (TRBV6-1, TRBJ2-1)
CASAKDGFYNEQFF

SEQ ID NO: 71427 - protein, 16 aa, Homo sapiens
  CDR3 for alpha chain variable domain of TCR clone 35714 (TRAV30, TRAJ24)
CGTEIVDADSWGKFQF

SEQ ID NO: 71428 - protein, 16 aa, Homo sapiens
  CDR3 for beta chain variable domain of TCR clone 35714 (TRBV15, TRBJ2-3)
CATSRDLGIVTDTQYF

SEQ ID NO: 71429 - protein, 18 aa, Homo sapiens
  CDR3 for alpha chain variable domain of TCR clone 35715 (TRAV26-2, TRAJ45)
CILRVDKHSGGGADGLTF

SEQ ID NO: 71430 - protein, 16 aa, Homo sapiens
  CDR3 for beta chain variable domain of TCR clone 35715 (TRBV2, TRBJ1-4)
CASNLLQGATNEKLFF

SEQ ID NO: 71431 - protein, 15 aa, Homo sapiens
  CDR3 for alpha chain variable domain of TCR clone 35716 (TRAV17, TRAJ22)
CATVAPSGSARQLTF

SEQ ID NO: 71432 - protein, 15 aa, Homo sapiens
  CDR3 for beta chain variable domain of TCR clone 35716 (TRBV20-1, TRBJ2-7)
CSARDRVSGMDEQYF

SEQ ID NO: 71433 - protein, 18 aa, Homo sapiens
  CDR3 for alpha chain variable domain of TCR clone 35717 (TRAV13-1, TRAJ52)
CAAKNPNAGGTSYGKLTF

SEQ ID NO: 71434 - protein, 11 aa, Homo sapiens
  CDR3 for beta chain variable domain of TCR clone 35717 (TRBV11-2, TRBJ1-1)
CASSINTEAFF

SEQ ID NO: 71435 - protein, 15 aa, Homo sapiens
  CDR3 for alpha chain variable domain of TCR clone 35718 (TRAV14/DV4, TRAJ26)
CAMREGQNYGQNFFF

SEQ ID NO: 71436 - protein, 13 aa, Homo sapiens
  CDR3 for beta chain variable domain of TCR clone 35718 (TRBV24-1, TRBJ2-2)
CATSDWSTGELFF

SEQ ID NO: 71437 - protein, 14 aa, Homo sapiens
  CDR3 for alpha chain variable domain of TCR clone 35719 (TRAV12-2, TRAJ40)
CAVKIPSGTYKYIF

SEQ ID NO: 71438 - protein, 14 aa, Homo sapiens
  CDR3 for beta chain variable domain of TCR clone 35719 (TRBV20-1, TRBJ1-1)
CSAQTRIGGTAAFF

SEQ ID NO: 71439 - protein, 14 aa, Homo sapiens
  CDR3 for alpha chain variable domain of TCR clone 35720 (TRAV26-1, TRAJ5)
CIVRVRFNRRALTF

SEQ ID NO: 71440 - protein, 17 aa, Homo sapiens
  CDR3 for beta chain variable domain of TCR clone 35720 (TRBV29-1, TRBJ2-3)
CSVGVLAGETSTDTQYF

SEQ ID NO: 71441 - protein, 14 aa, Homo sapiens
  CDR3 for alpha chain variable domain of TCR clone 35721 (TRAV23/DV6, TRAJ5)
CAAKRPAGRRALTF

SEQ ID NO: 71442 - protein, 13 aa, Homo sapiens
  CDR3 for beta chain variable domain of TCR clone 35721 (TRBV25-1, TRBJ2-7)
CASSEDGDYEQYF

SEQ ID NO: 71443 - protein, 17 aa, Homo sapiens
  CDR3 for alpha chain variable domain of TCR clone 35722 (TRAV3, TRAJ12)
CAVRDGGRMDSSYKLIF

SEQ ID NO: 71444 - protein, 12 aa, Homo sapiens
  CDR3 for beta chain variable domain of TCR clone 35722 (TRBV11-2, TRBJ2-2)
CASGLGGGELFF

SEQ ID NO: 71445 - protein, 16 aa, Homo sapiens
  CDR3 for alpha chain variable domain of TCR clone 35723 (TRAV3, TRAJ21)
CAVRDIERGNFNKFYF

SEQ ID NO: 71446 - protein, 15 aa, Homo sapiens
  CDR3 for beta chain variable domain of TCR clone 35723 (TRBV20-1, TRBJ2-7)
CSARDRVSGMDEQYF

SEQ ID NO: 71447 - protein, 13 aa, Homo sapiens
  CDR3 for alpha chain variable domain of TCR clone 35724 (TRAV13-1, TRAJ15)
CAALYQAGTALIF

SEQ ID NO: 71448 - protein, 16 aa, Homo sapiens
  CDR3 for beta chain variable domain of TCR clone 35724 (TRBV5-5, TRBJ1-4)
CASSLVAVLLGEKLFF

SEQ ID NO: 71449 - protein, 15 aa, Homo sapiens
  CDR3 for alpha chain variable domain of TCR clone 35725 (TRAV17, TRAJ57)
CATGPSQVGSEKLVF

SEQ ID NO: 71450 - protein, 14 aa, Homo sapiens
  CDR3 for beta chain variable domain of TCR clone 35725 (TRBV12-5, TRBJ2-5)
CASGSRTHQETQYF

SEQ ID NO: 71451 - protein, 14 aa, Homo sapiens
  CDR3 for alpha chain variable domain of TCR clone 35726 (TRAV1-1, TRAJ27)
CAVVYNTNAGKSTF

SEQ ID NO: 71452 - protein, 15 aa, Homo sapiens
  CDR3 for beta chain variable domain of TCR clone 35726 (TRBV7-2, TRBJ2-1)
CASSSGLAGGNEQFF

SEQ ID NO: 71453 - protein, 14 aa, Homo sapiens
  CDR3 for alpha chain variable domain of TCR clone 35727 (TRAV16, TRAJ17)
CALSGRAAGNKLTF

SEQ ID NO: 71454 - protein, 15 aa, Homo sapiens
  CDR3 for beta chain variable domain of TCR clone 35727 (TRBV3-1, TRBJ1-2)
CASSPTRLPGGGYTF

SEQ ID NO: 71455 - protein, 14 aa, Homo sapiens
  CDR3 for alpha chain variable domain of TCR clone 35728 (TRAV1-2, TRAJ16)
CAVNRFSDGQKLLF

SEQ ID NO: 71456 - protein, 13 aa, Homo sapiens
  CDR3 for beta chain variable domain of TCR clone 35728 (TRBV7-9, TRBJ1-2)
CASSLKQYYGYTF

SEQ ID NO: 71457 - protein, 11 aa, Homo sapiens
  CDR3 for alpha chain variable domain of TCR clone 35729 (TRAV1-1, TRAJ9)
CAVAGGFKTIF

SEQ ID NO: 71458 - protein, 13 aa, Homo sapiens
  CDR3 for beta chain variable domain of TCR clone 35729 (TRBV14, TRBJ2-7)
CASSQDRRYEQYF

SEQ ID NO: 71459 - protein, 14 aa, Homo sapiens
  CDR3 for alpha chain variable domain of TCR clone 35730 (TRAV1-2, TRAJ8)
CAVREDTGSQKLVF

SEQ ID NO: 71460 - protein, 13 aa, Homo sapiens
  CDR3 for beta chain variable domain of TCR clone 35730 (TRBV15, TRBJ2-7)
CATSTTGHYEQYF

SEQ ID NO: 71461 - protein, 13 aa, Homo sapiens
  CDR3 for alpha chain variable domain of TCR clone 35731 (TRAV1-2, TRAJ9)
CAALITGGFKTIF

SEQ ID NO: 71462 - protein, 13 aa, Homo sapiens
  CDR3 for beta chain variable domain of TCR clone 35731 (TRBV19, TRBJ1-2)
CASSVPGQDGYTF

SEQ ID NO: 71463 - protein, 15 aa, Homo sapiens
  CDR3 for alpha chain variable domain of TCR clone 35732 (TRAV2, TRAJ9)
CAVEDRVTGGFKTIF

SEQ ID NO: 71464 - protein, 16 aa, Homo sapiens
  CDR3 for beta chain variable domain of TCR clone 35732 (TRBV24-1, TRBJ2-3)
CATSDPGTGATDTQYF

SEQ ID NO: 71465 - protein, 15 aa, Homo sapiens
  CDR3 for alpha chain variable domain of TCR clone 35733 (TRAV3, TRAJ17)
CAVSPKEAVGNKLTF

SEQ ID NO: 71466 - protein, 12 aa, Homo sapiens
  CDR3 for beta chain variable domain of TCR clone 35733 (TRBV7-9, TRBJ1-6)
CASSLMTSPLHF

SEQ ID NO: 71467 - protein, 13 aa, Homo sapiens
  CDR3 for alpha chain variable domain of TCR clone 35734 (TRAV8-3, TRAJ28)
CAVGAVGSYQLTF

SEQ ID NO: 71468 - protein, 15 aa, Homo sapiens
  CDR3 for beta chain variable domain of TCR clone 35734 (TRBV7-9, TRBJ1-5)
CASSQGHQPNQPQHC

SEQ ID NO: 71469 - protein, 13 aa, Homo sapiens
  CDR3 for alpha chain variable domain of TCR clone 35735 (TRAV12-1, TRAJ40)
CVVPTSGTYKYIF

SEQ ID NO: 71470 - protein, 16 aa, Homo sapiens
  CDR3 for beta chain variable domain of TCR clone 35735 (TRBV7-9, TRBJ1-2)
CASSLGFSSGEDGYAF

SEQ ID NO: 71471 - protein, 14 aa, Homo sapiens
  CDR3 for alpha chain variable domain of TCR clone 35736 (TRAV9-2, TRAJ39)
CALYIYNAGNMLTF

SEQ ID NO: 71472 - protein, 15 aa, Homo sapiens
  CDR3 for beta chain variable domain of TCR clone 35736 (TRBV13, TRBJ1-2)
CASSLGRQPGYGYTF

SEQ ID NO: 71473 - protein, 15 aa, Homo sapiens
  CDR3 for alpha chain variable domain of TCR clone 35737 (TRAV27, TRAJ22)
TVPGWKSGSARQLTF

SEQ ID NO: 71474 - protein, 17 aa, Homo sapiens
  CDR3 for beta chain variable domain of TCR clone 35737 (TRBV5-5, TRBJ1-1)
CASSLRFRGLMNTEAFF

SEQ ID NO: 71475 - protein, 14 aa, Homo sapiens
  CDR3 for alpha chain variable domain of TCR clone 35738 (TRAV17, TRAJ15)
CATAPNQAGTALIF

SEQ ID NO: 71476 - protein, 14 aa, Homo sapiens
  CDR3 for beta chain variable domain of TCR clone 35738 (TRBV19, TRBJ2-7)
CASNMGQGAIEQYF

SEQ ID NO: 71477 - protein, 15 aa, Homo sapiens
  CDR3 for alpha chain variable domain of TCR clone 35739 (TRAV17, TRAJ57)
CATGHSQGGSEKLVF

SEQ ID NO: 71478 - protein, 16 aa, Homo sapiens
  CDR3 for beta chain variable domain of TCR clone 35739 (TRBV12-4, TRBJ1-5)
CASSRPVGGSNQPQHF

SEQ ID NO: 71479 - protein, 12 aa, Homo sapiens
  CDR3 for alpha chain variable domain of TCR clone 35740 (TRAV12-3, TRAJ17)
CAVTLTGNKPTF

SEQ ID NO: 71480 - protein, 15 aa, Homo sapiens
  CDR3 for beta chain variable domain of TCR clone 35740 (TRBV12-4, TRBJ2-5)
CASSPPTGLQETQYF

SEQ ID NO: 71481 - protein, 14 aa, Homo sapiens
  CDR3 for alpha chain variable domain of TCR clone 35741 (TRAV1-1, TRAJ27)
CAVIYNTNAGKSTF

SEQ ID NO: 71482 - protein, 14 aa, Homo sapiens
  CDR3 for beta chain variable domain of TCR clone 35741 (TRBV7-2, TRBJ2-7)
CASRSQGAAYEQYF

SEQ ID NO: 71483 - protein, 14 aa, Homo sapiens
  CDR3 for alpha chain variable domain of TCR clone 35742 (TRAV8-2, TRAJ11)
CVVSEKSGYSTLTF

SEQ ID NO: 71484 - protein, 16 aa, Homo sapiens
  CDR3 for beta chain variable domain of TCR clone 35742 (TRBV28, TRBJ2-1)
CASSSPEYPRDNGQFF

SEQ ID NO: 71485 - protein, 12 aa, Homo sapiens
  CDR3 for alpha chain variable domain of TCR clone 35743 (TRAV13-1, TRAJ49)
CAASIRSNQFYF

SEQ ID NO: 71486 - protein, 14 aa, Homo sapiens
  CDR3 for beta chain variable domain of TCR clone 35743 (TRBV7-2, TRBJ2-1)
CASSHGLAGNEQFF

SEQ ID NO: 71487 - protein, 14 aa, Homo sapiens
  CDR3 for alpha chain variable domain of TCR clone 35744 (TRAV12-1, TRAJ42)
CVVIYGGSQGNLIF

SEQ ID NO: 71488 - protein, 13 aa, Homo sapiens
  CDR3 for beta chain variable domain of TCR clone 35744 (TRBV18, TRBJ2-5)
RASSPPGKETQYF

SEQ ID NO: 71489 - protein, 16 aa, Homo sapiens
  CDR3 for alpha chain variable domain of TCR clone 35745 (TRAV3, TRAJ10)
CAMRDMRAGGGNKLTF

SEQ ID NO: 71490 - protein, 16 aa, Homo sapiens
  CDR3 for beta chain variable domain of TCR clone 35745 (TRBV5-7, TRBJ1-5)
CASSLQQDREYQPQHF

SEQ ID NO: 71491 - protein, 15 aa, Homo sapiens
  CDR3 for alpha chain variable domain of TCR clone 35746 (TRAV12-3, TRAJ6)
CAMSATTGGSYIPTF

SEQ ID NO: 71492 - protein, 14 aa, Homo sapiens
  CDR3 for beta chain variable domain of TCR clone 35746 (TRBV4-1, TRBJ2-2)
CASSQAVNTGELFF

SEQ ID NO: 71493 - protein, 18 aa, Homo sapiens
  CDR3 for alpha chain variable domain of TCR clone 35747 (TRAV13-1, TRAJ52)
CAAKNPNAGGTSYGKLTF

SEQ ID NO: 71494 - protein, 15 aa, Homo sapiens
  CDR3 for beta chain variable domain of TCR clone 35747 (TRBV18, TRBJ2-7)
CASSPLQGRTYEQYF

SEQ ID NO: 71495 - protein, 13 aa, Homo sapiens
  CDR3 for alpha chain variable domain of TCR clone 35748 (TRAV8-3, TRAJ28)
RAVGAVGSYQLTF

SEQ ID NO: 71496 - protein, 15 aa, Homo sapiens
  CDR3 for beta chain variable domain of TCR clone 35748 (TRBV7-9, TRBJ1-5)
CASSQGHQPNQPQHF

SEQ ID NO: 71497 - protein, 14 aa, Homo sapiens
  CDR3 for alpha chain variable domain of TCR clone 35749 (TRAV12-3, TRAJ42)
CAMNYGGSQGNLIF

SEQ ID NO: 71498 - protein, 15 aa, Homo sapiens
  CDR3 for beta chain variable domain of TCR clone 35749 (TRBV27, TRBJ2-1)
CASSNGGGSSNEQFF

SEQ ID NO: 71499 - protein, 13 aa, Homo sapiens
  CDR3 for alpha chain variable domain of TCR clone 35750 (TRAV12-1, TRAJ6)
CVVFAGGSYIPTF

SEQ ID NO: 71500 - protein, 14 aa, Homo sapiens
  CDR3 for beta chain variable domain of TCR clone 35750 (TRBV20-1, TRBJ1-3)
CSASPTGAGNTIYF

SEQ ID NO: 71501 - protein, 11 aa, Homo sapiens
  CDR3 for alpha chain variable domain of TCR clone 35751 (TRAV13-1, TRAJ43)
CAASMRNDMRF

SEQ ID NO: 71502 - protein, 15 aa, Homo sapiens
  CDR3 for beta chain variable domain of TCR clone 35751 (TRBV7-2, TRBJ2-2)
CASSPTGANTRELFF

SEQ ID NO: 71503 - protein, 12 aa, Homo sapiens
  CDR3 for alpha chain variable domain of TCR clone 35752 (TRAV12-3, TRAJ3)
CAIDSSASKIIF

SEQ ID NO: 71504 - protein, 17 aa, Homo sapiens
  CDR3 for beta chain variable domain of TCR clone 35752 (TRBV7-9, TRBJ2-3)
CASSLEEAGAYPDTQYS

SEQ ID NO: 71505 - protein, 15 aa, Homo sapiens
  CDR3 for alpha chain variable domain of TCR clone 35753 (TRAV35, TRAJ50)
CAGQLRKTSYDKVIF

SEQ ID NO: 71506 - protein, 12 aa, Homo sapiens
  CDR3 for beta chain variable domain of TCR clone 35753 (TRBV5-1, TRBJ2-5)
CASSLGLETQYF

SEQ ID NO: 71507 - protein, 13 aa, Homo sapiens
  CDR3 for alpha chain variable domain of TCR clone 35754 (TRAV13-1, TRAJ39)
CSKYSNAGNMLTF

SEQ ID NO: 71508 - protein, 16 aa, Homo sapiens
  CDR3 for beta chain variable domain of TCR clone 35754 (TRBV20-1, TRBJ1-4)
CSAPGQGLLTNEKLLF

SEQ ID NO: 71509 - protein, 11 aa, Homo sapiens
  CDR3 for alpha chain variable domain of TCR clone 35755 (TRAV3, TRAJ21)
CAVGNLNKFYS

SEQ ID NO: 71510 - protein, 16 aa, Homo sapiens
  CDR3 for beta chain variable domain of TCR clone 35755 (TRBV19, TRBJ2-1)
CASSKAGPSSYNEQFF

SEQ ID NO: 71511 - protein, 13 aa, Homo sapiens
  CDR3 for alpha chain variable domain of TCR clone 35756 (TRAV29/DV5, TRAJ31)
CAASRNNNARLMF

SEQ ID NO: 71512 - protein, 15 aa, Homo sapiens
  CDR3 for beta chain variable domain of TCR clone 35756 (TRBV11-3, TRBJ2-3)
CASLKDGREGDTQYF

SEQ ID NO: 71513 - protein, 14 aa, Homo sapiens
  CDR3 for alpha chain variable domain of TCR clone 35757 (TRAV12-2, TRAJ40)
CAVKIPSGTYKYIF

SEQ ID NO: 71514 - protein, 14 aa, Homo sapiens
  CDR3 for beta chain variable domain of TCR clone 35757 (TRBV20-1, TRBJ1-1)
CSAQTRIGGTEAFV

SEQ ID NO: 71515 - protein, 13 aa, Homo sapiens
  CDR3 for alpha chain variable domain of TCR clone 35758 (TRAV17, TRAJ26)
CAAVDNYGQNFVF

SEQ ID NO: 71516 - protein, 16 aa, Homo sapiens
  CDR3 for beta chain variable domain of TCR clone 35758 (TRBV2, TRBJ2-1)
CASSVGGSLSYNEQFF

SEQ ID NO: 71517 - protein, 14 aa, Homo sapiens
  CDR3 for alpha chain variable domain of TCR clone 35759 (TRAV13-1, TRAJ9)
CAASALTGGLKTIF

SEQ ID NO: 71518 - protein, 15 aa, Homo sapiens
  CDR3 for beta chain variable domain of TCR clone 35759 (TRBV5-1, TRBJ2-7)
CASSLNGGPAREQYF

SEQ ID NO: 71519 - protein, 17 aa, Homo sapiens
  CDR3 for alpha chain variable domain of TCR clone 35760 (TRAV12-2, TRAJ4)
CAVNVRPVSGGYNKLIF

SEQ ID NO: 71520 - protein, 14 aa, Homo sapiens
  CDR3 for beta chain variable domain of TCR clone 35760 (TRBV12-5, TRBJ2-5)
CASGSRTHQETQYF

SEQ ID NO: 71521 - protein, 13 aa, Homo sapiens
  CDR3 for alpha chain variable domain of TCR clone 35761 (TRAV20, TRAJ37)
CAGCSSNTGKLIF

SEQ ID NO: 71522 - protein, 17 aa, Homo sapiens
  CDR3 for beta chain variable domain of TCR clone 35761 (TRBV7-8, TRBJ2-6)
CASSAGTGGAGANVLTF

SEQ ID NO: 71523 - protein, 23 aa, Homo sapiens
  CDR3 for alpha chain variable domain of TCR clone 35762 (TRAV2, TRAJ38)
CAVEDFPNAGNNHIQNPDPAVYQ

SEQ ID NO: 71524 - protein, 14 aa, Homo sapiens
  CDR3 for beta chain variable domain of TCR clone 35762 (TRBV29-1, TRBJ1-4)
CSVSGRQGGEKLFF

SEQ ID NO: 71525 - protein, 14 aa, Homo sapiens
  CDR3 for alpha chain variable domain of TCR clone 35763 (TRAV12-2, TRAJ53)
CAVKGGGSNDKLTF

SEQ ID NO: 71526 - protein, 14 aa, Homo sapiens
  CDR3 for beta chain variable domain of TCR clone 35763 (TRBV7-7, TRBJ2-2)
CATRQDSDTGELFF

SEQ ID NO: 71527 - protein, 13 aa, Homo sapiens
  CDR3 for alpha chain variable domain of TCR clone 35764 (TRAV27, TRAJ6)
CAGGTRGSYIPTF

SEQ ID NO: 71528 - protein, 11 aa, Homo sapiens
  CDR3 for beta chain variable domain of TCR clone 35764 (TRBV19, TRBJ1-1)
CASSIGSEAFF

SEQ ID NO: 71529 - protein, 14 aa, Homo sapiens
  CDR3 for alpha chain variable domain of TCR clone 35765 (TRAV12-3, TRAJ9)
CAMSVETGGFKTIF

SEQ ID NO: 71530 - protein, 16 aa, Homo sapiens
  CDR3 for beta chain variable domain of TCR clone 35765 (TRBV4-3, TRBJ2-1)
CASSPALDRGVNEQFF

SEQ ID NO: 71531 - protein, 12 aa, Homo sapiens
  CDR3 for alpha chain variable domain of TCR clone 35766 (TRAV13-2, TRAJ23)
CAERHRGGKLIF

SEQ ID NO: 71532 - protein, 16 aa, Homo sapiens
  CDR3 for beta chain variable domain of TCR clone 35766 (TRBV12-4, TRBJ1-5)
CASSRPVGGSNQPQHF

SEQ ID NO: 71533 - protein, 15 aa, Homo sapiens
  CDR3 for alpha chain variable domain of TCR clone 35767 (TRAV17, TRAJ57)
CATGPYQGGSEKLVF

SEQ ID NO: 71534 - protein, 16 aa, Homo sapiens
  CDR3 for beta chain variable domain of TCR clone 35767 (TRBV12-4, TRBJ1-5)
CASSRPVGGSNQPQHF

SEQ ID NO: 71535 - protein, 14 aa, Homo sapiens
  CDR3 for alpha chain variable domain of TCR clone 35768 (TRAV12-2, TRAJ44)
CAVNPAGTASKLTF

SEQ ID NO: 71536 - protein, 13 aa, Homo sapiens
  CDR3 for beta chain variable domain of TCR clone 35768 (TRBV20-1, TRBJ1-6)
CSAPLGAGSPLHF

SEQ ID NO: 71537 - protein, 14 aa, Homo sapiens
  CDR3 for alpha chain variable domain of TCR clone 35769 (TRAV38-1, TRAJ29)
CAFITPSGNTPLVF

SEQ ID NO: 71538 - protein, 14 aa, Homo sapiens
  CDR3 for beta chain variable domain of TCR clone 35769 (TRBV18, TRBJ2-7)
CASSPREGAYEQYF

SEQ ID NO: 71539 - protein, 12 aa, Homo sapiens
  CDR3 for alpha chain variable domain of TCR clone 35770 (TRAV13-1, TRAJ21)
CAAKEGFNKFYF

SEQ ID NO: 71540 - protein, 14 aa, Homo sapiens
  CDR3 for beta chain variable domain of TCR clone 35770 (TRBV5-4, TRBJ1-1)
CASSLDSRWDEAFF

SEQ ID NO: 71541 - protein, 17 aa, Homo sapiens
  CDR3 for alpha chain variable domain of TCR clone 35771 (TRAV3, TRAJ42)
CAVRDRDYGGSQGNLIF

SEQ ID NO: 71542 - protein, 14 aa, Homo sapiens
  CDR3 for beta chain variable domain of TCR clone 35771 (TRBV12-5, TRBJ2-5)
CAGGSRTHQETQYF

SEQ ID NO: 71543 - protein, 13 aa, Homo sapiens
  CDR3 for alpha chain variable domain of TCR clone 35772 (TRAV36/DV7, TRAJ37)
CAVFSSNTGKLIF

SEQ ID NO: 71544 - protein, 12 aa, Homo sapiens
  CDR3 for beta chain variable domain of TCR clone 35772 (TRBV11-2, TRBJ2-2)
CASSPGGGELFF

SEQ ID NO: 71545 - protein, 17 aa, Homo sapiens
  CDR3 for alpha chain variable domain of TCR clone 35773 (TRAV26-1, TRAJ53)
CIVRVDDSGGSNCKLTF

SEQ ID NO: 71546 - protein, 15 aa, Homo sapiens
  CDR3 for beta chain variable domain of TCR clone 35773 (TRBV20-1, TRBJ2-7)
CSARVPAAYFYEQYF

SEQ ID NO: 71547 - protein, 13 aa, Homo sapiens
  CDR3 for alpha chain variable domain of TCR clone 35774 (TRAV12-3, TRAJ33)
CAMSVNSNYQLIW

SEQ ID NO: 71548 - protein, 14 aa, Homo sapiens
  CDR3 for beta chain variable domain of TCR clone 35774 (TRBV7-2, TRBJ2-7)
CASSPKTSFYEQYF

SEQ ID NO: 71549 - protein, 14 aa, Homo sapiens
  CDR3 for alpha chain variable domain of TCR clone 35775 (TRAV1-2, TRAJ8)
CAVREDTGFQKLVF

SEQ ID NO: 71550 - protein, 15 aa, Homo sapiens
  CDR3 for beta chain variable domain of TCR clone 35775 (TRBV29-1, TRBJ2-1)
CSVPTGLSLYNEQFF

SEQ ID NO: 71551 - protein, 12 aa, Homo sapiens
  CDR3 for alpha chain variable domain of TCR clone 35776 (TRAV12-3, TRAJ20)
CAMVRGDYKLSF

SEQ ID NO: 71552 - protein, 14 aa, Homo sapiens
  CDR3 for beta chain variable domain of TCR clone 35776 (TRBV5-5, TRBJ1-5)
CAWSGQGVDQPQHF

SEQ ID NO: 71553 - protein, 14 aa, Homo sapiens
  CDR3 for alpha chain variable domain of TCR clone 35777 (TRAV1-2, TRAJ16)
CAVNRFSDGQKLLF

SEQ ID NO: 71554 - protein, 14 aa, Homo sapiens
  CDR3 for beta chain variable domain of TCR clone 35777 (TRBV6-1, TRBJ1-3)
CASVQGGGGNTMYF

SEQ ID NO: 71555 - protein, 14 aa, Homo sapiens
  CDR3 for alpha chain variable domain of TCR clone 35778 (TRAV1-2, TRAJ16)
CAVNRFSDGQMLLF

SEQ ID NO: 71556 - protein, 15 aa, Homo sapiens
  CDR3 for beta chain variable domain of TCR clone 35778 (TRBV12-4, TRBJ2-5)
CASSPPTGLQETQYF

SEQ ID NO: 71557 - protein, 14 aa, Homo sapiens
  CDR3 for alpha chain variable domain of TCR clone 35779 (TRAV12-2, TRAJ5)
CAVNKSTGRRALTF

SEQ ID NO: 71558 - protein, 12 aa, Homo sapiens
  CDR3 for beta chain variable domain of TCR clone 35779 (TRBV19, TRBJ1-5)
CASSIAQQPQHF

SEQ ID NO: 71559 - protein, 13 aa, Homo sapiens
  CDR3 for alpha chain variable domain of TCR clone 35780 (TRAV2, TRAJ40)
CAVVTSGTYKYIF

SEQ ID NO: 71560 - protein, 13 aa, Homo sapiens
  CDR3 for beta chain variable domain of TCR clone 35780 (TRBV12-4, TRBJ2-7)
CASSPTETYEQYF

SEQ ID NO: 71561 - protein, 16 aa, Homo sapiens
  CDR3 for alpha chain variable domain of TCR clone 35781 (TRAV12-2, )
CAVEDIQNPDPAVYQL

SEQ ID NO: 71562 - protein, 18 aa, Homo sapiens
  CDR3 for beta chain variable domain of TCR clone 35781 (TRBV11-2, TRBJ2-3)
CASSLGGASRGAPNTQYF

SEQ ID NO: 71563 - protein, 15 aa, Homo sapiens
  CDR3 for alpha chain variable domain of TCR clone 35782 (TRAV3, TRAJ22)
CAVRDRGGSARQLTF

SEQ ID NO: 71564 - protein, 16 aa, Homo sapiens
  CDR3 for beta chain variable domain of TCR clone 35782 (TRBV5-4, TRBJ2-3)
CASQQPGAGGAETQYF

SEQ ID NO: 71565 - protein, 16 aa, Homo sapiens
  CDR3 for alpha chain variable domain of TCR clone 35783 (TRAV30, TRAJ24)
CGTEIVDADSWGKFQF

SEQ ID NO: 71566 - protein, 14 aa, Homo sapiens
  CDR3 for beta chain variable domain of TCR clone 35783 (TRBV9, TRBJ2-4)
CASSPAGTSGFQYF

SEQ ID NO: 71567 - protein, 11 aa, Homo sapiens
  CDR3 for alpha chain variable domain of TCR clone 35784 (TRAV2, TRAJ23)
CAVETRGELIF

SEQ ID NO: 71568 - protein, 14 aa, Homo sapiens
  CDR3 for beta chain variable domain of TCR clone 35784 (TRBV2, TRBJ2-3)
CASSEGQNTDTQYF

SEQ ID NO: 71569 - protein, 15 aa, Homo sapiens
  CDR3 for alpha chain variable domain of TCR clone 35785 (TRAV3, TRAJ17)
CAVSPKEAAGNKLTF

SEQ ID NO: 71570 - protein, 12 aa, Homo sapiens
  CDR3 for beta chain variable domain of TCR clone 35785 (TRBV7-9, TRBJ1-6)
CASSLMTSPPHF

SEQ ID NO: 71571 - protein, 13 aa, Homo sapiens
  CDR3 for alpha chain variable domain of TCR clone 35786 (TRAV21, TRAJ27)
CAARPGDAGKSTF

SEQ ID NO: 71572 - protein, 20 aa, Homo sapiens
  CDR3 for beta chain variable domain of TCR clone 35786 (TRBV4-2, TRBJ2-7)
CASSQASGGNLRAVLRAGHQ

SEQ ID NO: 71573 - protein, 16 aa, Homo sapiens
  CDR3 for alpha chain variable domain of TCR clone 35787 (TRAV12-1, TRAJ42)
CVVTPYYGGSQGNPIF

SEQ ID NO: 71574 - protein, 15 aa, Homo sapiens
  CDR3 for beta chain variable domain of TCR clone 35787 (TRBV4-3, TRBJ2-7)
CASSQGGRGIYEQYF

SEQ ID NO: 71575 - protein, 15 aa, Homo sapiens
  CDR3 for alpha chain variable domain of TCR clone 35788 (TRAV8-3, TRAJ41)
CAVGSNSNSGYALNF

SEQ ID NO: 71576 - protein, 17 aa, Homo sapiens
  CDR3 for beta chain variable domain of TCR clone 35788 (TRBV25-1, TRBJ2-1)
CASSACGQGRGVYEQFF

SEQ ID NO: 71577 - protein, 11 aa, Homo sapiens
  CDR3 for alpha chain variable domain of TCR clone 35789 (TRAV3, TRAJ21)
CAVGNFNKFYF

SEQ ID NO: 71578 - protein, 14 aa, Homo sapiens
  CDR3 for beta chain variable domain of TCR clone 35789 (TRBV5-1, TRBJ2-7)
CASSRGESSYEQYF

SEQ ID NO: 71579 - protein, 19 aa, Homo sapiens
  CDR3 for alpha chain variable domain of TCR clone 35790 (TRAV30, TRAJ43)
PAQLLRNLLPIIELNDMRF

SEQ ID NO: 71580 - protein, 14 aa, Homo sapiens
  CDR3 for beta chain variable domain of TCR clone 35790 (TRBV27, TRBJ2-1)
CASRHLGGGKEQFF

SEQ ID NO: 71581 - protein, 11 aa, Homo sapiens
  CDR3 for alpha chain variable domain of TCR clone 35791 (TRAV2, TRAJ33)
CAVESNYQLIW

SEQ ID NO: 71582 - protein, 15 aa, Homo sapiens
  CDR3 for beta chain variable domain of TCR clone 35791 (TRBV19, TRBJ1-1)
CASTSGQSQNTEAFF

SEQ ID NO: 71583 - protein, 15 aa, Homo sapiens
  CDR3 for alpha chain variable domain of TCR clone 35792 (TRAV3, TRAJ5)
YAVRPLGHGQESTYF

SEQ ID NO: 71584 - protein, 16 aa, Homo sapiens
  CDR3 for beta chain variable domain of TCR clone 35792 (TRBV3-1, TRBJ2-7)
CASSQGVGKGSSEQYF

SEQ ID NO: 71585 - protein, 19 aa, Homo sapiens
  CDR3 for alpha chain variable domain of TCR clone 35793 (TRAV26-1, TRAJ52)
CIVRAHRNAGGTSYGKLTF

SEQ ID NO: 71586 - protein, 15 aa, Homo sapiens
  CDR3 for beta chain variable domain of TCR clone 35793 (TRBV12-4, TRBJ2-5)
CASSPPTGLQGTQYF

SEQ ID NO: 71587 - protein, 16 aa, Homo sapiens
  CDR3 for alpha chain variable domain of TCR clone 35794 (TRAV3, TRAJ10)
CAVRDMRAGGGNKLTF

SEQ ID NO: 71588 - protein, 13 aa, Homo sapiens
  CDR3 for beta chain variable domain of TCR clone 35794 (TRBV6-1, TRBJ1-1)
CASSRQENTEAFF

SEQ ID NO: 71589 - protein, 14 aa, Homo sapiens
  CDR3 for alpha chain variable domain of TCR clone 35795 (TRAV12-2, TRAJ13)
CAMKKTGGYQKVTF

SEQ ID NO: 71590 - protein, 15 aa, Homo sapiens
  CDR3 for beta chain variable domain of TCR clone 35795 (TRBV12-4, TRBJ2-5)
CASSPPTGLQETQYF

SEQ ID NO: 71591 - protein, 13 aa, Homo sapiens
  CDR3 for alpha chain variable domain of TCR clone 35796 (TRAV1-1, TRAJ9)
CVAKNTGGFKTIF

SEQ ID NO: 71592 - protein, 14 aa, Homo sapiens
  CDR3 for beta chain variable domain of TCR clone 35796 (TRBV20-1, TRBJ2-1)
CSAQIGGSANEQFF

SEQ ID NO: 71593 - protein, 14 aa, Homo sapiens
  CDR3 for alpha chain variable domain of TCR clone 35797 (TRAV12-2, TRAJ13)
CAVKKTGGYQKVTF

SEQ ID NO: 71594 - protein, 15 aa, Homo sapiens
  CDR3 for beta chain variable domain of TCR clone 35797 (TRBV2, TRBJ2-7)
CASSEGLARSYEQYF

SEQ ID NO: 71595 - protein, 18 aa, Homo sapiens
  CDR3 for alpha chain variable domain of TCR clone 35798 (TRAV21, TRAJ52)
CAVRPSPAGGASYGKLTF

SEQ ID NO: 71596 - protein, 13 aa, Homo sapiens
  CDR3 for beta chain variable domain of TCR clone 35798 (TRBV7-3, TRBJ1-1)
CASSQDWGAEAFF

SEQ ID NO: 71597 - protein, 15 aa, Homo sapiens
  CDR3 for alpha chain variable domain of TCR clone 35799 (TRAV2, TRAJ28)
CAVPYSVAGSYQLTF

SEQ ID NO: 71598 - protein, 17 aa, Homo sapiens
  CDR3 for beta chain variable domain of TCR clone 35799 (TRBV20-1, TRBJ2-4)
CSARDWASGGRENIQYF

SEQ ID NO: 71599 - protein, 10 aa, Homo sapiens
  CDR3 for alpha chain variable domain of TCR clone 35800 (TRAV13-1, TRAJ8)
CAAPFQKLVF

SEQ ID NO: 71600 - protein, 12 aa, Homo sapiens
  CDR3 for beta chain variable domain of TCR clone 35800 (TRBV11-2, TRBJ2-2)
CASSLGGGELFF

SEQ ID NO: 71601 - protein, 14 aa, Homo sapiens
  CDR3 for alpha chain variable domain of TCR clone 35801 (TRAV38-1, TRAJ29)
CAFITPPGNTPLVF

SEQ ID NO: 71602 - protein, 14 aa, Homo sapiens
  CDR3 for beta chain variable domain of TCR clone 35801 (TRBV18, TRBJ2-7)
CASSPRGGAYEQYF

SEQ ID NO: 71603 - protein, 11 aa, Homo sapiens
  CDR3 for alpha chain variable domain of TCR clone 35802 (TRAV4, TRAJ31)
CLVGDNARLTF

SEQ ID NO: 71604 - protein, 16 aa, Homo sapiens
  CDR3 for beta chain variable domain of TCR clone 35802 (TRBV7-2, TRBJ2-5)
CASSSKWLSGQETQYF

SEQ ID NO: 71605 - protein, 15 aa, Homo sapiens
  CDR3 for alpha chain variable domain of TCR clone 35803 (TRAV21, TRAJ53)
CATLDSGGSNYKLTF

SEQ ID NO: 71606 - protein, 16 aa, Homo sapiens
  CDR3 for beta chain variable domain of TCR clone 35803 (TRBV20-1, TRBJ1-2)
CSASMGQGVANYGYTF

SEQ ID NO: 71607 - protein, 14 aa, Homo sapiens
  CDR3 for alpha chain variable domain of TCR clone 35804 (TRAV8-3, TRAJ4)
CAVGAAGGYNKLIF

SEQ ID NO: 71608 - protein, 15 aa, Homo sapiens
  CDR3 for beta chain variable domain of TCR clone 35804 (TRBV6-5, TRBJ2-1)
CASSYDAVAGNEQFF

SEQ ID NO: 71609 - protein, 12 aa, Homo sapiens
  CDR3 for alpha chain variable domain of TCR clone 35805 (TRAV12-1, TRAJ40)
CVVYSGTYKYIF

SEQ ID NO: 71610 - protein, 18 aa, Homo sapiens
  CDR3 for beta chain variable domain of TCR clone 35805 (TRBV11-2, TRBJ2-3)
CASSLGGASRGAPNTQHF

SEQ ID NO: 71611 - protein, 23 aa, Homo sapiens
  CDR3 for alpha chain variable domain of TCR clone 35806 (TRAV26-1, TRAJ38)
CIADNAGNNHIQNPDPAVYQLRD

SEQ ID NO: 71612 - protein, 13 aa, Homo sapiens
  CDR3 for beta chain variable domain of TCR clone 35806 (TRBV20-1, TRBJ1-1)
CSARGGGNTEAFL

SEQ ID NO: 71613 - protein, 15 aa, Homo sapiens
  CDR3 for alpha chain variable domain of TCR clone 35807 (TRAV21, TRAJ40)
CAVRPQTSGTYEYIF

SEQ ID NO: 71614 - protein, 13 aa, Homo sapiens
  CDR3 for beta chain variable domain of TCR clone 35807 (TRBV7-2, TRBJ2-2)
CASSSVRAGELFF

SEQ ID NO: 71615 - protein, 13 aa, Homo sapiens
  CDR3 for alpha chain variable domain of TCR clone 35808 (TRAV23/DV6, TRAJ16)
CAASISDGQKLLF

SEQ ID NO: 71616 - protein, 15 aa, Homo sapiens
  CDR3 for beta chain variable domain of TCR clone 35808 (TRBV4-1, TRBJ1-3)
CASSHPGTSGNTIYF

SEQ ID NO: 71617 - protein, 11 aa, Homo sapiens
  CDR3 for alpha chain variable domain of TCR clone 35809 (TRAV17, TRAJ49)
CATDAGNQFYF

SEQ ID NO: 71618 - protein, 12 aa, Homo sapiens
  CDR3 for beta chain variable domain of TCR clone 35809 (TRBV20-1, TRBJ2-5)
CSAPRSQETQYF

SEQ ID NO: 71619 - protein, 15 aa, Homo sapiens
  CDR3 for alpha chain variable domain of TCR clone 35810 (TRAV26-1, TRAJ29)
CIVRVEGSGNTPLVF

SEQ ID NO: 71620 - protein, 15 aa, Homo sapiens
  CDR3 for beta chain variable domain of TCR clone 35810 (TRBV7-2, TRBJ2-1)
CASSSGLAGGNEQFF

SEQ ID NO: 71621 - protein, 14 aa, Homo sapiens
  CDR3 for alpha chain variable domain of TCR clone 35811 (TRAV12-2, TRAJ40)
CAVKIPSGTYKYIF

SEQ ID NO: 71622 - protein, 16 aa, Homo sapiens
  CDR3 for beta chain variable domain of TCR clone 35811 (TRBV7-9, TRBJ1-2)
CASSLGFSSGEDGYTF

SEQ ID NO: 71623 - protein, 17 aa, Homo sapiens
  CDR3 for alpha chain variable domain of TCR clone 35812 (TRAV3, TRAJ12)
CAVRDGGRMDSSYKLIF

SEQ ID NO: 71624 - protein, 13 aa, Homo sapiens
  CDR3 for beta chain variable domain of TCR clone 35812 (TRBV7-9, TRBJ1-2)
CASSLKQNYGYTF

SEQ ID NO: 71625 - protein, 15 aa, Homo sapiens
  CDR3 for alpha chain variable domain of TCR clone 35813 (TRAV3, TRAJ5)
CAVRDRKTGRRALTF

SEQ ID NO: 71626 - protein, 15 aa, Homo sapiens
  CDR3 for beta chain variable domain of TCR clone 35813 (TRBV27, TRBJ2-1)
CASSNGGGSSNEQFF

SEQ ID NO: 71627 - protein, 12 aa, Homo sapiens
  CDR3 for alpha chain variable domain of TCR clone 35814 (TRAV12-3, TRAJ20)
CAMVRGDYRLSF

SEQ ID NO: 71628 - protein, 14 aa, Homo sapiens
  CDR3 for beta chain variable domain of TCR clone 35814 (TRBV5-5, TRBJ1-5)
CASSGQGVDQPQHF

SEQ ID NO: 71629 - protein, 14 aa, Homo sapiens
  CDR3 for alpha chain variable domain of TCR clone 35815 (TRAV1-2, TRAJ16)
CAVNRFSDGQKLLF

SEQ ID NO: 71630 - protein, 15 aa, Homo sapiens
  CDR3 for beta chain variable domain of TCR clone 35815 (TRBV25-1, TRBJ1-4)
CASSPGDSTNEKLFF

SEQ ID NO: 71631 - protein, 10 aa, Homo sapiens
  CDR3 for alpha chain variable domain of TCR clone 35816 (TRAV30, TRAJ48)
CGIGNEKLTF

SEQ ID NO: 71632 - protein, 16 aa, Homo sapiens
  CDR3 for beta chain variable domain of TCR clone 35816 (TRBV19, TRBJ2-1)
CASSKAGPSSYNERFF

SEQ ID NO: 71633 - protein, 14 aa, Homo sapiens
  CDR3 for alpha chain variable domain of TCR clone 35817 (TRAV12-1, TRAJ12)
CVVTRMDSSYKLIF

SEQ ID NO: 71634 - protein, 13 aa, Homo sapiens
  CDR3 for beta chain variable domain of TCR clone 35817 (TRBV20-1, TRBJ1-1)
FSARGGGNTEAFF

SEQ ID NO: 71635 - protein, 12 aa, Homo sapiens
  CDR3 for alpha chain variable domain of TCR clone 35818 (TRAV17, TRAJ20)
CATDGDDYKLSF

SEQ ID NO: 71636 - protein, 13 aa, Homo sapiens
  CDR3 for beta chain variable domain of TCR clone 35818 (TRBV10-3, TRBJ2-7)
CASKLAVNYEQYF

SEQ ID NO: 71637 - protein, 13 aa, Homo sapiens
  CDR3 for alpha chain variable domain of TCR clone 35819 (TRAV3, TRAJ20)
CAVRSLNNYKLSF

SEQ ID NO: 71638 - protein, 13 aa, Homo sapiens
  CDR3 for beta chain variable domain of TCR clone 35819 (TRBV6-1, TRBJ2-1)
CAGMDPTNNEQFF

SEQ ID NO: 71639 - protein, 23 aa, Homo sapiens
  CDR3 for alpha chain variable domain of TCR clone 35820 (TRAV12-2, TRAJ36)
SLLIRDSQPSDSATLERANNLFF

SEQ ID NO: 71640 - protein, 17 aa, Homo sapiens
  CDR3 for beta chain variable domain of TCR clone 35820 (TRBV13, TRBJ2-3)
CASSLSRVAGGRNTQYF

SEQ ID NO: 71641 - protein, 18 aa, Homo sapiens
  CDR3 for alpha chain variable domain of TCR clone 35821 (TRAV21, TRAJ52)
CAVRPSPAGGTSYGKLTF

SEQ ID NO: 71642 - protein, 12 aa, Homo sapiens
  CDR3 for beta chain variable domain of TCR clone 35821 (TRBV5-1, TRBJ1-2)
CASSQDTYGCTF

SEQ ID NO: 71643 - protein, 12 aa, Homo sapiens
  CDR3 for alpha chain variable domain of TCR clone 35822 (TRAV3, TRAJ31)
CAVRDGNARLMF

SEQ ID NO: 71644 - protein, 18 aa, Homo sapiens
  CDR3 for beta chain variable domain of TCR clone 35822 (TRBV7-2, TRBJ2-3)
CASSLKGEGSGITDTQYF

SEQ ID NO: 71645 - protein, 16 aa, Homo sapiens
  CDR3 for alpha chain variable domain of TCR clone 35823 (TRAV3, TRAJ4)
CAVRPSPSGVYNKLIF

SEQ ID NO: 71646 - protein, 12 aa, Homo sapiens
  CDR3 for beta chain variable domain of TCR clone 35823 (TRBV7-9, TRBJ2-7)
CASSQGVYEQYF

SEQ ID NO: 71647 - protein, 14 aa, Homo sapiens
  CDR3 for alpha chain variable domain of TCR clone 35824 (TRAV12-2, TRAJ17)
CAVLFKAAGNKLTF

SEQ ID NO: 71648 - protein, 15 aa, Homo sapiens
  CDR3 for beta chain variable domain of TCR clone 35824 (TRBV9, TRBJ1-6)
CASSVAGTGDSPLHF

SEQ ID NO: 71649 - protein, 15 aa, Homo sapiens
  CDR3 for alpha chain variable domain of TCR clone 35825 (TRAV8-3, TRAJ15)
CAVGAPNQAGAALIF

SEQ ID NO: 71650 - protein, 14 aa, Homo sapiens
  CDR3 for beta chain variable domain of TCR clone 35825 (TRBV20-1, TRBJ2-1)
CSPNDEASYNEQFF

SEQ ID NO: 71651 - protein, 13 aa, Homo sapiens
  CDR3 for alpha chain variable domain of TCR clone 35826 (TRAV22, TRAJ29)
CALGGSGNTPLVF

SEQ ID NO: 71652 - protein, 13 aa, Homo sapiens
  CDR3 for beta chain variable domain of TCR clone 35826 (TRBV4-2, TRBJ1-1)
CASSQAGNTEAFF

SEQ ID NO: 71653 - protein, 15 aa, Homo sapiens
  CDR3 for alpha chain variable domain of TCR clone 35827 (TRAV14/DV4, TRAJ10)
RAMRELTGGGNKLTF

SEQ ID NO: 71654 - protein, 18 aa, Homo sapiens
  CDR3 for beta chain variable domain of TCR clone 35827 (TRBV7-9, TRBJ2-7)
CASSLTTSGSRTWYEQYF

SEQ ID NO: 71655 - protein, 13 aa, Homo sapiens
  CDR3 for alpha chain variable domain of TCR clone 35828 (TRAV21, TRAJ27)
CAARPGNAGKSNF

SEQ ID NO: 71656 - protein, 14 aa, Homo sapiens
  CDR3 for beta chain variable domain of TCR clone 35828 (TRBV7-9, TRBJ2-5)
CASSLDTAQETQYF

SEQ ID NO: 71657 - protein, 11 aa, Homo sapiens
  CDR3 for alpha chain variable domain of TCR clone 35829 (TRAV1-2, TRAJ20)
CAVANDYKLSF

SEQ ID NO: 71658 - protein, 18 aa, Homo sapiens
  CDR3 for beta chain variable domain of TCR clone 35829 (TRBV20-1, TRBJ2-6)
CSAETTPTHDSGANVLTF

SEQ ID NO: 71659 - protein, 18 aa, Homo sapiens
  CDR3 for alpha chain variable domain of TCR clone 35830 (TRAV21, TRAJ52)
CAVRRSPAGGTSYGKLTF

SEQ ID NO: 71660 - protein, 17 aa, Homo sapiens
  CDR3 for beta chain variable domain of TCR clone 35830 (TRBV13, TRBJ2-3)
CASSLSRVAGGRNTQYF

SEQ ID NO: 71661 - protein, 18 aa, Homo sapiens
  CDR3 for alpha chain variable domain of TCR clone 35831 (TRAV26-2, TRAJ45)
CILRADKYSGGGADGLTF

SEQ ID NO: 71662 - protein, 16 aa, Homo sapiens
  CDR3 for beta chain variable domain of TCR clone 35831 (TRBV2, TRBJ1-4)
CASNLLQGATNEKLFF

SEQ ID NO: 71663 - protein, 17 aa, Homo sapiens
  CDR3 for alpha chain variable domain of TCR clone 35832 (TRAV3, TRAJ12)
CAVRDGGRMGSSYKLIF

SEQ ID NO: 71664 - protein, 16 aa, Homo sapiens
  CDR3 for beta chain variable domain of TCR clone 35832 (TRBV12-5, TRBJ2-5)
CASGPRTSGNQETQYF

SEQ ID NO: 71665 - protein, 15 aa, Homo sapiens
  CDR3 for alpha chain variable domain of TCR clone 35833 (TRAV10, TRAJ39)
CVVSASGNAGNMLTF

SEQ ID NO: 71666 - protein, 13 aa, Homo sapiens
  CDR3 for beta chain variable domain of TCR clone 35833 (TRBV18, TRBJ2-7)
CASQAGGGYEQYF

SEQ ID NO: 71667 - protein, 18 aa, Homo sapiens
  CDR3 for alpha chain variable domain of TCR clone 35834 (TRAV13-1, TRAJ52)
CAASKRSAGGTSYGKLTF

SEQ ID NO: 71668 - protein, 13 aa, Homo sapiens
  CDR3 for beta chain variable domain of TCR clone 35834 (TRBV12-4, TRBJ1-2)
CASSLRQGKGYTC

SEQ ID NO: 71669 - protein, 15 aa, Homo sapiens
  CDR3 for alpha chain variable domain of TCR clone 35835 (TRAV27, TRAJ38)
CATRRNAGNNRKLIW

SEQ ID NO: 71670 - protein, 13 aa, Homo sapiens
  CDR3 for beta chain variable domain of TCR clone 35835 (TRBV12-5, TRBJ2-3)
CASGDRQSDTQYF

SEQ ID NO: 71671 - protein, 15 aa, Homo sapiens
  CDR3 for alpha chain variable domain of TCR clone 35836 (TRAV17, TRAJ23)
CATDAEGNQGGKLIF

SEQ ID NO: 71672 - protein, 12 aa, Homo sapiens
  CDR3 for beta chain variable domain of TCR clone 35836 (TRBV2, TRBJ2-1)
CAKREGYNEQFF

SEQ ID NO: 71673 - protein, 16 aa, Homo sapiens
  CDR3 for alpha chain variable domain of TCR clone 35837 (TRAV14/DV4, TRAJ53)
CAMREGGGGSNYKLTF

SEQ ID NO: 71674 - protein, 15 aa, Homo sapiens
  CDR3 for beta chain variable domain of TCR clone 35837 (TRBV5-1, TRBJ2-3)
CASSVTSGSTDTQYF

SEQ ID NO: 71675 - protein, 10 aa, Homo sapiens
  CDR3 for alpha chain variable domain of TCR clone 35838 (TRAV8-4, TRAJ43)
CAVSADDMRF

SEQ ID NO: 71676 - protein, 16 aa, Homo sapiens
  CDR3 for beta chain variable domain of TCR clone 35838 (TRBV12-5, TRBJ2-5)
CASGPRTSGNRETQYF

SEQ ID NO: 71677 - protein, 17 aa, Homo sapiens
  CDR3 for alpha chain variable domain of TCR clone 35839 (TRAV38-1, TRAJ45)
CAFMRSRSGGGADGLTF

SEQ ID NO: 71678 - protein, 15 aa, Homo sapiens
  CDR3 for beta chain variable domain of TCR clone 35839 (TRBV7-2, TRBJ2-3)
CASSLVARGPDTQYF

SEQ ID NO: 71679 - protein, 15 aa, Homo sapiens
  CDR3 for alpha chain variable domain of TCR clone 35840 (TRAV12-1, TRAJ44)
CVADLSTGTASKLTF

SEQ ID NO: 71680 - protein, 13 aa, Homo sapiens
  CDR3 for beta chain variable domain of TCR clone 35840 (TRBV6-5, TRBJ2-5)
CASSPQGGETQYF

SEQ ID NO: 71681 - protein, 11 aa, Homo sapiens
  CDR3 for alpha chain variable domain of TCR clone 35841 (TRAV21, TRAJ34)
CAHYNTDKLIF

SEQ ID NO: 71682 - protein, 15 aa, Homo sapiens
  CDR3 for beta chain variable domain of TCR clone 35841 (TRBV5-1, TRBJ1-1)
CASSLSDLGGTEAFF

SEQ ID NO: 71683 - protein, 14 aa, Homo sapiens
  CDR3 for alpha chain variable domain of TCR clone 35842 (TRAV3, TRAJ40)
CAVRDRRGTYKYIF

SEQ ID NO: 71684 - protein, 17 aa, Homo sapiens
  CDR3 for beta chain variable domain of TCR clone 35842 (TRBV4-1, TRBJ2-7)
CASSRDPLGVRGGEQYF

SEQ ID NO: 71685 - protein, 22 aa, Homo sapiens
  CDR3 for alpha chain variable domain of TCR clone 35843 (TRAV27, TRAJ38)
CAARRNAGNNHIQNPDPAVYQL

SEQ ID NO: 71686 - protein, 16 aa, Homo sapiens
  CDR3 for beta chain variable domain of TCR clone 35843 (TRBV20-1, TRBJ1-2)
CSASMGQGVANYGYTF

SEQ ID NO: 71687 - protein, 14 aa, Homo sapiens
  CDR3 for alpha chain variable domain of TCR clone 35844 (TRAV13-1, TRAJ35)
CAASKGGFGNVLHC

SEQ ID NO: 71688 - protein, 14 aa, Homo sapiens
  CDR3 for beta chain variable domain of TCR clone 35844 (TRBV7-8, TRBJ2-3)
CASSFLDGQDTQYF

SEQ ID NO: 71689 - protein, 15 aa, Homo sapiens
  CDR3 for alpha chain variable domain of TCR clone 35845 (TRAV17, TRAJ57)
CATGPSQGGSEKLVF

SEQ ID NO: 71690 - protein, 16 aa, Homo sapiens
  CDR3 for beta chain variable domain of TCR clone 35845 (TRBV18, TRBJ2-5)
CASSPPSSGGAKTQYF

SEQ ID NO: 71691 - protein, 13 aa, Homo sapiens
  CDR3 for alpha chain variable domain of TCR clone 35846 (TRAV12-2, TRAJ52)
CAVGGTSYGKLTF

SEQ ID NO: 71692 - protein, 15 aa, Homo sapiens
  CDR3 for beta chain variable domain of TCR clone 35846 (TRBV7-9, TRBJ2-7)
CASSLALAEAYEQYF

SEQ ID NO: 71693 - protein, 12 aa, Homo sapiens
  CDR3 for alpha chain variable domain of TCR clone 35847 (TRAV21, TRAJ31)
CAVSPARGGLMF

SEQ ID NO: 71694 - protein, 14 aa, Homo sapiens
  CDR3 for beta chain variable domain of TCR clone 35847 (TRBV28, TRBJ2-7)
CASSLLRISYEQYF

SEQ ID NO: 71695 - protein, 19 aa, Homo sapiens
  CDR3 for alpha chain variable domain of TCR clone 35848 (TRAV26-1, TRAJ52)
CIVRAHRNAGGTSYGKLTL

SEQ ID NO: 71696 - protein, 15 aa, Homo sapiens
  CDR3 for beta chain variable domain of TCR clone 35848 (TRBV29-1, TRBJ2-1)
CSGRDRKSSYNEQFF

SEQ ID NO: 71697 - protein, 13 aa, Homo sapiens
  CDR3 for alpha chain variable domain of TCR clone 35849 (TRAV12-2, TRAJ9)
CAVKWAGGFKTIF

SEQ ID NO: 71698 - protein, 15 aa, Homo sapiens
  CDR3 for beta chain variable domain of TCR clone 35849 (TRBV5-1, TRBJ1-4)
CASSLTADSDEKLFL

SEQ ID NO: 71699 - protein, 11 aa, Homo sapiens
  CDR3 for alpha chain variable domain of TCR clone 35850 (TRAV13-1, TRAJ39)
CASHAGNMLTF

SEQ ID NO: 71700 - protein, 16 aa, Homo sapiens
  CDR3 for beta chain variable domain of TCR clone 35850 (TRBV4-1, TRBJ1-4)
CASSRGGTASNEKLFF

SEQ ID NO: 71701 - protein, 13 aa, Homo sapiens
  CDR3 for alpha chain variable domain of TCR clone 35851 (TRAV1-2, TRAJ12)
CAVSMDSSYKLIF

SEQ ID NO: 71702 - protein, 15 aa, Homo sapiens
  CDR3 for beta chain variable domain of TCR clone 35851 (TRBV27, TRBJ2-5)
CASSLTPSGGETQYF

SEQ ID NO: 71703 - protein, 14 aa, Homo sapiens
  CDR3 for alpha chain variable domain of TCR clone 35852 (TRAV26-1, TRAJ38)
CIADNAGNNRKLIW

SEQ ID NO: 71704 - protein, 13 aa, Homo sapiens
  CDR3 for beta chain variable domain of TCR clone 35852 (TRBV20-1, TRBJ1-1)
CSARGGGNTEACF

SEQ ID NO: 71705 - protein, 17 aa, Homo sapiens
  CDR3 for alpha chain variable domain of TCR clone 35853 (TRAV3, TRAJ42)
CAVRDRDYGGSQGNLIF

SEQ ID NO: 71706 - protein, 13 aa, Homo sapiens
  CDR3 for beta chain variable domain of TCR clone 35853 (TRBV4-2, TRBJ1-1)
CASSQAGNTEAFF

SEQ ID NO: 71707 - protein, 16 aa, Homo sapiens
  CDR3 for alpha chain variable domain of TCR clone 35854 (TRAV30, TRAJ24)
CGTGIVDADSWGKFQF

SEQ ID NO: 71708 - protein, 13 aa, Homo sapiens
  CDR3 for beta chain variable domain of TCR clone 35854 (TRBV20-1, TRBJ1-1)
CSARGGGNTEAFF

SEQ ID NO: 71709 - protein, 13 aa, Homo sapiens
  CDR3 for alpha chain variable domain of TCR clone 35855 (TRAV3, TRAJ27)
CAVRPLGAGKSTF

SEQ ID NO: 71710 - protein, 13 aa, Homo sapiens
  CDR3 for beta chain variable domain of TCR clone 35855 (TRBV7-9, TRBJ2-3)
CACSPGSTDTQYF

SEQ ID NO: 71711 - protein, 14 aa, Homo sapiens
  CDR3 for alpha chain variable domain of TCR clone 35856 (TRAV1-2, TRAJ6)
CAVSVSGGSYIPTF

SEQ ID NO: 71712 - protein, 15 aa, Homo sapiens
  CDR3 for beta chain variable domain of TCR clone 35856 (TRBV28, TRBJ2-7)
CASSPGGRGFYEQYF

SEQ ID NO: 71713 - protein, 13 aa, Homo sapiens
  CDR3 for alpha chain variable domain of TCR clone 35857 (TRAV13-2, TRAJ40)
CAEFTSGTYKCIF

SEQ ID NO: 71714 - protein, 14 aa, Homo sapiens
  CDR3 for beta chain variable domain of TCR clone 35857 (TRBV10-2, TRBJ1-5)
CASSSTGRNQPQHF

SEQ ID NO: 71715 - protein, 13 aa, Homo sapiens
  CDR3 for alpha chain variable domain of TCR clone 35858 (TRAV13-2, TRAJ53)
CAENMGSNYKLTF

SEQ ID NO: 71716 - protein, 13 aa, Homo sapiens
  CDR3 for beta chain variable domain of TCR clone 35858 (TRBV4-1, TRBJ2-2)
CASSQENTGELFL

SEQ ID NO: 71717 - protein, 18 aa, Homo sapiens
  CDR3 for alpha chain variable domain of TCR clone 35859 (TRAV9-2, TRAJ52)
GALSRHNAGGTSYGKLTF

SEQ ID NO: 71718 - protein, 13 aa, Homo sapiens
  CDR3 for beta chain variable domain of TCR clone 35859 (TRBV7-9, TRBJ1-2)
CASSLKQNYGYTF

SEQ ID NO: 71719 - protein, 13 aa, Homo sapiens
  CDR3 for alpha chain variable domain of TCR clone 35860 (TRAV1-2, TRAJ26)
CAVRPNYGQNFVF

SEQ ID NO: 71720 - protein, 14 aa, Homo sapiens
  CDR3 for beta chain variable domain of TCR clone 35860 (TRBV4-1, TRBJ2-5)
CASSQELALETQYF

SEQ ID NO: 71721 - protein, 12 aa, Homo sapiens
  CDR3 for alpha chain variable domain of TCR clone 35861 (TRAV21, TRAJ33)
CAKMGSKYQLIW

SEQ ID NO: 71722 - protein, 14 aa, Homo sapiens
  CDR3 for beta chain variable domain of TCR clone 35861 (TRBV2, TRBJ2-7)
CASSLTSGGYEQYF

SEQ ID NO: 71723 - protein, 12 aa, Homo sapiens
  CDR3 for alpha chain variable domain of TCR clone 35862 (TRAV12-3, TRAJ20)
CAMVGGDYKLSF

SEQ ID NO: 71724 - protein, 13 aa, Homo sapiens
  CDR3 for beta chain variable domain of TCR clone 35862 (TRBV23-1, TRBJ1-4)
CASRGKFNEKLFF

SEQ ID NO: 71725 - protein, 14 aa, Homo sapiens
  CDR3 for alpha chain variable domain of TCR clone 35863 (TRAV26-1, TRAJ40)
FIVRVARGTYKYIF

SEQ ID NO: 71726 - protein, 14 aa, Homo sapiens
  CDR3 for beta chain variable domain of TCR clone 35863 (TRBV7-3, TRBJ2-7)
CASSLKADSYEQYF

SEQ ID NO: 71727 - protein, 13 aa, Homo sapiens
  CDR3 for alpha chain variable domain of TCR clone 35864 (TRAV2, TRAJ40)
CAVVTSGTYKYIF

SEQ ID NO: 71728 - protein, 16 aa, Homo sapiens
  CDR3 for beta chain variable domain of TCR clone 35864 (TRBV2, TRBJ2-1)
CASSVGGSLSYNERFF

SEQ ID NO: 71729 - protein, 14 aa, Homo sapiens
  CDR3 for alpha chain variable domain of TCR clone 35865 (TRAV12-3, TRAJ10)
SHLPLTGGGNKLTF

SEQ ID NO: 71730 - protein, 13 aa, Homo sapiens
  CDR3 for beta chain variable domain of TCR clone 35865 (TRBV20-1, TRBJ1-1)
CSAPLGGGTEAFF

SEQ ID NO: 71731 - protein, 16 aa, Homo sapiens
  CDR3 for alpha chain variable domain of TCR clone 35866 (TRAV38-1, TRAJ56)
CAFMKRQTGANSKLTF

SEQ ID NO: 71732 - protein, 13 aa, Homo sapiens
  CDR3 for beta chain variable domain of TCR clone 35866 (TRBV7-9, TRBJ1-2)
CASSLKQNYGYTF

SEQ ID NO: 71733 - protein, 12 aa, Homo sapiens
  CDR3 for alpha chain variable domain of TCR clone 35867 (TRAV35, TRAJ49)
CAGWNTGNQFYF

SEQ ID NO: 71734 - protein, 16 aa, Homo sapiens
  CDR3 for beta chain variable domain of TCR clone 35867 (TRBV5-1, TRBJ2-2)
CASSIWDTTNTGELFF

SEQ ID NO: 71735 - protein, 12 aa, Homo sapiens
  CDR3 for alpha chain variable domain of TCR clone 35868 (TRAV36/DV7, TRAJ54)
CAVVRGAQTLVF

SEQ ID NO: 71736 - protein, 14 aa, Homo sapiens
  CDR3 for beta chain variable domain of TCR clone 35868 (TRBV7-3, TRBJ1-1)
CASSLKGGNTEAFF

SEQ ID NO: 71737 - protein, 14 aa, Homo sapiens
  CDR3 for alpha chain variable domain of TCR clone 35869 (TRAV12-3, TRAJ15)
CAPHTGQAGTALIF

SEQ ID NO: 71738 - protein, 14 aa, Homo sapiens
  CDR3 for beta chain variable domain of TCR clone 35869 (TRBV7-8, TRBJ2-7)
CASSPRDRVYEQYF

SEQ ID NO: 71739 - protein, 15 aa, Homo sapiens
  CDR3 for alpha chain variable domain of TCR clone 35870 (TRAV26-1, TRAJ40)
CIVRAVPSGTYKYIF

SEQ ID NO: 71740 - protein, 14 aa, Homo sapiens
  CDR3 for beta chain variable domain of TCR clone 35870 (TRBV19, TRBJ2-1)
CASKDSGLANEQFF

SEQ ID NO: 71741 - protein, 16 aa, Homo sapiens
  CDR3 for alpha chain variable domain of TCR clone 35871 (TRAV3, TRAJ37)
CAVRGKGAGNTGKLIF

SEQ ID NO: 71742 - protein, 13 aa, Homo sapiens
  CDR3 for beta chain variable domain of TCR clone 35871 (TRBV14, TRBJ2-7)
CASSQDRRYEQYF

SEQ ID NO: 71743 - protein, 17 aa, Homo sapiens
  CDR3 for alpha chain variable domain of TCR clone 35872 (TRAV3, TRAJ6)
CAVRDGPRAGGSYIPTF

SEQ ID NO: 71744 - protein, 20 aa, Homo sapiens
  CDR3 for beta chain variable domain of TCR clone 35872 (TRBV28, TRBJ2-1)
CASTPIGRSPGRAGGNEQFF

SEQ ID NO: 71745 - protein, 16 aa, Homo sapiens
  CDR3 for alpha chain variable domain of TCR clone 35873 (TRAV16, TRAJ4)
CALSRMFSGGYNKLIF

SEQ ID NO: 71746 - protein, 16 aa, Homo sapiens
  CDR3 for beta chain variable domain of TCR clone 35873 (TRBV24-1, TRBJ2-3)
CATSDLGTGATDTQYF

SEQ ID NO: 71747 - protein, 14 aa, Homo sapiens
  CDR3 for alpha chain variable domain of TCR clone 35874 (TRAV23/DV6, TRAJ40)
CAARKNSGTYKYIF

SEQ ID NO: 71748 - protein, 14 aa, Homo sapiens
  CDR3 for beta chain variable domain of TCR clone 35874 (TRBV10-3, TRBJ2-5)
CAVSERDYQETQYF

SEQ ID NO: 71749 - protein, 11 aa, Homo sapiens
  CDR3 for alpha chain variable domain of TCR clone 35875 (TRAV1-1, TRAJ5)
SALWFRRALTF

SEQ ID NO: 71750 - protein, 15 aa, Homo sapiens
  CDR3 for beta chain variable domain of TCR clone 35875 (TRBV4-1, TRBJ1-4)
CASSDTGGTNEKLFF

SEQ ID NO: 71751 - protein, 14 aa, Homo sapiens
  CDR3 for alpha chain variable domain of TCR clone 35876 (TRAV1-2, TRAJ16)
CAVNRFSDGQKLLF

SEQ ID NO: 71752 - protein, 17 aa, Homo sapiens
  CDR3 for beta chain variable domain of TCR clone 35876 (TRBV20-1, TRBJ2-2)
CSASGSGQGGLTGELSF

SEQ ID NO: 71753 - protein, 14 aa, Homo sapiens
  CDR3 for alpha chain variable domain of TCR clone 35877 (TRAV12-3, TRAJ58)
CAMSTETSGSRLTF

SEQ ID NO: 71754 - protein, 15 aa, Homo sapiens
  CDR3 for beta chain variable domain of TCR clone 35877 (TRBV19, TRBJ1-6)
CASSTQGAVGSPLHF

SEQ ID NO: 71755 - protein, 14 aa, Homo sapiens
  CDR3 for alpha chain variable domain of TCR clone 35878 (TRAV8-2, TRAJ4)
CVVSPSGGYNKLIF

SEQ ID NO: 71756 - protein, 16 aa, Homo sapiens
  CDR3 for beta chain variable domain of TCR clone 35878 (TRBV5-4, TRBJ2-3)
CASQQPGAGGADTQYF

SEQ ID NO: 71757 - protein, 14 aa, Homo sapiens
  CDR3 for alpha chain variable domain of TCR clone 35879 (TRAV12-2, TRAJ13)
CAVKKTEGYQKVTF

SEQ ID NO: 71758 - protein, 13 aa, Homo sapiens
  CDR3 for beta chain variable domain of TCR clone 35879 (TRBV10-3, TRBJ2-7)
CASKLAVNYEQYF

SEQ ID NO: 71759 - protein, 15 aa, Homo sapiens
  CDR3 for alpha chain variable domain of TCR clone 35880 (TRAV14/DV4, TRAJ10)
CAMRELTGGGNKLTF

SEQ ID NO: 71760 - protein, 13 aa, Homo sapiens
  CDR3 for beta chain variable domain of TCR clone 35880 (TRBV7-9, TRBJ1-2)
CASSLKQNYGYTF

SEQ ID NO: 71761 - protein, 13 aa, Homo sapiens
  CDR3 for alpha chain variable domain of TCR clone 35881 (TRAV12-2, TRAJ9)
CAVCNTGGFKTIF

SEQ ID NO: 71762 - protein, 14 aa, Homo sapiens
  CDR3 for beta chain variable domain of TCR clone 35881 (TRBV7-2, TRBJ2-7)
CASRSQGAAYEQYF

SEQ ID NO: 71763 - protein, 14 aa, Homo sapiens
  CDR3 for alpha chain variable domain of TCR clone 35882 (TRAV35, TRAJ42)
CAGRYGGSHGNLIF

SEQ ID NO: 71764 - protein, 15 aa, Homo sapiens
  CDR3 for beta chain variable domain of TCR clone 35882 (TRBV7-9, TRBJ2-1)
CASSLGWGRANEQFF

SEQ ID NO: 71765 - protein, 14 aa, Homo sapiens
  CDR3 for alpha chain variable domain of TCR clone 35883 (TRAV12-2, TRAJ40)
CAVKIPSGTYKYIF

SEQ ID NO: 71766 - protein, 17 aa, Homo sapiens
  CDR3 for beta chain variable domain of TCR clone 35883 (TRBV9, TRBJ2-2)
CASSVGGQGTDTGELFF

SEQ ID NO: 71767 - protein, 15 aa, Homo sapiens
  CDR3 for alpha chain variable domain of TCR clone 35884 (TRAV4, TRAJ39)
CLVGPNNNAGNMLTF

SEQ ID NO: 71768 - protein, 13 aa, Homo sapiens
  CDR3 for beta chain variable domain of TCR clone 35884 (TRBV11-2, TRBJ2-5)
CASSSTGEDTQYF

SEQ ID NO: 71769 - protein, 15 aa, Homo sapiens
  CDR3 for alpha chain variable domain of TCR clone 35885 (TRAV36/DV7, TRAJ53)
CAVEGRGGSNYKLTF

SEQ ID NO: 71770 - protein, 16 aa, Homo sapiens
  CDR3 for beta chain variable domain of TCR clone 35885 (TRBV27, TRBJ2-2)
CASSLSGFWVTGELFF

SEQ ID NO: 71771 - protein, 17 aa, Homo sapiens
  CDR3 for alpha chain variable domain of TCR clone 35886 (TRAV3, TRAJ6)
CAVRDGPRAGGSYIPTF

SEQ ID NO: 71772 - protein, 15 aa, Homo sapiens
  CDR3 for beta chain variable domain of TCR clone 35886 (TRBV11-2, TRBJ2-1)
CASSSPSTRYNEQFF

SEQ ID NO: 71773 - protein, 12 aa, Homo sapiens
  CDR3 for alpha chain variable domain of TCR clone 35887 (TRAV12-3, TRAJ42)
CAPGGSQGNLIF

SEQ ID NO: 71774 - protein, 13 aa, Homo sapiens
  CDR3 for beta chain variable domain of TCR clone 35887 (TRBV5-7, TRBJ2-6)
CAGTSSGANVLTF

SEQ ID NO: 71775 - protein, 13 aa, Homo sapiens
  CDR3 for alpha chain variable domain of TCR clone 35888 (TRAV2, TRAJ40)
CAVVTSGTYKYIF

SEQ ID NO: 71776 - protein, 16 aa, Homo sapiens
  CDR3 for beta chain variable domain of TCR clone 35888 (TRBV19, TRBJ2-2)
CVSRSPGTGATGELFF

SEQ ID NO: 71777 - protein, 18 aa, Homo sapiens
  CDR3 for alpha chain variable domain of TCR clone 35889 (TRAV26-2, TRAJ54)
CILRDVEVGIQGAQKLVF

SEQ ID NO: 71778 - protein, 16 aa, Homo sapiens
  CDR3 for beta chain variable domain of TCR clone 35889 (TRBV6-1, TRBJ2-5)
CASSETLDRGTETQYF

SEQ ID NO: 71779 - protein, 10 aa, Homo sapiens
  CDR3 for alpha chain variable domain of TCR clone 35890 (TRAV12-1, TRAJ37)
ARGNTGKLIF

SEQ ID NO: 71780 - protein, 15 aa, Homo sapiens
  CDR3 for beta chain variable domain of TCR clone 35890 (TRBV7-2, TRBJ2-3)
CASSLEQGGKDTQYF

SEQ ID NO: 71781 - protein, 12 aa, Homo sapiens
  CDR3 for alpha chain variable domain of TCR clone 35891 (TRAV2, TRAJ32)
CAVGGATNKPIF

SEQ ID NO: 71782 - protein, 15 aa, Homo sapiens
  CDR3 for beta chain variable domain of TCR clone 35891 (TRBV7-2, TRBJ2-1)
CASSSRTSREDEQFF

SEQ ID NO: 71783 - protein, 15 aa, Homo sapiens
  CDR3 for alpha chain variable domain of TCR clone 35892 (TRAV21, TRAJ24)
CAARSSTDSWGKWQF

SEQ ID NO: 71784 - protein, 13 aa, Homo sapiens
  CDR3 for beta chain variable domain of TCR clone 35892 (TRBV11-2, TRBJ2-5)
CASSSTGEETQYF

SEQ ID NO: 71785 - protein, 13 aa, Homo sapiens
  CDR3 for alpha chain variable domain of TCR clone 35893 (TRAV13-1, TRAJ10)
CAALEGGGNKLTF

SEQ ID NO: 71786 - protein, 14 aa, Homo sapiens
  CDR3 for beta chain variable domain of TCR clone 35893 (TRBV18, TRBJ2-5)
CASSPPGHQETQYF

SEQ ID NO: 71787 - protein, 14 aa, Homo sapiens
  CDR3 for alpha chain variable domain of TCR clone 35894 (TRAV38-1, TRAJ45)
CAYYSGGGADGLTF

SEQ ID NO: 71788 - protein, 20 aa, Homo sapiens
  CDR3 for beta chain variable domain of TCR clone 35894 (TRBV28, TRBJ2-1)
CASNPIGRSPGLAGGNEQFF

SEQ ID NO: 71789 - protein, 12 aa, Homo sapiens
  CDR3 for alpha chain variable domain of TCR clone 35895 (TRAV25, )
CAGNYMISRTLT

SEQ ID NO: 71790 - protein, 14 aa, Homo sapiens
  CDR3 for beta chain variable domain of TCR clone 35895 (TRBV25-1, TRBJ1-1)
CASTHLGGNTEAFF

SEQ ID NO: 71791 - protein, 12 aa, Homo sapiens
  CDR3 for alpha chain variable domain of TCR clone 35896 (TRAV17, TRAJ40)
CATESGTYKYIF

SEQ ID NO: 71792 - protein, 14 aa, Homo sapiens
  CDR3 for beta chain variable domain of TCR clone 35896 (TRBV7-2, TRBJ2-7)
CASRSQGAAYEQYF

SEQ ID NO: 71793 - protein, 13 aa, Homo sapiens
  CDR3 for alpha chain variable domain of TCR clone 35897 (TRAV14/DV4, TRAJ49)
CAMVENTGNQFYF

SEQ ID NO: 71794 - protein, 14 aa, Homo sapiens
  CDR3 for beta chain variable domain of TCR clone 35897 (TRBV6-1, TRBJ2-7)
CASTRTGDYYEQYF

SEQ ID NO: 71795 - protein, 16 aa, Homo sapiens
  CDR3 for alpha chain variable domain of TCR clone 35898 (TRAV2, TRAJ4)
CAVEERFSGGYNKLIF

SEQ ID NO: 71796 - protein, 13 aa, Homo sapiens
  CDR3 for beta chain variable domain of TCR clone 35898 (TRBV7-7, TRBJ2-5)
CASSRSGQETQYF

SEQ ID NO: 71797 - protein, 16 aa, Homo sapiens
  CDR3 for alpha chain variable domain of TCR clone 35899 (TRAV3, TRAJ18)
CAVRDGRGSTLGRLNF

SEQ ID NO: 71798 - protein, 15 aa, Homo sapiens
  CDR3 for beta chain variable domain of TCR clone 35899 (TRBV7-9, TRBJ1-6)
CASSSPGRGNSPLHF

SEQ ID NO: 71799 - protein, 14 aa, Homo sapiens
  CDR3 for alpha chain variable domain of TCR clone 35900 (TRAV12-3, TRAJ58)
CAMSAETSGSRLTF

SEQ ID NO: 71800 - protein, 15 aa, Homo sapiens
  CDR3 for beta chain variable domain of TCR clone 35900 (TRBV11-3, TRBJ2-3)
CASLKDGREGDTQYF

SEQ ID NO: 71801 - protein, 14 aa, Homo sapiens
  CDR3 for alpha chain variable domain of TCR clone 35901 (TRAV38-1, TRAJ40)
CALRPTSGTYKYIF

SEQ ID NO: 71802 - protein, 14 aa, Homo sapiens
  CDR3 for beta chain variable domain of TCR clone 35901 (TRBV25-1, TRBJ1-1)
CASNHLGGNTEAFF

SEQ ID NO: 71803 - protein, 18 aa, Homo sapiens
  CDR3 for alpha chain variable domain of TCR clone 35902 (TRAV13-1, TRAJ52)
CAASKRSAGGTSYGKLTF

SEQ ID NO: 71804 - protein, 13 aa, Homo sapiens
  CDR3 for beta chain variable domain of TCR clone 35902 (TRBV12-4, TRBJ1-2)
CDSSLRQGKGYTF

SEQ ID NO: 71805 - protein, 13 aa, Homo sapiens
  CDR3 for alpha chain variable domain of TCR clone 35903 (TRAV9-2, TRAJ58)
CSATGTSGSRLNF

SEQ ID NO: 71806 - protein, 14 aa, Homo sapiens
  CDR3 for beta chain variable domain of TCR clone 35903 (TRBV7-9, TRBJ2-1)
CASSPRDSLYEQFF

SEQ ID NO: 71807 - protein, 14 aa, Homo sapiens
  CDR3 for alpha chain variable domain of TCR clone 35904 (TRAV26-1, TRAJ45)
CIVRVVGGADGLTF

SEQ ID NO: 71808 - protein, 16 aa, Homo sapiens
  CDR3 for beta chain variable domain of TCR clone 35904 (TRBV7-9, TRBJ1-1)
CASSLTQVRSNTEALF

SEQ ID NO: 71809 - protein, 23 aa, Homo sapiens
  CDR3 for alpha chain variable domain of TCR clone 35905 (TRAV26-1, TRAJ38)
CIADNAGNNHIQNPDPAMYQLRD

SEQ ID NO: 71810 - protein, 13 aa, Homo sapiens
  CDR3 for beta chain variable domain of TCR clone 35905 (TRBV20-1, TRBJ1-1)
CSARGGGNTEAFF

SEQ ID NO: 71811 - protein, 16 aa, Homo sapiens
  CDR3 for alpha chain variable domain of TCR clone 35906 (TRAV12-2, TRAJ32)
CAVNLGQGGATNKLIF

SEQ ID NO: 71812 - protein, 15 aa, Homo sapiens
  CDR3 for beta chain variable domain of TCR clone 35906 (TRBV20-1, TRBJ2-7)
CSARDRVSGMDEQYF

SEQ ID NO: 71813 - protein, 18 aa, Homo sapiens
  CDR3 for alpha chain variable domain of TCR clone 35907 (TRAV9-2, TRAJ13)
CQTQRCTEPSGGYQEVTF

SEQ ID NO: 71814 - protein, 13 aa, Homo sapiens
  CDR3 for beta chain variable domain of TCR clone 35907 (TRBV5-7, TRBJ2-5)
CASRSSGGGTQYF

SEQ ID NO: 71815 - protein, 14 aa, Homo sapiens
  CDR3 for alpha chain variable domain of TCR clone 35908 (TRAV1-2, TRAJ8)
CAVREDTGFQKLVF

SEQ ID NO: 71816 - protein, 15 aa, Homo sapiens
  CDR3 for beta chain variable domain of TCR clone 35908 (TRBV20-1, TRBJ1-1)
CSASRGVTGNTETFF

SEQ ID NO: 71817 - protein, 12 aa, Homo sapiens
  CDR3 for alpha chain variable domain of TCR clone 35909 (TRAV22, TRAJ22)
CAPGGSARQLTF

SEQ ID NO: 71818 - protein, 13 aa, Homo sapiens
  CDR3 for beta chain variable domain of TCR clone 35909 (TRBV15, TRBJ1-6)
CATSGGLNSPLHL

SEQ ID NO: 71819 - protein, 14 aa, Homo sapiens
  CDR3 for alpha chain variable domain of TCR clone 35910 (TRAV1-2, TRAJ16)
CAVNRFSDGKKLLF

SEQ ID NO: 71820 - protein, 13 aa, Homo sapiens
  CDR3 for beta chain variable domain of TCR clone 35910 (TRBV7-9, TRBJ1-2)
CASSLKQNYGYTF

SEQ ID NO: 71821 - protein, 15 aa, Homo sapiens
  CDR3 for alpha chain variable domain of TCR clone 35911 (TRAV25, TRAJ53)
CAATGGGGSNYKLTF

SEQ ID NO: 71822 - protein, 15 aa, Homo sapiens
  CDR3 for beta chain variable domain of TCR clone 35911 (TRBV12-4, TRBJ2-5)
CASSPPTGLQETQYF

SEQ ID NO: 71823 - protein, 15 aa, Homo sapiens
  CDR3 for alpha chain variable domain of TCR clone 35912 (TRAV8-3, TRAJ45)
CASSYSGGGADGLTF

SEQ ID NO: 71824 - protein, 13 aa, Homo sapiens
  CDR3 for beta chain variable domain of TCR clone 35912 (TRBV4-2, TRBJ1-1)
CASSQAGNTEAFF

SEQ ID NO: 71825 - protein, 14 aa, Homo sapiens
  CDR3 for alpha chain variable domain of TCR clone 35913 (TRAV12-3, TRAJ10)
SHLPLTGGGNKLTF

SEQ ID NO: 71826 - protein, 16 aa, Homo sapiens
  CDR3 for beta chain variable domain of TCR clone 35913 (TRBV7-3, TRBJ2-1)
CASSLEGYRSYNEQFF

SEQ ID NO: 71827 - protein, 13 aa, Homo sapiens
  CDR3 for alpha chain variable domain of TCR clone 35914 (TRAV26-2, TRAJ43)
CTLRAVNNNDMRF

SEQ ID NO: 71828 - protein, 13 aa, Homo sapiens
  CDR3 for beta chain variable domain of TCR clone 35914 (TRBV7-9, TRBJ1-2)
CASSLKQNYGYTF

SEQ ID NO: 71829 - protein, 13 aa, Homo sapiens
  CDR3 for alpha chain variable domain of TCR clone 35915 (TRAV12-2, TRAJ20)
CAVYPSNDYKLSF

SEQ ID NO: 71830 - protein, 16 aa, Homo sapiens
  CDR3 for beta chain variable domain of TCR clone 35915 (TRBV2, TRBJ2-7)
CASSEPWTGPSYEQYF

SEQ ID NO: 71831 - protein, 14 aa, Homo sapiens
  CDR3 for alpha chain variable domain of TCR clone 35916 (TRAV26-1, TRAJ38)
CIADNAGNNRKLIW

SEQ ID NO: 71832 - protein, 13 aa, Homo sapiens
  CDR3 for beta chain variable domain of TCR clone 35916 (TRBV20-1, TRBJ1-1)
SSARGGGNTEAFF

SEQ ID NO: 71833 - protein, 16 aa, Homo sapiens
  CDR3 for alpha chain variable domain of TCR clone 35917 (TRAV3, TRAJ37)
CAVRGKGSGNTGKLIF

SEQ ID NO: 71834 - protein, 15 aa, Homo sapiens
  CDR3 for beta chain variable domain of TCR clone 35917 (TRBV7-2, TRBJ2-7)
CASSLGIGNDYEQYF

SEQ ID NO: 71835 - protein, 10 aa, Homo sapiens
  CDR3 for alpha chain variable domain of TCR clone 35918 (TRAV5, TRAJ34)
CAEDTDKIIF

SEQ ID NO: 71836 - protein, 12 aa, Homo sapiens
  CDR3 for beta chain variable domain of TCR clone 35918 (TRBV11-2, TRBJ2-2)
CASSLGGGELFF

SEQ ID NO: 71837 - protein, 15 aa, Homo sapiens
  CDR3 for alpha chain variable domain of TCR clone 35919 (TRAV8-3, TRAJ27)
CAVGPSKTNAGKSTF

SEQ ID NO: 71838 - protein, 14 aa, Homo sapiens
  CDR3 for beta chain variable domain of TCR clone 35919 (TRBV25-1, TRBJ1-1)
CASTHLGGNTEAFF

SEQ ID NO: 71839 - protein, 16 aa, Homo sapiens
  CDR3 for alpha chain variable domain of TCR clone 35920 (TRAV3, TRAJ23)
CAVKIGIYNQGGKLIF

SEQ ID NO: 71840 - protein, 17 aa, Homo sapiens
  CDR3 for beta chain variable domain of TCR clone 35920 (TRBV10-3, TRBJ2-6)
CAISESTAPSGANVLSF

SEQ ID NO: 71841 - protein, 13 aa, Homo sapiens
  CDR3 for alpha chain variable domain of TCR clone 35921 (TRAV23/DV6, TRAJ21)
CAASREQLQQILL

SEQ ID NO: 71842 - protein, 16 aa, Homo sapiens
  CDR3 for beta chain variable domain of TCR clone 35921 (TRBV20-1, TRBJ2-3)
CSAVRDRGPIADAQYF

SEQ ID NO: 71843 - protein, 10 aa, Homo sapiens
  CDR3 for alpha chain variable domain of TCR clone 35922 (TRAV16, TRAJ22)
LAMYLRQLTF

SEQ ID NO: 71844 - protein, 15 aa, Homo sapiens
  CDR3 for beta chain variable domain of TCR clone 35922 (TRBV7-9, TRBJ1-6)
CASSSPGRGNSPLHF

SEQ ID NO: 71845 - protein, 12 aa, Homo sapiens
  CDR3 for alpha chain variable domain of TCR clone 35923 (TRAV38-2/DV8, TRAJ48)
CALLSGNEKLTF

SEQ ID NO: 71846 - protein, 15 aa, Homo sapiens
  CDR3 for beta chain variable domain of TCR clone 35923 (TRBV6-1, TRBJ2-1)
CASSELRGQYSEQFF

SEQ ID NO: 71847 - protein, 16 aa, Homo sapiens
  CDR3 for alpha chain variable domain of TCR clone 35924 (TRAV3, TRAJ10)
CAVRDMGAGGGNKLTF

SEQ ID NO: 71848 - protein, 11 aa, Homo sapiens
  CDR3 for beta chain variable domain of TCR clone 35924 (TRBV29-1, TRBJ2-5)
CSEDRTGTQYF

SEQ ID NO: 71849 - protein, 14 aa, Homo sapiens
  CDR3 for alpha chain variable domain of TCR clone 35925 (TRAV12-2, TRAJ52)
RAVPGGTSYGKLTF

SEQ ID NO: 71850 - protein, 12 aa, Homo sapiens
  CDR3 for beta chain variable domain of TCR clone 35925 (TRBV18, TRBJ2-1)
CASSPGTSEGFF

SEQ ID NO: 71851 - protein, 16 aa, Homo sapiens
  CDR3 for alpha chain variable domain of TCR clone 35926 (TRAV21, TRAJ45)
CAVSWGSGGGADGLTL

SEQ ID NO: 71852 - protein, 14 aa, Homo sapiens
  CDR3 for beta chain variable domain of TCR clone 35926 (TRBV4-2, TRBJ1-2)
CASSPGGSNYGYTF

SEQ ID NO: 71853 - protein, 16 aa, Homo sapiens
  CDR3 for alpha chain variable domain of TCR clone 35927 (TRAV1-2, TRAJ10)
CAVRGLLTGGGNKLTF

SEQ ID NO: 71854 - protein, 13 aa, Homo sapiens
  CDR3 for beta chain variable domain of TCR clone 35927 (TRBV20-1, TRBJ1-6)
CSAPLGVGSPLHF

SEQ ID NO: 71855 - protein, 15 aa, Homo sapiens
  CDR3 for alpha chain variable domain of TCR clone 35928 (TRAV17, TRAJ57)
CATGPSQGGSEKLVF

SEQ ID NO: 71856 - protein, 14 aa, Homo sapiens
  CDR3 for beta chain variable domain of TCR clone 35928 (TRBV12-5, TRBJ2-5)
CASGSRTHQETQCF

SEQ ID NO: 71857 - protein, 18 aa, Homo sapiens
  CDR3 for alpha chain variable domain of TCR clone 35929 (TRAV26-2, TRAJ45)
CILRVDKYSGGGADGLTF

SEQ ID NO: 71858 - protein, 16 aa, Homo sapiens
  CDR3 for beta chain variable domain of TCR clone 35929 (TRBV2, TRBJ1-4)
CASNLLRGATNEKLFF

SEQ ID NO: 71859 - protein, 16 aa, Homo sapiens
  CDR3 for alpha chain variable domain of TCR clone 35930 (TRAV3, TRAJ37)
CAVRGKGSGNTGKLIF

SEQ ID NO: 71860 - protein, 15 aa, Homo sapiens
  CDR3 for beta chain variable domain of TCR clone 35930 (TRBV7-3, TRBJ2-2)
CASRETGQGTGELFF

SEQ ID NO: 71861 - protein, 15 aa, Homo sapiens
  CDR3 for alpha chain variable domain of TCR clone 35931 (TRAV21, TRAJ53)
CVTLNSGGSNYKLTF

SEQ ID NO: 71862 - protein, 16 aa, Homo sapiens
  CDR3 for beta chain variable domain of TCR clone 35931 (TRBV9, TRBJ2-1)
CASSVGGGGNYNEQFF

SEQ ID NO: 71863 - protein, 16 aa, Homo sapiens
  CDR3 for alpha chain variable domain of TCR clone 35932 (TRAV3, TRAJ10)
CAVRDMRAGGGNKLTF

SEQ ID NO: 71864 - protein, 15 aa, Homo sapiens
  CDR3 for beta chain variable domain of TCR clone 35932 (TRBV11-3, TRBJ2-7)
CASSQRTSGSLRAVL

SEQ ID NO: 71865 - protein, 11 aa, Homo sapiens
  CDR3 for alpha chain variable domain of TCR clone 35933 (TRAV12-3, TRAJ41)
CAVNAREALNF

SEQ ID NO: 71866 - protein, 16 aa, Homo sapiens
  CDR3 for beta chain variable domain of TCR clone 35933 (TRBV7-8, TRBJ2-3)
CASSTEGQRETDTQYF

SEQ ID NO: 71867 - protein, 11 aa, Homo sapiens
  CDR3 for alpha chain variable domain of TCR clone 35934 (TRAV3, TRAJ21)
CAVGNFNKFYF

SEQ ID NO: 71868 - protein, 16 aa, Homo sapiens
  CDR3 for beta chain variable domain of TCR clone 35934 (TRBV2, TRBJ2-3)
CASSTSVEGVTDTQYF

SEQ ID NO: 71869 - protein, 16 aa, Homo sapiens
  CDR3 for alpha chain variable domain of TCR clone 35935 (TRAV30, TRAJ24)
CGTEIVDADSWGKFQF

SEQ ID NO: 71870 - protein, 15 aa, Homo sapiens
  CDR3 for beta chain variable domain of TCR clone 35935 (TRBV11-2, TRBJ2-2)
CASSSDRVNAGELFF

SEQ ID NO: 71871 - protein, 14 aa, Homo sapiens
  CDR3 for alpha chain variable domain of TCR clone 35936 (TRAV16, TRAJ33)
CALSAMDSNYQLIW

SEQ ID NO: 71872 - protein, 12 aa, Homo sapiens
  CDR3 for beta chain variable domain of TCR clone 35936 (TRBV5-1, TRBJ1-2)
CASSQDTYGYTV

SEQ ID NO: 71873 - protein, 17 aa, Homo sapiens
  CDR3 for alpha chain variable domain of TCR clone 35937 (TRAV13-1, TRAJ52)
CAASSGAGGTSYGKLTF

SEQ ID NO: 71874 - protein, 13 aa, Homo sapiens
  CDR3 for beta chain variable domain of TCR clone 35937 (TRBV7-9, TRBJ1-2)
CASSLKQNYGYTF

SEQ ID NO: 71875 - protein, 12 aa, Homo sapiens
  CDR3 for alpha chain variable domain of TCR clone 35938 (TRAV12-2, TRAJ47)
CAVAEYGNKLGF

SEQ ID NO: 71876 - protein, 14 aa, Homo sapiens
  CDR3 for beta chain variable domain of TCR clone 35938 (TRBV20-1, TRBJ1-1)
CSAMGGTANTEAFF

SEQ ID NO: 71877 - protein, 13 aa, Homo sapiens
  CDR3 for alpha chain variable domain of TCR clone 35939 (TRAV8-3, TRAJ42)
CARYGGSQGNLIF

SEQ ID NO: 71878 - protein, 14 aa, Homo sapiens
  CDR3 for beta chain variable domain of TCR clone 35939 (TRBV20-1, TRBJ2-1)
CSALDRGTYNEQFS

SEQ ID NO: 71879 - protein, 12 aa, Homo sapiens
  CDR3 for alpha chain variable domain of TCR clone 35940 (TRAV2, TRAJ31)
CAVEEGNARLMF

SEQ ID NO: 71880 - protein, 18 aa, Homo sapiens
  CDR3 for beta chain variable domain of TCR clone 35940 (TRBV7-9, TRBJ2-3)
CASSLDLAGLSTPDTQYF

SEQ ID NO: 71881 - protein, 12 aa, Homo sapiens
  CDR3 for alpha chain variable domain of TCR clone 35941 (TRAV12-3, TRAJ17)
CAMALTGNKLTF

SEQ ID NO: 71882 - protein, 15 aa, Homo sapiens
  CDR3 for beta chain variable domain of TCR clone 35941 (TRBV10-2, TRBJ2-6)
CASSEQGTGANVLTF

SEQ ID NO: 71883 - protein, 12 aa, Homo sapiens
  CDR3 for alpha chain variable domain of TCR clone 35942 (TRAV13-2, TRAJ23)
CAERHRGGKLIF

SEQ ID NO: 71884 - protein, 13 aa, Homo sapiens
  CDR3 for beta chain variable domain of TCR clone 35942 (TRBV4-1, TRBJ1-1)
CASSRKMNTEAFF

SEQ ID NO: 71885 - protein, 14 aa, Homo sapiens
  CDR3 for alpha chain variable domain of TCR clone 35943 (TRAV12-3, TRAJ10)
SHLPLTGGGNKLTF

SEQ ID NO: 71886 - protein, 15 aa, Homo sapiens
  CDR3 for beta chain variable domain of TCR clone 35943 (TRBV27, TRBJ1-5)
CASSLGTGFDQTQHF

SEQ ID NO: 71887 - protein, 23 aa, Homo sapiens
  CDR3 for alpha chain variable domain of TCR clone 35944 (TRAV1-1, TRAJ11)
LLQELQMKDSASYFCAGYSTLTF

SEQ ID NO: 71888 - protein, 15 aa, Homo sapiens
  CDR3 for beta chain variable domain of TCR clone 35944 (TRBV6-5, TRBJ2-1)
CASRGDLDSYNEQFF

SEQ ID NO: 71889 - protein, 14 aa, Homo sapiens
  CDR3 for alpha chain variable domain of TCR clone 35945 (TRAV12-3, TRAJ10)
SHLPLTGGGNKLTF

SEQ ID NO: 71890 - protein, 15 aa, Homo sapiens
  CDR3 for beta chain variable domain of TCR clone 35945 (TRBV28, TRBJ2-7)
CASSPGGRGFYEQYF

SEQ ID NO: 71891 - protein, 16 aa, Homo sapiens
  CDR3 for alpha chain variable domain of TCR clone 35946 (TRAV3, TRAJ10)
CAVRDMRAGGGNKLTF

SEQ ID NO: 71892 - protein, 17 aa, Homo sapiens
  CDR3 for beta chain variable domain of TCR clone 35946 (TRBV4-1, TRBJ2-7)
CASSRDPLGVRGGEQYF

SEQ ID NO: 71893 - protein, 11 aa, Homo sapiens
  CDR3 for alpha chain variable domain of TCR clone 35947 (TRAV12-1, TRAJ30)
CVVNGQDKIIF

SEQ ID NO: 71894 - protein, 16 aa, Homo sapiens
  CDR3 for beta chain variable domain of TCR clone 35947 (TRBV24-1, TRBJ2-3)
CATSAAISGITDTQYF

SEQ ID NO: 71895 - protein, 15 aa, Homo sapiens
  CDR3 for alpha chain variable domain of TCR clone 35948 (TRAV26-1, TRAJ29)
CIVRVEGSGNTPLVF

SEQ ID NO: 71896 - protein, 14 aa, Homo sapiens
  CDR3 for beta chain variable domain of TCR clone 35948 (TRBV18, TRBJ2-5)
CASSPGVTQETQYF

SEQ ID NO: 71897 - protein, 14 aa, Homo sapiens
  CDR3 for alpha chain variable domain of TCR clone 35949 (TRAV17, TRAJ36)
CATVSLNWGKQPLL

SEQ ID NO: 71898 - protein, 13 aa, Homo sapiens
  CDR3 for beta chain variable domain of TCR clone 35949 (TRBV4-1, TRBJ1-1)
CASSQLGTGEAFF

SEQ ID NO: 71899 - protein, 14 aa, Homo sapiens
  CDR3 for alpha chain variable domain of TCR clone 35950 (TRAV8-4, TRAJ4)
CAVSPLGGYNKLIF

SEQ ID NO: 71900 - protein, 15 aa, Homo sapiens
  CDR3 for beta chain variable domain of TCR clone 35950 (TRBV9, TRBJ1-6)
CASSVAGTGDSPLHF

SEQ ID NO: 71901 - protein, 14 aa, Homo sapiens
  CDR3 for alpha chain variable domain of TCR clone 35951 (TRAV2, TRAJ37)
CAVDFTSNTGKLIF

SEQ ID NO: 71902 - protein, 14 aa, Homo sapiens
  CDR3 for beta chain variable domain of TCR clone 35951 (TRBV18, TRBJ2-5)
CASSPGVSQETQYF

SEQ ID NO: 71903 - protein, 13 aa, Homo sapiens
  CDR3 for alpha chain variable domain of TCR clone 35952 (TRAV13-2, TRAJ48)
CAERDFGNEKLTF

SEQ ID NO: 71904 - protein, 15 aa, Homo sapiens
  CDR3 for beta chain variable domain of TCR clone 35952 (TRBV7-9, TRBJ1-6)
CASSSPGRGNSPLHF

SEQ ID NO: 71905 - protein, 14 aa, Homo sapiens
  CDR3 for alpha chain variable domain of TCR clone 35953 (TRAV26-2, TRAJ31)
CILIPGNNNARLMF

SEQ ID NO: 71906 - protein, 16 aa, Homo sapiens
  CDR3 for beta chain variable domain of TCR clone 35953 (TRBV7-3, TRBJ2-1)
CAGSLVSGSSNNEQFF

SEQ ID NO: 71907 - protein, 13 aa, Homo sapiens
  CDR3 for alpha chain variable domain of TCR clone 35954 (TRAV35, TRAJ57)
CAGSQGGSEKLVF

SEQ ID NO: 71908 - protein, 19 aa, Homo sapiens
  CDR3 for beta chain variable domain of TCR clone 35954 (TRBV25-1, TRBJ2-2)
CAILVYRVDRGRKTGELFF

SEQ ID NO: 71909 - protein, 12 aa, Homo sapiens
  CDR3 for alpha chain variable domain of TCR clone 35955 (TRAV2, TRAJ31)
CAVEDNNARLRF

SEQ ID NO: 71910 - protein, 16 aa, Homo sapiens
  CDR3 for beta chain variable domain of TCR clone 35955 (TRBV10-3, TRBJ2-1)
CAISGVGDGGGGEQFF

SEQ ID NO: 71911 - protein, 14 aa, Homo sapiens
  CDR3 for alpha chain variable domain of TCR clone 35956 (TRAV12-3, TRAJ33)
CAMSVPGSNYQLIW

SEQ ID NO: 71912 - protein, 12 aa, Homo sapiens
  CDR3 for beta chain variable domain of TCR clone 35956 (TRBV7-8, TRBJ2-7)
CASSLGDWEQYF

SEQ ID NO: 71913 - protein, 12 aa, Homo sapiens
  CDR3 for alpha chain variable domain of TCR clone 35957 (TRAV13-1, TRAJ42)
SVLRGSQGNLIF

SEQ ID NO: 71914 - protein, 15 aa, Homo sapiens
  CDR3 for beta chain variable domain of TCR clone 35957 (TRBV7-9, TRBJ1-6)
CASSSPGRGNSPLHF

SEQ ID NO: 71915 - protein, 15 aa, Homo sapiens
  CDR3 for alpha chain variable domain of TCR clone 35958 (TRAV26-1, TRAJ22)
CIVRVSFWFCKATDL

SEQ ID NO: 71916 - protein, 13 aa, Homo sapiens
  CDR3 for beta chain variable domain of TCR clone 35958 (TRBV12-4, TRBJ1-2)
CASSLRQGKGYTF

SEQ ID NO: 71917 - protein, 10 aa, Homo sapiens
  CDR3 for alpha chain variable domain of TCR clone 35959 (TRAV1-2, TRAJ31)
GVSEDARLMF

SEQ ID NO: 71918 - protein, 14 aa, Homo sapiens
  CDR3 for beta chain variable domain of TCR clone 35959 (TRBV19, TRBJ2-1)
CASPTFVLSGEQFF

SEQ ID NO: 71919 - protein, 14 aa, Homo sapiens
  CDR3 for alpha chain variable domain of TCR clone 35960 (TRAV16, TRAJ33)
CALSAMDSNYQLIW

SEQ ID NO: 71920 - protein, 12 aa, Homo sapiens
  CDR3 for beta chain variable domain of TCR clone 35960 (TRBV5-1, TRBJ1-2)
CASGQDTYGYTF

SEQ ID NO: 71921 - protein, 14 aa, Homo sapiens
  CDR3 for alpha chain variable domain of TCR clone 35961 (TRAV12-2, TRAJ17)
CAVNIKAAGNKLTF

SEQ ID NO: 71922 - protein, 16 aa, Homo sapiens
  CDR3 for beta chain variable domain of TCR clone 35961 (TRBV20-1, TRBJ2-6)
CSASSQGYDGANVLSF

SEQ ID NO: 71923 - protein, 16 aa, Homo sapiens
  CDR3 for alpha chain variable domain of TCR clone 35962 (TRAV8-3, TRAJ42)
CAVGEGNGGSQGNLIF

SEQ ID NO: 71924 - protein, 14 aa, Homo sapiens
  CDR3 for beta chain variable domain of TCR clone 35962 (TRBV7-2, TRBJ2-1)
CASSRGGARNEKFF

SEQ ID NO: 71925 - protein, 16 aa, Homo sapiens
  CDR3 for alpha chain variable domain of TCR clone 35963 (TRAV12-2, )
CAVEDIQNPDPAVYQL

SEQ ID NO: 71926 - protein, 16 aa, Homo sapiens
  CDR3 for beta chain variable domain of TCR clone 35963 (TRBV6-1, TRBJ1-2)
CASSGAWQGRSHGYTF

SEQ ID NO: 71927 - protein, 13 aa, Homo sapiens
  CDR3 for alpha chain variable domain of TCR clone 35964 (TRAV26-1, TRAJ40)
CIVRGTGTYKHIF

SEQ ID NO: 71928 - protein, 16 aa, Homo sapiens
  CDR3 for beta chain variable domain of TCR clone 35964 (TRBV20-1, TRBJ1-1)
CSARDRTLSMNTEAFF

SEQ ID NO: 71929 - protein, 12 aa, Homo sapiens
  CDR3 for alpha chain variable domain of TCR clone 35965 (TRAV16, TRAJ21)
CALLGNFSKFYF

SEQ ID NO: 71930 - protein, 15 aa, Homo sapiens
  CDR3 for beta chain variable domain of TCR clone 35965 (TRBV3-1, TRBJ2-2)
CASSQAVRETGELFF

SEQ ID NO: 71931 - protein, 12 aa, Homo sapiens
  CDR3 for alpha chain variable domain of TCR clone 35966 (TRAV27, TRAJ33)
CAGDGSNYQLIW

SEQ ID NO: 71932 - protein, 13 aa, Homo sapiens
  CDR3 for beta chain variable domain of TCR clone 35966 (TRBV6-4, TRBJ1-5)
CASSADLNQPQHF

SEQ ID NO: 71933 - protein, 15 aa, Homo sapiens
  CDR3 for alpha chain variable domain of TCR clone 35967 (TRAV1-2, TRAJ30)
CAVRPHGNRDDKIIF

SEQ ID NO: 71934 - protein, 13 aa, Homo sapiens
  CDR3 for beta chain variable domain of TCR clone 35967 (TRBV4-1, TRBJ2-7)
CASSQGQAYEQYL

SEQ ID NO: 71935 - protein, 15 aa, Homo sapiens
  CDR3 for alpha chain variable domain of TCR clone 35968 (TRAV25, TRAJ52)
CAGTSGGTSYGKLTF

SEQ ID NO: 71936 - protein, 16 aa, Homo sapiens
  CDR3 for beta chain variable domain of TCR clone 35968 (TRBV15, TRBJ1-2)
CATNRGPRTGGGGYTF

SEQ ID NO: 71937 - protein, 14 aa, Homo sapiens
  CDR3 for alpha chain variable domain of TCR clone 35969 (TRAV12-3, TRAJ10)
SHLPLTGGGNKLTF

SEQ ID NO: 71938 - protein, 15 aa, Homo sapiens
  CDR3 for beta chain variable domain of TCR clone 35969 (TRBV7-2, TRBJ2-1)
CASTHGTGIYNEQFF

SEQ ID NO: 71939 - protein, 16 aa, Homo sapiens
  CDR3 for alpha chain variable domain of TCR clone 35970 (TRAV3, TRAJ18)
CAVRDERGSTLGRLYF

SEQ ID NO: 71940 - protein, 15 aa, Homo sapiens
  CDR3 for beta chain variable domain of TCR clone 35970 (TRBV7-9, TRBJ1-6)
CASSSPGRGNSPLHF

SEQ ID NO: 71941 - protein, 18 aa, Homo sapiens
  CDR3 for alpha chain variable domain of TCR clone 35971 (TRAV21, TRAJ52)
CAVRPSPAGGTSYGKLTF

SEQ ID NO: 71942 - protein, 14 aa, Homo sapiens
  CDR3 for beta chain variable domain of TCR clone 35971 (TRBV13, TRBJ2-7)
CASSLKGASYEQYF

SEQ ID NO: 71943 - protein, 13 aa, Homo sapiens
  CDR3 for alpha chain variable domain of TCR clone 35972 (TRAV27, TRAJ49)
CAPRPYTGNQFYS

SEQ ID NO: 71944 - protein, 16 aa, Homo sapiens
  CDR3 for beta chain variable domain of TCR clone 35972 (TRBV4-1, TRBJ1-2)
CASSQDAGQVLYGYTF

SEQ ID NO: 71945 - protein, 16 aa, Homo sapiens
  CDR3 for alpha chain variable domain of TCR clone 35973 (TRAV16, TRAJ42)
CARKMNYGGSQGNLIF

SEQ ID NO: 71946 - protein, 13 aa, Homo sapiens
  CDR3 for beta chain variable domain of TCR clone 35973 (TRBV20-1, TRBJ2-7)
CSASPPASYEQYF

SEQ ID NO: 71947 - protein, 13 aa, Homo sapiens
  CDR3 for alpha chain variable domain of TCR clone 35974 (TRAV38-1, TRAJ42)
CARWGGSQGNLIF

SEQ ID NO: 71948 - protein, 17 aa, Homo sapiens
  CDR3 for beta chain variable domain of TCR clone 35974 (TRBV13, TRBJ2-3)
CASSLSRVAGGRNTQYF

SEQ ID NO: 71949 - protein, 14 aa, Homo sapiens
  CDR3 for alpha chain variable domain of TCR clone 35975 (TRAV12-2, TRAJ53)
CAVKGGGSNYKLTF

SEQ ID NO: 71950 - protein, 14 aa, Homo sapiens
  CDR3 for beta chain variable domain of TCR clone 35975 (TRBV7-7, TRBJ2-2)
CATRQDSDTGELLF

SEQ ID NO: 71951 - protein, 11 aa, Homo sapiens
  CDR3 for alpha chain variable domain of TCR clone 35976 (TRAV12-1, TRAJ40)
CVVPGTYKYIF

SEQ ID NO: 71952 - protein, 16 aa, Homo sapiens
  CDR3 for beta chain variable domain of TCR clone 35976 (TRBV6-1, TRBJ2-1)
CASILRQGSSYNEQFF

SEQ ID NO: 71953 - protein, 14 aa, Homo sapiens
  CDR3 for alpha chain variable domain of TCR clone 35977 (TRAV8-4, TRAJ9)
CAVRINTGGFKTIF

SEQ ID NO: 71954 - protein, 15 aa, Homo sapiens
  CDR3 for beta chain variable domain of TCR clone 35977 (TRBV10-2, TRBJ2-6)
CASSEQGTGANVQTF

SEQ ID NO: 71955 - protein, 13 aa, Homo sapiens
  CDR3 for alpha chain variable domain of TCR clone 35978 (TRAV12-2, TRAJ52)
CAVSGTSYGKLTF

SEQ ID NO: 71956 - protein, 16 aa, Homo sapiens
  CDR3 for beta chain variable domain of TCR clone 35978 (TRBV5-7, TRBJ2-7)
RASSPTSGRELDEQYF

SEQ ID NO: 71957 - protein, 15 aa, Homo sapiens
  CDR3 for alpha chain variable domain of TCR clone 35979 (TRAV12-3, TRAJ6)
CAMSATTGGSYIPTF

SEQ ID NO: 71958 - protein, 16 aa, Homo sapiens
  CDR3 for beta chain variable domain of TCR clone 35979 (TRBV20-1, TRBJ1-2)
CSASMGQGVASYGYTF

SEQ ID NO: 71959 - protein, 13 aa, Homo sapiens
  CDR3 for alpha chain variable domain of TCR clone 35980 (TRAV23/DV6, TRAJ22)
CAPYSGSARQLTF

SEQ ID NO: 71960 - protein, 15 aa, Homo sapiens
  CDR3 for beta chain variable domain of TCR clone 35980 (TRBV11-2, TRBJ1-6)
CASSLDPWAVSTLHF

SEQ ID NO: 71961 - protein, 16 aa, Homo sapiens
  CDR3 for alpha chain variable domain of TCR clone 35981 (TRAV16, TRAJ4)
CALSRMFSGGYNKLIF

SEQ ID NO: 71962 - protein, 13 aa, Homo sapiens
  CDR3 for beta chain variable domain of TCR clone 35981 (TRBV7-3, TRBJ2-7)
CASSQAGGYEQYF

SEQ ID NO: 71963 - protein, 17 aa, Homo sapiens
  CDR3 for alpha chain variable domain of TCR clone 35982 (TRAV4, TRAJ13)
CLVGVQGSSGGYQQVTF

SEQ ID NO: 71964 - protein, 18 aa, Homo sapiens
  CDR3 for beta chain variable domain of TCR clone 35982 (TRBV15, TRBJ2-3)
CATSRDGARSWDTDTQYF

SEQ ID NO: 71965 - protein, 17 aa, Homo sapiens
  CDR3 for alpha chain variable domain of TCR clone 35983 (TRAV4, TRAJ13)
CLVGVQGSSGGYQKVTF

SEQ ID NO: 71966 - protein, 18 aa, Homo sapiens
  CDR3 for beta chain variable domain of TCR clone 35983 (TRBV15, TRBJ2-3)
CATSRDGARNWDTDTQYF

SEQ ID NO: 71967 - protein, 13 aa, Homo sapiens
  CDR3 for alpha chain variable domain of TCR clone 35984 (TRAV27, TRAJ45)
CRSSGGGADGLTF

SEQ ID NO: 71968 - protein, 13 aa, Homo sapiens
  CDR3 for beta chain variable domain of TCR clone 35984 (TRBV7-7, TRBJ2-5)
CASSRSGQETRYF

SEQ ID NO: 71969 - protein, 15 aa, Homo sapiens
  CDR3 for alpha chain variable domain of TCR clone 35985 (TRAV2, TRAJ15)
CAVEDRGQAGTALIF

SEQ ID NO: 71970 - protein, 13 aa, Homo sapiens
  CDR3 for beta chain variable domain of TCR clone 35985 (TRBV10-2, TRBJ2-7)
CASGARGGYEQYF

SEQ ID NO: 71971 - protein, 13 aa, Homo sapiens
  CDR3 for alpha chain variable domain of TCR clone 35986 (TRAV27, TRAJ49)
CAPRPYTGNQFSF

SEQ ID NO: 71972 - protein, 18 aa, Homo sapiens
  CDR3 for beta chain variable domain of TCR clone 35986 (TRBV7-3, TRBJ2-5)
CASSLGGAAQGRWETQYF

SEQ ID NO: 71973 - protein, 17 aa, Homo sapiens
  CDR3 for alpha chain variable domain of TCR clone 35987 (TRAV12-3, TRAJ6)
CAMSARGGAGGSYIPTF

SEQ ID NO: 71974 - protein, 14 aa, Homo sapiens
  CDR3 for beta chain variable domain of TCR clone 35987 (TRBV7-8, TRBJ2-3)
CASSLEAGTDTQYF

SEQ ID NO: 71975 - protein, 16 aa, Homo sapiens
  CDR3 for alpha chain variable domain of TCR clone 35988 (TRAV1-2, TRAJ6)
CAVRDQGTGGSYIPTF

SEQ ID NO: 71976 - protein, 13 aa, Homo sapiens
  CDR3 for beta chain variable domain of TCR clone 35988 (TRBV28, TRBJ2-7)
CASTPGLAGERYF

SEQ ID NO: 71977 - protein, 13 aa, Homo sapiens
  CDR3 for alpha chain variable domain of TCR clone 35989 (TRAV27, TRAJ3)
ASLRGSSAFKIIF

SEQ ID NO: 71978 - protein, 15 aa, Homo sapiens
  CDR3 for beta chain variable domain of TCR clone 35989 (TRBV28, TRBJ1-3)
CASSMGWASGNTIYF

SEQ ID NO: 71979 - protein, 14 aa, Homo sapiens
  CDR3 for alpha chain variable domain of TCR clone 35990 (TRAV8-4, TRAJ38)
CARLNAGNNRKLIW

SEQ ID NO: 71980 - protein, 12 aa, Homo sapiens
  CDR3 for beta chain variable domain of TCR clone 35990 (TRBV6-1, TRBJ2-7)
CASSEPLYEQYF

SEQ ID NO: 71981 - protein, 12 aa, Homo sapiens
  CDR3 for alpha chain variable domain of TCR clone 35991 (TRAV17, TRAJ4)
CATDGGSNKLIF

SEQ ID NO: 71982 - protein, 13 aa, Homo sapiens
  CDR3 for beta chain variable domain of TCR clone 35991 (TRBV29-1, TRBJ2-2)
CSTTGVNTGELFF

SEQ ID NO: 71983 - protein, 18 aa, Homo sapiens
  CDR3 for alpha chain variable domain of TCR clone 35992 (TRAV12-3, TRAJ52)
CAMSRTNSGGTSYGKLTF

SEQ ID NO: 71984 - protein, 17 aa, Homo sapiens
  CDR3 for beta chain variable domain of TCR clone 35992 (TRBV7-3, TRBJ2-3)
CASSLMKRMRGADTQYF

SEQ ID NO: 71985 - protein, 10 aa, Homo sapiens
  CDR3 for alpha chain variable domain of TCR clone 35993 (TRAV8-4, TRAJ39)
CAVSGNMLTL

SEQ ID NO: 71986 - protein, 14 aa, Homo sapiens
  CDR3 for beta chain variable domain of TCR clone 35993 (TRBV6-9, TRBJ1-5)
CASSYPTGGQPQHF

SEQ ID NO: 71987 - protein, 18 aa, Homo sapiens
  CDR3 for alpha chain variable domain of TCR clone 35994 (TRAV21, TRAJ52)
CAVRPSPAGGTSYGKLEF

SEQ ID NO: 71988 - protein, 17 aa, Homo sapiens
  CDR3 for beta chain variable domain of TCR clone 35994 (TRBV13, TRBJ2-3)
CASSLSRVAGGRNTQYF

SEQ ID NO: 71989 - protein, 16 aa, Homo sapiens
  CDR3 for alpha chain variable domain of TCR clone 35995 (TRAV3, TRAJ23)
CAVKIGVYNQGGKLIF

SEQ ID NO: 71990 - protein, 17 aa, Homo sapiens
  CDR3 for beta chain variable domain of TCR clone 35995 (TRBV10-3, TRBJ2-6)
CAISESTAPSGANVLTF

SEQ ID NO: 71991 - protein, 11 aa, Homo sapiens
  CDR3 for alpha chain variable domain of TCR clone 35996 (TRAV1-2, TRAJ20)
CAVSNDYKLSF

SEQ ID NO: 71992 - protein, 16 aa, Homo sapiens
  CDR3 for beta chain variable domain of TCR clone 35996 (TRBV29-1, TRBJ2-6)
CSVEDITYSGANVLTF

SEQ ID NO: 71993 - protein, 13 aa, Homo sapiens
  CDR3 for alpha chain variable domain of TCR clone 35997 (TRAV13-2, TRAJ48)
CAEMDFGNEKVTF

SEQ ID NO: 71994 - protein, 15 aa, Homo sapiens
  CDR3 for beta chain variable domain of TCR clone 35997 (TRBV7-9, TRBJ1-6)
CASSSPGRGNSPLHF

SEQ ID NO: 71995 - protein, 13 aa, Homo sapiens
  CDR3 for alpha chain variable domain of TCR clone 35998 (TRAV35, TRAJ21)
CAGQLSNFNKFYF

SEQ ID NO: 71996 - protein, 11 aa, Homo sapiens
  CDR3 for beta chain variable domain of TCR clone 35998 (TRBV7-6, TRBJ2-5)
CASSSQGTQYF

SEQ ID NO: 71997 - protein, 15 aa, Homo sapiens
  CDR3 for alpha chain variable domain of TCR clone 35999 (TRAV12-2, TRAJ43)
CAFDMRFVAGTRLTV

SEQ ID NO: 71998 - protein, 18 aa, Homo sapiens
  CDR3 for beta chain variable domain of TCR clone 35999 (TRBV20-1, TRBJ2-3)
CSASGLAGGPGTTDTQYF

SEQ ID NO: 71999 - protein, 15 aa, Homo sapiens
  CDR3 for alpha chain variable domain of TCR clone 36000 (TRAV3, TRAJ4)
CAVRDGTGGYNKLIF

SEQ ID NO: 72000 - protein, 16 aa, Homo sapiens
  CDR3 for beta chain variable domain of TCR clone 36000 (TRBV27, TRBJ2-2)
CASSSSGVSNTEELFF

SEQ ID NO: 72001 - protein, 17 aa, Homo sapiens
  CDR3 for alpha chain variable domain of TCR clone 36001 (TRAV3, TRAJ38)
CAVRDCLNAGNNRKLIW

SEQ ID NO: 72002 - protein, 16 aa, Homo sapiens
  CDR3 for beta chain variable domain of TCR clone 36001 (TRBV19, TRBJ2-1)
CASSKAGPSSYNEQFF

SEQ ID NO: 72003 - protein, 14 aa, Homo sapiens
  CDR3 for alpha chain variable domain of TCR clone 36002 (TRAV12-3, TRAJ42)
CAMNYGGSQGNLIF

SEQ ID NO: 72004 - protein, 17 aa, Homo sapiens
  CDR3 for beta chain variable domain of TCR clone 36002 (TRBV13, TRBJ2-3)
CASSLSRVAGGRNTQYF

SEQ ID NO: 72005 - protein, 13 aa, Homo sapiens
  CDR3 for alpha chain variable domain of TCR clone 36003 (TRAV21, TRAJ57)
CAVTQGGSEKLVF

SEQ ID NO: 72006 - protein, 16 aa, Homo sapiens
  CDR3 for beta chain variable domain of TCR clone 36003 (TRBV29-1, TRBJ2-7)
CSVEDAEDGTAYEQYY

SEQ ID NO: 72007 - protein, 13 aa, Homo sapiens
  CDR3 for alpha chain variable domain of TCR clone 36004 (TRAV26-1, TRAJ36)
CIVVGTGANNLFF

SEQ ID NO: 72008 - protein, 13 aa, Homo sapiens
  CDR3 for beta chain variable domain of TCR clone 36004 (TRBV6-5, TRBJ2-6)
CASSTSGPLHLDF

SEQ ID NO: 72009 - protein, 12 aa, Homo sapiens
  CDR3 for alpha chain variable domain of TCR clone 36005 (TRAV12-3, TRAJ17)
CAMTLTGNKLTF

SEQ ID NO: 72010 - protein, 16 aa, Homo sapiens
  CDR3 for beta chain variable domain of TCR clone 36005 (TRBV4-3, TRBJ2-2)
CASSQDRGSDTGELFF

SEQ ID NO: 72011 - protein, 14 aa, Homo sapiens
  CDR3 for alpha chain variable domain of TCR clone 36006 (TRAV12-1, TRAJ17)
CVVNYKAAGNKLTF

SEQ ID NO: 72012 - protein, 17 aa, Homo sapiens
  CDR3 for beta chain variable domain of TCR clone 36006 (TRBV20-1, TRBJ2-1)
CSASSSGRAGSYNEQFF

SEQ ID NO: 72013 - protein, 12 aa, Homo sapiens
  CDR3 for alpha chain variable domain of TCR clone 36007 (TRAV12-3, TRAJ40)
CAMSSGTYKYIL

SEQ ID NO: 72014 - protein, 15 aa, Homo sapiens
  CDR3 for beta chain variable domain of TCR clone 36007 (TRBV7-3, TRBJ2-2)
CASSETGQGTGELFF

SEQ ID NO: 72015 - protein, 15 aa, Homo sapiens
  CDR3 for alpha chain variable domain of TCR clone 36008 (TRAV17, TRAJ23)
CATDSEDNQGGKLIF

SEQ ID NO: 72016 - protein, 12 aa, Homo sapiens
  CDR3 for beta chain variable domain of TCR clone 36008 (TRBV2, TRBJ2-1)
CAKREGYNEQFF

SEQ ID NO: 72017 - protein, 12 aa, Homo sapiens
  CDR3 for alpha chain variable domain of TCR clone 36009 (TRAV27, TRAJ9)
CAGESGGFKTIL

SEQ ID NO: 72018 - protein, 14 aa, Homo sapiens
  CDR3 for beta chain variable domain of TCR clone 36009 (TRBV6-1, TRBJ2-1)
CASAKDGFYNEQFF

SEQ ID NO: 72019 - protein, 17 aa, Homo sapiens
  CDR3 for alpha chain variable domain of TCR clone 36010 (TRAV3, TRAJ6)
CAVRDGPRAGGSYIPTF

SEQ ID NO: 72020 - protein, 20 aa, Homo sapiens
  CDR3 for beta chain variable domain of TCR clone 36010 (TRBV28, TRBJ2-1)
CASTPIGRSPRLAGGNEQFF

SEQ ID NO: 72021 - protein, 14 aa, Homo sapiens
  CDR3 for alpha chain variable domain of TCR clone 36011 (TRAV2, TRAJ20)
CAVEDGTNDYKLSF

SEQ ID NO: 72022 - protein, 17 aa, Homo sapiens
  CDR3 for beta chain variable domain of TCR clone 36011 (TRBV28, TRBJ2-3)
CASSPTPAGGRVDTQYF

SEQ ID NO: 72023 - protein, 15 aa, Homo sapiens
  CDR3 for alpha chain variable domain of TCR clone 36012 (TRAV17, TRAJ4)
CATGAWSGGYNKLIF

SEQ ID NO: 72024 - protein, 13 aa, Homo sapiens
  CDR3 for beta chain variable domain of TCR clone 36012 (TRBV6-6, TRBJ2-7)
CASSPKHLAEQYF

SEQ ID NO: 72025 - protein, 17 aa, Homo sapiens
  CDR3 for alpha chain variable domain of TCR clone 36013 (TRAV12-3, TRAJ6)
CAMSARGGSGGSYIPTF

SEQ ID NO: 72026 - protein, 12 aa, Homo sapiens
  CDR3 for beta chain variable domain of TCR clone 36013 (TRBV12-4, TRBJ2-3)
CASSTLPDTQYF

SEQ ID NO: 72027 - protein, 16 aa, Homo sapiens
  CDR3 for alpha chain variable domain of TCR clone 36014 (TRAV26-1, TRAJ53)
CIVRVAMGGGNYKLTF

SEQ ID NO: 72028 - protein, 12 aa, Homo sapiens
  CDR3 for beta chain variable domain of TCR clone 36014 (TRBV7-9, TRBJ1-5)
CASSPQGQPQHF

SEQ ID NO: 72029 - protein, 11 aa, Homo sapiens
  CDR3 for alpha chain variable domain of TCR clone 36015 (TRAV35, TRAJ34)
CWARNTDKLTF

SEQ ID NO: 72030 - protein, 14 aa, Homo sapiens
  CDR3 for beta chain variable domain of TCR clone 36015 (TRBV5-1, TRBJ2-7)
CASSRGESLYEQYF

SEQ ID NO: 72031 - protein, 10 aa, Homo sapiens
  CDR3 for alpha chain variable domain of TCR clone 36016 (TRAV1-2, TRAJ20)
SACNDYKLSF

SEQ ID NO: 72032 - protein, 16 aa, Homo sapiens
  CDR3 for beta chain variable domain of TCR clone 36016 (TRBV20-1, TRBJ2-1)
CSARDLKQGMNNEQFF

SEQ ID NO: 72033 - protein, 13 aa, Homo sapiens
  CDR3 for alpha chain variable domain of TCR clone 36017 (TRAV17, TRAJ39)
CATDPVRAGNMLT

SEQ ID NO: 72034 - protein, 15 aa, Homo sapiens
  CDR3 for beta chain variable domain of TCR clone 36017 (TRBV13, TRBJ1-5)
CASSFGQGGVQPQHF

SEQ ID NO: 72035 - protein, 14 aa, Homo sapiens
  CDR3 for alpha chain variable domain of TCR clone 36018 (TRAV17, TRAJ6)
CATNPAGGSYIPTF

SEQ ID NO: 72036 - protein, 15 aa, Homo sapiens
  CDR3 for beta chain variable domain of TCR clone 36018 (TRBV2, TRBJ2-5)
CASSGTVAAGETPYF

SEQ ID NO: 72037 - protein, 13 aa, Homo sapiens
  CDR3 for alpha chain variable domain of TCR clone 36019 (TRAV26-1, TRAJ34)
CIVRPWITDKLIF

SEQ ID NO: 72038 - protein, 13 aa, Homo sapiens
  CDR3 for beta chain variable domain of TCR clone 36019 (TRBV5-1, TRBJ2-1)
CDSSLGSYNEQFF

SEQ ID NO: 72039 - protein, 18 aa, Homo sapiens
  CDR3 for alpha chain variable domain of TCR clone 36020 (TRAV13-1, TRAJ52)
CAASKRSAGGTSYGKLTF

SEQ ID NO: 72040 - protein, 15 aa, Homo sapiens
  CDR3 for beta chain variable domain of TCR clone 36020 (TRBV18, TRBJ2-1)
CASSPPSASYNEQFF

SEQ ID NO: 72041 - protein, 15 aa, Homo sapiens
  CDR3 for alpha chain variable domain of TCR clone 36021 (TRAV23/DV6, TRAJ18)
CAARSRGSTLGRLYF

SEQ ID NO: 72042 - protein, 13 aa, Homo sapiens
  CDR3 for beta chain variable domain of TCR clone 36021 (TRBV7-2, TRBJ2-7)
CASSSPSGSEQYF

SEQ ID NO: 72043 - protein, 15 aa, Homo sapiens
  CDR3 for alpha chain variable domain of TCR clone 36022 (TRAV8-3, TRAJ6)
CAVGPLGRGSYIPTF

SEQ ID NO: 72044 - protein, 14 aa, Homo sapiens
  CDR3 for beta chain variable domain of TCR clone 36022 (TRBV19, TRBJ2-2)
CASSTGQGAGELFF

SEQ ID NO: 72045 - protein, 14 aa, Homo sapiens
  CDR3 for alpha chain variable domain of TCR clone 36023 (TRAV8-2, TRAJ4)
CVVSPSGGYNKLIF

SEQ ID NO: 72046 - protein, 15 aa, Homo sapiens
  CDR3 for beta chain variable domain of TCR clone 36023 (TRBV12-4, TRBJ2-5)
CASSPPTGLQETQYF

SEQ ID NO: 72047 - protein, 12 aa, Homo sapiens
  CDR3 for alpha chain variable domain of TCR clone 36024 (TRAV8-3, TRAJ20)
CAVGANDYKLSF

SEQ ID NO: 72048 - protein, 15 aa, Homo sapiens
  CDR3 for beta chain variable domain of TCR clone 36024 (TRBV20-1, TRBJ2-7)
CSARDRVSGMDEQYF

SEQ ID NO: 72049 - protein, 15 aa, Homo sapiens
  CDR3 for alpha chain variable domain of TCR clone 36025 (TRAV2, TRAJ9)
CAVAALNTGGFKTIF

SEQ ID NO: 72050 - protein, 17 aa, Homo sapiens
  CDR3 for beta chain variable domain of TCR clone 36025 (TRBV13, TRBJ2-3)
CASSLSRVAGGRNTQYF

SEQ ID NO: 72051 - protein, 14 aa, Homo sapiens
  CDR3 for alpha chain variable domain of TCR clone 36026 (TRAV12-2, TRAJ17)
CAVLFKAAGNKLTS

SEQ ID NO: 72052 - protein, 14 aa, Homo sapiens
  CDR3 for beta chain variable domain of TCR clone 36026 (TRBV12-5, TRBJ2-5)
CASGSRTHQETQYF

SEQ ID NO: 72053 - protein, 16 aa, Homo sapiens
  CDR3 for alpha chain variable domain of TCR clone 36027 (TRAV3, TRAJ21)
CAVRDIERGNFNEFYF

SEQ ID NO: 72054 - protein, 13 aa, Homo sapiens
  CDR3 for beta chain variable domain of TCR clone 36027 (TRBV27, TRBJ2-7)
CASSLTTGYEQYF

SEQ ID NO: 72055 - protein, 12 aa, Homo sapiens
  CDR3 for alpha chain variable domain of TCR clone 36028 (TRAV3, TRAJ20)
CAVRDGDYKLSF

SEQ ID NO: 72056 - protein, 15 aa, Homo sapiens
  CDR3 for beta chain variable domain of TCR clone 36028 (TRBV9, TRBJ1-6)
CASSVAGTGDSPLHF

SEQ ID NO: 72057 - protein, 15 aa, Homo sapiens
  CDR3 for alpha chain variable domain of TCR clone 36029 (TRAV1-1, TRAJ5)
CAVRHMDTGRRALTF

SEQ ID NO: 72058 - protein, 17 aa, Homo sapiens
  CDR3 for beta chain variable domain of TCR clone 36029 (TRBV28, TRBJ2-7)
CASSPGLAGGDSSGQYF

SEQ ID NO: 72059 - protein, 14 aa, Homo sapiens
  CDR3 for alpha chain variable domain of TCR clone 36030 (TRAV29/DV5, TRAJ45)
CAASFRGGADGPTF

SEQ ID NO: 72060 - protein, 11 aa, Homo sapiens
  CDR3 for beta chain variable domain of TCR clone 36030 (TRBV11-2, TRBJ2-2)
CASSLPGELFF

SEQ ID NO: 72061 - protein, 16 aa, Homo sapiens
  CDR3 for alpha chain variable domain of TCR clone 36031 (TRAV3, TRAJ21)
CAVRDIERGNFNKFYF

SEQ ID NO: 72062 - protein, 14 aa, Homo sapiens
  CDR3 for beta chain variable domain of TCR clone 36031 (TRBV19, TRBJ1-5)
CASSKMTGPQPQHF

SEQ ID NO: 72063 - protein, 11 aa, Homo sapiens
  CDR3 for alpha chain variable domain of TCR clone 36032 (TRAV2, TRAJ13)
CASGGYQKVTF

SEQ ID NO: 72064 - protein, 14 aa, Homo sapiens
  CDR3 for beta chain variable domain of TCR clone 36032 (TRBV10-3, TRBJ2-5)
CATSRDRDRETQYF

SEQ ID NO: 72065 - protein, 12 aa, Homo sapiens
  CDR3 for alpha chain variable domain of TCR clone 36033 (TRAV12-3, TRAJ17)
CAMTLTGNKLTF

SEQ ID NO: 72066 - protein, 12 aa, Homo sapiens
  CDR3 for beta chain variable domain of TCR clone 36033 (TRBV7-9, TRBJ1-4)
CASSTDREKLFF

SEQ ID NO: 72067 - protein, 12 aa, Homo sapiens
  CDR3 for alpha chain variable domain of TCR clone 36034 (TRAV12-1, TRAJ40)
CVVYSGTYKYIF

SEQ ID NO: 72068 - protein, 18 aa, Homo sapiens
  CDR3 for beta chain variable domain of TCR clone 36034 (TRBV11-2, TRBJ2-3)
CTSSLGGASRGAPNTQYF

SEQ ID NO: 72069 - protein, 14 aa, Homo sapiens
  CDR3 for alpha chain variable domain of TCR clone 36035 (TRAV21, TRAJ35)
CAVMPIGFGNVLHC

SEQ ID NO: 72070 - protein, 12 aa, Homo sapiens
  CDR3 for beta chain variable domain of TCR clone 36035 (TRBV7-9, TRBJ2-7)
CASSIKREEQDF

SEQ ID NO: 72071 - protein, 17 aa, Homo sapiens
  CDR3 for alpha chain variable domain of TCR clone 36036 (TRAV4, TRAJ42)
CLVVVLNYGGSQGNLIF

SEQ ID NO: 72072 - protein, 12 aa, Homo sapiens
  CDR3 for beta chain variable domain of TCR clone 36036 (TRBV20-1, TRBJ2-1)
CSAQYTYNEQFF

SEQ ID NO: 72073 - protein, 16 aa, Homo sapiens
  CDR3 for alpha chain variable domain of TCR clone 36037 (TRAV21, TRAJ52)
GAVTNAGGTSYGKLTF

SEQ ID NO: 72074 - protein, 13 aa, Homo sapiens
  CDR3 for beta chain variable domain of TCR clone 36037 (TRBV20-1, TRBJ2-3)
CSARLAGTDTQYF

SEQ ID NO: 72075 - protein, 14 aa, Homo sapiens
  CDR3 for alpha chain variable domain of TCR clone 36038 (TRAV12-3, TRAJ10)
GHLPLTGGGNKLTF

SEQ ID NO: 72076 - protein, 15 aa, Homo sapiens
  CDR3 for beta chain variable domain of TCR clone 36038 (TRBV7-9, TRBJ1-4)
CASSRTGGFNEKLFF

SEQ ID NO: 72077 - protein, 13 aa, Homo sapiens
  CDR3 for alpha chain variable domain of TCR clone 36039 (TRAV27, TRAJ45)
CRSSGGGADGLTF

SEQ ID NO: 72078 - protein, 17 aa, Homo sapiens
  CDR3 for beta chain variable domain of TCR clone 36039 (TRBV11-2, TRBJ2-1)
CVSSLYPPGVEYNEQFF

SEQ ID NO: 72079 - protein, 13 aa, Homo sapiens
  CDR3 for alpha chain variable domain of TCR clone 36040 (TRAV8-3, TRAJ6)
CAVETRRKLHTYI

SEQ ID NO: 72080 - protein, 14 aa, Homo sapiens
  CDR3 for beta chain variable domain of TCR clone 36040 (TRBV18, TRBJ1-2)
RVAIFLCANYGYTF

SEQ ID NO: 72081 - protein, 17 aa, Homo sapiens
  CDR3 for alpha chain variable domain of TCR clone 36041 (TRAV36/DV7, TRAJ52)
CAVAQRAGGTSYGKLTF

SEQ ID NO: 72082 - protein, 14 aa, Homo sapiens
  CDR3 for beta chain variable domain of TCR clone 36041 (TRBV25-1, TRBJ1-1)
CASTHLGGNTEAFF

SEQ ID NO: 72083 - protein, 12 aa, Homo sapiens
  CDR3 for alpha chain variable domain of TCR clone 36042 (TRAV21, TRAJ33)
CAKMDSNYQLIW

SEQ ID NO: 72084 - protein, 14 aa, Homo sapiens
  CDR3 for beta chain variable domain of TCR clone 36042 (TRBV6-1, TRBJ1-3)
CASVQGGGGNTIYF

SEQ ID NO: 72085 - protein, 11 aa, Homo sapiens
  CDR3 for alpha chain variable domain of TCR clone 36043 (TRAV8-4, TRAJ26)
CAGGGRSEFCL

SEQ ID NO: 72086 - protein, 17 aa, Homo sapiens
  CDR3 for beta chain variable domain of TCR clone 36043 (TRBV7-9, TRBJ2-3)
CASSPTVAGDLTDTQYF

SEQ ID NO: 72087 - protein, 15 aa, Homo sapiens
  CDR3 for alpha chain variable domain of TCR clone 36044 (TRAV17, TRAJ35)
CATAFVIGFGNVLHC

SEQ ID NO: 72088 - protein, 14 aa, Homo sapiens
  CDR3 for beta chain variable domain of TCR clone 36044 (TRBV6-1, TRBJ1-3)
CASVQGGGGNTIYF

SEQ ID NO: 72089 - protein, 16 aa, Homo sapiens
  CDR3 for alpha chain variable domain of TCR clone 36045 (TRAV1-1, TRAJ29)
RAVRSTRNSGNTPLVF

SEQ ID NO: 72090 - protein, 16 aa, Homo sapiens
  CDR3 for beta chain variable domain of TCR clone 36045 (TRBV27, TRBJ1-1)
CASSSRGRTGYTEAFF

SEQ ID NO: 72091 - protein, 16 aa, Homo sapiens
  CDR3 for alpha chain variable domain of TCR clone 36046 (TRAV4, TRAJ22)
CLAGDLYSGSARQLTF

SEQ ID NO: 72092 - protein, 16 aa, Homo sapiens
  CDR3 for beta chain variable domain of TCR clone 36046 (TRBV7-9, TRBJ2-1)
CASSDVAGGSYNEQFF

SEQ ID NO: 72093 - protein, 17 aa, Homo sapiens
  CDR3 for alpha chain variable domain of TCR clone 36047 (TRAV3, TRAJ42)
RAVRDRDYGGSQGNLIF

SEQ ID NO: 72094 - protein, 14 aa, Homo sapiens
  CDR3 for beta chain variable domain of TCR clone 36047 (TRBV7-2, TRBJ2-5)
CASSPRGSSETQYF

SEQ ID NO: 72095 - protein, 11 aa, Homo sapiens
  CDR3 for alpha chain variable domain of TCR clone 36048 (TRAV12-2, TRAJ29)
CAVTLHSPLVF

SEQ ID NO: 72096 - protein, 16 aa, Homo sapiens
  CDR3 for beta chain variable domain of TCR clone 36048 (TRBV19, TRBJ1-5)
CASSIDRGGPRQPQHF

SEQ ID NO: 72097 - protein, 12 aa, Homo sapiens
  CDR3 for alpha chain variable domain of TCR clone 36049 (TRAV12-3, TRAJ3)
CAIDSSASKIIF

SEQ ID NO: 72098 - protein, 16 aa, Homo sapiens
  CDR3 for beta chain variable domain of TCR clone 36049 (TRBV7-3, TRBJ2-2)
CASSLKRGTLSGELFF

SEQ ID NO: 72099 - protein, 14 aa, Homo sapiens
  CDR3 for alpha chain variable domain of TCR clone 36050 (TRAV29/DV5, TRAJ45)
CAASEGGGADGLTF

SEQ ID NO: 72100 - protein, 15 aa, Homo sapiens
  CDR3 for beta chain variable domain of TCR clone 36050 (TRBV12-4, TRBJ1-5)
CASTQGTGPLQPQHF

SEQ ID NO: 72101 - protein, 14 aa, Homo sapiens
  CDR3 for alpha chain variable domain of TCR clone 36051 (TRAV17, TRAJ22)
CATSPSGSARQLTF

SEQ ID NO: 72102 - protein, 15 aa, Homo sapiens
  CDR3 for beta chain variable domain of TCR clone 36051 (TRBV4-1, TRBJ2-5)
CASSQWDLYQETQYV

SEQ ID NO: 72103 - protein, 15 aa, Homo sapiens
  CDR3 for alpha chain variable domain of TCR clone 36052 (TRAV3, TRAJ32)
CSVSSYGGATNKLIF

SEQ ID NO: 72104 - protein, 13 aa, Homo sapiens
  CDR3 for beta chain variable domain of TCR clone 36052 (TRBV20-1, TRBJ2-7)
CSARPSTNYEQYF

SEQ ID NO: 72105 - protein, 14 aa, Homo sapiens
  CDR3 for alpha chain variable domain of TCR clone 36053 (TRAV12-2, TRAJ44)
CAVNPSGTASKLTF

SEQ ID NO: 72106 - protein, 13 aa, Homo sapiens
  CDR3 for beta chain variable domain of TCR clone 36053 (TRBV20-1, TRBJ1-6)
CSAPLGVGSPLHF

SEQ ID NO: 72107 - protein, 13 aa, Homo sapiens
  CDR3 for alpha chain variable domain of TCR clone 36054 (TRAV20, TRAJ15)
RATINQAGTALIF

SEQ ID NO: 72108 - protein, 13 aa, Homo sapiens
  CDR3 for beta chain variable domain of TCR clone 36054 (TRBV12-4, TRBJ2-1)
CASRQPSNNEQFF

SEQ ID NO: 72109 - protein, 13 aa, Homo sapiens
  CDR3 for alpha chain variable domain of TCR clone 36055 (TRAV20, TRAJ48)
CAVHLFGNEKLTF

SEQ ID NO: 72110 - protein, 15 aa, Homo sapiens
  CDR3 for beta chain variable domain of TCR clone 36055 (TRBV6-5, TRBJ2-6)
CASSQGEAGANVLTF

SEQ ID NO: 72111 - protein, 14 aa, Homo sapiens
  CDR3 for alpha chain variable domain of TCR clone 36056 (TRAV12-1, TRAJ17)
CVGNYKAAGNKLTF

SEQ ID NO: 72112 - protein, 15 aa, Homo sapiens
  CDR3 for beta chain variable domain of TCR clone 36056 (TRBV7-2, TRBJ2-1)
CASTHGTGIYNEQFF

SEQ ID NO: 72113 - protein, 14 aa, Homo sapiens
  CDR3 for alpha chain variable domain of TCR clone 36057 (TRAV12-3, TRAJ10)
SHLPLTGGGNKLTF

SEQ ID NO: 72114 - protein, 14 aa, Homo sapiens
  CDR3 for beta chain variable domain of TCR clone 36057 (TRBV7-2, TRBJ2-5)
CASSPRGSSETQYF

SEQ ID NO: 72115 - protein, 14 aa, Homo sapiens
  CDR3 for alpha chain variable domain of TCR clone 36058 (TRAV12-2, TRAJ13)
CAVKKTGGYQKVTF

SEQ ID NO: 72116 - protein, 16 aa, Homo sapiens
  CDR3 for beta chain variable domain of TCR clone 36058 (TRBV15, TRBJ2-3)
CATSRDLGIVTDTQYF

SEQ ID NO: 72117 - protein, 14 aa, Homo sapiens
  CDR3 for alpha chain variable domain of TCR clone 36059 (TRAV1-2, TRAJ16)
CAVNRFSDGQKLLF

SEQ ID NO: 72118 - protein, 22 aa, Homo sapiens
  CDR3 for beta chain variable domain of TCR clone 36059 (TRBV11-2, TRBJ1-4)
CASSLDITRRGIPRKDNEKLFF

SEQ ID NO: 72119 - protein, 13 aa, Homo sapiens
  CDR3 for alpha chain variable domain of TCR clone 36060 (TRAV8-2, TRAJ49)
CVVTPNTGNQFYF

SEQ ID NO: 72120 - protein, 15 aa, Homo sapiens
  CDR3 for beta chain variable domain of TCR clone 36060 (TRBV11-2, TRBJ2-1)
CASSLTSGGYNEQFL

SEQ ID NO: 72121 - protein, 13 aa, Homo sapiens
  CDR3 for alpha chain variable domain of TCR clone 36061 (TRAV2, TRAJ9)
CAVESTGGFKTIF

SEQ ID NO: 72122 - protein, 12 aa, Homo sapiens
  CDR3 for beta chain variable domain of TCR clone 36061 (TRBV7-8, TRBJ2-7)
CASSLGDREQYF

SEQ ID NO: 72123 - protein, 18 aa, Homo sapiens
  CDR3 for alpha chain variable domain of TCR clone 36062 (TRAV21, TRAJ52)
CAVRPSPAGGTIYGKLTF

SEQ ID NO: 72124 - protein, 13 aa, Homo sapiens
  CDR3 for beta chain variable domain of TCR clone 36062 (TRBV7-3, TRBJ1-1)
CASSQDWGAEAFF

SEQ ID NO: 72125 - protein, 23 aa, Homo sapiens
  CDR3 for alpha chain variable domain of TCR clone 36063 (TRAV8-3, )
CAVVTTRIPDIQSPDPAVYQLRD

SEQ ID NO: 72126 - protein, 14 aa, Homo sapiens
  CDR3 for beta chain variable domain of TCR clone 36063 (TRBV11-2, TRBJ2-7)
CASSPSTTSYEQYF

SEQ ID NO: 72127 - protein, 12 aa, Homo sapiens
  CDR3 for alpha chain variable domain of TCR clone 36064 (TRAV3, TRAJ20)
CAVRDGDYKLSF

SEQ ID NO: 72128 - protein, 17 aa, Homo sapiens
  CDR3 for beta chain variable domain of TCR clone 36064 (TRBV7-3, TRBJ2-3)
CASSLMKRMRGADTQYF

SEQ ID NO: 72129 - protein, 16 aa, Homo sapiens
  CDR3 for alpha chain variable domain of TCR clone 36065 (TRAV3, TRAJ5)
CAVRNLMDTGRRVLTF

SEQ ID NO: 72130 - protein, 16 aa, Homo sapiens
  CDR3 for beta chain variable domain of TCR clone 36065 (TRBV4-2, TRBJ2-7)
CASSQEGLANSYEQYF

SEQ ID NO: 72131 - protein, 15 aa, Homo sapiens
  CDR3 for alpha chain variable domain of TCR clone 36066 (TRAV8-2, TRAJ42)
CVVSDGKGSQGNLIF

SEQ ID NO: 72132 - protein, 14 aa, Homo sapiens
  CDR3 for beta chain variable domain of TCR clone 36066 (TRBV5-1, TRBJ2-1)
CATNGGSSYNEQFF

SEQ ID NO: 72133 - protein, 13 aa, Homo sapiens
  CDR3 for alpha chain variable domain of TCR clone 36067 (TRAV16, TRAJ48)
CSPLNFGNEKLTF

SEQ ID NO: 72134 - protein, 13 aa, Homo sapiens
  CDR3 for beta chain variable domain of TCR clone 36067 (TRBV2, TRBJ1-1)
CASSEGGNTEAFF

SEQ ID NO: 72135 - protein, 12 aa, Homo sapiens
  CDR3 for alpha chain variable domain of TCR clone 36068 (TRAV12-3, TRAJ17)
CAMTLTGNKLTF

SEQ ID NO: 72136 - protein, 13 aa, Homo sapiens
  CDR3 for beta chain variable domain of TCR clone 36068 (TRBV4-1, TRBJ2-7)
CASSQGQAYEQYF

SEQ ID NO: 72137 - protein, 14 aa, Homo sapiens
  CDR3 for alpha chain variable domain of TCR clone 36069 (TRAV26-1, TRAJ34)
CIVRVAYNTDKLIF

SEQ ID NO: 72138 - protein, 15 aa, Homo sapiens
  CDR3 for beta chain variable domain of TCR clone 36069 (TRBV20-1, TRBJ2-7)
CSARVPAAYCYEQYF

SEQ ID NO: 72139 - protein, 13 aa, Homo sapiens
  CDR3 for alpha chain variable domain of TCR clone 36070 (TRAV35, TRAJ42)
CAGFTGSQGNLIF

SEQ ID NO: 72140 - protein, 14 aa, Homo sapiens
  CDR3 for beta chain variable domain of TCR clone 36070 (TRBV19, TRBJ2-1)
CASPTFVLSGEQFF

SEQ ID NO: 72141 - protein, 10 aa, Homo sapiens
  CDR3 for alpha chain variable domain of TCR clone 36071 (TRAV12-3, TRAJ49)
CAMNDVQFYF

SEQ ID NO: 72142 - protein, 13 aa, Homo sapiens
  CDR3 for beta chain variable domain of TCR clone 36071 (TRBV12-4, TRBJ1-1)
CASSPGTGFEAFF

SEQ ID NO: 72143 - protein, 13 aa, Homo sapiens
  CDR3 for alpha chain variable domain of TCR clone 36072 (TRAV20, TRAJ40)
CAVPFSGTYRYIF

SEQ ID NO: 72144 - protein, 13 aa, Homo sapiens
  CDR3 for beta chain variable domain of TCR clone 36072 (TRBV15, TRBJ2-5)
CATSQIGEETQYF

SEQ ID NO: 72145 - protein, 12 aa, Homo sapiens
  CDR3 for alpha chain variable domain of TCR clone 36073 (TRAV21, TRAJ31)
CAVWGNNARLMF

SEQ ID NO: 72146 - protein, 16 aa, Homo sapiens
  CDR3 for beta chain variable domain of TCR clone 36073 (TRBV27, TRBJ2-5)
RASSYGPGGQKETQYF

SEQ ID NO: 72147 - protein, 13 aa, Homo sapiens
  CDR3 for alpha chain variable domain of TCR clone 36074 (TRAV12-3, TRAJ33)
CAISVNSNYQLIW

SEQ ID NO: 72148 - protein, 13 aa, Homo sapiens
  CDR3 for beta chain variable domain of TCR clone 36074 (TRBV7-2, TRBJ2-2)
CASSLAVTGELFF

SEQ ID NO: 72149 - protein, 13 aa, Homo sapiens
  CDR3 for alpha chain variable domain of TCR clone 36075 (TRAV21, TRAJ57)
CAVTQGGSEKLVF

SEQ ID NO: 72150 - protein, 16 aa, Homo sapiens
  CDR3 for beta chain variable domain of TCR clone 36075 (TRBV29-1, TRBJ2-7)
SSVEDAEDGTAYEQYF

SEQ ID NO: 72151 - protein, 11 aa, Homo sapiens
  CDR3 for alpha chain variable domain of TCR clone 36076 (TRAV1-2, TRAJ40)
CAVPGTYKYIF

SEQ ID NO: 72152 - protein, 16 aa, Homo sapiens
  CDR3 for beta chain variable domain of TCR clone 36076 (TRBV29-1, TRBJ2-7)
CSVEVVGTSGSYEQYC

SEQ ID NO: 72153 - protein, 15 aa, Homo sapiens
  CDR3 for alpha chain variable domain of TCR clone 36077 (TRAV17, TRAJ57)
CATGPSQGGSEKLVF

SEQ ID NO: 72154 - protein, 16 aa, Homo sapiens
  CDR3 for beta chain variable domain of TCR clone 36077 (TRBV12-4, TRBJ1-5)
CASSRPAGGSNQPQHF

SEQ ID NO: 72155 - protein, 15 aa, Homo sapiens
  CDR3 for alpha chain variable domain of TCR clone 36078 (TRAV13-2, TRAJ17)
CAENKGGSCRQQANF

SEQ ID NO: 72156 - protein, 12 aa, Homo sapiens
  CDR3 for beta chain variable domain of TCR clone 36078 (TRBV11-2, TRBJ2-1)
CASSPGNNEQFF

SEQ ID NO: 72157 - protein, 12 aa, Homo sapiens
  CDR3 for alpha chain variable domain of TCR clone 36079 (TRAV6, TRAJ9)
CALNTGGFKTIF

SEQ ID NO: 72158 - protein, 15 aa, Homo sapiens
  CDR3 for beta chain variable domain of TCR clone 36079 (TRBV20-1, TRBJ2-5)
CSAEGTGGLQETQYF

SEQ ID NO: 72159 - protein, 11 aa, Homo sapiens
  CDR3 for alpha chain variable domain of TCR clone 36080 (TRAV3, TRAJ21)
CAVGNFNKFYF

SEQ ID NO: 72160 - protein, 16 aa, Homo sapiens
  CDR3 for beta chain variable domain of TCR clone 36080 (TRBV19, TRBJ2-1)
CASSKADRAPTMSSSS

SEQ ID NO: 72161 - protein, 18 aa, Homo sapiens
  CDR3 for alpha chain variable domain of TCR clone 36081 (TRAV38-2/DV8, TRAJ42)
CAYRSADLTGGSQGNLIF

SEQ ID NO: 72162 - protein, 12 aa, Homo sapiens
  CDR3 for beta chain variable domain of TCR clone 36081 (TRBV11-2, TRBJ2-2)
CASGLGGGELFF

SEQ ID NO: 72163 - protein, 11 aa, Homo sapiens
  CDR3 for alpha chain variable domain of TCR clone 36082 (TRAV17, TRAJ36)
CAPTGANNLFF

SEQ ID NO: 72164 - protein, 13 aa, Homo sapiens
  CDR3 for beta chain variable domain of TCR clone 36082 (TRBV29-1, TRBJ2-3)
SAALQGGADTQYF

SEQ ID NO: 72165 - protein, 13 aa, Homo sapiens
  CDR3 for alpha chain variable domain of TCR clone 36083 (TRAV17, TRAJ5)
CAPMDTGRRALTF

SEQ ID NO: 72166 - protein, 15 aa, Homo sapiens
  CDR3 for beta chain variable domain of TCR clone 36083 (TRBV20-1, TRBJ2-7)
CSARDRVSGMDEQYF

SEQ ID NO: 72167 - protein, 17 aa, Homo sapiens
  CDR3 for alpha chain variable domain of TCR clone 36084 (TRAV3, TRAJ6)
CAVRDGPRAGGSYIPTC

SEQ ID NO: 72168 - protein, 20 aa, Homo sapiens
  CDR3 for beta chain variable domain of TCR clone 36084 (TRBV28, TRBJ2-1)
CASTPIGRSPGLAGGNEQFF

SEQ ID NO: 72169 - protein, 11 aa, Homo sapiens
  CDR3 for alpha chain variable domain of TCR clone 36085 (TRAV1-1, TRAJ23)
CAVRQGGKLIF

SEQ ID NO: 72170 - protein, 20 aa, Homo sapiens
  CDR3 for beta chain variable domain of TCR clone 36085 (TRBV7-8, TRBJ2-2)
CASSHLFPGPTIHITGDLFF

SEQ ID NO: 72171 - protein, 13 aa, Homo sapiens
  CDR3 for alpha chain variable domain of TCR clone 36086 (TRAV13-1, TRAJ39)
CAASIWAGNMPTF

SEQ ID NO: 72172 - protein, 15 aa, Homo sapiens
  CDR3 for beta chain variable domain of TCR clone 36086 (TRBV7-9, TRBJ1-1)
CASSLLEQGGTEAFF

SEQ ID NO: 72173 - protein, 14 aa, Homo sapiens
  CDR3 for alpha chain variable domain of TCR clone 36087 (TRAV1-2, TRAJ16)
CAVNRFSDGQKLLF

SEQ ID NO: 72174 - protein, 12 aa, Homo sapiens
  CDR3 for beta chain variable domain of TCR clone 36087 (TRBV12-4, TRBJ1-3)
CASSFSGNTIYF

SEQ ID NO: 72175 - protein, 10 aa, Homo sapiens
  CDR3 for alpha chain variable domain of TCR clone 36088 (TRAV23/DV6, TRAJ57)
CAASSTLSQG

SEQ ID NO: 72176 - protein, 14 aa, Homo sapiens
  CDR3 for beta chain variable domain of TCR clone 36088 (TRBV25-1, TRBJ1-1)
CASNHLGGNTEAFF

SEQ ID NO: 72177 - protein, 14 aa, Homo sapiens
  CDR3 for alpha chain variable domain of TCR clone 36089 (TRAV13-1, TRAJ40)
YAASMTSGTYKYIF

SEQ ID NO: 72178 - protein, 15 aa, Homo sapiens
  CDR3 for beta chain variable domain of TCR clone 36089 (TRBV7-3, TRBJ2-1)
CASSPTGGGEVEQFF

SEQ ID NO: 72179 - protein, 13 aa, Homo sapiens
  CDR3 for alpha chain variable domain of TCR clone 36090 (TRAV29/DV5, TRAJ31)
CAASRNNNARLMF

SEQ ID NO: 72180 - protein, 12 aa, Homo sapiens
  CDR3 for beta chain variable domain of TCR clone 36090 (TRBV14, TRBJ2-5)
CASGQLKETQYF

SEQ ID NO: 72181 - protein, 12 aa, Homo sapiens
  CDR3 for alpha chain variable domain of TCR clone 36091 (TRAV3, TRAJ20)
CAVRDGDYKLSF

SEQ ID NO: 72182 - protein, 11 aa, Homo sapiens
  CDR3 for beta chain variable domain of TCR clone 36091 (TRBV11-2, TRBJ2-2)
CASSLPGELFF

SEQ ID NO: 72183 - protein, 17 aa, Homo sapiens
  CDR3 for alpha chain variable domain of TCR clone 36092 (TRAV12-3, TRAJ6)
CAMSARGGAGGSYIPTF

SEQ ID NO: 72184 - protein, 14 aa, Homo sapiens
  CDR3 for beta chain variable domain of TCR clone 36092 (TRBV5-7, TRBJ1-1)
CASSLAGDWTEAFF

SEQ ID NO: 72185 - protein, 15 aa, Homo sapiens
  CDR3 for alpha chain variable domain of TCR clone 36093 (TRAV13-1, TRAJ32)
CAARIYGGATNKLIF

SEQ ID NO: 72186 - protein, 12 aa, Homo sapiens
  CDR3 for beta chain variable domain of TCR clone 36093 (TRBV7-6, TRBJ2-3)
CASSTGTDTQYF

SEQ ID NO: 72187 - protein, 13 aa, Homo sapiens
  CDR3 for alpha chain variable domain of TCR clone 36094 (TRAV21, TRAJ57)
CAVTQGGSEKLVL

SEQ ID NO: 72188 - protein, 14 aa, Homo sapiens
  CDR3 for beta chain variable domain of TCR clone 36094 (TRBV5-1, TRBJ2-1)
CASSALWAGNEQFF

SEQ ID NO: 72189 - protein, 13 aa, Homo sapiens
  CDR3 for alpha chain variable domain of TCR clone 36095 (TRAV2, TRAJ40)
CAVVTSGTYKYIF

SEQ ID NO: 72190 - protein, 14 aa, Homo sapiens
  CDR3 for beta chain variable domain of TCR clone 36095 (TRBV19, TRBJ2-1)
CTSPTFVFSGEQFF

SEQ ID NO: 72191 - protein, 15 aa, Homo sapiens
  CDR3 for alpha chain variable domain of TCR clone 36096 (TRAV8-3, TRAJ23)
CAVGDRYNQGGKLIF

SEQ ID NO: 72192 - protein, 22 aa, Homo sapiens
  CDR3 for beta chain variable domain of TCR clone 36096 (TRBV29-1, TRBJ2-5)
TVSNMSPEDSSVYLCSAGTQYF

SEQ ID NO: 72193 - protein, 14 aa, Homo sapiens
  CDR3 for alpha chain variable domain of TCR clone 36097 (TRAV17, TRAJ37)
CATDAFSNTGKLIF

SEQ ID NO: 72194 - protein, 16 aa, Homo sapiens
  CDR3 for beta chain variable domain of TCR clone 36097 (TRBV5-6, TRBJ2-5)
CASSFGQGGYQETQYF

SEQ ID NO: 72195 - protein, 15 aa, Homo sapiens
  CDR3 for alpha chain variable domain of TCR clone 36098 (TRAV2, TRAJ9)
CAVEDRGTGGFQTIF

SEQ ID NO: 72196 - protein, 16 aa, Homo sapiens
  CDR3 for beta chain variable domain of TCR clone 36098 (TRBV24-1, TRBJ2-3)
CATSDPGTGATDTQYF

SEQ ID NO: 72197 - protein, 13 aa, Homo sapiens
  CDR3 for alpha chain variable domain of TCR clone 36099 (TRAV27, TRAJ29)
CAGAHSGNTPLVF

SEQ ID NO: 72198 - protein, 22 aa, Homo sapiens
  CDR3 for beta chain variable domain of TCR clone 36099 (TRBV7-9, TRBJ2-7)
RGTRPCISVPAALDRGAGEQYF

SEQ ID NO: 72199 - protein, 18 aa, Homo sapiens
  CDR3 for alpha chain variable domain of TCR clone 36100 (TRAV35, TRAJ28)
CAGHNYPLSGAGSYQPTF

SEQ ID NO: 72200 - protein, 12 aa, Homo sapiens
  CDR3 for beta chain variable domain of TCR clone 36100 (TRBV7-9, TRBJ1-1)
CASSLEGTEAFF

SEQ ID NO: 72201 - protein, 18 aa, Homo sapiens
  CDR3 for alpha chain variable domain of TCR clone 36101 (TRAV21, TRAJ52)
CAVRPSPAGGTSYGKLPF

SEQ ID NO: 72202 - protein, 14 aa, Homo sapiens
  CDR3 for beta chain variable domain of TCR clone 36101 (TRBV4-1, TRBJ2-2)
CASSQAVNTGELFF

SEQ ID NO: 72203 - protein, 15 aa, Homo sapiens
  CDR3 for alpha chain variable domain of TCR clone 36102 (TRAV23/DV6, TRAJ18)
CAAKYRGSTLGRLYF

SEQ ID NO: 72204 - protein, 13 aa, Homo sapiens
  CDR3 for beta chain variable domain of TCR clone 36102 (TRBV7-2, TRBJ2-7)
CASSSPSGSEQYF

SEQ ID NO: 72205 - protein, 13 aa, Homo sapiens
  CDR3 for alpha chain variable domain of TCR clone 36103 (TRAV8-6, TRAJ49)
CAVITNTGNQFYF

SEQ ID NO: 72206 - protein, 15 aa, Homo sapiens
  CDR3 for beta chain variable domain of TCR clone 36103 (TRBV19, TRBJ1-1)
CASTSGQIQNTEAFF

SEQ ID NO: 72207 - protein, 14 aa, Homo sapiens
  CDR3 for alpha chain variable domain of TCR clone 36104 (TRAV26-1, TRAJ45)
CIEVTGGGADGLTF

SEQ ID NO: 72208 - protein, 13 aa, Homo sapiens
  CDR3 for beta chain variable domain of TCR clone 36104 (TRBV7-6, TRBJ1-2)
CASSLVADYGYTV

SEQ ID NO: 72209 - protein, 13 aa, Homo sapiens
  CDR3 for alpha chain variable domain of TCR clone 36105 (TRAV2, TRAJ40)
CAVVTSGTYKYIF

SEQ ID NO: 72210 - protein, 16 aa, Homo sapiens
  CDR3 for beta chain variable domain of TCR clone 36105 (TRBV24-1, TRBJ2-3)
CATSDPGTGATDTQYF

SEQ ID NO: 72211 - protein, 15 aa, Homo sapiens
  CDR3 for alpha chain variable domain of TCR clone 36106 (TRAV26-1, TRAJ13)
CIVRVLSGGYQKVTF

SEQ ID NO: 72212 - protein, 13 aa, Homo sapiens
  CDR3 for beta chain variable domain of TCR clone 36106 (TRBV7-9, TRBJ1-2)
CASSLKQNYGYTF

SEQ ID NO: 72213 - protein, 16 aa, Homo sapiens
  CDR3 for alpha chain variable domain of TCR clone 36107 (TRAV16, TRAJ52)
CALSAAGGTSYGKLTF

SEQ ID NO: 72214 - protein, 12 aa, Homo sapiens
  CDR3 for beta chain variable domain of TCR clone 36107 (TRBV12-4, TRBJ1-3)
CASSFSGDTIYF

SEQ ID NO: 72215 - protein, 14 aa, Homo sapiens
  CDR3 for alpha chain variable domain of TCR clone 36108 (TRAV17, TRAJ22)
CATSPSGSARQLTF

SEQ ID NO: 72216 - protein, 15 aa, Homo sapiens
  CDR3 for beta chain variable domain of TCR clone 36108 (TRBV4-1, TRBJ2-5)
CASSQGDLYQETQYF

SEQ ID NO: 72217 - protein, 20 aa, Homo sapiens
  CDR3 for alpha chain variable domain of TCR clone 36109 (TRAV12-1, TRAJ42)
SSVIQPPTSVKGGSQGNLIF

SEQ ID NO: 72218 - protein, 18 aa, Homo sapiens
  CDR3 for beta chain variable domain of TCR clone 36109 (TRBV11-2, TRBJ2-3)
CASSLGGDSRGAPNTQYF

SEQ ID NO: 72219 - protein, 14 aa, Homo sapiens
  CDR3 for alpha chain variable domain of TCR clone 36110 (TRAV26-1, TRAJ22)
CIVRVYGSARQLTF

SEQ ID NO: 72220 - protein, 17 aa, Homo sapiens
  CDR3 for beta chain variable domain of TCR clone 36110 (TRBV7-3, TRBJ2-3)
CASSPGGPAGFGDTQYF

SEQ ID NO: 72221 - protein, 17 aa, Homo sapiens
  CDR3 for alpha chain variable domain of TCR clone 36111 (TRAV3, TRAJ6)
CAVRGGPRAGGSYIPTF

SEQ ID NO: 72222 - protein, 12 aa, Homo sapiens
  CDR3 for beta chain variable domain of TCR clone 36111 (TRBV11-2, TRBJ2-1)
CASSPGNNEQFF

SEQ ID NO: 72223 - protein, 13 aa, Homo sapiens
  CDR3 for alpha chain variable domain of TCR clone 36112 (TRAV2, TRAJ40)
CAVVTSGTYKYIF

SEQ ID NO: 72224 - protein, 15 aa, Homo sapiens
  CDR3 for beta chain variable domain of TCR clone 36112 (TRBV7-9, TRBJ1-1)
CASSLLEQGGTEAFF

SEQ ID NO: 72225 - protein, 15 aa, Homo sapiens
  CDR3 for alpha chain variable domain of TCR clone 36113 (TRAV2, TRAJ9)
CAVAALNTGGFKTIF

SEQ ID NO: 72226 - protein, 16 aa, Homo sapiens
  CDR3 for beta chain variable domain of TCR clone 36113 (TRBV7-3, TRBJ2-2)
CASSLKRGTLSGELFF

SEQ ID NO: 72227 - protein, 14 aa, Homo sapiens
  CDR3 for alpha chain variable domain of TCR clone 36114 (TRAV35, TRAJ13)
CAGSPSGGYQKVTF

SEQ ID NO: 72228 - protein, 13 aa, Homo sapiens
  CDR3 for beta chain variable domain of TCR clone 36114 (TRBV29-1, TRBJ1-1)
CSVGYSRNTEAFF

SEQ ID NO: 72229 - protein, 10 aa, Homo sapiens
  CDR3 for alpha chain variable domain of TCR clone 36115 (TRAV1-2, TRAJ31)
CAFFDARLMF

SEQ ID NO: 72230 - protein, 15 aa, Homo sapiens
  CDR3 for beta chain variable domain of TCR clone 36115 (TRBV7-2, TRBJ2-2)
CASSPTGANTGELFF

SEQ ID NO: 72231 - protein, 12 aa, Homo sapiens
  CDR3 for alpha chain variable domain of TCR clone 36116 (TRAV12-2, TRAJ10)
WGVTGGGNKLTF

SEQ ID NO: 72232 - protein, 16 aa, Homo sapiens
  CDR3 for beta chain variable domain of TCR clone 36116 (TRBV12-5, TRBJ2-5)
CASGPRTSGNQETQYF

SEQ ID NO: 72233 - protein, 16 aa, Homo sapiens
  CDR3 for alpha chain variable domain of TCR clone 36117 (TRAV30, TRAJ24)
CGTETVDADSWGKFQF

SEQ ID NO: 72234 - protein, 14 aa, Homo sapiens
  CDR3 for beta chain variable domain of TCR clone 36117 (TRBV7-2, TRBJ2-7)
CASRSQGAAYEQYF

SEQ ID NO: 72235 - protein, 17 aa, Homo sapiens
  CDR3 for alpha chain variable domain of TCR clone 36118 (TRAV12-3, TRAJ6)
CAMSARGGAGRSYIPTF

SEQ ID NO: 72236 - protein, 12 aa, Homo sapiens
  CDR3 for beta chain variable domain of TCR clone 36118 (TRBV12-4, TRBJ2-3)
CASSTLPDTQYF

SEQ ID NO: 72237 - protein, 13 aa, Homo sapiens
  CDR3 for alpha chain variable domain of TCR clone 36119 (TRAV26-2, TRAJ43)
CILGAVNNNDMRF

SEQ ID NO: 72238 - protein, 15 aa, Homo sapiens
  CDR3 for beta chain variable domain of TCR clone 36119 (TRBV7-2, TRBJ2-1)
CASTHGTGVYNEQFF

SEQ ID NO: 72239 - protein, 12 aa, Homo sapiens
  CDR3 for alpha chain variable domain of TCR clone 36120 (TRAV2, TRAJ5)
CALDTGRRALTF

SEQ ID NO: 72240 - protein, 15 aa, Homo sapiens
  CDR3 for beta chain variable domain of TCR clone 36120 (TRBV10-3, TRBJ2-1)
RAISDVQDRAYEQFF

SEQ ID NO: 72241 - protein, 18 aa, Homo sapiens
  CDR3 for alpha chain variable domain of TCR clone 36121 (TRAV21, TRAJ52)
CAVRPSPAGGTSYGKLTF

SEQ ID NO: 72242 - protein, 14 aa, Homo sapiens
  CDR3 for beta chain variable domain of TCR clone 36121 (TRBV4-3, TRBJ2-7)
CASSQGGAAYEQYF

SEQ ID NO: 72243 - protein, 15 aa, Homo sapiens
  CDR3 for alpha chain variable domain of TCR clone 36122 (TRAV26-2, TRAJ39)
CSLRGNNNAGNMLTF

SEQ ID NO: 72244 - protein, 15 aa, Homo sapiens
  CDR3 for beta chain variable domain of TCR clone 36122 (TRBV5-4, TRBJ1-1)
CASSSLGLANTEAFF

SEQ ID NO: 72245 - protein, 16 aa, Homo sapiens
  CDR3 for alpha chain variable domain of TCR clone 36123 (TRAV23/DV6, TRAJ9)
CATSIGGNTGGFKTIF

SEQ ID NO: 72246 - protein, 14 aa, Homo sapiens
  CDR3 for beta chain variable domain of TCR clone 36123 (TRBV9, TRBJ2-7)
CASSVGVGSYEQYF

SEQ ID NO: 72247 - protein, 13 aa, Homo sapiens
  CDR3 for alpha chain variable domain of TCR clone 36124 (TRAV21, TRAJ20)
CAVGLRVDYKLGF

SEQ ID NO: 72248 - protein, 13 aa, Homo sapiens
  CDR3 for beta chain variable domain of TCR clone 36124 (TRBV6-1, TRBJ1-1)
CASSRQGNTEAFF

SEQ ID NO: 72249 - protein, 10 aa, Homo sapiens
  CDR3 for alpha chain variable domain of TCR clone 36125 (TRAV30, TRAJ48)
CGIGNEKLTF

SEQ ID NO: 72250 - protein, 16 aa, Homo sapiens
  CDR3 for beta chain variable domain of TCR clone 36125 (TRBV19, TRBJ1-5)
CASSMWTGGGNQPQHF

SEQ ID NO: 72251 - protein, 13 aa, Homo sapiens
  CDR3 for alpha chain variable domain of TCR clone 36126 (TRAV13-1, TRAJ5)
CEASDTGRRALTF

SEQ ID NO: 72252 - protein, 12 aa, Homo sapiens
  CDR3 for beta chain variable domain of TCR clone 36126 (TRBV28, TRBJ2-3)
CASSLYRDTQYF

SEQ ID NO: 72253 - protein, 12 aa, Homo sapiens
  CDR3 for alpha chain variable domain of TCR clone 36127 (TRAV17, TRAJ12)
CATLSSSYKLIF

SEQ ID NO: 72254 - protein, 16 aa, Homo sapiens
  CDR3 for beta chain variable domain of TCR clone 36127 (TRBV28, TRBJ2-7)
CASSLFFETGGPEQYF

SEQ ID NO: 72255 - protein, 13 aa, Homo sapiens
  CDR3 for alpha chain variable domain of TCR clone 36128 (TRAV8-6, TRAJ49)
CAVITKTGNQFYF

SEQ ID NO: 72256 - protein, 14 aa, Homo sapiens
  CDR3 for beta chain variable domain of TCR clone 36128 (TRBV5-1, TRBJ2-7)
CASSRGESLYEQYF

SEQ ID NO: 72257 - protein, 13 aa, Homo sapiens
  CDR3 for alpha chain variable domain of TCR clone 36129 (TRAV12-3, TRAJ33)
CAMSVNSNYQLIW

SEQ ID NO: 72258 - protein, 15 aa, Homo sapiens
  CDR3 for beta chain variable domain of TCR clone 36129 (TRBV11-3, TRBJ2-3)
CASLKDGREGDTQYF

SEQ ID NO: 72259 - protein, 14 aa, Homo sapiens
  CDR3 for alpha chain variable domain of TCR clone 36130 (TRAV13-1, TRAJ35)
CAASKGGFGNVLHC

SEQ ID NO: 72260 - protein, 14 aa, Homo sapiens
  CDR3 for beta chain variable domain of TCR clone 36130 (TRBV20-1, TRBJ2-5)
CSASDSGSGETQYF

SEQ ID NO: 72261 - protein, 15 aa, Homo sapiens
  CDR3 for alpha chain variable domain of TCR clone 36131 (TRAV17, TRAJ56)
CATEPFTGANSKLTF

SEQ ID NO: 72262 - protein, 14 aa, Homo sapiens
  CDR3 for beta chain variable domain of TCR clone 36131 (TRBV19, TRBJ2-1)
CASPTFVLSDEQFF

SEQ ID NO: 72263 - protein, 14 aa, Homo sapiens
  CDR3 for alpha chain variable domain of TCR clone 36132 (TRAV13-1, TRAJ44)
CAAKATGTASKLTS

SEQ ID NO: 72264 - protein, 17 aa, Homo sapiens
  CDR3 for beta chain variable domain of TCR clone 36132 (TRBV7-3, TRBJ2-3)
RASSLMKRMRGADTQYF

SEQ ID NO: 72265 - protein, 14 aa, Homo sapiens
  CDR3 for alpha chain variable domain of TCR clone 36133 (TRAV2, TRAJ9)
CAVEDRSGGFKTIF

SEQ ID NO: 72266 - protein, 13 aa, Homo sapiens
  CDR3 for beta chain variable domain of TCR clone 36133 (TRBV4-2, TRBJ1-1)
CASSQAGNTEAFF

SEQ ID NO: 72267 - protein, 10 aa, Homo sapiens
  CDR3 for alpha chain variable domain of TCR clone 36134 (TRAV16, TRAJ22)
SAMYLRQLTF

SEQ ID NO: 72268 - protein, 15 aa, Homo sapiens
  CDR3 for beta chain variable domain of TCR clone 36134 (TRBV7-9, TRBJ1-6)
CASSSPGRGNSPLDF

SEQ ID NO: 72269 - protein, 12 aa, Homo sapiens
  CDR3 for alpha chain variable domain of TCR clone 36135 (TRAV1-1, TRAJ39)
CAVPVVGNMLTF

SEQ ID NO: 72270 - protein, 13 aa, Homo sapiens
  CDR3 for beta chain variable domain of TCR clone 36135 (TRBV27, TRBJ1-1)
CASSLSIGAEAFF

SEQ ID NO: 72271 - protein, 15 aa, Homo sapiens
  CDR3 for alpha chain variable domain of TCR clone 36136 (TRAV21, TRAJ53)
CATLNSGGSNYKLTF

SEQ ID NO: 72272 - protein, 17 aa, Homo sapiens
  CDR3 for beta chain variable domain of TCR clone 36136 (TRBV4-1, TRBJ2-7)
CASSRDPLGVRGGEQYF

SEQ ID NO: 72273 - protein, 13 aa, Homo sapiens
  CDR3 for alpha chain variable domain of TCR clone 36137 (TRAV36/DV7, TRAJ49)
CAGDSNTGNQFYF

SEQ ID NO: 72274 - protein, 13 aa, Homo sapiens
  CDR3 for beta chain variable domain of TCR clone 36137 (TRBV7-9, TRBJ1-2)
CASSLKQNYGYTF

SEQ ID NO: 72275 - protein, 10 aa, Homo sapiens
  CDR3 for alpha chain variable domain of TCR clone 36138 (TRAV38-2/DV8, TRAJ40)
CASVTYKYIF

SEQ ID NO: 72276 - protein, 14 aa, Homo sapiens
  CDR3 for beta chain variable domain of TCR clone 36138 (TRBV7-9, TRBJ2-1)
CASSPRDSLYEQFF

SEQ ID NO: 72277 - protein, 12 aa, Homo sapiens
  CDR3 for alpha chain variable domain of TCR clone 36139 (TRAV38-1, TRAJ43)
CTFMTRLADMRF

SEQ ID NO: 72278 - protein, 14 aa, Homo sapiens
  CDR3 for beta chain variable domain of TCR clone 36139 (TRBV27, TRBJ2-2)
CASSLSVVDGRMFF

SEQ ID NO: 72279 - protein, 14 aa, Homo sapiens
  CDR3 for alpha chain variable domain of TCR clone 36140 (TRAV19, TRAJ6)
CALSATGGSYIPTF

SEQ ID NO: 72280 - protein, 14 aa, Homo sapiens
  CDR3 for beta chain variable domain of TCR clone 36140 (TRBV7-2, TRBJ2-2)
CASRGQGAAGELFF

SEQ ID NO: 72281 - protein, 16 aa, Homo sapiens
  CDR3 for alpha chain variable domain of TCR clone 36141 (TRAV30, TRAJ24)
CGTEIVDADSWGKFKF

SEQ ID NO: 72282 - protein, 12 aa, Homo sapiens
  CDR3 for beta chain variable domain of TCR clone 36141 (TRBV11-2, TRBJ2-2)
CASSLPTGELFF

SEQ ID NO: 72283 - protein, 13 aa, Homo sapiens
  CDR3 for alpha chain variable domain of TCR clone 36142 (TRAV12-3, TRAJ35)
CAMAIGFGNVMHC

SEQ ID NO: 72284 - protein, 15 aa, Homo sapiens
  CDR3 for beta chain variable domain of TCR clone 36142 (TRBV20-1, TRBJ2-1)
CSARGSGTYYNEQFF

SEQ ID NO: 72285 - protein, 11 aa, Homo sapiens
  CDR3 for alpha chain variable domain of TCR clone 36143 (TRAV23/DV6, TRAJ49)
CAANTGNQFYF

SEQ ID NO: 72286 - protein, 12 aa, Homo sapiens
  CDR3 for beta chain variable domain of TCR clone 36143 (TRBV6-3, TRBJ2-7)
CASSEPGFEQYF

SEQ ID NO: 72287 - protein, 17 aa, Homo sapiens
  CDR3 for alpha chain variable domain of TCR clone 36144 (TRAV4, TRAJ18)
CLVGERSVGSTLGRLYF

SEQ ID NO: 72288 - protein, 16 aa, Homo sapiens
  CDR3 for beta chain variable domain of TCR clone 36144 (TRBV19, TRBJ2-1)
CASSKAGPSSYDEQFF

SEQ ID NO: 72289 - protein, 14 aa, Homo sapiens
  CDR3 for alpha chain variable domain of TCR clone 36145 (TRAV17, TRAJ11)
CATDTGRGYSTLTF

SEQ ID NO: 72290 - protein, 13 aa, Homo sapiens
  CDR3 for beta chain variable domain of TCR clone 36145 (TRBV19, TRBJ2-5)
CASRDSRRETQYF

SEQ ID NO: 72291 - protein, 16 aa, Homo sapiens
  CDR3 for alpha chain variable domain of TCR clone 36146 (TRAV4, TRAJ9)
CLVGDPNRPGGFTTIF

SEQ ID NO: 72292 - protein, 16 aa, Homo sapiens
  CDR3 for beta chain variable domain of TCR clone 36146 (TRBV28, TRBJ1-4)
CASSPPYRGRSEKLFF

SEQ ID NO: 72293 - protein, 13 aa, Homo sapiens
  CDR3 for alpha chain variable domain of TCR clone 36147 (TRAV13-1, TRAJ21)
CAASIYNFNKFYF

SEQ ID NO: 72294 - protein, 12 aa, Homo sapiens
  CDR3 for beta chain variable domain of TCR clone 36147 (TRBV11-2, TRBJ2-1)
CASSPGNNEQFF

SEQ ID NO: 72295 - protein, 16 aa, Homo sapiens
  CDR3 for alpha chain variable domain of TCR clone 36148 (TRAV3, TRAJ28)
CAVPPRSGAGSYQLTF

SEQ ID NO: 72296 - protein, 13 aa, Homo sapiens
  CDR3 for beta chain variable domain of TCR clone 36148 (TRBV12-4, TRBJ2-5)
CASRLAVQETQYF

SEQ ID NO: 72297 - protein, 15 aa, Homo sapiens
  CDR3 for alpha chain variable domain of TCR clone 36149 (TRAV16, TRAJ17)
CALSGNKAAGNKLTF

SEQ ID NO: 72298 - protein, 15 aa, Homo sapiens
  CDR3 for beta chain variable domain of TCR clone 36149 (TRBV20-1, TRBJ2-7)
CSARDRVSGMDEQYF

SEQ ID NO: 72299 - protein, 17 aa, Homo sapiens
  CDR3 for alpha chain variable domain of TCR clone 36150 (TRAV29/DV5, TRAJ10)
CSVLLGRATGGGNKLTF

SEQ ID NO: 72300 - protein, 12 aa, Homo sapiens
  CDR3 for beta chain variable domain of TCR clone 36150 (TRBV5-1, TRBJ1-2)
CASSQDTYGYTF

SEQ ID NO: 72301 - protein, 12 aa, Homo sapiens
  CDR3 for alpha chain variable domain of TCR clone 36151 (TRAV12-3, TRAJ17)
CAMTLTGNKLTF

SEQ ID NO: 72302 - protein, 15 aa, Homo sapiens
  CDR3 for beta chain variable domain of TCR clone 36151 (TRBV7-2, TRBJ2-3)
CASSSTGLETDTQYF

SEQ ID NO: 72303 - protein, 14 aa, Homo sapiens
  CDR3 for alpha chain variable domain of TCR clone 36152 (TRAV21, TRAJ35)
CAVMPIGFGNVLHC

SEQ ID NO: 72304 - protein, 12 aa, Homo sapiens
  CDR3 for beta chain variable domain of TCR clone 36152 (TRBV11-2, TRBJ2-2)
CASSLGGGELFF

SEQ ID NO: 72305 - protein, 14 aa, Homo sapiens
  CDR3 for alpha chain variable domain of TCR clone 36153 (TRAV21, TRAJ15)
CAGSLNQAGTALIF

SEQ ID NO: 72306 - protein, 11 aa, Homo sapiens
  CDR3 for beta chain variable domain of TCR clone 36153 (TRBV20-1, TRBJ2-7)
CSARTSYEQYF

SEQ ID NO: 72307 - protein, 11 aa, Homo sapiens
  CDR3 for alpha chain variable domain of TCR clone 36154 (TRAV3, TRAJ17)
PRGAAGNKLTF

SEQ ID NO: 72308 - protein, 16 aa, Homo sapiens
  CDR3 for beta chain variable domain of TCR clone 36154 (TRBV7-6, TRBJ2-1)
CASSAPRPSSYNEQFF

SEQ ID NO: 72309 - protein, 14 aa, Homo sapiens
  CDR3 for alpha chain variable domain of TCR clone 36155 (TRAV2, TRAJ37)
CAVDFTSNTGKLIF

SEQ ID NO: 72310 - protein, 15 aa, Homo sapiens
  CDR3 for beta chain variable domain of TCR clone 36155 (TRBV20-1, TRBJ1-1)
CSASRGVTENTEAFF

SEQ ID NO: 72311 - protein, 14 aa, Homo sapiens
  CDR3 for alpha chain variable domain of TCR clone 36156 (TRAV13-1, TRAJ44)
CAAKATGTASKLIF

SEQ ID NO: 72312 - protein, 17 aa, Homo sapiens
  CDR3 for beta chain variable domain of TCR clone 36156 (TRBV7-3, TRBJ2-3)
RASSLMKRMRGADTQYF

SEQ ID NO: 72313 - protein, 12 aa, Homo sapiens
  CDR3 for alpha chain variable domain of TCR clone 36157 (TRAV12-1, TRAJ34)
CVVAGATDKLVF

SEQ ID NO: 72314 - protein, 12 aa, Homo sapiens
  CDR3 for beta chain variable domain of TCR clone 36157 (TRBV7-9, TRBJ1-1)
CASSLVRGEAFF

SEQ ID NO: 72315 - protein, 14 aa, Homo sapiens
  CDR3 for alpha chain variable domain of TCR clone 36158 (TRAV13-1, TRAJ44)
CAAKATGTASKLTF

SEQ ID NO: 72316 - protein, 15 aa, Homo sapiens
  CDR3 for beta chain variable domain of TCR clone 36158 (TRBV7-9, TRBJ1-6)
CASSSPGRGNSPLHF

SEQ ID NO: 72317 - protein, 17 aa, Homo sapiens
  CDR3 for alpha chain variable domain of TCR clone 36159 (TRAV3, TRAJ42)
CAVRDRDYGGSQGNLIF

SEQ ID NO: 72318 - protein, 15 aa, Homo sapiens
  CDR3 for beta chain variable domain of TCR clone 36159 (TRBV7-9, TRBJ1-6)
CASSSPGRGNSPLHF

SEQ ID NO: 72319 - protein, 13 aa, Homo sapiens
  CDR3 for alpha chain variable domain of TCR clone 36160 (TRAV3, TRAJ15)
CAVRDLAGTALIF

SEQ ID NO: 72320 - protein, 15 aa, Homo sapiens
  CDR3 for beta chain variable domain of TCR clone 36160 (TRBV11-1, TRBJ2-7)
CASSLNYGASYEQYF

SEQ ID NO: 72321 - protein, 15 aa, Homo sapiens
  CDR3 for alpha chain variable domain of TCR clone 36161 (TRAV35, TRAJ40)
CAEQLGTSGTYKYIF

SEQ ID NO: 72322 - protein, 14 aa, Homo sapiens
  CDR3 for beta chain variable domain of TCR clone 36161 (TRBV7-3, TRBJ2-1)
CASSLAGGTNEQFF

SEQ ID NO: 72323 - protein, 20 aa, Homo sapiens
  CDR3 for alpha chain variable domain of TCR clone 36162 (TRAV25, TRAJ21)
TATQTTDVGTYPLSSNKFYF

SEQ ID NO: 72324 - protein, 14 aa, Homo sapiens
  CDR3 for beta chain variable domain of TCR clone 36162 (TRBV6-1, TRBJ2-1)
CASAKDGFYNEQFF

SEQ ID NO: 72325 - protein, 15 aa, Homo sapiens
  CDR3 for alpha chain variable domain of TCR clone 36163 (TRAV3, TRAJ5)
CDVRDRKTGRRALTF

SEQ ID NO: 72326 - protein, 15 aa, Homo sapiens
  CDR3 for beta chain variable domain of TCR clone 36163 (TRBV7-8, TRBJ2-1)
CASSLADSLYNEQFF

SEQ ID NO: 72327 - protein, 14 aa, Homo sapiens
  CDR3 for alpha chain variable domain of TCR clone 36164 (TRAV8-3, TRAJ39)
CAVGANNAGNMLTF

SEQ ID NO: 72328 - protein, 15 aa, Homo sapiens
  CDR3 for beta chain variable domain of TCR clone 36164 (TRBV4-3, TRBJ1-1)
CASSQGLGRGTEAFF

SEQ ID NO: 72329 - protein, 14 aa, Homo sapiens
  CDR3 for alpha chain variable domain of TCR clone 36165 (TRAV1-2, TRAJ16)
CAVNRFSDGQKLLF

SEQ ID NO: 72330 - protein, 15 aa, Homo sapiens
  CDR3 for beta chain variable domain of TCR clone 36165 (TRBV4-1, TRBJ2-7)
CASSQNTGRLYEQYF

SEQ ID NO: 72331 - protein, 14 aa, Homo sapiens
  CDR3 for alpha chain variable domain of TCR clone 36166 (TRAV20, TRAJ56)
CAVQFGGANSKLTF

SEQ ID NO: 72332 - protein, 14 aa, Homo sapiens
  CDR3 for beta chain variable domain of TCR clone 36166 (TRBV20-1, TRBJ2-7)
CSAKRGRSSYEQCF

SEQ ID NO: 72333 - protein, 13 aa, Homo sapiens
  CDR3 for alpha chain variable domain of TCR clone 36167 (TRAV1-2, TRAJ12)
CAVSMDSSYKLIF

SEQ ID NO: 72334 - protein, 11 aa, Homo sapiens
  CDR3 for beta chain variable domain of TCR clone 36167 (TRBV6-3, TRBJ2-3)
CATGQADTQYF

SEQ ID NO: 72335 - protein, 12 aa, Homo sapiens
  CDR3 for alpha chain variable domain of TCR clone 36168 (TRAV12-1, TRAJ23)
CVVNIPGGKLIF

SEQ ID NO: 72336 - protein, 15 aa, Homo sapiens
  CDR3 for beta chain variable domain of TCR clone 36168 (TRBV7-2, TRBJ2-7)
CASSLVSSGPYVQYF

SEQ ID NO: 72337 - protein, 23 aa, Homo sapiens
  CDR3 for alpha chain variable domain of TCR clone 36169 (TRAV36/DV7, TRAJ50)
CAVEPENLLRQGDIWARDKLISH

SEQ ID NO: 72338 - protein, 13 aa, Homo sapiens
  CDR3 for beta chain variable domain of TCR clone 36169 (TRBV7-2, TRBJ2-7)
CASSSPSGSEQYF

SEQ ID NO: 72339 - protein, 13 aa, Homo sapiens
  CDR3 for alpha chain variable domain of TCR clone 36170 (TRAV20, TRAJ37)
CAGCSSNTGKLIF

SEQ ID NO: 72340 - protein, 12 aa, Homo sapiens
  CDR3 for beta chain variable domain of TCR clone 36170 (TRBV11-2, TRBJ2-2)
CASSLGGGELFF

SEQ ID NO: 72341 - protein, 14 aa, Homo sapiens
  CDR3 for alpha chain variable domain of TCR clone 36171 (TRAV16, TRAJ54)
CALSGVQGAQELVF

SEQ ID NO: 72342 - protein, 15 aa, Homo sapiens
  CDR3 for beta chain variable domain of TCR clone 36171 (TRBV18, TRBJ2-2)
CASSTSGLHTGELFF

SEQ ID NO: 72343 - protein, 14 aa, Homo sapiens
  CDR3 for alpha chain variable domain of TCR clone 36172 (TRAV17, TRAJ31)
CATVLRNNNARLML

SEQ ID NO: 72344 - protein, 14 aa, Homo sapiens
  CDR3 for beta chain variable domain of TCR clone 36172 (TRBV12-4, TRBJ2-5)
CASSLWQKQETQYF

SEQ ID NO: 72345 - protein, 14 aa, Homo sapiens
  CDR3 for alpha chain variable domain of TCR clone 36173 (TRAV8-1, TRAJ5)
CAVSMDTGRRALTF

SEQ ID NO: 72346 - protein, 15 aa, Homo sapiens
  CDR3 for beta chain variable domain of TCR clone 36173 (TRBV19, TRBJ2-4)
CASRGPRGGENIQYF

SEQ ID NO: 72347 - protein, 16 aa, Homo sapiens
  CDR3 for alpha chain variable domain of TCR clone 36174 (TRAV3, TRAJ18)
CAVRDGKGSTLGRLYF

SEQ ID NO: 72348 - protein, 15 aa, Homo sapiens
  CDR3 for beta chain variable domain of TCR clone 36174 (TRBV7-9, TRBJ1-6)
CASSSPGRGNSPLHF

SEQ ID NO: 72349 - protein, 12 aa, Homo sapiens
  CDR3 for alpha chain variable domain of TCR clone 36175 (TRAV12-1, TRAJ40)
CVVYSGTYKYIF

SEQ ID NO: 72350 - protein, 18 aa, Homo sapiens
  CDR3 for beta chain variable domain of TCR clone 36175 (TRBV11-2, TRBJ2-3)
CASSLGGASRGAPNTHYF

SEQ ID NO: 72351 - protein, 15 aa, Homo sapiens
  CDR3 for alpha chain variable domain of TCR clone 36176 (TRAV26-1, TRAJ29)
CIVRVEGSGNTPLVF

SEQ ID NO: 72352 - protein, 15 aa, Homo sapiens
  CDR3 for beta chain variable domain of TCR clone 36176 (TRBV28, TRBJ1-3)
CASSMGWASGNTIYF

SEQ ID NO: 72353 - protein, 11 aa, Homo sapiens
  CDR3 for alpha chain variable domain of TCR clone 36177 (TRAV2, TRAJ4)
CAAGGYNKLIF

SEQ ID NO: 72354 - protein, 13 aa, Homo sapiens
  CDR3 for beta chain variable domain of TCR clone 36177 (TRBV20-1, TRBJ1-1)
CSARVGGNTGAFF

SEQ ID NO: 72355 - protein, 13 aa, Homo sapiens
  CDR3 for alpha chain variable domain of TCR clone 36178 (TRAV1-2, TRAJ9)
CAALNTGGFKTIF

SEQ ID NO: 72356 - protein, 13 aa, Homo sapiens
  CDR3 for beta chain variable domain of TCR clone 36178 (TRBV19, TRBJ1-2)
SASSVPGQDGYTF

SEQ ID NO: 72357 - protein, 10 aa, Homo sapiens
  CDR3 for alpha chain variable domain of TCR clone 36179 (TRAV13-1, TRAJ52)
CAAKNPMLVV

SEQ ID NO: 72358 - protein, 15 aa, Homo sapiens
  CDR3 for beta chain variable domain of TCR clone 36179 (TRBV6-1, TRBJ2-3)
CASSERGGITDTQYF

SEQ ID NO: 72359 - protein, 16 aa, Homo sapiens
  CDR3 for alpha chain variable domain of TCR clone 36180 (TRAV12-3, TRAJ53)
CAMSPGSGDSNYKLTF

SEQ ID NO: 72360 - protein, 17 aa, Homo sapiens
  CDR3 for beta chain variable domain of TCR clone 36180 (TRBV28, TRBJ2-5)
CASSTPEGDALQETQYF

SEQ ID NO: 72361 - protein, 16 aa, Homo sapiens
  CDR3 for alpha chain variable domain of TCR clone 36181 (TRAV21, TRAJ52)
CAVTNAGGASYGKLTF

SEQ ID NO: 72362 - protein, 17 aa, Homo sapiens
  CDR3 for beta chain variable domain of TCR clone 36181 (TRBV28, TRBJ2-5)
CASSRQGGLAGAETQYF

SEQ ID NO: 72363 - protein, 13 aa, Homo sapiens
  CDR3 for alpha chain variable domain of TCR clone 36182 (TRAV21, TRAJ27)
CAARPGNAGKSTF

SEQ ID NO: 72364 - protein, 14 aa, Homo sapiens
  CDR3 for beta chain variable domain of TCR clone 36182 (TRBV7-6, TRBJ2-3)
SASSLGTVTDTQYF

SEQ ID NO: 72365 - protein, 12 aa, Homo sapiens
  CDR3 for alpha chain variable domain of TCR clone 36183 (TRAV13-1, TRAJ21)
CAAKEGFNKFYF

SEQ ID NO: 72366 - protein, 12 aa, Homo sapiens
  CDR3 for beta chain variable domain of TCR clone 36183 (TRBV7-3, TRBJ1-3)
CASSLGGNAIYF

SEQ ID NO: 72367 - protein, 14 aa, Homo sapiens
  CDR3 for alpha chain variable domain of TCR clone 36184 (TRAV8-3, TRAJ4)
CAVGAACGYNKLIF

SEQ ID NO: 72368 - protein, 15 aa, Homo sapiens
  CDR3 for beta chain variable domain of TCR clone 36184 (TRBV6-5, TRBJ2-1)
CASSYDAGAGNEQFF

SEQ ID NO: 72369 - protein, 19 aa, Homo sapiens
  CDR3 for alpha chain variable domain of TCR clone 36185 (TRAV38-1, TRAJ53)
CAFMKHGLESGGSNYKLTF

SEQ ID NO: 72370 - protein, 13 aa, Homo sapiens
  CDR3 for beta chain variable domain of TCR clone 36185 (TRBV19, TRBJ2-7)
CASSPRQSYEQYL

SEQ ID NO: 72371 - protein, 16 aa, Homo sapiens
  CDR3 for alpha chain variable domain of TCR clone 36186 (TRAV30, TRAJ24)
CGTEIVDADSWGRFQF

SEQ ID NO: 72372 - protein, 14 aa, Homo sapiens
  CDR3 for beta chain variable domain of TCR clone 36186 (TRBV20-1, TRBJ1-1)
CSAQTRIGGTEAFF

SEQ ID NO: 72373 - protein, 12 aa, Homo sapiens
  CDR3 for alpha chain variable domain of TCR clone 36187 (TRAV17, TRAJ4)
CATDGGYNKLIL

SEQ ID NO: 72374 - protein, 13 aa, Homo sapiens
  CDR3 for beta chain variable domain of TCR clone 36187 (TRBV29-1, TRBJ2-2)
CSTTGVNTGELFF

SEQ ID NO: 72375 - protein, 11 aa, Homo sapiens
  CDR3 for alpha chain variable domain of TCR clone 36188 (TRAV1-2, TRAJ40)
CAFPGTYKYIF

SEQ ID NO: 72376 - protein, 16 aa, Homo sapiens
  CDR3 for beta chain variable domain of TCR clone 36188 (TRBV29-1, TRBJ2-7)
CSVEVVGTSGSYEQYF

SEQ ID NO: 72377 - protein, 16 aa, Homo sapiens
  CDR3 for alpha chain variable domain of TCR clone 36189 (TRAV16, TRAJ4)
CARSRMFSGGYNKLIF

SEQ ID NO: 72378 - protein, 16 aa, Homo sapiens
  CDR3 for beta chain variable domain of TCR clone 36189 (TRBV24-1, TRBJ2-3)
CATSDPGAGATDTQYF

SEQ ID NO: 72379 - protein, 12 aa, Homo sapiens
  CDR3 for alpha chain variable domain of TCR clone 36190 (TRAV30, TRAJ43)
CGTEERGNDMRF

SEQ ID NO: 72380 - protein, 13 aa, Homo sapiens
  CDR3 for beta chain variable domain of TCR clone 36190 (TRBV27, TRBJ2-7)
CVSSFSQGYEQYF

SEQ ID NO: 72381 - protein, 14 aa, Homo sapiens
  CDR3 for alpha chain variable domain of TCR clone 36191 (TRAV12-1, TRAJ30)
CVVNIGNRDDKIIF

SEQ ID NO: 72382 - protein, 14 aa, Homo sapiens
  CDR3 for beta chain variable domain of TCR clone 36191 (TRBV7-9, TRBJ2-5)
CASSPRPSGETQYL

SEQ ID NO: 72383 - protein, 11 aa, Homo sapiens
  CDR3 for alpha chain variable domain of TCR clone 36192 (TRAV21, TRAJ34)
CAVTNTDKLTF

SEQ ID NO: 72384 - protein, 16 aa, Homo sapiens
  CDR3 for beta chain variable domain of TCR clone 36192 (TRBV18, TRBJ1-1)
CASSPGVGGRGGEAFF

SEQ ID NO: 72385 - protein, 14 aa, Homo sapiens
  CDR3 for alpha chain variable domain of TCR clone 36193 (TRAV9-2, TRAJ39)
CALCIYNAGNMLTF

SEQ ID NO: 72386 - protein, 13 aa, Homo sapiens
  CDR3 for beta chain variable domain of TCR clone 36193 (TRBV11-3, TRBJ1-1)
CASSRQPNTEAFF

SEQ ID NO: 72387 - protein, 15 aa, Homo sapiens
  CDR3 for alpha chain variable domain of TCR clone 36194 (TRAV17, TRAJ57)
CATGPSQGGSEKLVF

SEQ ID NO: 72388 - protein, 13 aa, Homo sapiens
  CDR3 for beta chain variable domain of TCR clone 36194 (TRBV19, TRBJ2-7)
CASSIDRTYEQYF

SEQ ID NO: 72389 - protein, 14 aa, Homo sapiens
  CDR3 for alpha chain variable domain of TCR clone 36195 (TRAV17, TRAJ57)
CATDTQGGSEKLVF

SEQ ID NO: 72390 - protein, 18 aa, Homo sapiens
  CDR3 for beta chain variable domain of TCR clone 36195 (TRBV6-6, TRBJ1-3)
CASSYSKWDSISGNTIYF

SEQ ID NO: 72391 - protein, 14 aa, Homo sapiens
  CDR3 for alpha chain variable domain of TCR clone 36196 (TRAV22, TRAJ54)
CAVFIIQGAQKLVF

SEQ ID NO: 72392 - protein, 19 aa, Homo sapiens
  CDR3 for beta chain variable domain of TCR clone 36196 (TRBV5-8, TRBJ2-6)
CASSFHRGRAHSGANVLTF

SEQ ID NO: 72393 - protein, 10 aa, Homo sapiens
  CDR3 for alpha chain variable domain of TCR clone 36197 (TRAV1-2, TRAJ20)
CACNDYRLSF

SEQ ID NO: 72394 - protein, 16 aa, Homo sapiens
  CDR3 for beta chain variable domain of TCR clone 36197 (TRBV20-1, TRBJ2-1)
CSARDLKQGMNNEQFF

SEQ ID NO: 72395 - protein, 15 aa, Homo sapiens
  CDR3 for alpha chain variable domain of TCR clone 36198 (TRAV12-1, TRAJ44)
CVADLPTGTASKRTF

SEQ ID NO: 72396 - protein, 13 aa, Homo sapiens
  CDR3 for beta chain variable domain of TCR clone 36198 (TRBV6-5, TRBJ2-5)
CASSPQGGETQYF

SEQ ID NO: 72397 - protein, 18 aa, Homo sapiens
  CDR3 for alpha chain variable domain of TCR clone 36199 (TRAV21, TRAJ52)
CAVRPSPAGGTSYGKLTF

SEQ ID NO: 72398 - protein, 15 aa, Homo sapiens
  CDR3 for beta chain variable domain of TCR clone 36199 (TRBV7-3, TRBJ2-1)
CASSPTGGGEVEQFF

SEQ ID NO: 72399 - protein, 15 aa, Homo sapiens
  CDR3 for alpha chain variable domain of TCR clone 36200 (TRAV17, TRAJ57)
CATGPSQGGSEKLVF

SEQ ID NO: 72400 - protein, 16 aa, Homo sapiens
  CDR3 for beta chain variable domain of TCR clone 36200 (TRBV12-4, TRBJ1-5)
CASSRPVGGSNHPQHF

SEQ ID NO: 72401 - protein, 12 aa, Homo sapiens
  CDR3 for alpha chain variable domain of TCR clone 36201 (TRAV12-1, TRAJ40)
CVVYSGTYKYIF

SEQ ID NO: 72402 - protein, 18 aa, Homo sapiens
  CDR3 for beta chain variable domain of TCR clone 36201 (TRBV11-2, TRBJ2-3)
CASSLGGASRGAPNTQNF

SEQ ID NO: 72403 - protein, 14 aa, Homo sapiens
  CDR3 for alpha chain variable domain of TCR clone 36202 (TRAV4, TRAJ26)
CLVGPHNYGQNFVF

SEQ ID NO: 72404 - protein, 17 aa, Homo sapiens
  CDR3 for beta chain variable domain of TCR clone 36202 (TRBV24-1, TRBJ2-1)
CATSDVSTSGTYNEQLF

SEQ ID NO: 72405 - protein, 15 aa, Homo sapiens
  CDR3 for alpha chain variable domain of TCR clone 36203 (TRAV8-3, TRAJ45)
CASSYSGGGAHGLTF

SEQ ID NO: 72406 - protein, 13 aa, Homo sapiens
  CDR3 for beta chain variable domain of TCR clone 36203 (TRBV10-3, TRBJ2-7)
CASKLAVNYEQYF

SEQ ID NO: 72407 - protein, 11 aa, Homo sapiens
  CDR3 for alpha chain variable domain of TCR clone 36204 (TRAV21, TRAJ34)
CAVTNTDKLIF

SEQ ID NO: 72408 - protein, 17 aa, Homo sapiens
  CDR3 for beta chain variable domain of TCR clone 36204 (TRBV20-1, TRBJ2-1)
CSARSPSRGPPTMSSSS

SEQ ID NO: 72409 - protein, 14 aa, Homo sapiens
  CDR3 for alpha chain variable domain of TCR clone 36205 (TRAV1-2, TRAJ8)
CAVREDTGFQKLVF

SEQ ID NO: 72410 - protein, 15 aa, Homo sapiens
  CDR3 for beta chain variable domain of TCR clone 36205 (TRBV28, TRBJ2-3)
CASSPDRQGANTQYF

SEQ ID NO: 72411 - protein, 14 aa, Homo sapiens
  CDR3 for alpha chain variable domain of TCR clone 36206 (TRAV12-2, TRAJ17)
FAALFKAAGNKLTF

SEQ ID NO: 72412 - protein, 16 aa, Homo sapiens
  CDR3 for beta chain variable domain of TCR clone 36206 (TRBV20-1, TRBJ2-2)
CSASASGIPGAGELFF

SEQ ID NO: 72413 - protein, 16 aa, Homo sapiens
  CDR3 for alpha chain variable domain of TCR clone 36207 (TRAV30, TRAJ24)
CGTEIVDADSWGKSQF

SEQ ID NO: 72414 - protein, 14 aa, Homo sapiens
  CDR3 for beta chain variable domain of TCR clone 36207 (TRBV7-2, TRBJ2-7)
CASSPKTSFYEQYF

SEQ ID NO: 72415 - protein, 17 aa, Homo sapiens
  CDR3 for alpha chain variable domain of TCR clone 36208 (TRAV12-3, TRAJ6)
CAMSARGGAGGSYIPTF

SEQ ID NO: 72416 - protein, 12 aa, Homo sapiens
  CDR3 for beta chain variable domain of TCR clone 36208 (TRBV12-4, TRBJ2-3)
CASSTLPDTQYF

SEQ ID NO: 72417 - protein, 14 aa, Homo sapiens
  CDR3 for alpha chain variable domain of TCR clone 36209 (TRAV2, TRAJ12)
CAVDAMDSSYKLIF

SEQ ID NO: 72418 - protein, 13 aa, Homo sapiens
  CDR3 for beta chain variable domain of TCR clone 36209 (TRBV19, TRBJ2-1)
RASKVGAGGEQFF

SEQ ID NO: 72419 - protein, 15 aa, Homo sapiens
  CDR3 for alpha chain variable domain of TCR clone 36210 (TRAV12-1, TRAJ42)
CVVTRDGGSQGNLIF

SEQ ID NO: 72420 - protein, 14 aa, Homo sapiens
  CDR3 for beta chain variable domain of TCR clone 36210 (TRBV11-2, TRBJ2-3)
CASSLGGEANTQYF

SEQ ID NO: 72421 - protein, 15 aa, Homo sapiens
  CDR3 for alpha chain variable domain of TCR clone 36211 (TRAV8-3, TRAJ23)
CAVGDRYNQGGKLIL

SEQ ID NO: 72422 - protein, 17 aa, Homo sapiens
  CDR3 for beta chain variable domain of TCR clone 36211 (TRBV4-1, TRBJ1-4)
CASSQEGPRGVEEKLFF

SEQ ID NO: 72423 - protein, 14 aa, Homo sapiens
  CDR3 for alpha chain variable domain of TCR clone 36212 (TRAV1-2, TRAJ16)
CAVNRFSDGKKLLF

SEQ ID NO: 72424 - protein, 11 aa, Homo sapiens
  CDR3 for beta chain variable domain of TCR clone 36212 (TRBV29-1, TRBJ2-5)
CSEDRTGTQYF

SEQ ID NO: 72425 - protein, 20 aa, Homo sapiens
  CDR3 for alpha chain variable domain of TCR clone 36213 (TRAV1-1, TRAJ4)
CLLLLRCEGFLSGGYSKLIF

SEQ ID NO: 72426 - protein, 16 aa, Homo sapiens
  CDR3 for beta chain variable domain of TCR clone 36213 (TRBV28, TRBJ1-4)
CASSPPYRGRSEKLFF

SEQ ID NO: 72427 - protein, 23 aa, Homo sapiens
  CDR3 for alpha chain variable domain of TCR clone 36214 (TRAV13-2, TRAJ6)
CAEEVHREEATYLHLEEEPALLF

SEQ ID NO: 72428 - protein, 13 aa, Homo sapiens
  CDR3 for beta chain variable domain of TCR clone 36214 (TRBV9, TRBJ2-7)
CASSVAEYYEQYF

SEQ ID NO: 72429 - protein, 13 aa, Homo sapiens
  CDR3 for alpha chain variable domain of TCR clone 36215 (TRAV2, TRAJ24)
CAVSTDSWGKLQF

SEQ ID NO: 72430 - protein, 14 aa, Homo sapiens
  CDR3 for beta chain variable domain of TCR clone 36215 (TRBV13, TRBJ2-5)
CASSLGAAQETQYF

SEQ ID NO: 72431 - protein, 16 aa, Homo sapiens
  CDR3 for alpha chain variable domain of TCR clone 36216 (TRAV27, TRAJ52)
CAGAPAGGTSYGKLTF

SEQ ID NO: 72432 - protein, 12 aa, Homo sapiens
  CDR3 for beta chain variable domain of TCR clone 36216 (TRBV27, TRBJ2-1)
CASRGFYNEQSF

SEQ ID NO: 72433 - protein, 14 aa, Homo sapiens
  CDR3 for alpha chain variable domain of TCR clone 36217 (TRAV1-2, TRAJ16)
CAVNRFSDGQKLLF

SEQ ID NO: 72434 - protein, 15 aa, Homo sapiens
  CDR3 for beta chain variable domain of TCR clone 36217 (TRBV9, TRBJ1-6)
CASSVAGTEDSPLHF

SEQ ID NO: 72435 - protein, 15 aa, Homo sapiens
  CDR3 for alpha chain variable domain of TCR clone 36218 (TRAV12-2, TRAJ53)
CAVNGGGGSNYKLTF

SEQ ID NO: 72436 - protein, 14 aa, Homo sapiens
  CDR3 for beta chain variable domain of TCR clone 36218 (TRBV19, TRBJ2-2)
CASSTLHRSGELLF

SEQ ID NO: 72437 - protein, 11 aa, Homo sapiens
  CDR3 for alpha chain variable domain of TCR clone 36219 (TRAV27, TRAJ40)
SLTSGTYEYIF

SEQ ID NO: 72438 - protein, 12 aa, Homo sapiens
  CDR3 for beta chain variable domain of TCR clone 36219 (TRBV18, TRBJ2-3)
CQLNQNTDTQYF

SEQ ID NO: 72439 - protein, 12 aa, Homo sapiens
  CDR3 for alpha chain variable domain of TCR clone 36220 (TRAV41, TRAJ58)
CAVETSGSRLTF

SEQ ID NO: 72440 - protein, 15 aa, Homo sapiens
  CDR3 for beta chain variable domain of TCR clone 36220 (TRBV29-1, TRBJ2-6)
CSVGDRGSGANDLTF

SEQ ID NO: 72441 - protein, 16 aa, Homo sapiens
  CDR3 for alpha chain variable domain of TCR clone 36221 (TRAV3, TRAJ37)
CAVRGKGSGNTGKLIF

SEQ ID NO: 72442 - protein, 13 aa, Homo sapiens
  CDR3 for beta chain variable domain of TCR clone 36221 (TRBV19, TRBJ1-2)
CASSVPGQDGYTL

SEQ ID NO: 72443 - protein, 16 aa, Homo sapiens
  CDR3 for alpha chain variable domain of TCR clone 36222 (TRAV38-1, TRAJ37)
CAFKGDGSSNTGKLTF

SEQ ID NO: 72444 - protein, 13 aa, Homo sapiens
  CDR3 for beta chain variable domain of TCR clone 36222 (TRBV12-4, TRBJ2-5)
CASSLFRRETQYF

SEQ ID NO: 72445 - protein, 14 aa, Homo sapiens
  CDR3 for alpha chain variable domain of TCR clone 36223 (TRAV12-3, TRAJ5)
CAMSTYTGRRALTF

SEQ ID NO: 72446 - protein, 13 aa, Homo sapiens
  CDR3 for beta chain variable domain of TCR clone 36223 (TRBV28, TRBJ2-3)
CASSTGGGDTPYF

SEQ ID NO: 72447 - protein, 13 aa, Homo sapiens
  CDR3 for alpha chain variable domain of TCR clone 36224 (TRAV12-2, TRAJ20)
CAVYPSNDCKLSF

SEQ ID NO: 72448 - protein, 15 aa, Homo sapiens
  CDR3 for beta chain variable domain of TCR clone 36224 (TRBV6-1, TRBJ2-5)
CASSEGWGIQETQYF

SEQ ID NO: 72449 - protein, 12 aa, Homo sapiens
  CDR3 for alpha chain variable domain of TCR clone 36225 (TRAV13-1, TRAJ15)
CAASQAGTALIF

SEQ ID NO: 72450 - protein, 14 aa, Homo sapiens
  CDR3 for beta chain variable domain of TCR clone 36225 (TRBV19, TRBJ2-2)
CASSTLHRSGEMFF

SEQ ID NO: 72451 - protein, 10 aa, Homo sapiens
  CDR3 for alpha chain variable domain of TCR clone 36226 (TRAV3, TRAJ30)
CAVGEIEIIF

SEQ ID NO: 72452 - protein, 14 aa, Homo sapiens
  CDR3 for beta chain variable domain of TCR clone 36226 (TRBV15, TRBJ2-3)
CATRSGTSTDTQYF

SEQ ID NO: 72453 - protein, 13 aa, Homo sapiens
  CDR3 for alpha chain variable domain of TCR clone 36227 (TRAV20, TRAJ20)
CAVQAGSGYKLSL

SEQ ID NO: 72454 - protein, 17 aa, Homo sapiens
  CDR3 for beta chain variable domain of TCR clone 36227 (TRBV3-1, TRBJ2-3)
CCVFLCQQPRGGDTQYF

SEQ ID NO: 72455 - protein, 14 aa, Homo sapiens
  CDR3 for alpha chain variable domain of TCR clone 36228 (TRAV12-3, TRAJ57)
CEMSAWGGSEKLVF

SEQ ID NO: 72456 - protein, 14 aa, Homo sapiens
  CDR3 for beta chain variable domain of TCR clone 36228 (TRBV7-8, TRBJ2-7)
CASSPRDRVYEQYF

SEQ ID NO: 72457 - protein, 13 aa, Homo sapiens
  CDR3 for alpha chain variable domain of TCR clone 36229 (TRAV12-1, TRAJ40)
CVVPTSGTYKYIF

SEQ ID NO: 72458 - protein, 18 aa, Homo sapiens
  CDR3 for beta chain variable domain of TCR clone 36229 (TRBV7-6, TRBJ2-1)
CAGSPRTSGMSSYNEQFF

SEQ ID NO: 72459 - protein, 17 aa, Homo sapiens
  CDR3 for alpha chain variable domain of TCR clone 36230 (TRAV38-1, TRAJ28)
CALMKPTSGAGSYQLTF

SEQ ID NO: 72460 - protein, 15 aa, Homo sapiens
  CDR3 for beta chain variable domain of TCR clone 36230 (TRBV5-1, TRBJ2-4)
CASSLGGGGSYIQYF

SEQ ID NO: 72461 - protein, 12 aa, Homo sapiens
  CDR3 for alpha chain variable domain of TCR clone 36231 (TRAV2, TRAJ9)
CAVGAGGFKSIF

SEQ ID NO: 72462 - protein, 16 aa, Homo sapiens
  CDR3 for beta chain variable domain of TCR clone 36231 (TRBV13, TRBJ2-2)
CASSPRTGEHTGELFF

SEQ ID NO: 72463 - protein, 11 aa, Homo sapiens
  CDR3 for alpha chain variable domain of TCR clone 36232 (TRAV2, TRAJ13)
CASGGYQKVTF

SEQ ID NO: 72464 - protein, 15 aa, Homo sapiens
  CDR3 for beta chain variable domain of TCR clone 36232 (TRBV19, TRBJ1-1)
CASTSGQIQNTEAFF

SEQ ID NO: 72465 - protein, 12 aa, Homo sapiens
  CDR3 for alpha chain variable domain of TCR clone 36233 (TRAV35, TRAJ12)
CSGMDSSYKLIF

SEQ ID NO: 72466 - protein, 14 aa, Homo sapiens
  CDR3 for beta chain variable domain of TCR clone 36233 (TRBV28, TRBJ2-5)
CASSLYRGTETQYF

SEQ ID NO: 72467 - protein, 17 aa, Homo sapiens
  CDR3 for alpha chain variable domain of TCR clone 36234 (TRAV13-1, TRAJ52)
CAASSGASGTSYGKLTF

SEQ ID NO: 72468 - protein, 15 aa, Homo sapiens
  CDR3 for beta chain variable domain of TCR clone 36234 (TRBV2, TRBJ2-1)
CASSELAGSYNEQFF

SEQ ID NO: 72469 - protein, 15 aa, Homo sapiens
  CDR3 for alpha chain variable domain of TCR clone 36235 (TRAV12-2, TRAJ53)
CAVNGGGGSNDKLTF

SEQ ID NO: 72470 - protein, 17 aa, Homo sapiens
  CDR3 for beta chain variable domain of TCR clone 36235 (TRBV7-3, TRBJ2-3)
CASSLMKRMRGADTQYF

SEQ ID NO: 72471 - protein, 13 aa, Homo sapiens
  CDR3 for alpha chain variable domain of TCR clone 36236 (TRAV12-3, TRAJ40)
CAMSDSGTYKYIF

SEQ ID NO: 72472 - protein, 14 aa, Homo sapiens
  CDR3 for beta chain variable domain of TCR clone 36236 (TRBV7-2, TRBJ1-5)
CASSTQGASQPQHF

SEQ ID NO: 72473 - protein, 12 aa, Homo sapiens
  CDR3 for alpha chain variable domain of TCR clone 36237 (TRAV13-2, TRAJ23)
CAERHRGGKLIF

SEQ ID NO: 72474 - protein, 15 aa, Homo sapiens
  CDR3 for beta chain variable domain of TCR clone 36237 (TRBV7-9, TRBJ1-4)
CASSRTGGFNEKLFF

SEQ ID NO: 72475 - protein, 15 aa, Homo sapiens
  CDR3 for alpha chain variable domain of TCR clone 36238 (TRAV12-3, TRAJ10)
CASYILTGGGNKLNF

SEQ ID NO: 72476 - protein, 15 aa, Homo sapiens
  CDR3 for beta chain variable domain of TCR clone 36238 (TRBV7-2, TRBJ1-6)
CASSLGPDRGMPLHF

SEQ ID NO: 72477 - protein, 13 aa, Homo sapiens
  CDR3 for alpha chain variable domain of TCR clone 36239 (TRAV13-1, TRAJ5)
CAASDTGRRSLTF

SEQ ID NO: 72478 - protein, 12 aa, Homo sapiens
  CDR3 for beta chain variable domain of TCR clone 36239 (TRBV28, TRBJ2-3)
CASSLYRDTQYF

SEQ ID NO: 72479 - protein, 13 aa, Homo sapiens
  CDR3 for alpha chain variable domain of TCR clone 36240 (TRAV2, TRAJ15)
CAVASQAGTALTF

SEQ ID NO: 72480 - protein, 13 aa, Homo sapiens
  CDR3 for beta chain variable domain of TCR clone 36240 (TRBV20-1, TRBJ1-1)
CSAPLGGGTEAFF

SEQ ID NO: 72481 - protein, 11 aa, Homo sapiens
  CDR3 for alpha chain variable domain of TCR clone 36241 (TRAV2, TRAJ33)
CAVDSNYQLVW

SEQ ID NO: 72482 - protein, 14 aa, Homo sapiens
  CDR3 for beta chain variable domain of TCR clone 36241 (TRBV11-2, TRBJ2-3)
CASSRLARTDTQYF

SEQ ID NO: 72483 - protein, 15 aa, Homo sapiens
  CDR3 for alpha chain variable domain of TCR clone 36242 (TRAV4, TRAJ5)
CLVGAMDTGRRALTF

SEQ ID NO: 72484 - protein, 13 aa, Homo sapiens
  CDR3 for beta chain variable domain of TCR clone 36242 (TRBV6-5, TRBJ2-7)
CASRTSGIHEQYF

SEQ ID NO: 72485 - protein, 15 aa, Homo sapiens
  CDR3 for alpha chain variable domain of TCR clone 36243 (TRAV26-1, TRAJ29)
GIVRVEGSGNTPLVF

SEQ ID NO: 72486 - protein, 14 aa, Homo sapiens
  CDR3 for beta chain variable domain of TCR clone 36243 (TRBV18, TRBJ2-5)
CASSPGVSQETQYF

SEQ ID NO: 72487 - protein, 13 aa, Homo sapiens
  CDR3 for alpha chain variable domain of TCR clone 36244 (TRAV8-3, TRAJ43)
CAVGPDNNNDMRF

SEQ ID NO: 72488 - protein, 12 aa, Homo sapiens
  CDR3 for beta chain variable domain of TCR clone 36244 (TRBV7-2, TRBJ1-6)
CASSVSSSPLHF

SEQ ID NO: 72489 - protein, 16 aa, Homo sapiens
  CDR3 for alpha chain variable domain of TCR clone 36245 (TRAV4, TRAJ22)
CLVGDLYSGSARQLAF

SEQ ID NO: 72490 - protein, 16 aa, Homo sapiens
  CDR3 for beta chain variable domain of TCR clone 36245 (TRBV7-9, TRBJ2-1)
CASSDVAGGSYNEQFF

SEQ ID NO: 72491 - protein, 14 aa, Homo sapiens
  CDR3 for alpha chain variable domain of TCR clone 36246 (TRAV12-2, TRAJ17)
CAVLFKAAGNKLTF

SEQ ID NO: 72492 - protein, 17 aa, Homo sapiens
  CDR3 for beta chain variable domain of TCR clone 36246 (TRBV20-1, TRBJ2-2)
CSASGSVQGGLTGELFF

SEQ ID NO: 72493 - protein, 12 aa, Homo sapiens
  CDR3 for alpha chain variable domain of TCR clone 36247 (TRAV13-2, TRAJ13)
CRETGGYQKVTF

SEQ ID NO: 72494 - protein, 15 aa, Homo sapiens
  CDR3 for beta chain variable domain of TCR clone 36247 (TRBV4-1, TRBJ1-4)
CASSDTGGANEKLFF

SEQ ID NO: 72495 - protein, 10 aa, Homo sapiens
  CDR3 for alpha chain variable domain of TCR clone 36248 (TRAV23/DV6, TRAJ57)
CAASSTLSQG

SEQ ID NO: 72496 - protein, 13 aa, Homo sapiens
  CDR3 for beta chain variable domain of TCR clone 36248 (TRBV7-8, TRBJ2-1)
CASTRDAVDEQFF

SEQ ID NO: 72497 - protein, 12 aa, Homo sapiens
  CDR3 for alpha chain variable domain of TCR clone 36249 (TRAV12-3, TRAJ3)
CAIDSSASKIIF

SEQ ID NO: 72498 - protein, 17 aa, Homo sapiens
  CDR3 for beta chain variable domain of TCR clone 36249 (TRBV7-9, TRBJ2-3)
CASSLEEVGAYPDTQYF

SEQ ID NO: 72499 - protein, 18 aa, Homo sapiens
  CDR3 for alpha chain variable domain of TCR clone 36250 (TRAV21, TRAJ52)
CAVRPSPAGGTSYGKLTF

SEQ ID NO: 72500 - protein, 13 aa, Homo sapiens
  CDR3 for beta chain variable domain of TCR clone 36250 (TRBV20-1, TRBJ2-5)
CSAREAFQETQYS

SEQ ID NO: 72501 - protein, 12 aa, Homo sapiens
  CDR3 for alpha chain variable domain of TCR clone 36251 (TRAV12-1, TRAJ40)
CVFYSGTYKYIF

SEQ ID NO: 72502 - protein, 18 aa, Homo sapiens
  CDR3 for beta chain variable domain of TCR clone 36251 (TRBV12-4, TRBJ2-2)
CASSLVAGARGRTGELFF

SEQ ID NO: 72503 - protein, 14 aa, Homo sapiens
  CDR3 for alpha chain variable domain of TCR clone 36252 (TRAV17, TRAJ35)
CAADRPGFGNVLHC

SEQ ID NO: 72504 - protein, 15 aa, Homo sapiens
  CDR3 for beta chain variable domain of TCR clone 36252 (TRBV28, TRBJ2-5)
CASSSGRVIQETQYF

SEQ ID NO: 72505 - protein, 14 aa, Homo sapiens
  CDR3 for alpha chain variable domain of TCR clone 36253 (TRAV12-2, TRAJ13)
CAVKKTGGYQKVTF

SEQ ID NO: 72506 - protein, 16 aa, Homo sapiens
  CDR3 for beta chain variable domain of TCR clone 36253 (TRBV2, TRBJ2-1)
CASRSPAGGTYNEQFF

SEQ ID NO: 72507 - protein, 14 aa, Homo sapiens
  CDR3 for alpha chain variable domain of TCR clone 36254 (TRAV1-2, TRAJ16)
CAVNQFSDGQKLLF

SEQ ID NO: 72508 - protein, 15 aa, Homo sapiens
  CDR3 for beta chain variable domain of TCR clone 36254 (TRBV7-9, TRBJ1-6)
CASSSPGRGNSPLHF

SEQ ID NO: 72509 - protein, 13 aa, Homo sapiens
  CDR3 for alpha chain variable domain of TCR clone 36255 (TRAV27, TRAJ56)
CAGKPGANSRLTF

SEQ ID NO: 72510 - protein, 18 aa, Homo sapiens
  CDR3 for beta chain variable domain of TCR clone 36255 (TRBV11-2, TRBJ2-3)
CASSLGGASRGAPNTQYF

SEQ ID NO: 72511 - protein, 12 aa, Homo sapiens
  CDR3 for alpha chain variable domain of TCR clone 36256 (TRAV8-3, TRAJ20)
CAVGANDYKLSF

SEQ ID NO: 72512 - protein, 16 aa, Homo sapiens
  CDR3 for beta chain variable domain of TCR clone 36256 (TRBV19, TRBJ2-2)
CASRSPETGATGELFF

SEQ ID NO: 72513 - protein, 14 aa, Homo sapiens
  CDR3 for alpha chain variable domain of TCR clone 36257 (TRAV1-2, TRAJ16)
CAVNRFPDGQKLLF

SEQ ID NO: 72514 - protein, 17 aa, Homo sapiens
  CDR3 for beta chain variable domain of TCR clone 36257 (TRBV13, TRBJ2-3)
CASSLSGVAGGRNTQYF

SEQ ID NO: 72515 - protein, 16 aa, Homo sapiens
  CDR3 for alpha chain variable domain of TCR clone 36258 (TRAV30, TRAJ24)
CGTEIVDADSWGKFQF

SEQ ID NO: 72516 - protein, 20 aa, Homo sapiens
  CDR3 for beta chain variable domain of TCR clone 36258 (TRBV7-8, TRBJ2-1)
CASSLAHRLAGVRSYNEQFF

SEQ ID NO: 72517 - protein, 11 aa, Homo sapiens
  CDR3 for alpha chain variable domain of TCR clone 36259 (TRAV12-1, TRAJ30)
CVANGQDKIIF

SEQ ID NO: 72518 - protein, 15 aa, Homo sapiens
  CDR3 for beta chain variable domain of TCR clone 36259 (TRBV27, TRBJ2-2)
CTSVPANSSPGSCFF

SEQ ID NO: 72519 - protein, 12 aa, Homo sapiens
  CDR3 for alpha chain variable domain of TCR clone 36260 (TRAV16, TRAJ13)
CITLRGYQKVTF

SEQ ID NO: 72520 - protein, 17 aa, Homo sapiens
  CDR3 for beta chain variable domain of TCR clone 36260 (TRBV28, TRBJ2-5)
SASSRQGGLAGAETQYF

SEQ ID NO: 72521 - protein, 13 aa, Homo sapiens
  CDR3 for alpha chain variable domain of TCR clone 36261 (TRAV36/DV7, TRAJ40)
CAVEASGTYKYIF

SEQ ID NO: 72522 - protein, 13 aa, Homo sapiens
  CDR3 for beta chain variable domain of TCR clone 36261 (TRBV19, TRBJ2-2)
CASSIWSTGELFF

SEQ ID NO: 72523 - protein, 14 aa, Homo sapiens
  CDR3 for alpha chain variable domain of TCR clone 36262 (TRAV27, TRAJ22)
CAGVVPGSARQLTF

SEQ ID NO: 72524 - protein, 12 aa, Homo sapiens
  CDR3 for beta chain variable domain of TCR clone 36262 (TRBV24-1, TRBJ1-1)
CATLYPDTEAFF

SEQ ID NO: 72525 - protein, 13 aa, Homo sapiens
  CDR3 for alpha chain variable domain of TCR clone 36263 (TRAV13-2, TRAJ13)
CAERPGGYQKVTF

SEQ ID NO: 72526 - protein, 14 aa, Homo sapiens
  CDR3 for beta chain variable domain of TCR clone 36263 (TRBV19, TRBJ2-1)
CASPTFVLSGEQFF

SEQ ID NO: 72527 - protein, 14 aa, Homo sapiens
  CDR3 for alpha chain variable domain of TCR clone 36264 (TRAV1-2, TRAJ26)
CCERPDNYGQNFVF

SEQ ID NO: 72528 - protein, 11 aa, Homo sapiens
  CDR3 for beta chain variable domain of TCR clone 36264 (TRBV29-1, TRBJ2-5)
CSEDRTGTQYF

SEQ ID NO: 72529 - protein, 12 aa, Homo sapiens
  CDR3 for alpha chain variable domain of TCR clone 36265 (TRAV13-2, TRAJ23)
CEERHRGGKLIF

SEQ ID NO: 72530 - protein, 16 aa, Homo sapiens
  CDR3 for beta chain variable domain of TCR clone 36265 (TRBV20-1, TRBJ1-4)
CSAPGQGLLTNEKLFF

SEQ ID NO: 72531 - protein, 17 aa, Homo sapiens
  CDR3 for alpha chain variable domain of TCR clone 36266 (TRAV3, TRAJ42)
CAVRDRDYGGSQGNLIF

SEQ ID NO: 72532 - protein, 15 aa, Homo sapiens
  CDR3 for beta chain variable domain of TCR clone 36266 (TRBV6-6, TRBJ2-7)
CASSYSYGGYYEQYF

SEQ ID NO: 72533 - protein, 15 aa, Homo sapiens
  CDR3 for alpha chain variable domain of TCR clone 36267 (TRAV25, TRAJ53)
CAATGGGGSNYKLTF

SEQ ID NO: 72534 - protein, 12 aa, Homo sapiens
  CDR3 for beta chain variable domain of TCR clone 36267 (TRBV7-8, TRBJ2-7)
RASSLGDREQYF

SEQ ID NO: 72535 - protein, 13 aa, Homo sapiens
  CDR3 for alpha chain variable domain of TCR clone 36268 (TRAV20, TRAJ37)
CAGCSSNTGKLIF

SEQ ID NO: 72536 - protein, 14 aa, Homo sapiens
  CDR3 for beta chain variable domain of TCR clone 36268 (TRBV11-2, TRBJ2-3)
CASSRLARTDTQYF

SEQ ID NO: 72537 - protein, 14 aa, Homo sapiens
  CDR3 for alpha chain variable domain of TCR clone 36269 (TRAV12-1, TRAJ12)
CVVTRMDSSYKLIF

SEQ ID NO: 72538 - protein, 13 aa, Homo sapiens
  CDR3 for beta chain variable domain of TCR clone 36269 (TRBV7-9, TRBJ1-2)
CASSLKQNYGYTF

SEQ ID NO: 72539 - protein, 16 aa, Homo sapiens
  CDR3 for alpha chain variable domain of TCR clone 36270 (TRAV3, TRAJ23)
CAVKIGIYNQGGKLIF

SEQ ID NO: 72540 - protein, 17 aa, Homo sapiens
  CDR3 for beta chain variable domain of TCR clone 36270 (TRBV10-3, TRBJ2-6)
CAISESTAPSGAKVLTF

SEQ ID NO: 72541 - protein, 13 aa, Homo sapiens
  CDR3 for alpha chain variable domain of TCR clone 36271 (TRAV8-3, TRAJ28)
CAVGAVGSYQLTF

SEQ ID NO: 72542 - protein, 15 aa, Homo sapiens
  CDR3 for beta chain variable domain of TCR clone 36271 (TRBV6-3, TRBJ2-7)
CASSSPGTVFYEQYF

SEQ ID NO: 72543 - protein, 13 aa, Homo sapiens
  CDR3 for alpha chain variable domain of TCR clone 36272 (TRAV17, TRAJ5)
CAPMDTGRRALTL

SEQ ID NO: 72544 - protein, 15 aa, Homo sapiens
  CDR3 for beta chain variable domain of TCR clone 36272 (TRBV6-6, TRBJ2-5)
CASSPGGGLEETQYF

SEQ ID NO: 72545 - protein, 15 aa, Homo sapiens
  CDR3 for alpha chain variable domain of TCR clone 36273 (TRAV26-1, TRAJ29)
CIVRVEGSGNTPLVY

SEQ ID NO: 72546 - protein, 15 aa, Homo sapiens
  CDR3 for beta chain variable domain of TCR clone 36273 (TRBV7-9, TRBJ1-5)
CASSQGHQPNQPQHF

SEQ ID NO: 72547 - protein, 14 aa, Homo sapiens
  CDR3 for alpha chain variable domain of TCR clone 36274 (TRAV2, TRAJ37)
CAVDFTSNTGKLIF

SEQ ID NO: 72548 - protein, 17 aa, Homo sapiens
  CDR3 for beta chain variable domain of TCR clone 36274 (TRBV20-1, TRBJ1-1)
CSASRGVTGNTEASLDK

SEQ ID NO: 72549 - protein, 11 aa, Homo sapiens
  CDR3 for alpha chain variable domain of TCR clone 36275 (TRAV3, TRAJ17)
PRGAAGNKLTF

SEQ ID NO: 72550 - protein, 16 aa, Homo sapiens
  CDR3 for beta chain variable domain of TCR clone 36275 (TRBV7-6, TRBJ2-1)
CASNAPGPSSYNEQFF

SEQ ID NO: 72551 - protein, 18 aa, Homo sapiens
  CDR3 for alpha chain variable domain of TCR clone 36276 (TRAV29/DV5, TRAJ52)
CAAGFRGAGGTSYGKLTF

SEQ ID NO: 72552 - protein, 15 aa, Homo sapiens
  CDR3 for beta chain variable domain of TCR clone 36276 (TRBV19, TRBJ2-3)
CASRPLGTSRDTQYF

SEQ ID NO: 72553 - protein, 11 aa, Homo sapiens
  CDR3 for alpha chain variable domain of TCR clone 36277 (TRAV17, TRAJ43)
CATPRSNDMRF

SEQ ID NO: 72554 - protein, 12 aa, Homo sapiens
  CDR3 for beta chain variable domain of TCR clone 36277 (TRBV7-8, TRBJ2-7)
CASSLGDREQYF

SEQ ID NO: 72555 - protein, 12 aa, Homo sapiens
  CDR3 for alpha chain variable domain of TCR clone 36278 (TRAV12-3, TRAJ17)
CAMTLTGNELTF

SEQ ID NO: 72556 - protein, 15 aa, Homo sapiens
  CDR3 for beta chain variable domain of TCR clone 36278 (TRBV20-1, TRBJ2-7)
CSARDRVSWMDEQYF

SEQ ID NO: 72557 - protein, 12 aa, Homo sapiens
  CDR3 for alpha chain variable domain of TCR clone 36279 (TRAV21, TRAJ41)
CAVREFRVCTQL

SEQ ID NO: 72558 - protein, 15 aa, Homo sapiens
  CDR3 for beta chain variable domain of TCR clone 36279 (TRBV18, TRBJ1-5)
CASSPQARSDQPQHF

SEQ ID NO: 72559 - protein, 15 aa, Homo sapiens
  CDR3 for alpha chain variable domain of TCR clone 36280 (TRAV3, TRAJ20)
CAVRDLKLSDYKLSF

SEQ ID NO: 72560 - protein, 15 aa, Homo sapiens
  CDR3 for beta chain variable domain of TCR clone 36280 (TRBV7-9, TRBJ1-6)
CASSSPGRGNSPLHF

SEQ ID NO: 72561 - protein, 13 aa, Homo sapiens
  CDR3 for alpha chain variable domain of TCR clone 36281 (TRAV27, TRAJ45)
CRSSGGGADGLTF

SEQ ID NO: 72562 - protein, 14 aa, Homo sapiens
  CDR3 for beta chain variable domain of TCR clone 36281 (TRBV25-1, TRBJ1-1)
CASTHLGGNTEAFF

SEQ ID NO: 72563 - protein, 16 aa, Homo sapiens
  CDR3 for alpha chain variable domain of TCR clone 36282 (TRAV30, TRAJ24)
CGTEIVDADSWGKFQF

SEQ ID NO: 72564 - protein, 11 aa, Homo sapiens
  CDR3 for beta chain variable domain of TCR clone 36282 (TRBV10-1, TRBJ2-3)
CASSDSDTQYF

SEQ ID NO: 72565 - protein, 14 aa, Homo sapiens
  CDR3 for alpha chain variable domain of TCR clone 36283 (TRAV8-2, TRAJ5)
CVVIMDTGRRALTF

SEQ ID NO: 72566 - protein, 13 aa, Homo sapiens
  CDR3 for beta chain variable domain of TCR clone 36283 (TRBV15, TRBJ1-2)
CATSRDQGYGYTF

SEQ ID NO: 72567 - protein, 15 aa, Homo sapiens
  CDR3 for alpha chain variable domain of TCR clone 36284 (TRAV2, TRAJ9)
CAVEDRCTGGFKTIF

SEQ ID NO: 72568 - protein, 16 aa, Homo sapiens
  CDR3 for beta chain variable domain of TCR clone 36284 (TRBV24-1, TRBJ2-3)
CATSDPGTGATDTQYF

SEQ ID NO: 72569 - protein, 14 aa, Homo sapiens
  CDR3 for alpha chain variable domain of TCR clone 36285 (TRAV12-1, TRAJ17)
CVVSYKAAGNKLAF

SEQ ID NO: 72570 - protein, 17 aa, Homo sapiens
  CDR3 for beta chain variable domain of TCR clone 36285 (TRBV20-1, TRBJ2-1)
CSASSSGLAGSYNEQFF

SEQ ID NO: 72571 - protein, 15 aa, Homo sapiens
  CDR3 for alpha chain variable domain of TCR clone 36286 (TRAV8-4, TRAJ7)
CAVGGGNYGNNRLAF

SEQ ID NO: 72572 - protein, 11 aa, Homo sapiens
  CDR3 for beta chain variable domain of TCR clone 36286 (TRBV20-1, TRBJ2-1)
CSLSSGSEQFF

SEQ ID NO: 72573 - protein, 14 aa, Homo sapiens
  CDR3 for alpha chain variable domain of TCR clone 36287 (TRAV1-2, TRAJ16)
CAVNRFSDGQKLLF

SEQ ID NO: 72574 - protein, 13 aa, Homo sapiens
  CDR3 for beta chain variable domain of TCR clone 36287 (TRBV4-1, TRBJ2-1)
CASSQAGGGEQFF

SEQ ID NO: 72575 - protein, 11 aa, Homo sapiens
  CDR3 for alpha chain variable domain of TCR clone 36288 (TRAV1-1, TRAJ23)
CAVRQGGKLIF

SEQ ID NO: 72576 - protein, 13 aa, Homo sapiens
  CDR3 for beta chain variable domain of TCR clone 36288 (TRBV7-8, TRBJ2-2)
PGRLSISPGSCFF

SEQ ID NO: 72577 - protein, 14 aa, Homo sapiens
  CDR3 for alpha chain variable domain of TCR clone 36289 (TRAV12-3, TRAJ42)
CAMNYGGSQGNLIF

SEQ ID NO: 72578 - protein, 11 aa, Homo sapiens
  CDR3 for beta chain variable domain of TCR clone 36289 (TRBV11-3, TRBJ2-1)
CASSLGNEQFF

SEQ ID NO: 72579 - protein, 16 aa, Homo sapiens
  CDR3 for alpha chain variable domain of TCR clone 36290 (TRAV12-2, TRAJ18)
CAVTTDRGSTLGRRYF

SEQ ID NO: 72580 - protein, 14 aa, Homo sapiens
  CDR3 for beta chain variable domain of TCR clone 36290 (TRBV4-2, TRBJ1-5)
CASSQDSINQPQHF

SEQ ID NO: 72581 - protein, 13 aa, Homo sapiens
  CDR3 for alpha chain variable domain of TCR clone 36291 (TRAV2, TRAJ40)
CAVVTSGTYKYIF

SEQ ID NO: 72582 - protein, 14 aa, Homo sapiens
  CDR3 for beta chain variable domain of TCR clone 36291 (TRBV12-4, TRBJ1-1)
CASSLGTGGTEAFF

SEQ ID NO: 72583 - protein, 14 aa, Homo sapiens
  CDR3 for alpha chain variable domain of TCR clone 36292 (TRAV12-1, TRAJ24)
CVVRSTDSWGKFQF

SEQ ID NO: 72584 - protein, 13 aa, Homo sapiens
  CDR3 for beta chain variable domain of TCR clone 36292 (TRBV2, TRBJ2-3)
CTSILAGGQGQYF

SEQ ID NO: 72585 - protein, 13 aa, Homo sapiens
  CDR3 for alpha chain variable domain of TCR clone 36293 (TRAV2, TRAJ40)
CAVVTSGTYKYIF

SEQ ID NO: 72586 - protein, 12 aa, Homo sapiens
  CDR3 for beta chain variable domain of TCR clone 36293 (TRBV19, TRBJ1-5)
CASSIAQQPQHF

SEQ ID NO: 72587 - protein, 14 aa, Homo sapiens
  CDR3 for alpha chain variable domain of TCR clone 36294 (TRAV6, TRAJ37)
CALGSQGNTGKLIF

SEQ ID NO: 72588 - protein, 15 aa, Homo sapiens
  CDR3 for beta chain variable domain of TCR clone 36294 (TRBV2, TRBJ2-1)
CAGSEEREGDNEQFF

SEQ ID NO: 72589 - protein, 14 aa, Homo sapiens
  CDR3 for alpha chain variable domain of TCR clone 36295 (TRAV17, TRAJ34)
CATDSLEGTDKLIF

SEQ ID NO: 72590 - protein, 13 aa, Homo sapiens
  CDR3 for beta chain variable domain of TCR clone 36295 (TRBV11-3, TRBJ2-7)
CASSGTRPYEQYF

SEQ ID NO: 72591 - protein, 15 aa, Homo sapiens
  CDR3 for alpha chain variable domain of TCR clone 36296 (TRAV3, TRAJ22)
CAVRDRGGSARQLTF

SEQ ID NO: 72592 - protein, 15 aa, Homo sapiens
  CDR3 for beta chain variable domain of TCR clone 36296 (TRBV7-2, TRBJ2-1)
CASSSGLAGGNEQFF

SEQ ID NO: 72593 - protein, 14 aa, Homo sapiens
  CDR3 for alpha chain variable domain of TCR clone 36297 (TRAV14/DV4, TRAJ42)
CPRGSLRSQGNLIF

SEQ ID NO: 72594 - protein, 18 aa, Homo sapiens
  CDR3 for beta chain variable domain of TCR clone 36297 (TRBV20-1, TRBJ2-3)
CSASGLAGGPGTTNTQYF

SEQ ID NO: 72595 - protein, 11 aa, Homo sapiens
  CDR3 for alpha chain variable domain of TCR clone 36298 (TRAV8-2, TRAJ21)
CAVGNFNKFYF

SEQ ID NO: 72596 - protein, 17 aa, Homo sapiens
  CDR3 for beta chain variable domain of TCR clone 36298 (TRBV24-1, TRBJ2-1)
CATSDVSTSGTYNEQFF

SEQ ID NO: 72597 - protein, 15 aa, Homo sapiens
  CDR3 for alpha chain variable domain of TCR clone 36299 (TRAV3, TRAJ4)
CAGRDGTGGYNKLIF

SEQ ID NO: 72598 - protein, 16 aa, Homo sapiens
  CDR3 for beta chain variable domain of TCR clone 36299 (TRBV27, TRBJ2-2)
CASSSSGVSNTGELFF

SEQ ID NO: 72599 - protein, 13 aa, Homo sapiens
  CDR3 for alpha chain variable domain of TCR clone 36300 (TRAV3, TRAJ27)
CAVMPLGAGKSTF

SEQ ID NO: 72600 - protein, 13 aa, Homo sapiens
  CDR3 for beta chain variable domain of TCR clone 36300 (TRBV7-9, TRBJ2-3)
CASSPGSTDTQYF

SEQ ID NO: 72601 - protein, 11 aa, Homo sapiens
  CDR3 for alpha chain variable domain of TCR clone 36301 (TRAV12-3, TRAJ27)
CAMANAGKSTF

SEQ ID NO: 72602 - protein, 13 aa, Homo sapiens
  CDR3 for beta chain variable domain of TCR clone 36301 (TRBV20-1, TRBJ1-1)
CSAGVGGNTEAFF

SEQ ID NO: 72603 - protein, 14 aa, Homo sapiens
  CDR3 for alpha chain variable domain of TCR clone 36302 (TRAV1-2, TRAJ16)
CAVNRFSDGQKLLF

SEQ ID NO: 72604 - protein, 15 aa, Homo sapiens
  CDR3 for beta chain variable domain of TCR clone 36302 (TRBV5-8, TRBJ2-2)
CASSLDRGATGELFF

SEQ ID NO: 72605 - protein, 12 aa, Homo sapiens
  CDR3 for alpha chain variable domain of TCR clone 36303 (TRAV21, TRAJ33)
CAKMDSNYQLSW

SEQ ID NO: 72606 - protein, 14 aa, Homo sapiens
  CDR3 for beta chain variable domain of TCR clone 36303 (TRBV2, TRBJ2-7)
CASSLTSGGYEQYF

SEQ ID NO: 72607 - protein, 13 aa, Homo sapiens
  CDR3 for alpha chain variable domain of TCR clone 36304 (TRAV29/DV5, TRAJ31)
CAASRNNNARPMF

SEQ ID NO: 72608 - protein, 12 aa, Homo sapiens
  CDR3 for beta chain variable domain of TCR clone 36304 (TRBV14, TRBJ1-1)
CASSQLKGLAFF

SEQ ID NO: 72609 - protein, 15 aa, Homo sapiens
  CDR3 for alpha chain variable domain of TCR clone 36305 (TRAV2, TRAJ9)
CAVEDRGAGGFKTIF

SEQ ID NO: 72610 - protein, 17 aa, Homo sapiens
  CDR3 for beta chain variable domain of TCR clone 36305 (TRBV4-3, TRBJ2-1)
CASSQFSSGRASGEQFF

SEQ ID NO: 72611 - protein, 12 aa, Homo sapiens
  CDR3 for alpha chain variable domain of TCR clone 36306 (TRAV2, TRAJ9)
CAVGAGGFKTIF

SEQ ID NO: 72612 - protein, 15 aa, Homo sapiens
  CDR3 for beta chain variable domain of TCR clone 36306 (TRBV20-1, TRBJ2-7)
CSARDRVSGMDEQYF

SEQ ID NO: 72613 - protein, 14 aa, Homo sapiens
  CDR3 for alpha chain variable domain of TCR clone 36307 (TRAV12-3, TRAJ22)
CAMSLFGSARQLTF

SEQ ID NO: 72614 - protein, 14 aa, Homo sapiens
  CDR3 for beta chain variable domain of TCR clone 36307 (TRBV7-2, TRBJ2-7)
CASSPKTCFYEQYF

SEQ ID NO: 72615 - protein, 15 aa, Homo sapiens
  CDR3 for alpha chain variable domain of TCR clone 36308 (TRAV8-3, TRAJ45)
CASSYSGGGADGLTF

SEQ ID NO: 72616 - protein, 15 aa, Homo sapiens
  CDR3 for beta chain variable domain of TCR clone 36308 (TRBV20-1, TRBJ2-7)
CIARDRVSGMDEQYF

SEQ ID NO: 72617 - protein, 14 aa, Homo sapiens
  CDR3 for alpha chain variable domain of TCR clone 36309 (TRAV1-2, TRAJ8)
CAVREDTGFQKLVF

SEQ ID NO: 72618 - protein, 15 aa, Homo sapiens
  CDR3 for beta chain variable domain of TCR clone 36309 (TRBV7-3, TRBJ2-2)
CVSSETGQGTGELFF

SEQ ID NO: 72619 - protein, 15 aa, Homo sapiens
  CDR3 for alpha chain variable domain of TCR clone 36310 (TRAV3, TRAJ7)
CAVRDKDNGNNRLAF

SEQ ID NO: 72620 - protein, 17 aa, Homo sapiens
  CDR3 for beta chain variable domain of TCR clone 36310 (TRBV11-2, TRBJ2-1)
CASSLYPPGVEYNEQFF

SEQ ID NO: 72621 - protein, 15 aa, Homo sapiens
  CDR3 for alpha chain variable domain of TCR clone 36311 (TRAV16, TRAJ12)
CSKWPLRDSSYKLIF

SEQ ID NO: 72622 - protein, 13 aa, Homo sapiens
  CDR3 for beta chain variable domain of TCR clone 36311 (TRBV4-3, TRBJ1-1)
CASSQAGNTEAFF

SEQ ID NO: 72623 - protein, 11 aa, Homo sapiens
  CDR3 for alpha chain variable domain of TCR clone 36312 (TRAV12-2, TRAJ43)
CAAYNNNDMRF

SEQ ID NO: 72624 - protein, 14 aa, Homo sapiens
  CDR3 for beta chain variable domain of TCR clone 36312 (TRBV7-8, TRBJ1-2)
CASSAGTAIYGDTF

SEQ ID NO: 72625 - protein, 11 aa, Homo sapiens
  CDR3 for alpha chain variable domain of TCR clone 36313 (TRAV3, TRAJ21)
CAVGNFNKFYF

SEQ ID NO: 72626 - protein, 12 aa, Homo sapiens
  CDR3 for beta chain variable domain of TCR clone 36313 (TRBV12-4, TRBJ2-3)
CASSTLPDTQYF

SEQ ID NO: 72627 - protein, 12 aa, Homo sapiens
  CDR3 for alpha chain variable domain of TCR clone 36314 (TRAV12-3, TRAJ17)
CAMTLTGNKLTF

SEQ ID NO: 72628 - protein, 19 aa, Homo sapiens
  CDR3 for beta chain variable domain of TCR clone 36314 (TRBV7-8, TRBJ2-2)
CSSHLFPGPTIHITGELFF

SEQ ID NO: 72629 - protein, 18 aa, Homo sapiens
  CDR3 for alpha chain variable domain of TCR clone 36315 (TRAV3, TRAJ32)
CAVRDIRGYGGATKKLIF

SEQ ID NO: 72630 - protein, 15 aa, Homo sapiens
  CDR3 for beta chain variable domain of TCR clone 36315 (TRBV12-4, TRBJ2-2)
CASSLGVRHTGELFF

SEQ ID NO: 72631 - protein, 14 aa, Homo sapiens
  CDR3 for alpha chain variable domain of TCR clone 36316 (TRAV12-3, TRAJ9)
CAMSPNTGGFKTIF

SEQ ID NO: 72632 - protein, 14 aa, Homo sapiens
  CDR3 for beta chain variable domain of TCR clone 36316 (TRBV9, TRBJ2-7)
CASSVGVGSYEQYF

SEQ ID NO: 72633 - protein, 14 aa, Homo sapiens
  CDR3 for alpha chain variable domain of TCR clone 36317 (TRAV26-1, TRAJ39)
CIVRGSRAGNMLTF

SEQ ID NO: 72634 - protein, 13 aa, Homo sapiens
  CDR3 for beta chain variable domain of TCR clone 36317 (TRBV19, TRBJ1-2)
CASSVPGQDGYTF

SEQ ID NO: 72635 - protein, 14 aa, Homo sapiens
  CDR3 for alpha chain variable domain of TCR clone 36318 (TRAV35, TRAJ24)
CAGPRRDSWGKLQF

SEQ ID NO: 72636 - protein, 12 aa, Homo sapiens
  CDR3 for beta chain variable domain of TCR clone 36318 (TRBV12-4, TRBJ2-3)
CASSLGQDTRYF

SEQ ID NO: 72637 - protein, 14 aa, Homo sapiens
  CDR3 for alpha chain variable domain of TCR clone 36319 (TRAV1-2, TRAJ16)
CAVNRFSDGLKLLF

SEQ ID NO: 72638 - protein, 12 aa, Homo sapiens
  CDR3 for beta chain variable domain of TCR clone 36319 (TRBV6-5, TRBJ2-5)
CASSEGSETQYF

SEQ ID NO: 72639 - protein, 14 aa, Homo sapiens
  CDR3 for alpha chain variable domain of TCR clone 36320 (TRAV3, TRAJ17)
CAVRDAAAGNRLTF

SEQ ID NO: 72640 - protein, 13 aa, Homo sapiens
  CDR3 for beta chain variable domain of TCR clone 36320 (TRBV19, TRBJ1-2)
CASSVPGQDGYTF

SEQ ID NO: 72641 - protein, 16 aa, Homo sapiens
  CDR3 for alpha chain variable domain of TCR clone 36321 (TRAV12-2, TRAJ18)
CAVFAGRGSTLGRLYF

SEQ ID NO: 72642 - protein, 13 aa, Homo sapiens
  CDR3 for beta chain variable domain of TCR clone 36321 (TRBV2, TRBJ2-7)
CANGLAGDYEQYF

SEQ ID NO: 72643 - protein, 12 aa, Homo sapiens
  CDR3 for alpha chain variable domain of TCR clone 36322 (TRAV21, TRAJ33)
CAKMNSNYQLIW

SEQ ID NO: 72644 - protein, 14 aa, Homo sapiens
  CDR3 for beta chain variable domain of TCR clone 36322 (TRBV2, TRBJ2-7)
CASSLTSGGYEQYF

SEQ ID NO: 72645 - protein, 12 aa, Homo sapiens
  CDR3 for alpha chain variable domain of TCR clone 36323 (TRAV1-2, TRAJ29)
CAVPSGNTPLVF

SEQ ID NO: 72646 - protein, 12 aa, Homo sapiens
  CDR3 for beta chain variable domain of TCR clone 36323 (TRBV6-3, TRBJ2-7)
CASSLTPYEQYF

SEQ ID NO: 72647 - protein, 14 aa, Homo sapiens
  CDR3 for alpha chain variable domain of TCR clone 36324 (TRAV8-4, TRAJ54)
CAGSEVLGAQKLVF

SEQ ID NO: 72648 - protein, 13 aa, Homo sapiens
  CDR3 for beta chain variable domain of TCR clone 36324 (TRBV27, TRBJ2-7)
CASSFVSSYEQYF

SEQ ID NO: 72649 - protein, 13 aa, Homo sapiens
  CDR3 for alpha chain variable domain of TCR clone 36325 (TRAV2, TRAJ40)
CAVVTSGTYKYIF

SEQ ID NO: 72650 - protein, 15 aa, Homo sapiens
  CDR3 for beta chain variable domain of TCR clone 36325 (TRBV19, TRBJ2-2)
CQPISRDRGHRGAVF

SEQ ID NO: 72651 - protein, 15 aa, Homo sapiens
  CDR3 for alpha chain variable domain of TCR clone 36326 (TRAV35, TRAJ40)
CAGQLGTSGTYKYIF

SEQ ID NO: 72652 - protein, 13 aa, Homo sapiens
  CDR3 for beta chain variable domain of TCR clone 36326 (TRBV23-1, TRBJ2-7)
PASSSGTGLEQYF

SEQ ID NO: 72653 - protein, 16 aa, Homo sapiens
  CDR3 for alpha chain variable domain of TCR clone 36327 (TRAV17, TRAJ52)
RATSNAGGTSYGKLTF

SEQ ID NO: 72654 - protein, 13 aa, Homo sapiens
  CDR3 for beta chain variable domain of TCR clone 36327 (TRBV27, TRBJ1-6)
CASSLVLVSPLHF

SEQ ID NO: 72655 - protein, 14 aa, Homo sapiens
  CDR3 for alpha chain variable domain of TCR clone 36328 (TRAV8-4, TRAJ17)
CAVSDQAAGNKLTF

SEQ ID NO: 72656 - protein, 15 aa, Homo sapiens
  CDR3 for beta chain variable domain of TCR clone 36328 (TRBV7-2, TRBJ1-2)
CASSLAPNRGLGYTF

SEQ ID NO: 72657 - protein, 11 aa, Homo sapiens
  CDR3 for alpha chain variable domain of TCR clone 36329 (TRAV8-1, TRAJ8)
CAMTGFQRLVF

SEQ ID NO: 72658 - protein, 14 aa, Homo sapiens
  CDR3 for beta chain variable domain of TCR clone 36329 (TRBV5-4, TRBJ1-2)
CASTRQTGNYGYTF

SEQ ID NO: 72659 - protein, 18 aa, Homo sapiens
  CDR3 for alpha chain variable domain of TCR clone 36330 (TRAV12-3, TRAJ52)
CAMSVGGAGGTSYGKLTF

SEQ ID NO: 72660 - protein, 15 aa, Homo sapiens
  CDR3 for beta chain variable domain of TCR clone 36330 (TRBV27, TRBJ1-6)
CASSVDRGLGSPLHF

SEQ ID NO: 72661 - protein, 13 aa, Homo sapiens
  CDR3 for alpha chain variable domain of TCR clone 36331 (TRAV2, TRAJ29)
CAVRNSGNTPLVS

SEQ ID NO: 72662 - protein, 14 aa, Homo sapiens
  CDR3 for beta chain variable domain of TCR clone 36331 (TRBV7-9, TRBJ2-7)
CASSLQQGGYEQYF

SEQ ID NO: 72663 - protein, 13 aa, Homo sapiens
  CDR3 for alpha chain variable domain of TCR clone 36332 (TRAV21, TRAJ57)
CAVTQGGFEKLVF

SEQ ID NO: 72664 - protein, 16 aa, Homo sapiens
  CDR3 for beta chain variable domain of TCR clone 36332 (TRBV29-1, TRBJ2-7)
CSVEDAEDGTAYEQYF

SEQ ID NO: 72665 - protein, 17 aa, Homo sapiens
  CDR3 for alpha chain variable domain of TCR clone 36333 (TRAV3, TRAJ38)
CAVRDCLNAGNNRKLIW

SEQ ID NO: 72666 - protein, 14 aa, Homo sapiens
  CDR3 for beta chain variable domain of TCR clone 36333 (TRBV5-5, TRBJ1-5)
CASSGPGVDQPQHF

SEQ ID NO: 72667 - protein, 11 aa, Homo sapiens
  CDR3 for alpha chain variable domain of TCR clone 36334 (TRAV3, TRAJ49)
CAPITGNQSYF

SEQ ID NO: 72668 - protein, 16 aa, Homo sapiens
  CDR3 for beta chain variable domain of TCR clone 36334 (TRBV5-1, TRBJ2-3)
CASSVFPMSSTDTQYF

SEQ ID NO: 72669 - protein, 13 aa, Homo sapiens
  CDR3 for alpha chain variable domain of TCR clone 36335 (TRAV35, TRAJ48)
CAGHELGNEKLTF

SEQ ID NO: 72670 - protein, 14 aa, Homo sapiens
  CDR3 for beta chain variable domain of TCR clone 36335 (TRBV19, TRBJ2-1)
CASPTFVLSGEQFF

SEQ ID NO: 72671 - protein, 12 aa, Homo sapiens
  CDR3 for alpha chain variable domain of TCR clone 36336 (TRAV38-1, TRAJ32)
CAPLGATNKLIF

SEQ ID NO: 72672 - protein, 14 aa, Homo sapiens
  CDR3 for beta chain variable domain of TCR clone 36336 (TRBV29-1, TRBJ2-5)
CSVETSGSGETQHF

SEQ ID NO: 72673 - protein, 15 aa, Homo sapiens
  CDR3 for alpha chain variable domain of TCR clone 36337 (TRAV12-1, TRAJ5)
CVVNMLETGRRALTF

SEQ ID NO: 72674 - protein, 15 aa, Homo sapiens
  CDR3 for beta chain variable domain of TCR clone 36337 (TRBV20-1, TRBJ2-7)
CSARDRVSGMDEQYF

SEQ ID NO: 72675 - protein, 13 aa, Homo sapiens
  CDR3 for alpha chain variable domain of TCR clone 36338 (TRAV3, TRAJ21)
CAVREPDFNKFYF

SEQ ID NO: 72676 - protein, 17 aa, Homo sapiens
  CDR3 for beta chain variable domain of TCR clone 36338 (TRBV20-1, TRBJ2-2)
CSASGSGQGGLTGELFF

SEQ ID NO: 72677 - protein, 16 aa, Homo sapiens
  CDR3 for alpha chain variable domain of TCR clone 36339 (TRAV30, TRAJ24)
CGTEIVDADSWGKFQF

SEQ ID NO: 72678 - protein, 15 aa, Homo sapiens
  CDR3 for beta chain variable domain of TCR clone 36339 (TRBV10-3, TRBJ2-3)
CAISLTSGGTDTQYF

SEQ ID NO: 72679 - protein, 17 aa, Homo sapiens
  CDR3 for alpha chain variable domain of TCR clone 36340 (TRAV23/DV6, TRAJ57)
CAESSTLSQGGSEKLVF

SEQ ID NO: 72680 - protein, 14 aa, Homo sapiens
  CDR3 for beta chain variable domain of TCR clone 36340 (TRBV25-1, TRBJ1-1)
CASTHLGGNTEAFF

SEQ ID NO: 72681 - protein, 14 aa, Homo sapiens
  CDR3 for alpha chain variable domain of TCR clone 36341 (TRAV8-3, TRAJ36)
CAVGLITGANNLFF

SEQ ID NO: 72682 - protein, 15 aa, Homo sapiens
  CDR3 for beta chain variable domain of TCR clone 36341 (TRBV4-1, TRBJ2-1)
CASSQDPGNYNEQLF

SEQ ID NO: 72683 - protein, 14 aa, Homo sapiens
  CDR3 for alpha chain variable domain of TCR clone 36342 (TRAV12-1, TRAJ12)
CVVTRTDSSYKLIF

SEQ ID NO: 72684 - protein, 13 aa, Homo sapiens
  CDR3 for beta chain variable domain of TCR clone 36342 (TRBV20-1, TRBJ1-1)
CSARGGGNTEAFF

SEQ ID NO: 72685 - protein, 16 aa, Homo sapiens
  CDR3 for alpha chain variable domain of TCR clone 36343 (TRAV14/DV4, TRAJ21)
CAMREGPENNFNKFYF

SEQ ID NO: 72686 - protein, 15 aa, Homo sapiens
  CDR3 for beta chain variable domain of TCR clone 36343 (TRBV20-1, TRBJ2-7)
CSARDRVSGMDEQYF

SEQ ID NO: 72687 - protein, 14 aa, Homo sapiens
  CDR3 for alpha chain variable domain of TCR clone 36344 (TRAV21, TRAJ21)
CAVKGFGNFNKFYF

SEQ ID NO: 72688 - protein, 13 aa, Homo sapiens
  CDR3 for beta chain variable domain of TCR clone 36344 (TRBV18, TRBJ1-1)
CASSPETKPEAFF

SEQ ID NO: 72689 - protein, 11 aa, Homo sapiens
  CDR3 for alpha chain variable domain of TCR clone 36345 (TRAV26-1, TRAJ27)
CIDPNAGKSTL

SEQ ID NO: 72690 - protein, 18 aa, Homo sapiens
  CDR3 for beta chain variable domain of TCR clone 36345 (TRBV7-9, TRBJ2-6)
CASSFPGAGISGANVLTF

SEQ ID NO: 72691 - protein, 12 aa, Homo sapiens
  CDR3 for alpha chain variable domain of TCR clone 36346 (TRAV21, TRAJ23)
CAVMLQGGKLIL

SEQ ID NO: 72692 - protein, 14 aa, Homo sapiens
  CDR3 for beta chain variable domain of TCR clone 36346 (TRBV7-9, TRBJ1-4)
CAITEGEANEKLFF

SEQ ID NO: 72693 - protein, 13 aa, Homo sapiens
  CDR3 for alpha chain variable domain of TCR clone 36347 (TRAV12-2, TRAJ39)
CAVNNNAGNMLTF

SEQ ID NO: 72694 - protein, 13 aa, Homo sapiens
  CDR3 for beta chain variable domain of TCR clone 36347 (TRBV2, TRBJ1-5)
CAAAGPGNQPQHF

SEQ ID NO: 72695 - protein, 12 aa, Homo sapiens
  CDR3 for alpha chain variable domain of TCR clone 36348 (TRAV12-1, TRAJ40)
CVVYSGTYKYIF

SEQ ID NO: 72696 - protein, 18 aa, Homo sapiens
  CDR3 for beta chain variable domain of TCR clone 36348 (TRBV11-2, TRBJ2-3)
CASSLGGTSRGAPNTQYF

SEQ ID NO: 72697 - protein, 15 aa, Homo sapiens
  CDR3 for alpha chain variable domain of TCR clone 36349 (TRAV4, TRAJ39)
CLVGPNNNAVNMLTF

SEQ ID NO: 72698 - protein, 13 aa, Homo sapiens
  CDR3 for beta chain variable domain of TCR clone 36349 (TRBV11-2, TRBJ2-5)
CASSSTGEETQYF

SEQ ID NO: 72699 - protein, 14 aa, Homo sapiens
  CDR3 for alpha chain variable domain of TCR clone 36350 (TRAV1-2, TRAJ8)
CAVREDTGFQKLVF

SEQ ID NO: 72700 - protein, 19 aa, Homo sapiens
  CDR3 for beta chain variable domain of TCR clone 36350 (TRBV14, TRBJ2-1)
CASSQDQLWEAPECNEQFF

SEQ ID NO: 72701 - protein, 15 aa, Homo sapiens
  CDR3 for alpha chain variable domain of TCR clone 36351 (TRAV3, TRAJ47)
CAVRDIGEYGNKMVF

SEQ ID NO: 72702 - protein, 14 aa, Homo sapiens
  CDR3 for beta chain variable domain of TCR clone 36351 (TRBV13, TRBJ2-5)
CASSLERVGETQYF

SEQ ID NO: 72703 - protein, 14 aa, Homo sapiens
  CDR3 for alpha chain variable domain of TCR clone 36352 (TRAV4, TRAJ32)
CHVNYGGATNKLIF

SEQ ID NO: 72704 - protein, 14 aa, Homo sapiens
  CDR3 for beta chain variable domain of TCR clone 36352 (TRBV15, TRBJ2-5)
CATSGGTRTETQYF

SEQ ID NO: 72705 - protein, 16 aa, Homo sapiens
  CDR3 for alpha chain variable domain of TCR clone 36353 (TRAV3, TRAJ28)
CVVLPRSGAGSYQLTF

SEQ ID NO: 72706 - protein, 13 aa, Homo sapiens
  CDR3 for beta chain variable domain of TCR clone 36353 (TRBV12-4, TRBJ2-5)
CASRLAVQETQYF

SEQ ID NO: 72707 - protein, 13 aa, Homo sapiens
  CDR3 for alpha chain variable domain of TCR clone 36354 (TRAV8-3, TRAJ28)
CAEGAVGSYQLTF

SEQ ID NO: 72708 - protein, 14 aa, Homo sapiens
  CDR3 for beta chain variable domain of TCR clone 36354 (TRBV7-2, TRBJ2-7)
CASRSQGAAYEQYF

SEQ ID NO: 72709 - protein, 12 aa, Homo sapiens
  CDR3 for alpha chain variable domain of TCR clone 36355 (TRAV3, TRAJ43)
CAVRDPNNDMRF

SEQ ID NO: 72710 - protein, 19 aa, Homo sapiens
  CDR3 for beta chain variable domain of TCR clone 36355 (TRBV25-1, TRBJ2-2)
CAILVYRVDRGRKTGELFF

SEQ ID NO: 72711 - protein, 12 aa, Homo sapiens
  CDR3 for alpha chain variable domain of TCR clone 36356 (TRAV12-3, TRAJ40)
CAMSSGTYKYIF

SEQ ID NO: 72712 - protein, 16 aa, Homo sapiens
  CDR3 for beta chain variable domain of TCR clone 36356 (TRBV13, TRBJ2-2)
CASSPRTGEHTGELFF

SEQ ID NO: 72713 - protein, 11 aa, Homo sapiens
  CDR3 for alpha chain variable domain of TCR clone 36357 (TRAV27, TRAJ20)
CAGLNDYKLGF

SEQ ID NO: 72714 - protein, 14 aa, Homo sapiens
  CDR3 for beta chain variable domain of TCR clone 36357 (TRBV6-1, TRBJ1-1)
CASTPLQMNTEAFF

SEQ ID NO: 72715 - protein, 14 aa, Homo sapiens
  CDR3 for alpha chain variable domain of TCR clone 36358 (TRAV13-1, TRAJ35)
CAASKGGFGNVLHC

SEQ ID NO: 72716 - protein, 15 aa, Homo sapiens
  CDR3 for beta chain variable domain of TCR clone 36358 (TRBV28, TRBJ2-1)
CASGGLAEVDNEQFF

SEQ ID NO: 72717 - protein, 14 aa, Homo sapiens
  CDR3 for alpha chain variable domain of TCR clone 36359 (TRAV12-3, TRAJ12)
CAMSEVDSSYKLIF

SEQ ID NO: 72718 - protein, 12 aa, Homo sapiens
  CDR3 for beta chain variable domain of TCR clone 36359 (TRBV18, TRBJ1-4)
CASSPSREKLLF

SEQ ID NO: 72719 - protein, 13 aa, Homo sapiens
  CDR3 for alpha chain variable domain of TCR clone 36360 (TRAV16, TRAJ26)
CITLLCLGQNFVF

SEQ ID NO: 72720 - protein, 12 aa, Homo sapiens
  CDR3 for beta chain variable domain of TCR clone 36360 (TRBV11-2, TRBJ2-1)
CASSPGNNEQFF

SEQ ID NO: 72721 - protein, 14 aa, Homo sapiens
  CDR3 for alpha chain variable domain of TCR clone 36361 (TRAV1-2, TRAJ8)
CAVREDTGFQKLVF

SEQ ID NO: 72722 - protein, 15 aa, Homo sapiens
  CDR3 for beta chain variable domain of TCR clone 36361 (TRBV7-9, TRBJ2-7)
CASSPGGGLTYEQYF

SEQ ID NO: 72723 - protein, 15 aa, Homo sapiens
  CDR3 for alpha chain variable domain of TCR clone 36362 (TRAV26-1, TRAJ22)
CIVRVSFWFCKATDL

SEQ ID NO: 72724 - protein, 13 aa, Homo sapiens
  CDR3 for beta chain variable domain of TCR clone 36362 (TRBV7-9, TRBJ1-2)
CASRLKQNYGYTF

SEQ ID NO: 72725 - protein, 16 aa, Homo sapiens
  CDR3 for alpha chain variable domain of TCR clone 36363 (TRAV3, TRAJ10)
CAVRDMRAGGGNKLTF

SEQ ID NO: 72726 - protein, 15 aa, Homo sapiens
  CDR3 for beta chain variable domain of TCR clone 36363 (TRBV27, TRBJ2-1)
CASSNGGGSSNEQFF

SEQ ID NO: 72727 - protein, 13 aa, Homo sapiens
  CDR3 for alpha chain variable domain of TCR clone 36364 (TRAV12-1, TRAJ6)
CVAFPGGSYIPTF

SEQ ID NO: 72728 - protein, 13 aa, Homo sapiens
  CDR3 for beta chain variable domain of TCR clone 36364 (TRBV7-9, TRBJ1-2)
CASSLKQNYGYTF

SEQ ID NO: 72729 - protein, 17 aa, Homo sapiens
  CDR3 for alpha chain variable domain of TCR clone 36365 (TRAV3, TRAJ42)
CAVRDRDYGGSQGNLIF

SEQ ID NO: 72730 - protein, 17 aa, Homo sapiens
  CDR3 for beta chain variable domain of TCR clone 36365 (TRBV6-6, TRBJ2-7)
CASSYSYGVPTSSTSGR

SEQ ID NO: 72731 - protein, 11 aa, Homo sapiens
  CDR3 for alpha chain variable domain of TCR clone 36366 (TRAV21, TRAJ24)
GLQLTAGKLQF

SEQ ID NO: 72732 - protein, 13 aa, Homo sapiens
  CDR3 for beta chain variable domain of TCR clone 36366 (TRBV11-2, TRBJ2-5)
CASSSTGEETQYF

SEQ ID NO: 72733 - protein, 13 aa, Homo sapiens
  CDR3 for alpha chain variable domain of TCR clone 36367 (TRAV3, TRAJ21)
CAVREPDFNKFYF

SEQ ID NO: 72734 - protein, 15 aa, Homo sapiens
  CDR3 for beta chain variable domain of TCR clone 36367 (TRBV7-9, TRBJ1-5)
CASSQGHQPNQPQHF

SEQ ID NO: 72735 - protein, 16 aa, Homo sapiens
  CDR3 for alpha chain variable domain of TCR clone 36368 (TRAV16, TRAJ4)
CALSRMFSGGYIKLIF

SEQ ID NO: 72736 - protein, 16 aa, Homo sapiens
  CDR3 for beta chain variable domain of TCR clone 36368 (TRBV24-1, TRBJ2-3)
CATSDPGTGATDTQYF

SEQ ID NO: 72737 - protein, 12 aa, Homo sapiens
  CDR3 for alpha chain variable domain of TCR clone 36369 (TRAV8-3, TRAJ20)
CAVGGGDYKLSF

SEQ ID NO: 72738 - protein, 14 aa, Homo sapiens
  CDR3 for beta chain variable domain of TCR clone 36369 (TRBV5-1, TRBJ2-7)
CASSRGESSYEQYF

SEQ ID NO: 72739 - protein, 14 aa, Homo sapiens
  CDR3 for alpha chain variable domain of TCR clone 36370 (TRAV8-3, TRAJ39)
CAVGADNAGNMLTF

SEQ ID NO: 72740 - protein, 12 aa, Homo sapiens
  CDR3 for beta chain variable domain of TCR clone 36370 (TRBV11-3, TRBJ1-1)
CDSSHRQGEAFF

SEQ ID NO: 72741 - protein, 10 aa, Homo sapiens
  CDR3 for alpha chain variable domain of TCR clone 36371 (TRAV30, TRAJ48)
CGIGNEKLTF

SEQ ID NO: 72742 - protein, 14 aa, Homo sapiens
  CDR3 for beta chain variable domain of TCR clone 36371 (TRBV7-6, TRBJ2-3)
CAISVAGGTDTQYF

SEQ ID NO: 72743 - protein, 15 aa, Homo sapiens
  CDR3 for alpha chain variable domain of TCR clone 36372 (TRAV12-2, TRAJ53)
CAVNGGGGSNYKLPF

SEQ ID NO: 72744 - protein, 17 aa, Homo sapiens
  CDR3 for beta chain variable domain of TCR clone 36372 (TRBV7-3, TRBJ2-3)
CASSLMKRMRGADTQYF

SEQ ID NO: 72745 - protein, 12 aa, Homo sapiens
  CDR3 for alpha chain variable domain of TCR clone 36373 (TRAV12-2, TRAJ10)
WGVMGGGNKLTF

SEQ ID NO: 72746 - protein, 16 aa, Homo sapiens
  CDR3 for beta chain variable domain of TCR clone 36373 (TRBV6-4, TRBJ1-2)
CASSEAVGDPNYGYTF

SEQ ID NO: 72747 - protein, 11 aa, Homo sapiens
  CDR3 for alpha chain variable domain of TCR clone 36374 (TRAV2, TRAJ13)
CASGGYQKVTF

SEQ ID NO: 72748 - protein, 14 aa, Homo sapiens
  CDR3 for beta chain variable domain of TCR clone 36374 (TRBV20-1, TRBJ2-5)
CSAHRQGLWETQYF

SEQ ID NO: 72749 - protein, 17 aa, Homo sapiens
  CDR3 for alpha chain variable domain of TCR clone 36375 (TRAV20, TRAJ28)
CAVQEGYSGSGSYQLTF

SEQ ID NO: 72750 - protein, 15 aa, Homo sapiens
  CDR3 for beta chain variable domain of TCR clone 36375 (TRBV7-2, TRBJ2-7)
CASSLSSGRTYEQYF

SEQ ID NO: 72751 - protein, 15 aa, Homo sapiens
  CDR3 for alpha chain variable domain of TCR clone 36376 (TRAV12-3, TRAJ6)
CAMSSTTGGSYIPTF

SEQ ID NO: 72752 - protein, 16 aa, Homo sapiens
  CDR3 for beta chain variable domain of TCR clone 36376 (TRBV20-1, TRBJ1-2)
CSASMGQGVANYGYTF

SEQ ID NO: 72753 - protein, 18 aa, Homo sapiens
  CDR3 for alpha chain variable domain of TCR clone 36377 (TRAV17, TRAJ28)
CATDPPRGSGAGSYQLTF

SEQ ID NO: 72754 - protein, 14 aa, Homo sapiens
  CDR3 for beta chain variable domain of TCR clone 36377 (TRBV13, TRBJ2-5)
CASSLDCPQETQYF

SEQ ID NO: 72755 - protein, 14 aa, Homo sapiens
  CDR3 for alpha chain variable domain of TCR clone 36378 (TRAV12-2, TRAJ13)
CAVRKTGGYQKVTF

SEQ ID NO: 72756 - protein, 16 aa, Homo sapiens
  CDR3 for beta chain variable domain of TCR clone 36378 (TRBV2, TRBJ2-1)
CASRSPAGGKYNEQFF

SEQ ID NO: 72757 - protein, 15 aa, Homo sapiens
  CDR3 for alpha chain variable domain of TCR clone 36379 (TRAV12-3, TRAJ6)
CAMSATTGGSYIPTF

SEQ ID NO: 72758 - protein, 16 aa, Homo sapiens
  CDR3 for beta chain variable domain of TCR clone 36379 (TRBV20-1, TRBJ1-2)
YSASMGQGVANYGYTF

SEQ ID NO: 72759 - protein, 15 aa, Homo sapiens
  CDR3 for alpha chain variable domain of TCR clone 36380 (TRAV27, TRAJ38)
CAARRNAGNNCKLIW

SEQ ID NO: 72760 - protein, 13 aa, Homo sapiens
  CDR3 for beta chain variable domain of TCR clone 36380 (TRBV12-5, TRBJ2-3)
CASGDRQSDTQYF

SEQ ID NO: 72761 - protein, 13 aa, Homo sapiens
  CDR3 for alpha chain variable domain of TCR clone 36381 (TRAV3, TRAJ20)
CAVRDTPRYKLSF

SEQ ID NO: 72762 - protein, 16 aa, Homo sapiens
  CDR3 for beta chain variable domain of TCR clone 36381 (TRBV20-1, TRBJ2-7)
CSARAPGLALSYEQYS

SEQ ID NO: 72763 - protein, 15 aa, Homo sapiens
  CDR3 for alpha chain variable domain of TCR clone 36382 (TRAV12-3, TRAJ27)
CAMRAYNTNAGKSTF

SEQ ID NO: 72764 - protein, 13 aa, Homo sapiens
  CDR3 for beta chain variable domain of TCR clone 36382 (TRBV11-2, TRBJ2-5)
CACSRGPSETQYF

SEQ ID NO: 72765 - protein, 13 aa, Homo sapiens
  CDR3 for alpha chain variable domain of TCR clone 36383 (TRAV21, TRAJ20)
CAVGLRVDYKLSF

SEQ ID NO: 72766 - protein, 11 aa, Homo sapiens
  CDR3 for beta chain variable domain of TCR clone 36383 (TRBV11-2, TRBJ2-2)
CASSLPGELFF

SEQ ID NO: 72767 - protein, 13 aa, Homo sapiens
  CDR3 for alpha chain variable domain of TCR clone 36384 (TRAV21, TRAJ20)
CAVGLRVDYNLSF

SEQ ID NO: 72768 - protein, 13 aa, Homo sapiens
  CDR3 for beta chain variable domain of TCR clone 36384 (TRBV6-1, TRBJ1-1)
CASSRQGNTEAFF

SEQ ID NO: 72769 - protein, 17 aa, Homo sapiens
  CDR3 for alpha chain variable domain of TCR clone 36385 (TRAV8-6, TRAJ58)
CAVSSWVGETSGSRLTF

SEQ ID NO: 72770 - protein, 12 aa, Homo sapiens
  CDR3 for beta chain variable domain of TCR clone 36385 (TRBV11-2, TRBJ2-2)
CASSLGGGELFF

SEQ ID NO: 72771 - protein, 16 aa, Homo sapiens
  CDR3 for alpha chain variable domain of TCR clone 36386 (TRAV3, TRAJ10)
CAVRDMRAGGGNKLTF

SEQ ID NO: 72772 - protein, 11 aa, Homo sapiens
  CDR3 for beta chain variable domain of TCR clone 36386 (TRBV29-1, TRBJ2-5)
RSEDRTGTQYF

SEQ ID NO: 72773 - protein, 14 aa, Homo sapiens
  CDR3 for alpha chain variable domain of TCR clone 36387 (TRAV13-1, TRAJ9)
CAASALTGGFRTIF

SEQ ID NO: 72774 - protein, 13 aa, Homo sapiens
  CDR3 for beta chain variable domain of TCR clone 36387 (TRBV20-1, TRBJ1-1)
CSAGTVGNAEAFF

SEQ ID NO: 72775 - protein, 12 aa, Homo sapiens
  CDR3 for alpha chain variable domain of TCR clone 36388 (TRAV3, TRAJ20)
CAVRDGDYKLSF

SEQ ID NO: 72776 - protein, 13 aa, Homo sapiens
  CDR3 for beta chain variable domain of TCR clone 36388 (TRBV9, TRBJ2-1)
CASSVEQGGEQFF

SEQ ID NO: 72777 - protein, 12 aa, Homo sapiens
  CDR3 for alpha chain variable domain of TCR clone 36389 (TRAV29/DV5, TRAJ49)
CAATDTGNQLYF

SEQ ID NO: 72778 - protein, 12 aa, Homo sapiens
  CDR3 for beta chain variable domain of TCR clone 36389 (TRBV12-4, TRBJ2-7)
CASSLGGYEQYF

SEQ ID NO: 72779 - protein, 12 aa, Homo sapiens
  CDR3 for alpha chain variable domain of TCR clone 36390 (TRAV13-1, TRAJ49)
CAASPMRNQFYF

SEQ ID NO: 72780 - protein, 13 aa, Homo sapiens
  CDR3 for beta chain variable domain of TCR clone 36390 (TRBV20-1, TRBJ2-2)
CSASAAGTGELFF

SEQ ID NO: 72781 - protein, 15 aa, Homo sapiens
  CDR3 for alpha chain variable domain of TCR clone 36391 (TRAV13-1, TRAJ5)
CAASKADTGRRALTF

SEQ ID NO: 72782 - protein, 16 aa, Homo sapiens
  CDR3 for beta chain variable domain of TCR clone 36391 (TRBV7-2, TRBJ2-1)
CASSLGRTSGDNEQFS

SEQ ID NO: 72783 - protein, 15 aa, Homo sapiens
  CDR3 for alpha chain variable domain of TCR clone 36392 (TRAV13-1, TRAJ5)
CAASLRGHGQESTYF

SEQ ID NO: 72784 - protein, 15 aa, Homo sapiens
  CDR3 for beta chain variable domain of TCR clone 36392 (TRBV6-1, TRBJ2-3)
CASSERGGITDTQYF

SEQ ID NO: 72785 - protein, 17 aa, Homo sapiens
  CDR3 for alpha chain variable domain of TCR clone 36393 (TRAV3, TRAJ6)
CAVRDGPRAGGSYIPTF

SEQ ID NO: 72786 - protein, 16 aa, Homo sapiens
  CDR3 for beta chain variable domain of TCR clone 36393 (TRBV19, TRBJ2-2)
CASRSPGTGATGELFF

SEQ ID NO: 72787 - protein, 15 aa, Homo sapiens
  CDR3 for alpha chain variable domain of TCR clone 36394 (TRAV26-1, TRAJ29)
CIVRVEGSGNTPLVF

SEQ ID NO: 72788 - protein, 13 aa, Homo sapiens
  CDR3 for beta chain variable domain of TCR clone 36394 (TRBV12-4, TRBJ2-7)
CASSPTETYEQYF

SEQ ID NO: 72789 - protein, 14 aa, Homo sapiens
  CDR3 for alpha chain variable domain of TCR clone 36395 (TRAV17, TRAJ7)
CATLGRLAFGKGNQ

SEQ ID NO: 72790 - protein, 13 aa, Homo sapiens
  CDR3 for beta chain variable domain of TCR clone 36395 (TRBV12-4, TRBJ2-7)
CASSLERVREQYF

SEQ ID NO: 72791 - protein, 15 aa, Homo sapiens
  CDR3 for alpha chain variable domain of TCR clone 36396 (TRAV2, TRAJ15)
CAVEDRGQAGTALFF

SEQ ID NO: 72792 - protein, 13 aa, Homo sapiens
  CDR3 for beta chain variable domain of TCR clone 36396 (TRBV10-2, TRBJ2-7)
CASGASGGYEQYF

SEQ ID NO: 72793 - protein, 16 aa, Homo sapiens
  CDR3 for alpha chain variable domain of TCR clone 36397 (TRAV38-2/DV8, TRAJ47)
CAYKSAIMQYGNKLVF

SEQ ID NO: 72794 - protein, 14 aa, Homo sapiens
  CDR3 for beta chain variable domain of TCR clone 36397 (TRBV19, TRBJ2-7)
CASSIFAGTYEQYF

SEQ ID NO: 72795 - protein, 12 aa, Homo sapiens
  CDR3 for alpha chain variable domain of TCR clone 36398 (TRAV3, TRAJ20)
CAVRDGDYKLSF

SEQ ID NO: 72796 - protein, 13 aa, Homo sapiens
  CDR3 for beta chain variable domain of TCR clone 36398 (TRBV19, TRBJ1-2)
CASSQGQVYGYTF

SEQ ID NO: 72797 - protein, 15 aa, Homo sapiens
  CDR3 for alpha chain variable domain of TCR clone 36399 (TRAV12-1, TRAJ44)
CVADLPTGTASKLNF

SEQ ID NO: 72798 - protein, 13 aa, Homo sapiens
  CDR3 for beta chain variable domain of TCR clone 36399 (TRBV6-5, TRBJ2-5)
CASSPQGGETQYF

SEQ ID NO: 72799 - protein, 13 aa, Homo sapiens
  CDR3 for alpha chain variable domain of TCR clone 36400 (TRAV8-6, TRAJ49)
CAVITNTGNQFYF

SEQ ID NO: 72800 - protein, 13 aa, Homo sapiens
  CDR3 for beta chain variable domain of TCR clone 36400 (TRBV3-1, TRBJ2-3)
CASSQGSTDTQYF

SEQ ID NO: 72801 - protein, 13 aa, Homo sapiens
  CDR3 for alpha chain variable domain of TCR clone 36401 (TRAV35, TRAJ42)
CAGFPGSQGNLIF

SEQ ID NO: 72802 - protein, 14 aa, Homo sapiens
  CDR3 for beta chain variable domain of TCR clone 36401 (TRBV19, TRBJ2-1)
CASPTFALSGEQFF

SEQ ID NO: 72803 - protein, 11 aa, Homo sapiens
  CDR3 for alpha chain variable domain of TCR clone 36402 (TRAV21, TRAJ34)
CAVTNTDKLIF

SEQ ID NO: 72804 - protein, 13 aa, Homo sapiens
  CDR3 for beta chain variable domain of TCR clone 36402 (TRBV4-2, TRBJ1-1)
CASSQAGNTEAFF

SEQ ID NO: 72805 - protein, 12 aa, Homo sapiens
  CDR3 for alpha chain variable domain of TCR clone 36403 (TRAV17, TRAJ47)
CAPTVRGNKLVF

SEQ ID NO: 72806 - protein, 13 aa, Homo sapiens
  CDR3 for beta chain variable domain of TCR clone 36403 (TRBV7-2, TRBJ2-4)
CACSLAEGGIQYF

SEQ ID NO: 72807 - protein, 11 aa, Homo sapiens
  CDR3 for alpha chain variable domain of TCR clone 36404 (TRAV2, TRAJ21)
CAVFNSNKFYF

SEQ ID NO: 72808 - protein, 14 aa, Homo sapiens
  CDR3 for beta chain variable domain of TCR clone 36404 (TRBV15, TRBJ2-3)
CATRSGTSTDTQYF

SEQ ID NO: 72809 - protein, 12 aa, Homo sapiens
  CDR3 for alpha chain variable domain of TCR clone 36405 (TRAV12-3, TRAJ17)
CAMTLTGNKLTF

SEQ ID NO: 72810 - protein, 12 aa, Homo sapiens
  CDR3 for beta chain variable domain of TCR clone 36405 (TRBV12-4, TRBJ2-7)
CASSLGGCEQYF

SEQ ID NO: 72811 - protein, 17 aa, Homo sapiens
  CDR3 for alpha chain variable domain of TCR clone 36406 (TRAV4, TRAJ13)
CLVGVQGSSGGYQKVTF

SEQ ID NO: 72812 - protein, 18 aa, Homo sapiens
  CDR3 for beta chain variable domain of TCR clone 36406 (TRBV15, TRBJ2-3)
CATSRGGARSWDTDTQYF

SEQ ID NO: 72813 - protein, 12 aa, Homo sapiens
  CDR3 for alpha chain variable domain of TCR clone 36407 (TRAV3, TRAJ31)
CAVRDGNARLTF

SEQ ID NO: 72814 - protein, 18 aa, Homo sapiens
  CDR3 for beta chain variable domain of TCR clone 36407 (TRBV7-2, TRBJ2-3)
CASSLKREGSGITDTQYF

SEQ ID NO: 72815 - protein, 14 aa, Homo sapiens
  CDR3 for alpha chain variable domain of TCR clone 36408 (TRAV1-2, TRAJ8)
CAVREGTGFQKLVF

SEQ ID NO: 72816 - protein, 15 aa, Homo sapiens
  CDR3 for beta chain variable domain of TCR clone 36408 (TRBV11-3, TRBJ2-3)
CASLKDGREGDTQYF

SEQ ID NO: 72817 - protein, 13 aa, Homo sapiens
  CDR3 for alpha chain variable domain of TCR clone 36409 (TRAV17, TRAJ15)
CATDARAGTALIF

SEQ ID NO: 72818 - protein, 15 aa, Homo sapiens
  CDR3 for beta chain variable domain of TCR clone 36409 (TRBV20-1, TRBJ2-7)
CSARDRASGMDEQYF

SEQ ID NO: 72819 - protein, 14 aa, Homo sapiens
  CDR3 for alpha chain variable domain of TCR clone 36410 (TRAV17, TRAJ57)
CATDPQGGSEKLVF

SEQ ID NO: 72820 - protein, 18 aa, Homo sapiens
  CDR3 for beta chain variable domain of TCR clone 36410 (TRBV6-6, TRBJ1-3)
CASSYSKWDSTSGNTIYF

SEQ ID NO: 72821 - protein, 14 aa, Homo sapiens
  CDR3 for alpha chain variable domain of TCR clone 36411 (TRAV3, TRAJ7)
CAVREEEREQQTRF

SEQ ID NO: 72822 - protein, 12 aa, Homo sapiens
  CDR3 for beta chain variable domain of TCR clone 36411 (TRBV7-8, TRBJ2-7)
CASSLGDGEQYF

SEQ ID NO: 72823 - protein, 16 aa, Homo sapiens
  CDR3 for alpha chain variable domain of TCR clone 36412 (TRAV3, TRAJ10)
CAARDMRAGGGNKLTF

SEQ ID NO: 72824 - protein, 13 aa, Homo sapiens
  CDR3 for beta chain variable domain of TCR clone 36412 (TRBV6-1, TRBJ1-1)
CASSRQGNTEAFF

SEQ ID NO: 72825 - protein, 11 aa, Homo sapiens
  CDR3 for alpha chain variable domain of TCR clone 36413 (TRAV1-2, TRAJ31)
CAVINNARLMF

SEQ ID NO: 72826 - protein, 15 aa, Homo sapiens
  CDR3 for beta chain variable domain of TCR clone 36413 (TRBV28, TRBJ2-1)
CASSIIAGGRSEQFF

SEQ ID NO: 72827 - protein, 12 aa, Homo sapiens
  CDR3 for alpha chain variable domain of TCR clone 36414 (TRAV27, TRAJ9)
FAGESGGFKTIF

SEQ ID NO: 72828 - protein, 18 aa, Homo sapiens
  CDR3 for beta chain variable domain of TCR clone 36414 (TRBV10-2, TRBJ2-2)
CISAPAVHRQADAGELFF

SEQ ID NO: 72829 - protein, 14 aa, Homo sapiens
  CDR3 for alpha chain variable domain of TCR clone 36415 (TRAV35, TRAJ42)
CCVPYGGSQGNLIF

SEQ ID NO: 72830 - protein, 18 aa, Homo sapiens
  CDR3 for beta chain variable domain of TCR clone 36415 (TRBV13, TRBJ2-6)
CASSPMTSGGSGANDLTF

SEQ ID NO: 72831 - protein, 14 aa, Homo sapiens
  CDR3 for alpha chain variable domain of TCR clone 36416 (TRAV1-2, TRAJ16)
CAVSRFSDGQKLLF

SEQ ID NO: 72832 - protein, 14 aa, Homo sapiens
  CDR3 for beta chain variable domain of TCR clone 36416 (TRBV4-1, TRBJ2-2)
CASSQAVNTGELFF

SEQ ID NO: 72833 - protein, 15 aa, Homo sapiens
  CDR3 for alpha chain variable domain of TCR clone 36417 (TRAV35, TRAJ23)
CAGPLGNNQGGRLIF

SEQ ID NO: 72834 - protein, 14 aa, Homo sapiens
  CDR3 for beta chain variable domain of TCR clone 36417 (TRBV7-9, TRBJ1-1)
CASTPLQSYTEAFF

SEQ ID NO: 72835 - protein, 20 aa, Homo sapiens
  CDR3 for alpha chain variable domain of TCR clone 36418 (TRAV12-3, TRAJ41)
SLFIRDSQPSDSATPEALNF

SEQ ID NO: 72836 - protein, 15 aa, Homo sapiens
  CDR3 for beta chain variable domain of TCR clone 36418 (TRBV5-1, TRBJ2-7)
CASSLDLTSSYEQYS

SEQ ID NO: 72837 - protein, 16 aa, Homo sapiens
  CDR3 for alpha chain variable domain of TCR clone 36419 (TRAV30, TRAJ24)
CGTEIVDADSWGKFQF

SEQ ID NO: 72838 - protein, 14 aa, Homo sapiens
  CDR3 for beta chain variable domain of TCR clone 36419 (TRBV11-2, TRBJ1-5)
CASSLDRGRQPQHF

SEQ ID NO: 72839 - protein, 15 aa, Homo sapiens
  CDR3 for alpha chain variable domain of TCR clone 36420 (TRAV13-1, TRAJ21)
CAASIYNFNKFTLDL

SEQ ID NO: 72840 - protein, 13 aa, Homo sapiens
  CDR3 for beta chain variable domain of TCR clone 36420 (TRBV27, TRBJ1-4)
CASSLMGDEKLFF

SEQ ID NO: 72841 - protein, 13 aa, Homo sapiens
  CDR3 for alpha chain variable domain of TCR clone 36421 (TRAV21, TRAJ27)
CAARPGNAGKSTF

SEQ ID NO: 72842 - protein, 15 aa, Homo sapiens
  CDR3 for beta chain variable domain of TCR clone 36421 (TRBV2, TRBJ2-3)
RASSDAGGPPDTQYF

SEQ ID NO: 72843 - protein, 18 aa, Homo sapiens
  CDR3 for alpha chain variable domain of TCR clone 36422 (TRAV29/DV5, TRAJ52)
CAAGFRGAGGTSYGELTF

SEQ ID NO: 72844 - protein, 16 aa, Homo sapiens
  CDR3 for beta chain variable domain of TCR clone 36422 (TRBV7-3, TRBJ2-2)
CASSLKRGTLSGELFF

SEQ ID NO: 72845 - protein, 14 aa, Homo sapiens
  CDR3 for alpha chain variable domain of TCR clone 36423 (TRAV17, TRAJ57)
CATDPQGGSEKLVF

SEQ ID NO: 72846 - protein, 16 aa, Homo sapiens
  CDR3 for beta chain variable domain of TCR clone 36423 (TRBV24-1, TRBJ2-3)
CATSDPGTGATDTQYF

SEQ ID NO: 72847 - protein, 14 aa, Homo sapiens
  CDR3 for alpha chain variable domain of TCR clone 36424 (TRAV1-2, TRAJ8)
CAVREDTGFQKLVF

SEQ ID NO: 72848 - protein, 13 aa, Homo sapiens
  CDR3 for beta chain variable domain of TCR clone 36424 (TRBV19, TRBJ2-7)
CASSPRQSYEQYF

SEQ ID NO: 72849 - protein, 13 aa, Homo sapiens
  CDR3 for alpha chain variable domain of TCR clone 36425 (TRAV35, TRAJ36)
CAGPRIGANNLFF

SEQ ID NO: 72850 - protein, 15 aa, Homo sapiens
  CDR3 for beta chain variable domain of TCR clone 36425 (TRBV28, TRBJ2-5)
CASSPPWSYQETQYV

SEQ ID NO: 72851 - protein, 16 aa, Homo sapiens
  CDR3 for alpha chain variable domain of TCR clone 36426 (TRAV3, TRAJ37)
CAVRGKGSGNTGKLIF

SEQ ID NO: 72852 - protein, 15 aa, Homo sapiens
  CDR3 for beta chain variable domain of TCR clone 36426 (TRBV11-3, TRBJ2-3)
CASLKDGREGDTQYF

SEQ ID NO: 72853 - protein, 14 aa, Homo sapiens
  CDR3 for alpha chain variable domain of TCR clone 36427 (TRAV25, TRAJ27)
CAGPGNTNAGKSTF

SEQ ID NO: 72854 - protein, 16 aa, Homo sapiens
  CDR3 for beta chain variable domain of TCR clone 36427 (TRBV4-1, TRBJ2-6)
CASSQDGGPGANVPTF

SEQ ID NO: 72855 - protein, 12 aa, Homo sapiens
  CDR3 for alpha chain variable domain of TCR clone 36428 (TRAV1-1, TRAJ8)
CAGGTGFQKLVF

SEQ ID NO: 72856 - protein, 17 aa, Homo sapiens
  CDR3 for beta chain variable domain of TCR clone 36428 (TRBV7-9, TRBJ1-4)
CASSRTGGFNEKLFLAV

SEQ ID NO: 72857 - protein, 12 aa, Homo sapiens
  CDR3 for alpha chain variable domain of TCR clone 36429 (TRAV2, TRAJ33)
CAFVDSNYQLIW

SEQ ID NO: 72858 - protein, 16 aa, Homo sapiens
  CDR3 for beta chain variable domain of TCR clone 36429 (TRBV2, TRBJ2-7)
CASSEPWTGPSYEQYF

SEQ ID NO: 72859 - protein, 17 aa, Homo sapiens
  CDR3 for alpha chain variable domain of TCR clone 36430 (TRAV8-6, TRAJ58)
CAVSSWVGETSGSRLTF

SEQ ID NO: 72860 - protein, 17 aa, Homo sapiens
  CDR3 for beta chain variable domain of TCR clone 36430 (TRBV11-2, TRBJ2-1)
CASSLYPPGVKYNEQFF

SEQ ID NO: 72861 - protein, 17 aa, Homo sapiens
  CDR3 for alpha chain variable domain of TCR clone 36431 (TRAV19, TRAJ32)
CALSERPYGGATNKLIF

SEQ ID NO: 72862 - protein, 15 aa, Homo sapiens
  CDR3 for beta chain variable domain of TCR clone 36431 (TRBV28, TRBJ1-3)
CASSMGWASGDTIYF

SEQ ID NO: 72863 - protein, 12 aa, Homo sapiens
  CDR3 for alpha chain variable domain of TCR clone 36432 (TRAV16, TRAJ10)
CSRTGGGNKLTF

SEQ ID NO: 72864 - protein, 14 aa, Homo sapiens
  CDR3 for beta chain variable domain of TCR clone 36432 (TRBV25-1, TRBJ1-1)
CASTHLGGNTEAFF

SEQ ID NO: 72865 - protein, 13 aa, Homo sapiens
  CDR3 for alpha chain variable domain of TCR clone 36433 (TRAV1-2, TRAJ9)
CAALYTGGFKTIF

SEQ ID NO: 72866 - protein, 13 aa, Homo sapiens
  CDR3 for beta chain variable domain of TCR clone 36433 (TRBV19, TRBJ1-2)
CASSVPGQDGYTF

SEQ ID NO: 72867 - protein, 14 aa, Homo sapiens
  CDR3 for alpha chain variable domain of TCR clone 36434 (TRAV13-1, TRAJ44)
CAAKATGTASKLTF

SEQ ID NO: 72868 - protein, 13 aa, Homo sapiens
  CDR3 for beta chain variable domain of TCR clone 36434 (TRBV5-5, TRBJ1-2)
CASSFRRGEDYTF

SEQ ID NO: 72869 - protein, 12 aa, Homo sapiens
  CDR3 for alpha chain variable domain of TCR clone 36435 (TRAV13-1, TRAJ36)
WRGGAGANNLFF

SEQ ID NO: 72870 - protein, 16 aa, Homo sapiens
  CDR3 for beta chain variable domain of TCR clone 36435 (TRBV7-9, TRBJ2-5)
CASRLEIGTRKGTQYF

SEQ ID NO: 72871 - protein, 16 aa, Homo sapiens
  CDR3 for alpha chain variable domain of TCR clone 36436 (TRAV12-3, TRAJ53)
CAMSPGSGGSYYKLTF

SEQ ID NO: 72872 - protein, 11 aa, Homo sapiens
  CDR3 for beta chain variable domain of TCR clone 36436 (TRBV29-1, TRBJ2-5)
CSEDRTGTQYF

SEQ ID NO: 72873 - protein, 14 aa, Homo sapiens
  CDR3 for alpha chain variable domain of TCR clone 36437 (TRAV12-1, TRAJ17)
CVVIYKAAGNKLTF

SEQ ID NO: 72874 - protein, 14 aa, Homo sapiens
  CDR3 for beta chain variable domain of TCR clone 36437 (TRBV28, TRBJ2-1)
CASSPSTGYNEQFF

SEQ ID NO: 72875 - protein, 15 aa, Homo sapiens
  CDR3 for alpha chain variable domain of TCR clone 36438 (TRAV12-2, TRAJ53)
CAVNGGGGSNYKLTF

SEQ ID NO: 72876 - protein, 17 aa, Homo sapiens
  CDR3 for beta chain variable domain of TCR clone 36438 (TRBV7-3, TRBJ2-3)
CASSLMKRMRGAYTQYF

SEQ ID NO: 72877 - protein, 12 aa, Homo sapiens
  CDR3 for alpha chain variable domain of TCR clone 36439 (TRAV20, TRAJ39)
CAVGNAGNMLTF

SEQ ID NO: 72878 - protein, 13 aa, Homo sapiens
  CDR3 for beta chain variable domain of TCR clone 36439 (TRBV2, TRBJ1-1)
CASSEGGNTEAFF

SEQ ID NO: 72879 - protein, 16 aa, Homo sapiens
  CDR3 for alpha chain variable domain of TCR clone 36440 (TRAV30, TRAJ24)
CGTEIVDADSWGKFQF

SEQ ID NO: 72880 - protein, 16 aa, Homo sapiens
  CDR3 for beta chain variable domain of TCR clone 36440 (TRBV7-6, TRBJ1-6)
CASSLSSRIGDSPLHF

SEQ ID NO: 72881 - protein, 11 aa, Homo sapiens
  CDR3 for alpha chain variable domain of TCR clone 36441 (TRAV3, TRAJ17)
PGGAAGNKLTF

SEQ ID NO: 72882 - protein, 16 aa, Homo sapiens
  CDR3 for beta chain variable domain of TCR clone 36441 (TRBV7-6, TRBJ2-1)
CASSAPGPSSYNEQFF

SEQ ID NO: 72883 - protein, 15 aa, Homo sapiens
  CDR3 for alpha chain variable domain of TCR clone 36442 (TRAV26-1, TRAJ40)
CIVRAVPSGTYKYIF

SEQ ID NO: 72884 - protein, 14 aa, Homo sapiens
  CDR3 for beta chain variable domain of TCR clone 36442 (TRBV19, TRBJ2-1)
WASKDPGLANEQFF

SEQ ID NO: 72885 - protein, 12 aa, Homo sapiens
  CDR3 for alpha chain variable domain of TCR clone 36443 (TRAV21, TRAJ3)
CCFYSSASKIIL

SEQ ID NO: 72886 - protein, 16 aa, Homo sapiens
  CDR3 for beta chain variable domain of TCR clone 36443 (TRBV19, TRBJ2-1)
CASSKAGPSSYNEQFF

SEQ ID NO: 72887 - protein, 14 aa, Homo sapiens
  CDR3 for alpha chain variable domain of TCR clone 36444 (TRAV1-2, TRAJ8)
CAVREDTGFQKLVF

SEQ ID NO: 72888 - protein, 15 aa, Homo sapiens
  CDR3 for beta chain variable domain of TCR clone 36444 (TRBV6-3, TRBJ2-2)
CASSFLATLTGELFF

SEQ ID NO: 72889 - protein, 13 aa, Homo sapiens
  CDR3 for alpha chain variable domain of TCR clone 36445 (TRAV27, TRAJ42)
CAGARGSQGNLIF

SEQ ID NO: 72890 - protein, 16 aa, Homo sapiens
  CDR3 for beta chain variable domain of TCR clone 36445 (TRBV13, TRBJ2-3)
CQQPLQGSGGRNTQYF

SEQ ID NO: 72891 - protein, 14 aa, Homo sapiens
  CDR3 for alpha chain variable domain of TCR clone 36446 (TRAV26-1, TRAJ38)
CIADNAGNNRKLIW

SEQ ID NO: 72892 - protein, 14 aa, Homo sapiens
  CDR3 for beta chain variable domain of TCR clone 36446 (TRBV7-2, TRBJ2-7)
CASSPKTSFYEQYF

SEQ ID NO: 72893 - protein, 20 aa, Homo sapiens
  CDR3 for alpha chain variable domain of TCR clone 36447 (TRAV26-1, TRAJ42)
CCVLLHRQTYYGGSQGNLLF

SEQ ID NO: 72894 - protein, 16 aa, Homo sapiens
  CDR3 for beta chain variable domain of TCR clone 36447 (TRBV7-3, TRBJ2-2)
CASSLKRGTLSGELFF

SEQ ID NO: 72895 - protein, 13 aa, Homo sapiens
  CDR3 for alpha chain variable domain of TCR clone 36448 (TRAV12-2, TRAJ10)
CAVPTGGGNKLTF

SEQ ID NO: 72896 - protein, 11 aa, Homo sapiens
  CDR3 for beta chain variable domain of TCR clone 36448 (TRBV6-1, TRBJ2-1)
CASIGSNEQLF

SEQ ID NO: 72897 - protein, 16 aa, Homo sapiens
  CDR3 for alpha chain variable domain of TCR clone 36449 (TRAV8-3, TRAJ10)
CAVGPGVTGGGNKLTF

SEQ ID NO: 72898 - protein, 13 aa, Homo sapiens
  CDR3 for beta chain variable domain of TCR clone 36449 (TRBV18, TRBJ1-1)
CASSPGPSGEALF

SEQ ID NO: 72899 - protein, 11 aa, Homo sapiens
  CDR3 for alpha chain variable domain of TCR clone 36450 (TRAV2, TRAJ33)
CAVDSNYQLIW

SEQ ID NO: 72900 - protein, 14 aa, Homo sapiens
  CDR3 for beta chain variable domain of TCR clone 36450 (TRBV25-1, TRBJ1-1)
CASTHLGGNTEAFF

SEQ ID NO: 72901 - protein, 13 aa, Homo sapiens
  CDR3 for alpha chain variable domain of TCR clone 36451 (TRAV21, TRAJ20)
CAVGLGVDYKLSF

SEQ ID NO: 72902 - protein, 13 aa, Homo sapiens
  CDR3 for beta chain variable domain of TCR clone 36451 (TRBV6-1, TRBJ1-1)
CASSRQGNTEAFF

SEQ ID NO: 72903 - protein, 18 aa, Homo sapiens
  CDR3 for alpha chain variable domain of TCR clone 36452 (TRAV9-2, TRAJ52)
CALSRHNAGGTRYGKLTF

SEQ ID NO: 72904 - protein, 13 aa, Homo sapiens
  CDR3 for beta chain variable domain of TCR clone 36452 (TRBV7-9, TRBJ1-2)
CASSLKQNYGYTF

SEQ ID NO: 72905 - protein, 11 aa, Homo sapiens
  CDR3 for alpha chain variable domain of TCR clone 36453 (TRAV13-1, TRAJ39)
CASHAGNMLTF

SEQ ID NO: 72906 - protein, 14 aa, Homo sapiens
  CDR3 for beta chain variable domain of TCR clone 36453 (TRBV25-1, TRBJ1-1)
CASTHLGGNTEAFF

SEQ ID NO: 72907 - protein, 13 aa, Homo sapiens
  CDR3 for alpha chain variable domain of TCR clone 36454 (TRAV35, TRAJ57)
CAGSQGGSEKLVF

SEQ ID NO: 72908 - protein, 14 aa, Homo sapiens
  CDR3 for beta chain variable domain of TCR clone 36454 (TRBV25-1, TRBJ1-1)
CASTHLGGNTEALF

SEQ ID NO: 72909 - protein, 16 aa, Homo sapiens
  CDR3 for alpha chain variable domain of TCR clone 36455 (TRAV4, TRAJ42)
CLVGPIYGGSQGNLIF

SEQ ID NO: 72910 - protein, 15 aa, Homo sapiens
  CDR3 for beta chain variable domain of TCR clone 36455 (TRBV20-1, TRBJ2-7)
CSARVPAAYFYEQYF

SEQ ID NO: 72911 - protein, 13 aa, Homo sapiens
  CDR3 for alpha chain variable domain of TCR clone 36456 (TRAV2, TRAJ29)
CAAGNSGNTPLVF

SEQ ID NO: 72912 - protein, 16 aa, Homo sapiens
  CDR3 for beta chain variable domain of TCR clone 36456 (TRBV7-9, TRBJ1-2)
CASSTGGGAINYGYTF

SEQ ID NO: 72913 - protein, 14 aa, Homo sapiens
  CDR3 for alpha chain variable domain of TCR clone 36457 (TRAV12-3, TRAJ42)
CAMNYGGSQGNLIF

SEQ ID NO: 72914 - protein, 15 aa, Homo sapiens
  CDR3 for beta chain variable domain of TCR clone 36457 (TRBV5-7, TRBJ1-5)
CASSYGKLRDQPQHF

SEQ ID NO: 72915 - protein, 16 aa, Homo sapiens
  CDR3 for alpha chain variable domain of TCR clone 36458 (TRAV14/DV4, TRAJ9)
CAVREGRSRDDYKLSF

SEQ ID NO: 72916 - protein, 14 aa, Homo sapiens
  CDR3 for beta chain variable domain of TCR clone 36458 (TRBV19, TRBJ2-5)
CASSMTGQQETQYF

SEQ ID NO: 72917 - protein, 19 aa, Homo sapiens
  CDR3 for alpha chain variable domain of TCR clone 36459 (TRAV1-2, TRAJ26)
CLLPLCCERPDNYGQNFVF

SEQ ID NO: 72918 - protein, 12 aa, Homo sapiens
  CDR3 for beta chain variable domain of TCR clone 36459 (TRBV11-2, TRBJ2-2)
CASSLGGGELFF

SEQ ID NO: 72919 - protein, 11 aa, Homo sapiens
  CDR3 for alpha chain variable domain of TCR clone 36460 (TRAV3, TRAJ21)
CAVGNFNKFYF

SEQ ID NO: 72920 - protein, 13 aa, Homo sapiens
  CDR3 for beta chain variable domain of TCR clone 36460 (TRBV11-2, TRBJ2-5)
CASSSTGEETQYF

SEQ ID NO: 72921 - protein, 17 aa, Homo sapiens
  CDR3 for alpha chain variable domain of TCR clone 36461 (TRAV8-6, TRAJ58)
CAVSSWVGETSGTRLTF

SEQ ID NO: 72922 - protein, 14 aa, Homo sapiens
  CDR3 for beta chain variable domain of TCR clone 36461 (TRBV4-2, TRBJ2-1)
CASGLDRAYNEQFF

SEQ ID NO: 72923 - protein, 14 aa, Homo sapiens
  CDR3 for alpha chain variable domain of TCR clone 36462 (TRAV13-2, TRAJ43)
RAEIPTYNNNDMRF

SEQ ID NO: 72924 - protein, 15 aa, Homo sapiens
  CDR3 for beta chain variable domain of TCR clone 36462 (TRBV7-9, TRBJ2-2)
CASGPLDTFPGELFF

SEQ ID NO: 72925 - protein, 14 aa, Homo sapiens
  CDR3 for alpha chain variable domain of TCR clone 36463 (TRAV12-3, TRAJ12)
CAMSEVDSSYKLIF

SEQ ID NO: 72926 - protein, 17 aa, Homo sapiens
  CDR3 for beta chain variable domain of TCR clone 36463 (TRBV7-3, TRBJ2-3)
CASSPRGQGYGTDTQYF

SEQ ID NO: 72927 - protein, 13 aa, Homo sapiens
  CDR3 for alpha chain variable domain of TCR clone 36464 (TRAV21, TRAJ20)
CAVGLRVDYKLSF

SEQ ID NO: 72928 - protein, 14 aa, Homo sapiens
  CDR3 for beta chain variable domain of TCR clone 36464 (TRBV7-6, TRBJ2-3)
CASSLGTVTDTQYF

SEQ ID NO: 72929 - protein, 12 aa, Homo sapiens
  CDR3 for alpha chain variable domain of TCR clone 36465 (TRAV17, TRAJ13)
CATDGGYQKVTF

SEQ ID NO: 72930 - protein, 13 aa, Homo sapiens
  CDR3 for beta chain variable domain of TCR clone 36465 (TRBV27, TRBJ1-4)
CASSLMGDEKLFF

SEQ ID NO: 72931 - protein, 11 aa, Homo sapiens
  CDR3 for alpha chain variable domain of TCR clone 36466 (TRAV2, TRAJ21)
CAVFNFNKFYF

SEQ ID NO: 72932 - protein, 13 aa, Homo sapiens
  CDR3 for beta chain variable domain of TCR clone 36466 (TRBV5-7, TRBJ1-2)
CASSLIRAPGYTF

SEQ ID NO: 72933 - protein, 14 aa, Homo sapiens
  CDR3 for alpha chain variable domain of TCR clone 36467 (TRAV12-2, TRAJ24)
CAVTPADSWGKLQV

SEQ ID NO: 72934 - protein, 12 aa, Homo sapiens
  CDR3 for beta chain variable domain of TCR clone 36467 (TRBV3-1, TRBJ2-1)
CASSQGSSGQFF

SEQ ID NO: 72935 - protein, 14 aa, Homo sapiens
  CDR3 for alpha chain variable domain of TCR clone 36468 (TRAV17, TRAJ57)
CATDPQGGSEKLVF

SEQ ID NO: 72936 - protein, 16 aa, Homo sapiens
  CDR3 for beta chain variable domain of TCR clone 36468 (TRBV4-1, TRBJ1-1)
CASSQDAGMGNTEAFF

SEQ ID NO: 72937 - protein, 12 aa, Homo sapiens
  CDR3 for alpha chain variable domain of TCR clone 36469 (TRAV9-2, TRAJ5)
CVVDTGRRALTF

SEQ ID NO: 72938 - protein, 14 aa, Homo sapiens
  CDR3 for beta chain variable domain of TCR clone 36469 (TRBV5-1, TRBJ1-1)
CASSSTGEDTEAFF

SEQ ID NO: 72939 - protein, 14 aa, Homo sapiens
  CDR3 for alpha chain variable domain of TCR clone 36470 (TRAV17, TRAJ53)
CATYAGGSNYKLTF

SEQ ID NO: 72940 - protein, 16 aa, Homo sapiens
  CDR3 for beta chain variable domain of TCR clone 36470 (TRBV4-1, TRBJ1-1)
CASSQDAGMGNTEAFF

SEQ ID NO: 72941 - protein, 14 aa, Homo sapiens
  CDR3 for alpha chain variable domain of TCR clone 36471 (TRAV1-2, TRAJ16)
CAVNRFSDGQKLLF

SEQ ID NO: 72942 - protein, 11 aa, Homo sapiens
  CDR3 for beta chain variable domain of TCR clone 36471 (TRBV4-1, TRBJ2-2)
CASEHTGELSF

SEQ ID NO: 72943 - protein, 15 aa, Homo sapiens
  CDR3 for alpha chain variable domain of TCR clone 36472 (TRAV2, TRAJ9)
CAVEDRGTGGFKTIF

SEQ ID NO: 72944 - protein, 14 aa, Homo sapiens
  CDR3 for beta chain variable domain of TCR clone 36472 (TRBV6-1, TRBJ1-3)
CASVQGGGGNTIYF

SEQ ID NO: 72945 - protein, 12 aa, Homo sapiens
  CDR3 for alpha chain variable domain of TCR clone 36473 (TRAV35, TRAJ39)
LAPNNAGNMLTF

SEQ ID NO: 72946 - protein, 16 aa, Homo sapiens
  CDR3 for beta chain variable domain of TCR clone 36473 (TRBV2, TRBJ2-3)
CASSTSVEGATDTQYF

SEQ ID NO: 72947 - protein, 16 aa, Homo sapiens
  CDR3 for alpha chain variable domain of TCR clone 36474 (TRAV12-3, TRAJ53)
CAMSPGSGGSNHKLTF

SEQ ID NO: 72948 - protein, 16 aa, Homo sapiens
  CDR3 for beta chain variable domain of TCR clone 36474 (TRBV4-2, TRBJ1-1)
CASSQAGFGMNTEAFF

SEQ ID NO: 72949 - protein, 17 aa, Homo sapiens
  CDR3 for alpha chain variable domain of TCR clone 36475 (TRAV3, TRAJ6)
CAVRDGPRAGGSYIPTF

SEQ ID NO: 72950 - protein, 19 aa, Homo sapiens
  CDR3 for beta chain variable domain of TCR clone 36475 (TRBV7-2, TRBJ2-3)
CASSFLSRNWGGGTDTQYF

SEQ ID NO: 72951 - protein, 15 aa, Homo sapiens
  CDR3 for alpha chain variable domain of TCR clone 36476 (TRAV26-1, TRAJ23)
CIVRVLNNQGGKLIF

SEQ ID NO: 72952 - protein, 15 aa, Homo sapiens
  CDR3 for beta chain variable domain of TCR clone 36476 (TRBV7-3, TRBJ2-1)
CASSFGQSNYSEQFF

SEQ ID NO: 72953 - protein, 13 aa, Homo sapiens
  CDR3 for alpha chain variable domain of TCR clone 36477 (TRAV8-6, TRAJ21)
CAVSPSSLYKFYF

SEQ ID NO: 72954 - protein, 13 aa, Homo sapiens
  CDR3 for beta chain variable domain of TCR clone 36477 (TRBV29-1, TRBJ2-1)
CSVEGGRVNEQFF

SEQ ID NO: 72955 - protein, 14 aa, Homo sapiens
  CDR3 for alpha chain variable domain of TCR clone 36478 (TRAV3, TRAJ9)
CSVRLNTGGFKTIF

SEQ ID NO: 72956 - protein, 15 aa, Homo sapiens
  CDR3 for beta chain variable domain of TCR clone 36478 (TRBV7-2, TRBJ2-1)
CASSLASGRVNEQFF

SEQ ID NO: 72957 - protein, 15 aa, Homo sapiens
  CDR3 for alpha chain variable domain of TCR clone 36479 (TRAV21, TRAJ40)
CAVRPQTSGTSKYIF

SEQ ID NO: 72958 - protein, 13 aa, Homo sapiens
  CDR3 for beta chain variable domain of TCR clone 36479 (TRBV7-2, TRBJ2-2)
CASSSVRAGELFF

SEQ ID NO: 72959 - protein, 16 aa, Homo sapiens
  CDR3 for alpha chain variable domain of TCR clone 36480 (TRAV30, TRAJ24)
CGTEIVGADSWGNSSL

SEQ ID NO: 72960 - protein, 15 aa, Homo sapiens
  CDR3 for beta chain variable domain of TCR clone 36480 (TRBV7-9, TRBJ1-4)
CASSARTGGNEKLFF

SEQ ID NO: 72961 - protein, 11 aa, Homo sapiens
  CDR3 for alpha chain variable domain of TCR clone 36481 (TRAV8-2, TRAJ26)
CAVTLLLGSEF

SEQ ID NO: 72962 - protein, 15 aa, Homo sapiens
  CDR3 for beta chain variable domain of TCR clone 36481 (TRBV11-2, TRBJ2-2)
CASSSDRVNAGELFF

SEQ ID NO: 72963 - protein, 15 aa, Homo sapiens
  CDR3 for alpha chain variable domain of TCR clone 36482 (TRAV27, TRAJ53)
CRAINSGGSNYKLTF

SEQ ID NO: 72964 - protein, 11 aa, Homo sapiens
  CDR3 for beta chain variable domain of TCR clone 36482 (TRBV29-1, TRBJ2-5)
CSEDRTGTQYF

SEQ ID NO: 72965 - protein, 12 aa, Homo sapiens
  CDR3 for alpha chain variable domain of TCR clone 36483 (TRAV8-6, TRAJ8)
CAVTPGFQKLVF

SEQ ID NO: 72966 - protein, 15 aa, Homo sapiens
  CDR3 for beta chain variable domain of TCR clone 36483 (TRBV7-3, TRBJ2-2)
CQQLKAGTLSGELFF

SEQ ID NO: 72967 - protein, 10 aa, Homo sapiens
  CDR3 for alpha chain variable domain of TCR clone 36484 (TRAV1-2, TRAJ26)
CAVNGQNFVF

SEQ ID NO: 72968 - protein, 15 aa, Homo sapiens
  CDR3 for beta chain variable domain of TCR clone 36484 (TRBV9, TRBJ1-6)
CASSVAGTGDSPLHF

SEQ ID NO: 72969 - protein, 15 aa, Homo sapiens
  CDR3 for alpha chain variable domain of TCR clone 36485 (TRAV3, TRAJ5)
CAVRDLDTGRRALTF

SEQ ID NO: 72970 - protein, 13 aa, Homo sapiens
  CDR3 for beta chain variable domain of TCR clone 36485 (TRBV12-4, TRBJ2-7)
CASSQTETYEQYF

SEQ ID NO: 72971 - protein, 16 aa, Homo sapiens
  CDR3 for alpha chain variable domain of TCR clone 36486 (TRAV23/DV6, TRAJ9)
CAASIGGNTGGFKTIF

SEQ ID NO: 72972 - protein, 12 aa, Homo sapiens
  CDR3 for beta chain variable domain of TCR clone 36486 (TRBV12-4, TRBJ1-3)
CASSFSGNTIYF

SEQ ID NO: 72973 - protein, 13 aa, Homo sapiens
  CDR3 for alpha chain variable domain of TCR clone 36487 (TRAV35, TRAJ42)
CAGFPGSKGNLIF

SEQ ID NO: 72974 - protein, 13 aa, Homo sapiens
  CDR3 for beta chain variable domain of TCR clone 36487 (TRBV29-1, TRBJ2-1)
CSVEGGRVNEQFF

SEQ ID NO: 72975 - protein, 13 aa, Homo sapiens
  CDR3 for alpha chain variable domain of TCR clone 36488 (TRAV12-2, TRAJ54)
CLQEDQGAQKLVF

SEQ ID NO: 72976 - protein, 17 aa, Homo sapiens
  CDR3 for beta chain variable domain of TCR clone 36488 (TRBV4-2, TRBJ2-1)
CASSQFPGQGIYNEQFF

SEQ ID NO: 72977 - protein, 15 aa, Homo sapiens
  CDR3 for alpha chain variable domain of TCR clone 36489 (TRAV26-1, TRAJ44)
CIVRADTGTASKLTF

SEQ ID NO: 72978 - protein, 16 aa, Homo sapiens
  CDR3 for beta chain variable domain of TCR clone 36489 (TRBV7-7, TRBJ2-1)
CASSLASGTSYNEQFF

SEQ ID NO: 72979 - protein, 16 aa, Homo sapiens
  CDR3 for alpha chain variable domain of TCR clone 36490 (TRAV16, TRAJ52)
CALSAAGGTSYGKLTF

SEQ ID NO: 72980 - protein, 11 aa, Homo sapiens
  CDR3 for beta chain variable domain of TCR clone 36490 (TRBV12-4, TRBJ2-3)
CASTATDTQYF

SEQ ID NO: 72981 - protein, 12 aa, Homo sapiens
  CDR3 for alpha chain variable domain of TCR clone 36491 (TRAV8-3, TRAJ20)
CAVGANHYKLSF

SEQ ID NO: 72982 - protein, 16 aa, Homo sapiens
  CDR3 for beta chain variable domain of TCR clone 36491 (TRBV19, TRBJ2-2)
CASRSPGTGATGELFF

SEQ ID NO: 72983 - protein, 12 aa, Homo sapiens
  CDR3 for alpha chain variable domain of TCR clone 36492 (TRAV21, TRAJ11)
CAATSGYSTLTF

SEQ ID NO: 72984 - protein, 14 aa, Homo sapiens
  CDR3 for beta chain variable domain of TCR clone 36492 (TRBV20-1, TRBJ2-7)
CSAPELARVGEQYF

SEQ ID NO: 72985 - protein, 14 aa, Homo sapiens
  CDR3 for alpha chain variable domain of TCR clone 36493 (TRAV12-3, TRAJ9)
CSMSPNTGGFKTIF

SEQ ID NO: 72986 - protein, 12 aa, Homo sapiens
  CDR3 for beta chain variable domain of TCR clone 36493 (TRBV19, TRBJ1-5)
CASSIAQQPQHF

SEQ ID NO: 72987 - protein, 14 aa, Homo sapiens
  CDR3 for alpha chain variable domain of TCR clone 36494 (TRAV26-1, TRAJ38)
CIADNAGNNRRLIW

SEQ ID NO: 72988 - protein, 13 aa, Homo sapiens
  CDR3 for beta chain variable domain of TCR clone 36494 (TRBV20-1, TRBJ1-1)
CNARGGGNTEAFF

SEQ ID NO: 72989 - protein, 14 aa, Homo sapiens
  CDR3 for alpha chain variable domain of TCR clone 36495 (TRAV26-2, TRAJ32)
CCVGFGGATNKLIF

SEQ ID NO: 72990 - protein, 14 aa, Homo sapiens
  CDR3 for beta chain variable domain of TCR clone 36495 (TRBV4-2, TRBJ2-1)
CASGLDRAYNEQFF

SEQ ID NO: 72991 - protein, 13 aa, Homo sapiens
  CDR3 for alpha chain variable domain of TCR clone 36496 (TRAV38-2/DV8, TRAJ34)
CAYRTWNTDKLIF

SEQ ID NO: 72992 - protein, 16 aa, Homo sapiens
  CDR3 for beta chain variable domain of TCR clone 36496 (TRBV19, TRBJ2-1)
CDSSKAGPSSYNEQFF

SEQ ID NO: 72993 - protein, 20 aa, Homo sapiens
  CDR3 for alpha chain variable domain of TCR clone 36497 (TRAV25, TRAJ21)
TATQTTDVGTYPLSFNKFYF

SEQ ID NO: 72994 - protein, 14 aa, Homo sapiens
  CDR3 for beta chain variable domain of TCR clone 36497 (TRBV5-1, TRBJ2-7)
CASSRGESLYEQYF

SEQ ID NO: 72995 - protein, 15 aa, Homo sapiens
  CDR3 for alpha chain variable domain of TCR clone 36498 (TRAV20, TRAJ53)
CAAQASGGSNYKLTF

SEQ ID NO: 72996 - protein, 12 aa, Homo sapiens
  CDR3 for beta chain variable domain of TCR clone 36498 (TRBV7-6, TRBJ2-5)
CASSLSQETQYF

SEQ ID NO: 72997 - protein, 13 aa, Homo sapiens
  CDR3 for alpha chain variable domain of TCR clone 36499 (TRAV21, TRAJ15)
CAVANQAGTALVF

SEQ ID NO: 72998 - protein, 15 aa, Homo sapiens
  CDR3 for beta chain variable domain of TCR clone 36499 (TRBV27, TRBJ2-7)
CASSLGSSVSPEQYF

SEQ ID NO: 72999 - protein, 12 aa, Homo sapiens
  CDR3 for alpha chain variable domain of TCR clone 36500 (TRAV12-3, TRAJ17)
CAMTLTGNKLTF

SEQ ID NO: 73000 - protein, 15 aa, Homo sapiens
  CDR3 for beta chain variable domain of TCR clone 36500 (TRBV6-3, TRBJ2-2)
CASSFLATLTGELFF

SEQ ID NO: 73001 - protein, 16 aa, Homo sapiens
  CDR3 for alpha chain variable domain of TCR clone 36501 (TRAV30, TRAJ24)
CGTEIVDADSWGKFQF

SEQ ID NO: 73002 - protein, 15 aa, Homo sapiens
  CDR3 for beta chain variable domain of TCR clone 36501 (TRBV27, TRBJ2-5)
CASSLYPRGGETQYF

SEQ ID NO: 73003 - protein, 14 aa, Homo sapiens
  CDR3 for alpha chain variable domain of TCR clone 36502 (TRAV38-1, TRAJ40)
CALRPTSGTYKYIF

SEQ ID NO: 73004 - protein, 14 aa, Homo sapiens
  CDR3 for beta chain variable domain of TCR clone 36502 (TRBV7-2, TRBJ2-7)
CASSPKTSFYEQYF

SEQ ID NO: 73005 - protein, 14 aa, Homo sapiens
  CDR3 for alpha chain variable domain of TCR clone 36503 (TRAV17, TRAJ16)
CATADFSDGKKLLF

SEQ ID NO: 73006 - protein, 15 aa, Homo sapiens
  CDR3 for beta chain variable domain of TCR clone 36503 (TRBV18, TRBJ2-1)
CASSPPSASYNEQFF

SEQ ID NO: 73007 - protein, 15 aa, Homo sapiens
  CDR3 for alpha chain variable domain of TCR clone 36504 (TRAV27, TRAJ38)
CAARRNAGNNRKLLW

SEQ ID NO: 73008 - protein, 11 aa, Homo sapiens
  CDR3 for beta chain variable domain of TCR clone 36504 (TRBV12-4, TRBJ2-2)
CASSSAGELFF

SEQ ID NO: 73009 - protein, 14 aa, Homo sapiens
  CDR3 for alpha chain variable domain of TCR clone 36505 (TRAV1-1, TRAJ27)
CAVIYNTNVGKSTF

SEQ ID NO: 73010 - protein, 15 aa, Homo sapiens
  CDR3 for beta chain variable domain of TCR clone 36505 (TRBV7-2, TRBJ2-1)
CASSSGLAGGNEQFF

SEQ ID NO: 73011 - protein, 16 aa, Homo sapiens
  CDR3 for alpha chain variable domain of TCR clone 36506 (TRAV4, TRAJ22)
CLVGDLYSGSARQLTF

SEQ ID NO: 73012 - protein, 15 aa, Homo sapiens
  CDR3 for beta chain variable domain of TCR clone 36506 (TRBV9, TRBJ1-6)
CASSVAGTGDSPLHF

SEQ ID NO: 73013 - protein, 16 aa, Homo sapiens
  CDR3 for alpha chain variable domain of TCR clone 36507 (TRAV12-2, TRAJ32)
CAVNLGQGGATNKLLF

SEQ ID NO: 73014 - protein, 15 aa, Homo sapiens
  CDR3 for beta chain variable domain of TCR clone 36507 (TRBV20-1, TRBJ2-7)
CSARGPLAGGREQYF

SEQ ID NO: 73015 - protein, 12 aa, Homo sapiens
  CDR3 for alpha chain variable domain of TCR clone 36508 (TRAV17, TRAJ30)
CATDARDDKIIF

SEQ ID NO: 73016 - protein, 14 aa, Homo sapiens
  CDR3 for beta chain variable domain of TCR clone 36508 (TRBV4-1, TRBJ2-1)
RQQPRGELYNEQFF

SEQ ID NO: 73017 - protein, 13 aa, Homo sapiens
  CDR3 for alpha chain variable domain of TCR clone 36509 (TRAV2, TRAJ29)
CAAGNSGNTPLVF

SEQ ID NO: 73018 - protein, 16 aa, Homo sapiens
  CDR3 for beta chain variable domain of TCR clone 36509 (TRBV7-9, TRBJ1-2)
CASSPGEGAINYGYTF

SEQ ID NO: 73019 - protein, 13 aa, Homo sapiens
  CDR3 for alpha chain variable domain of TCR clone 36510 (TRAV17, TRAJ4)
CATKSGGYNKLIF

SEQ ID NO: 73020 - protein, 14 aa, Homo sapiens
  CDR3 for beta chain variable domain of TCR clone 36510 (TRBV20-1, TRBJ1-5)
CSARDDRGNRPQHF

SEQ ID NO: 73021 - protein, 14 aa, Homo sapiens
  CDR3 for alpha chain variable domain of TCR clone 36511 (TRAV8-6, TRAJ49)
CAVSDPGTGNQFYF

SEQ ID NO: 73022 - protein, 16 aa, Homo sapiens
  CDR3 for beta chain variable domain of TCR clone 36511 (TRBV24-1, TRBJ2-1)
CATSGVTGADYNEQFF

SEQ ID NO: 73023 - protein, 13 aa, Homo sapiens
  CDR3 for alpha chain variable domain of TCR clone 36512 (TRAV30, TRAJ6)
CGFIEGGSYMPTF

SEQ ID NO: 73024 - protein, 13 aa, Homo sapiens
  CDR3 for beta chain variable domain of TCR clone 36512 (TRBV5-4, TRBJ2-5)
CASSPVSQETQYF

SEQ ID NO: 73025 - protein, 11 aa, Homo sapiens
  CDR3 for alpha chain variable domain of TCR clone 36513 (TRAV2, TRAJ33)
CAVESNYQLIW

SEQ ID NO: 73026 - protein, 16 aa, Homo sapiens
  CDR3 for beta chain variable domain of TCR clone 36513 (TRBV12-5, TRBJ2-5)
CASGPRTSGNQETQYF

SEQ ID NO: 73027 - protein, 12 aa, Homo sapiens
  CDR3 for alpha chain variable domain of TCR clone 36514 (TRAV22, TRAJ45)
CAVGGGADGLTF

SEQ ID NO: 73028 - protein, 15 aa, Homo sapiens
  CDR3 for beta chain variable domain of TCR clone 36514 (TRBV11-3, TRBJ2-3)
CASLKDGREGDTQYF

SEQ ID NO: 73029 - protein, 18 aa, Homo sapiens
  CDR3 for alpha chain variable domain of TCR clone 36515 (TRAV29/DV5, TRAJ3)
QCTSVQQPLNSSASKIIF

SEQ ID NO: 73030 - protein, 16 aa, Homo sapiens
  CDR3 for beta chain variable domain of TCR clone 36515 (TRBV24-1, TRBJ2-3)
CATSDPGTGATDTQYF

SEQ ID NO: 73031 - protein, 16 aa, Homo sapiens
  CDR3 for alpha chain variable domain of TCR clone 36516 (TRAV35, TRAJ28)
CAGQRYSGAGSYQLTF

SEQ ID NO: 73032 - protein, 13 aa, Homo sapiens
  CDR3 for beta chain variable domain of TCR clone 36516 (TRBV19, TRBJ1-2)
CASSQGQVYGYTS

SEQ ID NO: 73033 - protein, 15 aa, Homo sapiens
  CDR3 for alpha chain variable domain of TCR clone 36517 (TRAV23/DV6, TRAJ38)
CAARSNAGNNRKLIW

SEQ ID NO: 73034 - protein, 16 aa, Homo sapiens
  CDR3 for beta chain variable domain of TCR clone 36517 (TRBV10-2, TRBJ1-5)
CASSRDRDYSNQPQHF

SEQ ID NO: 73035 - protein, 14 aa, Homo sapiens
  CDR3 for alpha chain variable domain of TCR clone 36518 (TRAV26-1, TRAJ40)
CIVRVARGTYKYIL

SEQ ID NO: 73036 - protein, 14 aa, Homo sapiens
  CDR3 for beta chain variable domain of TCR clone 36518 (TRBV7-3, TRBJ2-7)
CASSLKADSYEQYF

SEQ ID NO: 73037 - protein, 14 aa, Homo sapiens
  CDR3 for alpha chain variable domain of TCR clone 36519 (TRAV8-3, TRAJ15)
CAVGRHQAETALIF

SEQ ID NO: 73038 - protein, 13 aa, Homo sapiens
  CDR3 for beta chain variable domain of TCR clone 36519 (TRBV9, TRBJ2-7)
CASSASDSYEQYF

SEQ ID NO: 73039 - protein, 13 aa, Homo sapiens
  CDR3 for alpha chain variable domain of TCR clone 36520 (TRAV13-1, TRAJ5)
CVASDTGRRALTF

SEQ ID NO: 73040 - protein, 12 aa, Homo sapiens
  CDR3 for beta chain variable domain of TCR clone 36520 (TRBV28, TRBJ2-3)
CASSLYRDTQYF

SEQ ID NO: 73041 - protein, 13 aa, Homo sapiens
  CDR3 for alpha chain variable domain of TCR clone 36521 (TRAV3, TRAJ21)
GAVREPDFNKFYF

SEQ ID NO: 73042 - protein, 13 aa, Homo sapiens
  CDR3 for beta chain variable domain of TCR clone 36521 (TRBV9, TRBJ2-1)
CASSPSGGNEQFF

SEQ ID NO: 73043 - protein, 14 aa, Homo sapiens
  CDR3 for alpha chain variable domain of TCR clone 36522 (TRAV12-3, TRAJ9)
CAMSPNTGGFKTIF

SEQ ID NO: 73044 - protein, 12 aa, Homo sapiens
  CDR3 for beta chain variable domain of TCR clone 36522 (TRBV11-2, TRBJ2-2)
CASSLGGGGLFF

SEQ ID NO: 73045 - protein, 13 aa, Homo sapiens
  CDR3 for alpha chain variable domain of TCR clone 36523 (TRAV27, TRAJ41)
CAGEGNSGYALNF

SEQ ID NO: 73046 - protein, 14 aa, Homo sapiens
  CDR3 for beta chain variable domain of TCR clone 36523 (TRBV25-1, TRBJ1-1)
CANTHLGGNTEAFF

SEQ ID NO: 73047 - protein, 17 aa, Homo sapiens
  CDR3 for alpha chain variable domain of TCR clone 36524 (TRAV3, TRAJ38)
CAVRDCLNAGNNRKLIW

SEQ ID NO: 73048 - protein, 16 aa, Homo sapiens
  CDR3 for beta chain variable domain of TCR clone 36524 (TRBV7-3, TRBJ2-2)
CASSLKRGTLSGELFF

SEQ ID NO: 73049 - protein, 13 aa, Homo sapiens
  CDR3 for alpha chain variable domain of TCR clone 36525 (TRAV25, TRAJ40)
CAGSASGAYKYIF

SEQ ID NO: 73050 - protein, 14 aa, Homo sapiens
  CDR3 for beta chain variable domain of TCR clone 36525 (TRBV7-2, TRBJ2-7)
CASRSQGAAYEQYF

SEQ ID NO: 73051 - protein, 15 aa, Homo sapiens
  CDR3 for alpha chain variable domain of TCR clone 36526 (TRAV23/DV6, TRAJ13)
CAAWPGGGGYQEVTF

SEQ ID NO: 73052 - protein, 17 aa, Homo sapiens
  CDR3 for beta chain variable domain of TCR clone 36526 (TRBV19, TRBJ2-7)
CASSISFYDSYPYEQYF

SEQ ID NO: 73053 - protein, 13 aa, Homo sapiens
  CDR3 for alpha chain variable domain of TCR clone 36527 (TRAV25, TRAJ48)
CAGPKGGNEKLTF

SEQ ID NO: 73054 - protein, 15 aa, Homo sapiens
  CDR3 for beta chain variable domain of TCR clone 36527 (TRBV9, TRBJ2-6)
CAGSVLWNGANVLTS

SEQ ID NO: 73055 - protein, 16 aa, Homo sapiens
  CDR3 for alpha chain variable domain of TCR clone 36528 (TRAV3, TRAJ37)
CAVRGKGSGNTGKLIF

SEQ ID NO: 73056 - protein, 15 aa, Homo sapiens
  CDR3 for beta chain variable domain of TCR clone 36528 (TRBV7-9, TRBJ2-2)
CASGPLDTFPGGLFF

SEQ ID NO: 73057 - protein, 12 aa, Homo sapiens
  CDR3 for alpha chain variable domain of TCR clone 36529 (TRAV21, TRAJ33)
CAKMDSNYQLIW

SEQ ID NO: 73058 - protein, 15 aa, Homo sapiens
  CDR3 for beta chain variable domain of TCR clone 36529 (TRBV20-1, TRBJ2-7)
CSARDRVSGMDEQYF

SEQ ID NO: 73059 - protein, 13 aa, Homo sapiens
  CDR3 for alpha chain variable domain of TCR clone 36530 (TRAV27, TRAJ8)
CAGGPTGFQKLVS

SEQ ID NO: 73060 - protein, 15 aa, Homo sapiens
  CDR3 for beta chain variable domain of TCR clone 36530 (TRBV6-1, TRBJ2-7)
CASSESMGDFYEQYF

SEQ ID NO: 73061 - protein, 16 aa, Homo sapiens
  CDR3 for alpha chain variable domain of TCR clone 36531 (TRAV30, TRAJ24)
CGTEIVDADSWGKFQF

SEQ ID NO: 73062 - protein, 16 aa, Homo sapiens
  CDR3 for beta chain variable domain of TCR clone 36531 (TRBV6-1, TRBJ2-5)
CASSETLDRGAETQHF

SEQ ID NO: 73063 - protein, 20 aa, Homo sapiens
  CDR3 for alpha chain variable domain of TCR clone 36532 (TRAV12-1, TRAJ42)
SSVIQPPTSVKGGSQGNLIF

SEQ ID NO: 73064 - protein, 18 aa, Homo sapiens
  CDR3 for beta chain variable domain of TCR clone 36532 (TRBV11-2, TRBJ2-3)
CASSLGGASRGAPNTQYS

SEQ ID NO: 73065 - protein, 11 aa, Homo sapiens
  CDR3 for alpha chain variable domain of TCR clone 36533 (TRAV2, TRAJ21)
CAVFNFNKFYF

SEQ ID NO: 73066 - protein, 14 aa, Homo sapiens
  CDR3 for beta chain variable domain of TCR clone 36533 (TRBV15, TRBJ2-3)
CVTRSGTSTDTQYF

SEQ ID NO: 73067 - protein, 19 aa, Homo sapiens
  CDR3 for alpha chain variable domain of TCR clone 36534 (TRAV29/DV5, TRAJ49)
CSVLLCSKLTVDTGNQFYF

SEQ ID NO: 73068 - protein, 14 aa, Homo sapiens
  CDR3 for beta chain variable domain of TCR clone 36534 (TRBV7-2, TRBJ2-7)
CASRSQGAAYEQYF

SEQ ID NO: 73069 - protein, 12 aa, Homo sapiens
  CDR3 for alpha chain variable domain of TCR clone 36535 (TRAV12-2, TRAJ47)
CAVAEYGNKLVL

SEQ ID NO: 73070 - protein, 14 aa, Homo sapiens
  CDR3 for beta chain variable domain of TCR clone 36535 (TRBV20-1, TRBJ1-1)
CSAMGGTANTEAFF

SEQ ID NO: 73071 - protein, 14 aa, Homo sapiens
  CDR3 for alpha chain variable domain of TCR clone 36536 (TRAV8-4, TRAJ9)
CAVRINTGGFKTIF

SEQ ID NO: 73072 - protein, 17 aa, Homo sapiens
  CDR3 for beta chain variable domain of TCR clone 36536 (TRBV10-3, TRBJ2-6)
CAISESTAPSGANVLTF

SEQ ID NO: 73073 - protein, 13 aa, Homo sapiens
  CDR3 for alpha chain variable domain of TCR clone 36537 (TRAV1-1, TRAJ23)
CAVVANQGGKLIF

SEQ ID NO: 73074 - protein, 15 aa, Homo sapiens
  CDR3 for beta chain variable domain of TCR clone 36537 (TRBV7-9, TRBJ1-5)
CASSQGHQPNQPQHF

SEQ ID NO: 73075 - protein, 15 aa, Homo sapiens
  CDR3 for alpha chain variable domain of TCR clone 36538 (TRAV12-1, TRAJ44)
CVADLPTGTASKLTF

SEQ ID NO: 73076 - protein, 13 aa, Homo sapiens
  CDR3 for beta chain variable domain of TCR clone 36538 (TRBV6-5, TRBJ2-5)
CASSPQGGEAQYF

SEQ ID NO: 73077 - protein, 13 aa, Homo sapiens
  CDR3 for alpha chain variable domain of TCR clone 36539 (TRAV8-1, TRAJ39)
CAGLNTAGNMLTF

SEQ ID NO: 73078 - protein, 17 aa, Homo sapiens
  CDR3 for beta chain variable domain of TCR clone 36539 (TRBV19, TRBJ2-3)
CASSIDPAGGGTDTQYF

SEQ ID NO: 73079 - protein, 16 aa, Homo sapiens
  CDR3 for alpha chain variable domain of TCR clone 36540 (TRAV12-3, TRAJ53)
CAMSPGSGGSNYKLTF

SEQ ID NO: 73080 - protein, 14 aa, Homo sapiens
  CDR3 for beta chain variable domain of TCR clone 36540 (TRBV6-5, TRBJ1-2)
CASSYDGTGGGYTF

SEQ ID NO: 73081 - protein, 13 aa, Homo sapiens
  CDR3 for alpha chain variable domain of TCR clone 36541 (TRAV8-3, TRAJ36)
CAVGATGANNLFF

SEQ ID NO: 73082 - protein, 15 aa, Homo sapiens
  CDR3 for beta chain variable domain of TCR clone 36541 (TRBV7-2, TRBJ1-2)
CASSPRAGWNYGHTF

SEQ ID NO: 73083 - protein, 14 aa, Homo sapiens
  CDR3 for alpha chain variable domain of TCR clone 36542 (TRAV20, TRAJ18)
CAVGKGSTLGRLYF

SEQ ID NO: 73084 - protein, 14 aa, Homo sapiens
  CDR3 for beta chain variable domain of TCR clone 36542 (TRBV28, TRBJ2-4)
CASTQVTGVNIQYF

SEQ ID NO: 73085 - protein, 15 aa, Homo sapiens
  CDR3 for alpha chain variable domain of TCR clone 36543 (TRAV26-1, TRAJ38)
CIVRAEGGNNRKLIW

SEQ ID NO: 73086 - protein, 14 aa, Homo sapiens
  CDR3 for beta chain variable domain of TCR clone 36543 (TRBV7-6, TRBJ2-5)
CASSSPSGSETQYF

SEQ ID NO: 73087 - protein, 14 aa, Homo sapiens
  CDR3 for alpha chain variable domain of TCR clone 36544 (TRAV12-3, TRAJ10)
SHLPLTGGGNKLTF

SEQ ID NO: 73088 - protein, 14 aa, Homo sapiens
  CDR3 for beta chain variable domain of TCR clone 36544 (TRBV6-1, TRBJ1-3)
CASVQGGGGNTIYV

SEQ ID NO: 73089 - protein, 15 aa, Homo sapiens
  CDR3 for alpha chain variable domain of TCR clone 36545 (TRAV29/DV5, TRAJ57)
CAASLLRGGSEKLVF

SEQ ID NO: 73090 - protein, 13 aa, Homo sapiens
  CDR3 for beta chain variable domain of TCR clone 36545 (TRBV19, TRBJ2-2)
CASSIWSTGELFF

SEQ ID NO: 73091 - protein, 14 aa, Homo sapiens
  CDR3 for alpha chain variable domain of TCR clone 36546 (TRAV13-1, TRAJ35)
CAASKGGFGNVLHC

SEQ ID NO: 73092 - protein, 12 aa, Homo sapiens
  CDR3 for beta chain variable domain of TCR clone 36546 (TRBV11-2, TRBJ2-2)
CASSLPTGELFF

SEQ ID NO: 73093 - protein, 14 aa, Homo sapiens
  CDR3 for alpha chain variable domain of TCR clone 36547 (TRAV20, TRAJ42)
CAMQAGGSQGNLIF

SEQ ID NO: 73094 - protein, 14 aa, Homo sapiens
  CDR3 for beta chain variable domain of TCR clone 36547 (TRBV28, TRBJ1-2)
CASRIQGANYGYTF

SEQ ID NO: 73095 - protein, 12 aa, Homo sapiens
  CDR3 for alpha chain variable domain of TCR clone 36548 (TRAV13-1, TRAJ21)
CAAKEGFYKFYF

SEQ ID NO: 73096 - protein, 14 aa, Homo sapiens
  CDR3 for beta chain variable domain of TCR clone 36548 (TRBV5-4, TRBJ1-1)
CASSLDSRRDEAFF

SEQ ID NO: 73097 - protein, 13 aa, Homo sapiens
  CDR3 for alpha chain variable domain of TCR clone 36549 (TRAV22, TRAJ26)
CAVEHNYGQNFVF

SEQ ID NO: 73098 - protein, 16 aa, Homo sapiens
  CDR3 for beta chain variable domain of TCR clone 36549 (TRBV7-2, TRBJ2-6)
CASGERRASGANVLTF

SEQ ID NO: 73099 - protein, 14 aa, Homo sapiens
  CDR3 for alpha chain variable domain of TCR clone 36550 (TRAV8-1, TRAJ34)
CAVITTYNTDKLIF

SEQ ID NO: 73100 - protein, 14 aa, Homo sapiens
  CDR3 for beta chain variable domain of TCR clone 36550 (TRBV11-3, TRBJ1-3)
CASSHNGQGNTMYF

SEQ ID NO: 73101 - protein, 15 aa, Homo sapiens
  CDR3 for alpha chain variable domain of TCR clone 36551 (TRAV17, TRAJ57)
CATGPSQGGSEKLVF

SEQ ID NO: 73102 - protein, 14 aa, Homo sapiens
  CDR3 for beta chain variable domain of TCR clone 36551 (TRBV12-5, TRBJ2-5)
CASGSRTHQETQYL

SEQ ID NO: 73103 - protein, 13 aa, Homo sapiens
  CDR3 for alpha chain variable domain of TCR clone 36552 (TRAV21, TRAJ27)
CATRPGNAGKSTF

SEQ ID NO: 73104 - protein, 13 aa, Homo sapiens
  CDR3 for beta chain variable domain of TCR clone 36552 (TRBV18, TRBJ2-7)
CASQSGGGYEQYF

SEQ ID NO: 73105 - protein, 14 aa, Homo sapiens
  CDR3 for alpha chain variable domain of TCR clone 36553 (TRAV8-1, TRAJ23)
CAVGTYNQGGKLIF

SEQ ID NO: 73106 - protein, 16 aa, Homo sapiens
  CDR3 for beta chain variable domain of TCR clone 36553 (TRBV18, TRBJ1-5)
CASSPSTGNSNQPKHF

SEQ ID NO: 73107 - protein, 14 aa, Homo sapiens
  CDR3 for alpha chain variable domain of TCR clone 36554 (TRAV12-2, TRAJ53)
CAVKGGGSNYILTF

SEQ ID NO: 73108 - protein, 14 aa, Homo sapiens
  CDR3 for beta chain variable domain of TCR clone 36554 (TRBV7-7, TRBJ2-2)
CATRQDSDTGELFF

SEQ ID NO: 73109 - protein, 10 aa, Homo sapiens
  CDR3 for alpha chain variable domain of TCR clone 36555 (TRAV3, TRAJ30)
CAVREIGIIF

SEQ ID NO: 73110 - protein, 14 aa, Homo sapiens
  CDR3 for beta chain variable domain of TCR clone 36555 (TRBV15, TRBJ2-3)
CATRSGTSTDTQYF

SEQ ID NO: 73111 - protein, 12 aa, Homo sapiens
  CDR3 for alpha chain variable domain of TCR clone 36556 (TRAV21, TRAJ6)
CAVKGGSYIPTL

SEQ ID NO: 73112 - protein, 13 aa, Homo sapiens
  CDR3 for beta chain variable domain of TCR clone 36556 (TRBV11-2, TRBJ1-1)
CASSFTENTEAFF

SEQ ID NO: 73113 - protein, 12 aa, Homo sapiens
  CDR3 for alpha chain variable domain of TCR clone 36557 (TRAV13-2, TRAJ23)
CAERHRGGKLIF

SEQ ID NO: 73114 - protein, 16 aa, Homo sapiens
  CDR3 for beta chain variable domain of TCR clone 36557 (TRBV20-1, TRBJ1-4)
CSVPGQGLLTNEKLFF

SEQ ID NO: 73115 - protein, 14 aa, Homo sapiens
  CDR3 for alpha chain variable domain of TCR clone 36558 (TRAV1-2, TRAJ16)
CAVNRFSDVQKLLF

SEQ ID NO: 73116 - protein, 17 aa, Homo sapiens
  CDR3 for beta chain variable domain of TCR clone 36558 (TRBV13, TRBJ2-3)
CASSLSRVAGGRNTQYF

SEQ ID NO: 73117 - protein, 14 aa, Homo sapiens
  CDR3 for alpha chain variable domain of TCR clone 36559 (TRAV12-1, TRAJ12)
CVVTRMDSSYKLIF

SEQ ID NO: 73118 - protein, 14 aa, Homo sapiens
  CDR3 for beta chain variable domain of TCR clone 36559 (TRBV7-2, TRBJ2-7)
CASSPKTSFYEQYF

SEQ ID NO: 73119 - protein, 13 aa, Homo sapiens
  CDR3 for alpha chain variable domain of TCR clone 36560 (TRAV1-2, TRAJ31)
CAVRGYNNARLMF

SEQ ID NO: 73120 - protein, 15 aa, Homo sapiens
  CDR3 for beta chain variable domain of TCR clone 36560 (TRBV5-7, TRBJ2-7)
CASSLGLGRGHEQYF

SEQ ID NO: 73121 - protein, 11 aa, Homo sapiens
  CDR3 for alpha chain variable domain of TCR clone 36561 (TRAV25, TRAJ47)
CAGLYGSKLVF

SEQ ID NO: 73122 - protein, 14 aa, Homo sapiens
  CDR3 for beta chain variable domain of TCR clone 36561 (TRBV19, TRBJ2-1)
CASKEGVQVNEQFF

SEQ ID NO: 73123 - protein, 15 aa, Homo sapiens
  CDR3 for alpha chain variable domain of TCR clone 36562 (TRAV35, TRAJ32)
CAGQLPIGATNKLIF

SEQ ID NO: 73124 - protein, 14 aa, Homo sapiens
  CDR3 for beta chain variable domain of TCR clone 36562 (TRBV7-2, TRBJ2-7)
CASRSQGAAYEQYF

SEQ ID NO: 73125 - protein, 17 aa, Homo sapiens
  CDR3 for alpha chain variable domain of TCR clone 36563 (TRAV13-1, TRAJ28)
CAASPPYSGAGSYQLTF

SEQ ID NO: 73126 - protein, 15 aa, Homo sapiens
  CDR3 for beta chain variable domain of TCR clone 36563 (TRBV20-1, TRBJ2-7)
CSARDRVSGMDEQYF

SEQ ID NO: 73127 - protein, 11 aa, Homo sapiens
  CDR3 for alpha chain variable domain of TCR clone 36564 (TRAV1-2, TRAJ40)
CAVPGTYKYIF

SEQ ID NO: 73128 - protein, 16 aa, Homo sapiens
  CDR3 for beta chain variable domain of TCR clone 36564 (TRBV29-1, TRBJ2-7)
FSVEVVGTSGSYEQYF

SEQ ID NO: 73129 - protein, 10 aa, Homo sapiens
  CDR3 for alpha chain variable domain of TCR clone 36565 (TRAV23/DV6, TRAJ43)
CAAAVAALEQ

SEQ ID NO: 73130 - protein, 14 aa, Homo sapiens
  CDR3 for beta chain variable domain of TCR clone 36565 (TRBV4-1, TRBJ2-2)
CASSQAVNTGELFF

SEQ ID NO: 73131 - protein, 11 aa, Homo sapiens
  CDR3 for alpha chain variable domain of TCR clone 36566 (TRAV26-2, TRAJ8)
CILTGFQKLVF

SEQ ID NO: 73132 - protein, 12 aa, Homo sapiens
  CDR3 for beta chain variable domain of TCR clone 36566 (TRBV12-4, TRBJ1-2)
CASSFIWLHLRF

SEQ ID NO: 73133 - protein, 14 aa, Homo sapiens
  CDR3 for alpha chain variable domain of TCR clone 36567 (TRAV2, TRAJ29)
CAVEDRVGNTPLVC

SEQ ID NO: 73134 - protein, 15 aa, Homo sapiens
  CDR3 for beta chain variable domain of TCR clone 36567 (TRBV10-3, TRBJ2-1)
CANSDVQDRAYEQFF

SEQ ID NO: 73135 - protein, 13 aa, Homo sapiens
  CDR3 for alpha chain variable domain of TCR clone 36568 (TRAV17, TRAJ26)
CATVGNCGQNFVF

SEQ ID NO: 73136 - protein, 16 aa, Homo sapiens
  CDR3 for beta chain variable domain of TCR clone 36568 (TRBV2, TRBJ2-1)
CASSVGGSLSYNEQFF

SEQ ID NO: 73137 - protein, 15 aa, Homo sapiens
  CDR3 for alpha chain variable domain of TCR clone 36569 (TRAV20, TRAJ53)
CAVQASGGSNYKLTF

SEQ ID NO: 73138 - protein, 15 aa, Homo sapiens
  CDR3 for beta chain variable domain of TCR clone 36569 (TRBV9, TRBJ2-1)
CASSLAGSSCNEQFF

SEQ ID NO: 73139 - protein, 13 aa, Homo sapiens
  CDR3 for alpha chain variable domain of TCR clone 36570 (TRAV3, TRAJ41)
CAVSSDSGYALNF

SEQ ID NO: 73140 - protein, 13 aa, Homo sapiens
  CDR3 for beta chain variable domain of TCR clone 36570 (TRBV20-1, TRBJ2-2)
CSALSGGAGELFF

SEQ ID NO: 73141 - protein, 16 aa, Homo sapiens
  CDR3 for alpha chain variable domain of TCR clone 36571 (TRAV30, TRAJ24)
CGTEIVDADSWGKFQF

SEQ ID NO: 73142 - protein, 13 aa, Homo sapiens
  CDR3 for beta chain variable domain of TCR clone 36571 (TRBV20-1, TRBJ1-1)
CSARGGGNTEAFS

SEQ ID NO: 73143 - protein, 11 aa, Homo sapiens
  CDR3 for alpha chain variable domain of TCR clone 36572 (TRAV2, TRAJ13)
CASGGYQKVTF

SEQ ID NO: 73144 - protein, 16 aa, Homo sapiens
  CDR3 for beta chain variable domain of TCR clone 36572 (TRBV7-3, TRBJ2-2)
CASTLKRGTLSGELFF

SEQ ID NO: 73145 - protein, 15 aa, Homo sapiens
  CDR3 for alpha chain variable domain of TCR clone 36573 (TRAV8-3, TRAJ11)
CAVGLLNSGYSTLTF

SEQ ID NO: 73146 - protein, 16 aa, Homo sapiens
  CDR3 for beta chain variable domain of TCR clone 36573 (TRBV7-9, TRBJ1-2)
CASSLGFSSGEDGCTF

SEQ ID NO: 73147 - protein, 17 aa, Homo sapiens
  CDR3 for alpha chain variable domain of TCR clone 36574 (TRAV3, TRAJ42)
CAVRDRDYGGSQGNLIF

SEQ ID NO: 73148 - protein, 14 aa, Homo sapiens
  CDR3 for beta chain variable domain of TCR clone 36574 (TRBV25-1, TRBJ1-1)
CASTHLGGNTGAFF

SEQ ID NO: 73149 - protein, 11 aa, Homo sapiens
  CDR3 for alpha chain variable domain of TCR clone 36575 (TRAV2, TRAJ13)
CASGGYQKVTF

SEQ ID NO: 73150 - protein, 13 aa, Homo sapiens
  CDR3 for beta chain variable domain of TCR clone 36575 (TRBV7-9, TRBJ2-3)
CASSPGSTDTQYF

SEQ ID NO: 73151 - protein, 13 aa, Homo sapiens
  CDR3 for alpha chain variable domain of TCR clone 36576 (TRAV1-2, TRAJ20)
CAVRDGNDYKLSF

SEQ ID NO: 73152 - protein, 19 aa, Homo sapiens
  CDR3 for beta chain variable domain of TCR clone 36576 (TRBV7-2, TRBJ2-3)
GRVSLGQQLRGGGRDTQYF

SEQ ID NO: 73153 - protein, 15 aa, Homo sapiens
  CDR3 for alpha chain variable domain of TCR clone 36577 (TRAV26-1, TRAJ40)
CIVRVTTSGTYNYIF

SEQ ID NO: 73154 - protein, 12 aa, Homo sapiens
  CDR3 for beta chain variable domain of TCR clone 36577 (TRBV7-9, TRBJ1-4)
CASSTDREKLFF

SEQ ID NO: 73155 - protein, 15 aa, Homo sapiens
  CDR3 for alpha chain variable domain of TCR clone 36578 (TRAV13-2, TRAJ10)
CAENRDTGGGNKLTF

SEQ ID NO: 73156 - protein, 16 aa, Homo sapiens
  CDR3 for beta chain variable domain of TCR clone 36578 (TRBV2, TRBJ1-3)
CASSRTGGSTGNTIYL

SEQ ID NO: 73157 - protein, 15 aa, Homo sapiens
  CDR3 for alpha chain variable domain of TCR clone 36579 (TRAV26-1, TRAJ44)
CIVRANTGTASKLTF

SEQ ID NO: 73158 - protein, 16 aa, Homo sapiens
  CDR3 for beta chain variable domain of TCR clone 36579 (TRBV7-7, TRBJ2-1)
CASSSASGTSYNEQFF

SEQ ID NO: 73159 - protein, 15 aa, Homo sapiens
  CDR3 for alpha chain variable domain of TCR clone 36580 (TRAV3, TRAJ5)
CAVRDRKTDRRALTF

SEQ ID NO: 73160 - protein, 15 aa, Homo sapiens
  CDR3 for beta chain variable domain of TCR clone 36580 (TRBV7-8, TRBJ2-1)
CASSLADSLYNEQFF

SEQ ID NO: 73161 - protein, 15 aa, Homo sapiens
  CDR3 for alpha chain variable domain of TCR clone 36581 (TRAV8-3, TRAJ11)
CAVGLLNSGFSTLTF

SEQ ID NO: 73162 - protein, 16 aa, Homo sapiens
  CDR3 for beta chain variable domain of TCR clone 36581 (TRBV7-9, TRBJ1-2)
CASSLGFSSGEDGYTF

SEQ ID NO: 73163 - protein, 16 aa, Homo sapiens
  CDR3 for alpha chain variable domain of TCR clone 36582 (TRAV21, TRAJ45)
CAVEAPRGDQEEVLTD

SEQ ID NO: 73164 - protein, 12 aa, Homo sapiens
  CDR3 for beta chain variable domain of TCR clone 36582 (TRBV29-1, TRBJ1-3)
CSTRDSGNTIYF

SEQ ID NO: 73165 - protein, 17 aa, Homo sapiens
  CDR3 for alpha chain variable domain of TCR clone 36583 (TRAV3, TRAJ12)
CAVRDGGRMDSSYKLIF

SEQ ID NO: 73166 - protein, 14 aa, Homo sapiens
  CDR3 for beta chain variable domain of TCR clone 36583 (TRBV12-5, TRBJ2-5)
CASGSRTHQETQYF

SEQ ID NO: 73167 - protein, 15 aa, Homo sapiens
  CDR3 for alpha chain variable domain of TCR clone 36584 (TRAV3, TRAJ47)
CAVRDIGEYGNKLVF

SEQ ID NO: 73168 - protein, 14 aa, Homo sapiens
  CDR3 for beta chain variable domain of TCR clone 36584 (TRBV13, TRBJ2-5)
CAGSLERVGETQYF

SEQ ID NO: 73169 - protein, 13 aa, Homo sapiens
  CDR3 for alpha chain variable domain of TCR clone 36585 (TRAV12-3, TRAJ13)
CAMSSGGYQKVTF

SEQ ID NO: 73170 - protein, 13 aa, Homo sapiens
  CDR3 for beta chain variable domain of TCR clone 36585 (TRBV20-1, TRBJ1-1)
CSAPPEGHTEAFF

SEQ ID NO: 73171 - protein, 14 aa, Homo sapiens
  CDR3 for alpha chain variable domain of TCR clone 36586 (TRAV2, TRAJ9)
CAVDPNTGGFKTIF

SEQ ID NO: 73172 - protein, 13 aa, Homo sapiens
  CDR3 for beta chain variable domain of TCR clone 36586 (TRBV20-1, TRBJ2-1)
CSASTGTSNEQFL

SEQ ID NO: 73173 - protein, 15 aa, Homo sapiens
  CDR3 for alpha chain variable domain of TCR clone 36587 (TRAV35, TRAJ50)
CAGQLRKTSYDRVIF

SEQ ID NO: 73174 - protein, 12 aa, Homo sapiens
  CDR3 for beta chain variable domain of TCR clone 36587 (TRBV5-1, TRBJ2-5)
CASSLGLETQYF

SEQ ID NO: 73175 - protein, 11 aa, Homo sapiens
  CDR3 for alpha chain variable domain of TCR clone 36588 (TRAV2, TRAJ33)
CAADSNYQLIW

SEQ ID NO: 73176 - protein, 14 aa, Homo sapiens
  CDR3 for beta chain variable domain of TCR clone 36588 (TRBV11-2, TRBJ2-3)
CASSRLARTDTQYF

SEQ ID NO: 73177 - protein, 14 aa, Homo sapiens
  CDR3 for alpha chain variable domain of TCR clone 36589 (TRAV25, TRAJ22)
CAVRSSGSARQLTF

SEQ ID NO: 73178 - protein, 16 aa, Homo sapiens
  CDR3 for beta chain variable domain of TCR clone 36589 (TRBV4-2, TRBJ1-1)
CASSPSPGKAAPEAFF

SEQ ID NO: 73179 - protein, 13 aa, Homo sapiens
  CDR3 for alpha chain variable domain of TCR clone 36590 (TRAV13-1, TRAJ37)
CAARPGNTGKLIF

SEQ ID NO: 73180 - protein, 14 aa, Homo sapiens
  CDR3 for beta chain variable domain of TCR clone 36590 (TRBV12-4, TRBJ2-3)
CASSLGQGTDTQYF

SEQ ID NO: 73181 - protein, 15 aa, Homo sapiens
  CDR3 for alpha chain variable domain of TCR clone 36591 (TRAV16, TRAJ4)
CALPSLSGGYNKLIF

SEQ ID NO: 73182 - protein, 20 aa, Homo sapiens
  CDR3 for beta chain variable domain of TCR clone 36591 (TRBV7-8, TRBJ2-2)
CASSHLFPGPTIHITGELFF

SEQ ID NO: 73183 - protein, 14 aa, Homo sapiens
  CDR3 for alpha chain variable domain of TCR clone 36592 (TRAV12-2, TRAJ40)
CAVKIPSGTYKYIF

SEQ ID NO: 73184 - protein, 14 aa, Homo sapiens
  CDR3 for beta chain variable domain of TCR clone 36592 (TRBV19, TRBJ2-5)
CASSMTGQQETQYF

SEQ ID NO: 73185 - protein, 15 aa, Homo sapiens
  CDR3 for alpha chain variable domain of TCR clone 36593 (TRAV8-3, TRAJ45)
CASSYSGGGADGLTF

SEQ ID NO: 73186 - protein, 15 aa, Homo sapiens
  CDR3 for beta chain variable domain of TCR clone 36593 (TRBV7-2, TRBJ2-2)
CASSSLTGGTRELFF

SEQ ID NO: 73187 - protein, 12 aa, Homo sapiens
  CDR3 for alpha chain variable domain of TCR clone 36594 (TRAV12-2, TRAJ31)
CAVNTPDARLMF

SEQ ID NO: 73188 - protein, 15 aa, Homo sapiens
  CDR3 for beta chain variable domain of TCR clone 36594 (TRBV4-2, TRBJ1-1)
CASSQDRGLNTEAFF

SEQ ID NO: 73189 - protein, 15 aa, Homo sapiens
  CDR3 for alpha chain variable domain of TCR clone 36595 (TRAV26-1, TRAJ44)
CIVRIGTGTASKLTF

SEQ ID NO: 73190 - protein, 15 aa, Homo sapiens
  CDR3 for beta chain variable domain of TCR clone 36595 (TRBV7-6, TRBJ2-1)
CASSSLAGGGNEQFF

SEQ ID NO: 73191 - protein, 12 aa, Homo sapiens
  CDR3 for alpha chain variable domain of TCR clone 36596 (TRAV12-3, TRAJ21)
CAMFNNFNKFYF

SEQ ID NO: 73192 - protein, 14 aa, Homo sapiens
  CDR3 for beta chain variable domain of TCR clone 36596 (TRBV28, TRBJ2-1)
CASSIQGTVGGQFF

SEQ ID NO: 73193 - protein, 12 aa, Homo sapiens
  CDR3 for alpha chain variable domain of TCR clone 36597 (TRAV2, TRAJ36)
CAELTGANNLFF

SEQ ID NO: 73194 - protein, 18 aa, Homo sapiens
  CDR3 for beta chain variable domain of TCR clone 36597 (TRBV19, TRBJ1-1)
CASSIDGGDYTGNTEALF

SEQ ID NO: 73195 - protein, 15 aa, Homo sapiens
  CDR3 for alpha chain variable domain of TCR clone 36598 (TRAV26-1, TRAJ22)
CIVRVSFWFCKATDL

SEQ ID NO: 73196 - protein, 13 aa, Homo sapiens
  CDR3 for beta chain variable domain of TCR clone 36598 (TRBV7-9, TRBJ1-2)
CDSSLKQNYGYTF

SEQ ID NO: 73197 - protein, 14 aa, Homo sapiens
  CDR3 for alpha chain variable domain of TCR clone 36599 (TRAV2, TRAJ12)
CAVDAMDSSYKLIF

SEQ ID NO: 73198 - protein, 13 aa, Homo sapiens
  CDR3 for beta chain variable domain of TCR clone 36599 (TRBV19, TRBJ2-1)
CASKVGAGGEQFL

SEQ ID NO: 73199 - protein, 13 aa, Homo sapiens
  CDR3 for alpha chain variable domain of TCR clone 36600 (TRAV12-3, TRAJ43)
CAMIRPNNNDMRF

SEQ ID NO: 73200 - protein, 12 aa, Homo sapiens
  CDR3 for beta chain variable domain of TCR clone 36600 (TRBV11-2, TRBJ2-5)
CASSLGQETQHF

SEQ ID NO: 73201 - protein, 15 aa, Homo sapiens
  CDR3 for alpha chain variable domain of TCR clone 36601 (TRAV35, TRAJ40)
CAGQLGTSGTYKYIF

SEQ ID NO: 73202 - protein, 14 aa, Homo sapiens
  CDR3 for beta chain variable domain of TCR clone 36601 (TRBV7-3, TRBJ2-1)
CASRLAGGTNEQFF

SEQ ID NO: 73203 - protein, 12 aa, Homo sapiens
  CDR3 for alpha chain variable domain of TCR clone 36602 (TRAV17, TRAJ57)
CATDGGSEKLVF

SEQ ID NO: 73204 - protein, 16 aa, Homo sapiens
  CDR3 for beta chain variable domain of TCR clone 36602 (TRBV2, TRBJ2-1)
CASSVGGSLSHNEQFF

SEQ ID NO: 73205 - protein, 15 aa, Homo sapiens
  CDR3 for alpha chain variable domain of TCR clone 36603 (TRAV12-2, TRAJ53)
CAVNGGGGSNYKLTF

SEQ ID NO: 73206 - protein, 17 aa, Homo sapiens
  CDR3 for beta chain variable domain of TCR clone 36603 (TRBV7-3, TRBJ2-3)
CASSLTKRMRGADTQYF

SEQ ID NO: 73207 - protein, 13 aa, Homo sapiens
  CDR3 for alpha chain variable domain of TCR clone 36604 (TRAV29/DV5, TRAJ31)
CAASRNNNARLMF

SEQ ID NO: 73208 - protein, 13 aa, Homo sapiens
  CDR3 for beta chain variable domain of TCR clone 36604 (TRBV7-2, TRBJ2-4)
CASSWEHANIQYF

SEQ ID NO: 73209 - protein, 11 aa, Homo sapiens
  CDR3 for alpha chain variable domain of TCR clone 36605 (TRAV2, TRAJ13)
CASGGYQKVTF

SEQ ID NO: 73210 - protein, 12 aa, Homo sapiens
  CDR3 for beta chain variable domain of TCR clone 36605 (TRBV7-9, TRBJ2-7)
CASSIKREEQYF

SEQ ID NO: 73211 - protein, 15 aa, Homo sapiens
  CDR3 for alpha chain variable domain of TCR clone 36606 (TRAV3, TRAJ22)
CAVRDRGGSARQLTF

SEQ ID NO: 73212 - protein, 16 aa, Homo sapiens
  CDR3 for beta chain variable domain of TCR clone 36606 (TRBV5-4, TRBJ2-3)
CASQQPGAGGADTPYF

SEQ ID NO: 73213 - protein, 11 aa, Homo sapiens
  CDR3 for alpha chain variable domain of TCR clone 36607 (TRAV3, TRAJ21)
CAVGNSNKFYF

SEQ ID NO: 73214 - protein, 14 aa, Homo sapiens
  CDR3 for beta chain variable domain of TCR clone 36607 (TRBV29-1, TRBJ2-2)
CSGRGSGNTGELFF

SEQ ID NO: 73215 - protein, 15 aa, Homo sapiens
  CDR3 for alpha chain variable domain of TCR clone 36608 (TRAV26-1, TRAJ29)
CIVRVEGSGNTPLVF

SEQ ID NO: 73216 - protein, 20 aa, Homo sapiens
  CDR3 for beta chain variable domain of TCR clone 36608 (TRBV7-8, TRBJ2-2)
CASSHLFPGPTIHITGELFF

SEQ ID NO: 73217 - protein, 11 aa, Homo sapiens
  CDR3 for alpha chain variable domain of TCR clone 36609 (TRAV21, TRAJ56)
CYTGANSKLTF

SEQ ID NO: 73218 - protein, 14 aa, Homo sapiens
  CDR3 for beta chain variable domain of TCR clone 36609 (TRBV19, TRBJ2-1)
CASEVTGARNEQFF

SEQ ID NO: 73219 - protein, 13 aa, Homo sapiens
  CDR3 for alpha chain variable domain of TCR clone 36610 (TRAV12-1, TRAJ40)
CVVPTSGTYKYIL

SEQ ID NO: 73220 - protein, 18 aa, Homo sapiens
  CDR3 for beta chain variable domain of TCR clone 36610 (TRBV7-6, TRBJ2-1)
CASSPRTSGMSSYNEQFF

SEQ ID NO: 73221 - protein, 14 aa, Homo sapiens
  CDR3 for alpha chain variable domain of TCR clone 36611 (TRAV17, TRAJ22)
CATSPSGSARQPTF

SEQ ID NO: 73222 - protein, 15 aa, Homo sapiens
  CDR3 for beta chain variable domain of TCR clone 36611 (TRBV4-1, TRBJ2-5)
CASSQWDLYQETQYF

SEQ ID NO: 73223 - protein, 14 aa, Homo sapiens
  CDR3 for alpha chain variable domain of TCR clone 36612 (TRAV13-1, TRAJ20)
RAARPGSNDYKLSF

SEQ ID NO: 73224 - protein, 15 aa, Homo sapiens
  CDR3 for beta chain variable domain of TCR clone 36612 (TRBV4-1, TRBJ2-7)
CASSQQGQGFDEQYF

SEQ ID NO: 73225 - protein, 11 aa, Homo sapiens
  CDR3 for alpha chain variable domain of TCR clone 36613 (TRAV4, TRAJ31)
CLVGDNARLMF

SEQ ID NO: 73226 - protein, 16 aa, Homo sapiens
  CDR3 for beta chain variable domain of TCR clone 36613 (TRBV7-2, TRBJ2-5)
CASSSKWLSGQETQYS

SEQ ID NO: 73227 - protein, 13 aa, Homo sapiens
  CDR3 for alpha chain variable domain of TCR clone 36614 (TRAV23/DV6, TRAJ22)
CAPYSGSARQQTF

SEQ ID NO: 73228 - protein, 15 aa, Homo sapiens
  CDR3 for beta chain variable domain of TCR clone 36614 (TRBV11-2, TRBJ1-6)
CASSLDPWAVSPLHF

SEQ ID NO: 73229 - protein, 11 aa, Homo sapiens
  CDR3 for alpha chain variable domain of TCR clone 36615 (TRAV13-2, TRAJ36)
RAETGANNLFF

SEQ ID NO: 73230 - protein, 13 aa, Homo sapiens
  CDR3 for beta chain variable domain of TCR clone 36615 (TRBV7-9, TRBJ2-4)
CATEGLAGNIQYF

SEQ ID NO: 73231 - protein, 14 aa, Homo sapiens
  CDR3 for alpha chain variable domain of TCR clone 36616 (TRAV1-2, TRAJ16)
CAVNRISDGQKLLF

SEQ ID NO: 73232 - protein, 15 aa, Homo sapiens
  CDR3 for beta chain variable domain of TCR clone 36616 (TRBV7-9, TRBJ1-6)
CASSSPGRGNSPLHF

SEQ ID NO: 73233 - protein, 17 aa, Homo sapiens
  CDR3 for alpha chain variable domain of TCR clone 36617 (TRAV3, TRAJ42)
CAVRDRDYGGSQGNLIL

SEQ ID NO: 73234 - protein, 14 aa, Homo sapiens
  CDR3 for beta chain variable domain of TCR clone 36617 (TRBV19, TRBJ2-5)
CASSMTGQQETQYF

SEQ ID NO: 73235 - protein, 13 aa, Homo sapiens
  CDR3 for alpha chain variable domain of TCR clone 36618 (TRAV13-1, TRAJ6)
CARGSGGSYIPTF

SEQ ID NO: 73236 - protein, 12 aa, Homo sapiens
  CDR3 for beta chain variable domain of TCR clone 36618 (TRBV11-2, TRBJ2-2)
CASSLGGGELFF

SEQ ID NO: 73237 - protein, 17 aa, Homo sapiens
  CDR3 for alpha chain variable domain of TCR clone 36619 (TRAV13-1, TRAJ52)
CAAGRNAGGTSDGKLTF

SEQ ID NO: 73238 - protein, 13 aa, Homo sapiens
  CDR3 for beta chain variable domain of TCR clone 36619 (TRBV7-2, TRBJ1-1)
CASNLKGAKVAFF

SEQ ID NO: 73239 - protein, 18 aa, Homo sapiens
  CDR3 for alpha chain variable domain of TCR clone 36620 (TRAV12-3, TRAJ52)
CAMSVGGAGGTSYGKLTF

SEQ ID NO: 73240 - protein, 14 aa, Homo sapiens
  CDR3 for beta chain variable domain of TCR clone 36620 (TRBV12-5, TRBJ2-5)
CASGSRTHQETQYF

SEQ ID NO: 73241 - protein, 16 aa, Homo sapiens
  CDR3 for alpha chain variable domain of TCR clone 36621 (TRAV3, TRAJ37)
CAVRGKGSGNTGKLIF

SEQ ID NO: 73242 - protein, 13 aa, Homo sapiens
  CDR3 for beta chain variable domain of TCR clone 36621 (TRBV14, TRBJ2-7)
CASSQDRRYGQYF

SEQ ID NO: 73243 - protein, 13 aa, Homo sapiens
  CDR3 for alpha chain variable domain of TCR clone 36622 (TRAV3, TRAJ21)
CAVREPDFNKFYF

SEQ ID NO: 73244 - protein, 13 aa, Homo sapiens
  CDR3 for beta chain variable domain of TCR clone 36622 (TRBV9, TRBJ2-1)
CASSSSGGNEQFF

SEQ ID NO: 73245 - protein, 14 aa, Homo sapiens
  CDR3 for alpha chain variable domain of TCR clone 36623 (TRAV12-3, TRAJ10)
SHLPLTGGGNKLTF

SEQ ID NO: 73246 - protein, 14 aa, Homo sapiens
  CDR3 for beta chain variable domain of TCR clone 36623 (TRBV6-1, TRBJ1-3)
CASVQGGGGNTIYC

SEQ ID NO: 73247 - protein, 11 aa, Homo sapiens
  CDR3 for alpha chain variable domain of TCR clone 36624 (TRAV12-2, TRAJ29)
RAVTLRSPLVF

SEQ ID NO: 73248 - protein, 16 aa, Homo sapiens
  CDR3 for beta chain variable domain of TCR clone 36624 (TRBV19, TRBJ1-5)
CASSIDRGGPRQPQHF

SEQ ID NO: 73249 - protein, 15 aa, Homo sapiens
  CDR3 for alpha chain variable domain of TCR clone 36625 (TRAV2, TRAJ15)
CAVVDRGQAGTALIF

SEQ ID NO: 73250 - protein, 13 aa, Homo sapiens
  CDR3 for beta chain variable domain of TCR clone 36625 (TRBV10-2, TRBJ2-7)
CASGASGGYEQYF

SEQ ID NO: 73251 - protein, 14 aa, Homo sapiens
  CDR3 for alpha chain variable domain of TCR clone 36626 (TRAV1-2, TRAJ8)
CAVREDTGFQKLVF

SEQ ID NO: 73252 - protein, 14 aa, Homo sapiens
  CDR3 for beta chain variable domain of TCR clone 36626 (TRBV3-1, TRBJ2-5)
CASSQGPDQETQYF

SEQ ID NO: 73253 - protein, 15 aa, Homo sapiens
  CDR3 for alpha chain variable domain of TCR clone 36627 (TRAV25, TRAJ52)
CAGRPGGTSDGKLTF

SEQ ID NO: 73254 - protein, 17 aa, Homo sapiens
  CDR3 for beta chain variable domain of TCR clone 36627 (TRBV7-8, TRBJ2-6)
CASSAGTGGAGANVLTF

SEQ ID NO: 73255 - protein, 15 aa, Homo sapiens
  CDR3 for alpha chain variable domain of TCR clone 36628 (TRAV21, TRAJ53)
CATLNSGGSNYKLTF

SEQ ID NO: 73256 - protein, 14 aa, Homo sapiens
  CDR3 for beta chain variable domain of TCR clone 36628 (TRBV20-1, TRBJ2-5)
CSAHRQGLWETQYF

SEQ ID NO: 73257 - protein, 14 aa, Homo sapiens
  CDR3 for alpha chain variable domain of TCR clone 36629 (TRAV12-1, TRAJ17)
CVVNYKAAGNKLTF

SEQ ID NO: 73258 - protein, 17 aa, Homo sapiens
  CDR3 for beta chain variable domain of TCR clone 36629 (TRBV20-1, TRBJ2-1)
CSASSSGLEGSYNEQFF

SEQ ID NO: 73259 - protein, 16 aa, Homo sapiens
  CDR3 for alpha chain variable domain of TCR clone 36630 (TRAV38-1, TRAJ37)
CAFKGDGSSNTGKLIF

SEQ ID NO: 73260 - protein, 13 aa, Homo sapiens
  CDR3 for beta chain variable domain of TCR clone 36630 (TRBV12-4, TRBJ2-5)
CASSLFRREAQYF

SEQ ID NO: 73261 - protein, 13 aa, Homo sapiens
  CDR3 for alpha chain variable domain of TCR clone 36631 (TRAV8-3, TRAJ43)
CAVGPDNNNDMRF

SEQ ID NO: 73262 - protein, 15 aa, Homo sapiens
  CDR3 for beta chain variable domain of TCR clone 36631 (TRBV11-3, TRBJ2-3)
CASLKDGREGDMQYF

SEQ ID NO: 73263 - protein, 11 aa, Homo sapiens
  CDR3 for alpha chain variable domain of TCR clone 36632 (TRAV12-3, TRAJ43)
CVEYDNNDMRF

SEQ ID NO: 73264 - protein, 16 aa, Homo sapiens
  CDR3 for beta chain variable domain of TCR clone 36632 (TRBV5-4, TRBJ2-1)
CASSLVGSGQDNEQFF

SEQ ID NO: 73265 - protein, 13 aa, Homo sapiens
  CDR3 for alpha chain variable domain of TCR clone 36633 (TRAV17, TRAJ29)
CATDAFRKHTSCL

SEQ ID NO: 73266 - protein, 13 aa, Homo sapiens
  CDR3 for beta chain variable domain of TCR clone 36633 (TRBV5-7, TRBJ2-6)
CASTSSGANDLTF

SEQ ID NO: 73267 - protein, 15 aa, Homo sapiens
  CDR3 for alpha chain variable domain of TCR clone 36634 (TRAV21, TRAJ37)
CAVRPTSSNTGKLIF

SEQ ID NO: 73268 - protein, 16 aa, Homo sapiens
  CDR3 for beta chain variable domain of TCR clone 36634 (TRBV24-1, TRBJ2-3)
CATSDRRQDLTDTQYF

SEQ ID NO: 73269 - protein, 16 aa, Homo sapiens
  CDR3 for alpha chain variable domain of TCR clone 36635 (TRAV16, TRAJ18)
CAVRDGRGSTLGRLYF

SEQ ID NO: 73270 - protein, 15 aa, Homo sapiens
  CDR3 for beta chain variable domain of TCR clone 36635 (TRBV7-9, TRBJ1-6)
CASSSPGRGNSPLHF

SEQ ID NO: 73271 - protein, 12 aa, Homo sapiens
  CDR3 for alpha chain variable domain of TCR clone 36636 (TRAV21, TRAJ13)
PGPSGGYQKVTF

SEQ ID NO: 73272 - protein, 15 aa, Homo sapiens
  CDR3 for beta chain variable domain of TCR clone 36636 (TRBV7-9, TRBJ1-6)
CASSSPGRGNSPLHS

SEQ ID NO: 73273 - protein, 14 aa, Homo sapiens
  CDR3 for alpha chain variable domain of TCR clone 36637 (TRAV13-1, TRAJ35)
CAASKGGFGNVLHC

SEQ ID NO: 73274 - protein, 14 aa, Homo sapiens
  CDR3 for beta chain variable domain of TCR clone 36637 (TRBV7-3, TRBJ2-1)
CASSLAGGTNEQFF

SEQ ID NO: 73275 - protein, 15 aa, Homo sapiens
  CDR3 for alpha chain variable domain of TCR clone 36638 (TRAV3, TRAJ4)
CAVRDGTGGYKKLIF

SEQ ID NO: 73276 - protein, 16 aa, Homo sapiens
  CDR3 for beta chain variable domain of TCR clone 36638 (TRBV27, TRBJ2-2)
CASSSSGVSNTGELFF

SEQ ID NO: 73277 - protein, 14 aa, Homo sapiens
  CDR3 for alpha chain variable domain of TCR clone 36639 (TRAV17, TRAJ57)
CATDPQGGSEKLGF

SEQ ID NO: 73278 - protein, 16 aa, Homo sapiens
  CDR3 for beta chain variable domain of TCR clone 36639 (TRBV20-1, TRBJ1-4)
CSAPGQGLLTNEKLFF

SEQ ID NO: 73279 - protein, 12 aa, Homo sapiens
  CDR3 for alpha chain variable domain of TCR clone 36640 (TRAV2, TRAJ31)
CAVEYNNARLMF

SEQ ID NO: 73280 - protein, 16 aa, Homo sapiens
  CDR3 for beta chain variable domain of TCR clone 36640 (TRBV10-3, TRBJ2-1)
CAISGVGDGGGGEQFF

SEQ ID NO: 73281 - protein, 15 aa, Homo sapiens
  CDR3 for alpha chain variable domain of TCR clone 36641 (TRAV29/DV5, TRAJ29)
CAASERSSGNTTLVF

SEQ ID NO: 73282 - protein, 17 aa, Homo sapiens
  CDR3 for beta chain variable domain of TCR clone 36641 (TRBV4-1, TRBJ1-4)
CASSQEGPRGVEEKLFF

SEQ ID NO: 73283 - protein, 11 aa, Homo sapiens
  CDR3 for alpha chain variable domain of TCR clone 36642 (TRAV12-3, TRAJ16)
LMGGDGQKLLF

SEQ ID NO: 73284 - protein, 13 aa, Homo sapiens
  CDR3 for beta chain variable domain of TCR clone 36642 (TRBV12-4, TRBJ1-4)
CASAMGHNEKLFF

SEQ ID NO: 73285 - protein, 15 aa, Homo sapiens
  CDR3 for alpha chain variable domain of TCR clone 36643 (TRAV12-2, TRAJ53)
CAVNGGGGSNYKLKF

SEQ ID NO: 73286 - protein, 13 aa, Homo sapiens
  CDR3 for beta chain variable domain of TCR clone 36643 (TRBV3-1, TRBJ1-1)
CASSPGVITEAFF

SEQ ID NO: 73287 - protein, 12 aa, Homo sapiens
  CDR3 for alpha chain variable domain of TCR clone 36644 (TRAV12-3, TRAJ17)
CAMTLTGNKLTF

SEQ ID NO: 73288 - protein, 17 aa, Homo sapiens
  CDR3 for beta chain variable domain of TCR clone 36644 (TRBV11-2, TRBJ2-1)
CASSLYPPGVECNEQFF

SEQ ID NO: 73289 - protein, 11 aa, Homo sapiens
  CDR3 for alpha chain variable domain of TCR clone 36645 (TRAV13-1, TRAJ39)
CASHAGNMLTF

SEQ ID NO: 73290 - protein, 14 aa, Homo sapiens
  CDR3 for beta chain variable domain of TCR clone 36645 (TRBV11-2, TRBJ1-5)
CASSLDRGRQHQHF

SEQ ID NO: 73291 - protein, 16 aa, Homo sapiens
  CDR3 for alpha chain variable domain of TCR clone 36646 (TRAV9-2, TRAJ40)
CALSLESTSGTYKYIF

SEQ ID NO: 73292 - protein, 15 aa, Homo sapiens
  CDR3 for beta chain variable domain of TCR clone 36646 (TRBV11-3, TRBJ2-2)
CASSYFSTGTGELFF

SEQ ID NO: 73293 - protein, 15 aa, Homo sapiens
  CDR3 for alpha chain variable domain of TCR clone 36647 (TRAV26-1, TRAJ42)
FIVRVKGGSQGNLIF

SEQ ID NO: 73294 - protein, 14 aa, Homo sapiens
  CDR3 for beta chain variable domain of TCR clone 36647 (TRBV19, TRBJ2-2)
CATTGHANTGGLFF

SEQ ID NO: 73295 - protein, 14 aa, Homo sapiens
  CDR3 for alpha chain variable domain of TCR clone 36648 (TRAV12-3, TRAJ54)
CAMRGIQGVQKLVF

SEQ ID NO: 73296 - protein, 13 aa, Homo sapiens
  CDR3 for beta chain variable domain of TCR clone 36648 (TRBV19, TRBJ1-1)
CASSPSNGGEAFF

SEQ ID NO: 73297 - protein, 14 aa, Homo sapiens
  CDR3 for alpha chain variable domain of TCR clone 36649 (TRAV26-1, TRAJ34)
CIVRVAYNTDKLIF

SEQ ID NO: 73298 - protein, 15 aa, Homo sapiens
  CDR3 for beta chain variable domain of TCR clone 36649 (TRBV20-1, TRBJ2-7)
CSARVPAAYFYEQYL

SEQ ID NO: 73299 - protein, 17 aa, Homo sapiens
  CDR3 for alpha chain variable domain of TCR clone 36650 (TRAV13-1, TRAJ32)
CAASNGWWCYKQAHLWN

SEQ ID NO: 73300 - protein, 17 aa, Homo sapiens
  CDR3 for beta chain variable domain of TCR clone 36650 (TRBV15, TRBJ1-2)
CATSGREIDVVNYGYTF

SEQ ID NO: 73301 - protein, 12 aa, Homo sapiens
  CDR3 for alpha chain variable domain of TCR clone 36651 (TRAV30, TRAJ39)
CGRGNAGSMLTF

SEQ ID NO: 73302 - protein, 12 aa, Homo sapiens
  CDR3 for beta chain variable domain of TCR clone 36651 (TRBV10-3, TRBJ1-1)
CATMDRPPEAFF

SEQ ID NO: 73303 - protein, 17 aa, Homo sapiens
  CDR3 for alpha chain variable domain of TCR clone 36652 (TRAV12-3, TRAJ6)
CAMSARGGAGGSYIPTF

SEQ ID NO: 73304 - protein, 12 aa, Homo sapiens
  CDR3 for beta chain variable domain of TCR clone 36652 (TRBV12-4, TRBJ2-3)
CASSTLPDTQYL

SEQ ID NO: 73305 - protein, 13 aa, Homo sapiens
  CDR3 for alpha chain variable domain of TCR clone 36653 (TRAV21, TRAJ37)
CAVSSGNTGKLIF

SEQ ID NO: 73306 - protein, 17 aa, Homo sapiens
  CDR3 for beta chain variable domain of TCR clone 36653 (TRBV5-1, TRBJ2-5)
CASSLPGLAANQETQYF

SEQ ID NO: 73307 - protein, 14 aa, Homo sapiens
  CDR3 for alpha chain variable domain of TCR clone 36654 (TRAV14/DV4, TRAJ20)
CAMRGSLNDYKLSF

SEQ ID NO: 73308 - protein, 15 aa, Homo sapiens
  CDR3 for beta chain variable domain of TCR clone 36654 (TRBV27, TRBJ2-1)
CASSNGGGSSNEQFF

SEQ ID NO: 73309 - protein, 13 aa, Homo sapiens
  CDR3 for alpha chain variable domain of TCR clone 36655 (TRAV29/DV5, TRAJ33)
CAASVESNYRLIW

SEQ ID NO: 73310 - protein, 14 aa, Homo sapiens
  CDR3 for beta chain variable domain of TCR clone 36655 (TRBV11-2, TRBJ2-5)
CASSRTGGIETQYL

SEQ ID NO: 73311 - protein, 14 aa, Homo sapiens
  CDR3 for alpha chain variable domain of TCR clone 36656 (TRAV8-4, TRAJ9)
CSVRINTGGFKTIF

SEQ ID NO: 73312 - protein, 15 aa, Homo sapiens
  CDR3 for beta chain variable domain of TCR clone 36656 (TRBV10-2, TRBJ2-6)
CASSEQGTGANVLTF

SEQ ID NO: 73313 - protein, 15 aa, Homo sapiens
  CDR3 for alpha chain variable domain of TCR clone 36657 (TRAV8-4, TRAJ56)
CAVSGGTGANSKLTF

SEQ ID NO: 73314 - protein, 14 aa, Homo sapiens
  CDR3 for beta chain variable domain of TCR clone 36657 (TRBV7-9, TRBJ2-1)
CASSPRGGADEQFF

SEQ ID NO: 73315 - protein, 16 aa, Homo sapiens
  CDR3 for alpha chain variable domain of TCR clone 36658 (TRAV3, TRAJ37)
CAVRPHGSGNTGKLIF

SEQ ID NO: 73316 - protein, 17 aa, Homo sapiens
  CDR3 for beta chain variable domain of TCR clone 36658 (TRBV20-1, TRBJ2-1)
CGASSSGLAGSYNEQFF

SEQ ID NO: 73317 - protein, 13 aa, Homo sapiens
  CDR3 for alpha chain variable domain of TCR clone 36659 (TRAV21, TRAJ27)
CAARPGNAGKSTF

SEQ ID NO: 73318 - protein, 15 aa, Homo sapiens
  CDR3 for beta chain variable domain of TCR clone 36659 (TRBV11-1, TRBJ2-7)
CASSLNYGASYEQYF

SEQ ID NO: 73319 - protein, 12 aa, Homo sapiens
  CDR3 for alpha chain variable domain of TCR clone 36660 (TRAV10, TRAJ34)
CVVSGKHRQAHL

SEQ ID NO: 73320 - protein, 14 aa, Homo sapiens
  CDR3 for beta chain variable domain of TCR clone 36660 (TRBV19, TRBJ2-1)
CASPTVVLSGEQFF

SEQ ID NO: 73321 - protein, 13 aa, Homo sapiens
  CDR3 for alpha chain variable domain of TCR clone 36661 (TRAV12-1, TRAJ16)
CVVNGPDGQKLLF

SEQ ID NO: 73322 - protein, 13 aa, Homo sapiens
  CDR3 for beta chain variable domain of TCR clone 36661 (TRBV2, TRBJ1-1)
CARNPTGGSHAFF

SEQ ID NO: 73323 - protein, 13 aa, Homo sapiens
  CDR3 for alpha chain variable domain of TCR clone 36662 (TRAV13-2, TRAJ48)
CAEMDFGNEKLTF

SEQ ID NO: 73324 - protein, 13 aa, Homo sapiens
  CDR3 for beta chain variable domain of TCR clone 36662 (TRBV20-1, TRBJ1-1)
CSARGGGNTEAFF

SEQ ID NO: 73325 - protein, 12 aa, Homo sapiens
  CDR3 for alpha chain variable domain of TCR clone 36663 (TRAV12-3, TRAJ34)
CAMGYNTDKLTF

SEQ ID NO: 73326 - protein, 14 aa, Homo sapiens
  CDR3 for beta chain variable domain of TCR clone 36663 (TRBV4-1, TRBJ2-2)
CASSQAVNTGELFF

SEQ ID NO: 73327 - protein, 14 aa, Homo sapiens
  CDR3 for alpha chain variable domain of TCR clone 36664 (TRAV30, TRAJ33)
CGTVAPRSSYQLIW

SEQ ID NO: 73328 - protein, 18 aa, Homo sapiens
  CDR3 for beta chain variable domain of TCR clone 36664 (TRBV11-2, TRBJ2-3)
CASSLGGASRGAPNTQYF

SEQ ID NO: 73329 - protein, 16 aa, Homo sapiens
  CDR3 for alpha chain variable domain of TCR clone 36665 (TRAV30, TRAJ24)
CGTEIVDADSWGKFQF

SEQ ID NO: 73330 - protein, 19 aa, Homo sapiens
  CDR3 for beta chain variable domain of TCR clone 36665 (TRBV25-1, TRBJ2-2)
CAILVYRVDRGRKTGELSF

SEQ ID NO: 73331 - protein, 11 aa, Homo sapiens
  CDR3 for alpha chain variable domain of TCR clone 36666 (TRAV12-3, TRAJ27)
CAMANAGKLTF

SEQ ID NO: 73332 - protein, 13 aa, Homo sapiens
  CDR3 for beta chain variable domain of TCR clone 36666 (TRBV20-1, TRBJ1-1)
CSARVGGNTEAFF

SEQ ID NO: 73333 - protein, 17 aa, Homo sapiens
  CDR3 for alpha chain variable domain of TCR clone 36667 (TRAV36/DV7, TRAJ52)
CAVAQRAGGTSYGKLTF

SEQ ID NO: 73334 - protein, 13 aa, Homo sapiens
  CDR3 for beta chain variable domain of TCR clone 36667 (TRBV7-2, TRBJ1-1)
CASNLKGAKVAFF

SEQ ID NO: 73335 - protein, 14 aa, Homo sapiens
  CDR3 for alpha chain variable domain of TCR clone 36668 (TRAV1-2, TRAJ8)
CAVREDTGFQKLVF

SEQ ID NO: 73336 - protein, 14 aa, Homo sapiens
  CDR3 for beta chain variable domain of TCR clone 36668 (TRBV7-3, TRBJ2-1)
CASSLSGSYNEQFF

SEQ ID NO: 73337 - protein, 13 aa, Homo sapiens
  CDR3 for alpha chain variable domain of TCR clone 36669 (TRAV26-2, TRAJ57)
CIPSRGGSEKLVF

SEQ ID NO: 73338 - protein, 16 aa, Homo sapiens
  CDR3 for beta chain variable domain of TCR clone 36669 (TRBV18, TRBJ1-5)
CASSPRTGGGNQPQHF

SEQ ID NO: 73339 - protein, 13 aa, Homo sapiens
  CDR3 for alpha chain variable domain of TCR clone 36670 (TRAV12-1, TRAJ26)
CVVRRNYGQNLVF

SEQ ID NO: 73340 - protein, 14 aa, Homo sapiens
  CDR3 for beta chain variable domain of TCR clone 36670 (TRBV4-2, TRBJ2-1)
CASGLDRAYNEQFF

SEQ ID NO: 73341 - protein, 14 aa, Homo sapiens
  CDR3 for alpha chain variable domain of TCR clone 36671 (TRAV2, TRAJ9)
CAVEDRSGGFKTIF

SEQ ID NO: 73342 - protein, 13 aa, Homo sapiens
  CDR3 for beta chain variable domain of TCR clone 36671 (TRBV7-7, TRBJ2-5)
CASSRSGQETQYF

SEQ ID NO: 73343 - protein, 14 aa, Homo sapiens
  CDR3 for alpha chain variable domain of TCR clone 36672 (TRAV1-2, TRAJ16)
CAVNRFSDGKKLLF

SEQ ID NO: 73344 - protein, 16 aa, Homo sapiens
  CDR3 for beta chain variable domain of TCR clone 36672 (TRBV12-5, TRBJ2-5)
CASGPRTSGNQETQYF

SEQ ID NO: 73345 - protein, 11 aa, Homo sapiens
  CDR3 for alpha chain variable domain of TCR clone 36673 (TRAV21, TRAJ48)
RAVDGNEKLTF

SEQ ID NO: 73346 - protein, 16 aa, Homo sapiens
  CDR3 for beta chain variable domain of TCR clone 36673 (TRBV12-4, TRBJ1-5)
CASSSGPRGSNQPQHF

SEQ ID NO: 73347 - protein, 15 aa, Homo sapiens
  CDR3 for alpha chain variable domain of TCR clone 36674 (TRAV8-3, TRAJ27)
CAVGPSKTNAGKSTF

SEQ ID NO: 73348 - protein, 15 aa, Homo sapiens
  CDR3 for beta chain variable domain of TCR clone 36674 (TRBV7-2, TRBJ2-1)
CASSSGLAGGNEPFF

SEQ ID NO: 73349 - protein, 11 aa, Homo sapiens
  CDR3 for alpha chain variable domain of TCR clone 36675 (TRAV8-1, TRAJ8)
CAMTGFQRLVF

SEQ ID NO: 73350 - protein, 14 aa, Homo sapiens
  CDR3 for beta chain variable domain of TCR clone 36675 (TRBV5-4, TRBJ1-2)
CASTRQTDNYGYTF

SEQ ID NO: 73351 - protein, 16 aa, Homo sapiens
  CDR3 for alpha chain variable domain of TCR clone 36676 (TRAV4, TRAJ18)
CCVLLIGGSTLGRLYF

SEQ ID NO: 73352 - protein, 12 aa, Homo sapiens
  CDR3 for beta chain variable domain of TCR clone 36676 (TRBV6-3, TRBJ2-7)
CASSLTPYEQYL

SEQ ID NO: 73353 - protein, 12 aa, Homo sapiens
  CDR3 for alpha chain variable domain of TCR clone 36677 (TRAV12-1, TRAJ40)
CVVYSGTYKYIF

SEQ ID NO: 73354 - protein, 17 aa, Homo sapiens
  CDR3 for beta chain variable domain of TCR clone 36677 (TRBV11-3, TRBJ2-5)
CASSLPGVRGGKETQYF

SEQ ID NO: 73355 - protein, 14 aa, Homo sapiens
  CDR3 for alpha chain variable domain of TCR clone 36678 (TRAV8-4, TRAJ13)
CAVTLSGGYQKVTF

SEQ ID NO: 73356 - protein, 16 aa, Homo sapiens
  CDR3 for beta chain variable domain of TCR clone 36678 (TRBV5-7, TRBJ1-4)
CASSPSGGLKTEKLFS

SEQ ID NO: 73357 - protein, 13 aa, Homo sapiens
  CDR3 for alpha chain variable domain of TCR clone 36679 (TRAV13-1, TRAJ43)
CAASLSNNNGMRF

SEQ ID NO: 73358 - protein, 15 aa, Homo sapiens
  CDR3 for beta chain variable domain of TCR clone 36679 (TRBV5-1, TRBJ2-1)
CASSQAGYWWNEQFF

SEQ ID NO: 73359 - protein, 14 aa, Homo sapiens
  CDR3 for alpha chain variable domain of TCR clone 36680 (TRAV1-2, TRAJ16)
CAANRFSDGQKLLF

SEQ ID NO: 73360 - protein, 15 aa, Homo sapiens
  CDR3 for beta chain variable domain of TCR clone 36680 (TRBV27, TRBJ2-1)
CASSNGGGSSNEQFF

SEQ ID NO: 73361 - protein, 14 aa, Homo sapiens
  CDR3 for alpha chain variable domain of TCR clone 36681 (TRAV3, TRAJ7)
CAVREEEREQQTRL

SEQ ID NO: 73362 - protein, 12 aa, Homo sapiens
  CDR3 for beta chain variable domain of TCR clone 36681 (TRBV7-8, TRBJ2-7)
CASSLGDREQYF

SEQ ID NO: 73363 - protein, 14 aa, Homo sapiens
  CDR3 for alpha chain variable domain of TCR clone 36682 (TRAV4, TRAJ9)
CLVGSGTGGFQTIF

SEQ ID NO: 73364 - protein, 15 aa, Homo sapiens
  CDR3 for beta chain variable domain of TCR clone 36682 (TRBV7-2, TRBJ2-1)
CASSLASGRVNEQFF

SEQ ID NO: 73365 - protein, 12 aa, Homo sapiens
  CDR3 for alpha chain variable domain of TCR clone 36683 (TRAV3, TRAJ43)
CAVRDPNNNMRF

SEQ ID NO: 73366 - protein, 15 aa, Homo sapiens
  CDR3 for beta chain variable domain of TCR clone 36683 (TRBV27, TRBJ1-5)
CASSLGTGFDQPQHF

SEQ ID NO: 73367 - protein, 13 aa, Homo sapiens
  CDR3 for alpha chain variable domain of TCR clone 36684 (TRAV3, TRAJ21)
CAVREPDFNKFYF

SEQ ID NO: 73368 - protein, 16 aa, Homo sapiens
  CDR3 for beta chain variable domain of TCR clone 36684 (TRBV11-2, TRBJ1-1)
CASSLRQGGEHSKAFF

SEQ ID NO: 73369 - protein, 12 aa, Homo sapiens
  CDR3 for alpha chain variable domain of TCR clone 36685 (TRAV29/DV5, TRAJ26)
CAAIPSGQNFVF

SEQ ID NO: 73370 - protein, 15 aa, Homo sapiens
  CDR3 for beta chain variable domain of TCR clone 36685 (TRBV7-2, TRBJ2-7)
CASSLVSSGSYEQYF

SEQ ID NO: 73371 - protein, 16 aa, Homo sapiens
  CDR3 for alpha chain variable domain of TCR clone 36686 (TRAV3, TRAJ23)
CAVKIGIYNQGGKLIF

SEQ ID NO: 73372 - protein, 17 aa, Homo sapiens
  CDR3 for beta chain variable domain of TCR clone 36686 (TRBV10-3, TRBJ2-6)
CAISESTAPAGANVLTF

SEQ ID NO: 73373 - protein, 16 aa, Homo sapiens
  CDR3 for alpha chain variable domain of TCR clone 36687 (TRAV12-1, TRAJ53)
CVVTSVAGGSNYKLTF

SEQ ID NO: 73374 - protein, 16 aa, Homo sapiens
  CDR3 for beta chain variable domain of TCR clone 36687 (TRBV6-6, TRBJ2-3)
YASSYSHAGSTDTQYF

SEQ ID NO: 73375 - protein, 11 aa, Homo sapiens
  CDR3 for alpha chain variable domain of TCR clone 36688 (TRAV12-3, TRAJ27)
CAMANAGKSTF

SEQ ID NO: 73376 - protein, 13 aa, Homo sapiens
  CDR3 for beta chain variable domain of TCR clone 36688 (TRBV5-4, TRBJ2-5)
CASSPVSQETQYF

SEQ ID NO: 73377 - protein, 14 aa, Homo sapiens
  CDR3 for alpha chain variable domain of TCR clone 36689 (TRAV12-2, TRAJ13)
CAVKKTGGYQKVTF

SEQ ID NO: 73378 - protein, 15 aa, Homo sapiens
  CDR3 for beta chain variable domain of TCR clone 36689 (TRBV27, TRBJ2-1)
CASSNGGGSSNQQFF

SEQ ID NO: 73379 - protein, 15 aa, Homo sapiens
  CDR3 for alpha chain variable domain of TCR clone 36690 (TRAV13-1, TRAJ32)
CAASIYGGATNKLIF

SEQ ID NO: 73380 - protein, 11 aa, Homo sapiens
  CDR3 for beta chain variable domain of TCR clone 36690 (TRBV28, TRBJ2-7)
CASGPLPEQYF

SEQ ID NO: 73381 - protein, 12 aa, Homo sapiens
  CDR3 for alpha chain variable domain of TCR clone 36691 (TRAV8-1, TRAJ6)
CASSGGSYIPTF

SEQ ID NO: 73382 - protein, 12 aa, Homo sapiens
  CDR3 for beta chain variable domain of TCR clone 36691 (TRBV19, TRBJ1-1)
CASMNGYTEAFF

SEQ ID NO: 73383 - protein, 15 aa, Homo sapiens
  CDR3 for alpha chain variable domain of TCR clone 36692 (TRAV8-2, TRAJ40)
CVVLGTTSGTYKYLF

SEQ ID NO: 73384 - protein, 16 aa, Homo sapiens
  CDR3 for beta chain variable domain of TCR clone 36692 (TRBV7-3, TRBJ2-1)
CASSLEGYRSYNEQFF

SEQ ID NO: 73385 - protein, 12 aa, Homo sapiens
  CDR3 for alpha chain variable domain of TCR clone 36693 (TRAV16, TRAJ10)
CSRTGGGNKLTC

SEQ ID NO: 73386 - protein, 15 aa, Homo sapiens
  CDR3 for beta chain variable domain of TCR clone 36693 (TRBV6-3, TRBJ2-7)
CASSSPGTVFYEQYF

SEQ ID NO: 73387 - protein, 14 aa, Homo sapiens
  CDR3 for alpha chain variable domain of TCR clone 36694 (TRAV14/DV4, TRAJ9)
CAMRPNTGGFKTIF

SEQ ID NO: 73388 - protein, 15 aa, Homo sapiens
  CDR3 for beta chain variable domain of TCR clone 36694 (TRBV6-1, TRBJ1-5)
CASSVNRATGQPQHF

SEQ ID NO: 73389 - protein, 15 aa, Homo sapiens
  CDR3 for alpha chain variable domain of TCR clone 36695 (TRAV25, TRAJ52)
CAGRPGGTSYGKLTF

SEQ ID NO: 73390 - protein, 16 aa, Homo sapiens
  CDR3 for beta chain variable domain of TCR clone 36695 (TRBV7-8, TRBJ2-6)
CQQRRDRGRWANVLTF

SEQ ID NO: 73391 - protein, 14 aa, Homo sapiens
  CDR3 for alpha chain variable domain of TCR clone 36696 (TRAV17, TRAJ6)
CATVFQGGSYIPTF

SEQ ID NO: 73392 - protein, 16 aa, Homo sapiens
  CDR3 for beta chain variable domain of TCR clone 36696 (TRBV13, TRBJ2-2)
CASSPRTGEHTGELFF

SEQ ID NO: 73393 - protein, 15 aa, Homo sapiens
  CDR3 for alpha chain variable domain of TCR clone 36697 (TRAV39, TRAJ37)
CAVVYGSSNTGKLIF

SEQ ID NO: 73394 - protein, 14 aa, Homo sapiens
  CDR3 for beta chain variable domain of TCR clone 36697 (TRBV20-1, TRBJ1-5)
CSARDDRGNQPQHF

SEQ ID NO: 73395 - protein, 14 aa, Homo sapiens
  CDR3 for alpha chain variable domain of TCR clone 36698 (TRAV20, TRAJ29)
CAVQAWVGNTPLVL

SEQ ID NO: 73396 - protein, 15 aa, Homo sapiens
  CDR3 for beta chain variable domain of TCR clone 36698 (TRBV29-1, TRBJ2-7)
CSVEFFDRGSYEQYF

SEQ ID NO: 73397 - protein, 13 aa, Homo sapiens
  CDR3 for alpha chain variable domain of TCR clone 36699 (TRAV3, TRAJ27)
CAVRPLGAGKSTF

SEQ ID NO: 73398 - protein, 13 aa, Homo sapiens
  CDR3 for beta chain variable domain of TCR clone 36699 (TRBV7-9, TRBJ2-3)
CAISPGSTDTQYF

SEQ ID NO: 73399 - protein, 15 aa, Homo sapiens
  CDR3 for alpha chain variable domain of TCR clone 36700 (TRAV17, TRAJ57)
CATGPSQGGSEKLVF

SEQ ID NO: 73400 - protein, 16 aa, Homo sapiens
  CDR3 for beta chain variable domain of TCR clone 36700 (TRBV12-4, TRBJ1-5)
CASSRPVGGTNQPQHF

SEQ ID NO: 73401 - protein, 15 aa, Homo sapiens
  CDR3 for alpha chain variable domain of TCR clone 36701 (TRAV3, TRAJ29)
CAARDLYSGNTPLVF

SEQ ID NO: 73402 - protein, 17 aa, Homo sapiens
  CDR3 for beta chain variable domain of TCR clone 36701 (TRBV20-1, TRBJ2-1)
CSARDPLAGVWDNEQFF

SEQ ID NO: 73403 - protein, 12 aa, Homo sapiens
  CDR3 for alpha chain variable domain of TCR clone 36702 (TRAV12-1, TRAJ40)
CVFYSGTYKYIF

SEQ ID NO: 73404 - protein, 18 aa, Homo sapiens
  CDR3 for beta chain variable domain of TCR clone 36702 (TRBV12-4, TRBJ2-2)
CSSSLVAGTRGRTGELFF

SEQ ID NO: 73405 - protein, 14 aa, Homo sapiens
  CDR3 for alpha chain variable domain of TCR clone 36703 (TRAV16, TRAJ8)
CALLMNTGFQKLVF

SEQ ID NO: 73406 - protein, 16 aa, Homo sapiens
  CDR3 for beta chain variable domain of TCR clone 36703 (TRBV4-2, TRBJ2-7)
CASSQDRGTSSYEQYF

SEQ ID NO: 73407 - protein, 13 aa, Homo sapiens
  CDR3 for alpha chain variable domain of TCR clone 36704 (TRAV12-1, TRAJ22)
CVVYSGSARQLTL

SEQ ID NO: 73408 - protein, 15 aa, Homo sapiens
  CDR3 for beta chain variable domain of TCR clone 36704 (TRBV20-1, TRBJ2-7)
CSARDRVSGMDEQYF

SEQ ID NO: 73409 - protein, 13 aa, Homo sapiens
  CDR3 for alpha chain variable domain of TCR clone 36705 (TRAV21, TRAJ27)
CAARPGNAGKSTF

SEQ ID NO: 73410 - protein, 16 aa, Homo sapiens
  CDR3 for beta chain variable domain of TCR clone 36705 (TRBV20-1, TRBJ1-2)
CSASMGQGVANYGYSF

SEQ ID NO: 73411 - protein, 17 aa, Homo sapiens
  CDR3 for alpha chain variable domain of TCR clone 36706 (TRAV17, TRAJ28)
CATDPRRGGAGSYQLTF

SEQ ID NO: 73412 - protein, 16 aa, Homo sapiens
  CDR3 for beta chain variable domain of TCR clone 36706 (TRBV25-1, TRBJ1-1)
CASSGDRDRGRSEAFF

SEQ ID NO: 73413 - protein, 18 aa, Homo sapiens
  CDR3 for alpha chain variable domain of TCR clone 36707 (TRAV26-1, TRAJ23)
CIVRVGLEVWNQGGKLIF

SEQ ID NO: 73414 - protein, 16 aa, Homo sapiens
  CDR3 for beta chain variable domain of TCR clone 36707 (TRBV12-4, TRBJ2-5)
CASSVFVRGRQETQYF

SEQ ID NO: 73415 - protein, 13 aa, Homo sapiens
  CDR3 for alpha chain variable domain of TCR clone 36708 (TRAV27, TRAJ54)
CAGALREAQKLVF

SEQ ID NO: 73416 - protein, 15 aa, Homo sapiens
  CDR3 for beta chain variable domain of TCR clone 36708 (TRBV7-2, TRBJ1-2)
CASSLVSGGDYGYTF

SEQ ID NO: 73417 - protein, 13 aa, Homo sapiens
  CDR3 for alpha chain variable domain of TCR clone 36709 (TRAV17, TRAJ9)
CATDYTGGFKTIL

SEQ ID NO: 73418 - protein, 14 aa, Homo sapiens
  CDR3 for beta chain variable domain of TCR clone 36709 (TRBV19, TRBJ2-5)
CASSMTGQQEIQYF

SEQ ID NO: 73419 - protein, 13 aa, Homo sapiens
  CDR3 for alpha chain variable domain of TCR clone 36710 (TRAV12-1, TRAJ40)
CVVPTSGTYKYIF

SEQ ID NO: 73420 - protein, 18 aa, Homo sapiens
  CDR3 for beta chain variable domain of TCR clone 36710 (TRBV7-6, TRBJ2-1)
CASSPRTSGMGSYNEQFF

SEQ ID NO: 73421 - protein, 11 aa, Homo sapiens
  CDR3 for alpha chain variable domain of TCR clone 36711 (TRAV1-2, TRAJ31)
CAVNNNARLMF

SEQ ID NO: 73422 - protein, 15 aa, Homo sapiens
  CDR3 for beta chain variable domain of TCR clone 36711 (TRBV28, TRBJ2-1)
CASSIIAGGRNEQFF

SEQ ID NO: 73423 - protein, 15 aa, Homo sapiens
  CDR3 for alpha chain variable domain of TCR clone 36712 (TRAV3, TRAJ3)
CAVRDRDSSSSKIIF

SEQ ID NO: 73424 - protein, 18 aa, Homo sapiens
  CDR3 for beta chain variable domain of TCR clone 36712 (TRBV25-1, TRBJ1-2)
CASSGLQNGQGLIFGYTF

SEQ ID NO: 73425 - protein, 15 aa, Homo sapiens
  CDR3 for alpha chain variable domain of TCR clone 36713 (TRAV21, TRAJ32)
CAVRRYGGATNKLIF

SEQ ID NO: 73426 - protein, 14 aa, Homo sapiens
  CDR3 for beta chain variable domain of TCR clone 36713 (TRBV11-3, TRBJ2-1)
CASSATTSGSIQFF

SEQ ID NO: 73427 - protein, 13 aa, Homo sapiens
  CDR3 for alpha chain variable domain of TCR clone 36714 (TRAV17, TRAJ54)
CATSWGGAQKLVF

SEQ ID NO: 73428 - protein, 15 aa, Homo sapiens
  CDR3 for beta chain variable domain of TCR clone 36714 (TRBV4-3, TRBJ2-3)
CASSPSRLSTDTQYF

SEQ ID NO: 73429 - protein, 17 aa, Homo sapiens
  CDR3 for alpha chain variable domain of TCR clone 36715 (TRAV3, TRAJ42)
CAVRDRDYGGSQGNLIF

SEQ ID NO: 73430 - protein, 16 aa, Homo sapiens
  CDR3 for beta chain variable domain of TCR clone 36715 (TRBV20-1, TRBJ1-2)
CSASMGQGVANYGYTF

SEQ ID NO: 73431 - protein, 14 aa, Homo sapiens
  CDR3 for alpha chain variable domain of TCR clone 36716 (TRAV1-2, TRAJ8)
CAVREDTGFQKLVF

SEQ ID NO: 73432 - protein, 15 aa, Homo sapiens
  CDR3 for beta chain variable domain of TCR clone 36716 (TRBV6-3, TRBJ2-7)
CASSSPGTFFYEQYF

SEQ ID NO: 73433 - protein, 12 aa, Homo sapiens
  CDR3 for alpha chain variable domain of TCR clone 36717 (TRAV12-3, TRAJ20)
CAMVRGDCKLSF

SEQ ID NO: 73434 - protein, 14 aa, Homo sapiens
  CDR3 for beta chain variable domain of TCR clone 36717 (TRBV5-5, TRBJ1-5)
CASSGQGVDQPQHF

SEQ ID NO: 73435 - protein, 13 aa, Homo sapiens
  CDR3 for alpha chain variable domain of TCR clone 36718 (TRAV35, TRAJ58)
CAGLETSGSRLTF

SEQ ID NO: 73436 - protein, 15 aa, Homo sapiens
  CDR3 for beta chain variable domain of TCR clone 36718 (TRBV20-1, TRBJ2-1)
CSARFSAGGLNEQFL

SEQ ID NO: 73437 - protein, 15 aa, Homo sapiens
  CDR3 for alpha chain variable domain of TCR clone 36719 (TRAV20, TRAJ53)
CAVQARGGSNYKLTF

SEQ ID NO: 73438 - protein, 12 aa, Homo sapiens
  CDR3 for beta chain variable domain of TCR clone 36719 (TRBV7-8, TRBJ2-7)
CASSLGDREQYF

SEQ ID NO: 73439 - protein, 16 aa, Homo sapiens
  CDR3 for alpha chain variable domain of TCR clone 36720 (TRAV16, TRAJ42)
CARKMNYGGSQGNPIF

SEQ ID NO: 73440 - protein, 15 aa, Homo sapiens
  CDR3 for beta chain variable domain of TCR clone 36720 (TRBV20-1, TRBJ2-7)
CSAREGRDSLYEQYF

SEQ ID NO: 73441 - protein, 11 aa, Homo sapiens
  CDR3 for alpha chain variable domain of TCR clone 36721 (TRAV2, TRAJ13)
CASGGYQKVTF

SEQ ID NO: 73442 - protein, 15 aa, Homo sapiens
  CDR3 for beta chain variable domain of TCR clone 36721 (TRBV28, TRBJ2-7)
CASSVRQVSSYEQYF

SEQ ID NO: 73443 - protein, 13 aa, Homo sapiens
  CDR3 for alpha chain variable domain of TCR clone 36722 (TRAV13-1, TRAJ6)
CARGSGGSYIPTF

SEQ ID NO: 73444 - protein, 17 aa, Homo sapiens
  CDR3 for beta chain variable domain of TCR clone 36722 (TRBV7-8, TRBJ2-1)
CASSPPTGTLAYNEQLF

SEQ ID NO: 73445 - protein, 16 aa, Homo sapiens
  CDR3 for alpha chain variable domain of TCR clone 36723 (TRAV8-2, TRAJ7)
CVVSEGPYYGNNRLAF

SEQ ID NO: 73446 - protein, 13 aa, Homo sapiens
  CDR3 for beta chain variable domain of TCR clone 36723 (TRBV19, TRBJ2-1)
FASSMYRVNEQFF

SEQ ID NO: 73447 - protein, 12 aa, Homo sapiens
  CDR3 for alpha chain variable domain of TCR clone 36724 (TRAV13-1, TRAJ9)
CASHTGGFKTIF

SEQ ID NO: 73448 - protein, 18 aa, Homo sapiens
  CDR3 for beta chain variable domain of TCR clone 36724 (TRBV11-2, TRBJ2-3)
CASSLGRASRGAPNTQYF

SEQ ID NO: 73449 - protein, 17 aa, Homo sapiens
  CDR3 for alpha chain variable domain of TCR clone 36725 (TRAV13-1, TRAJ52)
CAAGRNAGVTSYGKLTF

SEQ ID NO: 73450 - protein, 13 aa, Homo sapiens
  CDR3 for beta chain variable domain of TCR clone 36725 (TRBV7-2, TRBJ1-1)
CASNLKGAKVAFF

SEQ ID NO: 73451 - protein, 12 aa, Homo sapiens
  CDR3 for alpha chain variable domain of TCR clone 36726 (TRAV16, TRAJ13)
CITLRGHQKVTF

SEQ ID NO: 73452 - protein, 17 aa, Homo sapiens
  CDR3 for beta chain variable domain of TCR clone 36726 (TRBV28, TRBJ2-5)
CASSRQGGLAGAETQYF

SEQ ID NO: 73453 - protein, 15 aa, Homo sapiens
  CDR3 for alpha chain variable domain of TCR clone 36727 (TRAV21, TRAJ37)
CAVRPTLSNTGKLIF

SEQ ID NO: 73454 - protein, 16 aa, Homo sapiens
  CDR3 for beta chain variable domain of TCR clone 36727 (TRBV24-1, TRBJ2-3)
CTTSDRRQDLTDTQYF

SEQ ID NO: 73455 - protein, 14 aa, Homo sapiens
  CDR3 for alpha chain variable domain of TCR clone 36728 (TRAV30, TRAJ29)
CGTEEHSGNAPLVF

SEQ ID NO: 73456 - protein, 15 aa, Homo sapiens
  CDR3 for beta chain variable domain of TCR clone 36728 (TRBV7-9, TRBJ2-5)
CASSPPGRRVETQYF

SEQ ID NO: 73457 - protein, 10 aa, Homo sapiens
  CDR3 for alpha chain variable domain of TCR clone 36729 (TRAV8-4, TRAJ43)
CAVSADDMRF

SEQ ID NO: 73458 - protein, 15 aa, Homo sapiens
  CDR3 for beta chain variable domain of TCR clone 36729 (TRBV5-1, TRBJ2-3)
CAGSVTSGSTDTQYF

SEQ ID NO: 73459 - protein, 15 aa, Homo sapiens
  CDR3 for alpha chain variable domain of TCR clone 36730 (TRAV34, TRAJ38)
CGADFTPGNSRKLIW

SEQ ID NO: 73460 - protein, 16 aa, Homo sapiens
  CDR3 for beta chain variable domain of TCR clone 36730 (TRBV12-5, TRBJ2-5)
CASGPRTSGNQETQYF

SEQ ID NO: 73461 - protein, 14 aa, Homo sapiens
  CDR3 for alpha chain variable domain of TCR clone 36731 (TRAV14/DV4, TRAJ58)
CAMMKETSGSRLAF

SEQ ID NO: 73462 - protein, 12 aa, Homo sapiens
  CDR3 for beta chain variable domain of TCR clone 36731 (TRBV12-4, TRBJ2-1)
CASTYVLNEQFF

SEQ ID NO: 73463 - protein, 13 aa, Homo sapiens
  CDR3 for alpha chain variable domain of TCR clone 36732 (TRAV26-1, TRAJ48)
CIVKVVGDEKLTF

SEQ ID NO: 73464 - protein, 18 aa, Homo sapiens
  CDR3 for beta chain variable domain of TCR clone 36732 (TRBV4-3, TRBJ1-6)
CASSQETPASSYNSPLHF

SEQ ID NO: 73465 - protein, 14 aa, Homo sapiens
  CDR3 for alpha chain variable domain of TCR clone 36733 (TRAV8-6, TRAJ52)
CAMIGGTSYGKLTF

SEQ ID NO: 73466 - protein, 15 aa, Homo sapiens
  CDR3 for beta chain variable domain of TCR clone 36733 (TRBV11-2, TRBJ2-5)
CASSLGAGGVETQYF

SEQ ID NO: 73467 - protein, 17 aa, Homo sapiens
  CDR3 for alpha chain variable domain of TCR clone 36734 (TRAV8-4, TRAJ11)
CAVSDRGENSGYSTLTF

SEQ ID NO: 73468 - protein, 14 aa, Homo sapiens
  CDR3 for beta chain variable domain of TCR clone 36734 (TRBV20-1, TRBJ2-1)
CSPSDEASYNEQFF

SEQ ID NO: 73469 - protein, 12 aa, Homo sapiens
  CDR3 for alpha chain variable domain of TCR clone 36735 (TRAV21, TRAJ11)
CAVRGGNSTLTF

SEQ ID NO: 73470 - protein, 15 aa, Homo sapiens
  CDR3 for beta chain variable domain of TCR clone 36735 (TRBV6-1, TRBJ2-7)
CASSEPIAATTEQSF

SEQ ID NO: 73471 - protein, 10 aa, Homo sapiens
  CDR3 for alpha chain variable domain of TCR clone 36736 (TRAV2, TRAJ40)
CAGYLRNLQI

SEQ ID NO: 73472 - protein, 14 aa, Homo sapiens
  CDR3 for beta chain variable domain of TCR clone 36736 (TRBV19, TRBJ2-1)
CASPTFVLSGEQFF

SEQ ID NO: 73473 - protein, 12 aa, Homo sapiens
  CDR3 for alpha chain variable domain of TCR clone 36737 (TRAV35, TRAJ39)
LAPNNAGNMLTF

SEQ ID NO: 73474 - protein, 16 aa, Homo sapiens
  CDR3 for beta chain variable domain of TCR clone 36737 (TRBV2, TRBJ2-3)
CASSTSVEGVTDTQYL

SEQ ID NO: 73475 - protein, 15 aa, Homo sapiens
  CDR3 for alpha chain variable domain of TCR clone 36738 (TRAV3, TRAJ20)
CAVRDVKLSDYKLSF

SEQ ID NO: 73476 - protein, 16 aa, Homo sapiens
  CDR3 for beta chain variable domain of TCR clone 36738 (TRBV12-4, TRBJ2-1)
CASSAVGQGNGDEQFF

SEQ ID NO: 73477 - protein, 13 aa, Homo sapiens
  CDR3 for alpha chain variable domain of TCR clone 36739 (TRAV1-1, TRAJ31)
CAVRPNNNARLMF

SEQ ID NO: 73478 - protein, 14 aa, Homo sapiens
  CDR3 for beta chain variable domain of TCR clone 36739 (TRBV11-2, TRBJ2-1)
CASSLSGPYNEQFF

SEQ ID NO: 73479 - protein, 15 aa, Homo sapiens
  CDR3 for alpha chain variable domain of TCR clone 36740 (TRAV3, TRAJ23)
CAVKDRGNQGGKLIF

SEQ ID NO: 73480 - protein, 13 aa, Homo sapiens
  CDR3 for beta chain variable domain of TCR clone 36740 (TRBV7-2, TRBJ2-7)
CASSSPSGSEQYF

SEQ ID NO: 73481 - protein, 14 aa, Homo sapiens
  CDR3 for alpha chain variable domain of TCR clone 36741 (TRAV36/DV7, TRAJ40)
CAVETTSGTYKHIF

SEQ ID NO: 73482 - protein, 13 aa, Homo sapiens
  CDR3 for beta chain variable domain of TCR clone 36741 (TRBV29-1, TRBJ2-1)
CSVEGGRVNEQFF

SEQ ID NO: 73483 - protein, 14 aa, Homo sapiens
  CDR3 for alpha chain variable domain of TCR clone 36742 (TRAV12-2, TRAJ48)
CAVNAFFGNEKLTF

SEQ ID NO: 73484 - protein, 13 aa, Homo sapiens
  CDR3 for beta chain variable domain of TCR clone 36742 (TRBV28, TRBJ2-7)
CTGAQQGLDEQYF

SEQ ID NO: 73485 - protein, 13 aa, Homo sapiens
  CDR3 for alpha chain variable domain of TCR clone 36743 (TRAV3, TRAJ27)
CAVKPLGAGKSTF

SEQ ID NO: 73486 - protein, 13 aa, Homo sapiens
  CDR3 for beta chain variable domain of TCR clone 36743 (TRBV7-9, TRBJ2-3)
CASSPGSTDTQYF

SEQ ID NO: 73487 - protein, 12 aa, Homo sapiens
  CDR3 for alpha chain variable domain of TCR clone 36744 (TRAV13-1, TRAJ21)
CAAKEGFNKFYF

SEQ ID NO: 73488 - protein, 17 aa, Homo sapiens
  CDR3 for beta chain variable domain of TCR clone 36744 (TRBV25-1, TRBJ1-4)
CASSPGDSTNEKLFLAV

SEQ ID NO: 73489 - protein, 14 aa, Homo sapiens
  CDR3 for alpha chain variable domain of TCR clone 36745 (TRAV12-2, TRAJ17)
CAGNIKAAGNKLTF

SEQ ID NO: 73490 - protein, 16 aa, Homo sapiens
  CDR3 for beta chain variable domain of TCR clone 36745 (TRBV20-1, TRBJ2-6)
CSASSQGYDGANVLTF

SEQ ID NO: 73491 - protein, 12 aa, Homo sapiens
  CDR3 for alpha chain variable domain of TCR clone 36746 (TRAV13-1, TRAJ5)
CAAKAGRRALTF

SEQ ID NO: 73492 - protein, 14 aa, Homo sapiens
  CDR3 for beta chain variable domain of TCR clone 36746 (TRBV7-3, TRBJ1-1)
CASSLKGGNTEAFF

SEQ ID NO: 73493 - protein, 13 aa, Homo sapiens
  CDR3 for alpha chain variable domain of TCR clone 36747 (TRAV17, TRAJ34)
CATDLYNTDKLIF

SEQ ID NO: 73494 - protein, 15 aa, Homo sapiens
  CDR3 for beta chain variable domain of TCR clone 36747 (TRBV20-1, TRBJ2-3)
CGATGTSGFTDTQYF

SEQ ID NO: 73495 - protein, 13 aa, Homo sapiens
  CDR3 for alpha chain variable domain of TCR clone 36748 (TRAV27, TRAJ45)
CRSSGGGADGLTF

SEQ ID NO: 73496 - protein, 17 aa, Homo sapiens
  CDR3 for beta chain variable domain of TCR clone 36748 (TRBV3-1, TRBJ2-5)
CASSNWGGTSGQETQYF

SEQ ID NO: 73497 - protein, 14 aa, Homo sapiens
  CDR3 for alpha chain variable domain of TCR clone 36749 (TRAV1-2, TRAJ16)
CAVNRFSDGQKLLF

SEQ ID NO: 73498 - protein, 16 aa, Homo sapiens
  CDR3 for beta chain variable domain of TCR clone 36749 (TRBV20-1, TRBJ1-4)
CSAPGQGLLTNGKLFF

SEQ ID NO: 73499 - protein, 15 aa, Homo sapiens
  CDR3 for alpha chain variable domain of TCR clone 36750 (TRAV23/DV6, TRAJ37)
CAAGEGSSNTGKLIF

SEQ ID NO: 73500 - protein, 17 aa, Homo sapiens
  CDR3 for beta chain variable domain of TCR clone 36750 (TRBV20-1, TRBJ2-7)
CSATRAGGVAGVGEQYF

SEQ ID NO: 73501 - protein, 14 aa, Homo sapiens
  CDR3 for alpha chain variable domain of TCR clone 36751 (TRAV2, TRAJ9)
CAVEDRGGGFKTIF

SEQ ID NO: 73502 - protein, 12 aa, Homo sapiens
  CDR3 for beta chain variable domain of TCR clone 36751 (TRBV11-2, TRBJ2-1)
CASSPGNNEQFF

SEQ ID NO: 73503 - protein, 14 aa, Homo sapiens
  CDR3 for alpha chain variable domain of TCR clone 36752 (TRAV1-2, TRAJ16)
CAVNRFSDGQKLLF

SEQ ID NO: 73504 - protein, 14 aa, Homo sapiens
  CDR3 for beta chain variable domain of TCR clone 36752 (TRBV19, TRBJ2-1)
CASPTFVLSGQQFF

SEQ ID NO: 73505 - protein, 18 aa, Homo sapiens
  CDR3 for alpha chain variable domain of TCR clone 36753 (TRAV21, TRAJ52)
CAVRPSPSGGTSYGKLTF

SEQ ID NO: 73506 - protein, 14 aa, Homo sapiens
  CDR3 for beta chain variable domain of TCR clone 36753 (TRBV4-1, TRBJ2-2)
CASSQAVNTGELFF

SEQ ID NO: 73507 - protein, 14 aa, Homo sapiens
  CDR3 for alpha chain variable domain of TCR clone 36754 (TRAV16, TRAJ33)
CAISAMDSNYQLIW

SEQ ID NO: 73508 - protein, 12 aa, Homo sapiens
  CDR3 for beta chain variable domain of TCR clone 36754 (TRBV5-1, TRBJ1-2)
CASSQDTYGYTF

SEQ ID NO: 73509 - protein, 15 aa, Homo sapiens
  CDR3 for alpha chain variable domain of TCR clone 36755 (TRAV8-3, TRAJ15)
CAVGAPNQAGTALSF

SEQ ID NO: 73510 - protein, 14 aa, Homo sapiens
  CDR3 for beta chain variable domain of TCR clone 36755 (TRBV20-1, TRBJ2-1)
CSPNDEASYNEQFF

SEQ ID NO: 73511 - protein, 11 aa, Homo sapiens
  CDR3 for alpha chain variable domain of TCR clone 36756 (TRAV16, TRAJ20)
CALSEGFKAAL

SEQ ID NO: 73512 - protein, 13 aa, Homo sapiens
  CDR3 for beta chain variable domain of TCR clone 36756 (TRBV7-3, TRBJ2-1)
CASSVDSYNEQFF

SEQ ID NO: 73513 - protein, 15 aa, Homo sapiens
  CDR3 for alpha chain variable domain of TCR clone 36757 (TRAV12-3, TRAJ27)
CAMRAYNTNAGKSTF

SEQ ID NO: 73514 - protein, 13 aa, Homo sapiens
  CDR3 for beta chain variable domain of TCR clone 36757 (TRBV11-2, TRBJ2-5)
CASSRGPPETQYF

SEQ ID NO: 73515 - protein, 14 aa, Homo sapiens
  CDR3 for alpha chain variable domain of TCR clone 36758 (TRAV1-1, TRAJ27)
CAVTYNTNAGKSTF

SEQ ID NO: 73516 - protein, 15 aa, Homo sapiens
  CDR3 for beta chain variable domain of TCR clone 36758 (TRBV7-2, TRBJ2-1)
CASSSGLAGGNEQFF

SEQ ID NO: 73517 - protein, 14 aa, Homo sapiens
  CDR3 for alpha chain variable domain of TCR clone 36759 (TRAV1-2, TRAJ8)
CAVREDIGFQKLVF

SEQ ID NO: 73518 - protein, 19 aa, Homo sapiens
  CDR3 for beta chain variable domain of TCR clone 36759 (TRBV7-2, TRBJ2-3)
CASSFLSRNWGGGTDTQYF

SEQ ID NO: 73519 - protein, 16 aa, Homo sapiens
  CDR3 for alpha chain variable domain of TCR clone 36760 (TRAV30, TRAJ24)
CGTEIVDADSSGKFQF

SEQ ID NO: 73520 - protein, 14 aa, Homo sapiens
  CDR3 for beta chain variable domain of TCR clone 36760 (TRBV12-5, TRBJ2-5)
CASGSRTHQETQYF

SEQ ID NO: 73521 - protein, 13 aa, Homo sapiens
  CDR3 for alpha chain variable domain of TCR clone 36761 (TRAV8-3, TRAJ36)
CAVGATGANNLFF

SEQ ID NO: 73522 - protein, 14 aa, Homo sapiens
  CDR3 for beta chain variable domain of TCR clone 36761 (TRBV25-1, TRBJ1-1)
CASTHLGGNTEAFF

SEQ ID NO: 73523 - protein, 18 aa, Homo sapiens
  CDR3 for alpha chain variable domain of TCR clone 36762 (TRAV16, TRAJ52)
CALSGVDAGGTSYGKLTF

SEQ ID NO: 73524 - protein, 15 aa, Homo sapiens
  CDR3 for beta chain variable domain of TCR clone 36762 (TRBV6-3, TRBJ2-7)
CASSSPGTVFYEQYF

SEQ ID NO: 73525 - protein, 12 aa, Homo sapiens
  CDR3 for alpha chain variable domain of TCR clone 36763 (TRAV2, TRAJ31)
CAVEEGNARLMF

SEQ ID NO: 73526 - protein, 18 aa, Homo sapiens
  CDR3 for beta chain variable domain of TCR clone 36763 (TRBV7-9, TRBJ2-3)
CASSLGLAGLATPDTQYF

SEQ ID NO: 73527 - protein, 14 aa, Homo sapiens
  CDR3 for alpha chain variable domain of TCR clone 36764 (TRAV20, TRAJ56)
CAVQFGGANSKLTF

SEQ ID NO: 73528 - protein, 14 aa, Homo sapiens
  CDR3 for beta chain variable domain of TCR clone 36764 (TRBV20-1, TRBJ2-7)
CSAKQGRSSYEQYF

SEQ ID NO: 73529 - protein, 13 aa, Homo sapiens
  CDR3 for alpha chain variable domain of TCR clone 36765 (TRAV27, TRAJ41)
CAGEGNSGYALNF

SEQ ID NO: 73530 - protein, 15 aa, Homo sapiens
  CDR3 for beta chain variable domain of TCR clone 36765 (TRBV6-3, TRBJ2-7)
RASSSPGTVFYEQYF

SEQ ID NO: 73531 - protein, 11 aa, Homo sapiens
  CDR3 for alpha chain variable domain of TCR clone 36766 (TRAV3, TRAJ21)
CAVGNFNKFYF

SEQ ID NO: 73532 - protein, 13 aa, Homo sapiens
  CDR3 for beta chain variable domain of TCR clone 36766 (TRBV7-9, TRBJ2-7)
CASSFAGAYEQYF

SEQ ID NO: 73533 - protein, 14 aa, Homo sapiens
  CDR3 for alpha chain variable domain of TCR clone 36767 (TRAV25, TRAJ21)
CADYTTSTNFTLDL

SEQ ID NO: 73534 - protein, 13 aa, Homo sapiens
  CDR3 for beta chain variable domain of TCR clone 36767 (TRBV27, TRBJ1-1)
CASSLSIGAEAFF

SEQ ID NO: 73535 - protein, 12 aa, Homo sapiens
  CDR3 for alpha chain variable domain of TCR clone 36768 (TRAV12-3, TRAJ17)
CAMTLTGNKLTF

SEQ ID NO: 73536 - protein, 13 aa, Homo sapiens
  CDR3 for beta chain variable domain of TCR clone 36768 (TRBV6-4, TRBJ1-5)
CASSADLNQPQHF

SEQ ID NO: 73537 - protein, 13 aa, Homo sapiens
  CDR3 for alpha chain variable domain of TCR clone 36769 (TRAV17, TRAJ5)
CAPMDTGRRALTF

SEQ ID NO: 73538 - protein, 15 aa, Homo sapiens
  CDR3 for beta chain variable domain of TCR clone 36769 (TRBV6-6, TRBJ2-5)
RASSPGGGLEETQYF

SEQ ID NO: 73539 - protein, 14 aa, Homo sapiens
  CDR3 for alpha chain variable domain of TCR clone 36770 (TRAV12-1, TRAJ12)
CVVTRMDSSYKLIL

SEQ ID NO: 73540 - protein, 13 aa, Homo sapiens
  CDR3 for beta chain variable domain of TCR clone 36770 (TRBV20-1, TRBJ1-1)
CSARGGGNTEAFF

SEQ ID NO: 73541 - protein, 13 aa, Homo sapiens
  CDR3 for alpha chain variable domain of TCR clone 36771 (TRAV8-3, TRAJ28)
CAVGAVGSYQLTF

SEQ ID NO: 73542 - protein, 14 aa, Homo sapiens
  CDR3 for beta chain variable domain of TCR clone 36771 (TRBV7-2, TRBJ2-7)
CASRSQGAEYEQYF

SEQ ID NO: 73543 - protein, 18 aa, Homo sapiens
  CDR3 for alpha chain variable domain of TCR clone 36772 (TRAV1-2, TRAJ18)
CAVRDMGDRGSTLGRLYF

SEQ ID NO: 73544 - protein, 13 aa, Homo sapiens
  CDR3 for beta chain variable domain of TCR clone 36772 (TRBV7-9, TRBJ1-2)
CASSLKQNYGYTF

SEQ ID NO: 73545 - protein, 14 aa, Homo sapiens
  CDR3 for alpha chain variable domain of TCR clone 36773 (TRAV17, TRAJ39)
CATDPVRTGNMLTF

SEQ ID NO: 73546 - protein, 15 aa, Homo sapiens
  CDR3 for beta chain variable domain of TCR clone 36773 (TRBV13, TRBJ1-5)
CASSFGQGGVQPQHF

SEQ ID NO: 73547 - protein, 14 aa, Homo sapiens
  CDR3 for alpha chain variable domain of TCR clone 36774 (TRAV26-1, TRAJ38)
CITDNAGNNRKLIW

SEQ ID NO: 73548 - protein, 12 aa, Homo sapiens
  CDR3 for beta chain variable domain of TCR clone 36774 (TRBV29-1, TRBJ2-3)
CSVTGGADTQYF

SEQ ID NO: 73549 - protein, 13 aa, Homo sapiens
  CDR3 for alpha chain variable domain of TCR clone 36775 (TRAV38-1, TRAJ42)
CARWGGSQGNLIF

SEQ ID NO: 73550 - protein, 14 aa, Homo sapiens
  CDR3 for beta chain variable domain of TCR clone 36775 (TRBV25-1, TRBJ1-1)
CASTHLGGNTEAFF

SEQ ID NO: 73551 - protein, 14 aa, Homo sapiens
  CDR3 for alpha chain variable domain of TCR clone 36776 (TRAV1-1, TRAJ27)
CAMIYNTNAGKSTF

SEQ ID NO: 73552 - protein, 15 aa, Homo sapiens
  CDR3 for beta chain variable domain of TCR clone 36776 (TRBV7-2, TRBJ2-1)
CASSSGLAGGNEQFF

SEQ ID NO: 73553 - protein, 13 aa, Homo sapiens
  CDR3 for alpha chain variable domain of TCR clone 36777 (TRAV35, TRAJ43)
CAGYPYNNNDTRF

SEQ ID NO: 73554 - protein, 15 aa, Homo sapiens
  CDR3 for beta chain variable domain of TCR clone 36777 (TRBV25-1, TRBJ1-4)
CASSKRIATNEKLFF

SEQ ID NO: 73555 - protein, 18 aa, Homo sapiens
  CDR3 for alpha chain variable domain of TCR clone 36778 (TRAV12-3, TRAJ52)
CAMSVGGAGGTSYGKLTF

SEQ ID NO: 73556 - protein, 14 aa, Homo sapiens
  CDR3 for beta chain variable domain of TCR clone 36778 (TRBV4-2, TRBJ2-1)
CASGLDRAYNEQFF

SEQ ID NO: 73557 - protein, 11 aa, Homo sapiens
  CDR3 for alpha chain variable domain of TCR clone 36779 (TRAV2, TRAJ21)
CAVFYFNKFYF

SEQ ID NO: 73558 - protein, 14 aa, Homo sapiens
  CDR3 for beta chain variable domain of TCR clone 36779 (TRBV15, TRBJ2-3)
CATRSGTSTDTQYF

SEQ ID NO: 73559 - protein, 10 aa, Homo sapiens
  CDR3 for alpha chain variable domain of TCR clone 36780 (TRAV16, TRAJ22)
SAMYLRQLTF

SEQ ID NO: 73560 - protein, 15 aa, Homo sapiens
  CDR3 for beta chain variable domain of TCR clone 36780 (TRBV7-9, TRBJ1-6)
CASSSPGRGNSHLHF

SEQ ID NO: 73561 - protein, 14 aa, Homo sapiens
  CDR3 for alpha chain variable domain of TCR clone 36781 (TRAV8-4, TRAJ39)
CAVSEGNAGNMLTF

SEQ ID NO: 73562 - protein, 16 aa, Homo sapiens
  CDR3 for beta chain variable domain of TCR clone 36781 (TRBV6-1, TRBJ1-1)
CASRDSGRGMNTEAFF

SEQ ID NO: 73563 - protein, 12 aa, Homo sapiens
  CDR3 for alpha chain variable domain of TCR clone 36782 (TRAV27, TRAJ21)
CAGVRQLQQILL

SEQ ID NO: 73564 - protein, 14 aa, Homo sapiens
  CDR3 for beta chain variable domain of TCR clone 36782 (TRBV7-9, TRBJ1-4)
RASSLEGQSEKLFF

SEQ ID NO: 73565 - protein, 13 aa, Homo sapiens
  CDR3 for alpha chain variable domain of TCR clone 36783 (TRAV8-3, TRAJ36)
CSVGATGANNLFF

SEQ ID NO: 73566 - protein, 15 aa, Homo sapiens
  CDR3 for beta chain variable domain of TCR clone 36783 (TRBV7-2, TRBJ1-2)
CASSPRAGWNYGYTF

SEQ ID NO: 73567 - protein, 12 aa, Homo sapiens
  CDR3 for alpha chain variable domain of TCR clone 36784 (TRAV4, TRAJ26)
CLVGDYGQNFVF

SEQ ID NO: 73568 - protein, 15 aa, Homo sapiens
  CDR3 for beta chain variable domain of TCR clone 36784 (TRBV6-3, TRBJ2-7)
CASSSPGTVFYEQYF

SEQ ID NO: 73569 - protein, 14 aa, Homo sapiens
  CDR3 for alpha chain variable domain of TCR clone 36785 (TRAV35, TRAJ38)
CDGYNAGNNRKLIW

SEQ ID NO: 73570 - protein, 12 aa, Homo sapiens
  CDR3 for beta chain variable domain of TCR clone 36785 (TRBV19, TRBJ2-7)
CASTDRGYEQYF

SEQ ID NO: 73571 - protein, 15 aa, Homo sapiens
  CDR3 for alpha chain variable domain of TCR clone 36786 (TRAV21, TRAJ53)
CATLNSGGSSYKLTF

SEQ ID NO: 73572 - protein, 14 aa, Homo sapiens
  CDR3 for beta chain variable domain of TCR clone 36786 (TRBV7-2, TRBJ2-7)
CASRSQGAAYEQYF

SEQ ID NO: 73573 - protein, 13 aa, Homo sapiens
  CDR3 for alpha chain variable domain of TCR clone 36787 (TRAV13-1, TRAJ13)
CAASKGGYQKVTF

SEQ ID NO: 73574 - protein, 16 aa, Homo sapiens
  CDR3 for beta chain variable domain of TCR clone 36787 (TRBV18, TRBJ1-2)
CASSPPERVTTYGYTF

SEQ ID NO: 73575 - protein, 13 aa, Homo sapiens
  CDR3 for alpha chain variable domain of TCR clone 36788 (TRAV12-3, TRAJ33)
CAMSVNSNYQLIW

SEQ ID NO: 73576 - protein, 13 aa, Homo sapiens
  CDR3 for beta chain variable domain of TCR clone 36788 (TRBV7-2, TRBJ2-2)
CASSLAVTGVLFF

SEQ ID NO: 73577 - protein, 14 aa, Homo sapiens
  CDR3 for alpha chain variable domain of TCR clone 36789 (TRAV12-2, TRAJ13)
CAVKKTGGFQKVTF

SEQ ID NO: 73578 - protein, 15 aa, Homo sapiens
  CDR3 for beta chain variable domain of TCR clone 36789 (TRBV27, TRBJ2-1)
CASSNGGGSSNEQFF

SEQ ID NO: 73579 - protein, 13 aa, Homo sapiens
  CDR3 for alpha chain variable domain of TCR clone 36790 (TRAV13-2, TRAJ13)
CAERSRGYQKVTF

SEQ ID NO: 73580 - protein, 14 aa, Homo sapiens
  CDR3 for beta chain variable domain of TCR clone 36790 (TRBV23-1, TRBJ2-5)
CASSFLRSQETQYF

SEQ ID NO: 73581 - protein, 14 aa, Homo sapiens
  CDR3 for alpha chain variable domain of TCR clone 36791 (TRAV20, TRAJ56)
CAVQFGGANSKLTF

SEQ ID NO: 73582 - protein, 14 aa, Homo sapiens
  CDR3 for beta chain variable domain of TCR clone 36791 (TRBV20-1, TRBJ2-7)
FSAKRGRSSYEQYF

SEQ ID NO: 73583 - protein, 13 aa, Homo sapiens
  CDR3 for alpha chain variable domain of TCR clone 36792 (TRAV27, TRAJ41)
CAGEGNSGYALNF

SEQ ID NO: 73584 - protein, 14 aa, Homo sapiens
  CDR3 for beta chain variable domain of TCR clone 36792 (TRBV7-2, TRBJ1-1)
CAGSFLTGTTEAFF

SEQ ID NO: 73585 - protein, 15 aa, Homo sapiens
  CDR3 for alpha chain variable domain of TCR clone 36793 (TRAV34, TRAJ38)
CGADFTPGNNRKLIW

SEQ ID NO: 73586 - protein, 15 aa, Homo sapiens
  CDR3 for beta chain variable domain of TCR clone 36793 (TRBV20-1, TRBJ2-7)
CSARDRVSGMDEQYF

SEQ ID NO: 73587 - protein, 11 aa, Homo sapiens
  CDR3 for alpha chain variable domain of TCR clone 36794 (TRAV17, TRAJ9)
CGFIGGFKTIF

SEQ ID NO: 73588 - protein, 14 aa, Homo sapiens
  CDR3 for beta chain variable domain of TCR clone 36794 (TRBV11-3, TRBJ2-5)
CASSRTGGIETQYF

SEQ ID NO: 73589 - protein, 11 aa, Homo sapiens
  CDR3 for alpha chain variable domain of TCR clone 36795 (TRAV1-2, TRAJ31)
CAVNNNARLMF

SEQ ID NO: 73590 - protein, 15 aa, Homo sapiens
  CDR3 for beta chain variable domain of TCR clone 36795 (TRBV28, TRBJ2-1)
CASSIIAEGRSEQFF

SEQ ID NO: 73591 - protein, 14 aa, Homo sapiens
  CDR3 for alpha chain variable domain of TCR clone 36796 (TRAV14/DV4, TRAJ42)
CPRGSLRSQGNLIF

SEQ ID NO: 73592 - protein, 18 aa, Homo sapiens
  CDR3 for beta chain variable domain of TCR clone 36796 (TRBV14, TRBJ2-3)
CASSQDRGVSQIRSILAQ

SEQ ID NO: 73593 - protein, 14 aa, Homo sapiens
  CDR3 for alpha chain variable domain of TCR clone 36797 (TRAV2, TRAJ37)
CAVDFTSNTGKLIF

SEQ ID NO: 73594 - protein, 17 aa, Homo sapiens
  CDR3 for beta chain variable domain of TCR clone 36797 (TRBV6-1, TRBJ1-2)
CASSGTHSQRGNYGYTF

SEQ ID NO: 73595 - protein, 15 aa, Homo sapiens
  CDR3 for alpha chain variable domain of TCR clone 36798 (TRAV17, TRAJ23)
CATDAEDNQGGKLIF

SEQ ID NO: 73596 - protein, 12 aa, Homo sapiens
  CDR3 for beta chain variable domain of TCR clone 36798 (TRBV2, TRBJ2-1)
RAKREGYNEQFF

SEQ ID NO: 73597 - protein, 11 aa, Homo sapiens
  CDR3 for alpha chain variable domain of TCR clone 36799 (TRAV1-2, TRAJ20)
CAVANDYKLIF

SEQ ID NO: 73598 - protein, 18 aa, Homo sapiens
  CDR3 for beta chain variable domain of TCR clone 36799 (TRBV20-1, TRBJ2-6)
CSAETTPTHGSGANVLTF

SEQ ID NO: 73599 - protein, 13 aa, Homo sapiens
  CDR3 for alpha chain variable domain of TCR clone 36800 (TRAV12-1, TRAJ42)
CGGVGGSQGNLIF

SEQ ID NO: 73600 - protein, 15 aa, Homo sapiens
  CDR3 for beta chain variable domain of TCR clone 36800 (TRBV5-4, TRBJ1-4)
CASSSFVTGNEKLFF

SEQ ID NO: 73601 - protein, 16 aa, Homo sapiens
  CDR3 for alpha chain variable domain of TCR clone 36801 (TRAV20, TRAJ22)
CAVQASSSGSAMQLTF

SEQ ID NO: 73602 - protein, 13 aa, Homo sapiens
  CDR3 for beta chain variable domain of TCR clone 36801 (TRBV7-2, TRBJ2-5)
CASSQTSVETQYF

SEQ ID NO: 73603 - protein, 15 aa, Homo sapiens
  CDR3 for alpha chain variable domain of TCR clone 36802 (TRAV12-3, TRAJ10)
CASYILTGGGNKLTF

SEQ ID NO: 73604 - protein, 15 aa, Homo sapiens
  CDR3 for beta chain variable domain of TCR clone 36802 (TRBV7-2, TRBJ1-6)
CASSLGPDRGMPLHS

SEQ ID NO: 73605 - protein, 12 aa, Homo sapiens
  CDR3 for alpha chain variable domain of TCR clone 36803 (TRAV12-3, TRAJ17)
CAMTLTGNKLTF

SEQ ID NO: 73606 - protein, 16 aa, Homo sapiens
  CDR3 for beta chain variable domain of TCR clone 36803 (TRBV2, TRBJ2-5)
CASSETQGVGEETQYF

SEQ ID NO: 73607 - protein, 15 aa, Homo sapiens
  CDR3 for alpha chain variable domain of TCR clone 36804 (TRAV1-2, TRAJ30)
CAVRPHGNRGDKIIF

SEQ ID NO: 73608 - protein, 13 aa, Homo sapiens
  CDR3 for beta chain variable domain of TCR clone 36804 (TRBV4-1, TRBJ2-7)
CASSQGQAYEQYF

SEQ ID NO: 73609 - protein, 13 aa, Homo sapiens
  CDR3 for alpha chain variable domain of TCR clone 36805 (TRAV27, TRAJ56)
CAGKPGANSKLTF

SEQ ID NO: 73610 - protein, 18 aa, Homo sapiens
  CDR3 for beta chain variable domain of TCR clone 36805 (TRBV11-2, TRBJ2-3)
CASSLGGAARGAPNTQYF

SEQ ID NO: 73611 - protein, 12 aa, Homo sapiens
  CDR3 for alpha chain variable domain of TCR clone 36806 (TRAV13-1, TRAJ21)
CAAKEGFNKFYF

SEQ ID NO: 73612 - protein, 14 aa, Homo sapiens
  CDR3 for beta chain variable domain of TCR clone 36806 (TRBV5-4, TRBJ1-1)
CASSLDCRRDEAFF

SEQ ID NO: 73613 - protein, 14 aa, Homo sapiens
  CDR3 for alpha chain variable domain of TCR clone 36807 (TRAV3, TRAJ6)
CAVRRTGGSYIPAF

SEQ ID NO: 73614 - protein, 13 aa, Homo sapiens
  CDR3 for beta chain variable domain of TCR clone 36807 (TRBV6-1, TRBJ1-3)
CASTLDSGNTIYF

SEQ ID NO: 73615 - protein, 15 aa, Homo sapiens
  CDR3 for alpha chain variable domain of TCR clone 36808 (TRAV35, TRAJ40)
CAGQLGTSGTDKYIF

SEQ ID NO: 73616 - protein, 14 aa, Homo sapiens
  CDR3 for beta chain variable domain of TCR clone 36808 (TRBV7-3, TRBJ2-1)
CASSLAGGTNEQFF

SEQ ID NO: 73617 - protein, 13 aa, Homo sapiens
  CDR3 for alpha chain variable domain of TCR clone 36809 (TRAV1-2, TRAJ12)
CAVSMDSSYKLIF

SEQ ID NO: 73618 - protein, 20 aa, Homo sapiens
  CDR3 for beta chain variable domain of TCR clone 36809 (TRBV27, TRBJ2-5)
CASSLIPSGGGDPVLRARHA

SEQ ID NO: 73619 - protein, 14 aa, Homo sapiens
  CDR3 for alpha chain variable domain of TCR clone 36810 (TRAV1-2, TRAJ16)
CAVNRFSDGQKLLF

SEQ ID NO: 73620 - protein, 16 aa, Homo sapiens
  CDR3 for beta chain variable domain of TCR clone 36810 (TRBV4-3, TRBJ2-2)
CASSHLQGSGTGELFF

SEQ ID NO: 73621 - protein, 14 aa, Homo sapiens
  CDR3 for alpha chain variable domain of TCR clone 36811 (TRAV26-1, TRAJ34)
CIVRVAYNTDKLIF

SEQ ID NO: 73622 - protein, 15 aa, Homo sapiens
  CDR3 for beta chain variable domain of TCR clone 36811 (TRBV20-1, TRBJ2-7)
CSARVPAAYFYEQYV

SEQ ID NO: 73623 - protein, 22 aa, Homo sapiens
  CDR3 for alpha chain variable domain of TCR clone 36812 (TRAV4, )
CLVGPHNYDIQNPDPAVYQLSD

SEQ ID NO: 73624 - protein, 17 aa, Homo sapiens
  CDR3 for beta chain variable domain of TCR clone 36812 (TRBV24-1, TRBJ2-1)
CATSDVSTSGTYNEQFF

SEQ ID NO: 73625 - protein, 13 aa, Homo sapiens
  CDR3 for alpha chain variable domain of TCR clone 36813 (TRAV12-1, TRAJ33)
CGDAPDSNYQLIW

SEQ ID NO: 73626 - protein, 16 aa, Homo sapiens
  CDR3 for beta chain variable domain of TCR clone 36813 (TRBV2, TRBJ2-1)
CASRSPAGGKYNEQFF

SEQ ID NO: 73627 - protein, 13 aa, Homo sapiens
  CDR3 for alpha chain variable domain of TCR clone 36814 (TRAV26-1, TRAJ36)
CIVAGTGANNLFF

SEQ ID NO: 73628 - protein, 13 aa, Homo sapiens
  CDR3 for beta chain variable domain of TCR clone 36814 (TRBV6-5, TRBJ2-6)
CASSTSGPLRLDF

SEQ ID NO: 73629 - protein, 16 aa, Homo sapiens
  CDR3 for alpha chain variable domain of TCR clone 36815 (TRAV30, TRAJ24)
CGTEIVDADSWGKFQF

SEQ ID NO: 73630 - protein, 16 aa, Homo sapiens
  CDR3 for beta chain variable domain of TCR clone 36815 (TRBV2, TRBJ2-3)
CASSTSVEGVTDTQYF

SEQ ID NO: 73631 - protein, 12 aa, Homo sapiens
  CDR3 for alpha chain variable domain of TCR clone 36816 (TRAV3, TRAJ17)
CAVRSCRQQANF

SEQ ID NO: 73632 - protein, 15 aa, Homo sapiens
  CDR3 for beta chain variable domain of TCR clone 36816 (TRBV2, TRBJ2-4)
CASSGTNLAENIQYF

SEQ ID NO: 73633 - protein, 12 aa, Homo sapiens
  CDR3 for alpha chain variable domain of TCR clone 36817 (TRAV30, TRAJ43)
CGTEERGNDMRF

SEQ ID NO: 73634 - protein, 13 aa, Homo sapiens
  CDR3 for beta chain variable domain of TCR clone 36817 (TRBV12-4, TRBJ1-2)
CASSSGSKDGYTL

SEQ ID NO: 73635 - protein, 15 aa, Homo sapiens
  CDR3 for alpha chain variable domain of TCR clone 36818 (TRAV3, TRAJ5)
CAVRDRKTGRRALTF

SEQ ID NO: 73636 - protein, 13 aa, Homo sapiens
  CDR3 for beta chain variable domain of TCR clone 36818 (TRBV7-3, TRBJ1-1)
CASSQDWGAEAFF

SEQ ID NO: 73637 - protein, 18 aa, Homo sapiens
  CDR3 for alpha chain variable domain of TCR clone 36819 (TRAV13-1, TRAJ52)
CAASKRSVGGTSYGKLTF

SEQ ID NO: 73638 - protein, 13 aa, Homo sapiens
  CDR3 for beta chain variable domain of TCR clone 36819 (TRBV12-4, TRBJ1-2)
CASSLRQGKGYTF

SEQ ID NO: 73639 - protein, 16 aa, Homo sapiens
  CDR3 for alpha chain variable domain of TCR clone 36820 (TRAV16, TRAJ4)
CALSRMFSGGYNKLIF

SEQ ID NO: 73640 - protein, 12 aa, Homo sapiens
  CDR3 for beta chain variable domain of TCR clone 36820 (TRBV24-1, TRBJ1-1)
CATLYPDTEAFF

SEQ ID NO: 73641 - protein, 14 aa, Homo sapiens
  CDR3 for alpha chain variable domain of TCR clone 36821 (TRAV12-1, TRAJ30)
CVVNIGGRDDKIIF

SEQ ID NO: 73642 - protein, 14 aa, Homo sapiens
  CDR3 for beta chain variable domain of TCR clone 36821 (TRBV7-6, TRBJ2-3)
CASSLGTVTNTQYF

SEQ ID NO: 73643 - protein, 14 aa, Homo sapiens
  CDR3 for alpha chain variable domain of TCR clone 36822 (TRAV17, TRAJ34)
CTTDSLEGTDKLIF

SEQ ID NO: 73644 - protein, 13 aa, Homo sapiens
  CDR3 for beta chain variable domain of TCR clone 36822 (TRBV11-2, TRBJ2-7)
CASSGTRPYEQYF

SEQ ID NO: 73645 - protein, 13 aa, Homo sapiens
  CDR3 for alpha chain variable domain of TCR clone 36823 (TRAV35, TRAJ48)
CAGHKFGNEKLTF

SEQ ID NO: 73646 - protein, 15 aa, Homo sapiens
  CDR3 for beta chain variable domain of TCR clone 36823 (TRBV27, TRBJ2-7)
CASSPQREGQREQYF

SEQ ID NO: 73647 - protein, 14 aa, Homo sapiens
  CDR3 for alpha chain variable domain of TCR clone 36824 (TRAV12-2, TRAJ40)
CAVKIPSGTYKYIF

SEQ ID NO: 73648 - protein, 15 aa, Homo sapiens
  CDR3 for beta chain variable domain of TCR clone 36824 (TRBV11-3, TRBJ2-3)
CASMKDGREGDTQYF

SEQ ID NO: 73649 - protein, 14 aa, Homo sapiens
  CDR3 for alpha chain variable domain of TCR clone 36825 (TRAV14/DV4, TRAJ15)
CAMRRDQAGTALIF

SEQ ID NO: 73650 - protein, 15 aa, Homo sapiens
  CDR3 for beta chain variable domain of TCR clone 36825 (TRBV6-3, TRBJ2-7)
CASSSPGTVFYEQYF

SEQ ID NO: 73651 - protein, 16 aa, Homo sapiens
  CDR3 for alpha chain variable domain of TCR clone 36826 (TRAV30, TRAJ24)
CGTEIVDADSWGKFQF

SEQ ID NO: 73652 - protein, 17 aa, Homo sapiens
  CDR3 for beta chain variable domain of TCR clone 36826 (TRBV7-8, TRBJ1-2)
CASSLRPLQGHLYGYTF

SEQ ID NO: 73653 - protein, 15 aa, Homo sapiens
  CDR3 for alpha chain variable domain of TCR clone 36827 (TRAV12-3, TRAJ6)
CAMSATTGGSYIPTF

SEQ ID NO: 73654 - protein, 16 aa, Homo sapiens
  CDR3 for beta chain variable domain of TCR clone 36827 (TRBV20-1, TRBJ1-2)
CSASVGQGVANYGYTF

SEQ ID NO: 73655 - protein, 18 aa, Homo sapiens
  CDR3 for alpha chain variable domain of TCR clone 36828 (TRAV12-3, TRAJ52)
CAMSRTNAGGTSYGKLTF

SEQ ID NO: 73656 - protein, 17 aa, Homo sapiens
  CDR3 for beta chain variable domain of TCR clone 36828 (TRBV7-3, TRBJ2-3)
CASSLMNRMRGADTQYF

SEQ ID NO: 73657 - protein, 14 aa, Homo sapiens
  CDR3 for alpha chain variable domain of TCR clone 36829 (TRAV12-1, TRAJ12)
CVVNGRDSSYKLIF

SEQ ID NO: 73658 - protein, 13 aa, Homo sapiens
  CDR3 for beta chain variable domain of TCR clone 36829 (TRBV28, TRBJ2-2)
CASIRESTGEQFF

SEQ ID NO: 73659 - protein, 14 aa, Homo sapiens
  CDR3 for alpha chain variable domain of TCR clone 36830 (TRAV2, TRAJ37)
CAVDFTSNTGKLIF

SEQ ID NO: 73660 - protein, 15 aa, Homo sapiens
  CDR3 for beta chain variable domain of TCR clone 36830 (TRBV20-1, TRBJ1-1)
CSAGRGVTGYTEAFF

SEQ ID NO: 73661 - protein, 12 aa, Homo sapiens
  CDR3 for alpha chain variable domain of TCR clone 36831 (TRAV12-3, TRAJ20)
CAMVRGDYKLSF

SEQ ID NO: 73662 - protein, 13 aa, Homo sapiens
  CDR3 for beta chain variable domain of TCR clone 36831 (TRBV7-2, TRBJ2-7)
CASSSPSGSEQYF

SEQ ID NO: 73663 - protein, 12 aa, Homo sapiens
  CDR3 for alpha chain variable domain of TCR clone 36832 (TRAV13-2, TRAJ39)
CAENNAGNMLTL

SEQ ID NO: 73664 - protein, 12 aa, Homo sapiens
  CDR3 for beta chain variable domain of TCR clone 36832 (TRBV11-2, TRBJ2-2)
CASSLGGGELFF

SEQ ID NO: 73665 - protein, 11 aa, Homo sapiens
  CDR3 for alpha chain variable domain of TCR clone 36833 (TRAV17, TRAJ31)
CATSNNARLMF

SEQ ID NO: 73666 - protein, 14 aa, Homo sapiens
  CDR3 for beta chain variable domain of TCR clone 36833 (TRBV18, TRBJ2-7)
RASSPRGGAYEQYF

SEQ ID NO: 73667 - protein, 14 aa, Homo sapiens
  CDR3 for alpha chain variable domain of TCR clone 36834 (TRAV12-2, TRAJ13)
CAVKKTEGYQKVTF

SEQ ID NO: 73668 - protein, 15 aa, Homo sapiens
  CDR3 for beta chain variable domain of TCR clone 36834 (TRBV9, TRBJ1-6)
CASSVAGTGDSPLHF

SEQ ID NO: 73669 - protein, 16 aa, Homo sapiens
  CDR3 for alpha chain variable domain of TCR clone 36835 (TRAV1-2, TRAJ10)
CTVRGVLTGGGNKLTF

SEQ ID NO: 73670 - protein, 12 aa, Homo sapiens
  CDR3 for beta chain variable domain of TCR clone 36835 (TRBV7-8, TRBJ2-7)
CASSLGDREQYF

SEQ ID NO: 73671 - protein, 14 aa, Homo sapiens
  CDR3 for alpha chain variable domain of TCR clone 36836 (TRAV29/DV5, TRAJ45)
CAASFRGGADVLTF

SEQ ID NO: 73672 - protein, 11 aa, Homo sapiens
  CDR3 for beta chain variable domain of TCR clone 36836 (TRBV11-2, TRBJ2-2)
CASSLPGELFF

SEQ ID NO: 73673 - protein, 14 aa, Homo sapiens
  CDR3 for alpha chain variable domain of TCR clone 36837 (TRAV4, TRAJ17)
CLLGDMAAGNKLTF

SEQ ID NO: 73674 - protein, 14 aa, Homo sapiens
  CDR3 for beta chain variable domain of TCR clone 36837 (TRBV7-6, TRBJ2-3)
CASSLGTVTDTQYF

SEQ ID NO: 73675 - protein, 10 aa, Homo sapiens
  CDR3 for alpha chain variable domain of TCR clone 36838 (TRAV23/DV6, TRAJ57)
CAASSTLSQD

SEQ ID NO: 73676 - protein, 14 aa, Homo sapiens
  CDR3 for beta chain variable domain of TCR clone 36838 (TRBV25-1, TRBJ1-1)
CASTHLGGNTEAFF

SEQ ID NO: 73677 - protein, 17 aa, Homo sapiens
  CDR3 for alpha chain variable domain of TCR clone 36839 (TRAV29/DV5, TRAJ21)
CAASNKFYFGSGTKLNV

SEQ ID NO: 73678 - protein, 15 aa, Homo sapiens
  CDR3 for beta chain variable domain of TCR clone 36839 (TRBV6-3, TRBJ2-7)
CASSSPGTVFYEQYF

SEQ ID NO: 73679 - protein, 14 aa, Homo sapiens
  CDR3 for alpha chain variable domain of TCR clone 36840 (TRAV26-1, TRAJ45)
CIEVSGGGADGLTF

SEQ ID NO: 73680 - protein, 13 aa, Homo sapiens
  CDR3 for beta chain variable domain of TCR clone 36840 (TRBV7-6, TRBJ1-2)
CASSLVADYGYTF

SEQ ID NO: 73681 - protein, 16 aa, Homo sapiens
  CDR3 for alpha chain variable domain of TCR clone 36841 (TRAV26-2, TRAJ48)
CILRPPFNFGDEKLTF

SEQ ID NO: 73682 - protein, 15 aa, Homo sapiens
  CDR3 for beta chain variable domain of TCR clone 36841 (TRBV20-1, TRBJ2-3)
CSARVEGTYTDTQYF

SEQ ID NO: 73683 - protein, 17 aa, Homo sapiens
  CDR3 for alpha chain variable domain of TCR clone 36842 (TRAV3, TRAJ12)
CAVRDGGRMDSSYKLIF

SEQ ID NO: 73684 - protein, 11 aa, Homo sapiens
  CDR3 for beta chain variable domain of TCR clone 36842 (TRBV6-3, TRBJ2-3)
CATGQADTQYF

SEQ ID NO: 73685 - protein, 14 aa, Homo sapiens
  CDR3 for alpha chain variable domain of TCR clone 36843 (TRAV34, TRAJ44)
CGADGTGTASKLTF

SEQ ID NO: 73686 - protein, 12 aa, Homo sapiens
  CDR3 for beta chain variable domain of TCR clone 36843 (TRBV6-3, TRBJ2-7)
CASSRQEYEQYF

SEQ ID NO: 73687 - protein, 10 aa, Homo sapiens
  CDR3 for alpha chain variable domain of TCR clone 36844 (TRAV12-3, TRAJ18)
CAMSAGAQPW

SEQ ID NO: 73688 - protein, 13 aa, Homo sapiens
  CDR3 for beta chain variable domain of TCR clone 36844 (TRBV15, TRBJ1-6)
CATSGGLNSPLHF

SEQ ID NO: 73689 - protein, 14 aa, Homo sapiens
  CDR3 for alpha chain variable domain of TCR clone 36845 (TRAV35, TRAJ33)
CAGSSQDSNYQLIW

SEQ ID NO: 73690 - protein, 15 aa, Homo sapiens
  CDR3 for beta chain variable domain of TCR clone 36845 (TRBV20-1, TRBJ2-7)
FSAESGTSGAYEQYF

SEQ ID NO: 73691 - protein, 14 aa, Homo sapiens
  CDR3 for alpha chain variable domain of TCR clone 36846 (TRAV12-2, TRAJ13)
CAVKKTGGYQKVTF

SEQ ID NO: 73692 - protein, 15 aa, Homo sapiens
  CDR3 for beta chain variable domain of TCR clone 36846 (TRBV27, TRBJ2-2)
CTSVPANSSPGSCFF

SEQ ID NO: 73693 - protein, 12 aa, Homo sapiens
  CDR3 for alpha chain variable domain of TCR clone 36847 (TRAV13-1, TRAJ21)
CAAKEGFNKFYF

SEQ ID NO: 73694 - protein, 14 aa, Homo sapiens
  CDR3 for beta chain variable domain of TCR clone 36847 (TRBV20-1, TRBJ2-7)
CSAKTGTGGYEQYF

SEQ ID NO: 73695 - protein, 12 aa, Homo sapiens
  CDR3 for alpha chain variable domain of TCR clone 36848 (TRAV16, TRAJ56)
CAPTGANSKLTF

SEQ ID NO: 73696 - protein, 16 aa, Homo sapiens
  CDR3 for beta chain variable domain of TCR clone 36848 (TRBV27, TRBJ1-6)
CASSFSRSSYNSPLHF

SEQ ID NO: 73697 - protein, 19 aa, Homo sapiens
  CDR3 for alpha chain variable domain of TCR clone 36849 (TRAV2, TRAJ20)
ILQVREADAAVYRGCKLSF

SEQ ID NO: 73698 - protein, 13 aa, Homo sapiens
  CDR3 for beta chain variable domain of TCR clone 36849 (TRBV15, TRBJ1-6)
CATSGGLNSPLHF

SEQ ID NO: 73699 - protein, 20 aa, Homo sapiens
  CDR3 for alpha chain variable domain of TCR clone 36850 (TRAV26-1, TRAJ42)
CCVLLHRQTYYGGSQGNLIF

SEQ ID NO: 73700 - protein, 13 aa, Homo sapiens
  CDR3 for beta chain variable domain of TCR clone 36850 (TRBV7-9, TRBJ1-2)
CASSLKQNYGYTF

SEQ ID NO: 73701 - protein, 17 aa, Homo sapiens
  CDR3 for alpha chain variable domain of TCR clone 36851 (TRAV13-1, TRAJ28)
CAASPPYSGAGSYQLTF

SEQ ID NO: 73702 - protein, 16 aa, Homo sapiens
  CDR3 for beta chain variable domain of TCR clone 36851 (TRBV12-5, TRBJ2-5)
CASGPRTSGNQETQYF

SEQ ID NO: 73703 - protein, 13 aa, Homo sapiens
  CDR3 for alpha chain variable domain of TCR clone 36852 (TRAV12-3, TRAJ9)
CAMRNTGGFKTIL

SEQ ID NO: 73704 - protein, 14 aa, Homo sapiens
  CDR3 for beta chain variable domain of TCR clone 36852 (TRBV11-2, TRBJ2-7)
CASSSTGEGYEQYF

SEQ ID NO: 73705 - protein, 17 aa, Homo sapiens
  CDR3 for alpha chain variable domain of TCR clone 36853 (TRAV3, TRAJ38)
CAVRDCLNAGNNRKLIW

SEQ ID NO: 73706 - protein, 14 aa, Homo sapiens
  CDR3 for beta chain variable domain of TCR clone 36853 (TRBV5-5, TRBJ1-5)
CASSGQGVDQAQHF

SEQ ID NO: 73707 - protein, 12 aa, Homo sapiens
  CDR3 for alpha chain variable domain of TCR clone 36854 (TRAV35, TRAJ39)
LDPNNAGNMLTF

SEQ ID NO: 73708 - protein, 16 aa, Homo sapiens
  CDR3 for beta chain variable domain of TCR clone 36854 (TRBV2, TRBJ2-3)
CASSTSVEGVTDTQYF

SEQ ID NO: 73709 - protein, 12 aa, Homo sapiens
  CDR3 for alpha chain variable domain of TCR clone 36855 (TRAV13-2, TRAJ23)
CAERHRGGKLSF

SEQ ID NO: 73710 - protein, 16 aa, Homo sapiens
  CDR3 for beta chain variable domain of TCR clone 36855 (TRBV20-1, TRBJ1-4)
CSAPGQGLLTNEKLFF

SEQ ID NO: 73711 - protein, 13 aa, Homo sapiens
  CDR3 for alpha chain variable domain of TCR clone 36856 (TRAV13-2, TRAJ48)
CAEMDFGNEKLTF

SEQ ID NO: 73712 - protein, 15 aa, Homo sapiens
  CDR3 for beta chain variable domain of TCR clone 36856 (TRBV7-9, TRBJ1-6)
CASSSPGRGNSPLNF

SEQ ID NO: 73713 - protein, 13 aa, Homo sapiens
  CDR3 for alpha chain variable domain of TCR clone 36857 (TRAV12-2, TRAJ12)
CAVNWDSSYKLIF

SEQ ID NO: 73714 - protein, 18 aa, Homo sapiens
  CDR3 for beta chain variable domain of TCR clone 36857 (TRBV11-2, TRBJ2-3)
CASSLGGASRGAPNTQYF

SEQ ID NO: 73715 - protein, 13 aa, Homo sapiens
  CDR3 for alpha chain variable domain of TCR clone 36858 (TRAV23/DV6, TRAJ30)
CAAPSNRDDKIIF

SEQ ID NO: 73716 - protein, 13 aa, Homo sapiens
  CDR3 for beta chain variable domain of TCR clone 36858 (TRBV7-3, TRBJ1-1)
CASSQDWGAEAFF

SEQ ID NO: 73717 - protein, 14 aa, Homo sapiens
  CDR3 for alpha chain variable domain of TCR clone 36859 (TRAV12-2, TRAJ17)
CAVNIKAAGNKLTF

SEQ ID NO: 73718 - protein, 13 aa, Homo sapiens
  CDR3 for beta chain variable domain of TCR clone 36859 (TRBV4-1, TRBJ2-2)
CASSQENTGELFL

SEQ ID NO: 73719 - protein, 14 aa, Homo sapiens
  CDR3 for alpha chain variable domain of TCR clone 36860 (TRAV12-2, TRAJ32)
CAHPESGSTNKLIF

SEQ ID NO: 73720 - protein, 14 aa, Homo sapiens
  CDR3 for beta chain variable domain of TCR clone 36860 (TRBV4-2, TRBJ2-3)
CASRETRAPGMQYF

SEQ ID NO: 73721 - protein, 15 aa, Homo sapiens
  CDR3 for alpha chain variable domain of TCR clone 36861 (TRAV21, TRAJ37)
CAVRPTLSNTGKLIF

SEQ ID NO: 73722 - protein, 16 aa, Homo sapiens
  CDR3 for beta chain variable domain of TCR clone 36861 (TRBV24-1, TRBJ2-3)
RATSDRRQDLTDTQYF

SEQ ID NO: 73723 - protein, 13 aa, Homo sapiens
  CDR3 for alpha chain variable domain of TCR clone 36862 (TRAV2, TRAJ29)
CAAGNSGNTPLVF

SEQ ID NO: 73724 - protein, 14 aa, Homo sapiens
  CDR3 for beta chain variable domain of TCR clone 36862 (TRBV7-2, TRBJ2-7)
CASSPKTSFYEQYF

SEQ ID NO: 73725 - protein, 17 aa, Homo sapiens
  CDR3 for alpha chain variable domain of TCR clone 36863 (TRAV12-2, TRAJ6)
CAPQGPPRAGGSYIPTF

SEQ ID NO: 73726 - protein, 16 aa, Homo sapiens
  CDR3 for beta chain variable domain of TCR clone 36863 (TRBV19, TRBJ2-2)
CVSSTARASNTGELFF

SEQ ID NO: 73727 - protein, 16 aa, Homo sapiens
  CDR3 for alpha chain variable domain of TCR clone 36864 (TRAV30, TRAJ24)
CGTGIVDADSWGKFQF

SEQ ID NO: 73728 - protein, 18 aa, Homo sapiens
  CDR3 for beta chain variable domain of TCR clone 36864 (TRBV11-2, TRBJ2-6)
CASSLNPFLGTGANVLTF

SEQ ID NO: 73729 - protein, 13 aa, Homo sapiens
  CDR3 for alpha chain variable domain of TCR clone 36865 (TRAV39, TRAJ58)
CAGEEASGSRLTF

SEQ ID NO: 73730 - protein, 13 aa, Homo sapiens
  CDR3 for beta chain variable domain of TCR clone 36865 (TRBV15, TRBJ2-7)
CATSTTGHYEQYF

SEQ ID NO: 73731 - protein, 15 aa, Homo sapiens
  CDR3 for alpha chain variable domain of TCR clone 36866 (TRAV3, TRAJ22)
CAVRDRGGSARQLTF

SEQ ID NO: 73732 - protein, 12 aa, Homo sapiens
  CDR3 for beta chain variable domain of TCR clone 36866 (TRBV11-2, TRBJ2-2)
CASSLPTGELFF

SEQ ID NO: 73733 - protein, 11 aa, Homo sapiens
  CDR3 for alpha chain variable domain of TCR clone 36867 (TRAV21, TRAJ23)
CAPQRRGKLIF

SEQ ID NO: 73734 - protein, 14 aa, Homo sapiens
  CDR3 for beta chain variable domain of TCR clone 36867 (TRBV12-4, TRBJ1-1)
CASAWTGHDTEAFF

SEQ ID NO: 73735 - protein, 11 aa, Homo sapiens
  CDR3 for alpha chain variable domain of TCR clone 36868 (TRAV3, TRAJ21)
CAVGYFNKFYF

SEQ ID NO: 73736 - protein, 16 aa, Homo sapiens
  CDR3 for beta chain variable domain of TCR clone 36868 (TRBV19, TRBJ2-1)
CASSKAGPSSYNEQFF

SEQ ID NO: 73737 - protein, 13 aa, Homo sapiens
  CDR3 for alpha chain variable domain of TCR clone 36869 (TRAV13-1, TRAJ21)
CVASIYNFNKFYF

SEQ ID NO: 73738 - protein, 13 aa, Homo sapiens
  CDR3 for beta chain variable domain of TCR clone 36869 (TRBV27, TRBJ1-4)
CASSLMGDEKLFF

SEQ ID NO: 73739 - protein, 15 aa, Homo sapiens
  CDR3 for alpha chain variable domain of TCR clone 36870 (TRAV21, TRAJ56)
CVVTKYTGANSKLTF

SEQ ID NO: 73740 - protein, 14 aa, Homo sapiens
  CDR3 for beta chain variable domain of TCR clone 36870 (TRBV20-1, TRBJ2-3)
CSARVRGSTDTQYF

SEQ ID NO: 73741 - protein, 16 aa, Homo sapiens
  CDR3 for alpha chain variable domain of TCR clone 36871 (TRAV16, TRAJ52)
CALSAAGGTSYGKLTF

SEQ ID NO: 73742 - protein, 14 aa, Homo sapiens
  CDR3 for beta chain variable domain of TCR clone 36871 (TRBV25-1, TRBJ1-1)
CASTHLGGNTEAFF

SEQ ID NO: 73743 - protein, 10 aa, Homo sapiens
  CDR3 for alpha chain variable domain of TCR clone 36872 (TRAV12-1, TRAJ37)
ARGNTGKLVF

SEQ ID NO: 73744 - protein, 15 aa, Homo sapiens
  CDR3 for beta chain variable domain of TCR clone 36872 (TRBV7-2, TRBJ2-3)
CASSLEQGGTDTQYF

SEQ ID NO: 73745 - protein, 16 aa, Homo sapiens
  CDR3 for alpha chain variable domain of TCR clone 36873 (TRAV16, TRAJ4)
CALSRMFSGGYNKLIF

SEQ ID NO: 73746 - protein, 16 aa, Homo sapiens
  CDR3 for beta chain variable domain of TCR clone 36873 (TRBV24-1, TRBJ2-3)
CATSDPWTGATDTQYF

SEQ ID NO: 73747 - protein, 11 aa, Homo sapiens
  CDR3 for alpha chain variable domain of TCR clone 36874 (TRAV12-2, TRAJ31)
CAILNDARLMF

SEQ ID NO: 73748 - protein, 13 aa, Homo sapiens
  CDR3 for beta chain variable domain of TCR clone 36874 (TRBV20-1, TRBJ1-1)
CSARLGQGTEAFF

SEQ ID NO: 73749 - protein, 14 aa, Homo sapiens
  CDR3 for alpha chain variable domain of TCR clone 36875 (TRAV13-1, TRAJ44)
CAAKATGTASKLTF

SEQ ID NO: 73750 - protein, 15 aa, Homo sapiens
  CDR3 for beta chain variable domain of TCR clone 36875 (TRBV19, TRBJ2-1)
CASIRGRGPYNEQFF

SEQ ID NO: 73751 - protein, 14 aa, Homo sapiens
  CDR3 for alpha chain variable domain of TCR clone 36876 (TRAV35, TRAJ33)
CAGSSQDSNYQLIC

SEQ ID NO: 73752 - protein, 15 aa, Homo sapiens
  CDR3 for beta chain variable domain of TCR clone 36876 (TRBV5-1, TRBJ1-4)
FAPAAWKDGNEKLFF

SEQ ID NO: 73753 - protein, 15 aa, Homo sapiens
  CDR3 for alpha chain variable domain of TCR clone 36877 (TRAV8-3, TRAJ11)
CAVGLLNSGYSTLTF

SEQ ID NO: 73754 - protein, 14 aa, Homo sapiens
  CDR3 for beta chain variable domain of TCR clone 36877 (TRBV12-5, TRBJ2-5)
CASGSRTHQETQYF

SEQ ID NO: 73755 - protein, 13 aa, Homo sapiens
  CDR3 for alpha chain variable domain of TCR clone 36878 (TRAV20, TRAJ45)
CAVKKRRCRRTHL

SEQ ID NO: 73756 - protein, 14 aa, Homo sapiens
  CDR3 for beta chain variable domain of TCR clone 36878 (TRBV15, TRBJ2-5)
CATSIRGLGETQYF

SEQ ID NO: 73757 - protein, 14 aa, Homo sapiens
  CDR3 for alpha chain variable domain of TCR clone 36879 (TRAV12-2, TRAJ5)
CAVNRSTGRRALTF

SEQ ID NO: 73758 - protein, 14 aa, Homo sapiens
  CDR3 for beta chain variable domain of TCR clone 36879 (TRBV19, TRBJ2-5)
CASSMTGQQETQYF

SEQ ID NO: 73759 - protein, 20 aa, Homo sapiens
  CDR3 for alpha chain variable domain of TCR clone 36880 (TRAV1-1, TRAJ4)
CLLLLRCEGFLSGGYNKLIF

SEQ ID NO: 73760 - protein, 16 aa, Homo sapiens
  CDR3 for beta chain variable domain of TCR clone 36880 (TRBV28, TRBJ1-4)
CASSPPYGGRSEKLFF

SEQ ID NO: 73761 - protein, 17 aa, Homo sapiens
  CDR3 for alpha chain variable domain of TCR clone 36881 (TRAV3, TRAJ6)
CAVRDGPRAGGSDIPTF

SEQ ID NO: 73762 - protein, 15 aa, Homo sapiens
  CDR3 for beta chain variable domain of TCR clone 36881 (TRBV20-1, TRBJ1-1)
CSASWDRFLNTEAFF

SEQ ID NO: 73763 - protein, 11 aa, Homo sapiens
  CDR3 for alpha chain variable domain of TCR clone 36882 (TRAV2, TRAJ33)
CAVESNYQLIW

SEQ ID NO: 73764 - protein, 13 aa, Homo sapiens
  CDR3 for beta chain variable domain of TCR clone 36882 (TRBV20-1, TRBJ2-2)
CSASAAGTGELFF

SEQ ID NO: 73765 - protein, 15 aa, Homo sapiens
  CDR3 for alpha chain variable domain of TCR clone 36883 (TRAV21, TRAJ45)
CAVSYSGGGADGLTF

SEQ ID NO: 73766 - protein, 13 aa, Homo sapiens
  CDR3 for beta chain variable domain of TCR clone 36883 (TRBV20-1, TRBJ2-5)
CSAATERQETQYF

SEQ ID NO: 73767 - protein, 13 aa, Homo sapiens
  CDR3 for alpha chain variable domain of TCR clone 36884 (TRAV12-2, TRAJ39)
CAVNNNAGNMLTF

SEQ ID NO: 73768 - protein, 14 aa, Homo sapiens
  CDR3 for beta chain variable domain of TCR clone 36884 (TRBV19, TRBJ2-1)
CASSRLASINEQFF

SEQ ID NO: 73769 - protein, 13 aa, Homo sapiens
  CDR3 for alpha chain variable domain of TCR clone 36885 (TRAV12-1, TRAJ26)
CVVRRNYGQNFVF

SEQ ID NO: 73770 - protein, 15 aa, Homo sapiens
  CDR3 for beta chain variable domain of TCR clone 36885 (TRBV19, TRBJ1-1)
CASTSGQIQNTEAFF

SEQ ID NO: 73771 - protein, 14 aa, Homo sapiens
  CDR3 for alpha chain variable domain of TCR clone 36886 (TRAV8-3, TRAJ6)
CAVSSSGGSYIPTF

SEQ ID NO: 73772 - protein, 13 aa, Homo sapiens
  CDR3 for beta chain variable domain of TCR clone 36886 (TRBV7-9, TRBJ1-2)
CASSLKQNYGYTF

SEQ ID NO: 73773 - protein, 16 aa, Homo sapiens
  CDR3 for alpha chain variable domain of TCR clone 36887 (TRAV8-3, TRAJ13)
CSVGAYPSGGYQKVTF

SEQ ID NO: 73774 - protein, 15 aa, Homo sapiens
  CDR3 for beta chain variable domain of TCR clone 36887 (TRBV19, TRBJ1-5)
CASSIVWADNQPQHF

SEQ ID NO: 73775 - protein, 12 aa, Homo sapiens
  CDR3 for alpha chain variable domain of TCR clone 36888 (TRAV12-2, TRAJ29)
CAMTLGNTPLVF

SEQ ID NO: 73776 - protein, 14 aa, Homo sapiens
  CDR3 for beta chain variable domain of TCR clone 36888 (TRBV7-8, TRBJ2-1)
CATERERSYNEQFF

SEQ ID NO: 73777 - protein, 15 aa, Homo sapiens
  CDR3 for alpha chain variable domain of TCR clone 36889 (TRAV17, TRAJ28)
CATDPSGAGSYQLTF

SEQ ID NO: 73778 - protein, 13 aa, Homo sapiens
  CDR3 for beta chain variable domain of TCR clone 36889 (TRBV12-4, TRBJ1-2)
CASSLRQGKGYTF

SEQ ID NO: 73779 - protein, 13 aa, Homo sapiens
  CDR3 for alpha chain variable domain of TCR clone 36890 (TRAV8-3, TRAJ6)
CAARRGGSYVPTF

SEQ ID NO: 73780 - protein, 15 aa, Homo sapiens
  CDR3 for beta chain variable domain of TCR clone 36890 (TRBV4-1, TRBJ2-3)
CASSNLAGGRDTQYF

SEQ ID NO: 73781 - protein, 16 aa, Homo sapiens
  CDR3 for alpha chain variable domain of TCR clone 36891 (TRAV12-3, TRAJ10)
CAMKKGITGGGNKLTL

SEQ ID NO: 73782 - protein, 12 aa, Homo sapiens
  CDR3 for beta chain variable domain of TCR clone 36891 (TRBV20-1, TRBJ2-7)
CSAITPTKEQYF

SEQ ID NO: 73783 - protein, 12 aa, Homo sapiens
  CDR3 for alpha chain variable domain of TCR clone 36892 (TRAV8-3, TRAJ26)
CAGDNYGQNFVF

SEQ ID NO: 73784 - protein, 15 aa, Homo sapiens
  CDR3 for beta chain variable domain of TCR clone 36892 (TRBV9, TRBJ2-1)
CASSLAGSSYNGQFF

SEQ ID NO: 73785 - protein, 13 aa, Homo sapiens
  CDR3 for alpha chain variable domain of TCR clone 36893 (TRAV27, TRAJ45)
CRSSGGDADGLTF

SEQ ID NO: 73786 - protein, 17 aa, Homo sapiens
  CDR3 for beta chain variable domain of TCR clone 36893 (TRBV11-2, TRBJ2-1)
CASSLYPPGVEYNEQFF

SEQ ID NO: 73787 - protein, 18 aa, Homo sapiens
  CDR3 for alpha chain variable domain of TCR clone 36894 (TRAV12-3, TRAJ52)
CAMSRTNAGGTSYVKLTF

SEQ ID NO: 73788 - protein, 17 aa, Homo sapiens
  CDR3 for beta chain variable domain of TCR clone 36894 (TRBV7-3, TRBJ2-3)
CASSLMKRMRGADTQYF

SEQ ID NO: 73789 - protein, 13 aa, Homo sapiens
  CDR3 for alpha chain variable domain of TCR clone 36895 (TRAV21, TRAJ20)
CAVGLRVDYELSF

SEQ ID NO: 73790 - protein, 11 aa, Homo sapiens
  CDR3 for beta chain variable domain of TCR clone 36895 (TRBV29-1, TRBJ2-5)
CSEDRTGTQYF

SEQ ID NO: 73791 - protein, 14 aa, Homo sapiens
  CDR3 for alpha chain variable domain of TCR clone 36896 (TRAV12-2, TRAJ45)
CAVNKGGGADGLTF

SEQ ID NO: 73792 - protein, 15 aa, Homo sapiens
  CDR3 for beta chain variable domain of TCR clone 36896 (TRBV9, TRBJ1-6)
CASSAAGTGDSPLHF

SEQ ID NO: 73793 - protein, 13 aa, Homo sapiens
  CDR3 for alpha chain variable domain of TCR clone 36897 (TRAV17, TRAJ4)
CATKSGGYNKLIF

SEQ ID NO: 73794 - protein, 14 aa, Homo sapiens
  CDR3 for beta chain variable domain of TCR clone 36897 (TRBV20-1, TRBJ1-5)
CSARDDRGNQHQHF

SEQ ID NO: 73795 - protein, 16 aa, Homo sapiens
  CDR3 for alpha chain variable domain of TCR clone 36898 (TRAV14/DV4, TRAJ54)
CAMREGRIQGAQKLVF

SEQ ID NO: 73796 - protein, 17 aa, Homo sapiens
  CDR3 for beta chain variable domain of TCR clone 36898 (TRBV7-8, TRBJ2-6)
CASSAGTGGAGANVLTF

SEQ ID NO: 73797 - protein, 14 aa, Homo sapiens
  CDR3 for alpha chain variable domain of TCR clone 36899 (TRAV38-1, TRAJ45)
CASHSGGGADGLTF

SEQ ID NO: 73798 - protein, 16 aa, Homo sapiens
  CDR3 for beta chain variable domain of TCR clone 36899 (TRBV7-3, TRBJ2-2)
CASSLKRGTLSGELFF

SEQ ID NO: 73799 - protein, 14 aa, Homo sapiens
  CDR3 for alpha chain variable domain of TCR clone 36900 (TRAV17, TRAJ32)
CATDPGGATNKPIF

SEQ ID NO: 73800 - protein, 14 aa, Homo sapiens
  CDR3 for beta chain variable domain of TCR clone 36900 (TRBV2, TRBJ1-5)
CASSENRGGQPQHF

SEQ ID NO: 73801 - protein, 14 aa, Homo sapiens
  CDR3 for alpha chain variable domain of TCR clone 36901 (TRAV12-2, TRAJ40)
CAVKIPSGTYKYIF

SEQ ID NO: 73802 - protein, 15 aa, Homo sapiens
  CDR3 for beta chain variable domain of TCR clone 36901 (TRBV19, TRBJ1-1)
CASTSGQIQNTEAFF

SEQ ID NO: 73803 - protein, 15 aa, Homo sapiens
  CDR3 for alpha chain variable domain of TCR clone 36902 (TRAV12-2, TRAJ53)
CAGNGGGGSNYKLTF

SEQ ID NO: 73804 - protein, 13 aa, Homo sapiens
  CDR3 for beta chain variable domain of TCR clone 36902 (TRBV3-1, TRBJ1-1)
CASSPGVITEAFF

SEQ ID NO: 73805 - protein, 13 aa, Homo sapiens
  CDR3 for alpha chain variable domain of TCR clone 36903 (TRAV2, TRAJ40)
CAVVTSGTYKYIF

SEQ ID NO: 73806 - protein, 16 aa, Homo sapiens
  CDR3 for beta chain variable domain of TCR clone 36903 (TRBV2, TRBJ2-3)
CASSTSVEGVTDTQYF

SEQ ID NO: 73807 - protein, 18 aa, Homo sapiens
  CDR3 for alpha chain variable domain of TCR clone 36904 (TRAV8-4, TRAJ52)
CVVTRANAGGTSYGKLTF

SEQ ID NO: 73808 - protein, 20 aa, Homo sapiens
  CDR3 for beta chain variable domain of TCR clone 36904 (TRBV19, TRBJ2-1)
CASSISRTVTSTRLNNEQFF

SEQ ID NO: 73809 - protein, 14 aa, Homo sapiens
  CDR3 for alpha chain variable domain of TCR clone 36905 (TRAV13-1, TRAJ6)
CAASITGGSYIPTF

SEQ ID NO: 73810 - protein, 14 aa, Homo sapiens
  CDR3 for beta chain variable domain of TCR clone 36905 (TRBV6-3, TRBJ2-1)
CASLHSAYYNEQFF

SEQ ID NO: 73811 - protein, 15 aa, Homo sapiens
  CDR3 for alpha chain variable domain of TCR clone 36906 (TRAV35, TRAJ40)
CTGQLGTSGTYKYIF

SEQ ID NO: 73812 - protein, 14 aa, Homo sapiens
  CDR3 for beta chain variable domain of TCR clone 36906 (TRBV7-3, TRBJ2-1)
CASSLAGGTNEQFF

SEQ ID NO: 73813 - protein, 10 aa, Homo sapiens
  CDR3 for alpha chain variable domain of TCR clone 36907 (TRAV1-2, TRAJ43)
CAVSADDMRF

SEQ ID NO: 73814 - protein, 15 aa, Homo sapiens
  CDR3 for beta chain variable domain of TCR clone 36907 (TRBV5-1, TRBJ2-3)
CASSVTSGSTDTQYF

SEQ ID NO: 73815 - protein, 18 aa, Homo sapiens
  CDR3 for alpha chain variable domain of TCR clone 36908 (TRAV21, TRAJ52)
CAVGPSPAGGTSYGKLTF

SEQ ID NO: 73816 - protein, 14 aa, Homo sapiens
  CDR3 for beta chain variable domain of TCR clone 36908 (TRBV7-2, TRBJ2-1)
CASSLEGGYNEQFF

SEQ ID NO: 73817 - protein, 14 aa, Homo sapiens
  CDR3 for alpha chain variable domain of TCR clone 36909 (TRAV26-1, TRAJ38)
CIADNAGNNRKLIW

SEQ ID NO: 73818 - protein, 13 aa, Homo sapiens
  CDR3 for beta chain variable domain of TCR clone 36909 (TRBV20-1, TRBJ1-1)
FSARGGGNTEAFF

SEQ ID NO: 73819 - protein, 16 aa, Homo sapiens
  CDR3 for alpha chain variable domain of TCR clone 36910 (TRAV5, TRAJ23)
CAGDRLIFGQGTELSV

SEQ ID NO: 73820 - protein, 15 aa, Homo sapiens
  CDR3 for beta chain variable domain of TCR clone 36910 (TRBV6-6, TRBJ2-7)
CASSYSYGGSYEQYF

SEQ ID NO: 73821 - protein, 14 aa, Homo sapiens
  CDR3 for alpha chain variable domain of TCR clone 36911 (TRAV26-1, TRAJ45)
CIEATGGGADGLTF

SEQ ID NO: 73822 - protein, 13 aa, Homo sapiens
  CDR3 for beta chain variable domain of TCR clone 36911 (TRBV7-6, TRBJ1-2)
CASSLVADYGYTF

SEQ ID NO: 73823 - protein, 12 aa, Homo sapiens
  CDR3 for alpha chain variable domain of TCR clone 36912 (TRAV20, TRAJ33)
CAVRGSNYQLIW

SEQ ID NO: 73824 - protein, 14 aa, Homo sapiens
  CDR3 for beta chain variable domain of TCR clone 36912 (TRBV19, TRBJ2-1)
CASKDPGLANEQFF

SEQ ID NO: 73825 - protein, 14 aa, Homo sapiens
  CDR3 for alpha chain variable domain of TCR clone 36913 (TRAV23/DV6, TRAJ4)
CGANLSGGYNKLIF

SEQ ID NO: 73826 - protein, 17 aa, Homo sapiens
  CDR3 for beta chain variable domain of TCR clone 36913 (TRBV4-1, TRBJ1-3)
CASSPQRGIRFGNTIYF

SEQ ID NO: 73827 - protein, 12 aa, Homo sapiens
  CDR3 for alpha chain variable domain of TCR clone 36914 (TRAV13-1, TRAJ17)
CAARTAGNKLTF

SEQ ID NO: 73828 - protein, 15 aa, Homo sapiens
  CDR3 for beta chain variable domain of TCR clone 36914 (TRBV7-6, TRBJ1-1)
CASGPQGGANTEAFF

SEQ ID NO: 73829 - protein, 14 aa, Homo sapiens
  CDR3 for alpha chain variable domain of TCR clone 36915 (TRAV12-3, TRAJ54)
CAMRIIQGAQKLVF

SEQ ID NO: 73830 - protein, 16 aa, Homo sapiens
  CDR3 for beta chain variable domain of TCR clone 36915 (TRBV28, TRBJ2-1)
CASRAPASGRIGEQFS

SEQ ID NO: 73831 - protein, 14 aa, Homo sapiens
  CDR3 for alpha chain variable domain of TCR clone 36916 (TRAV1-2, TRAJ8)
CAVREDTGFQELVF

SEQ ID NO: 73832 - protein, 15 aa, Homo sapiens
  CDR3 for beta chain variable domain of TCR clone 36916 (TRBV7-9, TRBJ1-1)
CASSHRGTVNTEAFF

SEQ ID NO: 73833 - protein, 15 aa, Homo sapiens
  CDR3 for alpha chain variable domain of TCR clone 36917 (TRAV8-3, TRAJ11)
RAVGLLNSGYSTLTF

SEQ ID NO: 73834 - protein, 16 aa, Homo sapiens
  CDR3 for beta chain variable domain of TCR clone 36917 (TRBV7-9, TRBJ1-2)
CASSLGFSSGEDGYTF

SEQ ID NO: 73835 - protein, 12 aa, Homo sapiens
  CDR3 for alpha chain variable domain of TCR clone 36918 (TRAV36/DV7, TRAJ40)
CAVGTGTYKYIF

SEQ ID NO: 73836 - protein, 13 aa, Homo sapiens
  CDR3 for beta chain variable domain of TCR clone 36918 (TRBV19, TRBJ2-3)
CASSIDLGRYAVF

SEQ ID NO: 73837 - protein, 10 aa, Homo sapiens
  CDR3 for alpha chain variable domain of TCR clone 36919 (TRAV16, TRAJ22)
SAMYLRQLTF

SEQ ID NO: 73838 - protein, 15 aa, Homo sapiens
  CDR3 for beta chain variable domain of TCR clone 36919 (TRBV7-9, TRBJ1-6)
CASSSQGRGNSPLHF

SEQ ID NO: 73839 - protein, 15 aa, Homo sapiens
  CDR3 for alpha chain variable domain of TCR clone 36920 (TRAV12-3, TRAJ6)
CAMSPASGGSYIPTF

SEQ ID NO: 73840 - protein, 15 aa, Homo sapiens
  CDR3 for beta chain variable domain of TCR clone 36920 (TRBV2, TRBJ1-2)
CASSESRTVNYDYTF

SEQ ID NO: 73841 - protein, 13 aa, Homo sapiens
  CDR3 for alpha chain variable domain of TCR clone 36921 (TRAV35, TRAJ36)
CAGPRIGANNLFF

SEQ ID NO: 73842 - protein, 15 aa, Homo sapiens
  CDR3 for beta chain variable domain of TCR clone 36921 (TRBV28, TRBJ2-5)
CASSPPWSYQETRYF

SEQ ID NO: 73843 - protein, 14 aa, Homo sapiens
  CDR3 for alpha chain variable domain of TCR clone 36922 (TRAV23/DV6, TRAJ40)
CAASLTSGTCKYIF

SEQ ID NO: 73844 - protein, 14 aa, Homo sapiens
  CDR3 for beta chain variable domain of TCR clone 36922 (TRBV5-1, TRBJ2-3)
CASSRGQGGGTQYF

SEQ ID NO: 73845 - protein, 12 aa, Homo sapiens
  CDR3 for alpha chain variable domain of TCR clone 36923 (TRAV8-6, TRAJ47)
CAVSDRGNKLVF

SEQ ID NO: 73846 - protein, 15 aa, Homo sapiens
  CDR3 for beta chain variable domain of TCR clone 36923 (TRBV20-1, TRBJ2-7)
CSVLESGTPGLEQYF

SEQ ID NO: 73847 - protein, 13 aa, Homo sapiens
  CDR3 for alpha chain variable domain of TCR clone 36924 (TRAV27, TRAJ41)
CAGVGNSGYALNF

SEQ ID NO: 73848 - protein, 14 aa, Homo sapiens
  CDR3 for beta chain variable domain of TCR clone 36924 (TRBV7-2, TRBJ1-1)
CASSFLTGTTEAFF

SEQ ID NO: 73849 - protein, 14 aa, Homo sapiens
  CDR3 for alpha chain variable domain of TCR clone 36925 (TRAV8-4, TRAJ9)
CDVRINTGGFKTIF

SEQ ID NO: 73850 - protein, 15 aa, Homo sapiens
  CDR3 for beta chain variable domain of TCR clone 36925 (TRBV10-2, TRBJ2-6)
CASSEQGTGANVLTF

SEQ ID NO: 73851 - protein, 14 aa, Homo sapiens
  CDR3 for alpha chain variable domain of TCR clone 36926 (TRAV1-2, TRAJ8)
CAVREDTGFQKLVF

SEQ ID NO: 73852 - protein, 17 aa, Homo sapiens
  CDR3 for beta chain variable domain of TCR clone 36926 (TRBV6-3, TRBJ2-7)
CTSVPAVPPGQFYEQYF

SEQ ID NO: 73853 - protein, 12 aa, Homo sapiens
  CDR3 for alpha chain variable domain of TCR clone 36927 (TRAV21, TRAJ15)
CAVNRAGTALIF

SEQ ID NO: 73854 - protein, 13 aa, Homo sapiens
  CDR3 for beta chain variable domain of TCR clone 36927 (TRBV11-2, TRBJ2-5)
CASSSTGEETQYF

SEQ ID NO: 73855 - protein, 14 aa, Homo sapiens
  CDR3 for alpha chain variable domain of TCR clone 36928 (TRAV17, TRAJ34)
CATDSIEGTDKLIF

SEQ ID NO: 73856 - protein, 13 aa, Homo sapiens
  CDR3 for beta chain variable domain of TCR clone 36928 (TRBV11-2, TRBJ2-7)
CASSGTRPYEQYF

SEQ ID NO: 73857 - protein, 14 aa, Homo sapiens
  CDR3 for alpha chain variable domain of TCR clone 36929 (TRAV9-2, TRAJ39)
CALYIYNAGNMLTF

SEQ ID NO: 73858 - protein, 14 aa, Homo sapiens
  CDR3 for beta chain variable domain of TCR clone 36929 (TRBV7-2, TRBJ1-6)
CASSLQGANSPLHF

SEQ ID NO: 73859 - protein, 14 aa, Homo sapiens
  CDR3 for alpha chain variable domain of TCR clone 36930 (TRAV12-3, TRAJ10)
SHLPLTGGGNKLTF

SEQ ID NO: 73860 - protein, 14 aa, Homo sapiens
  CDR3 for beta chain variable domain of TCR clone 36930 (TRBV19, TRBJ2-7)
CASTVQGRPYEQYL

SEQ ID NO: 73861 - protein, 12 aa, Homo sapiens
  CDR3 for alpha chain variable domain of TCR clone 36931 (TRAV29/DV5, TRAJ49)
CAATDTGNQFYL

SEQ ID NO: 73862 - protein, 19 aa, Homo sapiens
  CDR3 for beta chain variable domain of TCR clone 36931 (TRBV25-1, TRBJ2-2)
CAILVYRVDRGRKTGELFF

SEQ ID NO: 73863 - protein, 13 aa, Homo sapiens
  CDR3 for alpha chain variable domain of TCR clone 36932 (TRAV12-3, TRAJ33)
CAMSVNSNYQLIW

SEQ ID NO: 73864 - protein, 18 aa, Homo sapiens
  CDR3 for beta chain variable domain of TCR clone 36932 (TRBV20-1, TRBJ2-3)
CSASGLAGGPGTTDTQYF

SEQ ID NO: 73865 - protein, 18 aa, Homo sapiens
  CDR3 for alpha chain variable domain of TCR clone 36933 (TRAV13-1, TRAJ52)
CAAKNPNAGGTSYGKLTF

SEQ ID NO: 73866 - protein, 13 aa, Homo sapiens
  CDR3 for beta chain variable domain of TCR clone 36933 (TRBV29-1, TRBJ2-1)
CSVEGGRVNEQFF

SEQ ID NO: 73867 - protein, 15 aa, Homo sapiens
  CDR3 for alpha chain variable domain of TCR clone 36934 (TRAV8-3, TRAJ45)
CASSYSGGGADGLTF

SEQ ID NO: 73868 - protein, 16 aa, Homo sapiens
  CDR3 for beta chain variable domain of TCR clone 36934 (TRBV7-9, TRBJ2-2)
CASSGFGGANTEELFF

SEQ ID NO: 73869 - protein, 14 aa, Homo sapiens
  CDR3 for alpha chain variable domain of TCR clone 36935 (TRAV12-1, TRAJ43)
CVVNGRSNNNDMRF

SEQ ID NO: 73870 - protein, 13 aa, Homo sapiens
  CDR3 for beta chain variable domain of TCR clone 36935 (TRBV27, TRBJ1-1)
CASSLSIGAEASF

SEQ ID NO: 73871 - protein, 14 aa, Homo sapiens
  CDR3 for alpha chain variable domain of TCR clone 36936 (TRAV35, TRAJ33)
CAGSSQDSNYQLLW

SEQ ID NO: 73872 - protein, 15 aa, Homo sapiens
  CDR3 for beta chain variable domain of TCR clone 36936 (TRBV20-1, TRBJ2-7)
CSAESGTSGAYEQYF

SEQ ID NO: 73873 - protein, 14 aa, Homo sapiens
  CDR3 for alpha chain variable domain of TCR clone 36937 (TRAV8-4, TRAJ29)
CAVSAVEGNTPLVF

SEQ ID NO: 73874 - protein, 13 aa, Homo sapiens
  CDR3 for beta chain variable domain of TCR clone 36937 (TRBV12-4, TRBJ2-7)
CASSSQGRYEQYF

SEQ ID NO: 73875 - protein, 15 aa, Homo sapiens
  CDR3 for alpha chain variable domain of TCR clone 36938 (TRAV34, TRAJ38)
CGADFTPGNNRRLIW

SEQ ID NO: 73876 - protein, 16 aa, Homo sapiens
  CDR3 for beta chain variable domain of TCR clone 36938 (TRBV12-5, TRBJ2-5)
CASGPRTSGNQETQYF

SEQ ID NO: 73877 - protein, 12 aa, Homo sapiens
  CDR3 for alpha chain variable domain of TCR clone 36939 (TRAV12-3, TRAJ17)
CAMTLTGNKLTF

SEQ ID NO: 73878 - protein, 13 aa, Homo sapiens
  CDR3 for beta chain variable domain of TCR clone 36939 (TRBV5-7, TRBJ2-6)
CASTSSGANVLTF

SEQ ID NO: 73879 - protein, 11 aa, Homo sapiens
  CDR3 for alpha chain variable domain of TCR clone 36940 (TRAV1-1, TRAJ23)
CAVRQGGKLIF

SEQ ID NO: 73880 - protein, 15 aa, Homo sapiens
  CDR3 for beta chain variable domain of TCR clone 36940 (TRBV7-9, TRBJ1-6)
CASSSPGRGNSPLHF

SEQ ID NO: 73881 - protein, 16 aa, Homo sapiens
  CDR3 for alpha chain variable domain of TCR clone 36941 (TRAV26-1, TRAJ37)
CIVRGDGSGNTGKQIF

SEQ ID NO: 73882 - protein, 17 aa, Homo sapiens
  CDR3 for beta chain variable domain of TCR clone 36941 (TRBV4-1, TRBJ2-7)
CASSRDPLGVRGGEQYF

SEQ ID NO: 73883 - protein, 14 aa, Homo sapiens
  CDR3 for alpha chain variable domain of TCR clone 36942 (TRAV38-1, TRAJ40)
CALRPTSGTYKYIF

SEQ ID NO: 73884 - protein, 15 aa, Homo sapiens
  CDR3 for beta chain variable domain of TCR clone 36942 (TRBV7-9, TRBJ1-6)
CASSSPGRGNSPLHF

SEQ ID NO: 73885 - protein, 16 aa, Homo sapiens
  CDR3 for alpha chain variable domain of TCR clone 36943 (TRAV12-2, TRAJ10)
CAVNRVLTRGGNKLTF

SEQ ID NO: 73886 - protein, 12 aa, Homo sapiens
  CDR3 for beta chain variable domain of TCR clone 36943 (TRBV28, TRBJ2-7)
CASSFSSYEQYF

SEQ ID NO: 73887 - protein, 14 aa, Homo sapiens
  CDR3 for alpha chain variable domain of TCR clone 36944 (TRAV4, TRAJ39)
CLVGPNNNAATCSP

SEQ ID NO: 73888 - protein, 13 aa, Homo sapiens
  CDR3 for beta chain variable domain of TCR clone 36944 (TRBV11-2, TRBJ2-5)
CASSSTGEETQYF

SEQ ID NO: 73889 - protein, 17 aa, Homo sapiens
  CDR3 for alpha chain variable domain of TCR clone 36945 (TRAV12-2, TRAJ6)
CAPQGPPRTGGSYIPTF

SEQ ID NO: 73890 - protein, 16 aa, Homo sapiens
  CDR3 for beta chain variable domain of TCR clone 36945 (TRBV19, TRBJ2-2)
CASSTARASNTGELFF

SEQ ID NO: 73891 - protein, 11 aa, Homo sapiens
  CDR3 for alpha chain variable domain of TCR clone 36946 (TRAV3, TRAJ23)
CAVRQGGKLIF

SEQ ID NO: 73892 - protein, 20 aa, Homo sapiens
  CDR3 for beta chain variable domain of TCR clone 36946 (TRBV7-8, TRBJ2-2)
CASSHLFPGPTIHITGELFF

SEQ ID NO: 73893 - protein, 18 aa, Homo sapiens
  CDR3 for alpha chain variable domain of TCR clone 36947 (TRAV13-1, TRAJ52)
CAASKRSAGGTSYGKLTF

SEQ ID NO: 73894 - protein, 19 aa, Homo sapiens
  CDR3 for beta chain variable domain of TCR clone 36947 (TRBV7-3, TRBJ2-2)
CASSLRAGGSGPNTGELFF

SEQ ID NO: 73895 - protein, 16 aa, Homo sapiens
  CDR3 for alpha chain variable domain of TCR clone 36948 (TRAV3, TRAJ4)
CAVRPSPSGGYNKLIF

SEQ ID NO: 73896 - protein, 12 aa, Homo sapiens
  CDR3 for beta chain variable domain of TCR clone 36948 (TRBV7-9, TRBJ2-7)
CASSQGAYEQYF

SEQ ID NO: 73897 - protein, 15 aa, Homo sapiens
  CDR3 for alpha chain variable domain of TCR clone 36949 (TRAV12-1, TRAJ36)
CVVNEHQTGANNLFS

SEQ ID NO: 73898 - protein, 12 aa, Homo sapiens
  CDR3 for beta chain variable domain of TCR clone 36949 (TRBV29-1, TRBJ2-3)
CSVTGGADTQYF

SEQ ID NO: 73899 - protein, 15 aa, Homo sapiens
  CDR3 for alpha chain variable domain of TCR clone 36950 (TRAV12-3, TRAJ11)
CAMSEESSGYSTLTF

SEQ ID NO: 73900 - protein, 13 aa, Homo sapiens
  CDR3 for beta chain variable domain of TCR clone 36950 (TRBV12-4, TRBJ2-1)
CASSFHSGSEQFF

SEQ ID NO: 73901 - protein, 13 aa, Homo sapiens
  CDR3 for alpha chain variable domain of TCR clone 36951 (TRAV2, TRAJ40)
CAVITSGTYKYIF

SEQ ID NO: 73902 - protein, 15 aa, Homo sapiens
  CDR3 for beta chain variable domain of TCR clone 36951 (TRBV11-3, TRBJ2-3)
CASLKDGREGDTQYF

SEQ ID NO: 73903 - protein, 17 aa, Homo sapiens
  CDR3 for alpha chain variable domain of TCR clone 36952 (TRAV3, TRAJ42)
CAVRDRDYGGSQGNPIF

SEQ ID NO: 73904 - protein, 13 aa, Homo sapiens
  CDR3 for beta chain variable domain of TCR clone 36952 (TRBV10-3, TRBJ2-7)
CASKLAVNYEQYF

SEQ ID NO: 73905 - protein, 11 aa, Homo sapiens
  CDR3 for alpha chain variable domain of TCR clone 36953 (TRAV2, TRAJ33)
CAVDSNYQLIW

SEQ ID NO: 73906 - protein, 14 aa, Homo sapiens
  CDR3 for beta chain variable domain of TCR clone 36953 (TRBV11-2, TRBJ2-3)
CASSRLARKDTQYF

SEQ ID NO: 73907 - protein, 14 aa, Homo sapiens
  CDR3 for alpha chain variable domain of TCR clone 36954 (TRAV12-3, TRAJ10)
SHLPLTGGGNKLTF

SEQ ID NO: 73908 - protein, 13 aa, Homo sapiens
  CDR3 for beta chain variable domain of TCR clone 36954 (TRBV20-1, TRBJ2-1)
TSGALPPGNEQFL

SEQ ID NO: 73909 - protein, 12 aa, Homo sapiens
  CDR3 for alpha chain variable domain of TCR clone 36955 (TRAV1-2, TRAJ29)
CAVPSGNTPLVF

SEQ ID NO: 73910 - protein, 13 aa, Homo sapiens
  CDR3 for beta chain variable domain of TCR clone 36955 (TRBV4-2, TRBJ1-1)
CASSQAGNTEAFF

SEQ ID NO: 73911 - protein, 12 aa, Homo sapiens
  CDR3 for alpha chain variable domain of TCR clone 36956 (TRAV3, TRAJ43)
CAVRDPNNEMRF

SEQ ID NO: 73912 - protein, 15 aa, Homo sapiens
  CDR3 for beta chain variable domain of TCR clone 36956 (TRBV27, TRBJ1-5)
CASSLGTGFDQPQHF

SEQ ID NO: 73913 - protein, 11 aa, Homo sapiens
  CDR3 for alpha chain variable domain of TCR clone 36957 (TRAV1-2, TRAJ20)
CAVANDYKLSF

SEQ ID NO: 73914 - protein, 18 aa, Homo sapiens
  CDR3 for beta chain variable domain of TCR clone 36957 (TRBV20-1, TRBJ2-6)
YSAETTPTHGSGANVLTF

SEQ ID NO: 73915 - protein, 14 aa, Homo sapiens
  CDR3 for alpha chain variable domain of TCR clone 36958 (TRAV16, TRAJ15)
CALSFNQAGTALIF

SEQ ID NO: 73916 - protein, 14 aa, Homo sapiens
  CDR3 for beta chain variable domain of TCR clone 36958 (TRBV19, TRBJ2-2)
CATTGHANTGEPFF

SEQ ID NO: 73917 - protein, 14 aa, Homo sapiens
  CDR3 for alpha chain variable domain of TCR clone 36959 (TRAV1-2, TRAJ16)
CAVNRFSDGQKLLL

SEQ ID NO: 73918 - protein, 16 aa, Homo sapiens
  CDR3 for beta chain variable domain of TCR clone 36959 (TRBV20-1, TRBJ1-4)
CSAPGQGLLTNEKLFF

SEQ ID NO: 73919 - protein, 14 aa, Homo sapiens
  CDR3 for alpha chain variable domain of TCR clone 36960 (TRAV12-2, TRAJ17)
CAVLFKAAGNKLTF

SEQ ID NO: 73920 - protein, 14 aa, Homo sapiens
  CDR3 for beta chain variable domain of TCR clone 36960 (TRBV4-2, TRBJ2-1)
CASGLDRAYNEQFF

SEQ ID NO: 73921 - protein, 11 aa, Homo sapiens
  CDR3 for alpha chain variable domain of TCR clone 36961 (TRAV3, TRAJ21)
CAVGNFNKFYF

SEQ ID NO: 73922 - protein, 16 aa, Homo sapiens
  CDR3 for beta chain variable domain of TCR clone 36961 (TRBV19, TRBJ2-1)
CASSKPGPSSYNEQFF

SEQ ID NO: 73923 - protein, 14 aa, Homo sapiens
  CDR3 for alpha chain variable domain of TCR clone 36962 (TRAV29/DV5, TRAJ22)
CAASAGGSARQLTF

SEQ ID NO: 73924 - protein, 16 aa, Homo sapiens
  CDR3 for beta chain variable domain of TCR clone 36962 (TRBV11-2, TRBJ2-2)
CASRKPGQGFTGELFF

SEQ ID NO: 73925 - protein, 16 aa, Homo sapiens
  CDR3 for alpha chain variable domain of TCR clone 36963 (TRAV3, TRAJ37)
CAVRPHGSGNTGKLII

SEQ ID NO: 73926 - protein, 16 aa, Homo sapiens
  CDR3 for beta chain variable domain of TCR clone 36963 (TRBV9, TRBJ1-2)
CASSVEEKVSPYGYTF

SEQ ID NO: 73927 - protein, 23 aa, Homo sapiens
  CDR3 for alpha chain variable domain of TCR clone 36964 (TRAV26-1, TRAJ38)
CIADNAGNNHIQNPDPAVYQLRD

SEQ ID NO: 73928 - protein, 13 aa, Homo sapiens
  CDR3 for beta chain variable domain of TCR clone 36964 (TRBV5-4, TRBJ1-1)
CASSADLGTEAFF

SEQ ID NO: 73929 - protein, 12 aa, Homo sapiens
  CDR3 for alpha chain variable domain of TCR clone 36965 (TRAV21, TRAJ13)
PGPSGGYQKVTF

SEQ ID NO: 73930 - protein, 15 aa, Homo sapiens
  CDR3 for beta chain variable domain of TCR clone 36965 (TRBV7-9, TRBJ1-6)
CASSSPGRGNPPLHF

SEQ ID NO: 73931 - protein, 16 aa, Homo sapiens
  CDR3 for alpha chain variable domain of TCR clone 36966 (TRAV13-1, TRAJ45)
CAASWESGGGADGLAF

SEQ ID NO: 73932 - protein, 14 aa, Homo sapiens
  CDR3 for beta chain variable domain of TCR clone 36966 (TRBV12-4, TRBJ1-3)
CASGQTVSGNTIYF

SEQ ID NO: 73933 - protein, 10 aa, Homo sapiens
  CDR3 for alpha chain variable domain of TCR clone 36967 (TRAV16, TRAJ22)
SAMYLRQLTF

SEQ ID NO: 73934 - protein, 15 aa, Homo sapiens
  CDR3 for beta chain variable domain of TCR clone 36967 (TRBV7-9, TRBJ1-6)
CASSPPGRGNSPLHF

SEQ ID NO: 73935 - protein, 12 aa, Homo sapiens
  CDR3 for alpha chain variable domain of TCR clone 36968 (TRAV13-1, TRAJ53)
AASGGSNYKLAF

SEQ ID NO: 73936 - protein, 15 aa, Homo sapiens
  CDR3 for beta chain variable domain of TCR clone 36968 (TRBV5-1, TRBJ2-1)
CASSPPRAPYNEQFF

SEQ ID NO: 73937 - protein, 13 aa, Homo sapiens
  CDR3 for alpha chain variable domain of TCR clone 36969 (TRAV13-1, TRAJ21)
CAASIYNFSKFYF

SEQ ID NO: 73938 - protein, 13 aa, Homo sapiens
  CDR3 for beta chain variable domain of TCR clone 36969 (TRBV27, TRBJ1-4)
CASSLMGDEKLFF

SEQ ID NO: 73939 - protein, 15 aa, Homo sapiens
  CDR3 for alpha chain variable domain of TCR clone 36970 (TRAV25, TRAJ52)
CAGRPGGTSYGKLTF

SEQ ID NO: 73940 - protein, 13 aa, Homo sapiens
  CDR3 for beta chain variable domain of TCR clone 36970 (TRBV7-3, TRBJ1-1)
CASSQDWGAEAFF

SEQ ID NO: 73941 - protein, 16 aa, Homo sapiens
  CDR3 for alpha chain variable domain of TCR clone 36971 (TRAV23/DV6, TRAJ9)
CAASIGGNTGGFKTIF

SEQ ID NO: 73942 - protein, 13 aa, Homo sapiens
  CDR3 for beta chain variable domain of TCR clone 36971 (TRBV7-9, TRBJ1-2)
CASGLKQNYGYTF

SEQ ID NO: 73943 - protein, 14 aa, Homo sapiens
  CDR3 for alpha chain variable domain of TCR clone 36972 (TRAV21, TRAJ52)
CGRAGGASYGKLTF

SEQ ID NO: 73944 - protein, 14 aa, Homo sapiens
  CDR3 for beta chain variable domain of TCR clone 36972 (TRBV19, TRBJ1-2)
CASSVLGYNYGYTF

SEQ ID NO: 73945 - protein, 15 aa, Homo sapiens
  CDR3 for alpha chain variable domain of TCR clone 36973 (TRAV3, TRAJ5)
CAVRDRKTCRRALTF

SEQ ID NO: 73946 - protein, 15 aa, Homo sapiens
  CDR3 for beta chain variable domain of TCR clone 36973 (TRBV7-8, TRBJ2-1)
CASSLADSLYNEQFF

SEQ ID NO: 73947 - protein, 13 aa, Homo sapiens
  CDR3 for alpha chain variable domain of TCR clone 36974 (TRAV12-3, TRAJ13)
CAMTSGGYQKVTF

SEQ ID NO: 73948 - protein, 13 aa, Homo sapiens
  CDR3 for beta chain variable domain of TCR clone 36974 (TRBV20-1, TRBJ2-2)
CSVLSGGAGELFF

SEQ ID NO: 73949 - protein, 14 aa, Homo sapiens
  CDR3 for alpha chain variable domain of TCR clone 36975 (TRAV8-3, TRAJ4)
CAVGAAGGYNKLIF

SEQ ID NO: 73950 - protein, 15 aa, Homo sapiens
  CDR3 for beta chain variable domain of TCR clone 36975 (TRBV6-5, TRBJ2-1)
CASSYDAGAGNEQFS

SEQ ID NO: 73951 - protein, 13 aa, Homo sapiens
  CDR3 for alpha chain variable domain of TCR clone 36976 (TRAV3, TRAJ21)
CAVREPDFNRFYF

SEQ ID NO: 73952 - protein, 12 aa, Homo sapiens
  CDR3 for beta chain variable domain of TCR clone 36976 (TRBV5-1, TRBJ2-4)
LAGEWTKNIQYF

SEQ ID NO: 73953 - protein, 16 aa, Homo sapiens
  CDR3 for alpha chain variable domain of TCR clone 36977 (TRAV30, TRAJ24)
CGTEIVDADSWGKFQF

SEQ ID NO: 73954 - protein, 15 aa, Homo sapiens
  CDR3 for beta chain variable domain of TCR clone 36977 (TRBV7-3, TRBJ2-1)
CASSLGQGPFGEQFF

SEQ ID NO: 73955 - protein, 12 aa, Homo sapiens
  CDR3 for alpha chain variable domain of TCR clone 36978 (TRAV12-3, TRAJ17)
CAMTLTGNKLTF

SEQ ID NO: 73956 - protein, 15 aa, Homo sapiens
  CDR3 for beta chain variable domain of TCR clone 36978 (TRBV7-9, TRBJ1-6)
CASSSPGRGNSPLHL

SEQ ID NO: 73957 - protein, 17 aa, Homo sapiens
  CDR3 for alpha chain variable domain of TCR clone 36979 (TRAV4, TRAJ18)
CLVGERSVGSTLGRLYF

SEQ ID NO: 73958 - protein, 16 aa, Homo sapiens
  CDR3 for beta chain variable domain of TCR clone 36979 (TRBV4-2, TRBJ1-1)
CASSPTPGRAAPEAFF

SEQ ID NO: 73959 - protein, 14 aa, Homo sapiens
  CDR3 for alpha chain variable domain of TCR clone 36980 (TRAV1-2, TRAJ16)
YAVNRFSDGQKLLF

SEQ ID NO: 73960 - protein, 15 aa, Homo sapiens
  CDR3 for beta chain variable domain of TCR clone 36980 (TRBV7-9, TRBJ1-6)
CASSSPGRGNSPLHF

SEQ ID NO: 73961 - protein, 12 aa, Homo sapiens
  CDR3 for alpha chain variable domain of TCR clone 36981 (TRAV21, TRAJ13)
PGPSGGYQKVTF

SEQ ID NO: 73962 - protein, 15 aa, Homo sapiens
  CDR3 for beta chain variable domain of TCR clone 36981 (TRBV7-9, TRBJ1-6)
RASSSPGRGNSPLHF

SEQ ID NO: 73963 - protein, 14 aa, Homo sapiens
  CDR3 for alpha chain variable domain of TCR clone 36982 (TRAV12-3, TRAJ21)
SAATDLYNFNKFYF

SEQ ID NO: 73964 - protein, 13 aa, Homo sapiens
  CDR3 for beta chain variable domain of TCR clone 36982 (TRBV19, TRBJ2-2)
CASSSKNTGELLF

SEQ ID NO: 73965 - protein, 16 aa, Homo sapiens
  CDR3 for alpha chain variable domain of TCR clone 36983 (TRAV16, TRAJ4)
CALSRMFSGGYNKLIF

SEQ ID NO: 73966 - protein, 14 aa, Homo sapiens
  CDR3 for beta chain variable domain of TCR clone 36983 (TRBV19, TRBJ1-5)
CASSLGPGGEPQHF

SEQ ID NO: 73967 - protein, 15 aa, Homo sapiens
  CDR3 for alpha chain variable domain of TCR clone 36984 (TRAV17, TRAJ37)
CATDHGSSNTGKLIF

SEQ ID NO: 73968 - protein, 14 aa, Homo sapiens
  CDR3 for beta chain variable domain of TCR clone 36984 (TRBV7-2, TRBJ2-3)
CTSSRTSGADTQYF

SEQ ID NO: 73969 - protein, 16 aa, Homo sapiens
  CDR3 for alpha chain variable domain of TCR clone 36985 (TRAV30, TRAJ24)
CGTEIVDADSWGKFRF

SEQ ID NO: 73970 - protein, 14 aa, Homo sapiens
  CDR3 for beta chain variable domain of TCR clone 36985 (TRBV13, TRBJ2-1)
CASSPRPRYNEQFF

SEQ ID NO: 73971 - protein, 17 aa, Homo sapiens
  CDR3 for alpha chain variable domain of TCR clone 36986 (TRAV8-6, TRAJ58)
CAVSSWVGEASGSRLTF

SEQ ID NO: 73972 - protein, 15 aa, Homo sapiens
  CDR3 for beta chain variable domain of TCR clone 36986 (TRBV6-5, TRBJ2-1)
CASSYDAGAGNEQFF

SEQ ID NO: 73973 - protein, 11 aa, Homo sapiens
  CDR3 for alpha chain variable domain of TCR clone 36987 (TRAV1-2, TRAJ40)
CAVPGTCKYIF

SEQ ID NO: 73974 - protein, 16 aa, Homo sapiens
  CDR3 for beta chain variable domain of TCR clone 36987 (TRBV29-1, TRBJ2-7)
CSVEVVGTSGSYEQYF

SEQ ID NO: 73975 - protein, 15 aa, Homo sapiens
  CDR3 for alpha chain variable domain of TCR clone 36988 (TRAV3, TRAJ4)
CAVRDGTGGYNKLIF

SEQ ID NO: 73976 - protein, 14 aa, Homo sapiens
  CDR3 for beta chain variable domain of TCR clone 36988 (TRBV7-2, TRBJ2-2)
CASRGQGAAGELFF

SEQ ID NO: 73977 - protein, 13 aa, Homo sapiens
  CDR3 for alpha chain variable domain of TCR clone 36989 (TRAV17, TRAJ9)
CATDYTGGFKTIF

SEQ ID NO: 73978 - protein, 14 aa, Homo sapiens
  CDR3 for beta chain variable domain of TCR clone 36989 (TRBV19, TRBJ2-5)
CASSMTGQQETQYF

SEQ ID NO: 73979 - protein, 13 aa, Homo sapiens
  CDR3 for alpha chain variable domain of TCR clone 36990 (TRAV35, TRAJ42)
CAGFPGSQGNLIF

SEQ ID NO: 73980 - protein, 14 aa, Homo sapiens
  CDR3 for beta chain variable domain of TCR clone 36990 (TRBV19, TRBJ2-1)
CASPTFVVSGEQFF

SEQ ID NO: 73981 - protein, 15 aa, Homo sapiens
  CDR3 for alpha chain variable domain of TCR clone 36991 (TRAV29/DV5, TRAJ24)
CAASGATDSWGKFQF

SEQ ID NO: 73982 - protein, 11 aa, Homo sapiens
  CDR3 for beta chain variable domain of TCR clone 36991 (TRBV29-1, TRBJ2-5)
CSEDRTGTQYF

SEQ ID NO: 73983 - protein, 11 aa, Homo sapiens
  CDR3 for alpha chain variable domain of TCR clone 36992 (TRAV1-1, TRAJ23)
CAVRQGGKLIF

SEQ ID NO: 73984 - protein, 20 aa, Homo sapiens
  CDR3 for beta chain variable domain of TCR clone 36992 (TRBV7-8, TRBJ2-2)
CASSHLVPGPTIHITGELFF

SEQ ID NO: 73985 - protein, 16 aa, Homo sapiens
  CDR3 for alpha chain variable domain of TCR clone 36993 (TRAV26-1, TRAJ38)
CIVRVELGGNNRKPIW

SEQ ID NO: 73986 - protein, 14 aa, Homo sapiens
  CDR3 for beta chain variable domain of TCR clone 36993 (TRBV5-1, TRBJ2-3)
CASSPGLAADTQYF

SEQ ID NO: 73987 - protein, 15 aa, Homo sapiens
  CDR3 for alpha chain variable domain of TCR clone 36994 (TRAV13-1, TRAJ5)
CAVPPIDTGRRALTF

SEQ ID NO: 73988 - protein, 18 aa, Homo sapiens
  CDR3 for beta chain variable domain of TCR clone 36994 (TRBV4-1, TRBJ2-2)
CASSFRTSGGEGPGELFF

SEQ ID NO: 73989 - protein, 12 aa, Homo sapiens
  CDR3 for alpha chain variable domain of TCR clone 36995 (TRAV9-2, TRAJ26)
CALRDYGQNFVF

SEQ ID NO: 73990 - protein, 12 aa, Homo sapiens
  CDR3 for beta chain variable domain of TCR clone 36995 (TRBV29-1, TRBJ2-3)
CSVTGGADTQYF

SEQ ID NO: 73991 - protein, 19 aa, Homo sapiens
  CDR3 for alpha chain variable domain of TCR clone 36996 (TRAV8-4, TRAJ3)
CAVTGENLVQQCFQDNLWI

SEQ ID NO: 73992 - protein, 16 aa, Homo sapiens
  CDR3 for beta chain variable domain of TCR clone 36996 (TRBV4-2, TRBJ1-1)
CASSQAGFGMNTEAFF

SEQ ID NO: 73993 - protein, 14 aa, Homo sapiens
  CDR3 for alpha chain variable domain of TCR clone 36997 (TRAV2, TRAJ37)
CAVDFTSNTGKLIF

SEQ ID NO: 73994 - protein, 13 aa, Homo sapiens
  CDR3 for beta chain variable domain of TCR clone 36997 (TRBV4-2, TRBJ1-1)
CAGSQAGNTEAFF

SEQ ID NO: 73995 - protein, 16 aa, Homo sapiens
  CDR3 for alpha chain variable domain of TCR clone 36998 (TRAV12-3, TRAJ53)
CAMSPGSGGSNYKLTF

SEQ ID NO: 73996 - protein, 12 aa, Homo sapiens
  CDR3 for beta chain variable domain of TCR clone 36998 (TRBV6-3, TRBJ2-7)
CASSEPGFEQYF

SEQ ID NO: 73997 - protein, 17 aa, Homo sapiens
  CDR3 for alpha chain variable domain of TCR clone 36999 (TRAV3, TRAJ6)
CALRDGPRAGGSYIPTF

SEQ ID NO: 73998 - protein, 20 aa, Homo sapiens
  CDR3 for beta chain variable domain of TCR clone 36999 (TRBV28, TRBJ2-1)
CASTPIGRSPGLAGGNEQFF

SEQ ID NO: 73999 - protein, 18 aa, Homo sapiens
  CDR3 for alpha chain variable domain of TCR clone 37000 (TRAV13-1, TRAJ52)
CAASKRSAGGTSYGKLTF

SEQ ID NO: 74000 - protein, 17 aa, Homo sapiens
  CDR3 for beta chain variable domain of TCR clone 37000 (TRBV11-2, TRBJ2-1)
CASSLYPPGVEYNEQFF

SEQ ID NO: 74001 - protein, 14 aa, Homo sapiens
  CDR3 for alpha chain variable domain of TCR clone 37001 (TRAV20, TRAJ56)
CAVQFGGVNSKLTF

SEQ ID NO: 74002 - protein, 14 aa, Homo sapiens
  CDR3 for beta chain variable domain of TCR clone 37001 (TRBV20-1, TRBJ2-7)
CSAKRGRSSYEQYF

SEQ ID NO: 74003 - protein, 15 aa, Homo sapiens
  CDR3 for alpha chain variable domain of TCR clone 37002 (TRAV3, TRAJ5)
CAVRDRKTGRRALTF

SEQ ID NO: 74004 - protein, 15 aa, Homo sapiens
  CDR3 for beta chain variable domain of TCR clone 37002 (TRBV7-9, TRBJ2-2)
CTSGPLDTFPGELFF

SEQ ID NO: 74005 - protein, 17 aa, Homo sapiens
  CDR3 for alpha chain variable domain of TCR clone 37003 (TRAV12-2, TRAJ48)
CAPNEKLTFGTGTRLTI

SEQ ID NO: 74006 - protein, 15 aa, Homo sapiens
  CDR3 for beta chain variable domain of TCR clone 37003 (TRBV5-1, TRBJ2-1)
CASSQAGYWWNEQFF

SEQ ID NO: 74007 - protein, 10 aa, Homo sapiens
  CDR3 for alpha chain variable domain of TCR clone 37004 (TRAV12-1, TRAJ43)
CVVNPTALEQ

SEQ ID NO: 74008 - protein, 13 aa, Homo sapiens
  CDR3 for beta chain variable domain of TCR clone 37004 (TRBV20-1, TRBJ1-1)
CSARGGGNTEAFF

SEQ ID NO: 74009 - protein, 12 aa, Homo sapiens
  CDR3 for alpha chain variable domain of TCR clone 37005 (TRAV13-2, TRAJ23)
CAERHRGGKLIF

SEQ ID NO: 74010 - protein, 16 aa, Homo sapiens
  CDR3 for beta chain variable domain of TCR clone 37005 (TRBV20-1, TRBJ1-4)
CSAQGQGLLTNEKLFF

SEQ ID NO: 74011 - protein, 18 aa, Homo sapiens
  CDR3 for alpha chain variable domain of TCR clone 37006 (TRAV13-1, TRAJ52)
CAAKNPNAGGTSYGKLTF

SEQ ID NO: 74012 - protein, 12 aa, Homo sapiens
  CDR3 for beta chain variable domain of TCR clone 37006 (TRBV12-4, TRBJ2-7)
CASSLGGYEQYF

SEQ ID NO: 74013 - protein, 13 aa, Homo sapiens
  CDR3 for alpha chain variable domain of TCR clone 37007 (TRAV26-2, TRAJ43)
CILRAVNNNDMRF

SEQ ID NO: 74014 - protein, 13 aa, Homo sapiens
  CDR3 for beta chain variable domain of TCR clone 37007 (TRBV10-3, TRBJ2-7)
CASKLAVNYEQYF

SEQ ID NO: 74015 - protein, 17 aa, Homo sapiens
  CDR3 for alpha chain variable domain of TCR clone 37008 (TRAV14/DV4, TRAJ28)
CTMREVSSGAGSYQLTF

SEQ ID NO: 74016 - protein, 15 aa, Homo sapiens
  CDR3 for beta chain variable domain of TCR clone 37008 (TRBV11-2, TRBJ1-6)
CASTLRETGNSPLHF

SEQ ID NO: 74017 - protein, 13 aa, Homo sapiens
  CDR3 for alpha chain variable domain of TCR clone 37009 (TRAV26-1, TRAJ29)
CIARRSGNTPLVF

SEQ ID NO: 74018 - protein, 16 aa, Homo sapiens
  CDR3 for beta chain variable domain of TCR clone 37009 (TRBV11-2, TRBJ2-7)
CASSLAPTGVNYEQYF

SEQ ID NO: 74019 - protein, 14 aa, Homo sapiens
  CDR3 for alpha chain variable domain of TCR clone 37010 (TRAV8-2, TRAJ11)
CVVSEKSGYSNLTF

SEQ ID NO: 74020 - protein, 16 aa, Homo sapiens
  CDR3 for beta chain variable domain of TCR clone 37010 (TRBV28, TRBJ2-1)
CASSSPEYPRDNEQFF

SEQ ID NO: 74021 - protein, 16 aa, Homo sapiens
  CDR3 for alpha chain variable domain of TCR clone 37011 (TRAV3, TRAJ10)
CAVRDMRAGGGNKLTF

SEQ ID NO: 74022 - protein, 11 aa, Homo sapiens
  CDR3 for beta chain variable domain of TCR clone 37011 (TRBV7-9, TRBJ2-5)
CASSLGETQYF

SEQ ID NO: 74023 - protein, 12 aa, Homo sapiens
  CDR3 for alpha chain variable domain of TCR clone 37012 (TRAV13-1, TRAJ49)
CAASPMGNQFYF

SEQ ID NO: 74024 - protein, 17 aa, Homo sapiens
  CDR3 for beta chain variable domain of TCR clone 37012 (TRBV11-2, TRBJ2-1)
RASSLYPPGVEYNEQFF

SEQ ID NO: 74025 - protein, 12 aa, Homo sapiens
  CDR3 for alpha chain variable domain of TCR clone 37013 (TRAV1-2, TRAJ33)
CAALDSNYQLIW

SEQ ID NO: 74026 - protein, 17 aa, Homo sapiens
  CDR3 for beta chain variable domain of TCR clone 37013 (TRBV28, TRBJ2-5)
CASSTPEGDALQETQYF

SEQ ID NO: 74027 - protein, 14 aa, Homo sapiens
  CDR3 for alpha chain variable domain of TCR clone 37014 (TRAV12-2, TRAJ40)
CAVKIPSGTYKYIF

SEQ ID NO: 74028 - protein, 14 aa, Homo sapiens
  CDR3 for beta chain variable domain of TCR clone 37014 (TRBV20-1, TRBJ1-1)
CSAQPRIGGTEAFF

SEQ ID NO: 74029 - protein, 13 aa, Homo sapiens
  CDR3 for alpha chain variable domain of TCR clone 37015 (TRAV8-3, TRAJ43)
CAVGPDNNNDMRF

SEQ ID NO: 74030 - protein, 14 aa, Homo sapiens
  CDR3 for beta chain variable domain of TCR clone 37015 (TRBV19, TRBJ2-1)
CASPTFVLSGVQFF

SEQ ID NO: 74031 - protein, 15 aa, Homo sapiens
  CDR3 for alpha chain variable domain of TCR clone 37016 (TRAV26-1, TRAJ44)
CIARVPFGTARKLTF

SEQ ID NO: 74032 - protein, 17 aa, Homo sapiens
  CDR3 for beta chain variable domain of TCR clone 37016 (TRBV24-1, TRBJ2-4)
CATSDAEARGVRNIQYF

SEQ ID NO: 74033 - protein, 14 aa, Homo sapiens
  CDR3 for alpha chain variable domain of TCR clone 37017 (TRAV12-1, TRAJ17)
CVVNYKAAGNKLTF

SEQ ID NO: 74034 - protein, 11 aa, Homo sapiens
  CDR3 for beta chain variable domain of TCR clone 37017 (TRBV20-1, TRBJ2-1)
GASGILNEQFF

SEQ ID NO: 74035 - protein, 13 aa, Homo sapiens
  CDR3 for alpha chain variable domain of TCR clone 37018 (TRAV2, TRAJ20)
CAVEHPSEYKLSF

SEQ ID NO: 74036 - protein, 16 aa, Homo sapiens
  CDR3 for beta chain variable domain of TCR clone 37018 (TRBV25-1, TRBJ2-7)
CASSELTGGGIYEQYF

SEQ ID NO: 74037 - protein, 12 aa, Homo sapiens
  CDR3 for alpha chain variable domain of TCR clone 37019 (TRAV17, TRAJ57)
CATDGGSEKLGF

SEQ ID NO: 74038 - protein, 13 aa, Homo sapiens
  CDR3 for beta chain variable domain of TCR clone 37019 (TRBV7-9, TRBJ2-7)
CASSFAGAYEQYF

SEQ ID NO: 74039 - protein, 11 aa, Homo sapiens
  CDR3 for alpha chain variable domain of TCR clone 37020 (TRAV23/DV6, TRAJ58)
CAARLLRGETS

SEQ ID NO: 74040 - protein, 16 aa, Homo sapiens
  CDR3 for beta chain variable domain of TCR clone 37020 (TRBV19, TRBJ2-1)
CASSKAGPSSYNEQFF

SEQ ID NO: 74041 - protein, 13 aa, Homo sapiens
  CDR3 for alpha chain variable domain of TCR clone 37021 (TRAV3, TRAJ29)
CAVRDIIDTPLVF

SEQ ID NO: 74042 - protein, 14 aa, Homo sapiens
  CDR3 for beta chain variable domain of TCR clone 37021 (TRBV27, TRBJ2-1)
CASGATGGYNEQFF

SEQ ID NO: 74043 - protein, 16 aa, Homo sapiens
  CDR3 for alpha chain variable domain of TCR clone 37022 (TRAV8-3, TRAJ13)
CAVGAYPYGGYQKVTF

SEQ ID NO: 74044 - protein, 15 aa, Homo sapiens
  CDR3 for beta chain variable domain of TCR clone 37022 (TRBV19, TRBJ1-5)
CASSIVWADNQPQHF

SEQ ID NO: 74045 - protein, 14 aa, Homo sapiens
  CDR3 for alpha chain variable domain of TCR clone 37023 (TRAV13-2, TRAJ17)
CAGNSKAAGNKLTF

SEQ ID NO: 74046 - protein, 15 aa, Homo sapiens
  CDR3 for beta chain variable domain of TCR clone 37023 (TRBV27, TRBJ2-1)
CASSNGGGSSNEQFF

SEQ ID NO: 74047 - protein, 13 aa, Homo sapiens
  CDR3 for alpha chain variable domain of TCR clone 37024 (TRAV3, TRAJ33)
CAVRDRSNYQLIW

SEQ ID NO: 74048 - protein, 16 aa, Homo sapiens
  CDR3 for beta chain variable domain of TCR clone 37024 (TRBV4-3, TRBJ2-7)
CASSQDRGTSSYEQYF

SEQ ID NO: 74049 - protein, 14 aa, Homo sapiens
  CDR3 for alpha chain variable domain of TCR clone 37025 (TRAV17, TRAJ35)
CATDRPGFGNGLHC

SEQ ID NO: 74050 - protein, 19 aa, Homo sapiens
  CDR3 for beta chain variable domain of TCR clone 37025 (TRBV11-3, TRBJ2-2)
CASSTRPGAKTTNTGELFF

SEQ ID NO: 74051 - protein, 17 aa, Homo sapiens
  CDR3 for alpha chain variable domain of TCR clone 37026 (TRAV3, TRAJ6)
CAVRDGPRAGGSYIPTF

SEQ ID NO: 74052 - protein, 13 aa, Homo sapiens
  CDR3 for beta chain variable domain of TCR clone 37026 (TRBV20-1, TRBJ1-6)
CSAPLGAGSPLHF

SEQ ID NO: 74053 - protein, 15 aa, Homo sapiens
  CDR3 for alpha chain variable domain of TCR clone 37027 (TRAV2, TRAJ8)
CAVEVMNTGFQKLVF

SEQ ID NO: 74054 - protein, 13 aa, Homo sapiens
  CDR3 for beta chain variable domain of TCR clone 37027 (TRBV7-9, TRBJ1-2)
CASSLKQNYGYTF

SEQ ID NO: 74055 - protein, 12 aa, Homo sapiens
  CDR3 for alpha chain variable domain of TCR clone 37028 (TRAV2, TRAJ5)
CALDTGRRVLTF

SEQ ID NO: 74056 - protein, 15 aa, Homo sapiens
  CDR3 for beta chain variable domain of TCR clone 37028 (TRBV10-3, TRBJ2-1)
CAISDVQDRAYEQFF

SEQ ID NO: 74057 - protein, 13 aa, Homo sapiens
  CDR3 for alpha chain variable domain of TCR clone 37029 (TRAV13-1, TRAJ39)
CATSIVMQATYSP

SEQ ID NO: 74058 - protein, 16 aa, Homo sapiens
  CDR3 for beta chain variable domain of TCR clone 37029 (TRBV20-1, TRBJ1-4)
CSAPGQGLLTNEKLFF

SEQ ID NO: 74059 - protein, 22 aa, Homo sapiens
  CDR3 for alpha chain variable domain of TCR clone 37030 (TRAV26-1, TRAJ30)
CIVRVRTEMTRSSLEKGYDFIF

SEQ ID NO: 74060 - protein, 18 aa, Homo sapiens
  CDR3 for beta chain variable domain of TCR clone 37030 (TRBV4-1, TRBJ1-5)
CASSQDPRGQGLNQPQHF

SEQ ID NO: 74061 - protein, 16 aa, Homo sapiens
  CDR3 for alpha chain variable domain of TCR clone 37031 (TRAV30, TRAJ24)
CGTEIVDDDSWGKFQF

SEQ ID NO: 74062 - protein, 15 aa, Homo sapiens
  CDR3 for beta chain variable domain of TCR clone 37031 (TRBV20-1, TRBJ2-7)
CSARDRVSGMDEQYF

SEQ ID NO: 74063 - protein, 13 aa, Homo sapiens
  CDR3 for alpha chain variable domain of TCR clone 37032 (TRAV23/DV6, TRAJ24)
CSGSDCSWGKLQF

SEQ ID NO: 74064 - protein, 15 aa, Homo sapiens
  CDR3 for beta chain variable domain of TCR clone 37032 (TRBV7-2, TRBJ1-2)
CASSPRAGWNYGYTF

SEQ ID NO: 74065 - protein, 14 aa, Homo sapiens
  CDR3 for alpha chain variable domain of TCR clone 37033 (TRAV1-2, TRAJ8)
CAVREDTGFQKLVF

SEQ ID NO: 74066 - protein, 15 aa, Homo sapiens
  CDR3 for beta chain variable domain of TCR clone 37033 (TRBV19, TRBJ2-1)
CASSTGTSSYNEQLF

SEQ ID NO: 74067 - protein, 13 aa, Homo sapiens
  CDR3 for alpha chain variable domain of TCR clone 37034 (TRAV27, TRAJ28)
CAISGAGSYQLTF

SEQ ID NO: 74068 - protein, 13 aa, Homo sapiens
  CDR3 for beta chain variable domain of TCR clone 37034 (TRBV19, TRBJ1-2)
CASSVPGQDGYTF

SEQ ID NO: 74069 - protein, 15 aa, Homo sapiens
  CDR3 for alpha chain variable domain of TCR clone 37035 (TRAV26-1, TRAJ22)
CIVRVSFWFCKATDL

SEQ ID NO: 74070 - protein, 12 aa, Homo sapiens
  CDR3 for beta chain variable domain of TCR clone 37035 (TRBV11-3, TRBJ2-2)
CASSLGGGELFF

SEQ ID NO: 74071 - protein, 17 aa, Homo sapiens
  CDR3 for alpha chain variable domain of TCR clone 37036 (TRAV13-1, TRAJ52)
CAAGRNAGGTSYGKLTF

SEQ ID NO: 74072 - protein, 13 aa, Homo sapiens
  CDR3 for beta chain variable domain of TCR clone 37036 (TRBV7-2, TRBJ1-1)
CASNLKGAKVVFF

SEQ ID NO: 74073 - protein, 11 aa, Homo sapiens
  CDR3 for alpha chain variable domain of TCR clone 37037 (TRAV1-1, TRAJ23)
CAVRQGGKLIF

SEQ ID NO: 74074 - protein, 15 aa, Homo sapiens
  CDR3 for beta chain variable domain of TCR clone 37037 (TRBV19, TRBJ1-6)
RASSTQGAVGSPPHF

SEQ ID NO: 74075 - protein, 17 aa, Homo sapiens
  CDR3 for alpha chain variable domain of TCR clone 37038 (TRAV13-1, TRAJ53)
CAASRRNSGGSNYKLTF

SEQ ID NO: 74076 - protein, 14 aa, Homo sapiens
  CDR3 for beta chain variable domain of TCR clone 37038 (TRBV13, TRBJ2-7)
CASSRGDRGREQYF

SEQ ID NO: 74077 - protein, 10 aa, Homo sapiens
  CDR3 for alpha chain variable domain of TCR clone 37039 (TRAV13-2, TRAJ24)
TTDSWGKLQF

SEQ ID NO: 74078 - protein, 15 aa, Homo sapiens
  CDR3 for beta chain variable domain of TCR clone 37039 (TRBV5-7, TRBJ2-3)
CASSPWDRATDTQYF

SEQ ID NO: 74079 - protein, 12 aa, Homo sapiens
  CDR3 for alpha chain variable domain of TCR clone 37040 (TRAV29/DV5, TRAJ49)
CAATDTGNQFYF

SEQ ID NO: 74080 - protein, 12 aa, Homo sapiens
  CDR3 for beta chain variable domain of TCR clone 37040 (TRBV12-4, TRBJ2-7)
CAGSLGGYEQYF

SEQ ID NO: 74081 - protein, 11 aa, Homo sapiens
  CDR3 for alpha chain variable domain of TCR clone 37041 (TRAV1-1, TRAJ23)
CAVRQGGKLIF

SEQ ID NO: 74082 - protein, 17 aa, Homo sapiens
  CDR3 for beta chain variable domain of TCR clone 37041 (TRBV20-1, TRBJ2-2)
CSASGSGQGGLTGELFF

SEQ ID NO: 74083 - protein, 15 aa, Homo sapiens
  CDR3 for alpha chain variable domain of TCR clone 37042 (TRAV3, TRAJ20)
CAVRDIKLSDYKLSF

SEQ ID NO: 74084 - protein, 20 aa, Homo sapiens
  CDR3 for beta chain variable domain of TCR clone 37042 (TRBV11-3, TRBJ2-3)
LGTRPCISVPAAPITDTQYF

SEQ ID NO: 74085 - protein, 13 aa, Homo sapiens
  CDR3 for alpha chain variable domain of TCR clone 37043 (TRAV12-2, TRAJ6)
CAVNVSRKLHTCI

SEQ ID NO: 74086 - protein, 12 aa, Homo sapiens
  CDR3 for beta chain variable domain of TCR clone 37043 (TRBV29-1, TRBJ2-3)
CSVTGGADTQYF

SEQ ID NO: 74087 - protein, 12 aa, Homo sapiens
  CDR3 for alpha chain variable domain of TCR clone 37044 (TRAV35, TRAJ39)
LAPNNAGNMLTF

SEQ ID NO: 74088 - protein, 17 aa, Homo sapiens
  CDR3 for beta chain variable domain of TCR clone 37044 (TRBV7-3, TRBJ2-3)
CASSLMKRMRGADTQYF

SEQ ID NO: 74089 - protein, 14 aa, Homo sapiens
  CDR3 for alpha chain variable domain of TCR clone 37045 (TRAV12-1, TRAJ43)
CVVNGRSNNNDMRF

SEQ ID NO: 74090 - protein, 13 aa, Homo sapiens
  CDR3 for beta chain variable domain of TCR clone 37045 (TRBV27, TRBJ1-1)
CASSLSSGAEAFF

SEQ ID NO: 74091 - protein, 14 aa, Homo sapiens
  CDR3 for alpha chain variable domain of TCR clone 37046 (TRAV38-1, TRAJ40)
CALRPTSGTYKYIF

SEQ ID NO: 74092 - protein, 16 aa, Homo sapiens
  CDR3 for beta chain variable domain of TCR clone 37046 (TRBV7-3, TRBJ2-1)
CASSLEGYRSYNEQFF

SEQ ID NO: 74093 - protein, 17 aa, Homo sapiens
  CDR3 for alpha chain variable domain of TCR clone 37047 (TRAV3, TRAJ6)
CAVRDGPRAGGSYIPTF

SEQ ID NO: 74094 - protein, 15 aa, Homo sapiens
  CDR3 for beta chain variable domain of TCR clone 37047 (TRBV7-2, TRBJ2-3)
CASSSTGLETDTQYF

SEQ ID NO: 74095 - protein, 11 aa, Homo sapiens
  CDR3 for alpha chain variable domain of TCR clone 37048 (TRAV1-1, TRAJ20)
CAVFNDYKLSF

SEQ ID NO: 74096 - protein, 14 aa, Homo sapiens
  CDR3 for beta chain variable domain of TCR clone 37048 (TRBV23-1, TRBJ2-5)
CASSFLRSQETQYF

SEQ ID NO: 74097 - protein, 14 aa, Homo sapiens
  CDR3 for alpha chain variable domain of TCR clone 37049 (TRAV1-2, TRAJ16)
CAVDRFSDGQKLLF

SEQ ID NO: 74098 - protein, 13 aa, Homo sapiens
  CDR3 for beta chain variable domain of TCR clone 37049 (TRBV10-3, TRBJ1-2)
CAISERDSYGYTF

SEQ ID NO: 74099 - protein, 14 aa, Homo sapiens
  CDR3 for alpha chain variable domain of TCR clone 37050 (TRAV23/DV6, TRAJ4)
CAAPSSGVYNKLIF

SEQ ID NO: 74100 - protein, 16 aa, Homo sapiens
  CDR3 for beta chain variable domain of TCR clone 37050 (TRBV19, TRBJ1-1)
CASRFGGPVTGTEAFF

SEQ ID NO: 74101 - protein, 14 aa, Homo sapiens
  CDR3 for alpha chain variable domain of TCR clone 37051 (TRAV26-1, TRAJ38)
CIADNAGNNRKLIW

SEQ ID NO: 74102 - protein, 15 aa, Homo sapiens
  CDR3 for beta chain variable domain of TCR clone 37051 (TRBV5-1, TRBJ2-1)
CASSPPRAPYNEQFF

SEQ ID NO: 74103 - protein, 14 aa, Homo sapiens
  CDR3 for alpha chain variable domain of TCR clone 37052 (TRAV8-6, TRAJ49)
CAVSDPNTGNQFYF

SEQ ID NO: 74104 - protein, 14 aa, Homo sapiens
  CDR3 for beta chain variable domain of TCR clone 37052 (TRBV12-4, TRBJ1-1)
CASSLGTGGTEAFF

SEQ ID NO: 74105 - protein, 14 aa, Homo sapiens
  CDR3 for alpha chain variable domain of TCR clone 37053 (TRAV17, TRAJ31)
CATALRNNNARLMF

SEQ ID NO: 74106 - protein, 14 aa, Homo sapiens
  CDR3 for beta chain variable domain of TCR clone 37053 (TRBV12-4, TRBJ2-5)
CASSLWQKQETQYF

SEQ ID NO: 74107 - protein, 15 aa, Homo sapiens
  CDR3 for alpha chain variable domain of TCR clone 37054 (TRAV17, TRAJ22)
CATVAPSGSARQLTF

SEQ ID NO: 74108 - protein, 16 aa, Homo sapiens
  CDR3 for beta chain variable domain of TCR clone 37054 (TRBV10-3, TRBJ2-7)
CAISADLADRPYEQYF

SEQ ID NO: 74109 - protein, 14 aa, Homo sapiens
  CDR3 for alpha chain variable domain of TCR clone 37055 (TRAV35, TRAJ22)
CAGLRPGSARKLTF

SEQ ID NO: 74110 - protein, 15 aa, Homo sapiens
  CDR3 for beta chain variable domain of TCR clone 37055 (TRBV12-4, TRBJ2-5)
CASSPPTGLQETQYF

SEQ ID NO: 74111 - protein, 11 aa, Homo sapiens
  CDR3 for alpha chain variable domain of TCR clone 37056 (TRAV21, TRAJ34)
CAVTNTDKLIF

SEQ ID NO: 74112 - protein, 13 aa, Homo sapiens
  CDR3 for beta chain variable domain of TCR clone 37056 (TRBV7-2, TRBJ2-2)
CASSLAVTGELFF

SEQ ID NO: 74113 - protein, 12 aa, Homo sapiens
  CDR3 for alpha chain variable domain of TCR clone 37057 (TRAV26-2, TRAJ43)
CILAHNNNDMRF

SEQ ID NO: 74114 - protein, 14 aa, Homo sapiens
  CDR3 for beta chain variable domain of TCR clone 37057 (TRBV19, TRBJ2-1)
CASPTFVLSGEQFF

SEQ ID NO: 74115 - protein, 10 aa, Homo sapiens
  CDR3 for alpha chain variable domain of TCR clone 37058 (TRAV1-2, TRAJ31)
CVSEDARLMF

SEQ ID NO: 74116 - protein, 14 aa, Homo sapiens
  CDR3 for beta chain variable domain of TCR clone 37058 (TRBV19, TRBJ2-1)
CASPTFVLSGEKFF

SEQ ID NO: 74117 - protein, 12 aa, Homo sapiens
  CDR3 for alpha chain variable domain of TCR clone 37059 (TRAV13-1, TRAJ15)
CAASQAGTALIF

SEQ ID NO: 74118 - protein, 18 aa, Homo sapiens
  CDR3 for beta chain variable domain of TCR clone 37059 (TRBV7-9, TRBJ2-3)
CASSLPVNGQISTDTQYF

SEQ ID NO: 74119 - protein, 14 aa, Homo sapiens
  CDR3 for alpha chain variable domain of TCR clone 37060 (TRAV12-2, TRAJ53)
CAVKRGGSNYKLTF

SEQ ID NO: 74120 - protein, 14 aa, Homo sapiens
  CDR3 for beta chain variable domain of TCR clone 37060 (TRBV19, TRBJ2-1)
RASPTFVLSGEQFF

SEQ ID NO: 74121 - protein, 15 aa, Homo sapiens
  CDR3 for alpha chain variable domain of TCR clone 37061 (TRAV25, TRAJ52)
CAGLPGGTSYGKLTF

SEQ ID NO: 74122 - protein, 17 aa, Homo sapiens
  CDR3 for beta chain variable domain of TCR clone 37061 (TRBV7-8, TRBJ2-6)
CASSAGTGGAGANVLTF

SEQ ID NO: 74123 - protein, 10 aa, Homo sapiens
  CDR3 for alpha chain variable domain of TCR clone 37062 (TRAV38-1, TRAJ37)
CAFIHGSGNT

SEQ ID NO: 74124 - protein, 12 aa, Homo sapiens
  CDR3 for beta chain variable domain of TCR clone 37062 (TRBV7-9, TRBJ2-7)
CASSFGSYEQYF

SEQ ID NO: 74125 - protein, 10 aa, Homo sapiens
  CDR3 for alpha chain variable domain of TCR clone 37063 (TRAV4, )
CLVGPITMIS

SEQ ID NO: 74126 - protein, 17 aa, Homo sapiens
  CDR3 for beta chain variable domain of TCR clone 37063 (TRBV24-1, TRBJ2-1)
CATSDVSTSGTYNEQFF

SEQ ID NO: 74127 - protein, 16 aa, Homo sapiens
  CDR3 for alpha chain variable domain of TCR clone 37064 (TRAV26-1, TRAJ45)
CIVEKYSGGGADGLTF

SEQ ID NO: 74128 - protein, 13 aa, Homo sapiens
  CDR3 for beta chain variable domain of TCR clone 37064 (TRBV25-1, TRBJ2-5)
CASSESGRETQYF

SEQ ID NO: 74129 - protein, 18 aa, Homo sapiens
  CDR3 for alpha chain variable domain of TCR clone 37065 (TRAV26-1, TRAJ22)
FIVRVALISSGSARQLTF

SEQ ID NO: 74130 - protein, 13 aa, Homo sapiens
  CDR3 for beta chain variable domain of TCR clone 37065 (TRBV13, TRBJ2-5)
CASSPEVGETQYF

SEQ ID NO: 74131 - protein, 18 aa, Homo sapiens
  CDR3 for alpha chain variable domain of TCR clone 37066 (TRAV26-1, TRAJ22)
CIVRVALISSGSARQLTF

SEQ ID NO: 74132 - protein, 13 aa, Homo sapiens
  CDR3 for beta chain variable domain of TCR clone 37066 (TRBV13, TRBJ2-5)
CASSPEAGETQYF

SEQ ID NO: 74133 - protein, 11 aa, Homo sapiens
  CDR3 for alpha chain variable domain of TCR clone 37067 (TRAV29/DV5, TRAJ31)
CAAINNARLMF

SEQ ID NO: 74134 - protein, 20 aa, Homo sapiens
  CDR3 for beta chain variable domain of TCR clone 37067 (TRBV19, TRBJ2-1)
CASSISRTVTSTRLNNEQFF

SEQ ID NO: 74135 - protein, 11 aa, Homo sapiens
  CDR3 for alpha chain variable domain of TCR clone 37068 (TRAV13-1, TRAJ40)
CAVSGTYKYIF

SEQ ID NO: 74136 - protein, 13 aa, Homo sapiens
  CDR3 for beta chain variable domain of TCR clone 37068 (TRBV19, TRBJ1-5)
CASSIGGNQTQHF

SEQ ID NO: 74137 - protein, 16 aa, Homo sapiens
  CDR3 for alpha chain variable domain of TCR clone 37069 (TRAV13-1, TRAJ4)
CAASGIWSGGYNKLIF

SEQ ID NO: 74138 - protein, 11 aa, Homo sapiens
  CDR3 for beta chain variable domain of TCR clone 37069 (TRBV19, TRBJ1-1)
CASSIGSEAFF

SEQ ID NO: 74139 - protein, 13 aa, Homo sapiens
  CDR3 for alpha chain variable domain of TCR clone 37070 (TRAV12-1, TRAJ34)
CVVTGYNTDKLIF

SEQ ID NO: 74140 - protein, 11 aa, Homo sapiens
  CDR3 for beta chain variable domain of TCR clone 37070 (TRBV29-1, TRBJ2-5)
CSEDRTGTQYF

SEQ ID NO: 74141 - protein, 12 aa, Homo sapiens
  CDR3 for alpha chain variable domain of TCR clone 37071 (TRAV35, TRAJ30)
CAGQLADDKIIF

SEQ ID NO: 74142 - protein, 17 aa, Homo sapiens
  CDR3 for beta chain variable domain of TCR clone 37071 (TRBV4-2, TRBJ2-5)
CARSPGRWRNFQETQYF

SEQ ID NO: 74143 - protein, 14 aa, Homo sapiens
  CDR3 for alpha chain variable domain of TCR clone 37072 (TRAV17, TRAJ31)
CATVLRNNNARLMF

SEQ ID NO: 74144 - protein, 15 aa, Homo sapiens
  CDR3 for beta chain variable domain of TCR clone 37072 (TRBV18, TRBJ1-1)
CASSGRTGEVTEAFF

SEQ ID NO: 74145 - protein, 14 aa, Homo sapiens
  CDR3 for alpha chain variable domain of TCR clone 37073 (TRAV16, TRAJ39)
CALSKNNAGNMLTF

SEQ ID NO: 74146 - protein, 17 aa, Homo sapiens
  CDR3 for beta chain variable domain of TCR clone 37073 (TRBV23-1, TRBJ1-2)
CASSNTGCGLLWLHLRF

SEQ ID NO: 74147 - protein, 16 aa, Homo sapiens
  CDR3 for alpha chain variable domain of TCR clone 37074 (TRAV1-2, TRAJ10)
CAVRGVLTGGGNKLTF

SEQ ID NO: 74148 - protein, 12 aa, Homo sapiens
  CDR3 for beta chain variable domain of TCR clone 37074 (TRBV7-8, TRBJ2-7)
CASSVGDREQYF

SEQ ID NO: 74149 - protein, 18 aa, Homo sapiens
  CDR3 for alpha chain variable domain of TCR clone 37075 (TRAV13-1, TRAJ52)
CAAKNPNAGGTSYGKLTF

SEQ ID NO: 74150 - protein, 16 aa, Homo sapiens
  CDR3 for beta chain variable domain of TCR clone 37075 (TRBV29-1, TRBJ2-7)
CSVEVVGTSGSYEQYF

SEQ ID NO: 74151 - protein, 14 aa, Homo sapiens
  CDR3 for alpha chain variable domain of TCR clone 37076 (TRAV12-1, TRAJ30)
CVVNIGNRDDKIIF

SEQ ID NO: 74152 - protein, 14 aa, Homo sapiens
  CDR3 for beta chain variable domain of TCR clone 37076 (TRBV7-9, TRBJ2-5)
CASSPRSSGETQYF

SEQ ID NO: 74153 - protein, 12 aa, Homo sapiens
  CDR3 for alpha chain variable domain of TCR clone 37077 (TRAV26-1, TRAJ36)
CIVRVRADNLFF

SEQ ID NO: 74154 - protein, 13 aa, Homo sapiens
  CDR3 for beta chain variable domain of TCR clone 37077 (TRBV11-3, TRBJ2-5)
CASSRGPSETQYF

SEQ ID NO: 74155 - protein, 13 aa, Homo sapiens
  CDR3 for alpha chain variable domain of TCR clone 37078 (TRAV8-3, TRAJ28)
CAVGAVGSHQLTF

SEQ ID NO: 74156 - protein, 15 aa, Homo sapiens
  CDR3 for beta chain variable domain of TCR clone 37078 (TRBV7-9, TRBJ1-5)
CASSQGHQPNQPQHF

SEQ ID NO: 74157 - protein, 17 aa, Homo sapiens
  CDR3 for alpha chain variable domain of TCR clone 37079 (TRAV13-1, TRAJ41)
CAASGPRRTQIPDIQNP

SEQ ID NO: 74158 - protein, 16 aa, Homo sapiens
  CDR3 for beta chain variable domain of TCR clone 37079 (TRBV18, TRBJ2-3)
CASSPPAGGPRKYAVF

SEQ ID NO: 74159 - protein, 17 aa, Homo sapiens
  CDR3 for alpha chain variable domain of TCR clone 37080 (TRAV3, TRAJ42)
CAVRDRDYGGSQGNLIL

SEQ ID NO: 74160 - protein, 13 aa, Homo sapiens
  CDR3 for beta chain variable domain of TCR clone 37080 (TRBV10-3, TRBJ2-7)
CASKLAVNYEQYF

SEQ ID NO: 74161 - protein, 22 aa, Homo sapiens
  CDR3 for alpha chain variable domain of TCR clone 37081 (TRAV8-3, TRAJ32)
CAVEVVLQTSSSLELALCLLSS

SEQ ID NO: 74162 - protein, 12 aa, Homo sapiens
  CDR3 for beta chain variable domain of TCR clone 37081 (TRBV7-8, TRBJ2-7)
CASSLGDRGQYF

SEQ ID NO: 74163 - protein, 15 aa, Homo sapiens
  CDR3 for alpha chain variable domain of TCR clone 37082 (TRAV12-2, TRAJ53)
CAVNGGGGSNYKLTF

SEQ ID NO: 74164 - protein, 13 aa, Homo sapiens
  CDR3 for beta chain variable domain of TCR clone 37082 (TRBV3-1, TRBJ1-1)
CANSPGVITEAFF

SEQ ID NO: 74165 - protein, 14 aa, Homo sapiens
  CDR3 for alpha chain variable domain of TCR clone 37083 (TRAV3, TRAJ20)
CCERHKLSDYKLSF

SEQ ID NO: 74166 - protein, 16 aa, Homo sapiens
  CDR3 for beta chain variable domain of TCR clone 37083 (TRBV20-1, TRBJ1-4)
CSAPGQGLLTNEKLFF

SEQ ID NO: 74167 - protein, 15 aa, Homo sapiens
  CDR3 for alpha chain variable domain of TCR clone 37084 (TRAV3, TRAJ47)
CAVRYIGEYGNKLVF

SEQ ID NO: 74168 - protein, 14 aa, Homo sapiens
  CDR3 for beta chain variable domain of TCR clone 37084 (TRBV13, TRBJ2-5)
CASSLERVGETQYF

SEQ ID NO: 74169 - protein, 16 aa, Homo sapiens
  CDR3 for alpha chain variable domain of TCR clone 37085 (TRAV4, TRAJ5)
CLVGPDHGHGQESTYF

SEQ ID NO: 74170 - protein, 14 aa, Homo sapiens
  CDR3 for beta chain variable domain of TCR clone 37085 (TRBV27, TRBJ2-5)
CQQFNTFWGETQYF

SEQ ID NO: 74171 - protein, 14 aa, Homo sapiens
  CDR3 for alpha chain variable domain of TCR clone 37086 (TRAV8-2, TRAJ11)
CVVSEKSGYSTLTF

SEQ ID NO: 74172 - protein, 13 aa, Homo sapiens
  CDR3 for beta chain variable domain of TCR clone 37086 (TRBV10-2, TRBJ2-7)
CASGTSGGYEQYF

SEQ ID NO: 74173 - protein, 16 aa, Homo sapiens
  CDR3 for alpha chain variable domain of TCR clone 37087 (TRAV21, TRAJ17)
CAVRPGEEAAGNKLTF

SEQ ID NO: 74174 - protein, 16 aa, Homo sapiens
  CDR3 for beta chain variable domain of TCR clone 37087 (TRBV2, TRBJ2-7)
CASSEPWTGPTYEQYF

SEQ ID NO: 74175 - protein, 15 aa, Homo sapiens
  CDR3 for alpha chain variable domain of TCR clone 37088 (TRAV21, TRAJ53)
CATLNSGGSNYKLTL

SEQ ID NO: 74176 - protein, 16 aa, Homo sapiens
  CDR3 for beta chain variable domain of TCR clone 37088 (TRBV12-4, TRBJ1-5)
CASSRPVGGSNQPQHF

SEQ ID NO: 74177 - protein, 12 aa, Homo sapiens
  CDR3 for alpha chain variable domain of TCR clone 37089 (TRAV13-1, TRAJ49)
CAAPNTGNQFYF

SEQ ID NO: 74178 - protein, 17 aa, Homo sapiens
  CDR3 for beta chain variable domain of TCR clone 37089 (TRBV25-1, TRBJ2-7)
CSSSDARVVFSSYEQYF

SEQ ID NO: 74179 - protein, 12 aa, Homo sapiens
  CDR3 for alpha chain variable domain of TCR clone 37090 (TRAV16, TRAJ10)
CSRTGGGNKLTF

SEQ ID NO: 74180 - protein, 12 aa, Homo sapiens
  CDR3 for beta chain variable domain of TCR clone 37090 (TRBV11-3, TRBJ1-1)
CASSHRQGEAFS

SEQ ID NO: 74181 - protein, 20 aa, Homo sapiens
  CDR3 for alpha chain variable domain of TCR clone 37091 (TRAV8-3, TRAJ45)
LSTSVLWGSYSGGGADGLTF

SEQ ID NO: 74182 - protein, 11 aa, Homo sapiens
  CDR3 for beta chain variable domain of TCR clone 37091 (TRBV20-1, TRBJ2-5)
CRADRAETQYF

SEQ ID NO: 74183 - protein, 16 aa, Homo sapiens
  CDR3 for alpha chain variable domain of TCR clone 37092 (TRAV3, TRAJ37)
CAVRPHGSGNTGKLIL

SEQ ID NO: 74184 - protein, 15 aa, Homo sapiens
  CDR3 for beta chain variable domain of TCR clone 37092 (TRBV20-1, TRBJ2-7)
CSARDRVSGMDEQYF

SEQ ID NO: 74185 - protein, 13 aa, Homo sapiens
  CDR3 for alpha chain variable domain of TCR clone 37093 (TRAV30, TRAJ39)
CGTKKNAGNMLTF

SEQ ID NO: 74186 - protein, 12 aa, Homo sapiens
  CDR3 for beta chain variable domain of TCR clone 37093 (TRBV12-4, TRBJ2-5)
CASSSAQETQYF

SEQ ID NO: 74187 - protein, 14 aa, Homo sapiens
  CDR3 for alpha chain variable domain of TCR clone 37094 (TRAV12-2, TRAJ13)
CAVKKTGGYQKVTF

SEQ ID NO: 74188 - protein, 14 aa, Homo sapiens
  CDR3 for beta chain variable domain of TCR clone 37094 (TRBV10-3, TRBJ2-1)
RAISSDLAYNEQFF

SEQ ID NO: 74189 - protein, 18 aa, Homo sapiens
  CDR3 for alpha chain variable domain of TCR clone 37095 (TRAV21, TRAJ52)
CAVRPSPAGGTSYGKLTF

SEQ ID NO: 74190 - protein, 13 aa, Homo sapiens
  CDR3 for beta chain variable domain of TCR clone 37095 (TRBV7-3, TRBJ1-1)
CASSQDWRAEAFF

SEQ ID NO: 74191 - protein, 12 aa, Homo sapiens
  CDR3 for alpha chain variable domain of TCR clone 37096 (TRAV17, TRAJ12)
CATLRSSYRLIF

SEQ ID NO: 74192 - protein, 16 aa, Homo sapiens
  CDR3 for beta chain variable domain of TCR clone 37096 (TRBV28, TRBJ2-7)
CASSLFFETGGPEQYF

SEQ ID NO: 74193 - protein, 11 aa, Homo sapiens
  CDR3 for alpha chain variable domain of TCR clone 37097 (TRAV21, TRAJ34)
CAHYNTDKLIF

SEQ ID NO: 74194 - protein, 13 aa, Homo sapiens
  CDR3 for beta chain variable domain of TCR clone 37097 (TRBV7-6, TRBJ1-2)
CASILVADYGYTF

SEQ ID NO: 74195 - protein, 13 aa, Homo sapiens
  CDR3 for alpha chain variable domain of TCR clone 37098 (TRAV35, TRAJ42)
RAGFPGSQGNLIF

SEQ ID NO: 74196 - protein, 14 aa, Homo sapiens
  CDR3 for beta chain variable domain of TCR clone 37098 (TRBV4-1, TRBJ2-2)
CASSQAVNTGELFF

SEQ ID NO: 74197 - protein, 14 aa, Homo sapiens
  CDR3 for alpha chain variable domain of TCR clone 37099 (TRAV3, TRAJ27)
CAVRDDTNAGKSTF

SEQ ID NO: 74198 - protein, 15 aa, Homo sapiens
  CDR3 for beta chain variable domain of TCR clone 37099 (TRBV7-7, TRBJ2-2)
CASSKLAKNTGELFF

SEQ ID NO: 74199 - protein, 14 aa, Homo sapiens
  CDR3 for alpha chain variable domain of TCR clone 37100 (TRAV30, TRAJ33)
CGTVAPRSNYQLIW

SEQ ID NO: 74200 - protein, 12 aa, Homo sapiens
  CDR3 for beta chain variable domain of TCR clone 37100 (TRBV7-8, TRBJ2-7)
CASSLGDREQYF

SEQ ID NO: 74201 - protein, 13 aa, Homo sapiens
  CDR3 for alpha chain variable domain of TCR clone 37101 (TRAV12-3, TRAJ33)
CAMSVNSNYQLIW

SEQ ID NO: 74202 - protein, 17 aa, Homo sapiens
  CDR3 for beta chain variable domain of TCR clone 37101 (TRBV20-1, TRBJ2-2)
CSASGSGQGGLTGELFF

SEQ ID NO: 74203 - protein, 12 aa, Homo sapiens
  CDR3 for alpha chain variable domain of TCR clone 37102 (TRAV17, TRAJ57)
CATDGGAEKLVF

SEQ ID NO: 74204 - protein, 12 aa, Homo sapiens
  CDR3 for beta chain variable domain of TCR clone 37102 (TRBV29-1, TRBJ2-2)
CSVDKYTGELFF

SEQ ID NO: 74205 - protein, 16 aa, Homo sapiens
  CDR3 for alpha chain variable domain of TCR clone 37103 (TRAV3, TRAJ37)
CAVRVRGSGNTGKLIF

SEQ ID NO: 74206 - protein, 12 aa, Homo sapiens
  CDR3 for beta chain variable domain of TCR clone 37103 (TRBV11-2, TRBJ2-2)
CASSLGGGELFF

SEQ ID NO: 74207 - protein, 15 aa, Homo sapiens
  CDR3 for alpha chain variable domain of TCR clone 37104 (TRAV17, TRAJ23)
CATDAEDNQGGKLIS

SEQ ID NO: 74208 - protein, 12 aa, Homo sapiens
  CDR3 for beta chain variable domain of TCR clone 37104 (TRBV2, TRBJ2-1)
CAKREGYNEQFF

SEQ ID NO: 74209 - protein, 14 aa, Homo sapiens
  CDR3 for alpha chain variable domain of TCR clone 37105 (TRAV12-2, TRAJ13)
CAVKKAGGYQKVTF

SEQ ID NO: 74210 - protein, 15 aa, Homo sapiens
  CDR3 for beta chain variable domain of TCR clone 37105 (TRBV27, TRBJ2-1)
CASSNGGGYSNEQFF

SEQ ID NO: 74211 - protein, 20 aa, Homo sapiens
  CDR3 for alpha chain variable domain of TCR clone 37106 (TRAV26-1, TRAJ42)
CCVLLHRQTYYGGSQGNLIF

SEQ ID NO: 74212 - protein, 16 aa, Homo sapiens
  CDR3 for beta chain variable domain of TCR clone 37106 (TRBV7-3, TRBJ2-2)
CASSSKRGTLSGELFF

SEQ ID NO: 74213 - protein, 17 aa, Homo sapiens
  CDR3 for alpha chain variable domain of TCR clone 37107 (TRAV4, TRAJ18)
CLAGERSVGSTLGRLYF

SEQ ID NO: 74214 - protein, 14 aa, Homo sapiens
  CDR3 for beta chain variable domain of TCR clone 37107 (TRBV6-5, TRBJ1-2)
CASSYDGTGGGYTF

SEQ ID NO: 74215 - protein, 14 aa, Homo sapiens
  CDR3 for alpha chain variable domain of TCR clone 37108 (TRAV12-2, TRAJ13)
CAVKKTGGSQKVTF

SEQ ID NO: 74216 - protein, 15 aa, Homo sapiens
  CDR3 for beta chain variable domain of TCR clone 37108 (TRBV27, TRBJ2-1)
CASSNGGRSSNEHFF

SEQ ID NO: 74217 - protein, 11 aa, Homo sapiens
  CDR3 for alpha chain variable domain of TCR clone 37109 (TRAV12-1, TRAJ30)
CVVNGQDKIIF

SEQ ID NO: 74218 - protein, 13 aa, Homo sapiens
  CDR3 for beta chain variable domain of TCR clone 37109 (TRBV10-3, TRBJ2-7)
CASKLAVNYEQYF

SEQ ID NO: 74219 - protein, 16 aa, Homo sapiens
  CDR3 for alpha chain variable domain of TCR clone 37110 (TRAV23/DV6, TRAJ9)
CAASIGGNAGGFKTIF

SEQ ID NO: 74220 - protein, 14 aa, Homo sapiens
  CDR3 for beta chain variable domain of TCR clone 37110 (TRBV9, TRBJ2-7)
CASSVGVGSYEQYF

SEQ ID NO: 74221 - protein, 16 aa, Homo sapiens
  CDR3 for alpha chain variable domain of TCR clone 37111 (TRAV16, TRAJ4)
CALSHMFSGGYNKLIF

SEQ ID NO: 74222 - protein, 16 aa, Homo sapiens
  CDR3 for beta chain variable domain of TCR clone 37111 (TRBV24-1, TRBJ2-3)
CATSDPGTGATDTQYF

SEQ ID NO: 74223 - protein, 13 aa, Homo sapiens
  CDR3 for alpha chain variable domain of TCR clone 37112 (TRAV2, TRAJ29)
CAAQNSGNTPLVF

SEQ ID NO: 74224 - protein, 14 aa, Homo sapiens
  CDR3 for beta chain variable domain of TCR clone 37112 (TRBV7-9, TRBJ2-4)
CASSIAMGGNIQYF

SEQ ID NO: 74225 - protein, 20 aa, Homo sapiens
  CDR3 for alpha chain variable domain of TCR clone 37113 (TRAV26-1, TRAJ42)
CCVLLHRQTHYGGSQGNLIF

SEQ ID NO: 74226 - protein, 16 aa, Homo sapiens
  CDR3 for beta chain variable domain of TCR clone 37113 (TRBV7-3, TRBJ2-2)
CASSLKRGTLSGELFF

SEQ ID NO: 74227 - protein, 14 aa, Homo sapiens
  CDR3 for alpha chain variable domain of TCR clone 37114 (TRAV12-2, TRAJ45)
CALPERGGADGLTF

SEQ ID NO: 74228 - protein, 14 aa, Homo sapiens
  CDR3 for beta chain variable domain of TCR clone 37114 (TRBV18, TRBJ1-5)
CASPPGNSNQPQHF

SEQ ID NO: 74229 - protein, 13 aa, Homo sapiens
  CDR3 for alpha chain variable domain of TCR clone 37115 (TRAV24, TRAJ31)
CASLDGNNARLMF

SEQ ID NO: 74230 - protein, 15 aa, Homo sapiens
  CDR3 for beta chain variable domain of TCR clone 37115 (TRBV5-1, TRBJ2-3)
CASSLETASTDTQYF

SEQ ID NO: 74231 - protein, 12 aa, Homo sapiens
  CDR3 for alpha chain variable domain of TCR clone 37116 (TRAV35, TRAJ30)
CAGLNRDDKVIF

SEQ ID NO: 74232 - protein, 15 aa, Homo sapiens
  CDR3 for beta chain variable domain of TCR clone 37116 (TRBV18, TRBJ2-3)
CASSPLAGETDTQYF

SEQ ID NO: 74233 - protein, 15 aa, Homo sapiens
  CDR3 for alpha chain variable domain of TCR clone 37117 (TRAV8-3, TRAJ11)
CAVGLLNSGYSTLTF

SEQ ID NO: 74234 - protein, 16 aa, Homo sapiens
  CDR3 for beta chain variable domain of TCR clone 37117 (TRBV7-9, TRBJ1-2)
CASSLGFSSGEDGYTC

SEQ ID NO: 74235 - protein, 15 aa, Homo sapiens
  CDR3 for alpha chain variable domain of TCR clone 37118 (TRAV3, TRAJ5)
CAVRDLDTGRRALTF

SEQ ID NO: 74236 - protein, 14 aa, Homo sapiens
  CDR3 for beta chain variable domain of TCR clone 37118 (TRBV7-2, TRBJ2-7)
CASSPKTSFYEQYF

SEQ ID NO: 74237 - protein, 14 aa, Homo sapiens
  CDR3 for alpha chain variable domain of TCR clone 37119 (TRAV2, TRAJ9)
CAVKDRSGGFKTIF

SEQ ID NO: 74238 - protein, 18 aa, Homo sapiens
  CDR3 for beta chain variable domain of TCR clone 37119 (TRBV20-1, TRBJ2-5)
CSQTGDSGRLGGKETQYF

SEQ ID NO: 74239 - protein, 12 aa, Homo sapiens
  CDR3 for alpha chain variable domain of TCR clone 37120 (TRAV12-3, TRAJ17)
CAMTLTGNKLTF

SEQ ID NO: 74240 - protein, 13 aa, Homo sapiens
  CDR3 for beta chain variable domain of TCR clone 37120 (TRBV12-4, TRBJ2-5)
CASSLGGSRTQYF

SEQ ID NO: 74241 - protein, 14 aa, Homo sapiens
  CDR3 for alpha chain variable domain of TCR clone 37121 (TRAV29/DV5, TRAJ32)
CAASQGGATNKLIF

SEQ ID NO: 74242 - protein, 13 aa, Homo sapiens
  CDR3 for beta chain variable domain of TCR clone 37121 (TRBV7-9, TRBJ1-2)
CASSLKQNYGYTF

SEQ ID NO: 74243 - protein, 10 aa, Homo sapiens
  CDR3 for alpha chain variable domain of TCR clone 37122 (TRAV12-2, TRAJ10)
CAAWTGVETH

SEQ ID NO: 74244 - protein, 17 aa, Homo sapiens
  CDR3 for beta chain variable domain of TCR clone 37122 (TRBV11-2, TRBJ2-1)
CASSLYPPGVEYNEQFF

SEQ ID NO: 74245 - protein, 11 aa, Homo sapiens
  CDR3 for alpha chain variable domain of TCR clone 37123 (TRAV1-1, TRAJ23)
CAVRQGGKLIC

SEQ ID NO: 74246 - protein, 20 aa, Homo sapiens
  CDR3 for beta chain variable domain of TCR clone 37123 (TRBV7-8, TRBJ2-2)
CASSHLFPGPTIHITGELFF

SEQ ID NO: 74247 - protein, 13 aa, Homo sapiens
  CDR3 for alpha chain variable domain of TCR clone 37124 (TRAV2, TRAJ15)
CAVSSQAGTALIF

SEQ ID NO: 74248 - protein, 16 aa, Homo sapiens
  CDR3 for beta chain variable domain of TCR clone 37124 (TRBV5-1, TRBJ1-1)
CASSSGGNSLNTEAFF

SEQ ID NO: 74249 - protein, 17 aa, Homo sapiens
  CDR3 for alpha chain variable domain of TCR clone 37125 (TRAV8-6, TRAJ52)
CAVARNAGGTSYGKLTF

SEQ ID NO: 74250 - protein, 13 aa, Homo sapiens
  CDR3 for beta chain variable domain of TCR clone 37125 (TRBV7-9, TRBJ1-2)
CASSLKQNYGYTF

SEQ ID NO: 74251 - protein, 17 aa, Homo sapiens
  CDR3 for alpha chain variable domain of TCR clone 37126 (TRAV26-2, TRAJ52)
CILSSSSGGTSYRKLTF

SEQ ID NO: 74252 - protein, 11 aa, Homo sapiens
  CDR3 for beta chain variable domain of TCR clone 37126 (TRBV19, TRBJ1-1)
CATLRNTEAFF

SEQ ID NO: 74253 - protein, 14 aa, Homo sapiens
  CDR3 for alpha chain variable domain of TCR clone 37127 (TRAV12-1, TRAJ17)
CVVNYKVAGNKLTF

SEQ ID NO: 74254 - protein, 17 aa, Homo sapiens
  CDR3 for beta chain variable domain of TCR clone 37127 (TRBV20-1, TRBJ2-1)
CSASSSGLAGSYNEQFF

SEQ ID NO: 74255 - protein, 12 aa, Homo sapiens
  CDR3 for alpha chain variable domain of TCR clone 37128 (TRAV20, TRAJ39)
CAVGNAGNMLTF

SEQ ID NO: 74256 - protein, 16 aa, Homo sapiens
  CDR3 for beta chain variable domain of TCR clone 37128 (TRBV15, TRBJ1-2)
CATSRGPRTGGGGYTF

SEQ ID NO: 74257 - protein, 16 aa, Homo sapiens
  CDR3 for alpha chain variable domain of TCR clone 37129 (TRAV8-3, TRAJ18)
CAVGGRQRLNPGEAIL

SEQ ID NO: 74258 - protein, 12 aa, Homo sapiens
  CDR3 for beta chain variable domain of TCR clone 37129 (TRBV28, TRBJ2-6)
CAIQAGANVLTF

SEQ ID NO: 74259 - protein, 14 aa, Homo sapiens
  CDR3 for alpha chain variable domain of TCR clone 37130 (TRAV4, TRAJ17)
CLVGDMAAGNELTF

SEQ ID NO: 74260 - protein, 14 aa, Homo sapiens
  CDR3 for beta chain variable domain of TCR clone 37130 (TRBV4-1, TRBJ2-7)
CASSPVAGGDEQYF

SEQ ID NO: 74261 - protein, 15 aa, Homo sapiens
  CDR3 for alpha chain variable domain of TCR clone 37131 (TRAV25, TRAJ53)
CPTSNSGGSNYRLTF

SEQ ID NO: 74262 - protein, 14 aa, Homo sapiens
  CDR3 for beta chain variable domain of TCR clone 37131 (TRBV11-2, TRBJ2-3)
CASSRLARTDTQYF

SEQ ID NO: 74263 - protein, 13 aa, Homo sapiens
  CDR3 for alpha chain variable domain of TCR clone 37132 (TRAV2, TRAJ15)
CAVASQAGTALIF

SEQ ID NO: 74264 - protein, 16 aa, Homo sapiens
  CDR3 for beta chain variable domain of TCR clone 37132 (TRBV5-1, TRBJ1-1)
CASSPGGNSLNTEAFF

SEQ ID NO: 74265 - protein, 11 aa, Homo sapiens
  CDR3 for alpha chain variable domain of TCR clone 37133 (TRAV3, TRAJ13)
FAVTSYQKVTF

SEQ ID NO: 74266 - protein, 15 aa, Homo sapiens
  CDR3 for beta chain variable domain of TCR clone 37133 (TRBV7-9, TRBJ2-7)
CASSSSGLAVYEQYF

SEQ ID NO: 74267 - protein, 15 aa, Homo sapiens
  CDR3 for alpha chain variable domain of TCR clone 37134 (TRAV3, TRAJ36)
CAVRASQTGANNLFF

SEQ ID NO: 74268 - protein, 15 aa, Homo sapiens
  CDR3 for beta chain variable domain of TCR clone 37134 (TRBV3-1, TRBJ2-1)
CVSSQDYTPRGEQFF

SEQ ID NO: 74269 - protein, 15 aa, Homo sapiens
  CDR3 for alpha chain variable domain of TCR clone 37135 (TRAV17, TRAJ57)
CATGPSQGGSEKLVF

SEQ ID NO: 74270 - protein, 11 aa, Homo sapiens
  CDR3 for beta chain variable domain of TCR clone 37135 (TRBV12-4, TRBJ2-3)
CASTATDTQYF

SEQ ID NO: 74271 - protein, 14 aa, Homo sapiens
  CDR3 for alpha chain variable domain of TCR clone 37136 (TRAV1-2, TRAJ16)
CAVNRFSDGQKLLC

SEQ ID NO: 74272 - protein, 15 aa, Homo sapiens
  CDR3 for beta chain variable domain of TCR clone 37136 (TRBV9, TRBJ1-6)
CASSVAGTGDSPLHF

SEQ ID NO: 74273 - protein, 14 aa, Homo sapiens
  CDR3 for alpha chain variable domain of TCR clone 37137 (TRAV2, TRAJ37)
CAVDLTSNTGKLIF

SEQ ID NO: 74274 - protein, 12 aa, Homo sapiens
  CDR3 for beta chain variable domain of TCR clone 37137 (TRBV20-1, TRBJ1-1)
QCSTWGGTEAFF

SEQ ID NO: 74275 - protein, 12 aa, Homo sapiens
  CDR3 for alpha chain variable domain of TCR clone 37138 (TRAV13-1, TRAJ42)
VNYGGIQGNLIF

SEQ ID NO: 74276 - protein, 15 aa, Homo sapiens
  CDR3 for beta chain variable domain of TCR clone 37138 (TRBV20-1, TRBJ2-1)
CNASSAGSSYNEQFF

SEQ ID NO: 74277 - protein, 11 aa, Homo sapiens
  CDR3 for alpha chain variable domain of TCR clone 37139 (TRAV3, TRAJ21)
CAVGNFNKFYF

SEQ ID NO: 74278 - protein, 16 aa, Homo sapiens
  CDR3 for beta chain variable domain of TCR clone 37139 (TRBV19, TRBJ2-1)
CASSKAGPSSYNEEFF

SEQ ID NO: 74279 - protein, 20 aa, Homo sapiens
  CDR3 for alpha chain variable domain of TCR clone 37140 (TRAV26-1, TRAJ42)
CCVLLHRQAYYGGSQGNLIF

SEQ ID NO: 74280 - protein, 16 aa, Homo sapiens
  CDR3 for beta chain variable domain of TCR clone 37140 (TRBV7-3, TRBJ2-2)
CASSLKRGTLSGELFF

SEQ ID NO: 74281 - protein, 13 aa, Homo sapiens
  CDR3 for alpha chain variable domain of TCR clone 37141 (TRAV3, TRAJ15)
CAVRDQAGTALIF

SEQ ID NO: 74282 - protein, 12 aa, Homo sapiens
  CDR3 for beta chain variable domain of TCR clone 37141 (TRBV11-2, TRBJ2-1)
CASSPGNNEQFF

SEQ ID NO: 74283 - protein, 13 aa, Homo sapiens
  CDR3 for alpha chain variable domain of TCR clone 37142 (TRAV22, TRAJ29)
CAVGGSGNTPLVF

SEQ ID NO: 74284 - protein, 14 aa, Homo sapiens
  CDR3 for beta chain variable domain of TCR clone 37142 (TRBV12-5, TRBJ2-5)
CASGSRTHQETQYF

SEQ ID NO: 74285 - protein, 12 aa, Homo sapiens
  CDR3 for alpha chain variable domain of TCR clone 37143 (TRAV13-1, TRAJ17)
CAARTAGNKLTF

SEQ ID NO: 74286 - protein, 15 aa, Homo sapiens
  CDR3 for beta chain variable domain of TCR clone 37143 (TRBV7-6, TRBJ1-1)
CASSPQGGANTEALF

SEQ ID NO: 74287 - protein, 13 aa, Homo sapiens
  CDR3 for alpha chain variable domain of TCR clone 37144 (TRAV8-3, TRAJ44)
CAVVPGAASKLTF

SEQ ID NO: 74288 - protein, 14 aa, Homo sapiens
  CDR3 for beta chain variable domain of TCR clone 37144 (TRBV11-2, TRBJ2-3)
CASRRLARTDTQYF

SEQ ID NO: 74289 - protein, 13 aa, Homo sapiens
  CDR3 for alpha chain variable domain of TCR clone 37145 (TRAV12-1, TRAJ6)
CVVFPGGSYTPTF

SEQ ID NO: 74290 - protein, 14 aa, Homo sapiens
  CDR3 for beta chain variable domain of TCR clone 37145 (TRBV20-1, TRBJ1-3)
CSASPTGAGNTIYF

SEQ ID NO: 74291 - protein, 13 aa, Homo sapiens
  CDR3 for alpha chain variable domain of TCR clone 37146 (TRAV26-1, TRAJ34)
CIVRGHNTDKLIF

SEQ ID NO: 74292 - protein, 15 aa, Homo sapiens
  CDR3 for beta chain variable domain of TCR clone 37146 (TRBV12-4, TRBJ2-5)
CASSPPTGLQETQYF

SEQ ID NO: 74293 - protein, 13 aa, Homo sapiens
  CDR3 for alpha chain variable domain of TCR clone 37147 (TRAV17, TRAJ40)
CVGALGGTYKYIF

SEQ ID NO: 74294 - protein, 16 aa, Homo sapiens
  CDR3 for beta chain variable domain of TCR clone 37147 (TRBV7-2, TRBJ1-4)
CASSLAPGRRDEKLFF

SEQ ID NO: 74295 - protein, 19 aa, Homo sapiens
  CDR3 for alpha chain variable domain of TCR clone 37148 (TRAV1-1, TRAJ13)
CLLLLRCEGESGGHQKVTF

SEQ ID NO: 74296 - protein, 19 aa, Homo sapiens
  CDR3 for beta chain variable domain of TCR clone 37148 (TRBV14, TRBJ2-1)
CASSQDQLWEAPEYNEQFF

SEQ ID NO: 74297 - protein, 12 aa, Homo sapiens
  CDR3 for alpha chain variable domain of TCR clone 37149 (TRAV17, TRAJ20)
CATDSNDYKLSF

SEQ ID NO: 74298 - protein, 14 aa, Homo sapiens
  CDR3 for beta chain variable domain of TCR clone 37149 (TRBV6-5, TRBJ1-1)
CASSLGQGLSEALF

SEQ ID NO: 74299 - protein, 11 aa, Homo sapiens
  CDR3 for alpha chain variable domain of TCR clone 37150 (TRAV3, TRAJ32)
CAVREGIMVVL

SEQ ID NO: 74300 - protein, 13 aa, Homo sapiens
  CDR3 for beta chain variable domain of TCR clone 37150 (TRBV2, TRBJ1-1)
CARSEGGNTEAFF

SEQ ID NO: 74301 - protein, 19 aa, Homo sapiens
  CDR3 for alpha chain variable domain of TCR clone 37151 (TRAV1-2, TRAJ26)
CLLPLCCERPDNYGQNFVF

SEQ ID NO: 74302 - protein, 16 aa, Homo sapiens
  CDR3 for beta chain variable domain of TCR clone 37151 (TRBV20-1, TRBJ1-4)
CSAPGQGLLTNEKLFF

SEQ ID NO: 74303 - protein, 16 aa, Homo sapiens
  CDR3 for alpha chain variable domain of TCR clone 37152 (TRAV12-3, TRAJ53)
CAMSPGRGGSNYKLTF

SEQ ID NO: 74304 - protein, 16 aa, Homo sapiens
  CDR3 for beta chain variable domain of TCR clone 37152 (TRBV19, TRBJ2-1)
CASSKAGPSSYNEQFF

SEQ ID NO: 74305 - protein, 12 aa, Homo sapiens
  CDR3 for alpha chain variable domain of TCR clone 37153 (TRAV17, TRAJ20)
CATQSNDYKLSF

SEQ ID NO: 74306 - protein, 13 aa, Homo sapiens
  CDR3 for beta chain variable domain of TCR clone 37153 (TRBV10-3, TRBJ1-1)
RAIIPEGGTEAFF

SEQ ID NO: 74307 - protein, 18 aa, Homo sapiens
  CDR3 for alpha chain variable domain of TCR clone 37154 (TRAV17, TRAJ45)
CATSLDLYSGGGADGLTF

SEQ ID NO: 74308 - protein, 15 aa, Homo sapiens
  CDR3 for beta chain variable domain of TCR clone 37154 (TRBV11-2, TRBJ2-1)
CASSKSRGLIYEQFF

SEQ ID NO: 74309 - protein, 10 aa, Homo sapiens
  CDR3 for alpha chain variable domain of TCR clone 37155 (TRAV12-2, TRAJ48)
CAVTSEKLTF

SEQ ID NO: 74310 - protein, 17 aa, Homo sapiens
  CDR3 for beta chain variable domain of TCR clone 37155 (TRBV11-1, TRBJ2-7)
CASSLTGSFGLDYGQYF

SEQ ID NO: 74311 - protein, 14 aa, Homo sapiens
  CDR3 for alpha chain variable domain of TCR clone 37156 (TRAV26-1, TRAJ38)
CIADNAGNNRKQIW

SEQ ID NO: 74312 - protein, 13 aa, Homo sapiens
  CDR3 for beta chain variable domain of TCR clone 37156 (TRBV20-1, TRBJ1-1)
CSARGGGNTEAFF

SEQ ID NO: 74313 - protein, 17 aa, Homo sapiens
  CDR3 for alpha chain variable domain of TCR clone 37157 (TRAV3, TRAJ28)
CAVGEAYSGAGSYQLTF

SEQ ID NO: 74314 - protein, 18 aa, Homo sapiens
  CDR3 for beta chain variable domain of TCR clone 37157 (TRBV27, TRBJ2-1)
CASGNRAVGVGSKNEQFF

SEQ ID NO: 74315 - protein, 14 aa, Homo sapiens
  CDR3 for alpha chain variable domain of TCR clone 37158 (TRAV12-3, TRAJ10)
SHLPLTGGGNKLTF

SEQ ID NO: 74316 - protein, 13 aa, Homo sapiens
  CDR3 for beta chain variable domain of TCR clone 37158 (TRBV12-4, TRBJ1-1)
CASIPGTGFEAFF

SEQ ID NO: 74317 - protein, 15 aa, Homo sapiens
  CDR3 for alpha chain variable domain of TCR clone 37159 (TRAV12-2, TRAJ53)
CAVNGGGGSNYKLTF

SEQ ID NO: 74318 - protein, 17 aa, Homo sapiens
  CDR3 for beta chain variable domain of TCR clone 37159 (TRBV7-8, TRBJ2-6)
CASSAGTGGAGANVLTF

SEQ ID NO: 74319 - protein, 15 aa, Homo sapiens
  CDR3 for alpha chain variable domain of TCR clone 37160 (TRAV26-1, TRAJ29)
CIVRVEGSGNTPLVF

SEQ ID NO: 74320 - protein, 15 aa, Homo sapiens
  CDR3 for beta chain variable domain of TCR clone 37160 (TRBV7-9, TRBJ1-5)
CASSPGHQPNQPQHF

SEQ ID NO: 74321 - protein, 11 aa, Homo sapiens
  CDR3 for alpha chain variable domain of TCR clone 37161 (TRAV8-4, TRAJ34)
CAVSWTDKLIF

SEQ ID NO: 74322 - protein, 14 aa, Homo sapiens
  CDR3 for beta chain variable domain of TCR clone 37161 (TRBV7-9, TRBJ2-3)
CASSLEDDTDTQYF

SEQ ID NO: 74323 - protein, 12 aa, Homo sapiens
  CDR3 for alpha chain variable domain of TCR clone 37162 (TRAV12-3, TRAJ4)
CAMTGAGTRLAV

SEQ ID NO: 74324 - protein, 16 aa, Homo sapiens
  CDR3 for beta chain variable domain of TCR clone 37162 (TRBV10-3, TRBJ1-1)
CAISDTDRGLKLSLDK

SEQ ID NO: 74325 - protein, 15 aa, Homo sapiens
  CDR3 for alpha chain variable domain of TCR clone 37163 (TRAV12-3, TRAJ6)
CAMSATSGGSYIPTF

SEQ ID NO: 74326 - protein, 13 aa, Homo sapiens
  CDR3 for beta chain variable domain of TCR clone 37163 (TRBV7-9, TRBJ1-2)
CASSVKQNYGYTF

SEQ ID NO: 74327 - protein, 12 aa, Homo sapiens
  CDR3 for alpha chain variable domain of TCR clone 37164 (TRAV12-3, TRAJ17)
CAMTLTGNKLTF

SEQ ID NO: 74328 - protein, 15 aa, Homo sapiens
  CDR3 for beta chain variable domain of TCR clone 37164 (TRBV7-9, TRBJ2-7)
CASSPGGGLTYEQYF

SEQ ID NO: 74329 - protein, 11 aa, Homo sapiens
  CDR3 for alpha chain variable domain of TCR clone 37165 (TRAV3, TRAJ21)
CAVGNFNKFYF

SEQ ID NO: 74330 - protein, 17 aa, Homo sapiens
  CDR3 for beta chain variable domain of TCR clone 37165 (TRBV6-5, TRBJ2-1)
CASRKNPRTGGHNEQFF

SEQ ID NO: 74331 - protein, 14 aa, Homo sapiens
  CDR3 for alpha chain variable domain of TCR clone 37166 (TRAV12-2, TRAJ48)
RAVNAFFGNEKLTF

SEQ ID NO: 74332 - protein, 13 aa, Homo sapiens
  CDR3 for beta chain variable domain of TCR clone 37166 (TRBV28, TRBJ2-7)
CAGAQQGLDEQYF

SEQ ID NO: 74333 - protein, 23 aa, Homo sapiens
  CDR3 for alpha chain variable domain of TCR clone 37167 (TRAV26-1, TRAJ38)
CIADNAGNNHIQNPDPAGYQLRD

SEQ ID NO: 74334 - protein, 15 aa, Homo sapiens
  CDR3 for beta chain variable domain of TCR clone 37167 (TRBV27, TRBJ2-1)
CASSNGGGSSNEQFF

SEQ ID NO: 74335 - protein, 11 aa, Homo sapiens
  CDR3 for alpha chain variable domain of TCR clone 37168 (TRAV2, TRAJ13)
CASGGYQKVTF

SEQ ID NO: 74336 - protein, 15 aa, Homo sapiens
  CDR3 for beta chain variable domain of TCR clone 37168 (TRBV11-2, TRBJ2-1)
CASSSPSTRYNEQFF

SEQ ID NO: 74337 - protein, 13 aa, Homo sapiens
  CDR3 for alpha chain variable domain of TCR clone 37169 (TRAV12-2, TRAJ4)
CAAFSGGYNKLIF

SEQ ID NO: 74338 - protein, 13 aa, Homo sapiens
  CDR3 for beta chain variable domain of TCR clone 37169 (TRBV19, TRBJ1-5)
CASSIDRDQPQHF

SEQ ID NO: 74339 - protein, 22 aa, Homo sapiens
  CDR3 for alpha chain variable domain of TCR clone 37170 (TRAV27, TRAJ41)
CAVRTQIPDIQNPDPAGYQLRD

SEQ ID NO: 74340 - protein, 16 aa, Homo sapiens
  CDR3 for beta chain variable domain of TCR clone 37170 (TRBV5-1, TRBJ2-3)
CASSLGLAVYTDTQYF

SEQ ID NO: 74341 - protein, 13 aa, Homo sapiens
  CDR3 for alpha chain variable domain of TCR clone 37171 (TRAV12-3, TRAJ7)
CAMSASVNNRLAF

SEQ ID NO: 74342 - protein, 14 aa, Homo sapiens
  CDR3 for beta chain variable domain of TCR clone 37171 (TRBV13, TRBJ2-5)
CASSLGPRGETQYF

SEQ ID NO: 74343 - protein, 14 aa, Homo sapiens
  CDR3 for alpha chain variable domain of TCR clone 37172 (TRAV13-1, TRAJ3)
CAASKGSSASKIIF

SEQ ID NO: 74344 - protein, 13 aa, Homo sapiens
  CDR3 for beta chain variable domain of TCR clone 37172 (TRBV25-1, TRBJ2-5)
CASSESGRETQYF

SEQ ID NO: 74345 - protein, 14 aa, Homo sapiens
  CDR3 for alpha chain variable domain of TCR clone 37173 (TRAV35, TRAJ33)
CAGSSQDSNYQLIW

SEQ ID NO: 74346 - protein, 17 aa, Homo sapiens
  CDR3 for beta chain variable domain of TCR clone 37173 (TRBV11-2, TRBJ2-1)
CASSLYPPGVEYNEQFF

SEQ ID NO: 74347 - protein, 10 aa, Homo sapiens
  CDR3 for alpha chain variable domain of TCR clone 37174 (TRAV12-3, TRAJ49)
CAMNDDQFYF

SEQ ID NO: 74348 - protein, 13 aa, Homo sapiens
  CDR3 for beta chain variable domain of TCR clone 37174 (TRBV12-4, TRBJ1-1)
CASSPGTGFDAFF

SEQ ID NO: 74349 - protein, 16 aa, Homo sapiens
  CDR3 for alpha chain variable domain of TCR clone 37175 (TRAV30, TRAJ24)
CGTEIVDADSWGKFQF

SEQ ID NO: 74350 - protein, 18 aa, Homo sapiens
  CDR3 for beta chain variable domain of TCR clone 37175 (TRBV7-9, TRBJ2-7)
CASSLTTSGSRTWYERYF

SEQ ID NO: 74351 - protein, 15 aa, Homo sapiens
  CDR3 for alpha chain variable domain of TCR clone 37176 (TRAV8-4, TRAJ47)
CAVSDPEEYGNKLGF

SEQ ID NO: 74352 - protein, 15 aa, Homo sapiens
  CDR3 for beta chain variable domain of TCR clone 37176 (TRBV11-2, TRBJ2-1)
CASSLGPDSYNEQFF

SEQ ID NO: 74353 - protein, 13 aa, Homo sapiens
  CDR3 for alpha chain variable domain of TCR clone 37177 (TRAV27, TRAJ41)
CAGEGNSGYVLNF

SEQ ID NO: 74354 - protein, 14 aa, Homo sapiens
  CDR3 for beta chain variable domain of TCR clone 37177 (TRBV7-2, TRBJ1-1)
CASSFLTGTTEAFF

SEQ ID NO: 74355 - protein, 10 aa, Homo sapiens
  CDR3 for alpha chain variable domain of TCR clone 37178 (TRAV1-2, TRAJ31)
CASFDARLMF

SEQ ID NO: 74356 - protein, 15 aa, Homo sapiens
  CDR3 for beta chain variable domain of TCR clone 37178 (TRBV4-1, TRBJ1-4)
CASSDTGGTNEKLFF

SEQ ID NO: 74357 - protein, 15 aa, Homo sapiens
  CDR3 for alpha chain variable domain of TCR clone 37179 (TRAV17, TRAJ52)
CATGAGGTSYGKLTF

SEQ ID NO: 74358 - protein, 14 aa, Homo sapiens
  CDR3 for beta chain variable domain of TCR clone 37179 (TRBV28, TRBJ1-5)
CASSLGVLVKPQHF

SEQ ID NO: 74359 - protein, 17 aa, Homo sapiens
  CDR3 for alpha chain variable domain of TCR clone 37180 (TRAV3, TRAJ6)
CAVRDGPRVGGSYIPTF

SEQ ID NO: 74360 - protein, 12 aa, Homo sapiens
  CDR3 for beta chain variable domain of TCR clone 37180 (TRBV11-2, TRBJ2-2)
CAGSLGGGELFF

SEQ ID NO: 74361 - protein, 12 aa, Homo sapiens
  CDR3 for alpha chain variable domain of TCR clone 37181 (TRAV17, TRAJ49)
CATVTTGNQFYF

SEQ ID NO: 74362 - protein, 18 aa, Homo sapiens
  CDR3 for beta chain variable domain of TCR clone 37181 (TRBV11-2, TRBJ2-6)
CASSLNPFLGAGANVLTF

SEQ ID NO: 74363 - protein, 14 aa, Homo sapiens
  CDR3 for alpha chain variable domain of TCR clone 37182 (TRAV1-2, TRAJ8)
CAVREDTGFQKLVF

SEQ ID NO: 74364 - protein, 15 aa, Homo sapiens
  CDR3 for beta chain variable domain of TCR clone 37182 (TRBV11-2, TRBJ2-1)
CASSLGTSGLNEQFF

SEQ ID NO: 74365 - protein, 13 aa, Homo sapiens
  CDR3 for alpha chain variable domain of TCR clone 37183 (TRAV21, TRAJ57)
CAVTQGGSEKLVF

SEQ ID NO: 74366 - protein, 16 aa, Homo sapiens
  CDR3 for beta chain variable domain of TCR clone 37183 (TRBV29-1, TRBJ2-7)
CSVEDAEDVTAYEQYF

SEQ ID NO: 74367 - protein, 14 aa, Homo sapiens
  CDR3 for alpha chain variable domain of TCR clone 37184 (TRAV12-3, TRAJ58)
CAMSTGTSGSRLTF

SEQ ID NO: 74368 - protein, 11 aa, Homo sapiens
  CDR3 for beta chain variable domain of TCR clone 37184 (TRBV29-1, TRBJ2-5)
CSEDRTGTQYF

SEQ ID NO: 74369 - protein, 16 aa, Homo sapiens
  CDR3 for alpha chain variable domain of TCR clone 37185 (TRAV30, TRAJ24)
CGTEIVDADSWGKFQF

SEQ ID NO: 74370 - protein, 15 aa, Homo sapiens
  CDR3 for beta chain variable domain of TCR clone 37185 (TRBV11-2, TRBJ1-6)
CASTLRGTGNSPLHF

SEQ ID NO: 74371 - protein, 10 aa, Homo sapiens
  CDR3 for alpha chain variable domain of TCR clone 37186 (TRAV8-4, TRAJ43)
CAVSADDMRF

SEQ ID NO: 74372 - protein, 15 aa, Homo sapiens
  CDR3 for beta chain variable domain of TCR clone 37186 (TRBV20-1, TRBJ2-7)
CSARDRVSGMDEQYF

SEQ ID NO: 74373 - protein, 17 aa, Homo sapiens
  CDR3 for alpha chain variable domain of TCR clone 37187 (TRAV26-1, TRAJ53)
CIVRVDDSGGGNYKLTF

SEQ ID NO: 74374 - protein, 15 aa, Homo sapiens
  CDR3 for beta chain variable domain of TCR clone 37187 (TRBV20-1, TRBJ2-7)
CSARVPAAYFYEQYF

SEQ ID NO: 74375 - protein, 14 aa, Homo sapiens
  CDR3 for alpha chain variable domain of TCR clone 37188 (TRAV1-2, TRAJ8)
CAVREDTGFQKLVF

SEQ ID NO: 74376 - protein, 14 aa, Homo sapiens
  CDR3 for beta chain variable domain of TCR clone 37188 (TRBV11-2, TRBJ1-5)
CASSLDRGRQPQHF

SEQ ID NO: 74377 - protein, 16 aa, Homo sapiens
  CDR3 for alpha chain variable domain of TCR clone 37189 (TRAV3, TRAJ37)
CAVRPHGSGNTGKLIF

SEQ ID NO: 74378 - protein, 17 aa, Homo sapiens
  CDR3 for beta chain variable domain of TCR clone 37189 (TRBV11-2, TRBJ2-1)
CASSLYPPGVEYNEQFF

SEQ ID NO: 74379 - protein, 12 aa, Homo sapiens
  CDR3 for alpha chain variable domain of TCR clone 37190 (TRAV8-3, TRAJ6)
CAVAGGSYIPTF

SEQ ID NO: 74380 - protein, 14 aa, Homo sapiens
  CDR3 for beta chain variable domain of TCR clone 37190 (TRBV27, TRBJ2-7)
CASATGTERREQYL

SEQ ID NO: 74381 - protein, 14 aa, Homo sapiens
  CDR3 for alpha chain variable domain of TCR clone 37191 (TRAV26-1, TRAJ22)
CIVRVYGSARQLTF

SEQ ID NO: 74382 - protein, 17 aa, Homo sapiens
  CDR3 for beta chain variable domain of TCR clone 37191 (TRBV7-3, TRBJ2-3)
CASSPGGLAGFEDTQYF

SEQ ID NO: 74383 - protein, 18 aa, Homo sapiens
  CDR3 for alpha chain variable domain of TCR clone 37192 (TRAV21, TRAJ52)
CAVRPSPAGGTSYGKLTF

SEQ ID NO: 74384 - protein, 14 aa, Homo sapiens
  CDR3 for beta chain variable domain of TCR clone 37192 (TRBV7-2, TRBJ2-2)
CASRGQGAAGELFF

SEQ ID NO: 74385 - protein, 14 aa, Homo sapiens
  CDR3 for alpha chain variable domain of TCR clone 37193 (TRAV35, TRAJ22)
CAGLRPGSARQLTF

SEQ ID NO: 74386 - protein, 15 aa, Homo sapiens
  CDR3 for beta chain variable domain of TCR clone 37193 (TRBV12-4, TRBJ2-5)
CASSPPTGLQETLYF

SEQ ID NO: 74387 - protein, 11 aa, Homo sapiens
  CDR3 for alpha chain variable domain of TCR clone 37194 (TRAV3, TRAJ13)
CAVTSYQKVTF

SEQ ID NO: 74388 - protein, 15 aa, Homo sapiens
  CDR3 for beta chain variable domain of TCR clone 37194 (TRBV7-9, TRBJ2-7)
CASSGSGLAVYEQYF

SEQ ID NO: 74389 - protein, 11 aa, Homo sapiens
  CDR3 for alpha chain variable domain of TCR clone 37195 (TRAV12-1, TRAJ30)
CVVNGRDKIIF

SEQ ID NO: 74390 - protein, 12 aa, Homo sapiens
  CDR3 for beta chain variable domain of TCR clone 37195 (TRBV27, TRBJ2-2)
CASKLFTGELFF

SEQ ID NO: 74391 - protein, 14 aa, Homo sapiens
  CDR3 for alpha chain variable domain of TCR clone 37196 (TRAV12-3, TRAJ56)
CAMSVTGANSKLTF

SEQ ID NO: 74392 - protein, 17 aa, Homo sapiens
  CDR3 for beta chain variable domain of TCR clone 37196 (TRBV20-1, TRBJ2-3)
RSASLLGRGGSADTQYF

SEQ ID NO: 74393 - protein, 18 aa, Homo sapiens
  CDR3 for alpha chain variable domain of TCR clone 37197 (TRAV9-2, TRAJ52)
CALSRHNAGGTIYGKLTF

SEQ ID NO: 74394 - protein, 13 aa, Homo sapiens
  CDR3 for beta chain variable domain of TCR clone 37197 (TRBV7-9, TRBJ1-2)
CASSLKQNYGYTF

SEQ ID NO: 74395 - protein, 13 aa, Homo sapiens
  CDR3 for alpha chain variable domain of TCR clone 37198 (TRAV35, TRAJ57)
CAGSQGGSEKLGF

SEQ ID NO: 74396 - protein, 14 aa, Homo sapiens
  CDR3 for beta chain variable domain of TCR clone 37198 (TRBV25-1, TRBJ1-1)
CASTHLGGNTEAFF

SEQ ID NO: 74397 - protein, 14 aa, Homo sapiens
  CDR3 for alpha chain variable domain of TCR clone 37199 (TRAV1-2, TRAJ16)
CAVNRFSDGQKPLF

SEQ ID NO: 74398 - protein, 14 aa, Homo sapiens
  CDR3 for beta chain variable domain of TCR clone 37199 (TRBV19, TRBJ2-1)
CASPTFVLSGEQFF

SEQ ID NO: 74399 - protein, 15 aa, Homo sapiens
  CDR3 for alpha chain variable domain of TCR clone 37200 (TRAV21, TRAJ38)
CAVRQDAGNDRKLIW

SEQ ID NO: 74400 - protein, 16 aa, Homo sapiens
  CDR3 for beta chain variable domain of TCR clone 37200 (TRBV4-2, TRBJ1-1)
CASRPLDGGGDTEAFF

SEQ ID NO: 74401 - protein, 13 aa, Homo sapiens
  CDR3 for alpha chain variable domain of TCR clone 37201 (TRAV12-3, TRAJ7)
CAMTPYGNNRLAF

SEQ ID NO: 74402 - protein, 16 aa, Homo sapiens
  CDR3 for beta chain variable domain of TCR clone 37201 (TRBV20-1, TRBJ1-4)
CSARPYGGELNENLFF

SEQ ID NO: 74403 - protein, 15 aa, Homo sapiens
  CDR3 for alpha chain variable domain of TCR clone 37202 (TRAV3, TRAJ4)
CAVRDGTGGYNKLIF

SEQ ID NO: 74404 - protein, 14 aa, Homo sapiens
  CDR3 for beta chain variable domain of TCR clone 37202 (TRBV4-2, TRBJ2-1)
CASGLDRAYNEQFF

SEQ ID NO: 74405 - protein, 13 aa, Homo sapiens
  CDR3 for alpha chain variable domain of TCR clone 37203 (TRAV36/DV7, TRAJ37)
CAVSSSNTGKLIF

SEQ ID NO: 74406 - protein, 16 aa, Homo sapiens
  CDR3 for beta chain variable domain of TCR clone 37203 (TRBV3-1, TRBJ2-5)
CASSPGQFNGFGTQYF

SEQ ID NO: 74407 - protein, 14 aa, Homo sapiens
  CDR3 for alpha chain variable domain of TCR clone 37204 (TRAV12-3, TRAJ10)
SHLPLTGGGNKLTF

SEQ ID NO: 74408 - protein, 15 aa, Homo sapiens
  CDR3 for beta chain variable domain of TCR clone 37204 (TRBV11-3, TRBJ1-3)
CASSLDGTVGNTIYF

SEQ ID NO: 74409 - protein, 19 aa, Homo sapiens
  CDR3 for alpha chain variable domain of TCR clone 37205 (TRAV3, TRAJ6)
CAVGDRNPSRSGGSYIPTF

SEQ ID NO: 74410 - protein, 15 aa, Homo sapiens
  CDR3 for beta chain variable domain of TCR clone 37205 (TRBV18, TRBJ2-7)
CASSPTFMDSYEQYF

SEQ ID NO: 74411 - protein, 13 aa, Homo sapiens
  CDR3 for alpha chain variable domain of TCR clone 37206 (TRAV2, TRAJ29)
CAAQNSGNKPLVF

SEQ ID NO: 74412 - protein, 14 aa, Homo sapiens
  CDR3 for beta chain variable domain of TCR clone 37206 (TRBV7-9, TRBJ2-4)
CASSLAMGGNIQYF

SEQ ID NO: 74413 - protein, 16 aa, Homo sapiens
  CDR3 for alpha chain variable domain of TCR clone 37207 (TRAV3, TRAJ37)
CAVRPHGSGNTGKPIF

SEQ ID NO: 74414 - protein, 16 aa, Homo sapiens
  CDR3 for beta chain variable domain of TCR clone 37207 (TRBV9, TRBJ1-2)
CASSVEEKVSPYGYTF

SEQ ID NO: 74415 - protein, 14 aa, Homo sapiens
  CDR3 for alpha chain variable domain of TCR clone 37208 (TRAV1-2, TRAJ16)
CAVNRFSDGQKLLF

SEQ ID NO: 74416 - protein, 14 aa, Homo sapiens
  CDR3 for beta chain variable domain of TCR clone 37208 (TRBV12-4, TRBJ2-3)
CASSGQGSTDTQYF

SEQ ID NO: 74417 - protein, 16 aa, Homo sapiens
  CDR3 for alpha chain variable domain of TCR clone 37209 (TRAV8-1, TRAJ42)
CAVTSRYGGSKGNLIF

SEQ ID NO: 74418 - protein, 12 aa, Homo sapiens
  CDR3 for beta chain variable domain of TCR clone 37209 (TRBV6-3, TRBJ2-7)
CASSLGRRGLYF

SEQ ID NO: 74419 - protein, 17 aa, Homo sapiens
  CDR3 for alpha chain variable domain of TCR clone 37210 (TRAV4, TRAJ18)
CLVGERPVGSTLGRLYF

SEQ ID NO: 74420 - protein, 11 aa, Homo sapiens
  CDR3 for beta chain variable domain of TCR clone 37210 (TRBV29-1, TRBJ2-5)
CSEDRTGTQYF

SEQ ID NO: 74421 - protein, 19 aa, Homo sapiens
  CDR3 for alpha chain variable domain of TCR clone 37211 (TRAV38-1, TRAJ53)
CAFMKHGLESGGSNYKLTF

SEQ ID NO: 74422 - protein, 13 aa, Homo sapiens
  CDR3 for beta chain variable domain of TCR clone 37211 (TRBV19, TRBJ2-7)
CASSPRQPYEQYF

SEQ ID NO: 74423 - protein, 13 aa, Homo sapiens
  CDR3 for alpha chain variable domain of TCR clone 37212 (TRAV2, TRAJ40)
CAVVTPGTYKYIF

SEQ ID NO: 74424 - protein, 16 aa, Homo sapiens
  CDR3 for beta chain variable domain of TCR clone 37212 (TRBV29-1, TRBJ1-2)
CSVEANRDIANYGYTF

SEQ ID NO: 74425 - protein, 14 aa, Homo sapiens
  CDR3 for alpha chain variable domain of TCR clone 37213 (TRAV2, TRAJ37)
CAVGFTSNTGKLIF

SEQ ID NO: 74426 - protein, 13 aa, Homo sapiens
  CDR3 for beta chain variable domain of TCR clone 37213 (TRBV4-2, TRBJ1-1)
CASSQAGNTEAFF

SEQ ID NO: 74427 - protein, 15 aa, Homo sapiens
  CDR3 for alpha chain variable domain of TCR clone 37214 (TRAV17, TRAJ35)
CATAFVIGFGNVLHC

SEQ ID NO: 74428 - protein, 20 aa, Homo sapiens
  CDR3 for beta chain variable domain of TCR clone 37214 (TRBV11-2, TRBJ2-7)
CASSPLAGAEVRAVLRAGHQ

SEQ ID NO: 74429 - protein, 11 aa, Homo sapiens
  CDR3 for alpha chain variable domain of TCR clone 37215 (TRAV12-1, TRAJ34)
CVVNKGRELIF

SEQ ID NO: 74430 - protein, 12 aa, Homo sapiens
  CDR3 for beta chain variable domain of TCR clone 37215 (TRBV2, TRBJ2-1)
CAYRPPGNEQFF

SEQ ID NO: 74431 - protein, 14 aa, Homo sapiens
  CDR3 for alpha chain variable domain of TCR clone 37216 (TRAV30, TRAJ33)
CGTVAPRSNYQLIW

SEQ ID NO: 74432 - protein, 15 aa, Homo sapiens
  CDR3 for beta chain variable domain of TCR clone 37216 (TRBV7-9, TRBJ1-6)
CASSSPGRGNSPLHF

SEQ ID NO: 74433 - protein, 14 aa, Homo sapiens
  CDR3 for alpha chain variable domain of TCR clone 37217 (TRAV35, TRAJ22)
CAGLRPSSARQLTF

SEQ ID NO: 74434 - protein, 15 aa, Homo sapiens
  CDR3 for beta chain variable domain of TCR clone 37217 (TRBV12-4, TRBJ2-5)
CASSPPTGLQETQYF

SEQ ID NO: 74435 - protein, 18 aa, Homo sapiens
  CDR3 for alpha chain variable domain of TCR clone 37218 (TRAV21, TRAJ13)
CAVPRSFWGLPESYLCNW

SEQ ID NO: 74436 - protein, 13 aa, Homo sapiens
  CDR3 for beta chain variable domain of TCR clone 37218 (TRBV7-9, TRBJ1-2)
CASSLKQNYGYTF

SEQ ID NO: 74437 - protein, 15 aa, Homo sapiens
  CDR3 for alpha chain variable domain of TCR clone 37219 (TRAV3, TRAJ47)
CAVRDIGDYGNKLVF

SEQ ID NO: 74438 - protein, 14 aa, Homo sapiens
  CDR3 for beta chain variable domain of TCR clone 37219 (TRBV13, TRBJ2-5)
CASSLERVGETQYF

SEQ ID NO: 74439 - protein, 15 aa, Homo sapiens
  CDR3 for alpha chain variable domain of TCR clone 37220 (TRAV12-3, TRAJ6)
CAVSATSGGSYIPTF

SEQ ID NO: 74440 - protein, 13 aa, Homo sapiens
  CDR3 for beta chain variable domain of TCR clone 37220 (TRBV7-9, TRBJ1-2)
CASSLKQNYGYTF

SEQ ID NO: 74441 - protein, 14 aa, Homo sapiens
  CDR3 for alpha chain variable domain of TCR clone 37221 (TRAV1-2, TRAJ16)
CAVNRFSDGQKLLF

SEQ ID NO: 74442 - protein, 13 aa, Homo sapiens
  CDR3 for beta chain variable domain of TCR clone 37221 (TRBV7-9, TRBJ2-1)
CASSLDVGNEQFF

SEQ ID NO: 74443 - protein, 17 aa, Homo sapiens
  CDR3 for alpha chain variable domain of TCR clone 37222 (TRAV3, TRAJ12)
CAVRDGGRIDSSYKLIF

SEQ ID NO: 74444 - protein, 16 aa, Homo sapiens
  CDR3 for beta chain variable domain of TCR clone 37222 (TRBV9, TRBJ2-2)
CASSAMGKGNTGELFF

SEQ ID NO: 74445 - protein, 14 aa, Homo sapiens
  CDR3 for alpha chain variable domain of TCR clone 37223 (TRAV17, TRAJ54)
CATDANQGAQKLVF

SEQ ID NO: 74446 - protein, 12 aa, Homo sapiens
  CDR3 for beta chain variable domain of TCR clone 37223 (TRBV7-9, TRBJ2-7)
CASSTKREEQYF

SEQ ID NO: 74447 - protein, 16 aa, Homo sapiens
  CDR3 for alpha chain variable domain of TCR clone 37224 (TRAV16, TRAJ4)
CITVLPFSGGYNKLIF

SEQ ID NO: 74448 - protein, 14 aa, Homo sapiens
  CDR3 for beta chain variable domain of TCR clone 37224 (TRBV19, TRBJ2-7)
CASSMGQGASEQYF

SEQ ID NO: 74449 - protein, 10 aa, Homo sapiens
  CDR3 for alpha chain variable domain of TCR clone 37225 (TRAV26-2, TRAJ22)
LQGSARQLTF

SEQ ID NO: 74450 - protein, 15 aa, Homo sapiens
  CDR3 for beta chain variable domain of TCR clone 37225 (TRBV6-5, TRBJ2-3)
CASSRSGGARDTQYF

SEQ ID NO: 74451 - protein, 14 aa, Homo sapiens
  CDR3 for alpha chain variable domain of TCR clone 37226 (TRAV8-3, TRAJ43)
CAVGSEFFNNDMRF

SEQ ID NO: 74452 - protein, 14 aa, Homo sapiens
  CDR3 for beta chain variable domain of TCR clone 37226 (TRBV25-1, TRBJ1-1)
CASTHLGGNTEAFF

SEQ ID NO: 74453 - protein, 13 aa, Homo sapiens
  CDR3 for alpha chain variable domain of TCR clone 37227 (TRAV27, TRAJ45)
CRSSGRGADGLTF

SEQ ID NO: 74454 - protein, 17 aa, Homo sapiens
  CDR3 for beta chain variable domain of TCR clone 37227 (TRBV11-2, TRBJ2-1)
CASSLYPPGVEYNEQFF

SEQ ID NO: 74455 - protein, 15 aa, Homo sapiens
  CDR3 for alpha chain variable domain of TCR clone 37228 (TRAV12-1, TRAJ10)
CVVFVNTGTASKLTF

SEQ ID NO: 74456 - protein, 14 aa, Homo sapiens
  CDR3 for beta chain variable domain of TCR clone 37228 (TRBV7-2, TRBJ2-2)
CASSLNSNTGELFF

SEQ ID NO: 74457 - protein, 14 aa, Homo sapiens
  CDR3 for alpha chain variable domain of TCR clone 37229 (TRAV2, TRAJ9)
CAVEDRGGGFKTIF

SEQ ID NO: 74458 - protein, 13 aa, Homo sapiens
  CDR3 for beta chain variable domain of TCR clone 37229 (TRBV7-3, TRBJ1-1)
CASSQDWGAEAFF

SEQ ID NO: 74459 - protein, 11 aa, Homo sapiens
  CDR3 for alpha chain variable domain of TCR clone 37230 (TRAV17, TRAJ43)
CATPRSNDMRF

SEQ ID NO: 74460 - protein, 15 aa, Homo sapiens
  CDR3 for beta chain variable domain of TCR clone 37230 (TRBV11-2, TRBJ2-1)
CASSSGTSGLNEQFF

SEQ ID NO: 74461 - protein, 13 aa, Homo sapiens
  CDR3 for alpha chain variable domain of TCR clone 37231 (TRAV13-1, TRAJ5)
CAASDTGRRTLTF

SEQ ID NO: 74462 - protein, 12 aa, Homo sapiens
  CDR3 for beta chain variable domain of TCR clone 37231 (TRBV28, TRBJ2-3)
CASSLYRDTQYF

SEQ ID NO: 74463 - protein, 17 aa, Homo sapiens
  CDR3 for alpha chain variable domain of TCR clone 37232 (TRAV12-3, TRAJ26)
CAMSGGRWDNYGQNFVF

SEQ ID NO: 74464 - protein, 12 aa, Homo sapiens
  CDR3 for beta chain variable domain of TCR clone 37232 (TRBV19, TRBJ1-1)
CASGTTGIEAFF

SEQ ID NO: 74465 - protein, 13 aa, Homo sapiens
  CDR3 for alpha chain variable domain of TCR clone 37233 (TRAV12-3, TRAJ7)
CAMSASGNNRLAF

SEQ ID NO: 74466 - protein, 14 aa, Homo sapiens
  CDR3 for beta chain variable domain of TCR clone 37233 (TRBV13, TRBJ2-5)
CASSLGPRGEAQYF

SEQ ID NO: 74467 - protein, 13 aa, Homo sapiens
  CDR3 for alpha chain variable domain of TCR clone 37234 (TRAV21, TRAJ58)
CAVKGASGSRLTF

SEQ ID NO: 74468 - protein, 19 aa, Homo sapiens
  CDR3 for beta chain variable domain of TCR clone 37234 (TRBV25-1, TRBJ2-2)
CAILVYRVDRGRKTGELFF

SEQ ID NO: 74469 - protein, 13 aa, Homo sapiens
  CDR3 for alpha chain variable domain of TCR clone 37235 (TRAV38-1, TRAJ42)
CARWGGSQGNLVF

SEQ ID NO: 74470 - protein, 17 aa, Homo sapiens
  CDR3 for beta chain variable domain of TCR clone 37235 (TRBV20-1, TRBJ2-1)
CSARDPLAGVWDNEQFF

SEQ ID NO: 74471 - protein, 12 aa, Homo sapiens
  CDR3 for alpha chain variable domain of TCR clone 37236 (TRAV13-1, TRAJ53)
AASGGSNYKLTF

SEQ ID NO: 74472 - protein, 15 aa, Homo sapiens
  CDR3 for beta chain variable domain of TCR clone 37236 (TRBV5-1, TRBJ2-1)
CASSQPRAPYNEQFF

SEQ ID NO: 74473 - protein, 17 aa, Homo sapiens
  CDR3 for alpha chain variable domain of TCR clone 37237 (TRAV3, TRAJ6)
CAVRDGPRAGGSYIPTF

SEQ ID NO: 74474 - protein, 14 aa, Homo sapiens
  CDR3 for beta chain variable domain of TCR clone 37237 (TRBV7-2, TRBJ2-5)
CASSPRGSSETQYF

SEQ ID NO: 74475 - protein, 13 aa, Homo sapiens
  CDR3 for alpha chain variable domain of TCR clone 37238 (TRAV29/DV5, TRAJ31)
CAASRNNNARLMF

SEQ ID NO: 74476 - protein, 15 aa, Homo sapiens
  CDR3 for beta chain variable domain of TCR clone 37238 (TRBV2, TRBJ2-1)
CASSELAGSYNEQFL

SEQ ID NO: 74477 - protein, 17 aa, Homo sapiens
  CDR3 for alpha chain variable domain of TCR clone 37239 (TRAV26-1, TRAJ10)
CIVSFRGLTGGGNKLTF

SEQ ID NO: 74478 - protein, 13 aa, Homo sapiens
  CDR3 for beta chain variable domain of TCR clone 37239 (TRBV20-1, TRBJ2-3)
CSAGRQAADTRYF

SEQ ID NO: 74479 - protein, 15 aa, Homo sapiens
  CDR3 for alpha chain variable domain of TCR clone 37240 (TRAV3, TRAJ22)
CAVRDRCGSARQLTF

SEQ ID NO: 74480 - protein, 16 aa, Homo sapiens
  CDR3 for beta chain variable domain of TCR clone 37240 (TRBV5-4, TRBJ2-3)
CASQQPGAGGADTQYF

SEQ ID NO: 74481 - protein, 17 aa, Homo sapiens
  CDR3 for alpha chain variable domain of TCR clone 37241 (TRAV26-1, TRAJ46)
IASSESEKKSSGDKLTF

SEQ ID NO: 74482 - protein, 16 aa, Homo sapiens
  CDR3 for beta chain variable domain of TCR clone 37241 (TRBV27, TRBJ2-2)
CASSLRGLVRTGELFF

SEQ ID NO: 74483 - protein, 15 aa, Homo sapiens
  CDR3 for alpha chain variable domain of TCR clone 37242 (TRAV13-1, TRAJ36)
CAASIGQTGANNLFF

SEQ ID NO: 74484 - protein, 17 aa, Homo sapiens
  CDR3 for beta chain variable domain of TCR clone 37242 (TRBV20-1, TRBJ2-2)
CSARDRTSGRHTGELFF

SEQ ID NO: 74485 - protein, 14 aa, Homo sapiens
  CDR3 for alpha chain variable domain of TCR clone 37243 (TRAV12-2, TRAJ44)
CAVNPAGTASKLTF

SEQ ID NO: 74486 - protein, 14 aa, Homo sapiens
  CDR3 for beta chain variable domain of TCR clone 37243 (TRBV7-2, TRBJ1-3)
CASSRLRSGNTMYF

SEQ ID NO: 74487 - protein, 15 aa, Homo sapiens
  CDR3 for alpha chain variable domain of TCR clone 37244 (TRAV3, TRAJ3)
CAVRDRDSSASKIIF

SEQ ID NO: 74488 - protein, 18 aa, Homo sapiens
  CDR3 for beta chain variable domain of TCR clone 37244 (TRBV25-1, TRBJ1-2)
CASSGLQNGQGLIFGYTV

SEQ ID NO: 74489 - protein, 14 aa, Homo sapiens
  CDR3 for alpha chain variable domain of TCR clone 37245 (TRAV38-1, TRAJ45)
CASHSGGGADGLTF

SEQ ID NO: 74490 - protein, 12 aa, Homo sapiens
  CDR3 for beta chain variable domain of TCR clone 37245 (TRBV24-1, TRBJ1-4)
CATSDPNEKLFF

SEQ ID NO: 74491 - protein, 14 aa, Homo sapiens
  CDR3 for alpha chain variable domain of TCR clone 37246 (TRAV26-1, TRAJ38)
CIADNAGNNRKLIW

SEQ ID NO: 74492 - protein, 13 aa, Homo sapiens
  CDR3 for beta chain variable domain of TCR clone 37246 (TRBV20-1, TRBJ1-1)
CSARGEGNTEAFF

SEQ ID NO: 74493 - protein, 12 aa, Homo sapiens
  CDR3 for alpha chain variable domain of TCR clone 37247 (TRAV17, TRAJ57)
CATDGGTEKLVF

SEQ ID NO: 74494 - protein, 13 aa, Homo sapiens
  CDR3 for beta chain variable domain of TCR clone 37247 (TRBV7-9, TRBJ2-7)
CASSFAGAYEQYF

SEQ ID NO: 74495 - protein, 14 aa, Homo sapiens
  CDR3 for alpha chain variable domain of TCR clone 37248 (TRAV1-2, TRAJ16)
CAVNRFSDGQKLLF

SEQ ID NO: 74496 - protein, 16 aa, Homo sapiens
  CDR3 for beta chain variable domain of TCR clone 37248 (TRBV12-4, TRBJ2-5)
CASSCFVRGRQETQYF

SEQ ID NO: 74497 - protein, 12 aa, Homo sapiens
  CDR3 for alpha chain variable domain of TCR clone 37249 (TRAV13-2, TRAJ8)
CAPWLGFQKLVF

SEQ ID NO: 74498 - protein, 11 aa, Homo sapiens
  CDR3 for beta chain variable domain of TCR clone 37249 (TRBV6-3, TRBJ2-3)
CATGQADTQYF

SEQ ID NO: 74499 - protein, 11 aa, Homo sapiens
  CDR3 for alpha chain variable domain of TCR clone 37250 (TRAV12-1, TRAJ21)
CVVYNFNKFYF

SEQ ID NO: 74500 - protein, 14 aa, Homo sapiens
  CDR3 for beta chain variable domain of TCR clone 37250 (TRBV19, TRBJ2-7)
CASSMGQRAIEQYF

SEQ ID NO: 74501 - protein, 13 aa, Homo sapiens
  CDR3 for alpha chain variable domain of TCR clone 37251 (TRAV1-1, TRAJ9)
CAAKNTGGFKTIF

SEQ ID NO: 74502 - protein, 13 aa, Homo sapiens
  CDR3 for beta chain variable domain of TCR clone 37251 (TRBV19, TRBJ2-7)
CASRKAGGSEQYF

SEQ ID NO: 74503 - protein, 12 aa, Homo sapiens
  CDR3 for alpha chain variable domain of TCR clone 37252 (TRAV13-1, TRAJ9)
CAASYLGFKTIF

SEQ ID NO: 74504 - protein, 14 aa, Homo sapiens
  CDR3 for beta chain variable domain of TCR clone 37252 (TRBV4-1, TRBJ1-5)
CASSQGPVNQPRHF

SEQ ID NO: 74505 - protein, 16 aa, Homo sapiens
  CDR3 for alpha chain variable domain of TCR clone 37253 (TRAV3, TRAJ37)
CAVRGKGSVNTGKLIF

SEQ ID NO: 74506 - protein, 13 aa, Homo sapiens
  CDR3 for beta chain variable domain of TCR clone 37253 (TRBV14, TRBJ2-7)
CASSQDRRYEQYF

SEQ ID NO: 74507 - protein, 12 aa, Homo sapiens
  CDR3 for alpha chain variable domain of TCR clone 37254 (TRAV8-3, TRAJ20)
CAVGANDYKLSF

SEQ ID NO: 74508 - protein, 14 aa, Homo sapiens
  CDR3 for beta chain variable domain of TCR clone 37254 (TRBV7-6, TRBJ2-7)
CASSFRQGADEQYF

SEQ ID NO: 74509 - protein, 11 aa, Homo sapiens
  CDR3 for alpha chain variable domain of TCR clone 37255 (TRAV13-1, TRAJ47)
CAAAPRNKLVF

SEQ ID NO: 74510 - protein, 17 aa, Homo sapiens
  CDR3 for beta chain variable domain of TCR clone 37255 (TRBV20-1, TRBJ2-2)
CSASGSGQGGLTGELFF

SEQ ID NO: 74511 - protein, 15 aa, Homo sapiens
  CDR3 for alpha chain variable domain of TCR clone 37256 (TRAV17, TRAJ57)
CATGPSQGGSEKLVF

SEQ ID NO: 74512 - protein, 16 aa, Homo sapiens
  CDR3 for beta chain variable domain of TCR clone 37256 (TRBV12-4, TRBJ1-5)
CASSRPVGESNQPQHF

SEQ ID NO: 74513 - protein, 12 aa, Homo sapiens
  CDR3 for alpha chain variable domain of TCR clone 37257 (TRAV8-3, TRAJ7)
CAVEGGNNRLAF

SEQ ID NO: 74514 - protein, 15 aa, Homo sapiens
  CDR3 for beta chain variable domain of TCR clone 37257 (TRBV10-3, TRBJ2-1)
CATSDVQDRAYEQFF

SEQ ID NO: 74515 - protein, 12 aa, Homo sapiens
  CDR3 for alpha chain variable domain of TCR clone 37258 (TRAV29/DV5, TRAJ43)
CAAPYNNNDMRF

SEQ ID NO: 74516 - protein, 17 aa, Homo sapiens
  CDR3 for beta chain variable domain of TCR clone 37258 (TRBV19, TRBJ2-6)
CTSSTGQVFSGANVLTF

SEQ ID NO: 74517 - protein, 12 aa, Homo sapiens
  CDR3 for alpha chain variable domain of TCR clone 37259 (TRAV30, TRAJ20)
CGTESNDYKLSF

SEQ ID NO: 74518 - protein, 15 aa, Homo sapiens
  CDR3 for beta chain variable domain of TCR clone 37259 (TRBV20-1, TRBJ2-7)
CSARDRVSGMEEQYF

SEQ ID NO: 74519 - protein, 16 aa, Homo sapiens
  CDR3 for alpha chain variable domain of TCR clone 37260 (TRAV30, TRAJ24)
CGTEIVDADSWGKFQF

SEQ ID NO: 74520 - protein, 16 aa, Homo sapiens
  CDR3 for beta chain variable domain of TCR clone 37260 (TRBV7-2, TRBJ1-4)
CASSLAPGRRDEKLFF

SEQ ID NO: 74521 - protein, 12 aa, Homo sapiens
  CDR3 for alpha chain variable domain of TCR clone 37261 (TRAV17, TRAJ57)
CATDGGSEKLVF

SEQ ID NO: 74522 - protein, 13 aa, Homo sapiens
  CDR3 for beta chain variable domain of TCR clone 37261 (TRBV7-9, TRBJ2-7)
CASSFAGAYEQYV

SEQ ID NO: 74523 - protein, 16 aa, Homo sapiens
  CDR3 for alpha chain variable domain of TCR clone 37262 (TRAV3, TRAJ10)
CAVRDMRAGGGNKLTF

SEQ ID NO: 74524 - protein, 14 aa, Homo sapiens
  CDR3 for beta chain variable domain of TCR clone 37262 (TRBV7-2, TRBJ2-5)
CASSFTQGQETQYF

SEQ ID NO: 74525 - protein, 12 aa, Homo sapiens
  CDR3 for alpha chain variable domain of TCR clone 37263 (TRAV1-2, TRAJ33)
CAALDSNYQLIW

SEQ ID NO: 74526 - protein, 12 aa, Homo sapiens
  CDR3 for beta chain variable domain of TCR clone 37263 (TRBV12-4, TRBJ2-1)
CASRQTENEQFF

SEQ ID NO: 74527 - protein, 17 aa, Homo sapiens
  CDR3 for alpha chain variable domain of TCR clone 37264 (TRAV3, TRAJ12)
CAVRGGGRMDSSYKLIF

SEQ ID NO: 74528 - protein, 13 aa, Homo sapiens
  CDR3 for beta chain variable domain of TCR clone 37264 (TRBV20-1, TRBJ1-1)
CGAPLGGGTEAFF

SEQ ID NO: 74529 - protein, 12 aa, Homo sapiens
  CDR3 for alpha chain variable domain of TCR clone 37265 (TRAV35, TRAJ30)
CARQLADDKIIF

SEQ ID NO: 74530 - protein, 17 aa, Homo sapiens
  CDR3 for beta chain variable domain of TCR clone 37265 (TRBV4-2, TRBJ2-5)
CASSPGRWRNFQETQYF

SEQ ID NO: 74531 - protein, 14 aa, Homo sapiens
  CDR3 for alpha chain variable domain of TCR clone 37266 (TRAV12-1, TRAJ17)
CVVNYKAAGNKLTF

SEQ ID NO: 74532 - protein, 16 aa, Homo sapiens
  CDR3 for beta chain variable domain of TCR clone 37266 (TRBV12-4, TRBJ1-5)
CASSRQVGGSNQPQHF

SEQ ID NO: 74533 - protein, 11 aa, Homo sapiens
  CDR3 for alpha chain variable domain of TCR clone 37267 (TRAV2, TRAJ33)
CAVESNYQLIW

SEQ ID NO: 74534 - protein, 12 aa, Homo sapiens
  CDR3 for beta chain variable domain of TCR clone 37267 (TRBV11-2, TRBJ2-1)
CASSPGNNEQFF

SEQ ID NO: 74535 - protein, 13 aa, Homo sapiens
  CDR3 for alpha chain variable domain of TCR clone 37268 (TRAV13-1, TRAJ6)
CAARRGGSYIPTF

SEQ ID NO: 74536 - protein, 15 aa, Homo sapiens
  CDR3 for beta chain variable domain of TCR clone 37268 (TRBV27, TRBJ2-1)
CASSNGGGSSNEQFF

SEQ ID NO: 74537 - protein, 16 aa, Homo sapiens
  CDR3 for alpha chain variable domain of TCR clone 37269 (TRAV12-3, TRAJ45)
CAMGWGSGGGADGLTF

SEQ ID NO: 74538 - protein, 15 aa, Homo sapiens
  CDR3 for beta chain variable domain of TCR clone 37269 (TRBV3-1, TRBJ1-2)
CASSHPGTPGYGYAF

SEQ ID NO: 74539 - protein, 18 aa, Homo sapiens
  CDR3 for alpha chain variable domain of TCR clone 37270 (TRAV29/DV5, TRAJ52)
CAAGFRGAGGTSSGKLTF

SEQ ID NO: 74540 - protein, 16 aa, Homo sapiens
  CDR3 for beta chain variable domain of TCR clone 37270 (TRBV7-3, TRBJ2-2)
CASSLKRGTLSGELFF

SEQ ID NO: 74541 - protein, 11 aa, Homo sapiens
  CDR3 for alpha chain variable domain of TCR clone 37271 (TRAV12-3, TRAJ27)
CAMANAGRSTF

SEQ ID NO: 74542 - protein, 13 aa, Homo sapiens
  CDR3 for beta chain variable domain of TCR clone 37271 (TRBV20-1, TRBJ1-1)
CSARVGGNTEAFF

SEQ ID NO: 74543 - protein, 14 aa, Homo sapiens
  CDR3 for alpha chain variable domain of TCR clone 37272 (TRAV9-2, TRAJ39)
CALYIYNAGNMLTF

SEQ ID NO: 74544 - protein, 15 aa, Homo sapiens
  CDR3 for beta chain variable domain of TCR clone 37272 (TRBV7-9, TRBJ1-2)
CASSLDREPNYGYTF

SEQ ID NO: 74545 - protein, 10 aa, Homo sapiens
  CDR3 for alpha chain variable domain of TCR clone 37273 (TRAV26-2, TRAJ49)
CILLGNQYYF

SEQ ID NO: 74546 - protein, 13 aa, Homo sapiens
  CDR3 for beta chain variable domain of TCR clone 37273 (TRBV20-1, TRBJ2-7)
CSADPGATYEQYF

SEQ ID NO: 74547 - protein, 14 aa, Homo sapiens
  CDR3 for alpha chain variable domain of TCR clone 37274 (TRAV13-1, TRAJ44)
CAAKATGTASKLTV

SEQ ID NO: 74548 - protein, 17 aa, Homo sapiens
  CDR3 for beta chain variable domain of TCR clone 37274 (TRBV7-3, TRBJ2-3)
CASSLMKRMRGADTQYF

SEQ ID NO: 74549 - protein, 14 aa, Homo sapiens
  CDR3 for alpha chain variable domain of TCR clone 37275 (TRAV29/DV5, TRAJ45)
CAASFRGGADGLTF

SEQ ID NO: 74550 - protein, 15 aa, Homo sapiens
  CDR3 for beta chain variable domain of TCR clone 37275 (TRBV12-4, TRBJ2-5)
CASSPPTGLQETQYF

SEQ ID NO: 74551 - protein, 17 aa, Homo sapiens
  CDR3 for alpha chain variable domain of TCR clone 37276 (TRAV16, TRAJ58)
CITVLSNGETSGSRLTF

SEQ ID NO: 74552 - protein, 17 aa, Homo sapiens
  CDR3 for beta chain variable domain of TCR clone 37276 (TRBV18, TRBJ2-1)
CASSKGLSGGADSEQFF

SEQ ID NO: 74553 - protein, 18 aa, Homo sapiens
  CDR3 for alpha chain variable domain of TCR clone 37277 (TRAV8-3, TRAJ4)
WVRDPTSNDPGGYHKLIF

SEQ ID NO: 74554 - protein, 13 aa, Homo sapiens
  CDR3 for beta chain variable domain of TCR clone 37277 (TRBV20-1, TRBJ1-2)
CSATGIQGSGYTF

SEQ ID NO: 74555 - protein, 10 aa, Homo sapiens
  CDR3 for alpha chain variable domain of TCR clone 37278 (TRAV12-2, TRAJ48)
CAVTSEKLTS

SEQ ID NO: 74556 - protein, 17 aa, Homo sapiens
  CDR3 for beta chain variable domain of TCR clone 37278 (TRBV11-1, TRBJ2-7)
CASSLTGSFGLDYEQYF

SEQ ID NO: 74557 - protein, 12 aa, Homo sapiens
  CDR3 for alpha chain variable domain of TCR clone 37279 (TRAV8-6, TRAJ36)
CAVSDWLGQTTS

SEQ ID NO: 74558 - protein, 14 aa, Homo sapiens
  CDR3 for beta chain variable domain of TCR clone 37279 (TRBV12-5, TRBJ2-5)
CASGSRTHQETQYF

SEQ ID NO: 74559 - protein, 14 aa, Homo sapiens
  CDR3 for alpha chain variable domain of TCR clone 37280 (TRAV29/DV5, TRAJ45)
CAASFRGVADGLTF

SEQ ID NO: 74560 - protein, 11 aa, Homo sapiens
  CDR3 for beta chain variable domain of TCR clone 37280 (TRBV11-2, TRBJ2-2)
CASSLPGELFF

SEQ ID NO: 74561 - protein, 16 aa, Homo sapiens
  CDR3 for alpha chain variable domain of TCR clone 37281 (TRAV3, TRAJ37)
CAVRPHGSGNTGKLIF

SEQ ID NO: 74562 - protein, 16 aa, Homo sapiens
  CDR3 for beta chain variable domain of TCR clone 37281 (TRBV9, TRBJ1-2)
CASSVEEKVPPYGYTF

SEQ ID NO: 74563 - protein, 15 aa, Homo sapiens
  CDR3 for alpha chain variable domain of TCR clone 37282 (TRAV12-3, TRAJ6)
CAMSATTGGSYIPTF

SEQ ID NO: 74564 - protein, 16 aa, Homo sapiens
  CDR3 for beta chain variable domain of TCR clone 37282 (TRBV20-1, TRBJ1-2)
CNASMGQGVANYGYTF

SEQ ID NO: 74565 - protein, 14 aa, Homo sapiens
  CDR3 for alpha chain variable domain of TCR clone 37283 (TRAV12-1, TRAJ17)
CVVNYKAAGNKLTF

SEQ ID NO: 74566 - protein, 12 aa, Homo sapiens
  CDR3 for beta chain variable domain of TCR clone 37283 (TRBV20-1, TRBJ2-7)
CSAITPTKEHYF

SEQ ID NO: 74567 - protein, 15 aa, Homo sapiens
  CDR3 for alpha chain variable domain of TCR clone 37284 (TRAV26-1, TRAJ44)
CIVRAYTGTASKLTF

SEQ ID NO: 74568 - protein, 16 aa, Homo sapiens
  CDR3 for beta chain variable domain of TCR clone 37284 (TRBV7-7, TRBJ2-1)
CASSLASGTSYNEQFF

SEQ ID NO: 74569 - protein, 16 aa, Homo sapiens
  CDR3 for alpha chain variable domain of TCR clone 37285 (TRAV12-2, TRAJ15)
CAVNNPRGQAGTALIF

SEQ ID NO: 74570 - protein, 13 aa, Homo sapiens
  CDR3 for beta chain variable domain of TCR clone 37285 (TRBV2, TRBJ1-1)
CASSDRGTGEAFF

SEQ ID NO: 74571 - protein, 15 aa, Homo sapiens
  CDR3 for alpha chain variable domain of TCR clone 37286 (TRAV26-1, TRAJ29)
CIVRVEGSGNTPLVF

SEQ ID NO: 74572 - protein, 15 aa, Homo sapiens
  CDR3 for beta chain variable domain of TCR clone 37286 (TRBV19, TRBJ1-2)
CASSVGQVLNYGYTF

SEQ ID NO: 74573 - protein, 15 aa, Homo sapiens
  CDR3 for alpha chain variable domain of TCR clone 37287 (TRAV13-1, TRAJ16)
CAARYQMARSCSLQW

SEQ ID NO: 74574 - protein, 13 aa, Homo sapiens
  CDR3 for beta chain variable domain of TCR clone 37287 (TRBV4-1, TRBJ2-1)
CASSQAGGDEQFF

SEQ ID NO: 74575 - protein, 15 aa, Homo sapiens
  CDR3 for alpha chain variable domain of TCR clone 37288 (TRAV27, TRAJ38)
CAARRNAGNNRKLIW

SEQ ID NO: 74576 - protein, 17 aa, Homo sapiens
  CDR3 for beta chain variable domain of TCR clone 37288 (TRBV28, TRBJ2-5)
CASSRQGGLAGAETQYF

SEQ ID NO: 74577 - protein, 14 aa, Homo sapiens
  CDR3 for alpha chain variable domain of TCR clone 37289 (TRAV1-2, TRAJ8)
CAVREDTGFQKLVP

SEQ ID NO: 74578 - protein, 12 aa, Homo sapiens
  CDR3 for beta chain variable domain of TCR clone 37289 (TRBV28, TRBJ2-3)
CASSLYRDTQYF

SEQ ID NO: 74579 - protein, 15 aa, Homo sapiens
  CDR3 for alpha chain variable domain of TCR clone 37290 (TRAV12-3, TRAJ6)
CAMSATTGGSYIPTF

SEQ ID NO: 74580 - protein, 14 aa, Homo sapiens
  CDR3 for beta chain variable domain of TCR clone 37290 (TRBV7-2, TRBJ1-1)
CASSFLTGTTEAFF

SEQ ID NO: 74581 - protein, 13 aa, Homo sapiens
  CDR3 for alpha chain variable domain of TCR clone 37291 (TRAV26-2, TRAJ43)
CILRAVNNNDMRF

SEQ ID NO: 74582 - protein, 14 aa, Homo sapiens
  CDR3 for beta chain variable domain of TCR clone 37291 (TRBV25-1, TRBJ1-1)
CASTHLGGNTEAFF

SEQ ID NO: 74583 - protein, 15 aa, Homo sapiens
  CDR3 for alpha chain variable domain of TCR clone 37292 (TRAV8-6, TRAJ38)
CAVSSNVGNNRKLIW

SEQ ID NO: 74584 - protein, 14 aa, Homo sapiens
  CDR3 for beta chain variable domain of TCR clone 37292 (TRBV14, TRBJ2-1)
CASSQVQGRGEQFF

SEQ ID NO: 74585 - protein, 13 aa, Homo sapiens
  CDR3 for alpha chain variable domain of TCR clone 37293 (TRAV8-3, TRAJ48)
CAVVPFGNEKLTF

SEQ ID NO: 74586 - protein, 14 aa, Homo sapiens
  CDR3 for beta chain variable domain of TCR clone 37293 (TRBV18, TRBJ2-7)
CASPPRGGAYEQYF

SEQ ID NO: 74587 - protein, 12 aa, Homo sapiens
  CDR3 for alpha chain variable domain of TCR clone 37294 (TRAV21, TRAJ3)
CCFHSSASKIIF

SEQ ID NO: 74588 - protein, 16 aa, Homo sapiens
  CDR3 for beta chain variable domain of TCR clone 37294 (TRBV19, TRBJ2-1)
CASSKAGPSSYNEQFF

SEQ ID NO: 74589 - protein, 12 aa, Homo sapiens
  CDR3 for alpha chain variable domain of TCR clone 37295 (TRAV1-1, TRAJ15)
CAVGQAGTALIF

SEQ ID NO: 74590 - protein, 16 aa, Homo sapiens
  CDR3 for beta chain variable domain of TCR clone 37295 (TRBV12-4, TRBJ2-7)
CASSPEGQGRSYEQYF

SEQ ID NO: 74591 - protein, 23 aa, Homo sapiens
  CDR3 for alpha chain variable domain of TCR clone 37296 (TRAV30, TRAJ43)
CTLRPPSSVTQEPTSAALSDLRF

SEQ ID NO: 74592 - protein, 13 aa, Homo sapiens
  CDR3 for beta chain variable domain of TCR clone 37296 (TRBV12-4, TRBJ2-2)
CASSITGSGELFF

SEQ ID NO: 74593 - protein, 16 aa, Homo sapiens
  CDR3 for alpha chain variable domain of TCR clone 37297 (TRAV13-1, TRAJ18)
CAASRMRGSTLGRLYF

SEQ ID NO: 74594 - protein, 15 aa, Homo sapiens
  CDR3 for beta chain variable domain of TCR clone 37297 (TRBV29-1, TRBJ2-1)
CSVGRHALFCNEQFF

SEQ ID NO: 74595 - protein, 13 aa, Homo sapiens
  CDR3 for alpha chain variable domain of TCR clone 37298 (TRAV1-2, TRAJ9)
CAVLNTGGFTTIF

SEQ ID NO: 74596 - protein, 14 aa, Homo sapiens
  CDR3 for beta chain variable domain of TCR clone 37298 (TRBV20-1, TRBJ2-3)
CSARGGTSTDTQYF

SEQ ID NO: 74597 - protein, 12 aa, Homo sapiens
  CDR3 for alpha chain variable domain of TCR clone 37299 (TRAV2, TRAJ9)
CAVGAGGFKTIF

SEQ ID NO: 74598 - protein, 12 aa, Homo sapiens
  CDR3 for beta chain variable domain of TCR clone 37299 (TRBV7-9, TRBJ1-4)
CASSTDREKLFF

SEQ ID NO: 74599 - protein, 14 aa, Homo sapiens
  CDR3 for alpha chain variable domain of TCR clone 37300 (TRAV13-1, TRAJ44)
CAAKATGTASKLTF

SEQ ID NO: 74600 - protein, 17 aa, Homo sapiens
  CDR3 for beta chain variable domain of TCR clone 37300 (TRBV7-3, TRBJ2-3)
RASSLMKRMRGADTQYS

SEQ ID NO: 74601 - protein, 14 aa, Homo sapiens
  CDR3 for alpha chain variable domain of TCR clone 37301 (TRAV35, TRAJ33)
CAGSYQDSNYQLIW

SEQ ID NO: 74602 - protein, 15 aa, Homo sapiens
  CDR3 for beta chain variable domain of TCR clone 37301 (TRBV20-1, TRBJ2-7)
CSAESGTSGAYEQYF

SEQ ID NO: 74603 - protein, 13 aa, Homo sapiens
  CDR3 for alpha chain variable domain of TCR clone 37302 (TRAV6, TRAJ16)
CALDDSDGQKLLF

SEQ ID NO: 74604 - protein, 17 aa, Homo sapiens
  CDR3 for beta chain variable domain of TCR clone 37302 (TRBV28, TRBJ2-7)
CASSPLHRASGVYEQYF

SEQ ID NO: 74605 - protein, 13 aa, Homo sapiens
  CDR3 for alpha chain variable domain of TCR clone 37303 (TRAV20, TRAJ49)
CVVQARTGNQFYF

SEQ ID NO: 74606 - protein, 16 aa, Homo sapiens
  CDR3 for beta chain variable domain of TCR clone 37303 (TRBV5-1, TRBJ1-1)
CASSCRGRALKLSLDK

SEQ ID NO: 74607 - protein, 14 aa, Homo sapiens
  CDR3 for alpha chain variable domain of TCR clone 37304 (TRAV8-3, TRAJ4)
CAVGASVGYNKLIF

SEQ ID NO: 74608 - protein, 16 aa, Homo sapiens
  CDR3 for beta chain variable domain of TCR clone 37304 (TRBV4-3, TRBJ2-2)
CASSHLQGSGTGELFF

SEQ ID NO: 74609 - protein, 14 aa, Homo sapiens
  CDR3 for alpha chain variable domain of TCR clone 37305 (TRAV35, TRAJ22)
CAGLRPGSARQLTF

SEQ ID NO: 74610 - protein, 15 aa, Homo sapiens
  CDR3 for beta chain variable domain of TCR clone 37305 (TRBV12-4, TRBJ2-5)
CASSPPRGLQETQYF

SEQ ID NO: 74611 - protein, 23 aa, Homo sapiens
  CDR3 for alpha chain variable domain of TCR clone 37306 (TRAV8-6, TRAJ38)
CAVRNAGNNHIQNPDPAVYQLSD

SEQ ID NO: 74612 - protein, 15 aa, Homo sapiens
  CDR3 for beta chain variable domain of TCR clone 37306 (TRBV4-1, TRBJ2-2)
CASSEGQGITGELFF

SEQ ID NO: 74613 - protein, 12 aa, Homo sapiens
  CDR3 for alpha chain variable domain of TCR clone 37307 (TRAV12-3, TRAJ3)
CAIDSSASKIIF

SEQ ID NO: 74614 - protein, 17 aa, Homo sapiens
  CDR3 for beta chain variable domain of TCR clone 37307 (TRBV7-9, TRBJ2-3)
CTSSLEEAGAYPDTQYF

SEQ ID NO: 74615 - protein, 15 aa, Homo sapiens
  CDR3 for alpha chain variable domain of TCR clone 37308 (TRAV17, TRAJ54)
CATTRSEQGAQKLVF

SEQ ID NO: 74616 - protein, 15 aa, Homo sapiens
  CDR3 for beta chain variable domain of TCR clone 37308 (TRBV7-9, TRBJ1-6)
CASSSPGRGNSPLHF

SEQ ID NO: 74617 - protein, 11 aa, Homo sapiens
  CDR3 for alpha chain variable domain of TCR clone 37309 (TRAV2, TRAJ33)
CAVDSNYQLIW

SEQ ID NO: 74618 - protein, 15 aa, Homo sapiens
  CDR3 for beta chain variable domain of TCR clone 37309 (TRBV19, TRBJ1-2)
CASSVGQVLNYGHTF

SEQ ID NO: 74619 - protein, 13 aa, Homo sapiens
  CDR3 for alpha chain variable domain of TCR clone 37310 (TRAV3, TRAJ15)
CAVRDQAGTALIF

SEQ ID NO: 74620 - protein, 15 aa, Homo sapiens
  CDR3 for beta chain variable domain of TCR clone 37310 (TRBV11-1, TRBJ2-7)
CASSLNYGAAYEQYF

SEQ ID NO: 74621 - protein, 12 aa, Homo sapiens
  CDR3 for alpha chain variable domain of TCR clone 37311 (TRAV12-3, TRAJ17)
CAMTLTGNKLTF

SEQ ID NO: 74622 - protein, 12 aa, Homo sapiens
  CDR3 for beta chain variable domain of TCR clone 37311 (TRBV7-2, TRBJ1-6)
CASSLSSSPLHF

SEQ ID NO: 74623 - protein, 14 aa, Homo sapiens
  CDR3 for alpha chain variable domain of TCR clone 37312 (TRAV20, TRAJ10)
CAVRVKGGGNKLTF

SEQ ID NO: 74624 - protein, 18 aa, Homo sapiens
  CDR3 for beta chain variable domain of TCR clone 37312 (TRBV24-1, TRBJ2-1)
CATSDLMFLGRGVHEQFF

SEQ ID NO: 74625 - protein, 17 aa, Homo sapiens
  CDR3 for alpha chain variable domain of TCR clone 37313 (TRAV12-2, TRAJ52)
CAVNPYAGGTSYGKLTF

SEQ ID NO: 74626 - protein, 16 aa, Homo sapiens
  CDR3 for beta chain variable domain of TCR clone 37313 (TRBV6-1, TRBJ2-1)
CASILRQGSSYNEQFF

SEQ ID NO: 74627 - protein, 12 aa, Homo sapiens
  CDR3 for alpha chain variable domain of TCR clone 37314 (TRAV12-3, TRAJ20)
CAMVRGDYKLSF

SEQ ID NO: 74628 - protein, 12 aa, Homo sapiens
  CDR3 for beta chain variable domain of TCR clone 37314 (TRBV7-8, TRBJ2-1)
CASSLGHNEQFF

SEQ ID NO: 74629 - protein, 14 aa, Homo sapiens
  CDR3 for alpha chain variable domain of TCR clone 37315 (TRAV2, TRAJ37)
CAVDFTSNTGKLIF

SEQ ID NO: 74630 - protein, 15 aa, Homo sapiens
  CDR3 for beta chain variable domain of TCR clone 37315 (TRBV20-1, TRBJ1-1)
CSASRGVTGNTKAFF

SEQ ID NO: 74631 - protein, 11 aa, Homo sapiens
  CDR3 for alpha chain variable domain of TCR clone 37316 (TRAV1-1, TRAJ23)
CAVRQGGKLIF

SEQ ID NO: 74632 - protein, 20 aa, Homo sapiens
  CDR3 for beta chain variable domain of TCR clone 37316 (TRBV7-8, TRBJ2-2)
CTSSHLFPGPTIHITGELFF

SEQ ID NO: 74633 - protein, 13 aa, Homo sapiens
  CDR3 for alpha chain variable domain of TCR clone 37317 (TRAV17, TRAJ9)
CATDYTGGFKPIF

SEQ ID NO: 74634 - protein, 16 aa, Homo sapiens
  CDR3 for beta chain variable domain of TCR clone 37317 (TRBV7-7, TRBJ2-1)
CASSLASGTSYNEQFF

SEQ ID NO: 74635 - protein, 14 aa, Homo sapiens
  CDR3 for alpha chain variable domain of TCR clone 37318 (TRAV26-1, TRAJ38)
CIADNAGNNRKLIW

SEQ ID NO: 74636 - protein, 13 aa, Homo sapiens
  CDR3 for beta chain variable domain of TCR clone 37318 (TRBV6-5, TRBJ1-1)
CASRPVTGSRTFF

SEQ ID NO: 74637 - protein, 14 aa, Homo sapiens
  CDR3 for alpha chain variable domain of TCR clone 37319 (TRAV1-2, TRAJ16)
CAVNRFSDGRKLLF

SEQ ID NO: 74638 - protein, 12 aa, Homo sapiens
  CDR3 for beta chain variable domain of TCR clone 37319 (TRBV7-8, TRBJ2-7)
CASSLGDREQYF

SEQ ID NO: 74639 - protein, 15 aa, Homo sapiens
  CDR3 for alpha chain variable domain of TCR clone 37320 (TRAV12-2, TRAJ6)
CRPLAGSGGSYIPTF

SEQ ID NO: 74640 - protein, 10 aa, Homo sapiens
  CDR3 for beta chain variable domain of TCR clone 37320 (TRBV28, TRBJ1-2)
CASSSDRAVF

SEQ ID NO: 74641 - protein, 16 aa, Homo sapiens
  CDR3 for alpha chain variable domain of TCR clone 37321 (TRAV17, TRAJ22)
CATGPLSSGSARQLTF

SEQ ID NO: 74642 - protein, 13 aa, Homo sapiens
  CDR3 for beta chain variable domain of TCR clone 37321 (TRBV11-2, TRBJ2-1)
CASSLGLAGGRFF

SEQ ID NO: 74643 - protein, 16 aa, Homo sapiens
  CDR3 for alpha chain variable domain of TCR clone 37322 (TRAV12-1, TRAJ12)
CVVNTLLMDSSYKLIF

SEQ ID NO: 74644 - protein, 13 aa, Homo sapiens
  CDR3 for beta chain variable domain of TCR clone 37322 (TRBV11-2, TRBJ2-1)
CASSAEAYNEQFF

SEQ ID NO: 74645 - protein, 13 aa, Homo sapiens
  CDR3 for alpha chain variable domain of TCR clone 37323 (TRAV13-1, TRAJ5)
CAARVTGRRALTL

SEQ ID NO: 74646 - protein, 15 aa, Homo sapiens
  CDR3 for beta chain variable domain of TCR clone 37323 (TRBV7-9, TRBJ2-7)
CASSPGGGLTYEQYF

SEQ ID NO: 74647 - protein, 11 aa, Homo sapiens
  CDR3 for alpha chain variable domain of TCR clone 37324 (TRAV4, TRAJ31)
CLVGDNARRMF

SEQ ID NO: 74648 - protein, 16 aa, Homo sapiens
  CDR3 for beta chain variable domain of TCR clone 37324 (TRBV7-2, TRBJ2-5)
CASSSKWLSGQETQYF

SEQ ID NO: 74649 - protein, 12 aa, Homo sapiens
  CDR3 for alpha chain variable domain of TCR clone 37325 (TRAV2, TRAJ34)
CAVERNTDKLIF

SEQ ID NO: 74650 - protein, 14 aa, Homo sapiens
  CDR3 for beta chain variable domain of TCR clone 37325 (TRBV7-9, TRBJ2-1)
CASSDNSGYNEQSF

SEQ ID NO: 74651 - protein, 16 aa, Homo sapiens
  CDR3 for alpha chain variable domain of TCR clone 37326 (TRAV3, TRAJ37)
CAVRGKGSGNTGKLIF

SEQ ID NO: 74652 - protein, 13 aa, Homo sapiens
  CDR3 for beta chain variable domain of TCR clone 37326 (TRBV7-8, TRBJ2-7)
CASSLTGGREQYF

SEQ ID NO: 74653 - protein, 14 aa, Homo sapiens
  CDR3 for alpha chain variable domain of TCR clone 37327 (TRAV22, TRAJ29)
CAVTRNSGNTLLVF

SEQ ID NO: 74654 - protein, 13 aa, Homo sapiens
  CDR3 for beta chain variable domain of TCR clone 37327 (TRBV18, TRBJ1-1)
CASSPETKPEAFF

SEQ ID NO: 74655 - protein, 13 aa, Homo sapiens
  CDR3 for alpha chain variable domain of TCR clone 37328 (TRAV36/DV7, TRAJ21)
CAVEAYNFNKFYF

SEQ ID NO: 74656 - protein, 14 aa, Homo sapiens
  CDR3 for beta chain variable domain of TCR clone 37328 (TRBV6-1, TRBJ1-1)
RASSGTGLNTEAFF

SEQ ID NO: 74657 - protein, 16 aa, Homo sapiens
  CDR3 for alpha chain variable domain of TCR clone 37329 (TRAV3, TRAJ21)
CAVIDIERGNFNKFYF

SEQ ID NO: 74658 - protein, 13 aa, Homo sapiens
  CDR3 for beta chain variable domain of TCR clone 37329 (TRBV27, TRBJ2-7)
CASSLTTGYEQYF

SEQ ID NO: 74659 - protein, 13 aa, Homo sapiens
  CDR3 for alpha chain variable domain of TCR clone 37330 (TRAV26-1, TRAJ34)
CIVRGHSTDKLIF

SEQ ID NO: 74660 - protein, 15 aa, Homo sapiens
  CDR3 for beta chain variable domain of TCR clone 37330 (TRBV4-1, TRBJ2-7)
CASSQEWGPSYEQYF

SEQ ID NO: 74661 - protein, 12 aa, Homo sapiens
  CDR3 for alpha chain variable domain of TCR clone 37331 (TRAV12-3, TRAJ20)
CAMVRGDYKLSF

SEQ ID NO: 74662 - protein, 15 aa, Homo sapiens
  CDR3 for beta chain variable domain of TCR clone 37331 (TRBV19, TRBJ1-2)
CASNLGGETPYGYTF

SEQ ID NO: 74663 - protein, 14 aa, Homo sapiens
  CDR3 for alpha chain variable domain of TCR clone 37332 (TRAV35, TRAJ22)
CAGLRPGSARQLTF

SEQ ID NO: 74664 - protein, 15 aa, Homo sapiens
  CDR3 for beta chain variable domain of TCR clone 37332 (TRBV20-1, TRBJ1-1)
CSASRGVTGNTEAFF

SEQ ID NO: 74665 - protein, 13 aa, Homo sapiens
  CDR3 for alpha chain variable domain of TCR clone 37333 (TRAV8-1, TRAJ32)
CAADGGATNKLIF

SEQ ID NO: 74666 - protein, 15 aa, Homo sapiens
  CDR3 for beta chain variable domain of TCR clone 37333 (TRBV9, TRBJ1-6)
CASSVAGTGDSPLHF

SEQ ID NO: 74667 - protein, 13 aa, Homo sapiens
  CDR3 for alpha chain variable domain of TCR clone 37334 (TRAV30, TRAJ24)
CGTVTDSWGKLQF

SEQ ID NO: 74668 - protein, 14 aa, Homo sapiens
  CDR3 for beta chain variable domain of TCR clone 37334 (TRBV25-1, TRBJ1-1)
CASTHLGGNTEAFF

SEQ ID NO: 74669 - protein, 14 aa, Homo sapiens
  CDR3 for alpha chain variable domain of TCR clone 37335 (TRAV1-2, TRAJ8)
CAVREDTGFQKLVF

SEQ ID NO: 74670 - protein, 17 aa, Homo sapiens
  CDR3 for beta chain variable domain of TCR clone 37335 (TRBV11-2, TRBJ2-1)
CASSLYPPGVEYNKQFF

SEQ ID NO: 74671 - protein, 13 aa, Homo sapiens
  CDR3 for alpha chain variable domain of TCR clone 37336 (TRAV27, TRAJ41)
CAGEGNSGYSLNF

SEQ ID NO: 74672 - protein, 14 aa, Homo sapiens
  CDR3 for beta chain variable domain of TCR clone 37336 (TRBV7-2, TRBJ1-1)
CASSFLTGTTEAFF

SEQ ID NO: 74673 - protein, 13 aa, Homo sapiens
  CDR3 for alpha chain variable domain of TCR clone 37337 (TRAV3, TRAJ33)
CAVRDRSDYQLIW

SEQ ID NO: 74674 - protein, 16 aa, Homo sapiens
  CDR3 for beta chain variable domain of TCR clone 37337 (TRBV4-2, TRBJ2-7)
CASSQDRGTSSYEQYF

SEQ ID NO: 74675 - protein, 18 aa, Homo sapiens
  CDR3 for alpha chain variable domain of TCR clone 37338 (TRAV26-1, TRAJ52)
CIVRVEGAGGTSYGKLTF

SEQ ID NO: 74676 - protein, 17 aa, Homo sapiens
  CDR3 for beta chain variable domain of TCR clone 37338 (TRBV24-1, TRBJ2-4)
CATSDAEARGVRNIQYF

SEQ ID NO: 74677 - protein, 11 aa, Homo sapiens
  CDR3 for alpha chain variable domain of TCR clone 37339 (TRAV3, TRAJ21)
CAVGNFNKFYF

SEQ ID NO: 74678 - protein, 15 aa, Homo sapiens
  CDR3 for beta chain variable domain of TCR clone 37339 (TRBV7-3, TRBJ2-1)
CASSPTGGGEVEQFF

SEQ ID NO: 74679 - protein, 13 aa, Homo sapiens
  CDR3 for alpha chain variable domain of TCR clone 37340 (TRAV26-2, TRAJ43)
CILRAVNNNDMRF

SEQ ID NO: 74680 - protein, 14 aa, Homo sapiens
  CDR3 for beta chain variable domain of TCR clone 37340 (TRBV20-1, TRBJ1-1)
CSARTRIGGTEAFF

SEQ ID NO: 74681 - protein, 11 aa, Homo sapiens
  CDR3 for alpha chain variable domain of TCR clone 37341 (TRAV12-3, TRAJ43)
CAMSVSNDMRF

SEQ ID NO: 74682 - protein, 13 aa, Homo sapiens
  CDR3 for beta chain variable domain of TCR clone 37341 (TRBV20-1, TRBJ1-1)
GSAPLGGGTEAFF

SEQ ID NO: 74683 - protein, 18 aa, Homo sapiens
  CDR3 for alpha chain variable domain of TCR clone 37342 (TRAV21, TRAJ52)
CAVSPSPAGGTSYGKLTF

SEQ ID NO: 74684 - protein, 16 aa, Homo sapiens
  CDR3 for beta chain variable domain of TCR clone 37342 (TRBV7-3, TRBJ2-1)
CASSLEGYRSYNEQFF

SEQ ID NO: 74685 - protein, 15 aa, Homo sapiens
  CDR3 for alpha chain variable domain of TCR clone 37343 (TRAV12-3, TRAJ18)
CAMSAEAQPWRGYTL

SEQ ID NO: 74686 - protein, 13 aa, Homo sapiens
  CDR3 for beta chain variable domain of TCR clone 37343 (TRBV15, TRBJ1-6)
CATSGGLNSPLHF

SEQ ID NO: 74687 - protein, 13 aa, Homo sapiens
  CDR3 for alpha chain variable domain of TCR clone 37344 (TRAV8-1, TRAJ30)
CAVIMNRDDKIIF

SEQ ID NO: 74688 - protein, 14 aa, Homo sapiens
  CDR3 for beta chain variable domain of TCR clone 37344 (TRBV7-2, TRBJ1-6)
CASSLQGANSALHF

SEQ ID NO: 74689 - protein, 17 aa, Homo sapiens
  CDR3 for alpha chain variable domain of TCR clone 37345 (TRAV13-1, TRAJ52)
CAAGRNAGGTSYGKLTF

SEQ ID NO: 74690 - protein, 12 aa, Homo sapiens
  CDR3 for beta chain variable domain of TCR clone 37345 (TRBV11-2, TRBJ2-2)
CASSLGGGELFF

SEQ ID NO: 74691 - protein, 15 aa, Homo sapiens
  CDR3 for alpha chain variable domain of TCR clone 37346 (TRAV8-6, TRAJ37)
CAVIFSSGNTGKLIF

SEQ ID NO: 74692 - protein, 15 aa, Homo sapiens
  CDR3 for beta chain variable domain of TCR clone 37346 (TRBV25-1, TRBJ2-4)
CANSETESAKNIQYF

SEQ ID NO: 74693 - protein, 16 aa, Homo sapiens
  CDR3 for alpha chain variable domain of TCR clone 37347 (TRAV8-4, TRAJ28)
CAVESNSGAGSYQLTF

SEQ ID NO: 74694 - protein, 13 aa, Homo sapiens
  CDR3 for beta chain variable domain of TCR clone 37347 (TRBV6-6, TRBJ2-7)
CASSPKHLAEQYF

SEQ ID NO: 74695 - protein, 14 aa, Homo sapiens
  CDR3 for alpha chain variable domain of TCR clone 37348 (TRAV12-2, TRAJ17)
CAVLFKAAGNKLTF

SEQ ID NO: 74696 - protein, 13 aa, Homo sapiens
  CDR3 for beta chain variable domain of TCR clone 37348 (TRBV12-5, TRBJ2-3)
CASGDRQSDTQYF

SEQ ID NO: 74697 - protein, 16 aa, Homo sapiens
  CDR3 for alpha chain variable domain of TCR clone 37349 (TRAV4, TRAJ22)
CPVGDLYSGSARQLTF

SEQ ID NO: 74698 - protein, 16 aa, Homo sapiens
  CDR3 for beta chain variable domain of TCR clone 37349 (TRBV7-9, TRBJ2-1)
CASSDVAGGSYNEQFF

SEQ ID NO: 74699 - protein, 13 aa, Homo sapiens
  CDR3 for alpha chain variable domain of TCR clone 37350 (TRAV23/DV6, TRAJ9)
CAASTTGGFKTIF

SEQ ID NO: 74700 - protein, 17 aa, Homo sapiens
  CDR3 for beta chain variable domain of TCR clone 37350 (TRBV20-1, TRBJ2-2)
CSASGSGQGGLTGELFF

SEQ ID NO: 74701 - protein, 13 aa, Homo sapiens
  CDR3 for alpha chain variable domain of TCR clone 37351 (TRAV12-3, TRAJ43)
CAMIRPNNSDMRF

SEQ ID NO: 74702 - protein, 12 aa, Homo sapiens
  CDR3 for beta chain variable domain of TCR clone 37351 (TRBV11-2, TRBJ2-5)
CASSLGQETQYF

SEQ ID NO: 74703 - protein, 14 aa, Homo sapiens
  CDR3 for alpha chain variable domain of TCR clone 37352 (TRAV12-2, TRAJ15)
CAPHTGQAGTALIF

SEQ ID NO: 74704 - protein, 15 aa, Homo sapiens
  CDR3 for beta chain variable domain of TCR clone 37352 (TRBV20-1, TRBJ2-7)
CSARDRVSGMDEQYF

SEQ ID NO: 74705 - protein, 17 aa, Homo sapiens
  CDR3 for alpha chain variable domain of TCR clone 37353 (TRAV4, TRAJ42)
CLVGVLNYGGSHGNLIF

SEQ ID NO: 74706 - protein, 12 aa, Homo sapiens
  CDR3 for beta chain variable domain of TCR clone 37353 (TRBV20-1, TRBJ2-1)
CSAQYTYNEQFF

SEQ ID NO: 74707 - protein, 11 aa, Homo sapiens
  CDR3 for alpha chain variable domain of TCR clone 37354 (TRAV1-2, TRAJ40)
CAVPGTYKYIF

SEQ ID NO: 74708 - protein, 16 aa, Homo sapiens
  CDR3 for beta chain variable domain of TCR clone 37354 (TRBV29-1, TRBJ2-7)
CSVEVLGTSGSYEQYF

SEQ ID NO: 74709 - protein, 13 aa, Homo sapiens
  CDR3 for alpha chain variable domain of TCR clone 37355 (TRAV12-3, TRAJ7)
CAMTPYGNNRLAF

SEQ ID NO: 74710 - protein, 13 aa, Homo sapiens
  CDR3 for beta chain variable domain of TCR clone 37355 (TRBV10-3, TRBJ1-2)
CAINADLNCGYTF

SEQ ID NO: 74711 - protein, 13 aa, Homo sapiens
  CDR3 for alpha chain variable domain of TCR clone 37356 (TRAV21, TRAJ20)
CAVDLRVDYKLSF

SEQ ID NO: 74712 - protein, 13 aa, Homo sapiens
  CDR3 for beta chain variable domain of TCR clone 37356 (TRBV6-1, TRBJ1-1)
CASSRQGNTEAFF

SEQ ID NO: 74713 - protein, 13 aa, Homo sapiens
  CDR3 for alpha chain variable domain of TCR clone 37357 (TRAV29/DV5, TRAJ44)
CAASTGTASKLTF

SEQ ID NO: 74714 - protein, 13 aa, Homo sapiens
  CDR3 for beta chain variable domain of TCR clone 37357 (TRBV19, TRBJ2-7)
CASRRAGGNEQYF

SEQ ID NO: 74715 - protein, 15 aa, Homo sapiens
  CDR3 for alpha chain variable domain of TCR clone 37358 (TRAV12-3, TRAJ6)
CAMSATTGGSYIPTF

SEQ ID NO: 74716 - protein, 16 aa, Homo sapiens
  CDR3 for beta chain variable domain of TCR clone 37358 (TRBV20-1, TRBJ1-2)
CRASMGQGVANYGYTF

SEQ ID NO: 74717 - protein, 15 aa, Homo sapiens
  CDR3 for alpha chain variable domain of TCR clone 37359 (TRAV3, TRAJ5)
CAVRDLDTGRRALTF

SEQ ID NO: 74718 - protein, 13 aa, Homo sapiens
  CDR3 for beta chain variable domain of TCR clone 37359 (TRBV12-4, TRBJ2-7)
CDSSPTETYEQYF

SEQ ID NO: 74719 - protein, 15 aa, Homo sapiens
  CDR3 for alpha chain variable domain of TCR clone 37360 (TRAV8-2, TRAJ40)
CVVLGTTSGTYKYIF

SEQ ID NO: 74720 - protein, 16 aa, Homo sapiens
  CDR3 for beta chain variable domain of TCR clone 37360 (TRBV7-3, TRBJ2-1)
RASSLEGYRSYNEQFF

SEQ ID NO: 74721 - protein, 15 aa, Homo sapiens
  CDR3 for alpha chain variable domain of TCR clone 37361 (TRAV1-1, TRAJ5)
CAVRHMDTGRRALTL

SEQ ID NO: 74722 - protein, 17 aa, Homo sapiens
  CDR3 for beta chain variable domain of TCR clone 37361 (TRBV28, TRBJ2-7)
CASSPGLAGGDSSEQYF

SEQ ID NO: 74723 - protein, 16 aa, Homo sapiens
  CDR3 for alpha chain variable domain of TCR clone 37362 (TRAV30, TRAJ24)
CGTEIVDADSWGKFQL

SEQ ID NO: 74724 - protein, 14 aa, Homo sapiens
  CDR3 for beta chain variable domain of TCR clone 37362 (TRBV12-5, TRBJ2-5)
CASGSWTHQETQYF

SEQ ID NO: 74725 - protein, 14 aa, Homo sapiens
  CDR3 for alpha chain variable domain of TCR clone 37363 (TRAV12-2, TRAJ17)
CAVLFKAAGNKLTF

SEQ ID NO: 74726 - protein, 15 aa, Homo sapiens
  CDR3 for beta chain variable domain of TCR clone 37363 (TRBV20-1, TRBJ2-7)
CSAESGTSGAYEQYF

SEQ ID NO: 74727 - protein, 15 aa, Homo sapiens
  CDR3 for alpha chain variable domain of TCR clone 37364 (TRAV26-1, TRAJ40)
CIVRVTTSGTYKYIF

SEQ ID NO: 74728 - protein, 14 aa, Homo sapiens
  CDR3 for beta chain variable domain of TCR clone 37364 (TRBV19, TRBJ2-1)
CASPTFVLSGEQFF

SEQ ID NO: 74729 - protein, 15 aa, Homo sapiens
  CDR3 for alpha chain variable domain of TCR clone 37365 (TRAV3, TRAJ47)
CAVRDIGEYGTKLVF

SEQ ID NO: 74730 - protein, 14 aa, Homo sapiens
  CDR3 for beta chain variable domain of TCR clone 37365 (TRBV13, TRBJ2-5)
CASSLERVGETQYF

SEQ ID NO: 74731 - protein, 13 aa, Homo sapiens
  CDR3 for alpha chain variable domain of TCR clone 37366 (TRAV17, TRAJ26)
CATVDNYGQNFVF

SEQ ID NO: 74732 - protein, 16 aa, Homo sapiens
  CDR3 for beta chain variable domain of TCR clone 37366 (TRBV2, TRBJ2-1)
CASSVGGSLAYNEQFF

SEQ ID NO: 74733 - protein, 14 aa, Homo sapiens
  CDR3 for alpha chain variable domain of TCR clone 37367 (TRAV1-2, TRAJ8)
CAVREDTGFQKLVF

SEQ ID NO: 74734 - protein, 12 aa, Homo sapiens
  CDR3 for beta chain variable domain of TCR clone 37367 (TRBV19, TRBJ2-1)
CASSMQDTEQFF

SEQ ID NO: 74735 - protein, 17 aa, Homo sapiens
  CDR3 for alpha chain variable domain of TCR clone 37368 (TRAV26-1, TRAJ37)
CIVRVITVSSNTGKLIF

SEQ ID NO: 74736 - protein, 13 aa, Homo sapiens
  CDR3 for beta chain variable domain of TCR clone 37368 (TRBV14, TRBJ1-2)
CASSHGPSYGYTF

SEQ ID NO: 74737 - protein, 14 aa, Homo sapiens
  CDR3 for alpha chain variable domain of TCR clone 37369 (TRAV38-1, TRAJ45)
CAYDSGGGADGLTF

SEQ ID NO: 74738 - protein, 20 aa, Homo sapiens
  CDR3 for beta chain variable domain of TCR clone 37369 (TRBV28, TRBJ2-1)
CASTPIGRSPGLAGGNEQFF

SEQ ID NO: 74739 - protein, 13 aa, Homo sapiens
  CDR3 for alpha chain variable domain of TCR clone 37370 (TRAV12-2, TRAJ20)
YAVYPSNDYKLSF

SEQ ID NO: 74740 - protein, 15 aa, Homo sapiens
  CDR3 for beta chain variable domain of TCR clone 37370 (TRBV27, TRBJ2-5)
CASSLYPRGGETQYF

SEQ ID NO: 74741 - protein, 12 aa, Homo sapiens
  CDR3 for alpha chain variable domain of TCR clone 37371 (TRAV13-1, TRAJ21)
CAAKEGFNKFYF

SEQ ID NO: 74742 - protein, 13 aa, Homo sapiens
  CDR3 for beta chain variable domain of TCR clone 37371 (TRBV7-3, TRBJ1-1)
CASSQGWGAEAFF

SEQ ID NO: 74743 - protein, 14 aa, Homo sapiens
  CDR3 for alpha chain variable domain of TCR clone 37372 (TRAV17, TRAJ45)
CATASGGGADGFTF

SEQ ID NO: 74744 - protein, 15 aa, Homo sapiens
  CDR3 for beta chain variable domain of TCR clone 37372 (TRBV11-2, TRBJ2-1)
CASSRNRGLMYEQFF

SEQ ID NO: 74745 - protein, 16 aa, Homo sapiens
  CDR3 for alpha chain variable domain of TCR clone 37373 (TRAV8-4, TRAJ45)
CAVSAGVGGGADGLTF

SEQ ID NO: 74746 - protein, 14 aa, Homo sapiens
  CDR3 for beta chain variable domain of TCR clone 37373 (TRBV9, TRBJ2-7)
CASSVGVGSYEQYF

SEQ ID NO: 74747 - protein, 16 aa, Homo sapiens
  CDR3 for alpha chain variable domain of TCR clone 37374 (TRAV12-2, TRAJ40)
CAVIRGGTSGTYKYIL

SEQ ID NO: 74748 - protein, 13 aa, Homo sapiens
  CDR3 for beta chain variable domain of TCR clone 37374 (TRBV7-9, TRBJ1-2)
CASSLKQNYGYTF

SEQ ID NO: 74749 - protein, 14 aa, Homo sapiens
  CDR3 for alpha chain variable domain of TCR clone 37375 (TRAV26-1, TRAJ49)
CIVRPSNTGNQFHF

SEQ ID NO: 74750 - protein, 15 aa, Homo sapiens
  CDR3 for beta chain variable domain of TCR clone 37375 (TRBV19, TRBJ1-1)
CASMGFRDVNTEAFF

SEQ ID NO: 74751 - protein, 13 aa, Homo sapiens
  CDR3 for alpha chain variable domain of TCR clone 37376 (TRAV3, TRAJ20)
CAVRSLNDYKPSF

SEQ ID NO: 74752 - protein, 13 aa, Homo sapiens
  CDR3 for beta chain variable domain of TCR clone 37376 (TRBV6-1, TRBJ2-1)
CAGMDPTNNEQFF

SEQ ID NO: 74753 - protein, 15 aa, Homo sapiens
  CDR3 for alpha chain variable domain of TCR clone 37377 (TRAV8-1, TRAJ23)
CAVNSHYNQGGKLIF

SEQ ID NO: 74754 - protein, 15 aa, Homo sapiens
  CDR3 for beta chain variable domain of TCR clone 37377 (TRBV11-2, TRBJ1-6)
CASTLRGTGNSPPHF

SEQ ID NO: 74755 - protein, 14 aa, Homo sapiens
  CDR3 for alpha chain variable domain of TCR clone 37378 (TRAV20, TRAJ20)
CAVRRGYNDYKISF

SEQ ID NO: 74756 - protein, 13 aa, Homo sapiens
  CDR3 for beta chain variable domain of TCR clone 37378 (TRBV19, TRBJ2-5)
CASSETAPETQYF

SEQ ID NO: 74757 - protein, 18 aa, Homo sapiens
  CDR3 for alpha chain variable domain of TCR clone 37379 (TRAV9-2, TRAJ52)
CALSRHNAGGTSYGKLTF

SEQ ID NO: 74758 - protein, 13 aa, Homo sapiens
  CDR3 for beta chain variable domain of TCR clone 37379 (TRBV7-9, TRBJ1-2)
CASSLKQNYGYIF

SEQ ID NO: 74759 - protein, 12 aa, Homo sapiens
  CDR3 for alpha chain variable domain of TCR clone 37380 (TRAV13-2, TRAJ23)
CAERHRGGKLIF

SEQ ID NO: 74760 - protein, 13 aa, Homo sapiens
  CDR3 for beta chain variable domain of TCR clone 37380 (TRBV7-9, TRBJ1-2)
CASSLKQNCGYTF

SEQ ID NO: 74761 - protein, 14 aa, Homo sapiens
  CDR3 for alpha chain variable domain of TCR clone 37381 (TRAV26-1, )
CIDIQNPDPAVYQL

SEQ ID NO: 74762 - protein, 19 aa, Homo sapiens
  CDR3 for beta chain variable domain of TCR clone 37381 (TRBV19, TRBJ2-5)
CASSIGQVTDFFLGETQYF

SEQ ID NO: 74763 - protein, 13 aa, Homo sapiens
  CDR3 for alpha chain variable domain of TCR clone 37382 (TRAV29/DV5, TRAJ31)
CAASRNNNARLMF

SEQ ID NO: 74764 - protein, 15 aa, Homo sapiens
  CDR3 for beta chain variable domain of TCR clone 37382 (TRBV28, TRBJ2-1)
CASSIIAGGRSEQFF

SEQ ID NO: 74765 - protein, 12 aa, Homo sapiens
  CDR3 for alpha chain variable domain of TCR clone 37383 (TRAV29/DV5, TRAJ15)
CASSQAGTALIF

SEQ ID NO: 74766 - protein, 15 aa, Homo sapiens
  CDR3 for beta chain variable domain of TCR clone 37383 (TRBV11-2, TRBJ2-2)
CASSSDRVNAGELFF

SEQ ID NO: 74767 - protein, 18 aa, Homo sapiens
  CDR3 for alpha chain variable domain of TCR clone 37384 (TRAV1-2, TRAJ8)
CLLPLCCERDTGFQKLVF

SEQ ID NO: 74768 - protein, 15 aa, Homo sapiens
  CDR3 for beta chain variable domain of TCR clone 37384 (TRBV6-3, TRBJ2-7)
CASSSPGTVFYEQYF

SEQ ID NO: 74769 - protein, 14 aa, Homo sapiens
  CDR3 for alpha chain variable domain of TCR clone 37385 (TRAV1-2, TRAJ27)
CAVIYNTNAGKSTF

SEQ ID NO: 74770 - protein, 15 aa, Homo sapiens
  CDR3 for beta chain variable domain of TCR clone 37385 (TRBV7-2, TRBJ2-1)
CASSSGLAGGNEQFF

SEQ ID NO: 74771 - protein, 12 aa, Homo sapiens
  CDR3 for alpha chain variable domain of TCR clone 37386 (TRAV30, TRAJ43)
CGTEERGKDMRF

SEQ ID NO: 74772 - protein, 13 aa, Homo sapiens
  CDR3 for beta chain variable domain of TCR clone 37386 (TRBV27, TRBJ2-7)
CASSFSQGYEQYF

SEQ ID NO: 74773 - protein, 16 aa, Homo sapiens
  CDR3 for alpha chain variable domain of TCR clone 37387 (TRAV17, TRAJ52)
CATSNAGGTSYGKLTF

SEQ ID NO: 74774 - protein, 13 aa, Homo sapiens
  CDR3 for beta chain variable domain of TCR clone 37387 (TRBV27, TRBJ1-6)
CASSLVLVSPLDF

SEQ ID NO: 74775 - protein, 16 aa, Homo sapiens
  CDR3 for alpha chain variable domain of TCR clone 37388 (TRAV26-1, TRAJ23)
CIVRVHPYNQGGKLIF

SEQ ID NO: 74776 - protein, 15 aa, Homo sapiens
  CDR3 for beta chain variable domain of TCR clone 37388 (TRBV5-7, TRBJ2-7)
CASGPYFEGSYEQYF

SEQ ID NO: 74777 - protein, 13 aa, Homo sapiens
  CDR3 for alpha chain variable domain of TCR clone 37389 (TRAV8-1, TRAJ39)
CASLNNAGNMLTF

SEQ ID NO: 74778 - protein, 17 aa, Homo sapiens
  CDR3 for beta chain variable domain of TCR clone 37389 (TRBV19, TRBJ2-3)
CASSIDPAGGGTDTQYF

SEQ ID NO: 74779 - protein, 15 aa, Homo sapiens
  CDR3 for alpha chain variable domain of TCR clone 37390 (TRAV3, TRAJ3)
CAVRDRDSSASKIIF

SEQ ID NO: 74780 - protein, 18 aa, Homo sapiens
  CDR3 for beta chain variable domain of TCR clone 37390 (TRBV25-1, TRBJ1-2)
CASSGHQNGQGLIFGYTF

SEQ ID NO: 74781 - protein, 16 aa, Homo sapiens
  CDR3 for alpha chain variable domain of TCR clone 37391 (TRAV1-2, TRAJ10)
CAVRGVLTGGGNKLTF

SEQ ID NO: 74782 - protein, 13 aa, Homo sapiens
  CDR3 for beta chain variable domain of TCR clone 37391 (TRBV3-1, TRBJ1-1)
CASSPGVITEAFF

SEQ ID NO: 74783 - protein, 18 aa, Homo sapiens
  CDR3 for alpha chain variable domain of TCR clone 37392 (TRAV13-1, TRAJ10)
CAASKGRAVTGGGNKLTL

SEQ ID NO: 74784 - protein, 14 aa, Homo sapiens
  CDR3 for beta chain variable domain of TCR clone 37392 (TRBV18, TRBJ2-7)
CASSPRGGAYEQYF

SEQ ID NO: 74785 - protein, 15 aa, Homo sapiens
  CDR3 for alpha chain variable domain of TCR clone 37393 (TRAV13-1, TRAJ44)
CAASRGGSTASKLTF

SEQ ID NO: 74786 - protein, 14 aa, Homo sapiens
  CDR3 for beta chain variable domain of TCR clone 37393 (TRBV7-2, TRBJ2-5)
CASSPRGSSETQYF

SEQ ID NO: 74787 - protein, 14 aa, Homo sapiens
  CDR3 for alpha chain variable domain of TCR clone 37394 (TRAV13-1, TRAJ44)
CAAKATGTASKLTF

SEQ ID NO: 74788 - protein, 13 aa, Homo sapiens
  CDR3 for beta chain variable domain of TCR clone 37394 (TRBV5-5, TRBJ1-2)
CASSFWRGEDYTV

SEQ ID NO: 74789 - protein, 11 aa, Homo sapiens
  CDR3 for alpha chain variable domain of TCR clone 37395 (TRAV2, TRAJ13)
CASVGYQKVTF

SEQ ID NO: 74790 - protein, 14 aa, Homo sapiens
  CDR3 for beta chain variable domain of TCR clone 37395 (TRBV7-3, TRBJ2-1)
CASSLAGGTNEQFF

SEQ ID NO: 74791 - protein, 14 aa, Homo sapiens
  CDR3 for alpha chain variable domain of TCR clone 37396 (TRAV26-1, TRAJ5)
CIVRVRFNRRALTF

SEQ ID NO: 74792 - protein, 17 aa, Homo sapiens
  CDR3 for beta chain variable domain of TCR clone 37396 (TRBV29-1, TRBJ2-3)
CSVEVLAGETSTDTQYL

SEQ ID NO: 74793 - protein, 12 aa, Homo sapiens
  CDR3 for alpha chain variable domain of TCR clone 37397 (TRAV8-6, TRAJ11)
CAVSSGYSTLTF

SEQ ID NO: 74794 - protein, 14 aa, Homo sapiens
  CDR3 for beta chain variable domain of TCR clone 37397 (TRBV7-3, TRBJ2-2)
CASSSGGYTGELFF

SEQ ID NO: 74795 - protein, 16 aa, Homo sapiens
  CDR3 for alpha chain variable domain of TCR clone 37398 (TRAV12-1, TRAJ48)
CVVNMVSNFGNEKLTF

SEQ ID NO: 74796 - protein, 18 aa, Homo sapiens
  CDR3 for beta chain variable domain of TCR clone 37398 (TRBV11-2, TRBJ2-6)
CASSLNPFLGTGANVLTL

SEQ ID NO: 74797 - protein, 14 aa, Homo sapiens
  CDR3 for alpha chain variable domain of TCR clone 37399 (TRAV2, TRAJ9)
CAVEDRSGGFKTIF

SEQ ID NO: 74798 - protein, 12 aa, Homo sapiens
  CDR3 for beta chain variable domain of TCR clone 37399 (TRBV7-9, TRBJ2-7)
CAISLEGYEQYF

SEQ ID NO: 74799 - protein, 17 aa, Homo sapiens
  CDR3 for alpha chain variable domain of TCR clone 37400 (TRAV3, TRAJ42)
CAVRDRDYEGSQGNLIF

SEQ ID NO: 74800 - protein, 15 aa, Homo sapiens
  CDR3 for beta chain variable domain of TCR clone 37400 (TRBV6-6, TRBJ2-7)
CASSYSYGGSYEQYF

SEQ ID NO: 74801 - protein, 14 aa, Homo sapiens
  CDR3 for alpha chain variable domain of TCR clone 37401 (TRAV20, TRAJ29)
CAVQAWVGNTPLVF

SEQ ID NO: 74802 - protein, 17 aa, Homo sapiens
  CDR3 for beta chain variable domain of TCR clone 37401 (TRBV7-8, TRBJ2-6)
CASSAGTGGAGANVLTF

SEQ ID NO: 74803 - protein, 18 aa, Homo sapiens
  CDR3 for alpha chain variable domain of TCR clone 37402 (TRAV13-1, TRAJ52)
CAASKRSAGGTSYGKLPF

SEQ ID NO: 74804 - protein, 13 aa, Homo sapiens
  CDR3 for beta chain variable domain of TCR clone 37402 (TRBV12-4, TRBJ1-2)
CASSLRQGKGYTF

SEQ ID NO: 74805 - protein, 11 aa, Homo sapiens
  CDR3 for alpha chain variable domain of TCR clone 37403 (TRAV8-3, TRAJ15)
CAVGPGTALIF

SEQ ID NO: 74806 - protein, 15 aa, Homo sapiens
  CDR3 for beta chain variable domain of TCR clone 37403 (TRBV7-9, TRBJ2-7)
CASSLALAESYEQYF

SEQ ID NO: 74807 - protein, 11 aa, Homo sapiens
  CDR3 for alpha chain variable domain of TCR clone 37404 (TRAV3, TRAJ21)
CAVGNFNKFYF

SEQ ID NO: 74808 - protein, 12 aa, Homo sapiens
  CDR3 for beta chain variable domain of TCR clone 37404 (TRBV7-3, TRBJ1-1)
CQQPGLGAEAFF

SEQ ID NO: 74809 - protein, 17 aa, Homo sapiens
  CDR3 for alpha chain variable domain of TCR clone 37405 (TRAV3, TRAJ6)
CAVRDGPRAGGSYIPTF

SEQ ID NO: 74810 - protein, 16 aa, Homo sapiens
  CDR3 for beta chain variable domain of TCR clone 37405 (TRBV11-2, TRBJ1-1)
CASSLRQGGEHSKAFF

SEQ ID NO: 74811 - protein, 13 aa, Homo sapiens
  CDR3 for alpha chain variable domain of TCR clone 37406 (TRAV20, TRAJ34)
CAVRSYNTDKLIF

SEQ ID NO: 74812 - protein, 13 aa, Homo sapiens
  CDR3 for beta chain variable domain of TCR clone 37406 (TRBV4-2, TRBJ1-1)
CASSQAGNTEAFF

SEQ ID NO: 74813 - protein, 14 aa, Homo sapiens
  CDR3 for alpha chain variable domain of TCR clone 37407 (TRAV13-1, TRAJ44)
CSAKATGTASKLTF

SEQ ID NO: 74814 - protein, 17 aa, Homo sapiens
  CDR3 for beta chain variable domain of TCR clone 37407 (TRBV7-3, TRBJ2-3)
RASSLMKRMRGADTQYF

SEQ ID NO: 74815 - protein, 12 aa, Homo sapiens
  CDR3 for alpha chain variable domain of TCR clone 37408 (TRAV2, TRAJ24)
CAATDSWGKFQF

SEQ ID NO: 74816 - protein, 15 aa, Homo sapiens
  CDR3 for beta chain variable domain of TCR clone 37408 (TRBV10-3, TRBJ2-2)
CAIYTGGTGTGEMFF

SEQ ID NO: 74817 - protein, 11 aa, Homo sapiens
  CDR3 for alpha chain variable domain of TCR clone 37409 (TRAV21, TRAJ33)
CAVLSNYQLIL

SEQ ID NO: 74818 - protein, 15 aa, Homo sapiens
  CDR3 for beta chain variable domain of TCR clone 37409 (TRBV11-2, TRBJ2-7)
CASSLMVGGSYEQYF

SEQ ID NO: 74819 - protein, 14 aa, Homo sapiens
  CDR3 for alpha chain variable domain of TCR clone 37410 (TRAV12-3, TRAJ10)
SHLPLTGGGNKLTF

SEQ ID NO: 74820 - protein, 14 aa, Homo sapiens
  CDR3 for beta chain variable domain of TCR clone 37410 (TRBV18, TRBJ2-1)
CASSPGTSETEQFF

SEQ ID NO: 74821 - protein, 12 aa, Homo sapiens
  CDR3 for alpha chain variable domain of TCR clone 37411 (TRAV35, TRAJ31)
CAAASNNARLMF

SEQ ID NO: 74822 - protein, 18 aa, Homo sapiens
  CDR3 for beta chain variable domain of TCR clone 37411 (TRBV7-9, TRBJ2-7)
CASSLTTSGSRTWYEQYF

SEQ ID NO: 74823 - protein, 18 aa, Homo sapiens
  CDR3 for alpha chain variable domain of TCR clone 37412 (TRAV21, TRAJ52)
CAVRPSPAGGTSYGKLKF

SEQ ID NO: 74824 - protein, 13 aa, Homo sapiens
  CDR3 for beta chain variable domain of TCR clone 37412 (TRBV7-3, TRBJ1-1)
CASSQDWGAEAFF

SEQ ID NO: 74825 - protein, 14 aa, Homo sapiens
  CDR3 for alpha chain variable domain of TCR clone 37413 (TRAV8-1, TRAJ5)
CAVRTDTGRRALTF

SEQ ID NO: 74826 - protein, 14 aa, Homo sapiens
  CDR3 for beta chain variable domain of TCR clone 37413 (TRBV7-2, TRBJ2-7)
CASSPKTSFYEQYF

SEQ ID NO: 74827 - protein, 18 aa, Homo sapiens
  CDR3 for alpha chain variable domain of TCR clone 37414 (TRAV13-1, TRAJ52)
CAAKNPNAGGTSYGKLTF

SEQ ID NO: 74828 - protein, 13 aa, Homo sapiens
  CDR3 for beta chain variable domain of TCR clone 37414 (TRBV12-5, TRBJ2-3)
CASGDRQSDTQYF

SEQ ID NO: 74829 - protein, 14 aa, Homo sapiens
  CDR3 for alpha chain variable domain of TCR clone 37415 (TRAV25, TRAJ6)
CAGRESGGSYIPTF

SEQ ID NO: 74830 - protein, 15 aa, Homo sapiens
  CDR3 for beta chain variable domain of TCR clone 37415 (TRBV7-2, TRBJ2-1)
CASSSGLAGGNEQFF

SEQ ID NO: 74831 - protein, 11 aa, Homo sapiens
  CDR3 for alpha chain variable domain of TCR clone 37416 (TRAV12-1, TRAJ43)
CVEYDNNDMRF

SEQ ID NO: 74832 - protein, 16 aa, Homo sapiens
  CDR3 for beta chain variable domain of TCR clone 37416 (TRBV5-4, TRBJ2-1)
CASSLVGSGQDNEQFF

SEQ ID NO: 74833 - protein, 12 aa, Homo sapiens
  CDR3 for alpha chain variable domain of TCR clone 37417 (TRAV1-1, TRAJ39)
CAVPVVGNMLTF

SEQ ID NO: 74834 - protein, 13 aa, Homo sapiens
  CDR3 for beta chain variable domain of TCR clone 37417 (TRBV6-1, TRBJ2-1)
CASEGSSYNEQFF

SEQ ID NO: 74835 - protein, 13 aa, Homo sapiens
  CDR3 for alpha chain variable domain of TCR clone 37418 (TRAV12-3, TRAJ46)
CAVRKSSGDKLTF

SEQ ID NO: 74836 - protein, 13 aa, Homo sapiens
  CDR3 for beta chain variable domain of TCR clone 37418 (TRBV6-1, TRBJ2-1)
CASSHDRNNEQFF

SEQ ID NO: 74837 - protein, 11 aa, Homo sapiens
  CDR3 for alpha chain variable domain of TCR clone 37419 (TRAV16, TRAJ42)
CALASQGNLIF

SEQ ID NO: 74838 - protein, 18 aa, Homo sapiens
  CDR3 for beta chain variable domain of TCR clone 37419 (TRBV6-4, TRBJ2-1)
CASSPDRMGNGSINEQFF

SEQ ID NO: 74839 - protein, 15 aa, Homo sapiens
  CDR3 for alpha chain variable domain of TCR clone 37420 (TRAV3, TRAJ9)
CAVRARNTGGFKTIF

SEQ ID NO: 74840 - protein, 12 aa, Homo sapiens
  CDR3 for beta chain variable domain of TCR clone 37420 (TRBV11-2, TRBJ2-7)
CASSLTTYEQYF

SEQ ID NO: 74841 - protein, 11 aa, Homo sapiens
  CDR3 for alpha chain variable domain of TCR clone 37421 (TRAV2, TRAJ33)
CAVDSNYQLIW

SEQ ID NO: 74842 - protein, 15 aa, Homo sapiens
  CDR3 for beta chain variable domain of TCR clone 37421 (TRBV7-9, TRBJ1-5)
CASSQGHQPNQPQHF

SEQ ID NO: 74843 - protein, 17 aa, Homo sapiens
  CDR3 for alpha chain variable domain of TCR clone 37422 (TRAV8-6, TRAJ58)
CAVSSWVGETSGSRLTF

SEQ ID NO: 74844 - protein, 14 aa, Homo sapiens
  CDR3 for beta chain variable domain of TCR clone 37422 (TRBV7-6, TRBJ2-3)
CASSLGTVTDTQYF

SEQ ID NO: 74845 - protein, 14 aa, Homo sapiens
  CDR3 for alpha chain variable domain of TCR clone 37423 (TRAV12-1, TRAJ12)
CVVTSGDSSYKLIF

SEQ ID NO: 74846 - protein, 13 aa, Homo sapiens
  CDR3 for beta chain variable domain of TCR clone 37423 (TRBV12-4, TRBJ1-1)
CASSPGTGFEAFF

SEQ ID NO: 74847 - protein, 13 aa, Homo sapiens
  CDR3 for alpha chain variable domain of TCR clone 37424 (TRAV35, TRAJ43)
YAGYPYNNNDMRF

SEQ ID NO: 74848 - protein, 15 aa, Homo sapiens
  CDR3 for beta chain variable domain of TCR clone 37424 (TRBV25-1, TRBJ1-4)
CASSKRIATNEKLFF

SEQ ID NO: 74849 - protein, 13 aa, Homo sapiens
  CDR3 for alpha chain variable domain of TCR clone 37425 (TRAV27, TRAJ6)
CAGGTRGSYIPTF

SEQ ID NO: 74850 - protein, 16 aa, Homo sapiens
  CDR3 for beta chain variable domain of TCR clone 37425 (TRBV11-2, TRBJ1-1)
CASSLRQGGEHSKAFF

SEQ ID NO: 74851 - protein, 14 aa, Homo sapiens
  CDR3 for alpha chain variable domain of TCR clone 37426 (TRAV12-1, TRAJ17)
CVVNYKAAGNKLTF

SEQ ID NO: 74852 - protein, 18 aa, Homo sapiens
  CDR3 for beta chain variable domain of TCR clone 37426 (TRBV20-1, TRBJ2-6)
CSAETTPTHGSGANVLTL

SEQ ID NO: 74853 - protein, 14 aa, Homo sapiens
  CDR3 for alpha chain variable domain of TCR clone 37427 (TRAV35, TRAJ33)
CWPRGRDSNYQLIW

SEQ ID NO: 74854 - protein, 11 aa, Homo sapiens
  CDR3 for beta chain variable domain of TCR clone 37427 (TRBV10-3, TRBJ2-7)
CAINEGLEQYF

SEQ ID NO: 74855 - protein, 18 aa, Homo sapiens
  CDR3 for alpha chain variable domain of TCR clone 37428 (TRAV12-3, TRAJ52)
CAMSVGGAGGTSYGKLAF

SEQ ID NO: 74856 - protein, 15 aa, Homo sapiens
  CDR3 for beta chain variable domain of TCR clone 37428 (TRBV27, TRBJ1-6)
CASSFDRGLGSPLHF

SEQ ID NO: 74857 - protein, 14 aa, Homo sapiens
  CDR3 for alpha chain variable domain of TCR clone 37429 (TRAV17, TRAJ12)
CAILPMDSSYKLIF

SEQ ID NO: 74858 - protein, 14 aa, Homo sapiens
  CDR3 for beta chain variable domain of TCR clone 37429 (TRBV6-7, TRBJ2-3)
VTPRRGTNTDTQYF

SEQ ID NO: 74859 - protein, 14 aa, Homo sapiens
  CDR3 for alpha chain variable domain of TCR clone 37430 (TRAV3, TRAJ21)
CAVESQANFNKFYF

SEQ ID NO: 74860 - protein, 12 aa, Homo sapiens
  CDR3 for beta chain variable domain of TCR clone 37430 (TRBV6-3, TRBJ2-7)
CASSLTTYEQYF

SEQ ID NO: 74861 - protein, 12 aa, Homo sapiens
  CDR3 for alpha chain variable domain of TCR clone 37431 (TRAV12-3, TRAJ40)
RAVSSGTYKYIF

SEQ ID NO: 74862 - protein, 15 aa, Homo sapiens
  CDR3 for beta chain variable domain of TCR clone 37431 (TRBV7-9, TRBJ2-7)
CASSPGGGLTYEQYF

SEQ ID NO: 74863 - protein, 14 aa, Homo sapiens
  CDR3 for alpha chain variable domain of TCR clone 37432 (TRAV16, TRAJ17)
CALSGRAAGNKPTF

SEQ ID NO: 74864 - protein, 17 aa, Homo sapiens
  CDR3 for beta chain variable domain of TCR clone 37432 (TRBV18, TRBJ2-6)
CASSPRQGAVGANVLTF

SEQ ID NO: 74865 - protein, 15 aa, Homo sapiens
  CDR3 for alpha chain variable domain of TCR clone 37433 (TRAV26-1, TRAJ3)
CIVRSGYGSASKIIF

SEQ ID NO: 74866 - protein, 14 aa, Homo sapiens
  CDR3 for beta chain variable domain of TCR clone 37433 (TRBV13, TRBJ2-5)
CASYRRLAEETQYF

SEQ ID NO: 74867 - protein, 20 aa, Homo sapiens
  CDR3 for alpha chain variable domain of TCR clone 37434 (TRAV13-1, TRAJ10)
CAAKGHGRRRQTHLWDRHSA

SEQ ID NO: 74868 - protein, 13 aa, Homo sapiens
  CDR3 for beta chain variable domain of TCR clone 37434 (TRBV20-1, TRBJ1-1)
CSARGGGNTEAFF

SEQ ID NO: 74869 - protein, 20 aa, Homo sapiens
  CDR3 for alpha chain variable domain of TCR clone 37435 (TRAV21, TRAJ4)
AASQPGDSATLAGGYNKLIF

SEQ ID NO: 74870 - protein, 19 aa, Homo sapiens
  CDR3 for beta chain variable domain of TCR clone 37435 (TRBV18, TRBJ1-3)
CDSSPLSRTGMSSGNTIYF

SEQ ID NO: 74871 - protein, 12 aa, Homo sapiens
  CDR3 for alpha chain variable domain of TCR clone 37436 (TRAV13-2, TRAJ8)
CAPWLGFQKLVF

SEQ ID NO: 74872 - protein, 14 aa, Homo sapiens
  CDR3 for beta chain variable domain of TCR clone 37436 (TRBV19, TRBJ2-1)
CASPTFVLSGEQFF

SEQ ID NO: 74873 - protein, 15 aa, Homo sapiens
  CDR3 for alpha chain variable domain of TCR clone 37437 (TRAV21, TRAJ45)
CAVSYSGGGADGLTF

SEQ ID NO: 74874 - protein, 13 aa, Homo sapiens
  CDR3 for beta chain variable domain of TCR clone 37437 (TRBV19, TRBJ1-2)
CASSQGQVYGYTF

SEQ ID NO: 74875 - protein, 15 aa, Homo sapiens
  CDR3 for alpha chain variable domain of TCR clone 37438 (TRAV21, TRAJ45)
CAVSYSGGGADGLTF

SEQ ID NO: 74876 - protein, 13 aa, Homo sapiens
  CDR3 for beta chain variable domain of TCR clone 37438 (TRBV20-1, TRBJ2-5)
CSAPTELQETQYF

SEQ ID NO: 74877 - protein, 16 aa, Homo sapiens
  CDR3 for alpha chain variable domain of TCR clone 37439 (TRAV1-2, TRAJ16)
CAPPGFQMARSCSLQG

SEQ ID NO: 74878 - protein, 16 aa, Homo sapiens
  CDR3 for beta chain variable domain of TCR clone 37439 (TRBV27, TRBJ2-2)
CASSFRGLVRTGELFF

SEQ ID NO: 74879 - protein, 17 aa, Homo sapiens
  CDR3 for alpha chain variable domain of TCR clone 37440 (TRAV3, TRAJ6)
CAVSRRTDTGGSYLPTF

SEQ ID NO: 74880 - protein, 18 aa, Homo sapiens
  CDR3 for beta chain variable domain of TCR clone 37440 (TRBV7-2, TRBJ2-3)
CASSLETSRGRKADTQYF

SEQ ID NO: 74881 - protein, 14 aa, Homo sapiens
  CDR3 for alpha chain variable domain of TCR clone 37441 (TRAV12-3, TRAJ10)
SHLPLTGGGNELTF

SEQ ID NO: 74882 - protein, 15 aa, Homo sapiens
  CDR3 for beta chain variable domain of TCR clone 37441 (TRBV11-2, TRBJ1-3)
CASSLDGTVGNTIYF

SEQ ID NO: 74883 - protein, 14 aa, Homo sapiens
  CDR3 for alpha chain variable domain of TCR clone 37442 (TRAV21, TRAJ45)
CAVSSGGGADGLTF

SEQ ID NO: 74884 - protein, 15 aa, Homo sapiens
  CDR3 for beta chain variable domain of TCR clone 37442 (TRBV6-1, TRBJ2-4)
CASSEAVCTINIQYF

SEQ ID NO: 74885 - protein, 13 aa, Homo sapiens
  CDR3 for alpha chain variable domain of TCR clone 37443 (TRAV21, TRAJ27)
CAARPGNAGKPTF

SEQ ID NO: 74886 - protein, 13 aa, Homo sapiens
  CDR3 for beta chain variable domain of TCR clone 37443 (TRBV13, TRBJ2-1)
CASILGGRGEQFF

SEQ ID NO: 74887 - protein, 15 aa, Homo sapiens
  CDR3 for alpha chain variable domain of TCR clone 37444 (TRAV8-2, TRAJ8)
CVVTDFPTGFQKLVF

SEQ ID NO: 74888 - protein, 12 aa, Homo sapiens
  CDR3 for beta chain variable domain of TCR clone 37444 (TRBV11-2, TRBJ2-2)
CASSLGGGELFF

SEQ ID NO: 74889 - protein, 16 aa, Homo sapiens
  CDR3 for alpha chain variable domain of TCR clone 37445 (TRAV30, TRAJ24)
CGTEIADADSWGKFQF

SEQ ID NO: 74890 - protein, 14 aa, Homo sapiens
  CDR3 for beta chain variable domain of TCR clone 37445 (TRBV19, TRBJ2-1)
CASPTFVLSGEQFF

SEQ ID NO: 74891 - protein, 16 aa, Homo sapiens
  CDR3 for alpha chain variable domain of TCR clone 37446 (TRAV26-2, TRAJ57)
CILRDVGSGGSDKLVF

SEQ ID NO: 74892 - protein, 13 aa, Homo sapiens
  CDR3 for beta chain variable domain of TCR clone 37446 (TRBV18, TRBJ2-3)
CASSPGVTDTQYF

SEQ ID NO: 74893 - protein, 14 aa, Homo sapiens
  CDR3 for alpha chain variable domain of TCR clone 37447 (TRAV2, TRAJ9)
CAVEDRRGGFKTIF

SEQ ID NO: 74894 - protein, 16 aa, Homo sapiens
  CDR3 for beta chain variable domain of TCR clone 37447 (TRBV7-3, TRBJ2-1)
CASSLEGYRSYNEQFF

SEQ ID NO: 74895 - protein, 14 aa, Homo sapiens
  CDR3 for alpha chain variable domain of TCR clone 37448 (TRAV1-2, TRAJ16)
CSVNRFSDGQKLLF

SEQ ID NO: 74896 - protein, 13 aa, Homo sapiens
  CDR3 for beta chain variable domain of TCR clone 37448 (TRBV10-3, TRBJ2-7)
CASKLAVNYEQYF

SEQ ID NO: 74897 - protein, 13 aa, Homo sapiens
  CDR3 for alpha chain variable domain of TCR clone 37449 (TRAV35, TRAJ42)
CAGFPGSQGDLIF

SEQ ID NO: 74898 - protein, 14 aa, Homo sapiens
  CDR3 for beta chain variable domain of TCR clone 37449 (TRBV4-1, TRBJ2-2)
CASSQAANTGELFF

SEQ ID NO: 74899 - protein, 15 aa, Homo sapiens
  CDR3 for alpha chain variable domain of TCR clone 37450 (TRAV12-2, TRAJ53)
CAVNGGGGSNYKLTF

SEQ ID NO: 74900 - protein, 17 aa, Homo sapiens
  CDR3 for beta chain variable domain of TCR clone 37450 (TRBV7-3, TRBJ2-3)
CASSLMKRMRGADPQYF

SEQ ID NO: 74901 - protein, 17 aa, Homo sapiens
  CDR3 for alpha chain variable domain of TCR clone 37451 (TRAV38-2/DV8, TRAJ23)
CALSRKLIFGQGTELSV

SEQ ID NO: 74902 - protein, 14 aa, Homo sapiens
  CDR3 for beta chain variable domain of TCR clone 37451 (TRBV7-9, TRBJ2-2)
CASSLVQDTGELFF

SEQ ID NO: 74903 - protein, 14 aa, Homo sapiens
  CDR3 for alpha chain variable domain of TCR clone 37452 (TRAV12-2, TRAJ40)
CAVKIPSGTYKYIF

SEQ ID NO: 74904 - protein, 15 aa, Homo sapiens
  CDR3 for beta chain variable domain of TCR clone 37452 (TRBV19, TRBJ1-2)
CASSVGQVLNYGYTF

SEQ ID NO: 74905 - protein, 11 aa, Homo sapiens
  CDR3 for alpha chain variable domain of TCR clone 37453 (TRAV8-6, TRAJ13)
CALGIYQKVTF

SEQ ID NO: 74906 - protein, 16 aa, Homo sapiens
  CDR3 for beta chain variable domain of TCR clone 37453 (TRBV18, TRBJ1-1)
CASSTGVGGRGGEAFF

SEQ ID NO: 74907 - protein, 12 aa, Homo sapiens
  CDR3 for alpha chain variable domain of TCR clone 37454 (TRAV1-2, TRAJ29)
CAVPPGNTPLVF

SEQ ID NO: 74908 - protein, 12 aa, Homo sapiens
  CDR3 for beta chain variable domain of TCR clone 37454 (TRBV7-9, TRBJ2-7)
CASSFGSYEQYF

SEQ ID NO: 74909 - protein, 12 aa, Homo sapiens
  CDR3 for alpha chain variable domain of TCR clone 37455 (TRAV22, TRAJ29)
CAPPPGNTPLVF

SEQ ID NO: 74910 - protein, 16 aa, Homo sapiens
  CDR3 for beta chain variable domain of TCR clone 37455 (TRBV7-3, TRBJ2-2)
CASSLKRGTLSGELFF

SEQ ID NO: 74911 - protein, 13 aa, Homo sapiens
  CDR3 for alpha chain variable domain of TCR clone 37456 (TRAV22, TRAJ29)
CAVGGSGNTPLVF

SEQ ID NO: 74912 - protein, 16 aa, Homo sapiens
  CDR3 for beta chain variable domain of TCR clone 37456 (TRBV2, TRBJ1-3)
CASSGQGPSSGNTIYF

SEQ ID NO: 74913 - protein, 14 aa, Homo sapiens
  CDR3 for alpha chain variable domain of TCR clone 37457 (TRAV26-1, TRAJ39)
CIGRGSRAGNMLTF

SEQ ID NO: 74914 - protein, 15 aa, Homo sapiens
  CDR3 for beta chain variable domain of TCR clone 37457 (TRBV7-9, TRBJ1-5)
CASSQGHQPNQPQHF

SEQ ID NO: 74915 - protein, 14 aa, Homo sapiens
  CDR3 for alpha chain variable domain of TCR clone 37458 (TRAV12-3, TRAJ10)
SHLPLTGGGNKLTF

SEQ ID NO: 74916 - protein, 15 aa, Homo sapiens
  CDR3 for beta chain variable domain of TCR clone 37458 (TRBV25-1, TRBJ2-4)
CASSETESAKNMQYF

SEQ ID NO: 74917 - protein, 12 aa, Homo sapiens
  CDR3 for alpha chain variable domain of TCR clone 37459 (TRAV13-1, TRAJ49)
CAASPMGNQFYF

SEQ ID NO: 74918 - protein, 15 aa, Homo sapiens
  CDR3 for beta chain variable domain of TCR clone 37459 (TRBV28, TRBJ2-1)
CASSIIAGGRSEQFF

SEQ ID NO: 74919 - protein, 14 aa, Homo sapiens
  CDR3 for alpha chain variable domain of TCR clone 37460 (TRAV26-2, TRAJ31)
CILIPGNNNARLMF

SEQ ID NO: 74920 - protein, 16 aa, Homo sapiens
  CDR3 for beta chain variable domain of TCR clone 37460 (TRBV7-3, TRBJ2-1)
CASSLVSGSSNNGQFF

SEQ ID NO: 74921 - protein, 11 aa, Homo sapiens
  CDR3 for alpha chain variable domain of TCR clone 37461 (TRAV2, TRAJ13)
CASGGYQKVTF

SEQ ID NO: 74922 - protein, 16 aa, Homo sapiens
  CDR3 for beta chain variable domain of TCR clone 37461 (TRBV6-1, TRBJ2-5)
CARSETLDRGAETQYF

SEQ ID NO: 74923 - protein, 13 aa, Homo sapiens
  CDR3 for alpha chain variable domain of TCR clone 37462 (TRAV27, TRAJ45)
CRSSGGGSDGLTF

SEQ ID NO: 74924 - protein, 14 aa, Homo sapiens
  CDR3 for beta chain variable domain of TCR clone 37462 (TRBV7-9, TRBJ2-1)
CASSSMVGFGEQFF

SEQ ID NO: 74925 - protein, 12 aa, Homo sapiens
  CDR3 for alpha chain variable domain of TCR clone 37463 (TRAV12-1, TRAJ40)
CVVYSGTYKYIF

SEQ ID NO: 74926 - protein, 13 aa, Homo sapiens
  CDR3 for beta chain variable domain of TCR clone 37463 (TRBV7-8, TRBJ2-1)
CASTRDAVDEQFF

SEQ ID NO: 74927 - protein, 15 aa, Homo sapiens
  CDR3 for alpha chain variable domain of TCR clone 37464 (TRAV12-2, TRAJ53)
CAVNGGGGVNYKLTF

SEQ ID NO: 74928 - protein, 17 aa, Homo sapiens
  CDR3 for beta chain variable domain of TCR clone 37464 (TRBV7-3, TRBJ2-3)
RASSLMKRMRGADTQYF

SEQ ID NO: 74929 - protein, 17 aa, Homo sapiens
  CDR3 for alpha chain variable domain of TCR clone 37465 (TRAV1-2, TRAJ13)
CAVPPYFTFGTGTKLQV

SEQ ID NO: 74930 - protein, 15 aa, Homo sapiens
  CDR3 for beta chain variable domain of TCR clone 37465 (TRBV5-1, TRBJ2-3)
CASSLDPASTDTQYF

SEQ ID NO: 74931 - protein, 14 aa, Homo sapiens
  CDR3 for alpha chain variable domain of TCR clone 37466 (TRAV8-4, TRAJ8)
CAVNVGTGFQKLVF

SEQ ID NO: 74932 - protein, 15 aa, Homo sapiens
  CDR3 for beta chain variable domain of TCR clone 37466 (TRBV2, TRBJ2-3)
CASSGEGTGTDTQYF

SEQ ID NO: 74933 - protein, 15 aa, Homo sapiens
  CDR3 for alpha chain variable domain of TCR clone 37467 (TRAV8-3, TRAJ27)
CAVGPSKTNASKSTF

SEQ ID NO: 74934 - protein, 14 aa, Homo sapiens
  CDR3 for beta chain variable domain of TCR clone 37467 (TRBV11-2, TRBJ2-3)
CASSRLARTDTQYF

SEQ ID NO: 74935 - protein, 16 aa, Homo sapiens
  CDR3 for alpha chain variable domain of TCR clone 37468 (TRAV30, TRAJ24)
CGTEVVDADSWGKFQF

SEQ ID NO: 74936 - protein, 16 aa, Homo sapiens
  CDR3 for beta chain variable domain of TCR clone 37468 (TRBV28, TRBJ2-7)
CASSLFFETGGPEQYF

SEQ ID NO: 74937 - protein, 11 aa, Homo sapiens
  CDR3 for alpha chain variable domain of TCR clone 37469 (TRAV21, TRAJ34)
CAHYNTDKLIF

SEQ ID NO: 74938 - protein, 13 aa, Homo sapiens
  CDR3 for beta chain variable domain of TCR clone 37469 (TRBV7-6, TRBJ1-2)
CANSLVADYGYTF

SEQ ID NO: 74939 - protein, 13 aa, Homo sapiens
  CDR3 for alpha chain variable domain of TCR clone 37470 (TRAV29/DV5, TRAJ31)
CAASRNNNARLMF

SEQ ID NO: 74940 - protein, 15 aa, Homo sapiens
  CDR3 for beta chain variable domain of TCR clone 37470 (TRBV11-2, TRBJ2-1)
CASSLAPRAHNEQFF

SEQ ID NO: 74941 - protein, 13 aa, Homo sapiens
  CDR3 for alpha chain variable domain of TCR clone 37471 (TRAV3, TRAJ21)
CAVREPYFNKFYF

SEQ ID NO: 74942 - protein, 17 aa, Homo sapiens
  CDR3 for beta chain variable domain of TCR clone 37471 (TRBV7-8, TRBJ2-6)
CASSAGTGGAGANVLTF

SEQ ID NO: 74943 - protein, 15 aa, Homo sapiens
  CDR3 for alpha chain variable domain of TCR clone 37472 (TRAV17, TRAJ57)
CATGPSQGGSEKLVF

SEQ ID NO: 74944 - protein, 14 aa, Homo sapiens
  CDR3 for beta chain variable domain of TCR clone 37472 (TRBV7-3, TRBJ2-1)
CASSLAGGTNEQFF

SEQ ID NO: 74945 - protein, 15 aa, Homo sapiens
  CDR3 for alpha chain variable domain of TCR clone 37473 (TRAV8-3, TRAJ11)
CAVGLLNSGYSTLTF

SEQ ID NO: 74946 - protein, 15 aa, Homo sapiens
  CDR3 for beta chain variable domain of TCR clone 37473 (TRBV4-1, TRBJ2-5)
CASSQWDLYQETQYF

SEQ ID NO: 74947 - protein, 13 aa, Homo sapiens
  CDR3 for alpha chain variable domain of TCR clone 37474 (TRAV21, TRAJ20)
CAVSRLGDYKLSF

SEQ ID NO: 74948 - protein, 13 aa, Homo sapiens
  CDR3 for beta chain variable domain of TCR clone 37474 (TRBV7-3, TRBJ1-1)
CASSPAGGPEAFF

SEQ ID NO: 74949 - protein, 18 aa, Homo sapiens
  CDR3 for alpha chain variable domain of TCR clone 37475 (TRAV26-1, TRAJ39)
CCVLLHRQGLEAGNMLTF

SEQ ID NO: 74950 - protein, 15 aa, Homo sapiens
  CDR3 for beta chain variable domain of TCR clone 37475 (TRBV7-9, TRBJ1-5)
CASSQGHQPNQPQHF

SEQ ID NO: 74951 - protein, 14 aa, Homo sapiens
  CDR3 for alpha chain variable domain of TCR clone 37476 (TRAV21, TRAJ35)
CAVMPIGFGNVLHF

SEQ ID NO: 74952 - protein, 13 aa, Homo sapiens
  CDR3 for beta chain variable domain of TCR clone 37476 (TRBV23-1, TRBJ1-4)
CASRGKFNEKLFF

SEQ ID NO: 74953 - protein, 13 aa, Homo sapiens
  CDR3 for alpha chain variable domain of TCR clone 37477 (TRAV22, TRAJ29)
CAVGGSGNTPLVF

SEQ ID NO: 74954 - protein, 13 aa, Homo sapiens
  CDR3 for beta chain variable domain of TCR clone 37477 (TRBV4-2, TRBJ1-1)
CASSQAGKTEAFF

SEQ ID NO: 74955 - protein, 13 aa, Homo sapiens
  CDR3 for alpha chain variable domain of TCR clone 37478 (TRAV3, TRAJ16)
CAVRDRNGQKLPF

SEQ ID NO: 74956 - protein, 15 aa, Homo sapiens
  CDR3 for beta chain variable domain of TCR clone 37478 (TRBV5-1, TRBJ2-1)
CASSPPRAPYNKQFF

SEQ ID NO: 74957 - protein, 16 aa, Homo sapiens
  CDR3 for alpha chain variable domain of TCR clone 37479 (TRAV12-2, )
WAVEDIQNPDPAVYQL

SEQ ID NO: 74958 - protein, 16 aa, Homo sapiens
  CDR3 for beta chain variable domain of TCR clone 37479 (TRBV6-1, TRBJ1-2)
CASSGAWQGRSHGYTF

SEQ ID NO: 74959 - protein, 14 aa, Homo sapiens
  CDR3 for alpha chain variable domain of TCR clone 37480 (TRAV2, TRAJ37)
CAVDFTSNTGKLIF

SEQ ID NO: 74960 - protein, 16 aa, Homo sapiens
  CDR3 for beta chain variable domain of TCR clone 37480 (TRBV20-1, TRBJ2-7)
CSATPWEGQASYEQYF

SEQ ID NO: 74961 - protein, 12 aa, Homo sapiens
  CDR3 for alpha chain variable domain of TCR clone 37481 (TRAV16, TRAJ10)
CSRTGGGNKLTF

SEQ ID NO: 74962 - protein, 15 aa, Homo sapiens
  CDR3 for beta chain variable domain of TCR clone 37481 (TRBV6-3, TRBJ2-7)
CASSSPGTVFYEQHF

SEQ ID NO: 74963 - protein, 17 aa, Homo sapiens
  CDR3 for alpha chain variable domain of TCR clone 37482 (TRAV3, TRAJ6)
CAVRDGPRAGGSYIPTF

SEQ ID NO: 74964 - protein, 15 aa, Homo sapiens
  CDR3 for beta chain variable domain of TCR clone 37482 (TRBV7-9, TRBJ1-4)
CASSRTGGFNEKLFF

SEQ ID NO: 74965 - protein, 14 aa, Homo sapiens
  CDR3 for alpha chain variable domain of TCR clone 37483 (TRAV12-1, TRAJ17)
CVVNYKAAGNKLTF

SEQ ID NO: 74966 - protein, 14 aa, Homo sapiens
  CDR3 for beta chain variable domain of TCR clone 37483 (TRBV13, TRBJ2-5)
CASYRRLAEETQYF

SEQ ID NO: 74967 - protein, 15 aa, Homo sapiens
  CDR3 for alpha chain variable domain of TCR clone 37484 (TRAV4, TRAJ17)
CLVGDIGAAGNRLTF

SEQ ID NO: 74968 - protein, 14 aa, Homo sapiens
  CDR3 for beta chain variable domain of TCR clone 37484 (TRBV6-3, TRBJ2-7)
CASSYSVRVYEQYF

SEQ ID NO: 74969 - protein, 12 aa, Homo sapiens
  CDR3 for alpha chain variable domain of TCR clone 37485 (TRAV3, TRAJ26)
CAVRDYGQNFAF

SEQ ID NO: 74970 - protein, 16 aa, Homo sapiens
  CDR3 for beta chain variable domain of TCR clone 37485 (TRBV11-2, TRBJ1-2)
CASSPSGREANYGYTF

SEQ ID NO: 74971 - protein, 16 aa, Homo sapiens
  CDR3 for alpha chain variable domain of TCR clone 37486 (TRAV17, TRAJ52)
CATGIIGGTSYGKLTF

SEQ ID NO: 74972 - protein, 12 aa, Homo sapiens
  CDR3 for beta chain variable domain of TCR clone 37486 (TRBV7-3, TRBJ2-1)
CASSFISNEQFF

SEQ ID NO: 74973 - protein, 12 aa, Homo sapiens
  CDR3 for alpha chain variable domain of TCR clone 37487 (TRAV1-1, TRAJ39)
CAVPVVGNMLTF

SEQ ID NO: 74974 - protein, 12 aa, Homo sapiens
  CDR3 for beta chain variable domain of TCR clone 37487 (TRBV11-2, TRBJ2-2)
CASSLGGGELFF

SEQ ID NO: 74975 - protein, 14 aa, Homo sapiens
  CDR3 for alpha chain variable domain of TCR clone 37488 (TRAV20, TRAJ56)
CAVQFGGASSKLTF

SEQ ID NO: 74976 - protein, 14 aa, Homo sapiens
  CDR3 for beta chain variable domain of TCR clone 37488 (TRBV20-1, TRBJ2-7)
CSAKRGRSSYEQYF

SEQ ID NO: 74977 - protein, 14 aa, Homo sapiens
  CDR3 for alpha chain variable domain of TCR clone 37489 (TRAV12-3, TRAJ10)
SHLPLTGGGNKLTF

SEQ ID NO: 74978 - protein, 15 aa, Homo sapiens
  CDR3 for beta chain variable domain of TCR clone 37489 (TRBV10-3, TRBJ1-3)
RAISDSQGAGNTIYF

SEQ ID NO: 74979 - protein, 14 aa, Homo sapiens
  CDR3 for alpha chain variable domain of TCR clone 37490 (TRAV26-2, TRAJ31)
CILIPGNNNARLMF

SEQ ID NO: 74980 - protein, 16 aa, Homo sapiens
  CDR3 for beta chain variable domain of TCR clone 37490 (TRBV7-3, TRBJ2-1)
CASSLASGSSNNEQFF

SEQ ID NO: 74981 - protein, 14 aa, Homo sapiens
  CDR3 for alpha chain variable domain of TCR clone 37491 (TRAV12-2, TRAJ13)
CAVKKTGGYQKVTF

SEQ ID NO: 74982 - protein, 15 aa, Homo sapiens
  CDR3 for beta chain variable domain of TCR clone 37491 (TRBV19, TRBJ2-1)
CASSNGGGSSNEQFF

SEQ ID NO: 74983 - protein, 12 aa, Homo sapiens
  CDR3 for alpha chain variable domain of TCR clone 37492 (TRAV12-3, TRAJ17)
CAMALTGNKLTF

SEQ ID NO: 74984 - protein, 13 aa, Homo sapiens
  CDR3 for beta chain variable domain of TCR clone 37492 (TRBV7-9, TRBJ1-2)
CASSLKQNYGYTF

SEQ ID NO: 74985 - protein, 11 aa, Homo sapiens
  CDR3 for alpha chain variable domain of TCR clone 37493 (TRAV2, TRAJ33)
RAVDSNYQLIW

SEQ ID NO: 74986 - protein, 15 aa, Homo sapiens
  CDR3 for beta chain variable domain of TCR clone 37493 (TRBV19, TRBJ1-2)
CASSVGQVLNYGYTF

SEQ ID NO: 74987 - protein, 13 aa, Homo sapiens
  CDR3 for alpha chain variable domain of TCR clone 37494 (TRAV21, TRAJ27)
CAALNTNAGKSTF

SEQ ID NO: 74988 - protein, 14 aa, Homo sapiens
  CDR3 for beta chain variable domain of TCR clone 37494 (TRBV27, TRBJ1-1)
CASSLLRGLSEAFF

SEQ ID NO: 74989 - protein, 16 aa, Homo sapiens
  CDR3 for alpha chain variable domain of TCR clone 37495 (TRAV3, TRAJ21)
CAVRDIARGNFNKFYF

SEQ ID NO: 74990 - protein, 13 aa, Homo sapiens
  CDR3 for beta chain variable domain of TCR clone 37495 (TRBV27, TRBJ2-7)
CASSLTTGYEQYF

SEQ ID NO: 74991 - protein, 14 aa, Homo sapiens
  CDR3 for alpha chain variable domain of TCR clone 37496 (TRAV35, TRAJ50)
CAGHRKTSYDKVIF

SEQ ID NO: 74992 - protein, 13 aa, Homo sapiens
  CDR3 for beta chain variable domain of TCR clone 37496 (TRBV7-7, TRBJ2-3)
CASSLGRADTQYF

SEQ ID NO: 74993 - protein, 17 aa, Homo sapiens
  CDR3 for alpha chain variable domain of TCR clone 37497 (TRAV4, TRAJ18)
CLVGERSVGSTLGRLYF

SEQ ID NO: 74994 - protein, 14 aa, Homo sapiens
  CDR3 for beta chain variable domain of TCR clone 37497 (TRBV6-5, TRBJ1-2)
CASSYDGTGGGYAF

SEQ ID NO: 74995 - protein, 12 aa, Homo sapiens
  CDR3 for alpha chain variable domain of TCR clone 37498 (TRAV20, TRAJ39)
CAVGNAGNMLTF

SEQ ID NO: 74996 - protein, 17 aa, Homo sapiens
  CDR3 for beta chain variable domain of TCR clone 37498 (TRBV4-1, TRBJ2-3)
CDSSQGYVSGGTDTQYF

SEQ ID NO: 74997 - protein, 14 aa, Homo sapiens
  CDR3 for alpha chain variable domain of TCR clone 37499 (TRAV21, TRAJ12)
CAVRNGDSSYKLTF

SEQ ID NO: 74998 - protein, 14 aa, Homo sapiens
  CDR3 for beta chain variable domain of TCR clone 37499 (TRBV7-6, TRBJ2-7)
CASSLTGTGNEQYF

SEQ ID NO: 74999 - protein, 11 aa, Homo sapiens
  CDR3 for alpha chain variable domain of TCR clone 37500 (TRAV17, TRAJ9)
CATTGGFKTIF

SEQ ID NO: 75000 - protein, 11 aa, Homo sapiens
  CDR3 for beta chain variable domain of TCR clone 37500 (TRBV10-3, TRBJ2-7)
CAISEGLEQYF

SEQ ID NO: 75001 - protein, 14 aa, Homo sapiens
  CDR3 for alpha chain variable domain of TCR clone 37501 (TRAV36/DV7, TRAJ57)
CAVGFPGGPEKLVF

SEQ ID NO: 75002 - protein, 12 aa, Homo sapiens
  CDR3 for beta chain variable domain of TCR clone 37501 (TRBV19, TRBJ2-7)
CASTSGTYEQYF

SEQ ID NO: 75003 - protein, 12 aa, Homo sapiens
  CDR3 for alpha chain variable domain of TCR clone 37502 (TRAV12-3, TRAJ17)
CAMALTGNKLTF

SEQ ID NO: 75004 - protein, 15 aa, Homo sapiens
  CDR3 for beta chain variable domain of TCR clone 37502 (TRBV20-1, TRBJ2-7)
CSARDRVPGMDEQYF

SEQ ID NO: 75005 - protein, 16 aa, Homo sapiens
  CDR3 for alpha chain variable domain of TCR clone 37503 (TRAV30, TRAJ24)
CGTEIVDADSWGKFQF

SEQ ID NO: 75006 - protein, 14 aa, Homo sapiens
  CDR3 for beta chain variable domain of TCR clone 37503 (TRBV12-5, TRBJ2-5)
CATGSRTHQETQYF

SEQ ID NO: 75007 - protein, 12 aa, Homo sapiens
  CDR3 for alpha chain variable domain of TCR clone 37504 (TRAV2, TRAJ9)
CAVGAGGFKTLF

SEQ ID NO: 75008 - protein, 16 aa, Homo sapiens
  CDR3 for beta chain variable domain of TCR clone 37504 (TRBV13, TRBJ2-2)
CASSPRTGEHTGELFF

SEQ ID NO: 75009 - protein, 13 aa, Homo sapiens
  CDR3 for alpha chain variable domain of TCR clone 37505 (TRAV30, TRAJ6)
CGFIEGGSYIPTF

SEQ ID NO: 75010 - protein, 12 aa, Homo sapiens
  CDR3 for beta chain variable domain of TCR clone 37505 (TRBV14, TRBJ2-5)
CASSHLKETQYF

SEQ ID NO: 75011 - protein, 13 aa, Homo sapiens
  CDR3 for alpha chain variable domain of TCR clone 37506 (TRAV13-1, TRAJ5)
CAASDTGRRALTF

SEQ ID NO: 75012 - protein, 12 aa, Homo sapiens
  CDR3 for beta chain variable domain of TCR clone 37506 (TRBV28, TRBJ2-3)
CASSLYRDTQYL

SEQ ID NO: 75013 - protein, 17 aa, Homo sapiens
  CDR3 for alpha chain variable domain of TCR clone 37507 (TRAV26-1, TRAJ58)
CIVRVGAEETSGSRVTF

SEQ ID NO: 75014 - protein, 18 aa, Homo sapiens
  CDR3 for beta chain variable domain of TCR clone 37507 (TRBV7-9, TRBJ2-7)
CASSLTTSGSRTWYEQYF

SEQ ID NO: 75015 - protein, 13 aa, Homo sapiens
  CDR3 for alpha chain variable domain of TCR clone 37508 (TRAV12-1, TRAJ26)
CVVRRNYGQNFVL

SEQ ID NO: 75016 - protein, 15 aa, Homo sapiens
  CDR3 for beta chain variable domain of TCR clone 37508 (TRBV28, TRBJ2-1)
CASSIIAGGRSEQFF

SEQ ID NO: 75017 - protein, 13 aa, Homo sapiens
  CDR3 for alpha chain variable domain of TCR clone 37509 (TRAV8-3, TRAJ36)
CAVGATGANNLFF

SEQ ID NO: 75018 - protein, 15 aa, Homo sapiens
  CDR3 for beta chain variable domain of TCR clone 37509 (TRBV7-2, TRBJ1-2)
CASSPRAGWSYGYTF

SEQ ID NO: 75019 - protein, 16 aa, Homo sapiens
  CDR3 for alpha chain variable domain of TCR clone 37510 (TRAV30, TRAJ24)
CGTEIVDADSWGKFQF

SEQ ID NO: 75020 - protein, 16 aa, Homo sapiens
  CDR3 for beta chain variable domain of TCR clone 37510 (TRBV4-1, TRBJ2-3)
CASSQSTSGAEDTQYF

SEQ ID NO: 75021 - protein, 14 aa, Homo sapiens
  CDR3 for alpha chain variable domain of TCR clone 37511 (TRAV12-3, TRAJ22)
CAMSLFGSSRQLTF

SEQ ID NO: 75022 - protein, 11 aa, Homo sapiens
  CDR3 for beta chain variable domain of TCR clone 37511 (TRBV12-4, TRBJ2-2)
CASSSAGELFF

SEQ ID NO: 75023 - protein, 12 aa, Homo sapiens
  CDR3 for alpha chain variable domain of TCR clone 37512 (TRAV16, TRAJ10)
CSRTGGGNKLTF

SEQ ID NO: 75024 - protein, 13 aa, Homo sapiens
  CDR3 for beta chain variable domain of TCR clone 37512 (TRBV7-9, TRBJ2-3)
CASSPGSTDTQYF

SEQ ID NO: 75025 - protein, 13 aa, Homo sapiens
  CDR3 for alpha chain variable domain of TCR clone 37513 (TRAV8-3, TRAJ44)
CAVVPGTASKLTF

SEQ ID NO: 75026 - protein, 13 aa, Homo sapiens
  CDR3 for beta chain variable domain of TCR clone 37513 (TRBV7-3, TRBJ1-1)
CASSQDWGAEAFF

SEQ ID NO: 75027 - protein, 14 aa, Homo sapiens
  CDR3 for alpha chain variable domain of TCR clone 37514 (TRAV1-2, TRAJ8)
CAVREDTGFQKLVF

SEQ ID NO: 75028 - protein, 16 aa, Homo sapiens
  CDR3 for beta chain variable domain of TCR clone 37514 (TRBV28, TRBJ1-4)
CASGPPYRGRSEKLFF

SEQ ID NO: 75029 - protein, 16 aa, Homo sapiens
  CDR3 for alpha chain variable domain of TCR clone 37515 (TRAV12-3, TRAJ53)
CAMSLGSGGSNYKLTF

SEQ ID NO: 75030 - protein, 16 aa, Homo sapiens
  CDR3 for beta chain variable domain of TCR clone 37515 (TRBV4-2, TRBJ1-1)
CASSQAGFGMNTEAFF

SEQ ID NO: 75031 - protein, 14 aa, Homo sapiens
  CDR3 for alpha chain variable domain of TCR clone 37516 (TRAV26-1, TRAJ38)
CIADNAGNNRKLIL

SEQ ID NO: 75032 - protein, 14 aa, Homo sapiens
  CDR3 for beta chain variable domain of TCR clone 37516 (TRBV4-1, TRBJ2-2)
CASSQAVNTGELFF

SEQ ID NO: 75033 - protein, 12 aa, Homo sapiens
  CDR3 for alpha chain variable domain of TCR clone 37517 (TRAV27, TRAJ35)
CAGADFGNVLHC

SEQ ID NO: 75034 - protein, 16 aa, Homo sapiens
  CDR3 for beta chain variable domain of TCR clone 37517 (TRBV6-1, TRBJ2-1)
CASILRQGISYNEQFF

SEQ ID NO: 75035 - protein, 13 aa, Homo sapiens
  CDR3 for alpha chain variable domain of TCR clone 37518 (TRAV26-2, TRAJ43)
CILRAVNNNDMRF

SEQ ID NO: 75036 - protein, 15 aa, Homo sapiens
  CDR3 for beta chain variable domain of TCR clone 37518 (TRBV7-2, TRBJ2-1)
RASTHGTGIYNEQFF

SEQ ID NO: 75037 - protein, 13 aa, Homo sapiens
  CDR3 for alpha chain variable domain of TCR clone 37519 (TRAV8-1, TRAJ28)
CAVSGAGSYQLTF

SEQ ID NO: 75038 - protein, 18 aa, Homo sapiens
  CDR3 for beta chain variable domain of TCR clone 37519 (TRBV11-2, TRBJ2-3)
CASSLGGASRGAPNTQYF

SEQ ID NO: 75039 - protein, 15 aa, Homo sapiens
  CDR3 for alpha chain variable domain of TCR clone 37520 (TRAV35, TRAJ58)
CAGRRQETSGSRLTF

SEQ ID NO: 75040 - protein, 11 aa, Homo sapiens
  CDR3 for beta chain variable domain of TCR clone 37520 (TRBV11-2, TRBJ1-1)
CASSINTEDFF

SEQ ID NO: 75041 - protein, 14 aa, Homo sapiens
  CDR3 for alpha chain variable domain of TCR clone 37521 (TRAV8-3, TRAJ4)
CAVGASGGYNKLFF

SEQ ID NO: 75042 - protein, 16 aa, Homo sapiens
  CDR3 for beta chain variable domain of TCR clone 37521 (TRBV4-3, TRBJ2-2)
CASSHLQGSGTGELFF

SEQ ID NO: 75043 - protein, 13 aa, Homo sapiens
  CDR3 for alpha chain variable domain of TCR clone 37522 (TRAV27, TRAJ57)
CRSAQGGSEKLVF

SEQ ID NO: 75044 - protein, 13 aa, Homo sapiens
  CDR3 for beta chain variable domain of TCR clone 37522 (TRBV7-3, TRBJ1-1)
CASSQDWGAEAFF

SEQ ID NO: 75045 - protein, 14 aa, Homo sapiens
  CDR3 for alpha chain variable domain of TCR clone 37523 (TRAV1-2, TRAJ16)
CAVNRFSDGQKLLF

SEQ ID NO: 75046 - protein, 19 aa, Homo sapiens
  CDR3 for beta chain variable domain of TCR clone 37523 (TRBV7-9, TRBJ2-6)
CASSLESATVLPGANVLTF

SEQ ID NO: 75047 - protein, 14 aa, Homo sapiens
  CDR3 for alpha chain variable domain of TCR clone 37524 (TRAV17, TRAJ31)
CATVFRNNNARLMF

SEQ ID NO: 75048 - protein, 14 aa, Homo sapiens
  CDR3 for beta chain variable domain of TCR clone 37524 (TRBV12-4, TRBJ2-5)
CASSLWQKQETQYF

SEQ ID NO: 75049 - protein, 11 aa, Homo sapiens
  CDR3 for alpha chain variable domain of TCR clone 37525 (TRAV12-2, TRAJ54)
CAVEGAQKLVF

SEQ ID NO: 75050 - protein, 17 aa, Homo sapiens
  CDR3 for beta chain variable domain of TCR clone 37525 (TRBV18, TRBJ1-3)
CASSPCPTGPSGNTIYF

SEQ ID NO: 75051 - protein, 14 aa, Homo sapiens
  CDR3 for alpha chain variable domain of TCR clone 37526 (TRAV1-1, TRAJ34)
CAVSPNYNTDKLIF

SEQ ID NO: 75052 - protein, 15 aa, Homo sapiens
  CDR3 for beta chain variable domain of TCR clone 37526 (TRBV6-3, TRBJ2-7)
CASSFPGTVFYEQYF

SEQ ID NO: 75053 - protein, 16 aa, Homo sapiens
  CDR3 for alpha chain variable domain of TCR clone 37527 (TRAV21, TRAJ52)
CAVTNAGGTSYGKLTF

SEQ ID NO: 75054 - protein, 20 aa, Homo sapiens
  CDR3 for beta chain variable domain of TCR clone 37527 (TRBV28, TRBJ2-1)
CASTPIGRSPGLAGGNEQFF

SEQ ID NO: 75055 - protein, 16 aa, Homo sapiens
  CDR3 for alpha chain variable domain of TCR clone 37528 (TRAV8-3, TRAJ8)
CAVPRDGNTGFQKLLF

SEQ ID NO: 75056 - protein, 14 aa, Homo sapiens
  CDR3 for beta chain variable domain of TCR clone 37528 (TRBV28, TRBJ1-1)
CASSESGRGTEAFF

SEQ ID NO: 75057 - protein, 14 aa, Homo sapiens
  CDR3 for alpha chain variable domain of TCR clone 37529 (TRAV12-3, TRAJ10)
SHLPLTGGGNKLTF

SEQ ID NO: 75058 - protein, 14 aa, Homo sapiens
  CDR3 for beta chain variable domain of TCR clone 37529 (TRBV7-6, TRBJ2-3)
CASSSGTVTDTQYF

SEQ ID NO: 75059 - protein, 13 aa, Homo sapiens
  CDR3 for alpha chain variable domain of TCR clone 37530 (TRAV13-2, TRAJ22)
CLGWISSARQLTF

SEQ ID NO: 75060 - protein, 15 aa, Homo sapiens
  CDR3 for beta chain variable domain of TCR clone 37530 (TRBV7-2, TRBJ2-3)
CACSSTGLETDTQYF

SEQ ID NO: 75061 - protein, 14 aa, Homo sapiens
  CDR3 for alpha chain variable domain of TCR clone 37531 (TRAV23/DV6, TRAJ22)
CAADPSGSARQLTF

SEQ ID NO: 75062 - protein, 14 aa, Homo sapiens
  CDR3 for beta chain variable domain of TCR clone 37531 (TRBV5-1, TRBJ2-7)
CASSLWGTQDEQYF

SEQ ID NO: 75063 - protein, 14 aa, Homo sapiens
  CDR3 for alpha chain variable domain of TCR clone 37532 (TRAV2, TRAJ9)
CAVEDRSGGFKTIF

SEQ ID NO: 75064 - protein, 12 aa, Homo sapiens
  CDR3 for beta chain variable domain of TCR clone 37532 (TRBV12-4, TRBJ2-4)
CASSSSRNIQYF

SEQ ID NO: 75065 - protein, 11 aa, Homo sapiens
  CDR3 for alpha chain variable domain of TCR clone 37533 (TRAV35, TRAJ30)
CAGPGDDKIIF

SEQ ID NO: 75066 - protein, 18 aa, Homo sapiens
  CDR3 for beta chain variable domain of TCR clone 37533 (TRBV7-6, TRBJ2-1)
CASSPRTSGVSSYNEQFF

SEQ ID NO: 75067 - protein, 14 aa, Homo sapiens
  CDR3 for alpha chain variable domain of TCR clone 37534 (TRAV8-3, TRAJ31)
CAVGRGPNNARLMF

SEQ ID NO: 75068 - protein, 15 aa, Homo sapiens
  CDR3 for beta chain variable domain of TCR clone 37534 (TRBV7-2, TRBJ2-2)
CASSLAGGLTGELFF

SEQ ID NO: 75069 - protein, 13 aa, Homo sapiens
  CDR3 for alpha chain variable domain of TCR clone 37535 (TRAV12-3, TRAJ31)
CAMSANNNARLMF

SEQ ID NO: 75070 - protein, 16 aa, Homo sapiens
  CDR3 for beta chain variable domain of TCR clone 37535 (TRBV7-9, TRBJ1-2)
CASSLGFSSGEDGYAF

SEQ ID NO: 75071 - protein, 12 aa, Homo sapiens
  CDR3 for alpha chain variable domain of TCR clone 37536 (TRAV27, TRAJ58)
CAGARDTSRLTF

SEQ ID NO: 75072 - protein, 14 aa, Homo sapiens
  CDR3 for beta chain variable domain of TCR clone 37536 (TRBV7-3, TRBJ2-1)
YASSLGTSANEQFF

SEQ ID NO: 75073 - protein, 15 aa, Homo sapiens
  CDR3 for alpha chain variable domain of TCR clone 37537 (TRAV13-1, TRAJ57)
CAASNTQGGSEKLVF

SEQ ID NO: 75074 - protein, 16 aa, Homo sapiens
  CDR3 for beta chain variable domain of TCR clone 37537 (TRBV19, TRBJ2-1)
CASGKAGPSSYNEQFF

SEQ ID NO: 75075 - protein, 14 aa, Homo sapiens
  CDR3 for alpha chain variable domain of TCR clone 37538 (TRAV27, TRAJ44)
CAASFTGTASKLTF

SEQ ID NO: 75076 - protein, 13 aa, Homo sapiens
  CDR3 for beta chain variable domain of TCR clone 37538 (TRBV27, TRBJ2-3)
CATSSGGLYTQYF

SEQ ID NO: 75077 - protein, 16 aa, Homo sapiens
  CDR3 for alpha chain variable domain of TCR clone 37539 (TRAV8-3, TRAJ13)
CAVGAYPSGGYQKVTF

SEQ ID NO: 75078 - protein, 12 aa, Homo sapiens
  CDR3 for beta chain variable domain of TCR clone 37539 (TRBV11-2, TRBJ2-2)
CASSLGGGELFF

SEQ ID NO: 75079 - protein, 12 aa, Homo sapiens
  CDR3 for alpha chain variable domain of TCR clone 37540 (TRAV35, TRAJ30)
CAGLNRDDKIIF

SEQ ID NO: 75080 - protein, 15 aa, Homo sapiens
  CDR3 for beta chain variable domain of TCR clone 37540 (TRBV18, TRBJ2-3)
CASSPLAGEADTQYF

SEQ ID NO: 75081 - protein, 13 aa, Homo sapiens
  CDR3 for alpha chain variable domain of TCR clone 37541 (TRAV2, TRAJ29)
CAAQNSGNTPLVI

SEQ ID NO: 75082 - protein, 14 aa, Homo sapiens
  CDR3 for beta chain variable domain of TCR clone 37541 (TRBV7-9, TRBJ2-4)
CASSLAMGGNIQYF

SEQ ID NO: 75083 - protein, 15 aa, Homo sapiens
  CDR3 for alpha chain variable domain of TCR clone 37542 (TRAV20, TRAJ41)
CAVQANSNSGYALNF

SEQ ID NO: 75084 - protein, 18 aa, Homo sapiens
  CDR3 for beta chain variable domain of TCR clone 37542 (TRBV7-9, TRBJ2-7)
CASSLTASGSRTWYEQYF

SEQ ID NO: 75085 - protein, 14 aa, Homo sapiens
  CDR3 for alpha chain variable domain of TCR clone 37543 (TRAV38-1, TRAJ57)
CAFMNTGGSEKLVF

SEQ ID NO: 75086 - protein, 12 aa, Homo sapiens
  CDR3 for beta chain variable domain of TCR clone 37543 (TRBV20-1, TRBJ1-5)
CSTSQGNQPQHL

SEQ ID NO: 75087 - protein, 12 aa, Homo sapiens
  CDR3 for alpha chain variable domain of TCR clone 37544 (TRAV3, TRAJ20)
CAVRDPDYKLSF

SEQ ID NO: 75088 - protein, 13 aa, Homo sapiens
  CDR3 for beta chain variable domain of TCR clone 37544 (TRBV12-4, TRBJ1-2)
CASSLRQGKGYTF

SEQ ID NO: 75089 - protein, 12 aa, Homo sapiens
  CDR3 for alpha chain variable domain of TCR clone 37545 (TRAV3, TRAJ43)
CAVRDPNNDMRF

SEQ ID NO: 75090 - protein, 13 aa, Homo sapiens
  CDR3 for beta chain variable domain of TCR clone 37545 (TRBV10-3, TRBJ2-7)
CASKLAVNYEQYF

SEQ ID NO: 75091 - protein, 12 aa, Homo sapiens
  CDR3 for alpha chain variable domain of TCR clone 37546 (TRAV13-1, TRAJ21)
CAAKEGFNKFYF

SEQ ID NO: 75092 - protein, 18 aa, Homo sapiens
  CDR3 for beta chain variable domain of TCR clone 37546 (TRBV7-9, TRBJ2-7)
CASSLTTSGSRTWYEQYF

SEQ ID NO: 75093 - protein, 13 aa, Homo sapiens
  CDR3 for alpha chain variable domain of TCR clone 37547 (TRAV1-1, TRAJ16)
CAVMFSDGQKLLF

SEQ ID NO: 75094 - protein, 16 aa, Homo sapiens
  CDR3 for beta chain variable domain of TCR clone 37547 (TRBV19, TRBJ2-1)
CASSKAGPSSYNEQFF

SEQ ID NO: 75095 - protein, 12 aa, Homo sapiens
  CDR3 for alpha chain variable domain of TCR clone 37548 (TRAV12-2, TRAJ52)
IGGGTSYGKLTF

SEQ ID NO: 75096 - protein, 13 aa, Homo sapiens
  CDR3 for beta chain variable domain of TCR clone 37548 (TRBV12-4, TRBJ1-1)
CASSPGAGFEAFF

SEQ ID NO: 75097 - protein, 14 aa, Homo sapiens
  CDR3 for alpha chain variable domain of TCR clone 37549 (TRAV16, TRAJ32)
CALKSGGATNKLIF

SEQ ID NO: 75098 - protein, 12 aa, Homo sapiens
  CDR3 for beta chain variable domain of TCR clone 37549 (TRBV7-8, TRBJ2-7)
CASSLGDREQYF

SEQ ID NO: 75099 - protein, 15 aa, Homo sapiens
  CDR3 for alpha chain variable domain of TCR clone 37550 (TRAV12-2, TRAJ53)
CAVNGGGGSNYKLTF

SEQ ID NO: 75100 - protein, 12 aa, Homo sapiens
  CDR3 for beta chain variable domain of TCR clone 37550 (TRBV11-2, TRBJ2-2)
CASSLPTGELFF

SEQ ID NO: 75101 - protein, 15 aa, Homo sapiens
  CDR3 for alpha chain variable domain of TCR clone 37551 (TRAV8-3, TRAJ45)
CASSYSGGGADVLTF

SEQ ID NO: 75102 - protein, 17 aa, Homo sapiens
  CDR3 for beta chain variable domain of TCR clone 37551 (TRBV7-8, TRBJ1-2)
CASSLRPLQGHLYGYTF

SEQ ID NO: 75103 - protein, 14 aa, Homo sapiens
  CDR3 for alpha chain variable domain of TCR clone 37552 (TRAV29/DV5, TRAJ45)
CAASFRGGADGLTF

SEQ ID NO: 75104 - protein, 11 aa, Homo sapiens
  CDR3 for beta chain variable domain of TCR clone 37552 (TRBV11-2, TRBJ2-2)
RASSLPGELFF

SEQ ID NO: 75105 - protein, 14 aa, Homo sapiens
  CDR3 for alpha chain variable domain of TCR clone 37553 (TRAV1-2, TRAJ8)
CAVREDTGFQKLAF

SEQ ID NO: 75106 - protein, 12 aa, Homo sapiens
  CDR3 for beta chain variable domain of TCR clone 37553 (TRBV2, TRBJ2-1)
CAYGPPGNEQFF

SEQ ID NO: 75107 - protein, 10 aa, Homo sapiens
  CDR3 for alpha chain variable domain of TCR clone 37554 (TRAV23/DV6, TRAJ3)
CAATTFALGG

SEQ ID NO: 75108 - protein, 15 aa, Homo sapiens
  CDR3 for beta chain variable domain of TCR clone 37554 (TRBV19, TRBJ1-6)
CASSTQGAAGSPLHF

SEQ ID NO: 75109 - protein, 14 aa, Homo sapiens
  CDR3 for alpha chain variable domain of TCR clone 37555 (TRAV12-2, TRAJ40)
CAVKIPSGTYKYIF

SEQ ID NO: 75110 - protein, 15 aa, Homo sapiens
  CDR3 for beta chain variable domain of TCR clone 37555 (TRBV19, TRBJ2-1)
CASSSPGVPLDEQFF

SEQ ID NO: 75111 - protein, 12 aa, Homo sapiens
  CDR3 for alpha chain variable domain of TCR clone 37556 (TRAV12-3, TRAJ17)
CAMTLTGNKLTF

SEQ ID NO: 75112 - protein, 20 aa, Homo sapiens
  CDR3 for beta chain variable domain of TCR clone 37556 (TRBV7-8, TRBJ2-2)
CASSHLFPGPTIHITGELFL

SEQ ID NO: 75113 - protein, 15 aa, Homo sapiens
  CDR3 for alpha chain variable domain of TCR clone 37557 (TRAV1-2, TRAJ28)
CAVQYSGAGSYQLTF

SEQ ID NO: 75114 - protein, 13 aa, Homo sapiens
  CDR3 for beta chain variable domain of TCR clone 37557 (TRBV20-1, TRBJ2-7)
CSATHTSGHEQYF

SEQ ID NO: 75115 - protein, 15 aa, Homo sapiens
  CDR3 for alpha chain variable domain of TCR clone 37558 (TRAV8-3, TRAJ27)
CAVGPSKTNAGKSTF

SEQ ID NO: 75116 - protein, 15 aa, Homo sapiens
  CDR3 for beta chain variable domain of TCR clone 37558 (TRBV7-2, TRBJ2-1)
CACSSGLAGGNEQFF

SEQ ID NO: 75117 - protein, 12 aa, Homo sapiens
  CDR3 for alpha chain variable domain of TCR clone 37559 (TRAV30, TRAJ43)
CGTEERGNDMRF

SEQ ID NO: 75118 - protein, 13 aa, Homo sapiens
  CDR3 for beta chain variable domain of TCR clone 37559 (TRBV27, TRBJ2-7)
CASSFSQGYEQYF

SEQ ID NO: 75119 - protein, 14 aa, Homo sapiens
  CDR3 for alpha chain variable domain of TCR clone 37560 (TRAV12-2, TRAJ40)
CAVKIPSGTYKYIF

SEQ ID NO: 75120 - protein, 12 aa, Homo sapiens
  CDR3 for beta chain variable domain of TCR clone 37560 (TRBV11-3, TRBJ2-1)
CASSPGNNEQFF

SEQ ID NO: 75121 - protein, 13 aa, Homo sapiens
  CDR3 for alpha chain variable domain of TCR clone 37561 (TRAV3, TRAJ41)
CAVSSNSGYELNF

SEQ ID NO: 75122 - protein, 14 aa, Homo sapiens
  CDR3 for beta chain variable domain of TCR clone 37561 (TRBV7-2, TRBJ2-7)
CASSPKTSFYEQYF

SEQ ID NO: 75123 - protein, 13 aa, Homo sapiens
  CDR3 for alpha chain variable domain of TCR clone 37562 (TRAV13-1, TRAJ39)
CSASIVMQATCSP

SEQ ID NO: 75124 - protein, 16 aa, Homo sapiens
  CDR3 for beta chain variable domain of TCR clone 37562 (TRBV20-1, TRBJ1-4)
CSAPGQGLLTNEKLFF

SEQ ID NO: 75125 - protein, 14 aa, Homo sapiens
  CDR3 for alpha chain variable domain of TCR clone 37563 (TRAV2, TRAJ9)
CAVEDRSGGFKAIF

SEQ ID NO: 75126 - protein, 18 aa, Homo sapiens
  CDR3 for beta chain variable domain of TCR clone 37563 (TRBV11-2, TRBJ2-3)
CASSLGGASRGAPNTQYF

SEQ ID NO: 75127 - protein, 14 aa, Homo sapiens
  CDR3 for alpha chain variable domain of TCR clone 37564 (TRAV12-3, TRAJ10)
SHLPLTGGGNKLTF

SEQ ID NO: 75128 - protein, 14 aa, Homo sapiens
  CDR3 for beta chain variable domain of TCR clone 37564 (TRBV12-5, TRBJ2-5)
CASDSRTHQETQYF

SEQ ID NO: 75129 - protein, 13 aa, Homo sapiens
  CDR3 for alpha chain variable domain of TCR clone 37565 (TRAV35, TRAJ42)
CAEFPGSQGNLIF

SEQ ID NO: 75130 - protein, 13 aa, Homo sapiens
  CDR3 for beta chain variable domain of TCR clone 37565 (TRBV29-1, TRBJ2-1)
CSVEGGRVNEQFF

SEQ ID NO: 75131 - protein, 13 aa, Homo sapiens
  CDR3 for alpha chain variable domain of TCR clone 37566 (TRAV2, TRAJ29)
CAAQSSGNTPLVF

SEQ ID NO: 75132 - protein, 14 aa, Homo sapiens
  CDR3 for beta chain variable domain of TCR clone 37566 (TRBV7-9, TRBJ2-4)
CASSLAMGGNIQYF

SEQ ID NO: 75133 - protein, 18 aa, Homo sapiens
  CDR3 for alpha chain variable domain of TCR clone 37567 (TRAV13-1, TRAJ52)
CAASKKSAGGTSYGKLTF

SEQ ID NO: 75134 - protein, 13 aa, Homo sapiens
  CDR3 for beta chain variable domain of TCR clone 37567 (TRBV12-4, TRBJ1-2)
CASSLRQGKGYTF

SEQ ID NO: 75135 - protein, 12 aa, Homo sapiens
  CDR3 for alpha chain variable domain of TCR clone 37568 (TRAV2, TRAJ9)
CAVGAGCFKTIF

SEQ ID NO: 75136 - protein, 14 aa, Homo sapiens
  CDR3 for beta chain variable domain of TCR clone 37568 (TRBV6-1, TRBJ1-3)
CASVQGGGGNTIYF

SEQ ID NO: 75137 - protein, 16 aa, Homo sapiens
  CDR3 for alpha chain variable domain of TCR clone 37569 (TRAV26-1, TRAJ53)
CIVRFAMGGSNYKLTF

SEQ ID NO: 75138 - protein, 12 aa, Homo sapiens
  CDR3 for beta chain variable domain of TCR clone 37569 (TRBV7-9, TRBJ1-5)
CASSPQGQPQHF

SEQ ID NO: 75139 - protein, 13 aa, Homo sapiens
  CDR3 for alpha chain variable domain of TCR clone 37570 (TRAV27, TRAJ3)
ASLRGSSASNIIF

SEQ ID NO: 75140 - protein, 15 aa, Homo sapiens
  CDR3 for beta chain variable domain of TCR clone 37570 (TRBV28, TRBJ1-3)
CASSMGWASGNTIYF

SEQ ID NO: 75141 - protein, 14 aa, Homo sapiens
  CDR3 for alpha chain variable domain of TCR clone 37571 (TRAV14/DV4, TRAJ20)
CAVREGYNDYKLSF

SEQ ID NO: 75142 - protein, 15 aa, Homo sapiens
  CDR3 for beta chain variable domain of TCR clone 37571 (TRBV28, TRBJ2-7)
CASSLISGGSYEQYF

SEQ ID NO: 75143 - protein, 13 aa, Homo sapiens
  CDR3 for alpha chain variable domain of TCR clone 37572 (TRAV23/DV6, TRAJ27)
CAASKPMQANQPL

SEQ ID NO: 75144 - protein, 14 aa, Homo sapiens
  CDR3 for beta chain variable domain of TCR clone 37572 (TRBV7-2, TRBJ2-7)
CASSPKTSFYEQYF

SEQ ID NO: 75145 - protein, 13 aa, Homo sapiens
  CDR3 for alpha chain variable domain of TCR clone 37573 (TRAV21, TRAJ27)
CAARPGNAGKSTF

SEQ ID NO: 75146 - protein, 14 aa, Homo sapiens
  CDR3 for beta chain variable domain of TCR clone 37573 (TRBV20-1, TRBJ2-3)
CRAYSGGRTGTQYF

SEQ ID NO: 75147 - protein, 19 aa, Homo sapiens
  CDR3 for alpha chain variable domain of TCR clone 37574 (TRAV21, TRAJ20)
SLVTQPPTSVLPNDYKLSF

SEQ ID NO: 75148 - protein, 14 aa, Homo sapiens
  CDR3 for beta chain variable domain of TCR clone 37574 (TRBV7-2, TRBJ1-3)
CASSRLRSGNTMYF

SEQ ID NO: 75149 - protein, 10 aa, Homo sapiens
  CDR3 for alpha chain variable domain of TCR clone 37575 (TRAV8-4, TRAJ43)
CAVSADEMRF

SEQ ID NO: 75150 - protein, 15 aa, Homo sapiens
  CDR3 for beta chain variable domain of TCR clone 37575 (TRBV5-1, TRBJ2-3)
CASSVTSGSTDTQYF

SEQ ID NO: 75151 - protein, 15 aa, Homo sapiens
  CDR3 for alpha chain variable domain of TCR clone 37576 (TRAV8-3, TRAJ45)
CASSYSGGGADGLTF

SEQ ID NO: 75152 - protein, 13 aa, Homo sapiens
  CDR3 for beta chain variable domain of TCR clone 37576 (TRBV10-3, TRBJ2-7)
CASKLAVNYQQYF

SEQ ID NO: 75153 - protein, 14 aa, Homo sapiens
  CDR3 for alpha chain variable domain of TCR clone 37577 (TRAV12-3, TRAJ9)
CAMSPNTGGFKTSF

SEQ ID NO: 75154 - protein, 12 aa, Homo sapiens
  CDR3 for beta chain variable domain of TCR clone 37577 (TRBV19, TRBJ1-5)
CASSIAQQPQHF

SEQ ID NO: 75155 - protein, 14 aa, Homo sapiens
  CDR3 for alpha chain variable domain of TCR clone 37578 (TRAV13-1, TRAJ40)
CAASMTSRTYKYIF

SEQ ID NO: 75156 - protein, 15 aa, Homo sapiens
  CDR3 for beta chain variable domain of TCR clone 37578 (TRBV7-3, TRBJ2-1)
CASSPTGGGEVEQFF

SEQ ID NO: 75157 - protein, 18 aa, Homo sapiens
  CDR3 for alpha chain variable domain of TCR clone 37579 (TRAV21, TRAJ52)
CAVRPFPAGGTSYGKLTF

SEQ ID NO: 75158 - protein, 14 aa, Homo sapiens
  CDR3 for beta chain variable domain of TCR clone 37579 (TRBV4-2, TRBJ2-1)
CASGLDRAYNEQFF

SEQ ID NO: 75159 - protein, 14 aa, Homo sapiens
  CDR3 for alpha chain variable domain of TCR clone 37580 (TRAV29/DV5, TRAJ44)
CAAFLVGTASKLTF

SEQ ID NO: 75160 - protein, 15 aa, Homo sapiens
  CDR3 for beta chain variable domain of TCR clone 37580 (TRBV7-3, TRBJ2-2)
CASSETGQGTGELFF

SEQ ID NO: 75161 - protein, 15 aa, Homo sapiens
  CDR3 for alpha chain variable domain of TCR clone 37581 (TRAV26-1, TRAJ22)
CIVRVSFWFCKATDL

SEQ ID NO: 75162 - protein, 11 aa, Homo sapiens
  CDR3 for beta chain variable domain of TCR clone 37581 (TRBV11-2, TRBJ2-2)
CASSLPGELFF

SEQ ID NO: 75163 - protein, 16 aa, Homo sapiens
  CDR3 for alpha chain variable domain of TCR clone 37582 (TRAV1-2, TRAJ10)
CAVRGVLTGGGNKLTF

SEQ ID NO: 75164 - protein, 13 aa, Homo sapiens
  CDR3 for beta chain variable domain of TCR clone 37582 (TRBV15, TRBJ1-6)
CATSGGLNSPLHF

SEQ ID NO: 75165 - protein, 13 aa, Homo sapiens
  CDR3 for alpha chain variable domain of TCR clone 37583 (TRAV12-1, TRAJ33)
CGNAPDSNYQLIW

SEQ ID NO: 75166 - protein, 13 aa, Homo sapiens
  CDR3 for beta chain variable domain of TCR clone 37583 (TRBV7-2, TRBJ2-5)
CASSQTSVETQYF

SEQ ID NO: 75167 - protein, 16 aa, Homo sapiens
  CDR3 for alpha chain variable domain of TCR clone 37584 (TRAV3, TRAJ3)
CAVRDRAESSASKIIF

SEQ ID NO: 75168 - protein, 16 aa, Homo sapiens
  CDR3 for beta chain variable domain of TCR clone 37584 (TRBV20-1, TRBJ2-4)
CSATSLAELAKNIQYF

SEQ ID NO: 75169 - protein, 13 aa, Homo sapiens
  CDR3 for alpha chain variable domain of TCR clone 37585 (TRAV12-1, TRAJ26)
CVVRRNHGQNFVF

SEQ ID NO: 75170 - protein, 14 aa, Homo sapiens
  CDR3 for beta chain variable domain of TCR clone 37585 (TRBV4-2, TRBJ2-1)
CASGLDRAYNEQFF

SEQ ID NO: 75171 - protein, 15 aa, Homo sapiens
  CDR3 for alpha chain variable domain of TCR clone 37586 (TRAV2, TRAJ15)
CAVEDREQAGTALLF

SEQ ID NO: 75172 - protein, 13 aa, Homo sapiens
  CDR3 for beta chain variable domain of TCR clone 37586 (TRBV10-2, TRBJ2-7)
CASGTSGGYEQYF

SEQ ID NO: 75173 - protein, 14 aa, Homo sapiens
  CDR3 for alpha chain variable domain of TCR clone 37587 (TRAV12-2, TRAJ13)
CAVKKIGGYQKVTF

SEQ ID NO: 75174 - protein, 12 aa, Homo sapiens
  CDR3 for beta chain variable domain of TCR clone 37587 (TRBV12-4, TRBJ1-2)
CASSFIWLHLRF

SEQ ID NO: 75175 - protein, 18 aa, Homo sapiens
  CDR3 for alpha chain variable domain of TCR clone 37588 (TRAV17, TRAJ45)
CATSLDLYSGGGADGLTF

SEQ ID NO: 75176 - protein, 15 aa, Homo sapiens
  CDR3 for beta chain variable domain of TCR clone 37588 (TRBV11-2, TRBJ2-1)
CASSKTRGLIYEQFF

SEQ ID NO: 75177 - protein, 13 aa, Homo sapiens
  CDR3 for alpha chain variable domain of TCR clone 37589 (TRAV12-1, TRAJ40)
GVVPTSGTYKYIF

SEQ ID NO: 75178 - protein, 18 aa, Homo sapiens
  CDR3 for beta chain variable domain of TCR clone 37589 (TRBV7-6, TRBJ2-1)
CASSPRTSGMSSYNEQFF

SEQ ID NO: 75179 - protein, 16 aa, Homo sapiens
  CDR3 for alpha chain variable domain of TCR clone 37590 (TRAV1-1, TRAJ24)
CAVRDNQLGEIPVWSR

SEQ ID NO: 75180 - protein, 11 aa, Homo sapiens
  CDR3 for beta chain variable domain of TCR clone 37590 (TRBV19, TRBJ1-1)
CASSIGSEAFF

SEQ ID NO: 75181 - protein, 14 aa, Homo sapiens
  CDR3 for alpha chain variable domain of TCR clone 37591 (TRAV26-1, TRAJ38)
CIANNAGNNRKLIW

SEQ ID NO: 75182 - protein, 13 aa, Homo sapiens
  CDR3 for beta chain variable domain of TCR clone 37591 (TRBV20-1, TRBJ1-1)
CSARGGGNTEAFL

SEQ ID NO: 75183 - protein, 14 aa, Homo sapiens
  CDR3 for alpha chain variable domain of TCR clone 37592 (TRAV1-1, TRAJ23)
CAVSIYNQGGKLIF

SEQ ID NO: 75184 - protein, 13 aa, Homo sapiens
  CDR3 for beta chain variable domain of TCR clone 37592 (TRBV10-3, TRBJ2-7)
CASKLAVNYEQYF

SEQ ID NO: 75185 - protein, 15 aa, Homo sapiens
  CDR3 for alpha chain variable domain of TCR clone 37593 (TRAV17, TRAJ16)
CATALRSSDGQKLLF

SEQ ID NO: 75186 - protein, 15 aa, Homo sapiens
  CDR3 for beta chain variable domain of TCR clone 37593 (TRBV20-1, TRBJ1-1)
CSASRGVTGNTEAFF

SEQ ID NO: 75187 - protein, 12 aa, Homo sapiens
  CDR3 for alpha chain variable domain of TCR clone 37594 (TRAV12-3, TRAJ42)
CAPGGSQGNLIL

SEQ ID NO: 75188 - protein, 13 aa, Homo sapiens
  CDR3 for beta chain variable domain of TCR clone 37594 (TRBV5-7, TRBJ2-6)
CASTSSGANVLTF

SEQ ID NO: 75189 - protein, 12 aa, Homo sapiens
  CDR3 for alpha chain variable domain of TCR clone 37595 (TRAV17, TRAJ4)
CATDGGYNKLIF

SEQ ID NO: 75190 - protein, 13 aa, Homo sapiens
  CDR3 for beta chain variable domain of TCR clone 37595 (TRBV2, TRBJ1-1)
CASSVLMNTEAFF

SEQ ID NO: 75191 - protein, 13 aa, Homo sapiens
  CDR3 for alpha chain variable domain of TCR clone 37596 (TRAV2, TRAJ40)
CAVVTSGTYKYIF

SEQ ID NO: 75192 - protein, 18 aa, Homo sapiens
  CDR3 for beta chain variable domain of TCR clone 37596 (TRBV2, TRBJ2-2)
CQQSTGTSGGGNTGELFF

SEQ ID NO: 75193 - protein, 14 aa, Homo sapiens
  CDR3 for alpha chain variable domain of TCR clone 37597 (TRAV26-1, TRAJ48)
CIVRVGFGNEKLTF

SEQ ID NO: 75194 - protein, 11 aa, Homo sapiens
  CDR3 for beta chain variable domain of TCR clone 37597 (TRBV19, TRBJ1-1)
CASSIGSEAFF

SEQ ID NO: 75195 - protein, 15 aa, Homo sapiens
  CDR3 for alpha chain variable domain of TCR clone 37598 (TRAV17, TRAJ57)
CATGPSQGGSEKLVF

SEQ ID NO: 75196 - protein, 15 aa, Homo sapiens
  CDR3 for beta chain variable domain of TCR clone 37598 (TRBV12-4, TRBJ1-5)
CQQPPVGGSNQPQHF

SEQ ID NO: 75197 - protein, 14 aa, Homo sapiens
  CDR3 for alpha chain variable domain of TCR clone 37599 (TRAV12-3, TRAJ10)
SHLPLTGGGNKLTF

SEQ ID NO: 75198 - protein, 12 aa, Homo sapiens
  CDR3 for beta chain variable domain of TCR clone 37599 (TRBV5-5, TRBJ2-5)
CASSYFGETQYF

SEQ ID NO: 75199 - protein, 13 aa, Homo sapiens
  CDR3 for alpha chain variable domain of TCR clone 37600 (TRAV2, TRAJ40)
CAVVTSGTYKYIF

SEQ ID NO: 75200 - protein, 15 aa, Homo sapiens
  CDR3 for beta chain variable domain of TCR clone 37600 (TRBV11-3, TRBJ2-3)
CASLKDGREGDTKYF

SEQ ID NO: 75201 - protein, 12 aa, Homo sapiens
  CDR3 for alpha chain variable domain of TCR clone 37601 (TRAV12-2, TRAJ44)
CADTGTASKLTF

SEQ ID NO: 75202 - protein, 17 aa, Homo sapiens
  CDR3 for beta chain variable domain of TCR clone 37601 (TRBV20-1, TRBJ1-1)
CSARGTGGSYGNTEAFF

SEQ ID NO: 75203 - protein, 10 aa, Homo sapiens
  CDR3 for alpha chain variable domain of TCR clone 37602 (TRAV21, TRAJ43)
CAVRIGDIRF

SEQ ID NO: 75204 - protein, 13 aa, Homo sapiens
  CDR3 for beta chain variable domain of TCR clone 37602 (TRBV20-1, TRBJ2-7)
CSAPGLADYEQYF

SEQ ID NO: 75205 - protein, 13 aa, Homo sapiens
  CDR3 for alpha chain variable domain of TCR clone 37603 (TRAV2, TRAJ40)
CAVVTSGTYKYIL

SEQ ID NO: 75206 - protein, 15 aa, Homo sapiens
  CDR3 for beta chain variable domain of TCR clone 37603 (TRBV11-3, TRBJ2-3)
CASLKDGWEGDTQYF

SEQ ID NO: 75207 - protein, 12 aa, Homo sapiens
  CDR3 for alpha chain variable domain of TCR clone 37604 (TRAV12-3, TRAJ20)
CTMVRGDYKLSF

SEQ ID NO: 75208 - protein, 14 aa, Homo sapiens
  CDR3 for beta chain variable domain of TCR clone 37604 (TRBV5-5, TRBJ1-5)
CASSGQGVDQPQHF

SEQ ID NO: 75209 - protein, 15 aa, Homo sapiens
  CDR3 for alpha chain variable domain of TCR clone 37605 (TRAV3, TRAJ22)
CAVRDRGGSARQLTL

SEQ ID NO: 75210 - protein, 14 aa, Homo sapiens
  CDR3 for beta chain variable domain of TCR clone 37605 (TRBV20-1, TRBJ2-5)
CSALVPGYQETQYF

SEQ ID NO: 75211 - protein, 13 aa, Homo sapiens
  CDR3 for alpha chain variable domain of TCR clone 37606 (TRAV8-3, TRAJ43)
CAVVPYNNNYMRF

SEQ ID NO: 75212 - protein, 17 aa, Homo sapiens
  CDR3 for beta chain variable domain of TCR clone 37606 (TRBV7-7, TRBJ1-1)
CASIGDRPNLGVTEAFF

SEQ ID NO: 75213 - protein, 11 aa, Homo sapiens
  CDR3 for alpha chain variable domain of TCR clone 37607 (TRAV3, TRAJ21)
CAVGNFNKFYF

SEQ ID NO: 75214 - protein, 13 aa, Homo sapiens
  CDR3 for beta chain variable domain of TCR clone 37607 (TRBV15, TRBJ1-6)
CATSGGLNSPLHF

SEQ ID NO: 75215 - protein, 10 aa, Homo sapiens
  CDR3 for alpha chain variable domain of TCR clone 37608 (TRAV36/DV7, TRAJ48)
CAVGNEKLTF

SEQ ID NO: 75216 - protein, 15 aa, Homo sapiens
  CDR3 for beta chain variable domain of TCR clone 37608 (TRBV6-5, TRBJ1-4)
CANSSVGGAGEKLFF

SEQ ID NO: 75217 - protein, 14 aa, Homo sapiens
  CDR3 for alpha chain variable domain of TCR clone 37609 (TRAV1-2, TRAJ8)
CAVREDTGFQKLVF

SEQ ID NO: 75218 - protein, 13 aa, Homo sapiens
  CDR3 for beta chain variable domain of TCR clone 37609 (TRBV12-4, TRBJ2-5)
CASRKRGKETQYS

SEQ ID NO: 75219 - protein, 16 aa, Homo sapiens
  CDR3 for alpha chain variable domain of TCR clone 37610 (TRAV30, TRAJ26)
CGTESMGDNYGQNFVF

SEQ ID NO: 75220 - protein, 13 aa, Homo sapiens
  CDR3 for beta chain variable domain of TCR clone 37610 (TRBV19, TRBJ1-2)
CASSISEDYGYTF

SEQ ID NO: 75221 - protein, 13 aa, Homo sapiens
  CDR3 for alpha chain variable domain of TCR clone 37611 (TRAV12-3, TRAJ7)
CAMSASGNNRLAF

SEQ ID NO: 75222 - protein, 14 aa, Homo sapiens
  CDR3 for beta chain variable domain of TCR clone 37611 (TRBV13, TRBJ2-5)
CASSLGPRGDTQYF

SEQ ID NO: 75223 - protein, 15 aa, Homo sapiens
  CDR3 for alpha chain variable domain of TCR clone 37612 (TRAV12-1, TRAJ44)
CVADLPTGTASKLTF

SEQ ID NO: 75224 - protein, 13 aa, Homo sapiens
  CDR3 for beta chain variable domain of TCR clone 37612 (TRBV6-5, TRBJ2-5)
CASSPQGGENQYF

SEQ ID NO: 75225 - protein, 15 aa, Homo sapiens
  CDR3 for alpha chain variable domain of TCR clone 37613 (TRAV13-1, TRAJ44)
CAASRGGGTASKLPF

SEQ ID NO: 75226 - protein, 14 aa, Homo sapiens
  CDR3 for beta chain variable domain of TCR clone 37613 (TRBV7-2, TRBJ2-5)
CASSPRGSSETQYF

SEQ ID NO: 75227 - protein, 15 aa, Homo sapiens
  CDR3 for alpha chain variable domain of TCR clone 37614 (TRAV2, TRAJ11)
CAVGGRNSGYSTLTF

SEQ ID NO: 75228 - protein, 12 aa, Homo sapiens
  CDR3 for beta chain variable domain of TCR clone 37614 (TRBV28, TRBJ2-7)
CASSLSSYEQYF

SEQ ID NO: 75229 - protein, 12 aa, Homo sapiens
  CDR3 for alpha chain variable domain of TCR clone 37615 (TRAV17, TRAJ39)
CATGAADNMLTF

SEQ ID NO: 75230 - protein, 14 aa, Homo sapiens
  CDR3 for beta chain variable domain of TCR clone 37615 (TRBV7-9, TRBJ1-2)
CASSRQGANYGYTF

SEQ ID NO: 75231 - protein, 14 aa, Homo sapiens
  CDR3 for alpha chain variable domain of TCR clone 37616 (TRAV12-2, TRAJ17)
CAALFRAAGNKLTF

SEQ ID NO: 75232 - protein, 16 aa, Homo sapiens
  CDR3 for beta chain variable domain of TCR clone 37616 (TRBV20-1, TRBJ2-2)
CSASASGIPGAGELFF

SEQ ID NO: 75233 - protein, 14 aa, Homo sapiens
  CDR3 for alpha chain variable domain of TCR clone 37617 (TRAV26-1, TRAJ38)
CIADNAGNNRKLIW

SEQ ID NO: 75234 - protein, 14 aa, Homo sapiens
  CDR3 for beta chain variable domain of TCR clone 37617 (TRBV29-1, TRBJ2-3)
CSAGAGVGADTQYF

SEQ ID NO: 75235 - protein, 11 aa, Homo sapiens
  CDR3 for alpha chain variable domain of TCR clone 37618 (TRAV13-1, TRAJ30)
CAASRDDKITF

SEQ ID NO: 75236 - protein, 15 aa, Homo sapiens
  CDR3 for beta chain variable domain of TCR clone 37618 (TRBV18, TRBJ1-1)
CASSPSSWVNTEAFF

SEQ ID NO: 75237 - protein, 16 aa, Homo sapiens
  CDR3 for alpha chain variable domain of TCR clone 37619 (TRAV16, TRAJ4)
CALSRMFSGGYNKLIF

SEQ ID NO: 75238 - protein, 16 aa, Homo sapiens
  CDR3 for beta chain variable domain of TCR clone 37619 (TRBV24-1, TRBJ2-3)
CATSNPGTGATDTQYF

SEQ ID NO: 75239 - protein, 12 aa, Homo sapiens
  CDR3 for alpha chain variable domain of TCR clone 37620 (TRAV3, TRAJ20)
CAVRDGDYKLSF

SEQ ID NO: 75240 - protein, 17 aa, Homo sapiens
  CDR3 for beta chain variable domain of TCR clone 37620 (TRBV11-2, TRBJ2-1)
CASSLYPPGVEYNEQFF

SEQ ID NO: 75241 - protein, 11 aa, Homo sapiens
  CDR3 for alpha chain variable domain of TCR clone 37621 (TRAV3, TRAJ21)
CAVGNFNKFYF

SEQ ID NO: 75242 - protein, 16 aa, Homo sapiens
  CDR3 for beta chain variable domain of TCR clone 37621 (TRBV27, TRBJ2-2)
CASSFRGLVRTGELFF

SEQ ID NO: 75243 - protein, 12 aa, Homo sapiens
  CDR3 for alpha chain variable domain of TCR clone 37622 (TRAV35, TRAJ31)
CAAASNNARLMF

SEQ ID NO: 75244 - protein, 13 aa, Homo sapiens
  CDR3 for beta chain variable domain of TCR clone 37622 (TRBV2, TRBJ2-2)
CQQPVRGKRGAVF

SEQ ID NO: 75245 - protein, 16 aa, Homo sapiens
  CDR3 for alpha chain variable domain of TCR clone 37623 (TRAV30, TRAJ24)
CGTEIVDADSWGKFQF

SEQ ID NO: 75246 - protein, 15 aa, Homo sapiens
  CDR3 for beta chain variable domain of TCR clone 37623 (TRBV27, TRBJ2-7)
CASSTAGTGSYEQYF

SEQ ID NO: 75247 - protein, 16 aa, Homo sapiens
  CDR3 for alpha chain variable domain of TCR clone 37624 (TRAV8-3, TRAJ13)
CAVGAYPSGGYQKVTF

SEQ ID NO: 75248 - protein, 15 aa, Homo sapiens
  CDR3 for beta chain variable domain of TCR clone 37624 (TRBV19, TRBJ1-5)
CASSIVWSDNQPQHF

SEQ ID NO: 75249 - protein, 12 aa, Homo sapiens
  CDR3 for alpha chain variable domain of TCR clone 37625 (TRAV13-1, TRAJ53)
AASGGSNYKLTF

SEQ ID NO: 75250 - protein, 15 aa, Homo sapiens
  CDR3 for beta chain variable domain of TCR clone 37625 (TRBV5-1, TRBJ2-1)
CASSPPRATYNEQFF

SEQ ID NO: 75251 - protein, 12 aa, Homo sapiens
  CDR3 for alpha chain variable domain of TCR clone 37626 (TRAV12-1, TRAJ40)
CVFYSGTYKYIF

SEQ ID NO: 75252 - protein, 18 aa, Homo sapiens
  CDR3 for beta chain variable domain of TCR clone 37626 (TRBV12-4, TRBJ2-2)
CASSLVAGTRGRTGELVF

SEQ ID NO: 75253 - protein, 11 aa, Homo sapiens
  CDR3 for alpha chain variable domain of TCR clone 37627 (TRAV2, TRAJ33)
CAVDSNYQLIW

SEQ ID NO: 75254 - protein, 13 aa, Homo sapiens
  CDR3 for beta chain variable domain of TCR clone 37627 (TRBV7-2, TRBJ2-7)
CASSAPSGSEQYF

SEQ ID NO: 75255 - protein, 14 aa, Homo sapiens
  CDR3 for alpha chain variable domain of TCR clone 37628 (TRAV16, TRAJ42)
CALLAGGSQGNLIF

SEQ ID NO: 75256 - protein, 13 aa, Homo sapiens
  CDR3 for beta chain variable domain of TCR clone 37628 (TRBV7-9, TRBJ1-2)
CDSSLKQNYGYTF

SEQ ID NO: 75257 - protein, 13 aa, Homo sapiens
  CDR3 for alpha chain variable domain of TCR clone 37629 (TRAV13-1, TRAJ6)
CSASKGGSYIPTF

SEQ ID NO: 75258 - protein, 14 aa, Homo sapiens
  CDR3 for beta chain variable domain of TCR clone 37629 (TRBV7-2, TRBJ2-1)
CASSLGVGYNEQFF

SEQ ID NO: 75259 - protein, 13 aa, Homo sapiens
  CDR3 for alpha chain variable domain of TCR clone 37630 (TRAV21, TRAJ27)
CAARPGNAGKSTL

SEQ ID NO: 75260 - protein, 16 aa, Homo sapiens
  CDR3 for beta chain variable domain of TCR clone 37630 (TRBV20-1, TRBJ1-2)
CSASMGQGVANYGYTF

SEQ ID NO: 75261 - protein, 15 aa, Homo sapiens
  CDR3 for alpha chain variable domain of TCR clone 37631 (TRAV12-2, TRAJ23)
CAVKPIYNQVGKLIF

SEQ ID NO: 75262 - protein, 15 aa, Homo sapiens
  CDR3 for beta chain variable domain of TCR clone 37631 (TRBV5-1, TRBJ1-2)
CASSLVGGQSQGYTF

SEQ ID NO: 75263 - protein, 11 aa, Homo sapiens
  CDR3 for alpha chain variable domain of TCR clone 37632 (TRAV8-3, TRAJ8)
CAVVGFQKLVF

SEQ ID NO: 75264 - protein, 13 aa, Homo sapiens
  CDR3 for beta chain variable domain of TCR clone 37632 (TRBV10-3, TRBJ2-7)
CASKLAVNYEQYF

SEQ ID NO: 75265 - protein, 13 aa, Homo sapiens
  CDR3 for alpha chain variable domain of TCR clone 37633 (TRAV13-1, TRAJ10)
CAALEGGGNKLTF

SEQ ID NO: 75266 - protein, 13 aa, Homo sapiens
  CDR3 for beta chain variable domain of TCR clone 37633 (TRBV7-9, TRBJ1-2)
CASSLKQNYGDTF

SEQ ID NO: 75267 - protein, 14 aa, Homo sapiens
  CDR3 for alpha chain variable domain of TCR clone 37634 (TRAV25, TRAJ22)
CAVRSSGSARQLTF

SEQ ID NO: 75268 - protein, 16 aa, Homo sapiens
  CDR3 for beta chain variable domain of TCR clone 37634 (TRBV4-3, TRBJ1-1)
CASSPSPGRAAPEAFF

SEQ ID NO: 75269 - protein, 12 aa, Homo sapiens
  CDR3 for alpha chain variable domain of TCR clone 37635 (TRAV27, TRAJ36)
ASTPAGANNLFF

SEQ ID NO: 75270 - protein, 13 aa, Homo sapiens
  CDR3 for beta chain variable domain of TCR clone 37635 (TRBV7-9, TRBJ2-3)
CASSPGSTDTQYL

SEQ ID NO: 75271 - protein, 15 aa, Homo sapiens
  CDR3 for alpha chain variable domain of TCR clone 37636 (TRAV12-3, TRAJ6)
CAMSAKTGGSYIPTF

SEQ ID NO: 75272 - protein, 16 aa, Homo sapiens
  CDR3 for beta chain variable domain of TCR clone 37636 (TRBV20-1, TRBJ1-2)
CSASMGQGVANYGYTF

SEQ ID NO: 75273 - protein, 21 aa, Homo sapiens
  CDR3 for alpha chain variable domain of TCR clone 37637 (TRAV6, TRAJ36)
CARQTASSLGLERDSPLFPIS

SEQ ID NO: 75274 - protein, 14 aa, Homo sapiens
  CDR3 for beta chain variable domain of TCR clone 37637 (TRBV10-2, TRBJ1-5)
CASSSTGRNQPQHF

SEQ ID NO: 75275 - protein, 12 aa, Homo sapiens
  CDR3 for alpha chain variable domain of TCR clone 37638 (TRAV3, TRAJ31)
CAVRDGNARLMF

SEQ ID NO: 75276 - protein, 18 aa, Homo sapiens
  CDR3 for beta chain variable domain of TCR clone 37638 (TRBV7-2, TRBJ2-3)
CDSSLKREGSGITDTQYF

SEQ ID NO: 75277 - protein, 15 aa, Homo sapiens
  CDR3 for alpha chain variable domain of TCR clone 37639 (TRAV21, TRAJ40)
CAVRPQTSGTYKYIF

SEQ ID NO: 75278 - protein, 13 aa, Homo sapiens
  CDR3 for beta chain variable domain of TCR clone 37639 (TRBV7-9, TRBJ1-2)
CASSLKQNYGYTF

SEQ ID NO: 75279 - protein, 14 aa, Homo sapiens
  CDR3 for alpha chain variable domain of TCR clone 37640 (TRAV27, TRAJ23)
CAGVLRNQGGKLIF

SEQ ID NO: 75280 - protein, 13 aa, Homo sapiens
  CDR3 for beta chain variable domain of TCR clone 37640 (TRBV7-3, TRBJ1-2)
CASSLKRGYGYTF

SEQ ID NO: 75281 - protein, 23 aa, Homo sapiens
  CDR3 for alpha chain variable domain of TCR clone 37641 (TRAV26-1, TRAJ38)
CIADNAGNNHIQNPDPTVYQLRD

SEQ ID NO: 75282 - protein, 12 aa, Homo sapiens
  CDR3 for beta chain variable domain of TCR clone 37641 (TRBV11-2, TRBJ2-2)
CASSLGGGELFF

SEQ ID NO: 75283 - protein, 12 aa, Homo sapiens
  CDR3 for alpha chain variable domain of TCR clone 37642 (TRAV1-2, TRAJ33)
CAALDSNYQLIW

SEQ ID NO: 75284 - protein, 14 aa, Homo sapiens
  CDR3 for beta chain variable domain of TCR clone 37642 (TRBV19, TRBJ2-1)
CASPTFVLSGEQFF

SEQ ID NO: 75285 - protein, 18 aa, Homo sapiens
  CDR3 for alpha chain variable domain of TCR clone 37643 (TRAV13-1, TRAJ52)
CAAKNPNAGGTSYGTLTF

SEQ ID NO: 75286 - protein, 15 aa, Homo sapiens
  CDR3 for beta chain variable domain of TCR clone 37643 (TRBV6-1, TRBJ2-3)
CASSERGGITDTQYF

SEQ ID NO: 75287 - protein, 13 aa, Homo sapiens
  CDR3 for alpha chain variable domain of TCR clone 37644 (TRAV12-1, TRAJ40)
CVVPTSGTYKYIF

SEQ ID NO: 75288 - protein, 16 aa, Homo sapiens
  CDR3 for beta chain variable domain of TCR clone 37644 (TRBV7-9, TRBJ1-2)
CASGLGFSSGEDGYTF

SEQ ID NO: 75289 - protein, 16 aa, Homo sapiens
  CDR3 for alpha chain variable domain of TCR clone 37645 (TRAV4, TRAJ22)
CLVGDLYSGSARQLTF

SEQ ID NO: 75290 - protein, 17 aa, Homo sapiens
  CDR3 for beta chain variable domain of TCR clone 37645 (TRBV11-2, TRBJ2-1)
CASSLYPPGVECNEQFF

SEQ ID NO: 75291 - protein, 15 aa, Homo sapiens
  CDR3 for alpha chain variable domain of TCR clone 37646 (TRAV21, TRAJ37)
CAVRPTLSNKGKLIF

SEQ ID NO: 75292 - protein, 16 aa, Homo sapiens
  CDR3 for beta chain variable domain of TCR clone 37646 (TRBV24-1, TRBJ2-3)
CATSDRRQDLTDTQYF

SEQ ID NO: 75293 - protein, 14 aa, Homo sapiens
  CDR3 for alpha chain variable domain of TCR clone 37647 (TRAV3, TRAJ17)
CAVRDAAAGNKLTF

SEQ ID NO: 75294 - protein, 13 aa, Homo sapiens
  CDR3 for beta chain variable domain of TCR clone 37647 (TRBV2, TRBJ1-1)
CASSVSGYTEDFF

SEQ ID NO: 75295 - protein, 10 aa, Homo sapiens
  CDR3 for alpha chain variable domain of TCR clone 37648 (TRAV12-3, TRAJ49)
CAMNDDQFYF

SEQ ID NO: 75296 - protein, 13 aa, Homo sapiens
  CDR3 for beta chain variable domain of TCR clone 37648 (TRBV12-4, TRBJ1-1)
CASSPWTGFEAFF

SEQ ID NO: 75297 - protein, 11 aa, Homo sapiens
  CDR3 for alpha chain variable domain of TCR clone 37649 (TRAV17, TRAJ31)
CATSNNARLMF

SEQ ID NO: 75298 - protein, 13 aa, Homo sapiens
  CDR3 for beta chain variable domain of TCR clone 37649 (TRBV10-3, TRBJ2-7)
CASKLAVNYEQYF

SEQ ID NO: 75299 - protein, 16 aa, Homo sapiens
  CDR3 for alpha chain variable domain of TCR clone 37650 (TRAV13-2, TRAJ53)
CAENANSGGSDYKLTF

SEQ ID NO: 75300 - protein, 19 aa, Homo sapiens
  CDR3 for beta chain variable domain of TCR clone 37650 (TRBV28, TRBJ2-7)
CASSYSGTSRLGWVYEQYF

SEQ ID NO: 75301 - protein, 14 aa, Homo sapiens
  CDR3 for alpha chain variable domain of TCR clone 37651 (TRAV12-2, TRAJ5)
CAVNRSTGRRATTF

SEQ ID NO: 75302 - protein, 12 aa, Homo sapiens
  CDR3 for beta chain variable domain of TCR clone 37651 (TRBV19, TRBJ1-5)
CASSIAQQPQHF

SEQ ID NO: 75303 - protein, 13 aa, Homo sapiens
  CDR3 for alpha chain variable domain of TCR clone 37652 (TRAV13-1, TRAJ5)
CAASDTVRRALTF

SEQ ID NO: 75304 - protein, 12 aa, Homo sapiens
  CDR3 for beta chain variable domain of TCR clone 37652 (TRBV28, TRBJ2-3)
CASSLYRDTQYF

SEQ ID NO: 75305 - protein, 14 aa, Homo sapiens
  CDR3 for alpha chain variable domain of TCR clone 37653 (TRAV12-2, TRAJ45)
CAVNIGGGAGGLTF

SEQ ID NO: 75306 - protein, 13 aa, Homo sapiens
  CDR3 for beta chain variable domain of TCR clone 37653 (TRBV19, TRBJ2-2)
CASSIWSTGELFF

SEQ ID NO: 75307 - protein, 12 aa, Homo sapiens
  CDR3 for alpha chain variable domain of TCR clone 37654 (TRAV12-3, TRAJ17)
CAMALTGNKLTF

SEQ ID NO: 75308 - protein, 13 aa, Homo sapiens
  CDR3 for beta chain variable domain of TCR clone 37654 (TRBV7-3, TRBJ1-1)
CASSQDWGAEAFF

SEQ ID NO: 75309 - protein, 16 aa, Homo sapiens
  CDR3 for alpha chain variable domain of TCR clone 37655 (TRAV30, TRAJ24)
CGTEIVDTDSWGKFQF

SEQ ID NO: 75310 - protein, 15 aa, Homo sapiens
  CDR3 for beta chain variable domain of TCR clone 37655 (TRBV7-9, TRBJ1-4)
CASSARTGGNEKLFF

SEQ ID NO: 75311 - protein, 14 aa, Homo sapiens
  CDR3 for alpha chain variable domain of TCR clone 37656 (TRAV16, TRAJ15)
CALSFNQAGTALIF

SEQ ID NO: 75312 - protein, 16 aa, Homo sapiens
  CDR3 for beta chain variable domain of TCR clone 37656 (TRBV9, TRBJ2-7)
CASSAGPDRSPYEQCF

SEQ ID NO: 75313 - protein, 12 aa, Homo sapiens
  CDR3 for alpha chain variable domain of TCR clone 37657 (TRAV12-3, TRAJ20)
CAMVRGNYKLSF

SEQ ID NO: 75314 - protein, 14 aa, Homo sapiens
  CDR3 for beta chain variable domain of TCR clone 37657 (TRBV5-5, TRBJ1-5)
CASSGQGVDQPQHF

SEQ ID NO: 75315 - protein, 14 aa, Homo sapiens
  CDR3 for alpha chain variable domain of TCR clone 37658 (TRAV9-2, TRAJ39)
CALYIYNAGNMLTF

SEQ ID NO: 75316 - protein, 14 aa, Homo sapiens
  CDR3 for beta chain variable domain of TCR clone 37658 (TRBV7-3, TRBJ2-2)
CASSSGGYTGELFF

SEQ ID NO: 75317 - protein, 13 aa, Homo sapiens
  CDR3 for alpha chain variable domain of TCR clone 37659 (TRAV36/DV7, TRAJ57)
CAVGEGGSEKLVF

SEQ ID NO: 75318 - protein, 15 aa, Homo sapiens
  CDR3 for beta chain variable domain of TCR clone 37659 (TRBV6-3, TRBJ2-7)
CASSSPGTVFYEQYF

SEQ ID NO: 75319 - protein, 16 aa, Homo sapiens
  CDR3 for alpha chain variable domain of TCR clone 37660 (TRAV30, TRAJ24)
CGTEIVDADSWGKFQF

SEQ ID NO: 75320 - protein, 13 aa, Homo sapiens
  CDR3 for beta chain variable domain of TCR clone 37660 (TRBV7-2, TRBJ2-7)
CASSSPSGSEQYF

SEQ ID NO: 75321 - protein, 12 aa, Homo sapiens
  CDR3 for alpha chain variable domain of TCR clone 37661 (TRAV13-1, TRAJ21)
CAAKEGFNKFYF

SEQ ID NO: 75322 - protein, 14 aa, Homo sapiens
  CDR3 for beta chain variable domain of TCR clone 37661 (TRBV5-4, TRBJ1-1)
CASSLDSRRNEAFF

SEQ ID NO: 75323 - protein, 16 aa, Homo sapiens
  CDR3 for alpha chain variable domain of TCR clone 37662 (TRAV38-2/DV8, TRAJ45)
CAYRGNSGGGADGLTF

SEQ ID NO: 75324 - protein, 15 aa, Homo sapiens
  CDR3 for beta chain variable domain of TCR clone 37662 (TRBV6-1, TRBJ2-3)
CASSERWDSTDTQYF

SEQ ID NO: 75325 - protein, 20 aa, Homo sapiens
  CDR3 for alpha chain variable domain of TCR clone 37663 (TRAV26-1, TRAJ42)
CCVLLHRQTYYGGSQGNHIF

SEQ ID NO: 75326 - protein, 16 aa, Homo sapiens
  CDR3 for beta chain variable domain of TCR clone 37663 (TRBV7-3, TRBJ2-2)
CASSLKRGTLSGELFF

SEQ ID NO: 75327 - protein, 14 aa, Homo sapiens
  CDR3 for alpha chain variable domain of TCR clone 37664 (TRAV35, TRAJ22)
CAGLRPGSARQLTF

SEQ ID NO: 75328 - protein, 15 aa, Homo sapiens
  CDR3 for beta chain variable domain of TCR clone 37664 (TRBV7-9, TRBJ1-4)
CASSARTGGNEKLFF

SEQ ID NO: 75329 - protein, 14 aa, Homo sapiens
  CDR3 for alpha chain variable domain of TCR clone 37665 (TRAV12-3, TRAJ33)
CAMSVPGSNYQLIW

SEQ ID NO: 75330 - protein, 16 aa, Homo sapiens
  CDR3 for beta chain variable domain of TCR clone 37665 (TRBV19, TRBJ2-1)
CASSKAGPSSYNEQFF

SEQ ID NO: 75331 - protein, 15 aa, Homo sapiens
  CDR3 for alpha chain variable domain of TCR clone 37666 (TRAV3, TRAJ22)
CAVRDRGGSAWQLTF

SEQ ID NO: 75332 - protein, 14 aa, Homo sapiens
  CDR3 for beta chain variable domain of TCR clone 37666 (TRBV19, TRBJ1-5)
CASSLGLIGQPQHF

SEQ ID NO: 75333 - protein, 11 aa, Homo sapiens
  CDR3 for alpha chain variable domain of TCR clone 37667 (TRAV12-3, TRAJ43)
CAMSVSNDMRF

SEQ ID NO: 75334 - protein, 13 aa, Homo sapiens
  CDR3 for beta chain variable domain of TCR clone 37667 (TRBV20-1, TRBJ1-1)
CSAPLRGGTEAFF

SEQ ID NO: 75335 - protein, 16 aa, Homo sapiens
  CDR3 for alpha chain variable domain of TCR clone 37668 (TRAV3, TRAJ37)
CAVRPHGSGNTGKQIF

SEQ ID NO: 75336 - protein, 16 aa, Homo sapiens
  CDR3 for beta chain variable domain of TCR clone 37668 (TRBV9, TRBJ1-2)
CASSVEEKVSPYGYTF

SEQ ID NO: 75337 - protein, 15 aa, Homo sapiens
  CDR3 for alpha chain variable domain of TCR clone 37669 (TRAV12-1, TRAJ44)
CVVDEYTGTASKLTF

SEQ ID NO: 75338 - protein, 17 aa, Homo sapiens
  CDR3 for beta chain variable domain of TCR clone 37669 (TRBV10-3, TRBJ2-4)
CTSVPSVNKGSKNIQYF

SEQ ID NO: 75339 - protein, 12 aa, Homo sapiens
  CDR3 for alpha chain variable domain of TCR clone 37670 (TRAV26-1, TRAJ36)
CIVRVRADNLFF

SEQ ID NO: 75340 - protein, 13 aa, Homo sapiens
  CDR3 for beta chain variable domain of TCR clone 37670 (TRBV11-2, TRBJ2-5)
CASRRGPSETQYF

SEQ ID NO: 75341 - protein, 17 aa, Homo sapiens
  CDR3 for alpha chain variable domain of TCR clone 37671 (TRAV2, TRAJ36)
CAVEDRGNWGKQPLLWD

SEQ ID NO: 75342 - protein, 14 aa, Homo sapiens
  CDR3 for beta chain variable domain of TCR clone 37671 (TRBV7-9, TRBJ2-5)
CASSLGTAQETQYF

SEQ ID NO: 75343 - protein, 13 aa, Homo sapiens
  CDR3 for alpha chain variable domain of TCR clone 37672 (TRAV27, TRAJ29)
CAGAHSGNTPLVF

SEQ ID NO: 75344 - protein, 13 aa, Homo sapiens
  CDR3 for beta chain variable domain of TCR clone 37672 (TRBV20-1, TRBJ1-1)
CSARAGGNTEAFF

SEQ ID NO: 75345 - protein, 14 aa, Homo sapiens
  CDR3 for alpha chain variable domain of TCR clone 37673 (TRAV12-1, TRAJ9)
CVVTGYTGGFKTIF

SEQ ID NO: 75346 - protein, 13 aa, Homo sapiens
  CDR3 for beta chain variable domain of TCR clone 37673 (TRBV20-1, TRBJ1-1)
CSARAGGNTEDFF

SEQ ID NO: 75347 - protein, 12 aa, Homo sapiens
  CDR3 for alpha chain variable domain of TCR clone 37674 (TRAV13-2, TRAJ8)
CAPWLGFQKLVF

SEQ ID NO: 75348 - protein, 17 aa, Homo sapiens
  CDR3 for beta chain variable domain of TCR clone 37674 (TRBV19, TRBJ2-7)
CASSISFYDSYPYEQYF

SEQ ID NO: 75349 - protein, 15 aa, Homo sapiens
  CDR3 for alpha chain variable domain of TCR clone 37675 (TRAV26-1, TRAJ29)
CIVRVEGSGNTPLVF

SEQ ID NO: 75350 - protein, 15 aa, Homo sapiens
  CDR3 for beta chain variable domain of TCR clone 37675 (TRBV6-5, TRBJ2-1)
CASSYDAGAGNEQFF

SEQ ID NO: 75351 - protein, 16 aa, Homo sapiens
  CDR3 for alpha chain variable domain of TCR clone 37676 (TRAV8-3, TRAJ13)
CAVGAYPSGGYQKVTF

SEQ ID NO: 75352 - protein, 15 aa, Homo sapiens
  CDR3 for beta chain variable domain of TCR clone 37676 (TRBV19, TRBJ1-5)
CASSIVWADNKPQHF

SEQ ID NO: 75353 - protein, 13 aa, Homo sapiens
  CDR3 for alpha chain variable domain of TCR clone 37677 (TRAV12-1, TRAJ16)
CVVNGPDGQKLLF

SEQ ID NO: 75354 - protein, 13 aa, Homo sapiens
  CDR3 for beta chain variable domain of TCR clone 37677 (TRBV2, TRBJ1-1)
CARNPTGGFHSFF

SEQ ID NO: 75355 - protein, 14 aa, Homo sapiens
  CDR3 for alpha chain variable domain of TCR clone 37678 (TRAV23/DV6, TRAJ4)
CAAPSSGGYNKLIF

SEQ ID NO: 75356 - protein, 16 aa, Homo sapiens
  CDR3 for beta chain variable domain of TCR clone 37678 (TRBV19, TRBJ1-1)
CASRFGGPMTGTEAFF

SEQ ID NO: 75357 - protein, 17 aa, Homo sapiens
  CDR3 for alpha chain variable domain of TCR clone 37679 (TRAV3, TRAJ38)
WAVRDCLNAGNNRKLIW

SEQ ID NO: 75358 - protein, 15 aa, Homo sapiens
  CDR3 for beta chain variable domain of TCR clone 37679 (TRBV27, TRBJ2-1)
CASSNGGGSSNEQFF

SEQ ID NO: 75359 - protein, 14 aa, Homo sapiens
  CDR3 for alpha chain variable domain of TCR clone 37680 (TRAV14/DV4, TRAJ15)
CAMRRDQAGTALIF

SEQ ID NO: 75360 - protein, 16 aa, Homo sapiens
  CDR3 for beta chain variable domain of TCR clone 37680 (TRBV15, TRBJ2-3)
CATSSDLGIVTDTQYF

SEQ ID NO: 75361 - protein, 16 aa, Homo sapiens
  CDR3 for alpha chain variable domain of TCR clone 37681 (TRAV30, TRAJ24)
CGTEIVDADSWGKFQF

SEQ ID NO: 75362 - protein, 14 aa, Homo sapiens
  CDR3 for beta chain variable domain of TCR clone 37681 (TRBV7-9, TRBJ2-4)
CASSLAMGGNIQYF

SEQ ID NO: 75363 - protein, 13 aa, Homo sapiens
  CDR3 for alpha chain variable domain of TCR clone 37682 (TRAV12-1, TRAJ6)
CVVFPGGSYIPTF

SEQ ID NO: 75364 - protein, 14 aa, Homo sapiens
  CDR3 for beta chain variable domain of TCR clone 37682 (TRBV20-1, TRBJ1-3)
CSASPTGAGNTIYF

SEQ ID NO: 75365 - protein, 16 aa, Homo sapiens
  CDR3 for alpha chain variable domain of TCR clone 37683 (TRAV30, TRAJ24)
CGTEIVDADSWGKFQF

SEQ ID NO: 75366 - protein, 15 aa, Homo sapiens
  CDR3 for beta chain variable domain of TCR clone 37683 (TRBV28, TRBJ2-5)
CASSPGQGSIETQYF

SEQ ID NO: 75367 - protein, 13 aa, Homo sapiens
  CDR3 for alpha chain variable domain of TCR clone 37684 (TRAV13-1, TRAJ43)
CAASLSNNNDIRF

SEQ ID NO: 75368 - protein, 14 aa, Homo sapiens
  CDR3 for beta chain variable domain of TCR clone 37684 (TRBV5-1, TRBJ2-5)
CASSLAGKQETQYF

SEQ ID NO: 75369 - protein, 14 aa, Homo sapiens
  CDR3 for alpha chain variable domain of TCR clone 37685 (TRAV12-3, TRAJ10)
SHLPLTGGGNKLTF

SEQ ID NO: 75370 - protein, 15 aa, Homo sapiens
  CDR3 for beta chain variable domain of TCR clone 37685 (TRBV7-8, TRBJ1-1)
CASSLGDSRNTEAFF

SEQ ID NO: 75371 - protein, 15 aa, Homo sapiens
  CDR3 for alpha chain variable domain of TCR clone 37686 (TRAV17, TRAJ13)
CATDAGSGGYQKVTF

SEQ ID NO: 75372 - protein, 17 aa, Homo sapiens
  CDR3 for beta chain variable domain of TCR clone 37686 (TRBV11-2, TRBJ2-1)
CASSLHPPGVEYNEQFF

SEQ ID NO: 75373 - protein, 15 aa, Homo sapiens
  CDR3 for alpha chain variable domain of TCR clone 37687 (TRAV20, TRAJ43)
CAVQAGKSSNNDMRF

SEQ ID NO: 75374 - protein, 14 aa, Homo sapiens
  CDR3 for beta chain variable domain of TCR clone 37687 (TRBV27, TRBJ2-1)
CASRHLGGGKKQFF

SEQ ID NO: 75375 - protein, 14 aa, Homo sapiens
  CDR3 for alpha chain variable domain of TCR clone 37688 (TRAV9-2, TRAJ39)
CALYIYNAGNMLTF

SEQ ID NO: 75376 - protein, 12 aa, Homo sapiens
  CDR3 for beta chain variable domain of TCR clone 37688 (TRBV11-2, TRBJ2-2)
CASSPLTGELFF

SEQ ID NO: 75377 - protein, 16 aa, Homo sapiens
  CDR3 for alpha chain variable domain of TCR clone 37689 (TRAV1-2, TRAJ6)
CAVRDQGTGGSYILTF

SEQ ID NO: 75378 - protein, 13 aa, Homo sapiens
  CDR3 for beta chain variable domain of TCR clone 37689 (TRBV28, TRBJ2-7)
CASTPGLAGEQYF

SEQ ID NO: 75379 - protein, 16 aa, Homo sapiens
  CDR3 for alpha chain variable domain of TCR clone 37690 (TRAV12-3, TRAJ50)
CAMRDPMKTSYDKVIF

SEQ ID NO: 75380 - protein, 14 aa, Homo sapiens
  CDR3 for beta chain variable domain of TCR clone 37690 (TRBV25-1, TRBJ1-1)
CASTHLGGNTEAFF

SEQ ID NO: 75381 - protein, 14 aa, Homo sapiens
  CDR3 for alpha chain variable domain of TCR clone 37691 (TRAV38-1, TRAJ40)
CALRPTSGTYKYIF

SEQ ID NO: 75382 - protein, 14 aa, Homo sapiens
  CDR3 for beta chain variable domain of TCR clone 37691 (TRBV25-1, TRBJ1-1)
CASTHLEGNTEAFF

SEQ ID NO: 75383 - protein, 14 aa, Homo sapiens
  CDR3 for alpha chain variable domain of TCR clone 37692 (TRAV12-2, TRAJ44)
CAVNKAGTASKLTF

SEQ ID NO: 75384 - protein, 13 aa, Homo sapiens
  CDR3 for beta chain variable domain of TCR clone 37692 (TRBV15, TRBJ1-6)
CATSGGLNSPLHF

SEQ ID NO: 75385 - protein, 13 aa, Homo sapiens
  CDR3 for alpha chain variable domain of TCR clone 37693 (TRAV1-2, TRAJ9)
CAALNTGGFKTIF

SEQ ID NO: 75386 - protein, 16 aa, Homo sapiens
  CDR3 for beta chain variable domain of TCR clone 37693 (TRBV7-9, TRBJ1-2)
CASSLGFSSGEDGYTF

SEQ ID NO: 75387 - protein, 13 aa, Homo sapiens
  CDR3 for alpha chain variable domain of TCR clone 37694 (TRAV2, TRAJ15)
CAVASQAGTALIF

SEQ ID NO: 75388 - protein, 16 aa, Homo sapiens
  CDR3 for beta chain variable domain of TCR clone 37694 (TRBV5-1, TRBJ1-1)
CASSSGGNSVNTEAFF

SEQ ID NO: 75389 - protein, 16 aa, Homo sapiens
  CDR3 for alpha chain variable domain of TCR clone 37695 (TRAV3, TRAJ21)
WAVRDIERGNFNKFYF

SEQ ID NO: 75390 - protein, 13 aa, Homo sapiens
  CDR3 for beta chain variable domain of TCR clone 37695 (TRBV27, TRBJ2-7)
CASSLTTGYEQYF

SEQ ID NO: 75391 - protein, 12 aa, Homo sapiens
  CDR3 for alpha chain variable domain of TCR clone 37696 (TRAV35, TRAJ49)
CAGWNTGNQFYL

SEQ ID NO: 75392 - protein, 16 aa, Homo sapiens
  CDR3 for beta chain variable domain of TCR clone 37696 (TRBV5-1, TRBJ2-2)
CASSLWDTTNTGELFF

SEQ ID NO: 75393 - protein, 14 aa, Homo sapiens
  CDR3 for alpha chain variable domain of TCR clone 37697 (TRAV26-1, TRAJ34)
CIVIAAYNTDKLIF

SEQ ID NO: 75394 - protein, 15 aa, Homo sapiens
  CDR3 for beta chain variable domain of TCR clone 37697 (TRBV20-1, TRBJ2-7)
CSARVPAAYFYEQYF

SEQ ID NO: 75395 - protein, 13 aa, Homo sapiens
  CDR3 for alpha chain variable domain of TCR clone 37698 (TRAV3, TRAJ15)
CTVRDQAGTALIF

SEQ ID NO: 75396 - protein, 15 aa, Homo sapiens
  CDR3 for beta chain variable domain of TCR clone 37698 (TRBV11-1, TRBJ2-7)
CASSLNYGASYEQYF

SEQ ID NO: 75397 - protein, 13 aa, Homo sapiens
  CDR3 for alpha chain variable domain of TCR clone 37699 (TRAV21, TRAJ20)
CAVGLRVDYKLSF

SEQ ID NO: 75398 - protein, 16 aa, Homo sapiens
  CDR3 for beta chain variable domain of TCR clone 37699 (TRBV27, TRBJ2-2)
CASSFRGLVRTGELFF

SEQ ID NO: 75399 - protein, 14 aa, Homo sapiens
  CDR3 for alpha chain variable domain of TCR clone 37700 (TRAV1-2, TRAJ8)
CAVREDTGFQKLVF

SEQ ID NO: 75400 - protein, 15 aa, Homo sapiens
  CDR3 for beta chain variable domain of TCR clone 37700 (TRBV6-3, TRBJ2-7)
CASSSPGTVFYVQYF

SEQ ID NO: 75401 - protein, 11 aa, Homo sapiens
  CDR3 for alpha chain variable domain of TCR clone 37701 (TRAV23/DV6, TRAJ43)
CAASSGNEMRF

SEQ ID NO: 75402 - protein, 14 aa, Homo sapiens
  CDR3 for beta chain variable domain of TCR clone 37701 (TRBV4-1, TRBJ1-2)
CASSQDPLPYGYTF

SEQ ID NO: 75403 - protein, 14 aa, Homo sapiens
  CDR3 for alpha chain variable domain of TCR clone 37702 (TRAV1-2, TRAJ16)
CAVNRFSDGQKLLF

SEQ ID NO: 75404 - protein, 14 aa, Homo sapiens
  CDR3 for beta chain variable domain of TCR clone 37702 (TRBV5-1, TRBJ2-3)
CASRGQTSTDTQYF

SEQ ID NO: 75405 - protein, 16 aa, Homo sapiens
  CDR3 for alpha chain variable domain of TCR clone 37703 (TRAV3, TRAJ6)
CAVRDGMRRRKLHTYI

SEQ ID NO: 75406 - protein, 15 aa, Homo sapiens
  CDR3 for beta chain variable domain of TCR clone 37703 (TRBV5-1, TRBJ2-1)
CASSLAGSSYNEQFF

SEQ ID NO: 75407 - protein, 12 aa, Homo sapiens
  CDR3 for alpha chain variable domain of TCR clone 37704 (TRAV13-1, TRAJ21)
CAAKEGFNKFYF

SEQ ID NO: 75408 - protein, 20 aa, Homo sapiens
  CDR3 for beta chain variable domain of TCR clone 37704 (TRBV7-8, TRBJ2-2)
WASSHLFPGPTIHITGELFF

SEQ ID NO: 75409 - protein, 14 aa, Homo sapiens
  CDR3 for alpha chain variable domain of TCR clone 37705 (TRAV23/DV6, TRAJ37)
CAASTSSNTGKLIF

SEQ ID NO: 75410 - protein, 15 aa, Homo sapiens
  CDR3 for beta chain variable domain of TCR clone 37705 (TRBV28, TRBJ2-1)
CASSIIAGGRSEQFF

SEQ ID NO: 75411 - protein, 13 aa, Homo sapiens
  CDR3 for alpha chain variable domain of TCR clone 37706 (TRAV12-1, TRAJ7)
CVGNMRGNNRLAF

SEQ ID NO: 75412 - protein, 15 aa, Homo sapiens
  CDR3 for beta chain variable domain of TCR clone 37706 (TRBV27, TRBJ2-3)
CASSLGLAATDTQYF

SEQ ID NO: 75413 - protein, 14 aa, Homo sapiens
  CDR3 for alpha chain variable domain of TCR clone 37707 (TRAV2, TRAJ9)
CAVEDRSGGLKTIF

SEQ ID NO: 75414 - protein, 17 aa, Homo sapiens
  CDR3 for beta chain variable domain of TCR clone 37707 (TRBV4-1, TRBJ2-7)
CASSRDPLGVRGGEQYF

SEQ ID NO: 75415 - protein, 16 aa, Homo sapiens
  CDR3 for alpha chain variable domain of TCR clone 37708 (TRAV12-2, TRAJ45)
CAVIFLSGGGADGLTF

SEQ ID NO: 75416 - protein, 19 aa, Homo sapiens
  CDR3 for beta chain variable domain of TCR clone 37708 (TRBV28, TRBJ2-4)
CASSFHPGGPAHSKNIQYF

SEQ ID NO: 75417 - protein, 15 aa, Homo sapiens
  CDR3 for alpha chain variable domain of TCR clone 37709 (TRAV23/DV6, TRAJ18)
CAASFRGPTLGRLYF

SEQ ID NO: 75418 - protein, 13 aa, Homo sapiens
  CDR3 for beta chain variable domain of TCR clone 37709 (TRBV28, TRBJ2-7)
CAILDRAGGEQYF

SEQ ID NO: 75419 - protein, 11 aa, Homo sapiens
  CDR3 for alpha chain variable domain of TCR clone 37710 (TRAV26-2, TRAJ8)
CILTGFQKLVF

SEQ ID NO: 75420 - protein, 13 aa, Homo sapiens
  CDR3 for beta chain variable domain of TCR clone 37710 (TRBV27, TRBJ1-1)
CASSLSIGAEAFF

SEQ ID NO: 75421 - protein, 12 aa, Homo sapiens
  CDR3 for alpha chain variable domain of TCR clone 37711 (TRAV9-2, TRAJ26)
CALLGYGQNFVF

SEQ ID NO: 75422 - protein, 12 aa, Homo sapiens
  CDR3 for beta chain variable domain of TCR clone 37711 (TRBV29-1, TRBJ2-3)
CSVTGGADTQYF

SEQ ID NO: 75423 - protein, 13 aa, Homo sapiens
  CDR3 for alpha chain variable domain of TCR clone 37712 (TRAV8-3, TRAJ48)
CAVVPFGNEKLTF

SEQ ID NO: 75424 - protein, 15 aa, Homo sapiens
  CDR3 for beta chain variable domain of TCR clone 37712 (TRBV11-2, TRBJ2-1)
CASSSPSTRYDEQFF

SEQ ID NO: 75425 - protein, 14 aa, Homo sapiens
  CDR3 for alpha chain variable domain of TCR clone 37713 (TRAV35, TRAJ33)
CAGSSQDSNYQLIW

SEQ ID NO: 75426 - protein, 15 aa, Homo sapiens
  CDR3 for beta chain variable domain of TCR clone 37713 (TRBV20-1, TRBJ2-7)
CSAESGTSGAYEQYC

SEQ ID NO: 75427 - protein, 12 aa, Homo sapiens
  CDR3 for alpha chain variable domain of TCR clone 37714 (TRAV13-2, TRAJ23)
CAERHRGGKLIF

SEQ ID NO: 75428 - protein, 13 aa, Homo sapiens
  CDR3 for beta chain variable domain of TCR clone 37714 (TRBV7-9, TRBJ1-2)
CASSLKQNYGYTI

SEQ ID NO: 75429 - protein, 14 aa, Homo sapiens
  CDR3 for alpha chain variable domain of TCR clone 37715 (TRAV1-2, TRAJ8)
CAVREGTGFQKLVF

SEQ ID NO: 75430 - protein, 16 aa, Homo sapiens
  CDR3 for beta chain variable domain of TCR clone 37715 (TRBV20-1, TRBJ1-4)
CSAPGQGLLTNEKLFF

SEQ ID NO: 75431 - protein, 12 aa, Homo sapiens
  CDR3 for alpha chain variable domain of TCR clone 37716 (TRAV30, TRAJ43)
CGTEESGNDMRF

SEQ ID NO: 75432 - protein, 13 aa, Homo sapiens
  CDR3 for beta chain variable domain of TCR clone 37716 (TRBV27, TRBJ2-7)
CASSFSQGYEQYF

SEQ ID NO: 75433 - protein, 13 aa, Homo sapiens
  CDR3 for alpha chain variable domain of TCR clone 37717 (TRAV13-1, TRAJ5)
CAASDTSRRALTF

SEQ ID NO: 75434 - protein, 12 aa, Homo sapiens
  CDR3 for beta chain variable domain of TCR clone 37717 (TRBV28, TRBJ2-3)
CASSLYRDTQYF

SEQ ID NO: 75435 - protein, 11 aa, Homo sapiens
  CDR3 for alpha chain variable domain of TCR clone 37718 (TRAV12-2, TRAJ52)
GGGTSYGKLTF

SEQ ID NO: 75436 - protein, 13 aa, Homo sapiens
  CDR3 for beta chain variable domain of TCR clone 37718 (TRBV15, TRBJ2-7)
CATSTTGHYEQYF

SEQ ID NO: 75437 - protein, 11 aa, Homo sapiens
  CDR3 for alpha chain variable domain of TCR clone 37719 (TRAV12-1, TRAJ30)
CVVNGQDKIIF

SEQ ID NO: 75438 - protein, 14 aa, Homo sapiens
  CDR3 for beta chain variable domain of TCR clone 37719 (TRBV25-1, TRBJ1-1)
CASTHLGGNTEAFF

SEQ ID NO: 75439 - protein, 15 aa, Homo sapiens
  CDR3 for alpha chain variable domain of TCR clone 37720 (TRAV3, TRAJ5)
CAVRDLDTRRRALTF

SEQ ID NO: 75440 - protein, 13 aa, Homo sapiens
  CDR3 for beta chain variable domain of TCR clone 37720 (TRBV12-4, TRBJ2-7)
CASSPTETYEQYF

SEQ ID NO: 75441 - protein, 11 aa, Homo sapiens
  CDR3 for alpha chain variable domain of TCR clone 37721 (TRAV1-2, TRAJ20)
CAVANDYKLSF

SEQ ID NO: 75442 - protein, 14 aa, Homo sapiens
  CDR3 for beta chain variable domain of TCR clone 37721 (TRBV7-9, TRBJ2-5)
CASSLDTAQETQYF

SEQ ID NO: 75443 - protein, 10 aa, Homo sapiens
  CDR3 for alpha chain variable domain of TCR clone 37722 (TRAV12-2, TRAJ52)
RSTSYGKLTF

SEQ ID NO: 75444 - protein, 13 aa, Homo sapiens
  CDR3 for beta chain variable domain of TCR clone 37722 (TRBV7-9, TRBJ1-2)
CASSLKQNYGYTF

SEQ ID NO: 75445 - protein, 12 aa, Homo sapiens
  CDR3 for alpha chain variable domain of TCR clone 37723 (TRAV26-1, TRAJ13)
CIVSRGYQKVNF

SEQ ID NO: 75446 - protein, 16 aa, Homo sapiens
  CDR3 for beta chain variable domain of TCR clone 37723 (TRBV27, TRBJ2-1)
CASSLSKGFGLDEQFF

SEQ ID NO: 75447 - protein, 15 aa, Homo sapiens
  CDR3 for alpha chain variable domain of TCR clone 37724 (TRAV2, TRAJ42)
CAVEVYGGSQGNLIF

SEQ ID NO: 75448 - protein, 12 aa, Homo sapiens
  CDR3 for beta chain variable domain of TCR clone 37724 (TRBV11-2, TRBJ2-2)
CASSLGGGELFF

SEQ ID NO: 75449 - protein, 14 aa, Homo sapiens
  CDR3 for alpha chain variable domain of TCR clone 37725 (TRAV12-1, TRAJ17)
CVVNYKAAGNKLTF

SEQ ID NO: 75450 - protein, 16 aa, Homo sapiens
  CDR3 for beta chain variable domain of TCR clone 37725 (TRBV7-8, TRBJ2-4)
CASSAERTLAKNIQYF

SEQ ID NO: 75451 - protein, 14 aa, Homo sapiens
  CDR3 for alpha chain variable domain of TCR clone 37726 (TRAV23/DV6, TRAJ4)
CAANLSGGYNKMIF

SEQ ID NO: 75452 - protein, 11 aa, Homo sapiens
  CDR3 for beta chain variable domain of TCR clone 37726 (TRBV7-9, TRBJ2-3)
CASSPTDTQYF

SEQ ID NO: 75453 - protein, 11 aa, Homo sapiens
  CDR3 for alpha chain variable domain of TCR clone 37727 (TRAV12-1, TRAJ21)
RVVNNLNKFYF

SEQ ID NO: 75454 - protein, 14 aa, Homo sapiens
  CDR3 for beta chain variable domain of TCR clone 37727 (TRBV15, TRBJ1-5)
CATSREQSNQPQHF

SEQ ID NO: 75455 - protein, 14 aa, Homo sapiens
  CDR3 for alpha chain variable domain of TCR clone 37728 (TRAV27, TRAJ22)
CAGVSVLGKGQLTF

SEQ ID NO: 75456 - protein, 17 aa, Homo sapiens
  CDR3 for beta chain variable domain of TCR clone 37728 (TRBV14, TRBJ2-1)
CASSQDRRVTSYNEQFF

SEQ ID NO: 75457 - protein, 13 aa, Homo sapiens
  CDR3 for alpha chain variable domain of TCR clone 37729 (TRAV13-1, TRAJ39)
CSEYSNAGNMLTF

SEQ ID NO: 75458 - protein, 16 aa, Homo sapiens
  CDR3 for beta chain variable domain of TCR clone 37729 (TRBV20-1, TRBJ1-4)
CSAPGQGLLTNEKLFF

SEQ ID NO: 75459 - protein, 20 aa, Homo sapiens
  CDR3 for alpha chain variable domain of TCR clone 37730 (TRAV12-3, TRAJ41)
SLFIRDSQPSDSATPEALNF

SEQ ID NO: 75460 - protein, 18 aa, Homo sapiens
  CDR3 for beta chain variable domain of TCR clone 37730 (TRBV11-2, TRBJ2-3)
CASSLGGASRGAPNTQYF

SEQ ID NO: 75461 - protein, 13 aa, Homo sapiens
  CDR3 for alpha chain variable domain of TCR clone 37731 (TRAV20, TRAJ21)
CAVEGYNFNNFYF

SEQ ID NO: 75462 - protein, 14 aa, Homo sapiens
  CDR3 for beta chain variable domain of TCR clone 37731 (TRBV3-1, TRBJ2-5)
CASSQGPDQETQYF

SEQ ID NO: 75463 - protein, 12 aa, Homo sapiens
  CDR3 for alpha chain variable domain of TCR clone 37732 (TRAV12-1, TRAJ31)
CVSWNNNARLMF

SEQ ID NO: 75464 - protein, 15 aa, Homo sapiens
  CDR3 for beta chain variable domain of TCR clone 37732 (TRBV7-2, TRBJ1-5)
CASSLDRGQEQPQHF

SEQ ID NO: 75465 - protein, 13 aa, Homo sapiens
  CDR3 for alpha chain variable domain of TCR clone 37733 (TRAV25, TRAJ26)
CAGMDNYGQNFVS

SEQ ID NO: 75466 - protein, 15 aa, Homo sapiens
  CDR3 for beta chain variable domain of TCR clone 37733 (TRBV10-3, TRBJ2-1)
CAIRNGTSGHNEQFF

SEQ ID NO: 75467 - protein, 16 aa, Homo sapiens
  CDR3 for alpha chain variable domain of TCR clone 37734 (TRAV24, TRAJ53)
CAFNMGGGGSNYKLTF

SEQ ID NO: 75468 - protein, 13 aa, Homo sapiens
  CDR3 for beta chain variable domain of TCR clone 37734 (TRBV14, TRBJ2-7)
CASSPRRPYEQYF

SEQ ID NO: 75469 - protein, 11 aa, Homo sapiens
  CDR3 for alpha chain variable domain of TCR clone 37735 (TRAV16, TRAJ31)
FALFNNARLMF

SEQ ID NO: 75470 - protein, 15 aa, Homo sapiens
  CDR3 for beta chain variable domain of TCR clone 37735 (TRBV18, TRBJ1-1)
CASSPRQGENTEAFF

SEQ ID NO: 75471 - protein, 21 aa, Homo sapiens
  CDR3 for alpha chain variable domain of TCR clone 37736 (TRAV2, TRAJ9)
CAVRVLEASKLSLEQEQDYLL

SEQ ID NO: 75472 - protein, 15 aa, Homo sapiens
  CDR3 for beta chain variable domain of TCR clone 37736 (TRBV10-3, TRBJ2-1)
CAITFGGGTDNEQFF

SEQ ID NO: 75473 - protein, 16 aa, Homo sapiens
  CDR3 for alpha chain variable domain of TCR clone 37737 (TRAV12-3, TRAJ53)
CAMSPGSGGSNYKLTF

SEQ ID NO: 75474 - protein, 11 aa, Homo sapiens
  CDR3 for beta chain variable domain of TCR clone 37737 (TRBV29-1, TRBJ2-5)
CSEVRTGTQYF

SEQ ID NO: 75475 - protein, 14 aa, Homo sapiens
  CDR3 for alpha chain variable domain of TCR clone 37738 (TRAV13-2, TRAJ15)
CAENPNQAGTALIF

SEQ ID NO: 75476 - protein, 16 aa, Homo sapiens
  CDR3 for beta chain variable domain of TCR clone 37738 (TRBV12-4, TRBJ1-2)
CASSPTATGKTRGDTF

SEQ ID NO: 75477 - protein, 13 aa, Homo sapiens
  CDR3 for alpha chain variable domain of TCR clone 37739 (TRAV1-1, TRAJ9)
CVAKNTGGFKTIF

SEQ ID NO: 75478 - protein, 15 aa, Homo sapiens
  CDR3 for beta chain variable domain of TCR clone 37739 (TRBV5-1, TRBJ2-1)
CASTGSGRTYNEQFF

SEQ ID NO: 75479 - protein, 16 aa, Homo sapiens
  CDR3 for alpha chain variable domain of TCR clone 37740 (TRAV16, TRAJ52)
CALSAAGGTSYGKLTF

SEQ ID NO: 75480 - protein, 14 aa, Homo sapiens
  CDR3 for beta chain variable domain of TCR clone 37740 (TRBV7-9, TRBJ2-1)
CASSPRDSLYEQFF

SEQ ID NO: 75481 - protein, 22 aa, Homo sapiens
  CDR3 for alpha chain variable domain of TCR clone 37741 (TRAV12-3, TRAJ34)
SPVIQPLISVLCTRDNTDKLIF

SEQ ID NO: 75482 - protein, 15 aa, Homo sapiens
  CDR3 for beta chain variable domain of TCR clone 37741 (TRBV2, TRBJ2-1)
CASSVTSEGTDEQFF

SEQ ID NO: 75483 - protein, 14 aa, Homo sapiens
  CDR3 for alpha chain variable domain of TCR clone 37742 (TRAV3, TRAJ7)
CAVREEEREQQTRF

SEQ ID NO: 75484 - protein, 14 aa, Homo sapiens
  CDR3 for beta chain variable domain of TCR clone 37742 (TRBV7-7, TRBJ2-2)
CASSTRASGGEPFF

SEQ ID NO: 75485 - protein, 14 aa, Homo sapiens
  CDR3 for alpha chain variable domain of TCR clone 37743 (TRAV8-3, TRAJ6)
CAVGASGGSHIPTF

SEQ ID NO: 75486 - protein, 17 aa, Homo sapiens
  CDR3 for beta chain variable domain of TCR clone 37743 (TRBV18, TRBJ2-2)
CASSPSDPWQNTGELFF

SEQ ID NO: 75487 - protein, 14 aa, Homo sapiens
  CDR3 for alpha chain variable domain of TCR clone 37744 (TRAV14/DV4, TRAJ7)
CAMSLYYGNNRLAF

SEQ ID NO: 75488 - protein, 13 aa, Homo sapiens
  CDR3 for beta chain variable domain of TCR clone 37744 (TRBV12-4, TRBJ2-2)
CASNITGSGELFF

SEQ ID NO: 75489 - protein, 14 aa, Homo sapiens
  CDR3 for alpha chain variable domain of TCR clone 37745 (TRAV20, TRAJ56)
CAVQFGGANSKLTF

SEQ ID NO: 75490 - protein, 14 aa, Homo sapiens
  CDR3 for beta chain variable domain of TCR clone 37745 (TRBV18, TRBJ2-7)
CASSPRGGAYEQYF

SEQ ID NO: 75491 - protein, 16 aa, Homo sapiens
  CDR3 for alpha chain variable domain of TCR clone 37746 (TRAV16, TRAJ52)
FALSAAGGTSYGKLTF

SEQ ID NO: 75492 - protein, 16 aa, Homo sapiens
  CDR3 for beta chain variable domain of TCR clone 37746 (TRBV12-4, TRBJ1-5)
CASSRPVGGSNQPQHF

SEQ ID NO: 75493 - protein, 12 aa, Homo sapiens
  CDR3 for alpha chain variable domain of TCR clone 37747 (TRAV30, TRAJ20)
CGTESNDYKLSF

SEQ ID NO: 75494 - protein, 15 aa, Homo sapiens
  CDR3 for beta chain variable domain of TCR clone 37747 (TRBV13, TRBJ1-2)
CASSSKIQGNYGYTF

SEQ ID NO: 75495 - protein, 14 aa, Homo sapiens
  CDR3 for alpha chain variable domain of TCR clone 37748 (TRAV12-2, TRAJ40)
CAVKIPSGTYKYIF

SEQ ID NO: 75496 - protein, 20 aa, Homo sapiens
  CDR3 for beta chain variable domain of TCR clone 37748 (TRBV28, TRBJ2-1)
CASTPIGRSPGLAGGNEQIF

SEQ ID NO: 75497 - protein, 14 aa, Homo sapiens
  CDR3 for alpha chain variable domain of TCR clone 37749 (TRAV23/DV6, TRAJ40)
CAARKNSGTYRYIF

SEQ ID NO: 75498 - protein, 14 aa, Homo sapiens
  CDR3 for beta chain variable domain of TCR clone 37749 (TRBV10-3, TRBJ2-5)
CAISERDYQETQYF

SEQ ID NO: 75499 - protein, 13 aa, Homo sapiens
  CDR3 for alpha chain variable domain of TCR clone 37750 (TRAV21, TRAJ36)
RAVIKTGANNLFF

SEQ ID NO: 75500 - protein, 13 aa, Homo sapiens
  CDR3 for beta chain variable domain of TCR clone 37750 (TRBV29-1, TRBJ2-3)
CSATRGGRDTQYF

SEQ ID NO: 75501 - protein, 14 aa, Homo sapiens
  CDR3 for alpha chain variable domain of TCR clone 37751 (TRAV12-3, TRAJ10)
SHLPLTGGGNKLTF

SEQ ID NO: 75502 - protein, 13 aa, Homo sapiens
  CDR3 for beta chain variable domain of TCR clone 37751 (TRBV20-1, TRBJ2-1)
CSASTGTSNEQLF

SEQ ID NO: 75503 - protein, 14 aa, Homo sapiens
  CDR3 for alpha chain variable domain of TCR clone 37752 (TRAV12-1, TRAJ27)
CGEHIRTNAGKSTF

SEQ ID NO: 75504 - protein, 13 aa, Homo sapiens
  CDR3 for beta chain variable domain of TCR clone 37752 (TRBV2, TRBJ1-4)
CASSERAGEKLFF

SEQ ID NO: 75505 - protein, 12 aa, Homo sapiens
  CDR3 for alpha chain variable domain of TCR clone 37753 (TRAV13-2, TRAJ8)
CAPWLGFQKLVF

SEQ ID NO: 75506 - protein, 12 aa, Homo sapiens
  CDR3 for beta chain variable domain of TCR clone 37753 (TRBV5-5, TRBJ2-5)
CASSYFGETQYF

SEQ ID NO: 75507 - protein, 15 aa, Homo sapiens
  CDR3 for alpha chain variable domain of TCR clone 37754 (TRAV21, TRAJ45)
CAVSYSGGGADGLTF

SEQ ID NO: 75508 - protein, 13 aa, Homo sapiens
  CDR3 for beta chain variable domain of TCR clone 37754 (TRBV20-1, TRBJ2-5)
CSAATELQETQYV

SEQ ID NO: 75509 - protein, 14 aa, Homo sapiens
  CDR3 for alpha chain variable domain of TCR clone 37755 (TRAV12-3, TRAJ10)
SHLPLTGGGNKLTF

SEQ ID NO: 75510 - protein, 13 aa, Homo sapiens
  CDR3 for beta chain variable domain of TCR clone 37755 (TRBV20-1, TRBJ1-1)
CSAGTVGNTEAFF

SEQ ID NO: 75511 - protein, 13 aa, Homo sapiens
  CDR3 for alpha chain variable domain of TCR clone 37756 (TRAV12-1, TRAJ26)
CVVRRNCGQNFVF

SEQ ID NO: 75512 - protein, 14 aa, Homo sapiens
  CDR3 for beta chain variable domain of TCR clone 37756 (TRBV4-2, TRBJ2-1)
CASGLDRAYNEQFF

SEQ ID NO: 75513 - protein, 14 aa, Homo sapiens
  CDR3 for alpha chain variable domain of TCR clone 37757 (TRAV20, TRAJ42)
CAVQAGGSQRKLIF

SEQ ID NO: 75514 - protein, 14 aa, Homo sapiens
  CDR3 for beta chain variable domain of TCR clone 37757 (TRBV28, TRBJ1-2)
CASRIQGANYGYTF

SEQ ID NO: 75515 - protein, 12 aa, Homo sapiens
  CDR3 for alpha chain variable domain of TCR clone 37758 (TRAV12-3, TRAJ17)
CAMTLTGNKLTL

SEQ ID NO: 75516 - protein, 15 aa, Homo sapiens
  CDR3 for beta chain variable domain of TCR clone 37758 (TRBV20-1, TRBJ2-7)
CSARDRVSGMDEQYS

SEQ ID NO: 75517 - protein, 16 aa, Homo sapiens
  CDR3 for alpha chain variable domain of TCR clone 37759 (TRAV12-2, TRAJ32)
CAVNMNYGGATNKLTF

SEQ ID NO: 75518 - protein, 16 aa, Homo sapiens
  CDR3 for beta chain variable domain of TCR clone 37759 (TRBV7-8, TRBJ2-3)
CASSTEGQRETDTQYF

SEQ ID NO: 75519 - protein, 14 aa, Homo sapiens
  CDR3 for alpha chain variable domain of TCR clone 37760 (TRAV35, TRAJ50)
CAGHRKTSYDKVIF

SEQ ID NO: 75520 - protein, 15 aa, Homo sapiens
  CDR3 for beta chain variable domain of TCR clone 37760 (TRBV5-7, TRBJ1-5)
CASSYGKLWDQPQHF

SEQ ID NO: 75521 - protein, 16 aa, Homo sapiens
  CDR3 for alpha chain variable domain of TCR clone 37761 (TRAV4, TRAJ22)
CLVGDLYSVSARQLTF

SEQ ID NO: 75522 - protein, 16 aa, Homo sapiens
  CDR3 for beta chain variable domain of TCR clone 37761 (TRBV7-9, TRBJ2-1)
CASSDVAGGSYNEQFF

SEQ ID NO: 75523 - protein, 11 aa, Homo sapiens
  CDR3 for alpha chain variable domain of TCR clone 37762 (TRAV2, TRAJ33)
CAVESNYQLIG

SEQ ID NO: 75524 - protein, 15 aa, Homo sapiens
  CDR3 for beta chain variable domain of TCR clone 37762 (TRBV19, TRBJ1-1)
CASTSGQIQNTEAFF

SEQ ID NO: 75525 - protein, 16 aa, Homo sapiens
  CDR3 for alpha chain variable domain of TCR clone 37763 (TRAV3, TRAJ37)
CAVRPHGSGNTGQLIF

SEQ ID NO: 75526 - protein, 16 aa, Homo sapiens
  CDR3 for beta chain variable domain of TCR clone 37763 (TRBV9, TRBJ1-2)
CASSVEEKVSPYGYTF

SEQ ID NO: 75527 - protein, 16 aa, Homo sapiens
  CDR3 for alpha chain variable domain of TCR clone 37764 (TRAV30, TRAJ24)
CGTEIVDADSWGKFQF

SEQ ID NO: 75528 - protein, 13 aa, Homo sapiens
  CDR3 for beta chain variable domain of TCR clone 37764 (TRBV20-1, TRBJ1-1)
CSAPPGGYTEAFF

SEQ ID NO: 75529 - protein, 17 aa, Homo sapiens
  CDR3 for alpha chain variable domain of TCR clone 37765 (TRAV26-1, TRAJ53)
CIVRVDDSGSSNYKLTF

SEQ ID NO: 75530 - protein, 15 aa, Homo sapiens
  CDR3 for beta chain variable domain of TCR clone 37765 (TRBV20-1, TRBJ2-7)
CSARDRVSGMDEQYF

SEQ ID NO: 75531 - protein, 15 aa, Homo sapiens
  CDR3 for alpha chain variable domain of TCR clone 37766 (TRAV8-3, TRAJ45)
CASSYSGGGADGLTF

SEQ ID NO: 75532 - protein, 16 aa, Homo sapiens
  CDR3 for beta chain variable domain of TCR clone 37766 (TRBV9, TRBJ2-1)
CASSVGGGGNYNEQFF

SEQ ID NO: 75533 - protein, 13 aa, Homo sapiens
  CDR3 for alpha chain variable domain of TCR clone 37767 (TRAV17, TRAJ7)
CATDNYGNNRLAF

SEQ ID NO: 75534 - protein, 13 aa, Homo sapiens
  CDR3 for beta chain variable domain of TCR clone 37767 (TRBV27, TRBJ2-1)
CDSSSGSYNEQFF

SEQ ID NO: 75535 - protein, 19 aa, Homo sapiens
  CDR3 for alpha chain variable domain of TCR clone 37768 (TRAV21, TRAJ20)
SLVTQPPTSVLPNDHKLSF

SEQ ID NO: 75536 - protein, 14 aa, Homo sapiens
  CDR3 for beta chain variable domain of TCR clone 37768 (TRBV7-2, TRBJ1-3)
CASSRLRSGNTIYF

SEQ ID NO: 75537 - protein, 17 aa, Homo sapiens
  CDR3 for alpha chain variable domain of TCR clone 37769 (TRAV3, TRAJ42)
CAVRDRDYGGSQGNLIF

SEQ ID NO: 75538 - protein, 16 aa, Homo sapiens
  CDR3 for beta chain variable domain of TCR clone 37769 (TRBV19, TRBJ2-2)
CASRSPGTGATGELFF

SEQ ID NO: 75539 - protein, 15 aa, Homo sapiens
  CDR3 for alpha chain variable domain of TCR clone 37770 (TRAV34, TRAJ38)
CGADFTPGNNRKLIW

SEQ ID NO: 75540 - protein, 13 aa, Homo sapiens
  CDR3 for beta chain variable domain of TCR clone 37770 (TRBV24-1, TRBJ2-2)
CATSDWSTGELFF

SEQ ID NO: 75541 - protein, 11 aa, Homo sapiens
  CDR3 for alpha chain variable domain of TCR clone 37771 (TRAV4, TRAJ31)
CLVGDNARLMF

SEQ ID NO: 75542 - protein, 14 aa, Homo sapiens
  CDR3 for beta chain variable domain of TCR clone 37771 (TRBV12-5, TRBJ2-5)
CASGSRTHQETQYF

SEQ ID NO: 75543 - protein, 15 aa, Homo sapiens
  CDR3 for alpha chain variable domain of TCR clone 37772 (TRAV8-3, TRAJ45)
CASSYSGGGADGLPF

SEQ ID NO: 75544 - protein, 17 aa, Homo sapiens
  CDR3 for beta chain variable domain of TCR clone 37772 (TRBV7-8, TRBJ1-2)
CASSLRPLQGHLYGYTF

SEQ ID NO: 75545 - protein, 11 aa, Homo sapiens
  CDR3 for alpha chain variable domain of TCR clone 37773 (TRAV1-1, TRAJ23)
CAVRQGGKLIF

SEQ ID NO: 75546 - protein, 19 aa, Homo sapiens
  CDR3 for beta chain variable domain of TCR clone 37773 (TRBV4-1, TRBJ2-7)
CASSPVAGGGRAVLRAGHQ

SEQ ID NO: 75547 - protein, 14 aa, Homo sapiens
  CDR3 for alpha chain variable domain of TCR clone 37774 (TRAV20, TRAJ29)
CAVQAWVGNTPLVF

SEQ ID NO: 75548 - protein, 15 aa, Homo sapiens
  CDR3 for beta chain variable domain of TCR clone 37774 (TRBV29-1, TRBJ2-7)
CSVEFFDGGSYEQYF

SEQ ID NO: 75549 - protein, 14 aa, Homo sapiens
  CDR3 for alpha chain variable domain of TCR clone 37775 (TRAV3, TRAJ17)
CAVRDAAAGNKLTF

SEQ ID NO: 75550 - protein, 14 aa, Homo sapiens
  CDR3 for beta chain variable domain of TCR clone 37775 (TRBV12-4, TRBJ1-1)
CASSSARGYTEAFF

SEQ ID NO: 75551 - protein, 12 aa, Homo sapiens
  CDR3 for alpha chain variable domain of TCR clone 37776 (TRAV1-1, TRAJ8)
CAGGTGFPKLVF

SEQ ID NO: 75552 - protein, 15 aa, Homo sapiens
  CDR3 for beta chain variable domain of TCR clone 37776 (TRBV7-9, TRBJ1-4)
CASSRTGGFNEKLFF

SEQ ID NO: 75553 - protein, 17 aa, Homo sapiens
  CDR3 for alpha chain variable domain of TCR clone 37777 (TRAV36/DV7, TRAJ52)
CAAAQRAGGTSYGKLTF

SEQ ID NO: 75554 - protein, 15 aa, Homo sapiens
  CDR3 for beta chain variable domain of TCR clone 37777 (TRBV20-1, TRBJ2-7)
CSARDRVSGMDEQYF

SEQ ID NO: 75555 - protein, 16 aa, Homo sapiens
  CDR3 for alpha chain variable domain of TCR clone 37778 (TRAV8-3, TRAJ44)
CAVGASNTGTASKLTF

SEQ ID NO: 75556 - protein, 15 aa, Homo sapiens
  CDR3 for beta chain variable domain of TCR clone 37778 (TRBV27, TRBJ1-5)
RASTFNRGSNQPQHF

SEQ ID NO: 75557 - protein, 11 aa, Homo sapiens
  CDR3 for alpha chain variable domain of TCR clone 37779 (TRAV1-1, TRAJ23)
CAVRQGGKLIF

SEQ ID NO: 75558 - protein, 13 aa, Homo sapiens
  CDR3 for beta chain variable domain of TCR clone 37779 (TRBV7-3, TRBJ1-1)
CASSQDWGTEAFF

SEQ ID NO: 75559 - protein, 12 aa, Homo sapiens
  CDR3 for alpha chain variable domain of TCR clone 37780 (TRAV29/DV5, TRAJ49)
CAATDTVNQFYF

SEQ ID NO: 75560 - protein, 19 aa, Homo sapiens
  CDR3 for beta chain variable domain of TCR clone 37780 (TRBV25-1, TRBJ2-2)
CAILVYRVDRGRKTGELFF

SEQ ID NO: 75561 - protein, 17 aa, Homo sapiens
  CDR3 for alpha chain variable domain of TCR clone 37781 (TRAV26-2, TRAJ42)
CILRAVGYGGSQGNLIF

SEQ ID NO: 75562 - protein, 16 aa, Homo sapiens
  CDR3 for beta chain variable domain of TCR clone 37781 (TRBV12-4, TRBJ2-7)
CASSLIGGTGTYEQYF

SEQ ID NO: 75563 - protein, 14 aa, Homo sapiens
  CDR3 for alpha chain variable domain of TCR clone 37782 (TRAV12-2, TRAJ53)
CAVKGGGSNYKLTF

SEQ ID NO: 75564 - protein, 14 aa, Homo sapiens
  CDR3 for beta chain variable domain of TCR clone 37782 (TRBV7-7, TRBJ2-2)
CAARQDSDTGELFF

SEQ ID NO: 75565 - protein, 13 aa, Homo sapiens
  CDR3 for alpha chain variable domain of TCR clone 37783 (TRAV8-6, TRAJ13)
CAVRDGGYQKVTF

SEQ ID NO: 75566 - protein, 15 aa, Homo sapiens
  CDR3 for beta chain variable domain of TCR clone 37783 (TRBV7-9, TRBJ2-2)
CASRPEGTGTGELFF

SEQ ID NO: 75567 - protein, 15 aa, Homo sapiens
  CDR3 for alpha chain variable domain of TCR clone 37784 (TRAV21, TRAJ53)
CATLNSGGSNYKPTF

SEQ ID NO: 75568 - protein, 12 aa, Homo sapiens
  CDR3 for beta chain variable domain of TCR clone 37784 (TRBV5-4, TRBJ2-7)
CASSLEAYEQYF

SEQ ID NO: 75569 - protein, 12 aa, Homo sapiens
  CDR3 for alpha chain variable domain of TCR clone 37785 (TRAV12-1, TRAJ39)
CGEDNAGNMLTF

SEQ ID NO: 75570 - protein, 12 aa, Homo sapiens
  CDR3 for beta chain variable domain of TCR clone 37785 (TRBV14, TRBJ2-7)
CASSLYKDEQYF

SEQ ID NO: 75571 - protein, 12 aa, Homo sapiens
  CDR3 for alpha chain variable domain of TCR clone 37786 (TRAV3, TRAJ20)
CAARDGDYKLSF

SEQ ID NO: 75572 - protein, 13 aa, Homo sapiens
  CDR3 for beta chain variable domain of TCR clone 37786 (TRBV9, TRBJ2-1)
CASSVGQGGEQFF

SEQ ID NO: 75573 - protein, 14 aa, Homo sapiens
  CDR3 for alpha chain variable domain of TCR clone 37787 (TRAV26-1, TRAJ47)
CIVGPMEYGNKLVF

SEQ ID NO: 75574 - protein, 15 aa, Homo sapiens
  CDR3 for beta chain variable domain of TCR clone 37787 (TRBV7-3, TRBJ2-1)
CASSPTGGGEVEQFF

SEQ ID NO: 75575 - protein, 16 aa, Homo sapiens
  CDR3 for alpha chain variable domain of TCR clone 37788 (TRAV3, TRAJ37)
CAVRPHGSGNTGKLIF

SEQ ID NO: 75576 - protein, 15 aa, Homo sapiens
  CDR3 for beta chain variable domain of TCR clone 37788 (TRBV9, TRBJ1-6)
CASSVAGTGDSPLHF

SEQ ID NO: 75577 - protein, 13 aa, Homo sapiens
  CDR3 for alpha chain variable domain of TCR clone 37789 (TRAV12-3, TRAJ33)
CAMSVNSNYQLIW

SEQ ID NO: 75578 - protein, 13 aa, Homo sapiens
  CDR3 for beta chain variable domain of TCR clone 37789 (TRBV4-1, TRBJ2-2)
CASSQENTGELLF

SEQ ID NO: 75579 - protein, 16 aa, Homo sapiens
  CDR3 for alpha chain variable domain of TCR clone 37790 (TRAV30, TRAJ24)
CGTEIVDADSWGKFQF

SEQ ID NO: 75580 - protein, 12 aa, Homo sapiens
  CDR3 for beta chain variable domain of TCR clone 37790 (TRBV11-2, TRBJ2-2)
CASGLPTGELFF

SEQ ID NO: 75581 - protein, 16 aa, Homo sapiens
  CDR3 for alpha chain variable domain of TCR clone 37791 (TRAV35, TRAJ28)
CAGQKYSGAGSYQLTF

SEQ ID NO: 75582 - protein, 14 aa, Homo sapiens
  CDR3 for beta chain variable domain of TCR clone 37791 (TRBV19, TRBJ2-1)
CASPTFVLSGEQFF

SEQ ID NO: 75583 - protein, 13 aa, Homo sapiens
  CDR3 for alpha chain variable domain of TCR clone 37792 (TRAV13-2, TRAJ48)
CAEMDFGNEKLTF

SEQ ID NO: 75584 - protein, 12 aa, Homo sapiens
  CDR3 for beta chain variable domain of TCR clone 37792 (TRBV11-3, TRBJ2-2)
CASSLGGGELFF

SEQ ID NO: 75585 - protein, 15 aa, Homo sapiens
  CDR3 for alpha chain variable domain of TCR clone 37793 (TRAV12-3, TRAJ49)
CAMAVTPNTGNQLYF

SEQ ID NO: 75586 - protein, 14 aa, Homo sapiens
  CDR3 for beta chain variable domain of TCR clone 37793 (TRBV7-8, TRBJ2-3)
CASSLEAGTDTQYF

SEQ ID NO: 75587 - protein, 18 aa, Homo sapiens
  CDR3 for alpha chain variable domain of TCR clone 37794 (TRAV21, TRAJ52)
CSVRPSPAGGTSYGKLTF

SEQ ID NO: 75588 - protein, 13 aa, Homo sapiens
  CDR3 for beta chain variable domain of TCR clone 37794 (TRBV7-3, TRBJ1-1)
CASSQDWGAEAFF

SEQ ID NO: 75589 - protein, 14 aa, Homo sapiens
  CDR3 for alpha chain variable domain of TCR clone 37795 (TRAV8-1, TRAJ5)
CAVRTDTGRRALTL

SEQ ID NO: 75590 - protein, 16 aa, Homo sapiens
  CDR3 for beta chain variable domain of TCR clone 37795 (TRBV29-1, TRBJ2-7)
CSVEVVGTSGSYEQYF

SEQ ID NO: 75591 - protein, 16 aa, Homo sapiens
  CDR3 for alpha chain variable domain of TCR clone 37796 (TRAV3, TRAJ10)
CAVRGMRAGGGNKLTF

SEQ ID NO: 75592 - protein, 14 aa, Homo sapiens
  CDR3 for beta chain variable domain of TCR clone 37796 (TRBV19, TRBJ2-1)
CASPTFVLSGEQFF

SEQ ID NO: 75593 - protein, 12 aa, Homo sapiens
  CDR3 for alpha chain variable domain of TCR clone 37797 (TRAV29/DV5, TRAJ49)
CAATDTGNQFYF

SEQ ID NO: 75594 - protein, 19 aa, Homo sapiens
  CDR3 for beta chain variable domain of TCR clone 37797 (TRBV25-1, TRBJ2-2)
CAILVYRVERGRKTGELFF

SEQ ID NO: 75595 - protein, 16 aa, Homo sapiens
  CDR3 for alpha chain variable domain of TCR clone 37798 (TRAV26-1, TRAJ36)
CIVRVPDQTGANNPFF

SEQ ID NO: 75596 - protein, 14 aa, Homo sapiens
  CDR3 for beta chain variable domain of TCR clone 37798 (TRBV7-2, TRBJ2-7)
CASSLYPGRYEQYF

SEQ ID NO: 75597 - protein, 13 aa, Homo sapiens
  CDR3 for alpha chain variable domain of TCR clone 37799 (TRAV13-2, TRAJ48)
CAEMDFGNEKLTF

SEQ ID NO: 75598 - protein, 15 aa, Homo sapiens
  CDR3 for beta chain variable domain of TCR clone 37799 (TRBV7-9, TRBJ1-6)
CDSSSPGRGNSPLHF

SEQ ID NO: 75599 - protein, 13 aa, Homo sapiens
  CDR3 for alpha chain variable domain of TCR clone 37800 (TRAV8-3, TRAJ43)
CAVGPDNNNDMRS

SEQ ID NO: 75600 - protein, 12 aa, Homo sapiens
  CDR3 for beta chain variable domain of TCR clone 37800 (TRBV7-2, TRBJ1-6)
CASSLSSSPLHF

SEQ ID NO: 75601 - protein, 16 aa, Homo sapiens
  CDR3 for alpha chain variable domain of TCR clone 37801 (TRAV3, TRAJ37)
CAVRPHGSVNTGKLIF

SEQ ID NO: 75602 - protein, 16 aa, Homo sapiens
  CDR3 for beta chain variable domain of TCR clone 37801 (TRBV9, TRBJ1-2)
CASSVEEKVSPYGYTF

SEQ ID NO: 75603 - protein, 14 aa, Homo sapiens
  CDR3 for alpha chain variable domain of TCR clone 37802 (TRAV12-2, TRAJ53)
CAVKGGGSNYKLTF

SEQ ID NO: 75604 - protein, 14 aa, Homo sapiens
  CDR3 for beta chain variable domain of TCR clone 37802 (TRBV7-7, TRBJ2-2)
CATRQGSDTGELFF

SEQ ID NO: 75605 - protein, 12 aa, Homo sapiens
  CDR3 for alpha chain variable domain of TCR clone 37803 (TRAV13-1, TRAJ48)
CAANFGNERLTF

SEQ ID NO: 75606 - protein, 13 aa, Homo sapiens
  CDR3 for beta chain variable domain of TCR clone 37803 (TRBV7-3, TRBJ1-1)
CASSQDWGAEAFF

SEQ ID NO: 75607 - protein, 14 aa, Homo sapiens
  CDR3 for alpha chain variable domain of TCR clone 37804 (TRAV14/DV4, TRAJ34)
CAMREGRPHRQAHL

SEQ ID NO: 75608 - protein, 13 aa, Homo sapiens
  CDR3 for beta chain variable domain of TCR clone 37804 (TRBV19, TRBJ1-2)
CASSVPGQDGYTF

SEQ ID NO: 75609 - protein, 12 aa, Homo sapiens
  CDR3 for alpha chain variable domain of TCR clone 37805 (TRAV27, TRAJ33)
CAGDGSNYQLIW

SEQ ID NO: 75610 - protein, 14 aa, Homo sapiens
  CDR3 for beta chain variable domain of TCR clone 37805 (TRBV12-4, TRBJ1-2)
CASSPLGTVGGYTF

SEQ ID NO: 75611 - protein, 13 aa, Homo sapiens
  CDR3 for alpha chain variable domain of TCR clone 37806 (TRAV26-2, TRAJ54)
CIPRVGGAQQLVF

SEQ ID NO: 75612 - protein, 16 aa, Homo sapiens
  CDR3 for beta chain variable domain of TCR clone 37806 (TRBV4-1, TRBJ1-1)
CASSSMSERPNTEAFF

SEQ ID NO: 75613 - protein, 15 aa, Homo sapiens
  CDR3 for alpha chain variable domain of TCR clone 37807 (TRAV17, TRAJ42)
CATDHYGGSQGNLIF

SEQ ID NO: 75614 - protein, 14 aa, Homo sapiens
  CDR3 for beta chain variable domain of TCR clone 37807 (TRBV19, TRBJ2-5)
YASSIEHSQETQYF

SEQ ID NO: 75615 - protein, 15 aa, Homo sapiens
  CDR3 for alpha chain variable domain of TCR clone 37808 (TRAV12-2, TRAJ43)
CAFDMRFGAGTRLTV

SEQ ID NO: 75616 - protein, 18 aa, Homo sapiens
  CDR3 for beta chain variable domain of TCR clone 37808 (TRBV20-1, TRBJ2-3)
CSASGLAGGPWTTDTQYF

SEQ ID NO: 75617 - protein, 15 aa, Homo sapiens
  CDR3 for alpha chain variable domain of TCR clone 37809 (TRAV20, TRAJ53)
CAVQASGGINYKLTF

SEQ ID NO: 75618 - protein, 12 aa, Homo sapiens
  CDR3 for beta chain variable domain of TCR clone 37809 (TRBV7-8, TRBJ2-7)
CASSLGDREQYF

SEQ ID NO: 75619 - protein, 14 aa, Homo sapiens
  CDR3 for alpha chain variable domain of TCR clone 37810 (TRAV12-3, TRAJ10)
SHLPLTRGGNKLTF

SEQ ID NO: 75620 - protein, 14 aa, Homo sapiens
  CDR3 for beta chain variable domain of TCR clone 37810 (TRBV6-1, TRBJ1-3)
CASVQGGGGNTIYF

SEQ ID NO: 75621 - protein, 15 aa, Homo sapiens
  CDR3 for alpha chain variable domain of TCR clone 37811 (TRAV3, TRAJ4)
CAVRDGTGGYNKLIF

SEQ ID NO: 75622 - protein, 15 aa, Homo sapiens
  CDR3 for beta chain variable domain of TCR clone 37811 (TRBV27, TRBJ2-7)
CASSPDQGRLYKQYF

SEQ ID NO: 75623 - protein, 11 aa, Homo sapiens
  CDR3 for alpha chain variable domain of TCR clone 37812 (TRAV12-1, TRAJ8)
CVVTGFQKLVF

SEQ ID NO: 75624 - protein, 14 aa, Homo sapiens
  CDR3 for beta chain variable domain of TCR clone 37812 (TRBV19, TRBJ2-1)
CASGKSPQYNEQFF

SEQ ID NO: 75625 - protein, 14 aa, Homo sapiens
  CDR3 for alpha chain variable domain of TCR clone 37813 (TRAV12-2, TRAJ45)
CAVNIGGGADGLTF

SEQ ID NO: 75626 - protein, 13 aa, Homo sapiens
  CDR3 for beta chain variable domain of TCR clone 37813 (TRBV5-4, TRBJ1-1)
CASSFQVNTEAFF

SEQ ID NO: 75627 - protein, 12 aa, Homo sapiens
  CDR3 for alpha chain variable domain of TCR clone 37814 (TRAV12-3, TRAJ17)
CAMTLTGNKLTF

SEQ ID NO: 75628 - protein, 18 aa, Homo sapiens
  CDR3 for beta chain variable domain of TCR clone 37814 (TRBV4-3, TRBJ1-6)
CASSQDTPASSYNSPLHF

SEQ ID NO: 75629 - protein, 12 aa, Homo sapiens
  CDR3 for alpha chain variable domain of TCR clone 37815 (TRAV12-1, TRAJ40)
CVVSSGTYKYIF

SEQ ID NO: 75630 - protein, 16 aa, Homo sapiens
  CDR3 for beta chain variable domain of TCR clone 37815 (TRBV5-4, TRBJ2-3)
CASSFGAGEGTDTQYV

SEQ ID NO: 75631 - protein, 13 aa, Homo sapiens
  CDR3 for alpha chain variable domain of TCR clone 37816 (TRAV12-3, TRAJ31)
CAMSANNNARLMF

SEQ ID NO: 75632 - protein, 16 aa, Homo sapiens
  CDR3 for beta chain variable domain of TCR clone 37816 (TRBV7-9, TRBJ1-2)
CASSLGFSAGEDGYTF

SEQ ID NO: 75633 - protein, 16 aa, Homo sapiens
  CDR3 for alpha chain variable domain of TCR clone 37817 (TRAV3, TRAJ37)
CAVRGKGSGNTGKLIF

SEQ ID NO: 75634 - protein, 13 aa, Homo sapiens
  CDR3 for beta chain variable domain of TCR clone 37817 (TRBV14, TRBJ2-7)
CASSQDRRYEQCF

SEQ ID NO: 75635 - protein, 14 aa, Homo sapiens
  CDR3 for alpha chain variable domain of TCR clone 37818 (TRAV9-2, TRAJ39)
CALYIYNAGNMLTF

SEQ ID NO: 75636 - protein, 16 aa, Homo sapiens
  CDR3 for beta chain variable domain of TCR clone 37818 (TRBV12-4, TRBJ1-5)
CASSRPVGGSNQPQHF

SEQ ID NO: 75637 - protein, 11 aa, Homo sapiens
  CDR3 for alpha chain variable domain of TCR clone 37819 (TRAV13-1, TRAJ52)
PGGTSYGKLTF

SEQ ID NO: 75638 - protein, 16 aa, Homo sapiens
  CDR3 for beta chain variable domain of TCR clone 37819 (TRBV28, TRBJ2-7)
CASSPWVATGDLTQYF

SEQ ID NO: 75639 - protein, 13 aa, Homo sapiens
  CDR3 for alpha chain variable domain of TCR clone 37820 (TRAV8-6, TRAJ21)
CALSPSSLNKFYF

SEQ ID NO: 75640 - protein, 14 aa, Homo sapiens
  CDR3 for beta chain variable domain of TCR clone 37820 (TRBV7-9, TRBJ2-5)
CASSLDTAQETQYF

SEQ ID NO: 75641 - protein, 17 aa, Homo sapiens
  CDR3 for alpha chain variable domain of TCR clone 37821 (TRAV2, TRAJ36)
CAVEDRGNWGKQPLLWD

SEQ ID NO: 75642 - protein, 14 aa, Homo sapiens
  CDR3 for beta chain variable domain of TCR clone 37821 (TRBV7-9, TRBJ2-5)
CASSLDMAQETQYF

SEQ ID NO: 75643 - protein, 16 aa, Homo sapiens
  CDR3 for alpha chain variable domain of TCR clone 37822 (TRAV1-2, TRAJ10)
CDVRGVLTGGGNKLTF

SEQ ID NO: 75644 - protein, 12 aa, Homo sapiens
  CDR3 for beta chain variable domain of TCR clone 37822 (TRBV7-8, TRBJ2-7)
CASSLGDREQYF

SEQ ID NO: 75645 - protein, 12 aa, Homo sapiens
  CDR3 for alpha chain variable domain of TCR clone 37823 (TRAV16, TRAJ10)
CSRTGGGNKLTF

SEQ ID NO: 75646 - protein, 15 aa, Homo sapiens
  CDR3 for beta chain variable domain of TCR clone 37823 (TRBV7-9, TRBJ1-4)
CASSARTGGNEKLFF

SEQ ID NO: 75647 - protein, 11 aa, Homo sapiens
  CDR3 for alpha chain variable domain of TCR clone 37824 (TRAV17, TRAJ9)
CATTGGFKTIF

SEQ ID NO: 75648 - protein, 15 aa, Homo sapiens
  CDR3 for beta chain variable domain of TCR clone 37824 (TRBV20-1, TRBJ2-7)
CSARDRVSGMDEQYF

SEQ ID NO: 75649 - protein, 11 aa, Homo sapiens
  CDR3 for alpha chain variable domain of TCR clone 37825 (TRAV12-1, TRAJ31)
CVGRVQCQTHV

SEQ ID NO: 75650 - protein, 13 aa, Homo sapiens
  CDR3 for beta chain variable domain of TCR clone 37825 (TRBV9, TRBJ2-1)
CASSVGQGGEQFF

SEQ ID NO: 75651 - protein, 21 aa, Homo sapiens
  CDR3 for alpha chain variable domain of TCR clone 37826 (TRAV8-3, TRAJ6)
CAVGREEATYLHLEEEPALLF

SEQ ID NO: 75652 - protein, 14 aa, Homo sapiens
  CDR3 for beta chain variable domain of TCR clone 37826 (TRBV5-1, TRBJ2-7)
CASSRGESLYEQYF

SEQ ID NO: 75653 - protein, 11 aa, Homo sapiens
  CDR3 for alpha chain variable domain of TCR clone 37827 (TRAV10, TRAJ3)
YPGRGASKIIF

SEQ ID NO: 75654 - protein, 16 aa, Homo sapiens
  CDR3 for beta chain variable domain of TCR clone 37827 (TRBV7-2, TRBJ2-3)
CASSESGPTGTDTQYF

SEQ ID NO: 75655 - protein, 13 aa, Homo sapiens
  CDR3 for alpha chain variable domain of TCR clone 37828 (TRAV27, TRAJ41)
CAGEGNSGYALNF

SEQ ID NO: 75656 - protein, 14 aa, Homo sapiens
  CDR3 for beta chain variable domain of TCR clone 37828 (TRBV7-2, TRBJ1-1)
CSSSFLTGTTEAFF

SEQ ID NO: 75657 - protein, 17 aa, Homo sapiens
  CDR3 for alpha chain variable domain of TCR clone 37829 (TRAV12-3, TRAJ6)
CAMSARRGAGGSYIPTF

SEQ ID NO: 75658 - protein, 12 aa, Homo sapiens
  CDR3 for beta chain variable domain of TCR clone 37829 (TRBV12-4, TRBJ2-3)
CASSTLPDTQYF

SEQ ID NO: 75659 - protein, 15 aa, Homo sapiens
  CDR3 for alpha chain variable domain of TCR clone 37830 (TRAV26-1, TRAJ42)
CIVRVKGGSQGNLIF

SEQ ID NO: 75660 - protein, 12 aa, Homo sapiens
  CDR3 for beta chain variable domain of TCR clone 37830 (TRBV7-8, TRBJ2-7)
CASSLGDREQYF

SEQ ID NO: 75661 - protein, 16 aa, Homo sapiens
  CDR3 for alpha chain variable domain of TCR clone 37831 (TRAV12-1, TRAJ48)
CVVYGGSNFGNEKLTF

SEQ ID NO: 75662 - protein, 15 aa, Homo sapiens
  CDR3 for beta chain variable domain of TCR clone 37831 (TRBV28, TRBJ1-2)
CASIPQGSDDYGYTF

SEQ ID NO: 75663 - protein, 13 aa, Homo sapiens
  CDR3 for alpha chain variable domain of TCR clone 37832 (TRAV12-1, TRAJ33)
CGDAPDSNYQLIW

SEQ ID NO: 75664 - protein, 15 aa, Homo sapiens
  CDR3 for beta chain variable domain of TCR clone 37832 (TRBV27, TRBJ2-1)
CASSNGGGSSSEQFF

SEQ ID NO: 75665 - protein, 12 aa, Homo sapiens
  CDR3 for alpha chain variable domain of TCR clone 37833 (TRAV4, TRAJ26)
CLVGDYGQNFVF

SEQ ID NO: 75666 - protein, 16 aa, Homo sapiens
  CDR3 for beta chain variable domain of TCR clone 37833 (TRBV7-2, TRBJ1-2)
CASSPNQDRRGHGYTF

SEQ ID NO: 75667 - protein, 17 aa, Homo sapiens
  CDR3 for alpha chain variable domain of TCR clone 37834 (TRAV23/DV6, TRAJ57)
CAANSTLSQGGSEKLVF

SEQ ID NO: 75668 - protein, 14 aa, Homo sapiens
  CDR3 for beta chain variable domain of TCR clone 37834 (TRBV7-8, TRBJ2-1)
CASSSQGTYNEQFF

SEQ ID NO: 75669 - protein, 18 aa, Homo sapiens
  CDR3 for alpha chain variable domain of TCR clone 37835 (TRAV12-2, )
CAVEDIQNPDPAVYQLRD

SEQ ID NO: 75670 - protein, 16 aa, Homo sapiens
  CDR3 for beta chain variable domain of TCR clone 37835 (TRBV19, TRBJ2-1)
CASSKAGPSSYNEQFF

SEQ ID NO: 75671 - protein, 15 aa, Homo sapiens
  CDR3 for alpha chain variable domain of TCR clone 37836 (TRAV3, TRAJ3)
CAVRDMSSSASKIIF

SEQ ID NO: 75672 - protein, 14 aa, Homo sapiens
  CDR3 for beta chain variable domain of TCR clone 37836 (TRBV19, TRBJ2-1)
CASPTFVLSGEQFS

SEQ ID NO: 75673 - protein, 22 aa, Homo sapiens
  CDR3 for alpha chain variable domain of TCR clone 37837 (TRAV27, TRAJ38)
CAARRNAGNNHIQNPAPAVYQL

SEQ ID NO: 75674 - protein, 13 aa, Homo sapiens
  CDR3 for beta chain variable domain of TCR clone 37837 (TRBV12-5, TRBJ2-3)
CASGDRQSDTQYF

SEQ ID NO: 75675 - protein, 10 aa, Homo sapiens
  CDR3 for alpha chain variable domain of TCR clone 37838 (TRAV26-1, TRAJ40)
CIAGTYKYIF

SEQ ID NO: 75676 - protein, 15 aa, Homo sapiens
  CDR3 for beta chain variable domain of TCR clone 37838 (TRBV19, TRBJ2-1)
CASSSPGVPLDEQFS

SEQ ID NO: 75677 - protein, 14 aa, Homo sapiens
  CDR3 for alpha chain variable domain of TCR clone 37839 (TRAV16, TRAJ33)
CALSAMDSNYQLIW

SEQ ID NO: 75678 - protein, 14 aa, Homo sapiens
  CDR3 for beta chain variable domain of TCR clone 37839 (TRBV19, TRBJ2-5)
CASSMTGQQETQYF

SEQ ID NO: 75679 - protein, 16 aa, Homo sapiens
  CDR3 for alpha chain variable domain of TCR clone 37840 (TRAV20, TRAJ22)
CSVQASSSGSARQLTF

SEQ ID NO: 75680 - protein, 13 aa, Homo sapiens
  CDR3 for beta chain variable domain of TCR clone 37840 (TRBV7-2, TRBJ2-5)
CASSQTSVETQYF

SEQ ID NO: 75681 - protein, 16 aa, Homo sapiens
  CDR3 for alpha chain variable domain of TCR clone 37841 (TRAV3, TRAJ37)
CAVRPHGPGNTGKLIF

SEQ ID NO: 75682 - protein, 14 aa, Homo sapiens
  CDR3 for beta chain variable domain of TCR clone 37841 (TRBV25-1, TRBJ1-1)
CASTHLGGNTEAFF

SEQ ID NO: 75683 - protein, 14 aa, Homo sapiens
  CDR3 for alpha chain variable domain of TCR clone 37842 (TRAV35, TRAJ22)
CAGLRPGSAGQLTF

SEQ ID NO: 75684 - protein, 13 aa, Homo sapiens
  CDR3 for beta chain variable domain of TCR clone 37842 (TRBV20-1, TRBJ2-7)
CSATHTSGYEQYF

SEQ ID NO: 75685 - protein, 12 aa, Homo sapiens
  CDR3 for alpha chain variable domain of TCR clone 37843 (TRAV3, TRAJ43)
CAVRDPNNDMRF

SEQ ID NO: 75686 - protein, 16 aa, Homo sapiens
  CDR3 for beta chain variable domain of TCR clone 37843 (TRBV12-4, TRBJ1-5)
CASSRPVGGSNQPQHF

SEQ ID NO: 75687 - protein, 15 aa, Homo sapiens
  CDR3 for alpha chain variable domain of TCR clone 37844 (TRAV12-3, TRAJ42)
CAMSGHGGSQGNLIF

SEQ ID NO: 75688 - protein, 13 aa, Homo sapiens
  CDR3 for beta chain variable domain of TCR clone 37844 (TRBV19, TRBJ2-5)
CASSGRAGETHYF

SEQ ID NO: 75689 - protein, 12 aa, Homo sapiens
  CDR3 for alpha chain variable domain of TCR clone 37845 (TRAV12-3, TRAJ41)
CAMSYSGYALTF

SEQ ID NO: 75690 - protein, 13 aa, Homo sapiens
  CDR3 for beta chain variable domain of TCR clone 37845 (TRBV7-3, TRBJ2-1)
CASSLDSYNEQFF

SEQ ID NO: 75691 - protein, 12 aa, Homo sapiens
  CDR3 for alpha chain variable domain of TCR clone 37846 (TRAV23/DV6, TRAJ30)
CAASRGDDKIIF

SEQ ID NO: 75692 - protein, 18 aa, Homo sapiens
  CDR3 for beta chain variable domain of TCR clone 37846 (TRBV10-3, TRBJ2-3)
CAISESRVGPMRGDTQYF

SEQ ID NO: 75693 - protein, 15 aa, Homo sapiens
  CDR3 for alpha chain variable domain of TCR clone 37847 (TRAV23/DV6, TRAJ18)
CAASFRGSTLGRLHF

SEQ ID NO: 75694 - protein, 13 aa, Homo sapiens
  CDR3 for beta chain variable domain of TCR clone 37847 (TRBV28, TRBJ2-7)
CAILDRAGGEQYF

SEQ ID NO: 75695 - protein, 13 aa, Homo sapiens
  CDR3 for alpha chain variable domain of TCR clone 37848 (TRAV17, TRAJ26)
FATVDNYGQNFVF

SEQ ID NO: 75696 - protein, 16 aa, Homo sapiens
  CDR3 for beta chain variable domain of TCR clone 37848 (TRBV2, TRBJ2-1)
CASSVGGSLSYNEQFF

SEQ ID NO: 75697 - protein, 15 aa, Homo sapiens
  CDR3 for alpha chain variable domain of TCR clone 37849 (TRAV12-3, TRAJ27)
CAMRAYNTNAGKSTF

SEQ ID NO: 75698 - protein, 14 aa, Homo sapiens
  CDR3 for beta chain variable domain of TCR clone 37849 (TRBV12-4, TRBJ1-4)
CASSRQGANEKLFF

SEQ ID NO: 75699 - protein, 23 aa, Homo sapiens
  CDR3 for alpha chain variable domain of TCR clone 37850 (TRAV26-1, TRAJ38)
CIVRPLNAGNNHIQNPDPAVYQL

SEQ ID NO: 75700 - protein, 13 aa, Homo sapiens
  CDR3 for beta chain variable domain of TCR clone 37850 (TRBV18, TRBJ1-1)
CASSSNGDTEAFF

SEQ ID NO: 75701 - protein, 13 aa, Homo sapiens
  CDR3 for alpha chain variable domain of TCR clone 37851 (TRAV12-3, TRAJ5)
CAMIYTGRRALTF

SEQ ID NO: 75702 - protein, 14 aa, Homo sapiens
  CDR3 for beta chain variable domain of TCR clone 37851 (TRBV18, TRBJ1-4)
CASSPSREKLFLAV

SEQ ID NO: 75703 - protein, 14 aa, Homo sapiens
  CDR3 for alpha chain variable domain of TCR clone 37852 (TRAV13-1, TRAJ9)
CAASALTGGFTTIF

SEQ ID NO: 75704 - protein, 13 aa, Homo sapiens
  CDR3 for beta chain variable domain of TCR clone 37852 (TRBV20-1, TRBJ1-1)
CSAGTVGNTEAFF

SEQ ID NO: 75705 - protein, 14 aa, Homo sapiens
  CDR3 for alpha chain variable domain of TCR clone 37853 (TRAV29/DV5, TRAJ45)
CAASFRGGADGLTV

SEQ ID NO: 75706 - protein, 11 aa, Homo sapiens
  CDR3 for beta chain variable domain of TCR clone 37853 (TRBV11-2, TRBJ2-2)
CASSLPGELFF

SEQ ID NO: 75707 - protein, 13 aa, Homo sapiens
  CDR3 for alpha chain variable domain of TCR clone 37854 (TRAV20, TRAJ21)
CAVEGYNFNKFYF

SEQ ID NO: 75708 - protein, 14 aa, Homo sapiens
  CDR3 for beta chain variable domain of TCR clone 37854 (TRBV12-5, TRBJ2-5)
CASGPRTHQETQYF

SEQ ID NO: 75709 - protein, 17 aa, Homo sapiens
  CDR3 for alpha chain variable domain of TCR clone 37855 (TRAV8-6, TRAJ58)
RAVSSWVGETSGSRLTF

SEQ ID NO: 75710 - protein, 15 aa, Homo sapiens
  CDR3 for beta chain variable domain of TCR clone 37855 (TRBV20-1, TRBJ2-7)
CSARDRVSGMDEQYF

SEQ ID NO: 75711 - protein, 17 aa, Homo sapiens
  CDR3 for alpha chain variable domain of TCR clone 37856 (TRAV3, TRAJ38)
CAVRGCLNAGNNRKLIR

SEQ ID NO: 75712 - protein, 16 aa, Homo sapiens
  CDR3 for beta chain variable domain of TCR clone 37856 (TRBV20-1, TRBJ1-4)
CSAPGQGLLTNEKLFF

SEQ ID NO: 75713 - protein, 18 aa, Homo sapiens
  CDR3 for alpha chain variable domain of TCR clone 37857 (TRAV12-3, TRAJ52)
CAMSVGGAGGTSYGKLTF

SEQ ID NO: 75714 - protein, 15 aa, Homo sapiens
  CDR3 for beta chain variable domain of TCR clone 37857 (TRBV27, TRBJ1-6)
CASSFDRGLGPPLHF

SEQ ID NO: 75715 - protein, 17 aa, Homo sapiens
  CDR3 for alpha chain variable domain of TCR clone 37858 (TRAV23/DV6, TRAJ10)
CSKPPLILTGGGDKLTF

SEQ ID NO: 75716 - protein, 15 aa, Homo sapiens
  CDR3 for beta chain variable domain of TCR clone 37858 (TRBV20-1, TRBJ2-1)
CSAEGGLLAGDEQFF

SEQ ID NO: 75717 - protein, 12 aa, Homo sapiens
  CDR3 for alpha chain variable domain of TCR clone 37859 (TRAV26-2, TRAJ47)
CILVEYGNKLVF

SEQ ID NO: 75718 - protein, 14 aa, Homo sapiens
  CDR3 for beta chain variable domain of TCR clone 37859 (TRBV19, TRBJ2-1)
CASPTFVLSGEQFF

SEQ ID NO: 75719 - protein, 17 aa, Homo sapiens
  CDR3 for alpha chain variable domain of TCR clone 37860 (TRAV13-1, TRAJ31)
CAPRDRLMFGDGTQLVV

SEQ ID NO: 75720 - protein, 14 aa, Homo sapiens
  CDR3 for beta chain variable domain of TCR clone 37860 (TRBV25-1, TRBJ1-1)
CASTHLGGNTEAFF

SEQ ID NO: 75721 - protein, 13 aa, Homo sapiens
  CDR3 for alpha chain variable domain of TCR clone 37861 (TRAV27, TRAJ54)
CAGAGQGAQKLVF

SEQ ID NO: 75722 - protein, 15 aa, Homo sapiens
  CDR3 for beta chain variable domain of TCR clone 37861 (TRBV18, TRBJ2-6)
CASSPSYAGANVPTF

SEQ ID NO: 75723 - protein, 18 aa, Homo sapiens
  CDR3 for alpha chain variable domain of TCR clone 37862 (TRAV21, TRAJ13)
CAVPRSFWGLPESYLWNW

SEQ ID NO: 75724 - protein, 15 aa, Homo sapiens
  CDR3 for beta chain variable domain of TCR clone 37862 (TRBV7-9, TRBJ1-6)
CASSSPGRGNSPLHF

SEQ ID NO: 75725 - protein, 14 aa, Homo sapiens
  CDR3 for alpha chain variable domain of TCR clone 37863 (TRAV1-2, TRAJ16)
CAVNRFSDGQKLLF

SEQ ID NO: 75726 - protein, 20 aa, Homo sapiens
  CDR3 for beta chain variable domain of TCR clone 37863 (TRBV11-2, TRBJ2-2)
LRTRPCISVPAASLPGSCFF

SEQ ID NO: 75727 - protein, 13 aa, Homo sapiens
  CDR3 for alpha chain variable domain of TCR clone 37864 (TRAV8-3, TRAJ28)
CAVGAVGSYQPTF

SEQ ID NO: 75728 - protein, 17 aa, Homo sapiens
  CDR3 for beta chain variable domain of TCR clone 37864 (TRBV11-2, TRBJ2-1)
CASSLYPPGVEYNEQFF

SEQ ID NO: 75729 - protein, 18 aa, Homo sapiens
  CDR3 for alpha chain variable domain of TCR clone 37865 (TRAV21, TRAJ52)
CAVRPSPAGGTSYGKLAF

SEQ ID NO: 75730 - protein, 15 aa, Homo sapiens
  CDR3 for beta chain variable domain of TCR clone 37865 (TRBV7-9, TRBJ2-7)
CASSSSGLAVYEQYF

SEQ ID NO: 75731 - protein, 12 aa, Homo sapiens
  CDR3 for alpha chain variable domain of TCR clone 37866 (TRAV2, TRAJ9)
CAVGAGGFKTIF

SEQ ID NO: 75732 - protein, 17 aa, Homo sapiens
  CDR3 for beta chain variable domain of TCR clone 37866 (TRBV20-1, TRBJ2-2)
CSASGSGQGGLTGELFF

SEQ ID NO: 75733 - protein, 15 aa, Homo sapiens
  CDR3 for alpha chain variable domain of TCR clone 37867 (TRAV9-2, TRAJ56)
CALSDVDGANSKLTF

SEQ ID NO: 75734 - protein, 15 aa, Homo sapiens
  CDR3 for beta chain variable domain of TCR clone 37867 (TRBV7-2, TRBJ2-1)
CASSSGLAGGNEQFF

SEQ ID NO: 75735 - protein, 14 aa, Homo sapiens
  CDR3 for alpha chain variable domain of TCR clone 37868 (TRAV30, TRAJ33)
CGTVAPRSNYQLIW

SEQ ID NO: 75736 - protein, 15 aa, Homo sapiens
  CDR3 for beta chain variable domain of TCR clone 37868 (TRBV3-1, TRBJ2-1)
CASSQQPSGGNEQFF

SEQ ID NO: 75737 - protein, 14 aa, Homo sapiens
  CDR3 for alpha chain variable domain of TCR clone 37869 (TRAV35, TRAJ42)
CAGRYGGSQGNLIF

SEQ ID NO: 75738 - protein, 15 aa, Homo sapiens
  CDR3 for beta chain variable domain of TCR clone 37869 (TRBV7-9, TRBJ2-1)
CASSVGWGRANEQFF

SEQ ID NO: 75739 - protein, 13 aa, Homo sapiens
  CDR3 for alpha chain variable domain of TCR clone 37870 (TRAV12-3, TRAJ33)
CAMSVNSNYQLIW

SEQ ID NO: 75740 - protein, 16 aa, Homo sapiens
  CDR3 for beta chain variable domain of TCR clone 37870 (TRBV7-9, TRBJ2-3)
CASSLGAGGPTDTQYF

SEQ ID NO: 75741 - protein, 12 aa, Homo sapiens
  CDR3 for alpha chain variable domain of TCR clone 37871 (TRAV2, TRAJ9)
CAVGAGGFKTIF

SEQ ID NO: 75742 - protein, 13 aa, Homo sapiens
  CDR3 for beta chain variable domain of TCR clone 37871 (TRBV4-2, TRBJ1-1)
CASSQAGNTEAFF

SEQ ID NO: 75743 - protein, 12 aa, Homo sapiens
  CDR3 for alpha chain variable domain of TCR clone 37872 (TRAV3, TRAJ20)
CAVRDPDYKLSF

SEQ ID NO: 75744 - protein, 15 aa, Homo sapiens
  CDR3 for beta chain variable domain of TCR clone 37872 (TRBV7-9, TRBJ1-2)
CASSSVDRSNYGYTF

SEQ ID NO: 75745 - protein, 12 aa, Homo sapiens
  CDR3 for alpha chain variable domain of TCR clone 37873 (TRAV12-3, TRAJ17)
CAMTLTGNKLTF

SEQ ID NO: 75746 - protein, 14 aa, Homo sapiens
  CDR3 for beta chain variable domain of TCR clone 37873 (TRBV11-2, TRBJ2-7)
CASSSTGEGYEQYF

SEQ ID NO: 75747 - protein, 17 aa, Homo sapiens
  CDR3 for alpha chain variable domain of TCR clone 37874 (TRAV3, TRAJ42)
CAVRDREYGGSQGNLIF

SEQ ID NO: 75748 - protein, 14 aa, Homo sapiens
  CDR3 for beta chain variable domain of TCR clone 37874 (TRBV7-2, TRBJ2-5)
CASSPRGSSETQYF

SEQ ID NO: 75749 - protein, 15 aa, Homo sapiens
  CDR3 for alpha chain variable domain of TCR clone 37875 (TRAV38-1, TRAJ37)
CAFIFGSGNTVKLIF

SEQ ID NO: 75750 - protein, 12 aa, Homo sapiens
  CDR3 for beta chain variable domain of TCR clone 37875 (TRBV7-9, TRBJ2-7)
CASSLEGYEQYF

SEQ ID NO: 75751 - protein, 13 aa, Homo sapiens
  CDR3 for alpha chain variable domain of TCR clone 37876 (TRAV35, TRAJ22)
CAGLSGSARQLTF

SEQ ID NO: 75752 - protein, 16 aa, Homo sapiens
  CDR3 for beta chain variable domain of TCR clone 37876 (TRBV4-2, TRBJ2-7)
CASSQDGGSLRGEQYF

SEQ ID NO: 75753 - protein, 16 aa, Homo sapiens
  CDR3 for alpha chain variable domain of TCR clone 37877 (TRAV8-3, TRAJ10)
CAVGPILTGGGNKLTF

SEQ ID NO: 75754 - protein, 16 aa, Homo sapiens
  CDR3 for beta chain variable domain of TCR clone 37877 (TRBV7-2, TRBJ2-5)
CASSSKWLSGQETRYF

SEQ ID NO: 75755 - protein, 17 aa, Homo sapiens
  CDR3 for alpha chain variable domain of TCR clone 37878 (TRAV3, TRAJ42)
CAVRDRDYGGSQGNPIF

SEQ ID NO: 75756 - protein, 20 aa, Homo sapiens
  CDR3 for beta chain variable domain of TCR clone 37878 (TRBV28, TRBJ2-1)
CASTPIGRSPGLAGGNEQFF

SEQ ID NO: 75757 - protein, 14 aa, Homo sapiens
  CDR3 for alpha chain variable domain of TCR clone 37879 (TRAV2, TRAJ9)
CAVDPNTGGFKTIF

SEQ ID NO: 75758 - protein, 13 aa, Homo sapiens
  CDR3 for beta chain variable domain of TCR clone 37879 (TRBV20-1, TRBJ2-1)
CSASTGTSNEQLF

SEQ ID NO: 75759 - protein, 15 aa, Homo sapiens
  CDR3 for alpha chain variable domain of TCR clone 37880 (TRAV2, TRAJ22)
CAVPSRGGSARQLTF

SEQ ID NO: 75760 - protein, 11 aa, Homo sapiens
  CDR3 for beta chain variable domain of TCR clone 37880 (TRBV27, TRBJ2-3)
CASSLGDTQYL

SEQ ID NO: 75761 - protein, 11 aa, Homo sapiens
  CDR3 for alpha chain variable domain of TCR clone 37881 (TRAV13-2, TRAJ31)
CAENMDARLMF

SEQ ID NO: 75762 - protein, 15 aa, Homo sapiens
  CDR3 for beta chain variable domain of TCR clone 37881 (TRBV7-8, TRBJ1-2)
CAGSLVRDGGLGYTF

SEQ ID NO: 75763 - protein, 13 aa, Homo sapiens
  CDR3 for alpha chain variable domain of TCR clone 37882 (TRAV35, TRAJ42)
CAGFPGSQGNLIL

SEQ ID NO: 75764 - protein, 13 aa, Homo sapiens
  CDR3 for beta chain variable domain of TCR clone 37882 (TRBV29-1, TRBJ2-1)
CSVEGGRVNEQFF

SEQ ID NO: 75765 - protein, 15 aa, Homo sapiens
  CDR3 for alpha chain variable domain of TCR clone 37883 (TRAV12-3, TRAJ6)
CAMSATTGGSYIPTF

SEQ ID NO: 75766 - protein, 15 aa, Homo sapiens
  CDR3 for beta chain variable domain of TCR clone 37883 (TRBV5-1, TRBJ2-2)
CASTIQGGDTGELFF

SEQ ID NO: 75767 - protein, 15 aa, Homo sapiens
  CDR3 for alpha chain variable domain of TCR clone 37884 (TRAV23/DV6, TRAJ47)
CAASIRNGIWKQTGL

SEQ ID NO: 75768 - protein, 13 aa, Homo sapiens
  CDR3 for beta chain variable domain of TCR clone 37884 (TRBV19, TRBJ1-2)
CASSQGQVYGYTF

SEQ ID NO: 75769 - protein, 13 aa, Homo sapiens
  CDR3 for alpha chain variable domain of TCR clone 37885 (TRAV8-3, TRAJ28)
CAVGAVGSYQLTF

SEQ ID NO: 75770 - protein, 12 aa, Homo sapiens
  CDR3 for beta chain variable domain of TCR clone 37885 (TRBV7-9, TRBJ2-7)
CASSLEGYEQYF

SEQ ID NO: 75771 - protein, 14 aa, Homo sapiens
  CDR3 for alpha chain variable domain of TCR clone 37886 (TRAV8-4, TRAJ40)
CAVIPTSGTYKYIF

SEQ ID NO: 75772 - protein, 15 aa, Homo sapiens
  CDR3 for beta chain variable domain of TCR clone 37886 (TRBV7-2, TRBJ2-1)
CASTSASGDYSEQFF

SEQ ID NO: 75773 - protein, 12 aa, Homo sapiens
  CDR3 for alpha chain variable domain of TCR clone 37887 (TRAV17, TRAJ39)
CATGASGNMLTF

SEQ ID NO: 75774 - protein, 14 aa, Homo sapiens
  CDR3 for beta chain variable domain of TCR clone 37887 (TRBV7-9, TRBJ1-2)
CASSRQGANYGYTF

SEQ ID NO: 75775 - protein, 12 aa, Homo sapiens
  CDR3 for alpha chain variable domain of TCR clone 37888 (TRAV12-1, TRAJ8)
CVVNTGFQKLVF

SEQ ID NO: 75776 - protein, 10 aa, Homo sapiens
  CDR3 for beta chain variable domain of TCR clone 37888 (TRBV11-1, TRBJ2-7)
CASGQQEQYF

SEQ ID NO: 75777 - protein, 16 aa, Homo sapiens
  CDR3 for alpha chain variable domain of TCR clone 37889 (TRAV12-3, TRAJ53)
CAMSPGSGGSNYKLTF

SEQ ID NO: 75778 - protein, 15 aa, Homo sapiens
  CDR3 for beta chain variable domain of TCR clone 37889 (TRBV5-1, TRBJ2-1)
CASSPPRAPYNEQFF

SEQ ID NO: 75779 - protein, 16 aa, Homo sapiens
  CDR3 for alpha chain variable domain of TCR clone 37890 (TRAV27, TRAJ52)
CAGAGAGGTSYGKRTF

SEQ ID NO: 75780 - protein, 17 aa, Homo sapiens
  CDR3 for beta chain variable domain of TCR clone 37890 (TRBV24-1, TRBJ2-3)
CATSDLPSGEDTDTQYF

SEQ ID NO: 75781 - protein, 15 aa, Homo sapiens
  CDR3 for alpha chain variable domain of TCR clone 37891 (TRAV14/DV4, TRAJ26)
CAMREGQNYGQNFVF

SEQ ID NO: 75782 - protein, 13 aa, Homo sapiens
  CDR3 for beta chain variable domain of TCR clone 37891 (TRBV24-1, TRBJ2-2)
CATSDWPTGELFF

SEQ ID NO: 75783 - protein, 13 aa, Homo sapiens
  CDR3 for alpha chain variable domain of TCR clone 37892 (TRAV8-6, TRAJ49)
CAVITNTGNQFYF

SEQ ID NO: 75784 - protein, 14 aa, Homo sapiens
  CDR3 for beta chain variable domain of TCR clone 37892 (TRBV11-3, TRBJ2-2)
CASSPRRDTGELFF

SEQ ID NO: 75785 - protein, 12 aa, Homo sapiens
  CDR3 for alpha chain variable domain of TCR clone 37893 (TRAV23/DV6, TRAJ58)
CAARLLRGEASG

SEQ ID NO: 75786 - protein, 13 aa, Homo sapiens
  CDR3 for beta chain variable domain of TCR clone 37893 (TRBV6-4, TRBJ1-5)
CASSADLNQPQHF

SEQ ID NO: 75787 - protein, 13 aa, Homo sapiens
  CDR3 for alpha chain variable domain of TCR clone 37894 (TRAV12-1, TRAJ26)
CVVRRNYGQNFVF

SEQ ID NO: 75788 - protein, 14 aa, Homo sapiens
  CDR3 for beta chain variable domain of TCR clone 37894 (TRBV6-3, TRBJ1-1)
CASRYTGGSTEAFF

SEQ ID NO: 75789 - protein, 11 aa, Homo sapiens
  CDR3 for alpha chain variable domain of TCR clone 37895 (TRAV12-2, TRAJ33)
CAVTSNYQLIW

SEQ ID NO: 75790 - protein, 14 aa, Homo sapiens
  CDR3 for beta chain variable domain of TCR clone 37895 (TRBV12-4, TRBJ2-2)
CASNLGANTGELFF

SEQ ID NO: 75791 - protein, 13 aa, Homo sapiens
  CDR3 for alpha chain variable domain of TCR clone 37896 (TRAV12-3, TRAJ9)
CAIRNTGGFKTIF

SEQ ID NO: 75792 - protein, 14 aa, Homo sapiens
  CDR3 for beta chain variable domain of TCR clone 37896 (TRBV11-2, TRBJ2-7)
CASSSTGEGYEQYF

SEQ ID NO: 75793 - protein, 16 aa, Homo sapiens
  CDR3 for alpha chain variable domain of TCR clone 37897 (TRAV1-2, TRAJ33)
CAVRAISMDSNYQLIW

SEQ ID NO: 75794 - protein, 13 aa, Homo sapiens
  CDR3 for beta chain variable domain of TCR clone 37897 (TRBV5-5, TRBJ1-2)
CANSFWRGEDYTF

SEQ ID NO: 75795 - protein, 15 aa, Homo sapiens
  CDR3 for alpha chain variable domain of TCR clone 37898 (TRAV17, TRAJ57)
CATGPSQCGSEKLVF

SEQ ID NO: 75796 - protein, 14 aa, Homo sapiens
  CDR3 for beta chain variable domain of TCR clone 37898 (TRBV12-5, TRBJ2-5)
CASGSRTHQETQYF

SEQ ID NO: 75797 - protein, 14 aa, Homo sapiens
  CDR3 for alpha chain variable domain of TCR clone 37899 (TRAV12-2, TRAJ13)
CAVKKTGGYQKVTF

SEQ ID NO: 75798 - protein, 15 aa, Homo sapiens
  CDR3 for beta chain variable domain of TCR clone 37899 (TRBV20-1, TRBJ1-1)
CSARGGGTLKLSLDK

SEQ ID NO: 75799 - protein, 14 aa, Homo sapiens
  CDR3 for alpha chain variable domain of TCR clone 37900 (TRAV24, TRAJ42)
CAQNCGGSQGNLIF

SEQ ID NO: 75800 - protein, 15 aa, Homo sapiens
  CDR3 for beta chain variable domain of TCR clone 37900 (TRBV19, TRBJ1-5)
CASSIPGGAGQPQHF

SEQ ID NO: 75801 - protein, 12 aa, Homo sapiens
  CDR3 for alpha chain variable domain of TCR clone 37901 (TRAV13-2, TRAJ23)
CAERHRGGKLIF

SEQ ID NO: 75802 - protein, 13 aa, Homo sapiens
  CDR3 for beta chain variable domain of TCR clone 37901 (TRBV7-9, TRBJ1-2)
CASSLKQNYGYSF

SEQ ID NO: 75803 - protein, 17 aa, Homo sapiens
  CDR3 for alpha chain variable domain of TCR clone 37902 (TRAV17, TRAJ28)
CATDPRRGGAGSHQLTF

SEQ ID NO: 75804 - protein, 16 aa, Homo sapiens
  CDR3 for beta chain variable domain of TCR clone 37902 (TRBV25-1, TRBJ1-1)
CASSGDRDRGRIEAFF

SEQ ID NO: 75805 - protein, 14 aa, Homo sapiens
  CDR3 for alpha chain variable domain of TCR clone 37903 (TRAV16, TRAJ48)
CALTPGFGNEKLTF

SEQ ID NO: 75806 - protein, 14 aa, Homo sapiens
  CDR3 for beta chain variable domain of TCR clone 37903 (TRBV7-2, TRBJ2-7)
CASSSISGLSEQYF

SEQ ID NO: 75807 - protein, 12 aa, Homo sapiens
  CDR3 for alpha chain variable domain of TCR clone 37904 (TRAV12-2, TRAJ31)
CAVNTPDARLMF

SEQ ID NO: 75808 - protein, 17 aa, Homo sapiens
  CDR3 for beta chain variable domain of TCR clone 37904 (TRBV20-1, TRBJ1-6)
CSARSGYTFSYNSPLHF

SEQ ID NO: 75809 - protein, 13 aa, Homo sapiens
  CDR3 for alpha chain variable domain of TCR clone 37905 (TRAV26-1, TRAJ34)
CTVRPWITDKLIF

SEQ ID NO: 75810 - protein, 13 aa, Homo sapiens
  CDR3 for beta chain variable domain of TCR clone 37905 (TRBV5-1, TRBJ2-1)
CASSLGSYNEQFF

SEQ ID NO: 75811 - protein, 15 aa, Homo sapiens
  CDR3 for alpha chain variable domain of TCR clone 37906 (TRAV3, TRAJ20)
CAVRDIKLSDYKLSF

SEQ ID NO: 75812 - protein, 15 aa, Homo sapiens
  CDR3 for beta chain variable domain of TCR clone 37906 (TRBV7-9, TRBJ1-6)
CASSSPGRGNSPLNF

SEQ ID NO: 75813 - protein, 14 aa, Homo sapiens
  CDR3 for alpha chain variable domain of TCR clone 37907 (TRAV1-2, TRAJ8)
CAVREDTGSQKLVF

SEQ ID NO: 75814 - protein, 12 aa, Homo sapiens
  CDR3 for beta chain variable domain of TCR clone 37907 (TRBV11-2, TRBJ2-2)
CASSLGGGELFF

SEQ ID NO: 75815 - protein, 14 aa, Homo sapiens
  CDR3 for alpha chain variable domain of TCR clone 37908 (TRAV3, TRAJ21)
CAVESQANFNKFYF

SEQ ID NO: 75816 - protein, 18 aa, Homo sapiens
  CDR3 for beta chain variable domain of TCR clone 37908 (TRBV7-9, TRBJ2-1)
CASSLAASGTSGRNEQFF

SEQ ID NO: 75817 - protein, 14 aa, Homo sapiens
  CDR3 for alpha chain variable domain of TCR clone 37909 (TRAV35, TRAJ22)
CAGLRPGSARQLTF

SEQ ID NO: 75818 - protein, 17 aa, Homo sapiens
  CDR3 for beta chain variable domain of TCR clone 37909 (TRBV7-8, TRBJ2-6)
CASSAGTGGAGANVLTF

SEQ ID NO: 75819 - protein, 15 aa, Homo sapiens
  CDR3 for alpha chain variable domain of TCR clone 37910 (TRAV8-3, TRAJ27)
CAVGPSKTNAGKSTF

SEQ ID NO: 75820 - protein, 17 aa, Homo sapiens
  CDR3 for beta chain variable domain of TCR clone 37910 (TRBV13, TRBJ2-3)
CASSLSRVAGGRNTQYF

SEQ ID NO: 75821 - protein, 13 aa, Homo sapiens
  CDR3 for alpha chain variable domain of TCR clone 37911 (TRAV30, TRAJ24)
CGTVTDSWGKWQF

SEQ ID NO: 75822 - protein, 14 aa, Homo sapiens
  CDR3 for beta chain variable domain of TCR clone 37911 (TRBV6-3, TRBJ2-2)
CASTYTPDTGELFF

SEQ ID NO: 75823 - protein, 17 aa, Homo sapiens
  CDR3 for alpha chain variable domain of TCR clone 37912 (TRAV26-2, TRAJ42)
CILRDVGYGGSQGNLIF

SEQ ID NO: 75824 - protein, 16 aa, Homo sapiens
  CDR3 for beta chain variable domain of TCR clone 37912 (TRBV12-4, TRBJ2-7)
CASSLIVGTGTYEQYF

SEQ ID NO: 75825 - protein, 17 aa, Homo sapiens
  CDR3 for alpha chain variable domain of TCR clone 37913 (TRAV12-3, TRAJ6)
CAMSARGGARGSYIPTF

SEQ ID NO: 75826 - protein, 12 aa, Homo sapiens
  CDR3 for beta chain variable domain of TCR clone 37913 (TRBV12-4, TRBJ2-3)
CASSTLPDTQYF

SEQ ID NO: 75827 - protein, 11 aa, Homo sapiens
  CDR3 for alpha chain variable domain of TCR clone 37914 (TRAV2, TRAJ33)
CAVDSNYQLIW

SEQ ID NO: 75828 - protein, 14 aa, Homo sapiens
  CDR3 for beta chain variable domain of TCR clone 37914 (TRBV2, TRBJ1-5)
CASSENRGGQPQHF

SEQ ID NO: 75829 - protein, 15 aa, Homo sapiens
  CDR3 for alpha chain variable domain of TCR clone 37915 (TRAV13-1, TRAJ11)
CAASNRNSGYSTPTF

SEQ ID NO: 75830 - protein, 13 aa, Homo sapiens
  CDR3 for beta chain variable domain of TCR clone 37915 (TRBV4-2, TRBJ1-1)
CASSQAGNTEAFF

SEQ ID NO: 75831 - protein, 13 aa, Homo sapiens
  CDR3 for alpha chain variable domain of TCR clone 37916 (TRAV1-1, TRAJ9)
CAAKNTGGFKTIF

SEQ ID NO: 75832 - protein, 14 aa, Homo sapiens
  CDR3 for beta chain variable domain of TCR clone 37916 (TRBV20-1, TRBJ2-1)
FSAQIGGSANEQFF

SEQ ID NO: 75833 - protein, 15 aa, Homo sapiens
  CDR3 for alpha chain variable domain of TCR clone 37917 (TRAV4, TRAJ10)
CLVGDGSVGGNKLTF

SEQ ID NO: 75834 - protein, 15 aa, Homo sapiens
  CDR3 for beta chain variable domain of TCR clone 37917 (TRBV27, TRBJ2-3)
CASSSLAGVIDTQYF

SEQ ID NO: 75835 - protein, 13 aa, Homo sapiens
  CDR3 for alpha chain variable domain of TCR clone 37918 (TRAV21, TRAJ48)
CAARPGNAGKLTF

SEQ ID NO: 75836 - protein, 17 aa, Homo sapiens
  CDR3 for beta chain variable domain of TCR clone 37918 (TRBV28, TRBJ2-5)
CASSTPEGDALQETQYF

SEQ ID NO: 75837 - protein, 14 aa, Homo sapiens
  CDR3 for alpha chain variable domain of TCR clone 37919 (TRAV1-2, TRAJ16)
CVVNRFSDGQKLLF

SEQ ID NO: 75838 - protein, 15 aa, Homo sapiens
  CDR3 for beta chain variable domain of TCR clone 37919 (TRBV9, TRBJ1-6)
CASSAAGTGDSPLHF

SEQ ID NO: 75839 - protein, 13 aa, Homo sapiens
  CDR3 for alpha chain variable domain of TCR clone 37920 (TRAV13-2, TRAJ48)
CAEMDFGNEKLTF

SEQ ID NO: 75840 - protein, 16 aa, Homo sapiens
  CDR3 for beta chain variable domain of TCR clone 37920 (TRBV12-5, TRBJ2-5)
CASGPRTGGNQETQYF

SEQ ID NO: 75841 - protein, 12 aa, Homo sapiens
  CDR3 for alpha chain variable domain of TCR clone 37921 (TRAV16, TRAJ10)
CSRTGGGNKRTF

SEQ ID NO: 75842 - protein, 15 aa, Homo sapiens
  CDR3 for beta chain variable domain of TCR clone 37921 (TRBV6-3, TRBJ2-7)
CASSSPGTVFYEQYF

SEQ ID NO: 75843 - protein, 10 aa, Homo sapiens
  CDR3 for alpha chain variable domain of TCR clone 37922 (TRAV1-2, TRAJ31)
CAFFDARLMF

SEQ ID NO: 75844 - protein, 12 aa, Homo sapiens
  CDR3 for beta chain variable domain of TCR clone 37922 (TRBV19, TRBJ2-7)
CASTDRDYEQYF

SEQ ID NO: 75845 - protein, 12 aa, Homo sapiens
  CDR3 for alpha chain variable domain of TCR clone 37923 (TRAV13-1, TRAJ21)
CAAKEGFNKFYF

SEQ ID NO: 75846 - protein, 13 aa, Homo sapiens
  CDR3 for beta chain variable domain of TCR clone 37923 (TRBV20-1, TRBJ2-7)
CSARTGAGYEQYF

SEQ ID NO: 75847 - protein, 17 aa, Homo sapiens
  CDR3 for alpha chain variable domain of TCR clone 37924 (TRAV8-6, TRAJ58)
CAVSSWVGETSGSRLTF

SEQ ID NO: 75848 - protein, 14 aa, Homo sapiens
  CDR3 for beta chain variable domain of TCR clone 37924 (TRBV4-2, TRBJ2-1)
CASGLDRAYTEQFF

SEQ ID NO: 75849 - protein, 13 aa, Homo sapiens
  CDR3 for alpha chain variable domain of TCR clone 37925 (TRAV35, TRAJ42)
CAGFPGSQRNLIF

SEQ ID NO: 75850 - protein, 13 aa, Homo sapiens
  CDR3 for beta chain variable domain of TCR clone 37925 (TRBV29-1, TRBJ2-1)
CSVEGGRVNEQFF

SEQ ID NO: 75851 - protein, 15 aa, Homo sapiens
  CDR3 for alpha chain variable domain of TCR clone 37926 (TRAV8-3, TRAJ40)
CAAPSLGSGAYKYIF

SEQ ID NO: 75852 - protein, 16 aa, Homo sapiens
  CDR3 for beta chain variable domain of TCR clone 37926 (TRBV7-3, TRBJ2-3)
CASSLSGYRPEDTQYF

SEQ ID NO: 75853 - protein, 21 aa, Homo sapiens
  CDR3 for alpha chain variable domain of TCR clone 37927 (TRAV9-2, )
CALIQIGDIQNPDPAGYQLRD

SEQ ID NO: 75854 - protein, 13 aa, Homo sapiens
  CDR3 for beta chain variable domain of TCR clone 37927 (TRBV20-1, TRBJ1-1)
CSARGGGNTEAFF

SEQ ID NO: 75855 - protein, 16 aa, Homo sapiens
  CDR3 for alpha chain variable domain of TCR clone 37928 (TRAV3, TRAJ3)
CAVRDRAKSSASKIIF

SEQ ID NO: 75856 - protein, 13 aa, Homo sapiens
  CDR3 for beta chain variable domain of TCR clone 37928 (TRBV19, TRBJ1-2)
CASSQGQVYGYTF

SEQ ID NO: 75857 - protein, 14 aa, Homo sapiens
  CDR3 for alpha chain variable domain of TCR clone 37929 (TRAV8-3, TRAJ4)
CAVGAAGGYNKLIF

SEQ ID NO: 75858 - protein, 16 aa, Homo sapiens
  CDR3 for beta chain variable domain of TCR clone 37929 (TRBV2, TRBJ2-3)
CASSTSVEGVTDTQYF

SEQ ID NO: 75859 - protein, 13 aa, Homo sapiens
  CDR3 for alpha chain variable domain of TCR clone 37930 (TRAV17, TRAJ9)
CATDYTGGFNTIF

SEQ ID NO: 75860 - protein, 14 aa, Homo sapiens
  CDR3 for beta chain variable domain of TCR clone 37930 (TRBV19, TRBJ2-5)
CASSMTGQQETQYF

SEQ ID NO: 75861 - protein, 14 aa, Homo sapiens
  CDR3 for alpha chain variable domain of TCR clone 37931 (TRAV21, TRAJ45)
CAVSSGGGADGLTF

SEQ ID NO: 75862 - protein, 14 aa, Homo sapiens
  CDR3 for beta chain variable domain of TCR clone 37931 (TRBV2, TRBJ2-2)
CASSLFGGDGELFF

SEQ ID NO: 75863 - protein, 14 aa, Homo sapiens
  CDR3 for alpha chain variable domain of TCR clone 37932 (TRAV12-2, TRAJ40)
CAVKIPSGAYKYVF

SEQ ID NO: 75864 - protein, 14 aa, Homo sapiens
  CDR3 for beta chain variable domain of TCR clone 37932 (TRBV20-1, TRBJ1-1)
CSAQTRIGGTEAFF

SEQ ID NO: 75865 - protein, 14 aa, Homo sapiens
  CDR3 for alpha chain variable domain of TCR clone 37933 (TRAV12-2, TRAJ13)
CAVGKTGGYQKVTF

SEQ ID NO: 75866 - protein, 15 aa, Homo sapiens
  CDR3 for beta chain variable domain of TCR clone 37933 (TRBV27, TRBJ2-1)
CASSNGGGSSNEQFF

SEQ ID NO: 75867 - protein, 20 aa, Homo sapiens
  CDR3 for alpha chain variable domain of TCR clone 37934 (TRAV26-1, TRAJ42)
CCVLSHRQTYYGGSQGNLIF

SEQ ID NO: 75868 - protein, 14 aa, Homo sapiens
  CDR3 for beta chain variable domain of TCR clone 37934 (TRBV19, TRBJ2-2)
CASSGQGIAGELFF

SEQ ID NO: 75869 - protein, 14 aa, Homo sapiens
  CDR3 for alpha chain variable domain of TCR clone 37935 (TRAV26-1, TRAJ38)
CIADNAGNNRKPIW

SEQ ID NO: 75870 - protein, 15 aa, Homo sapiens
  CDR3 for beta chain variable domain of TCR clone 37935 (TRBV20-1, TRBJ2-7)
CSARDRVSGMDEQYF

SEQ ID NO: 75871 - protein, 14 aa, Homo sapiens
  CDR3 for alpha chain variable domain of TCR clone 37936 (TRAV2, TRAJ37)
CAVDFTSNTGKLIF

SEQ ID NO: 75872 - protein, 17 aa, Homo sapiens
  CDR3 for beta chain variable domain of TCR clone 37936 (TRBV20-1, TRBJ2-1)
CSASSSGLAGSYNEQFF

SEQ ID NO: 75873 - protein, 15 aa, Homo sapiens
  CDR3 for alpha chain variable domain of TCR clone 37937 (TRAV12-2, TRAJ50)
CAVNGLETSYDKVIF

SEQ ID NO: 75874 - protein, 15 aa, Homo sapiens
  CDR3 for beta chain variable domain of TCR clone 37937 (TRBV5-1, TRBJ2-3)
CASRNQAGSTDTQYF

SEQ ID NO: 75875 - protein, 17 aa, Homo sapiens
  CDR3 for alpha chain variable domain of TCR clone 37938 (TRAV3, TRAJ6)
CAVRDGPRAGGSYIPSF

SEQ ID NO: 75876 - protein, 20 aa, Homo sapiens
  CDR3 for beta chain variable domain of TCR clone 37938 (TRBV28, TRBJ2-1)
CASTPIGRSPGLAGGNEQFF

SEQ ID NO: 75877 - protein, 16 aa, Homo sapiens
  CDR3 for alpha chain variable domain of TCR clone 37939 (TRAV2, TRAJ4)
CAVVDRFSGGYNKLIF

SEQ ID NO: 75878 - protein, 13 aa, Homo sapiens
  CDR3 for beta chain variable domain of TCR clone 37939 (TRBV7-7, TRBJ2-5)
CASSRSGQETQYF

SEQ ID NO: 75879 - protein, 12 aa, Homo sapiens
  CDR3 for alpha chain variable domain of TCR clone 37940 (TRAV13-1, TRAJ49)
CAASPMGNQFYF

SEQ ID NO: 75880 - protein, 12 aa, Homo sapiens
  CDR3 for beta chain variable domain of TCR clone 37940 (TRBV7-8, TRBJ2-7)
CASSLGDREQYF

SEQ ID NO: 75881 - protein, 14 aa, Homo sapiens
  CDR3 for alpha chain variable domain of TCR clone 37941 (TRAV12-3, TRAJ10)
SHLPLTGGGNKLTF

SEQ ID NO: 75882 - protein, 12 aa, Homo sapiens
  CDR3 for beta chain variable domain of TCR clone 37941 (TRBV7-9, TRBJ2-7)
CASSFGSYEQYF

SEQ ID NO: 75883 - protein, 14 aa, Homo sapiens
  CDR3 for alpha chain variable domain of TCR clone 37942 (TRAV29/DV5, TRAJ17)
CAARGRAAGNKLTF

SEQ ID NO: 75884 - protein, 12 aa, Homo sapiens
  CDR3 for beta chain variable domain of TCR clone 37942 (TRBV7-9, TRBJ2-3)
CASSFITDTQYF

SEQ ID NO: 75885 - protein, 16 aa, Homo sapiens
  CDR3 for alpha chain variable domain of TCR clone 37943 (TRAV3, TRAJ37)
CAVRGKGSGNTGKLIF

SEQ ID NO: 75886 - protein, 15 aa, Homo sapiens
  CDR3 for beta chain variable domain of TCR clone 37943 (TRBV10-2, TRBJ2-3)
CASTSTSGGTDTQYF

SEQ ID NO: 75887 - protein, 11 aa, Homo sapiens
  CDR3 for alpha chain variable domain of TCR clone 37944 (TRAV21, TRAJ34)
CAHYNTDKLIF

SEQ ID NO: 75888 - protein, 13 aa, Homo sapiens
  CDR3 for beta chain variable domain of TCR clone 37944 (TRBV19, TRBJ2-2)
CASSIWSTGELFF

SEQ ID NO: 75889 - protein, 23 aa, Homo sapiens
  CDR3 for alpha chain variable domain of TCR clone 37945 (TRAV12-2, TRAJ36)
SLLIRDSQPSDSATLERANNLFF

SEQ ID NO: 75890 - protein, 19 aa, Homo sapiens
  CDR3 for beta chain variable domain of TCR clone 37945 (TRBV25-1, TRBJ2-2)
CAILVYRVDRGRKTGELFF

SEQ ID NO: 75891 - protein, 12 aa, Homo sapiens
  CDR3 for alpha chain variable domain of TCR clone 37946 (TRAV13-1, TRAJ27)
CAAHTNADKSTF

SEQ ID NO: 75892 - protein, 14 aa, Homo sapiens
  CDR3 for beta chain variable domain of TCR clone 37946 (TRBV19, TRBJ2-2)
CASSGQGIAGELFF

SEQ ID NO: 75893 - protein, 11 aa, Homo sapiens
  CDR3 for alpha chain variable domain of TCR clone 37947 (TRAV3, TRAJ32)
CAVSPKGMVVL

SEQ ID NO: 75894 - protein, 15 aa, Homo sapiens
  CDR3 for beta chain variable domain of TCR clone 37947 (TRBV9, TRBJ1-6)
CASSVAGTGDSPLHF

SEQ ID NO: 75895 - protein, 14 aa, Homo sapiens
  CDR3 for alpha chain variable domain of TCR clone 37948 (TRAV13-2, TRAJ15)
CAENPNQAGTALIF

SEQ ID NO: 75896 - protein, 16 aa, Homo sapiens
  CDR3 for beta chain variable domain of TCR clone 37948 (TRBV12-4, TRBJ1-2)
CASSPTATGKTRGYTV

SEQ ID NO: 75897 - protein, 15 aa, Homo sapiens
  CDR3 for alpha chain variable domain of TCR clone 37949 (TRAV2, TRAJ22)
CAVPSRGGSARQLTF

SEQ ID NO: 75898 - protein, 11 aa, Homo sapiens
  CDR3 for beta chain variable domain of TCR clone 37949 (TRBV27, TRBJ2-3)
CASRLGDTQYF

SEQ ID NO: 75899 - protein, 17 aa, Homo sapiens
  CDR3 for alpha chain variable domain of TCR clone 37950 (TRAV3, TRAJ42)
CAVRDRDYGGSQGNLIF

SEQ ID NO: 75900 - protein, 15 aa, Homo sapiens
  CDR3 for beta chain variable domain of TCR clone 37950 (TRBV6-6, TRBJ2-7)
CASSYAYGGSYEQYF

SEQ ID NO: 75901 - protein, 11 aa, Homo sapiens
  CDR3 for alpha chain variable domain of TCR clone 37951 (TRAV21, TRAJ9)
CAVPGGFKTIF

SEQ ID NO: 75902 - protein, 17 aa, Homo sapiens
  CDR3 for beta chain variable domain of TCR clone 37951 (TRBV7-9, TRBJ2-5)
CATSVGARDPVLRARHA

SEQ ID NO: 75903 - protein, 16 aa, Homo sapiens
  CDR3 for alpha chain variable domain of TCR clone 37952 (TRAV1-2, TRAJ10)
CAVRGVLTGGGNKLTF

SEQ ID NO: 75904 - protein, 12 aa, Homo sapiens
  CDR3 for beta chain variable domain of TCR clone 37952 (TRBV7-8, TRBJ2-7)
CANSLGDREQYF

SEQ ID NO: 75905 - protein, 15 aa, Homo sapiens
  CDR3 for alpha chain variable domain of TCR clone 37953 (TRAV8-3, TRAJ45)
CASSYSGGGADGLTF

SEQ ID NO: 75906 - protein, 15 aa, Homo sapiens
  CDR3 for beta chain variable domain of TCR clone 37953 (TRBV20-1, TRBJ2-7)
CSARDLVSGMDEQYF

SEQ ID NO: 75907 - protein, 12 aa, Homo sapiens
  CDR3 for alpha chain variable domain of TCR clone 37954 (TRAV27, TRAJ13)
KAILGGYQKVTF

SEQ ID NO: 75908 - protein, 15 aa, Homo sapiens
  CDR3 for beta chain variable domain of TCR clone 37954 (TRBV3-1, TRBJ1-2)
CASSPTRLPEGGYTF

SEQ ID NO: 75909 - protein, 14 aa, Homo sapiens
  CDR3 for alpha chain variable domain of TCR clone 37955 (TRAV35, TRAJ42)
CAGRYGVSQGNLIF

SEQ ID NO: 75910 - protein, 15 aa, Homo sapiens
  CDR3 for beta chain variable domain of TCR clone 37955 (TRBV7-9, TRBJ2-1)
CASSLGWGRANEQFF

SEQ ID NO: 75911 - protein, 12 aa, Homo sapiens
  CDR3 for alpha chain variable domain of TCR clone 37956 (TRAV12-3, TRAJ5)
CAMDTGRRTLTF

SEQ ID NO: 75912 - protein, 13 aa, Homo sapiens
  CDR3 for beta chain variable domain of TCR clone 37956 (TRBV7-7, TRBJ2-2)
CASSLTSAGELFF

SEQ ID NO: 75913 - protein, 15 aa, Homo sapiens
  CDR3 for alpha chain variable domain of TCR clone 37957 (TRAV38-1, TRAJ37)
CAFIFGSGNTGKLIF

SEQ ID NO: 75914 - protein, 12 aa, Homo sapiens
  CDR3 for beta chain variable domain of TCR clone 37957 (TRBV7-9, TRBJ2-7)
CASSLEGYEQYV

SEQ ID NO: 75915 - protein, 14 aa, Homo sapiens
  CDR3 for alpha chain variable domain of TCR clone 37958 (TRAV16, TRAJ37)
CALDISGNTGKLIF

SEQ ID NO: 75916 - protein, 15 aa, Homo sapiens
  CDR3 for beta chain variable domain of TCR clone 37958 (TRBV27, TRBJ2-1)
CASSNGGGSSNEQFF

SEQ ID NO: 75917 - protein, 14 aa, Homo sapiens
  CDR3 for alpha chain variable domain of TCR clone 37959 (TRAV13-2, TRAJ17)
CAENSKAAGNKLTF

SEQ ID NO: 75918 - protein, 13 aa, Homo sapiens
  CDR3 for beta chain variable domain of TCR clone 37959 (TRBV7-3, TRBJ1-1)
CASSLTQGTEAFF

SEQ ID NO: 75919 - protein, 23 aa, Homo sapiens
  CDR3 for alpha chain variable domain of TCR clone 37960 (TRAV12-2, TRAJ43)
SLLIRDSQPSDSVTYLCAFDMRF

SEQ ID NO: 75920 - protein, 18 aa, Homo sapiens
  CDR3 for beta chain variable domain of TCR clone 37960 (TRBV20-1, TRBJ2-3)
CSASGLAGGPGTTDTQYF

SEQ ID NO: 75921 - protein, 15 aa, Homo sapiens
  CDR3 for alpha chain variable domain of TCR clone 37961 (TRAV38-1, TRAJ37)
CAFIHGSGNTGKPIF

SEQ ID NO: 75922 - protein, 12 aa, Homo sapiens
  CDR3 for beta chain variable domain of TCR clone 37961 (TRBV7-9, TRBJ2-7)
CASSFGSYEQYF

SEQ ID NO: 75923 - protein, 18 aa, Homo sapiens
  CDR3 for alpha chain variable domain of TCR clone 37962 (TRAV26-2, TRAJ45)
CILRLWGYSGGGADGLTF

SEQ ID NO: 75924 - protein, 14 aa, Homo sapiens
  CDR3 for beta chain variable domain of TCR clone 37962 (TRBV11-1, TRBJ2-7)
CASSFRQGSYEQYF

SEQ ID NO: 75925 - protein, 11 aa, Homo sapiens
  CDR3 for alpha chain variable domain of TCR clone 37963 (TRAV17, TRAJ31)
CAKSNNARLMF

SEQ ID NO: 75926 - protein, 16 aa, Homo sapiens
  CDR3 for beta chain variable domain of TCR clone 37963 (TRBV7-8, TRBJ2-4)
CASSAERTLAKNIQYF

SEQ ID NO: 75927 - protein, 13 aa, Homo sapiens
  CDR3 for alpha chain variable domain of TCR clone 37964 (TRAV8-3, TRAJ28)
CAMGAVGSYQLTF

SEQ ID NO: 75928 - protein, 14 aa, Homo sapiens
  CDR3 for beta chain variable domain of TCR clone 37964 (TRBV7-2, TRBJ2-7)
CASRSQGAAYEQYF

SEQ ID NO: 75929 - protein, 23 aa, Homo sapiens
  CDR3 for alpha chain variable domain of TCR clone 37965 (TRAV26-1, TRAJ38)
CIADNAGNNHNQNPDPAVYQLRD

SEQ ID NO: 75930 - protein, 13 aa, Homo sapiens
  CDR3 for beta chain variable domain of TCR clone 37965 (TRBV20-1, TRBJ1-1)
CSARGGGNTEAFF

SEQ ID NO: 75931 - protein, 14 aa, Homo sapiens
  CDR3 for alpha chain variable domain of TCR clone 37966 (TRAV1-2, TRAJ16)
CAVNRFSDGQKLLF

SEQ ID NO: 75932 - protein, 13 aa, Homo sapiens
  CDR3 for beta chain variable domain of TCR clone 37966 (TRBV10-3, TRBJ2-7)
CASKLSVNYEQYF

SEQ ID NO: 75933 - protein, 14 aa, Homo sapiens
  CDR3 for alpha chain variable domain of TCR clone 37967 (TRAV17, TRAJ57)
CATDPQGGYEKLVF

SEQ ID NO: 75934 - protein, 13 aa, Homo sapiens
  CDR3 for beta chain variable domain of TCR clone 37967 (TRBV19, TRBJ2-7)
CASSPRQSYEQYF

SEQ ID NO: 75935 - protein, 14 aa, Homo sapiens
  CDR3 for alpha chain variable domain of TCR clone 37968 (TRAV29/DV5, TRAJ36)
CAARRKTGANNLIF

SEQ ID NO: 75936 - protein, 14 aa, Homo sapiens
  CDR3 for beta chain variable domain of TCR clone 37968 (TRBV12-5, TRBJ2-5)
CASGSRTHQETQYF

SEQ ID NO: 75937 - protein, 15 aa, Homo sapiens
  CDR3 for alpha chain variable domain of TCR clone 37969 (TRAV12-1, TRAJ9)
GVVSFGDTGGFKTIF

SEQ ID NO: 75938 - protein, 13 aa, Homo sapiens
  CDR3 for beta chain variable domain of TCR clone 37969 (TRBV2, TRBJ1-4)
CASSERAGEKLFF

SEQ ID NO: 75939 - protein, 17 aa, Homo sapiens
  CDR3 for alpha chain variable domain of TCR clone 37970 (TRAV17, TRAJ28)
CATDPRRGGAGSYQLTV

SEQ ID NO: 75940 - protein, 16 aa, Homo sapiens
  CDR3 for beta chain variable domain of TCR clone 37970 (TRBV25-1, TRBJ1-1)
CASSGDRDRGRIEAFF

SEQ ID NO: 75941 - protein, 15 aa, Homo sapiens
  CDR3 for alpha chain variable domain of TCR clone 37971 (TRAV3, TRAJ22)
CAVRDRGGSARQLTF

SEQ ID NO: 75942 - protein, 17 aa, Homo sapiens
  CDR3 for beta chain variable domain of TCR clone 37971 (TRBV7-8, TRBJ2-6)
CASSAGTGGAGANVLTF

SEQ ID NO: 75943 - protein, 14 aa, Homo sapiens
  CDR3 for alpha chain variable domain of TCR clone 37972 (TRAV12-3, TRAJ54)
CAMRGIQGDQKLVF

SEQ ID NO: 75944 - protein, 13 aa, Homo sapiens
  CDR3 for beta chain variable domain of TCR clone 37972 (TRBV19, TRBJ1-1)
CASSPSNGGEAFF

SEQ ID NO: 75945 - protein, 12 aa, Homo sapiens
  CDR3 for alpha chain variable domain of TCR clone 37973 (TRAV30, TRAJ43)
CGTEERGNDMRF

SEQ ID NO: 75946 - protein, 16 aa, Homo sapiens
  CDR3 for beta chain variable domain of TCR clone 37973 (TRBV28, TRBJ2-7)
CASSLFFETGGPEQYL

SEQ ID NO: 75947 - protein, 14 aa, Homo sapiens
  CDR3 for alpha chain variable domain of TCR clone 37974 (TRAV8-3, TRAJ15)
CAVGRHQAGTALIF

SEQ ID NO: 75948 - protein, 18 aa, Homo sapiens
  CDR3 for beta chain variable domain of TCR clone 37974 (TRBV11-2, TRBJ2-6)
CASSLNPFLGTGANVLTF

SEQ ID NO: 75949 - protein, 14 aa, Homo sapiens
  CDR3 for alpha chain variable domain of TCR clone 37975 (TRAV23/DV6, TRAJ37)
CAASTPSNTGKLIF

SEQ ID NO: 75950 - protein, 13 aa, Homo sapiens
  CDR3 for beta chain variable domain of TCR clone 37975 (TRBV18, TRBJ2-5)
CASSPIPGETQYF

SEQ ID NO: 75951 - protein, 14 aa, Homo sapiens
  CDR3 for alpha chain variable domain of TCR clone 37976 (TRAV12-3, TRAJ10)
SHLPLTGGGNKLTF

SEQ ID NO: 75952 - protein, 14 aa, Homo sapiens
  CDR3 for beta chain variable domain of TCR clone 37976 (TRBV7-2, TRBJ2-2)
CASSLNSNTGELFL

SEQ ID NO: 75953 - protein, 12 aa, Homo sapiens
  CDR3 for alpha chain variable domain of TCR clone 37977 (TRAV27, TRAJ42)
CAGGGSQGNLIF

SEQ ID NO: 75954 - protein, 13 aa, Homo sapiens
  CDR3 for beta chain variable domain of TCR clone 37977 (TRBV19, TRBJ2-7)
CASSIRSSYERYF

SEQ ID NO: 75955 - protein, 13 aa, Homo sapiens
  CDR3 for alpha chain variable domain of TCR clone 37978 (TRAV12-1, TRAJ6)
CVVFPGGSYIPTF

SEQ ID NO: 75956 - protein, 14 aa, Homo sapiens
  CDR3 for beta chain variable domain of TCR clone 37978 (TRBV20-1, TRBJ1-3)
CSASPAGAGNTIYF

SEQ ID NO: 75957 - protein, 16 aa, Homo sapiens
  CDR3 for alpha chain variable domain of TCR clone 37979 (TRAV12-2, TRAJ50)
CAVGAATKTSYDKVIF

SEQ ID NO: 75958 - protein, 12 aa, Homo sapiens
  CDR3 for beta chain variable domain of TCR clone 37979 (TRBV12-4, TRBJ1-5)
CASSLGRQPQHF

SEQ ID NO: 75959 - protein, 14 aa, Homo sapiens
  CDR3 for alpha chain variable domain of TCR clone 37980 (TRAV1-2, TRAJ16)
CAVNRFSDGQKLPF

SEQ ID NO: 75960 - protein, 14 aa, Homo sapiens
  CDR3 for beta chain variable domain of TCR clone 37980 (TRBV12-5, TRBJ2-5)
CASGSRTHQETQYF

SEQ ID NO: 75961 - protein, 12 aa, Homo sapiens
  CDR3 for alpha chain variable domain of TCR clone 37981 (TRAV12-2, TRAJ20)
CAVRPSDYKLSF

SEQ ID NO: 75962 - protein, 14 aa, Homo sapiens
  CDR3 for beta chain variable domain of TCR clone 37981 (TRBV6-1, TRBJ2-7)
CAGNRARPDYEQYF

SEQ ID NO: 75963 - protein, 14 aa, Homo sapiens
  CDR3 for alpha chain variable domain of TCR clone 37982 (TRAV8-2, TRAJ45)
CVVSAGGGADGLTF

SEQ ID NO: 75964 - protein, 12 aa, Homo sapiens
  CDR3 for beta chain variable domain of TCR clone 37982 (TRBV12-4, TRBJ2-1)
CASRLVRVEQFF

SEQ ID NO: 75965 - protein, 14 aa, Homo sapiens
  CDR3 for alpha chain variable domain of TCR clone 37983 (TRAV8-3, TRAJ4)
CAVGAAGGYNKLIF

SEQ ID NO: 75966 - protein, 15 aa, Homo sapiens
  CDR3 for beta chain variable domain of TCR clone 37983 (TRBV5-1, TRBJ2-1)
CASSPPRAPYNKQFF

SEQ ID NO: 75967 - protein, 12 aa, Homo sapiens
  CDR3 for alpha chain variable domain of TCR clone 37984 (TRAV27, TRAJ35)
CAGADFGNVLHC

SEQ ID NO: 75968 - protein, 17 aa, Homo sapiens
  CDR3 for beta chain variable domain of TCR clone 37984 (TRBV3-1, TRBJ2-2)
CASSQDSQGPNTGELFF

SEQ ID NO: 75969 - protein, 14 aa, Homo sapiens
  CDR3 for alpha chain variable domain of TCR clone 37985 (TRAV1-2, TRAJ16)
CAVNRFSDGQKLLF

SEQ ID NO: 75970 - protein, 15 aa, Homo sapiens
  CDR3 for beta chain variable domain of TCR clone 37985 (TRBV7-9, TRBJ1-6)
CANSSPGRGNSPLHF

SEQ ID NO: 75971 - protein, 14 aa, Homo sapiens
  CDR3 for alpha chain variable domain of TCR clone 37986 (TRAV17, TRAJ6)
CATNPAGGSYIPTF

SEQ ID NO: 75972 - protein, 13 aa, Homo sapiens
  CDR3 for beta chain variable domain of TCR clone 37986 (TRBV7-9, TRBJ1-2)
CASSLKQNYGYTF

SEQ ID NO: 75973 - protein, 15 aa, Homo sapiens
  CDR3 for alpha chain variable domain of TCR clone 37987 (TRAV3, TRAJ40)
CAVRDVTSGTYKYIF

SEQ ID NO: 75974 - protein, 14 aa, Homo sapiens
  CDR3 for beta chain variable domain of TCR clone 37987 (TRBV28, TRBJ2-5)
CASSLGDGAETQYF

SEQ ID NO: 75975 - protein, 14 aa, Homo sapiens
  CDR3 for alpha chain variable domain of TCR clone 37988 (TRAV12-2, TRAJ17)
CAVLFKAAGNKLTF

SEQ ID NO: 75976 - protein, 17 aa, Homo sapiens
  CDR3 for beta chain variable domain of TCR clone 37988 (TRBV7-8, TRBJ2-6)
CASSAGTGGAGANVLTF

SEQ ID NO: 75977 - protein, 15 aa, Homo sapiens
  CDR3 for alpha chain variable domain of TCR clone 37989 (TRAV23/DV6, TRAJ38)
CAARSNAGNNRKLIL

SEQ ID NO: 75978 - protein, 16 aa, Homo sapiens
  CDR3 for beta chain variable domain of TCR clone 37989 (TRBV10-2, TRBJ1-5)
CASSRDRDYSNQPQHF

SEQ ID NO: 75979 - protein, 15 aa, Homo sapiens
  CDR3 for alpha chain variable domain of TCR clone 37990 (TRAV8-2, TRAJ40)
RVVLGTTSGTYKYIF

SEQ ID NO: 75980 - protein, 16 aa, Homo sapiens
  CDR3 for beta chain variable domain of TCR clone 37990 (TRBV7-3, TRBJ2-1)
CASSLEGYRSYNEQFF

SEQ ID NO: 75981 - protein, 11 aa, Homo sapiens
  CDR3 for alpha chain variable domain of TCR clone 37991 (TRAV13-2, TRAJ36)
CAETGANNLFF

SEQ ID NO: 75982 - protein, 13 aa, Homo sapiens
  CDR3 for beta chain variable domain of TCR clone 37991 (TRBV7-9, TRBJ2-4)
CATEGLAGNMQYF

SEQ ID NO: 75983 - protein, 15 aa, Homo sapiens
  CDR3 for alpha chain variable domain of TCR clone 37992 (TRAV12-2, TRAJ43)
CVFDMRFGAGTRLTV

SEQ ID NO: 75984 - protein, 18 aa, Homo sapiens
  CDR3 for beta chain variable domain of TCR clone 37992 (TRBV20-1, TRBJ2-3)
CSASGLAGGPGTTDTQYF

SEQ ID NO: 75985 - protein, 18 aa, Homo sapiens
  CDR3 for alpha chain variable domain of TCR clone 37993 (TRAV29/DV5, TRAJ52)
CAAGFRGAGGTSYGKLTF

SEQ ID NO: 75986 - protein, 13 aa, Homo sapiens
  CDR3 for beta chain variable domain of TCR clone 37993 (TRBV7-3, TRBJ1-1)
CASSQDWGAEAFF

SEQ ID NO: 75987 - protein, 12 aa, Homo sapiens
  CDR3 for alpha chain variable domain of TCR clone 37994 (TRAV8-3, TRAJ26)
CAGDNYGQNFVF

SEQ ID NO: 75988 - protein, 15 aa, Homo sapiens
  CDR3 for beta chain variable domain of TCR clone 37994 (TRBV7-9, TRBJ1-5)
CASSQGHQPNQPQHF

SEQ ID NO: 75989 - protein, 20 aa, Homo sapiens
  CDR3 for alpha chain variable domain of TCR clone 37995 (TRAV26-1, TRAJ42)
CCVLLHRQTYYGGSQGNLIF

SEQ ID NO: 75990 - protein, 16 aa, Homo sapiens
  CDR3 for beta chain variable domain of TCR clone 37995 (TRBV7-3, TRBJ2-2)
CASRLKRGTLSGELFF

SEQ ID NO: 75991 - protein, 14 aa, Homo sapiens
  CDR3 for alpha chain variable domain of TCR clone 37996 (TRAV12-2, TRAJ13)
CAAKKTGGYQKVTF

SEQ ID NO: 75992 - protein, 15 aa, Homo sapiens
  CDR3 for beta chain variable domain of TCR clone 37996 (TRBV10-3, TRBJ2-6)
CATPAAASGADVLTF

SEQ ID NO: 75993 - protein, 12 aa, Homo sapiens
  CDR3 for alpha chain variable domain of TCR clone 37997 (TRAV13-1, TRAJ11)
CAGPSGYSTLTF

SEQ ID NO: 75994 - protein, 13 aa, Homo sapiens
  CDR3 for beta chain variable domain of TCR clone 37997 (TRBV12-4, TRBJ2-1)
CASSLPPSNEQFF

SEQ ID NO: 75995 - protein, 17 aa, Homo sapiens
  CDR3 for alpha chain variable domain of TCR clone 37998 (TRAV4, TRAJ42)
CLVGVLNYGGRQGNLIF

SEQ ID NO: 75996 - protein, 12 aa, Homo sapiens
  CDR3 for beta chain variable domain of TCR clone 37998 (TRBV20-1, TRBJ2-1)
CSAQYTYNEQFF

SEQ ID NO: 75997 - protein, 14 aa, Homo sapiens
  CDR3 for alpha chain variable domain of TCR clone 37999 (TRAV13-1, TRAJ35)
CAASKGGFGNVLHC

SEQ ID NO: 75998 - protein, 13 aa, Homo sapiens
  CDR3 for beta chain variable domain of TCR clone 37999 (TRBV7-2, TRBJ2-2)
CASSLAVTGELFF

SEQ ID NO: 75999 - protein, 12 aa, Homo sapiens
  CDR3 for alpha chain variable domain of TCR clone 38000 (TRAV17, TRAJ20)
CTTDSNDYKLSF

SEQ ID NO: 76000 - protein, 17 aa, Homo sapiens
  CDR3 for beta chain variable domain of TCR clone 38000 (TRBV5-1, TRBJ2-2)
CASSLAGLSGGTGELFF

SEQ ID NO: 76001 - protein, 12 aa, Homo sapiens
  CDR3 for alpha chain variable domain of TCR clone 38001 (TRAV13-1, TRAJ21)
CAAKEGFNKFYF

SEQ ID NO: 76002 - protein, 11 aa, Homo sapiens
  CDR3 for beta chain variable domain of TCR clone 38001 (TRBV7-8, TRBJ2-7)
CASSLSLEQYF

SEQ ID NO: 76003 - protein, 15 aa, Homo sapiens
  CDR3 for alpha chain variable domain of TCR clone 38002 (TRAV27, TRAJ53)
CRAINSGGSSYKLTF

SEQ ID NO: 76004 - protein, 14 aa, Homo sapiens
  CDR3 for beta chain variable domain of TCR clone 38002 (TRBV7-3, TRBJ2-1)
CASSLAGGTNEQFF

SEQ ID NO: 76005 - protein, 11 aa, Homo sapiens
  CDR3 for alpha chain variable domain of TCR clone 38003 (TRAV1-2, TRAJ31)
CAVNINARLMF

SEQ ID NO: 76006 - protein, 15 aa, Homo sapiens
  CDR3 for beta chain variable domain of TCR clone 38003 (TRBV28, TRBJ2-1)
CASSIIAGGRSEQFF

SEQ ID NO: 76007 - protein, 12 aa, Homo sapiens
  CDR3 for alpha chain variable domain of TCR clone 38004 (TRAV13-1, TRAJ21)
CAAKEGFNKFYF

SEQ ID NO: 76008 - protein, 12 aa, Homo sapiens
  CDR3 for beta chain variable domain of TCR clone 38004 (TRBV11-2, TRBJ2-2)
CASRLGGGELFF

SEQ ID NO: 76009 - protein, 11 aa, Homo sapiens
  CDR3 for alpha chain variable domain of TCR clone 38005 (TRAV35, TRAJ34)
CWARNTDKLIF

SEQ ID NO: 76010 - protein, 13 aa, Homo sapiens
  CDR3 for beta chain variable domain of TCR clone 38005 (TRBV19, TRBJ2-7)
CASSIDRTYEQYL

SEQ ID NO: 76011 - protein, 18 aa, Homo sapiens
  CDR3 for alpha chain variable domain of TCR clone 38006 (TRAV26-1, TRAJ23)
CIVRAGLEVWNQGGKLIF

SEQ ID NO: 76012 - protein, 16 aa, Homo sapiens
  CDR3 for beta chain variable domain of TCR clone 38006 (TRBV12-4, TRBJ2-5)
CASSFFVRGRQETQYF

SEQ ID NO: 76013 - protein, 12 aa, Homo sapiens
  CDR3 for alpha chain variable domain of TCR clone 38007 (TRAV3, TRAJ31)
CAVRNGNARLMF

SEQ ID NO: 76014 - protein, 18 aa, Homo sapiens
  CDR3 for beta chain variable domain of TCR clone 38007 (TRBV7-2, TRBJ2-3)
CASSLKREGSGITDTQYF

SEQ ID NO: 76015 - protein, 16 aa, Homo sapiens
  CDR3 for alpha chain variable domain of TCR clone 38008 (TRAV17, TRAJ52)
CATDGAGGTSYGKLTF

SEQ ID NO: 76016 - protein, 14 aa, Homo sapiens
  CDR3 for beta chain variable domain of TCR clone 38008 (TRBV6-1, TRBJ2-1)
CASSLGLAGLWEFL

SEQ ID NO: 76017 - protein, 14 aa, Homo sapiens
  CDR3 for alpha chain variable domain of TCR clone 38009 (TRAV12-2, TRAJ13)
CAVKKNGGYQKVTF

SEQ ID NO: 76018 - protein, 18 aa, Homo sapiens
  CDR3 for beta chain variable domain of TCR clone 38009 (TRBV24-1, TRBJ2-2)
CATSDSGQGTANTGELFF

SEQ ID NO: 76019 - protein, 12 aa, Homo sapiens
  CDR3 for alpha chain variable domain of TCR clone 38010 (TRAV1-1, TRAJ39)
CAVPVVGNMLTF

SEQ ID NO: 76020 - protein, 16 aa, Homo sapiens
  CDR3 for beta chain variable domain of TCR clone 38010 (TRBV19, TRBJ2-1)
CANSKAGPSSYNEQFF

SEQ ID NO: 76021 - protein, 13 aa, Homo sapiens
  CDR3 for alpha chain variable domain of TCR clone 38011 (TRAV3, TRAJ27)
CAVRPLGAGKSTF

SEQ ID NO: 76022 - protein, 14 aa, Homo sapiens
  CDR3 for beta chain variable domain of TCR clone 38011 (TRBV4-2, TRBJ2-1)
CASGLDRAYNEQFF

SEQ ID NO: 76023 - protein, 14 aa, Homo sapiens
  CDR3 for alpha chain variable domain of TCR clone 38012 (TRAV1-2, TRAJ16)
CAVNRFSDGQKLLF

SEQ ID NO: 76024 - protein, 14 aa, Homo sapiens
  CDR3 for beta chain variable domain of TCR clone 38012 (TRBV11-2, TRBJ2-7)
CASSSTGEGYEQYF

SEQ ID NO: 76025 - protein, 14 aa, Homo sapiens
  CDR3 for alpha chain variable domain of TCR clone 38013 (TRAV35, TRAJ24)
CAGPRRDSWGKLRF

SEQ ID NO: 76026 - protein, 12 aa, Homo sapiens
  CDR3 for beta chain variable domain of TCR clone 38013 (TRBV12-4, TRBJ2-3)
CASSLGQDTQYF

SEQ ID NO: 76027 - protein, 14 aa, Homo sapiens
  CDR3 for alpha chain variable domain of TCR clone 38014 (TRAV10, TRAJ15)
CVVSASQAGTAPIF

SEQ ID NO: 76028 - protein, 12 aa, Homo sapiens
  CDR3 for beta chain variable domain of TCR clone 38014 (TRBV29-1, TRBJ2-3)
CSVTGGADTQYF

SEQ ID NO: 76029 - protein, 15 aa, Homo sapiens
  CDR3 for alpha chain variable domain of TCR clone 38015 (TRAV2, TRAJ15)
CAVEDRGQAGTGLIF

SEQ ID NO: 76030 - protein, 13 aa, Homo sapiens
  CDR3 for beta chain variable domain of TCR clone 38015 (TRBV10-2, TRBJ2-7)
CASGASGGYEQYF

SEQ ID NO: 76031 - protein, 15 aa, Homo sapiens
  CDR3 for alpha chain variable domain of TCR clone 38016 (TRAV27, TRAJ38)
CAARRNAGNNRKLIL

SEQ ID NO: 76032 - protein, 17 aa, Homo sapiens
  CDR3 for beta chain variable domain of TCR clone 38016 (TRBV20-1, TRBJ2-2)
CSASGSGQGGLTGELFF

SEQ ID NO: 76033 - protein, 12 aa, Homo sapiens
  CDR3 for alpha chain variable domain of TCR clone 38017 (TRAV17, TRAJ20)
CATDRYDYKLSF

SEQ ID NO: 76034 - protein, 14 aa, Homo sapiens
  CDR3 for beta chain variable domain of TCR clone 38017 (TRBV19, TRBJ2-1)
RASPTFVLSGEQFF

SEQ ID NO: 76035 - protein, 12 aa, Homo sapiens
  CDR3 for alpha chain variable domain of TCR clone 38018 (TRAV1-1, TRAJ39)
CAVPVVGNMLTF

SEQ ID NO: 76036 - protein, 14 aa, Homo sapiens
  CDR3 for beta chain variable domain of TCR clone 38018 (TRBV7-3, TRBJ1-1)
CASSLKGGNTEAFF

SEQ ID NO: 76037 - protein, 12 aa, Homo sapiens
  CDR3 for alpha chain variable domain of TCR clone 38019 (TRAV12-3, TRAJ17)
CAMTLTGNKLTF

SEQ ID NO: 76038 - protein, 15 aa, Homo sapiens
  CDR3 for beta chain variable domain of TCR clone 38019 (TRBV4-1, TRBJ1-4)
CASSGTGGANEKLFF

SEQ ID NO: 76039 - protein, 15 aa, Homo sapiens
  CDR3 for alpha chain variable domain of TCR clone 38020 (TRAV2, TRAJ22)
CAVPPRGGSARQLTF

SEQ ID NO: 76040 - protein, 11 aa, Homo sapiens
  CDR3 for beta chain variable domain of TCR clone 38020 (TRBV27, TRBJ2-3)
CASSLGDTQYF

SEQ ID NO: 76041 - protein, 13 aa, Homo sapiens
  CDR3 for alpha chain variable domain of TCR clone 38021 (TRAV27, TRAJ6)
CAGGTRGSYIPTF

SEQ ID NO: 76042 - protein, 16 aa, Homo sapiens
  CDR3 for beta chain variable domain of TCR clone 38021 (TRBV19, TRBJ2-1)
CASSKAGPSSYNEQFF

SEQ ID NO: 76043 - protein, 11 aa, Homo sapiens
  CDR3 for alpha chain variable domain of TCR clone 38022 (TRAV21, TRAJ9)
CAVPGGFKTVF

SEQ ID NO: 76044 - protein, 17 aa, Homo sapiens
  CDR3 for beta chain variable domain of TCR clone 38022 (TRBV7-9, TRBJ2-5)
CATSGGARDPVLRARHA

SEQ ID NO: 76045 - protein, 14 aa, Homo sapiens
  CDR3 for alpha chain variable domain of TCR clone 38023 (TRAV13-2, TRAJ43)
CAEIPTYNNNDMRF

SEQ ID NO: 76046 - protein, 15 aa, Homo sapiens
  CDR3 for beta chain variable domain of TCR clone 38023 (TRBV7-9, TRBJ2-2)
CASGPLETFPGELFF

SEQ ID NO: 76047 - protein, 12 aa, Homo sapiens
  CDR3 for alpha chain variable domain of TCR clone 38024 (TRAV12-3, TRAJ17)
CAMTLTGNKLTF

SEQ ID NO: 76048 - protein, 15 aa, Homo sapiens
  CDR3 for beta chain variable domain of TCR clone 38024 (TRBV11-2, TRBJ2-3)
CASSPGGGATDTQYF

SEQ ID NO: 76049 - protein, 13 aa, Homo sapiens
  CDR3 for alpha chain variable domain of TCR clone 38025 (TRAV21, TRAJ27)
CAARPGNAGKSTF

SEQ ID NO: 76050 - protein, 14 aa, Homo sapiens
  CDR3 for beta chain variable domain of TCR clone 38025 (TRBV11-2, TRBJ2-7)
YASSLGAGAYEQYF

SEQ ID NO: 76051 - protein, 15 aa, Homo sapiens
  CDR3 for alpha chain variable domain of TCR clone 38026 (TRAV12-2, TRAJ23)
CAVKPIYNQGGKLIF

SEQ ID NO: 76052 - protein, 12 aa, Homo sapiens
  CDR3 for beta chain variable domain of TCR clone 38026 (TRBV5-1, TRBJ1-2)
CASSLVVDRARA

SEQ ID NO: 76053 - protein, 12 aa, Homo sapiens
  CDR3 for alpha chain variable domain of TCR clone 38027 (TRAV8-3, TRAJ26)
CAGDNYGQNFVF

SEQ ID NO: 76054 - protein, 15 aa, Homo sapiens
  CDR3 for beta chain variable domain of TCR clone 38027 (TRBV9, TRBJ2-1)
CAGSLAGSSYNEQFF

SEQ ID NO: 76055 - protein, 17 aa, Homo sapiens
  CDR3 for alpha chain variable domain of TCR clone 38028 (TRAV29/DV5, TRAJ52)
CAASEDAGGTSYGKLTF

SEQ ID NO: 76056 - protein, 16 aa, Homo sapiens
  CDR3 for beta chain variable domain of TCR clone 38028 (TRBV7-8, TRBJ2-6)
CASRVGDSSGANVLTF

SEQ ID NO: 76057 - protein, 15 aa, Homo sapiens
  CDR3 for alpha chain variable domain of TCR clone 38029 (TRAV1-2, TRAJ26)
CAVRDLITMVRILSF

SEQ ID NO: 76058 - protein, 15 aa, Homo sapiens
  CDR3 for beta chain variable domain of TCR clone 38029 (TRBV9, TRBJ1-6)
CASSVAGTGDSPLHF

SEQ ID NO: 76059 - protein, 14 aa, Homo sapiens
  CDR3 for alpha chain variable domain of TCR clone 38030 (TRAV2, TRAJ41)
CAVGLQIPGMHSTS

SEQ ID NO: 76060 - protein, 13 aa, Homo sapiens
  CDR3 for beta chain variable domain of TCR clone 38030 (TRBV4-1, TRBJ2-1)
CASSQEVQYEQFF

SEQ ID NO: 76061 - protein, 14 aa, Homo sapiens
  CDR3 for alpha chain variable domain of TCR clone 38031 (TRAV2, TRAJ37)
CAVEGSSNTGKLIS

SEQ ID NO: 76062 - protein, 15 aa, Homo sapiens
  CDR3 for beta chain variable domain of TCR clone 38031 (TRBV24-1, TRBJ2-4)
CATSDPRDRANIQYF

SEQ ID NO: 76063 - protein, 13 aa, Homo sapiens
  CDR3 for alpha chain variable domain of TCR clone 38032 (TRAV27, TRAJ57)
CRSAQGGSDKLVF

SEQ ID NO: 76064 - protein, 11 aa, Homo sapiens
  CDR3 for beta chain variable domain of TCR clone 38032 (TRBV11-2, TRBJ1-1)
CASSINTEAFF

SEQ ID NO: 76065 - protein, 12 aa, Homo sapiens
  CDR3 for alpha chain variable domain of TCR clone 38033 (TRAV3, TRAJ7)
CADLLWEQQTRF

SEQ ID NO: 76066 - protein, 13 aa, Homo sapiens
  CDR3 for beta chain variable domain of TCR clone 38033 (TRBV7-3, TRBJ2-5)
CASSFRVGETQYF

SEQ ID NO: 76067 - protein, 14 aa, Homo sapiens
  CDR3 for alpha chain variable domain of TCR clone 38034 (TRAV17, TRAJ39)
CATDPLRAGNMLTF

SEQ ID NO: 76068 - protein, 15 aa, Homo sapiens
  CDR3 for beta chain variable domain of TCR clone 38034 (TRBV13, TRBJ1-5)
CASSFGQGGVQPQHF

SEQ ID NO: 76069 - protein, 11 aa, Homo sapiens
  CDR3 for alpha chain variable domain of TCR clone 38035 (TRAV3, TRAJ17)
PRGAAGNKLTF

SEQ ID NO: 76070 - protein, 16 aa, Homo sapiens
  CDR3 for beta chain variable domain of TCR clone 38035 (TRBV19, TRBJ2-1)
CASSKAGPSSYNEQFF

SEQ ID NO: 76071 - protein, 14 aa, Homo sapiens
  CDR3 for alpha chain variable domain of TCR clone 38036 (TRAV9-2, TRAJ39)
CALYIYNAGNMLTF

SEQ ID NO: 76072 - protein, 15 aa, Homo sapiens
  CDR3 for beta chain variable domain of TCR clone 38036 (TRBV5-1, TRBJ2-7)
CASSLDLTSSYERYF

SEQ ID NO: 76073 - protein, 11 aa, Homo sapiens
  CDR3 for alpha chain variable domain of TCR clone 38037 (TRAV21, TRAJ20)
CCRVNDYKLSF

SEQ ID NO: 76074 - protein, 13 aa, Homo sapiens
  CDR3 for beta chain variable domain of TCR clone 38037 (TRBV20-1, TRBJ2-5)
CSAREAFQETQYF

SEQ ID NO: 76075 - protein, 15 aa, Homo sapiens
  CDR3 for alpha chain variable domain of TCR clone 38038 (TRAV8-3, TRAJ45)
CASSYSGGGADGLTF

SEQ ID NO: 76076 - protein, 13 aa, Homo sapiens
  CDR3 for beta chain variable domain of TCR clone 38038 (TRBV7-6, TRBJ1-2)
CASSLVADYGYTF

SEQ ID NO: 76077 - protein, 14 aa, Homo sapiens
  CDR3 for alpha chain variable domain of TCR clone 38039 (TRAV12-2, TRAJ45)
CALPERGGADGPTF

SEQ ID NO: 76078 - protein, 14 aa, Homo sapiens
  CDR3 for beta chain variable domain of TCR clone 38039 (TRBV18, TRBJ1-5)
CASSPGNSNQPQHF

SEQ ID NO: 76079 - protein, 11 aa, Homo sapiens
  CDR3 for alpha chain variable domain of TCR clone 38040 (TRAV17, TRAJ31)
CATSNNARLMF

SEQ ID NO: 76080 - protein, 14 aa, Homo sapiens
  CDR3 for beta chain variable domain of TCR clone 38040 (TRBV18, TRBJ2-7)
CAGSPRGGAYEQYF

SEQ ID NO: 76081 - protein, 11 aa, Homo sapiens
  CDR3 for alpha chain variable domain of TCR clone 38041 (TRAV3, TRAJ21)
CAVGNFNKFYF

SEQ ID NO: 76082 - protein, 13 aa, Homo sapiens
  CDR3 for beta chain variable domain of TCR clone 38041 (TRBV27, TRBJ1-6)
CASSLVLVSPLHF

SEQ ID NO: 76083 - protein, 12 aa, Homo sapiens
  CDR3 for alpha chain variable domain of TCR clone 38042 (TRAV12-3, TRAJ17)
CAMTLTGNKLTF

SEQ ID NO: 76084 - protein, 14 aa, Homo sapiens
  CDR3 for beta chain variable domain of TCR clone 38042 (TRBV5-1, TRBJ1-1)
CASSLVSINTEAFF

SEQ ID NO: 76085 - protein, 19 aa, Homo sapiens
  CDR3 for alpha chain variable domain of TCR clone 38043 (TRAV12-1, TRAJ42)
SAIQPPTSVKGGSQGNLIF

SEQ ID NO: 76086 - protein, 18 aa, Homo sapiens
  CDR3 for beta chain variable domain of TCR clone 38043 (TRBV11-2, TRBJ2-3)
CASSLGGASRGAPNTQYF

SEQ ID NO: 76087 - protein, 16 aa, Homo sapiens
  CDR3 for alpha chain variable domain of TCR clone 38044 (TRAV30, TRAJ24)
CGTEIVDADSWGKFQF

SEQ ID NO: 76088 - protein, 15 aa, Homo sapiens
  CDR3 for beta chain variable domain of TCR clone 38044 (TRBV20-1, TRBJ2-7)
CSARNRVSGMDEQYF

SEQ ID NO: 76089 - protein, 16 aa, Homo sapiens
  CDR3 for alpha chain variable domain of TCR clone 38045 (TRAV30, TRAJ24)
CGTEIVDADSWGKFQF

SEQ ID NO: 76090 - protein, 17 aa, Homo sapiens
  CDR3 for beta chain variable domain of TCR clone 38045 (TRBV28, TRBJ2-5)
CASSRQGGLAGAETQYF

SEQ ID NO: 76091 - protein, 14 aa, Homo sapiens
  CDR3 for alpha chain variable domain of TCR clone 38046 (TRAV8-2, TRAJ4)
CVVSPSGGYNKLIF

SEQ ID NO: 76092 - protein, 13 aa, Homo sapiens
  CDR3 for beta chain variable domain of TCR clone 38046 (TRBV4-2, TRBJ1-1)
CASSQAGNTEAFF

SEQ ID NO: 76093 - protein, 13 aa, Homo sapiens
  CDR3 for alpha chain variable domain of TCR clone 38047 (TRAV2, TRAJ15)
CAVASQAGTALIF

SEQ ID NO: 76094 - protein, 11 aa, Homo sapiens
  CDR3 for beta chain variable domain of TCR clone 38047 (TRBV25-1, TRBJ1-1)
PTWGGNTEAFF

SEQ ID NO: 76095 - protein, 11 aa, Homo sapiens
  CDR3 for alpha chain variable domain of TCR clone 38048 (TRAV1-2, TRAJ31)
CAVNNNARLMF

SEQ ID NO: 76096 - protein, 15 aa, Homo sapiens
  CDR3 for beta chain variable domain of TCR clone 38048 (TRBV28, TRBJ2-1)
CASSIMAGGRSEQFF

SEQ ID NO: 76097 - protein, 13 aa, Homo sapiens
  CDR3 for alpha chain variable domain of TCR clone 38049 (TRAV12-2, TRAJ7)
CAVSLYGNNRLAF

SEQ ID NO: 76098 - protein, 18 aa, Homo sapiens
  CDR3 for beta chain variable domain of TCR clone 38049 (TRBV4-2, TRBJ2-1)
CASSQQGLAASPYNEQFF

SEQ ID NO: 76099 - protein, 13 aa, Homo sapiens
  CDR3 for alpha chain variable domain of TCR clone 38050 (TRAV27, TRAJ6)
CAGGTKGSYIPTF

SEQ ID NO: 76100 - protein, 15 aa, Homo sapiens
  CDR3 for beta chain variable domain of TCR clone 38050 (TRBV5-5, TRBJ2-7)
CASSLAAPLSYEQYF

SEQ ID NO: 76101 - protein, 15 aa, Homo sapiens
  CDR3 for alpha chain variable domain of TCR clone 38051 (TRAV25, TRAJ53)
CPTSNSGGSNYKLTF

SEQ ID NO: 76102 - protein, 14 aa, Homo sapiens
  CDR3 for beta chain variable domain of TCR clone 38051 (TRBV11-2, TRBJ2-3)
CASSRLARTGTQYF

SEQ ID NO: 76103 - protein, 16 aa, Homo sapiens
  CDR3 for alpha chain variable domain of TCR clone 38052 (TRAV3, TRAJ10)
CAVRYMRAGGGNKLTF

SEQ ID NO: 76104 - protein, 15 aa, Homo sapiens
  CDR3 for beta chain variable domain of TCR clone 38052 (TRBV11-2, TRBJ1-6)
CASTGFGTAVSPLHF

SEQ ID NO: 76105 - protein, 13 aa, Homo sapiens
  CDR3 for alpha chain variable domain of TCR clone 38053 (TRAV8-3, TRAJ43)
CAVVPYNNNGMRF

SEQ ID NO: 76106 - protein, 17 aa, Homo sapiens
  CDR3 for beta chain variable domain of TCR clone 38053 (TRBV7-7, TRBJ1-1)
CASIGDRPNLGVTEAFF

SEQ ID NO: 76107 - protein, 14 aa, Homo sapiens
  CDR3 for alpha chain variable domain of TCR clone 38054 (TRAV1-2, TRAJ8)
CAVREDTGFQKLVF

SEQ ID NO: 76108 - protein, 16 aa, Homo sapiens
  CDR3 for beta chain variable domain of TCR clone 38054 (TRBV12-4, TRBJ2-5)
CASSFFVRGRQETQYF

SEQ ID NO: 76109 - protein, 12 aa, Homo sapiens
  CDR3 for alpha chain variable domain of TCR clone 38055 (TRAV35, TRAJ21)
CALRYNFNKFYF

SEQ ID NO: 76110 - protein, 13 aa, Homo sapiens
  CDR3 for beta chain variable domain of TCR clone 38055 (TRBV24-1, TRBJ2-5)
CATSTGGTETQYF

SEQ ID NO: 76111 - protein, 14 aa, Homo sapiens
  CDR3 for alpha chain variable domain of TCR clone 38056 (TRAV20, TRAJ42)
CAVQAGGSQGNLIS

SEQ ID NO: 76112 - protein, 14 aa, Homo sapiens
  CDR3 for beta chain variable domain of TCR clone 38056 (TRBV28, TRBJ1-2)
CASRIQGANYGYTF

SEQ ID NO: 76113 - protein, 21 aa, Homo sapiens
  CDR3 for alpha chain variable domain of TCR clone 38057 (TRAV26-1, TRAJ38)
CIADNAGNNHIQNPDPAVYQL

SEQ ID NO: 76114 - protein, 17 aa, Homo sapiens
  CDR3 for beta chain variable domain of TCR clone 38057 (TRBV11-2, TRBJ2-6)
CASSQRDIFSGANVLTF

SEQ ID NO: 76115 - protein, 14 aa, Homo sapiens
  CDR3 for alpha chain variable domain of TCR clone 38058 (TRAV8-3, TRAJ9)
YAVVYNTGGFKTIF

SEQ ID NO: 76116 - protein, 14 aa, Homo sapiens
  CDR3 for beta chain variable domain of TCR clone 38058 (TRBV7-3, TRBJ2-2)
CASSSGGYTGELFF

SEQ ID NO: 76117 - protein, 14 aa, Homo sapiens
  CDR3 for alpha chain variable domain of TCR clone 38059 (TRAV3, TRAJ9)
CAVRLNTGGFKTIF

SEQ ID NO: 76118 - protein, 15 aa, Homo sapiens
  CDR3 for beta chain variable domain of TCR clone 38059 (TRBV7-2, TRBJ2-1)
CASSLARGRVNEQFF

SEQ ID NO: 76119 - protein, 14 aa, Homo sapiens
  CDR3 for alpha chain variable domain of TCR clone 38060 (TRAV8-4, TRAJ13)
CAVTISGGYQKVTF

SEQ ID NO: 76120 - protein, 14 aa, Homo sapiens
  CDR3 for beta chain variable domain of TCR clone 38060 (TRBV7-2, TRBJ1-2)
CASSQTGSTYGYTF

SEQ ID NO: 76121 - protein, 18 aa, Homo sapiens
  CDR3 for alpha chain variable domain of TCR clone 38061 (TRAV21, TRAJ52)
CAVRPSPGGGTSYGKLTF

SEQ ID NO: 76122 - protein, 17 aa, Homo sapiens
  CDR3 for beta chain variable domain of TCR clone 38061 (TRBV13, TRBJ2-3)
CASSLSRVAGGRNTQYF

SEQ ID NO: 76123 - protein, 13 aa, Homo sapiens
  CDR3 for alpha chain variable domain of TCR clone 38062 (TRAV8-3, TRAJ28)
CAVGAVGSYQLTF

SEQ ID NO: 76124 - protein, 14 aa, Homo sapiens
  CDR3 for beta chain variable domain of TCR clone 38062 (TRBV7-2, TRBJ2-7)
CTSRSQGAAYEQYF

SEQ ID NO: 76125 - protein, 15 aa, Homo sapiens
  CDR3 for alpha chain variable domain of TCR clone 38063 (TRAV2, TRAJ9)
CAVEDRGTGGFKIIF

SEQ ID NO: 76126 - protein, 16 aa, Homo sapiens
  CDR3 for beta chain variable domain of TCR clone 38063 (TRBV24-1, TRBJ2-3)
CATSDPGTGATDTQYF

SEQ ID NO: 76127 - protein, 12 aa, Homo sapiens
  CDR3 for alpha chain variable domain of TCR clone 38064 (TRAV12-3, TRAJ5)
CAMDTGRRALTF

SEQ ID NO: 76128 - protein, 13 aa, Homo sapiens
  CDR3 for beta chain variable domain of TCR clone 38064 (TRBV7-7, TRBJ2-2)
CANSLTSAGELFF

SEQ ID NO: 76129 - protein, 14 aa, Homo sapiens
  CDR3 for alpha chain variable domain of TCR clone 38065 (TRAV1-2, TRAJ8)
CAVREDTGFQKLVF

SEQ ID NO: 76130 - protein, 14 aa, Homo sapiens
  CDR3 for beta chain variable domain of TCR clone 38065 (TRBV28, TRBJ1-5)
CASTLGPHNQPQHF

SEQ ID NO: 76131 - protein, 15 aa, Homo sapiens
  CDR3 for alpha chain variable domain of TCR clone 38066 (TRAV30, TRAJ32)
CSTEILGGATNKLIF

SEQ ID NO: 76132 - protein, 13 aa, Homo sapiens
  CDR3 for beta chain variable domain of TCR clone 38066 (TRBV6-3, TRBJ2-7)
CASSFSGGYEQYF

SEQ ID NO: 76133 - protein, 10 aa, Homo sapiens
  CDR3 for alpha chain variable domain of TCR clone 38067 (TRAV12-3, TRAJ49)
CAMNDDQFYF

SEQ ID NO: 76134 - protein, 14 aa, Homo sapiens
  CDR3 for beta chain variable domain of TCR clone 38067 (TRBV12-5, TRBJ2-5)
CASGSRTHQETQYF

SEQ ID NO: 76135 - protein, 15 aa, Homo sapiens
  CDR3 for alpha chain variable domain of TCR clone 38068 (TRAV2, TRAJ9)
CAVEDRGTGGFKTIF

SEQ ID NO: 76136 - protein, 16 aa, Homo sapiens
  CDR3 for beta chain variable domain of TCR clone 38068 (TRBV24-1, TRBJ2-3)
FATSDPGTGATDTQYF

SEQ ID NO: 76137 - protein, 16 aa, Homo sapiens
  CDR3 for alpha chain variable domain of TCR clone 38069 (TRAV1-2, TRAJ10)
CAVRGVLTGEGNKLTF

SEQ ID NO: 76138 - protein, 12 aa, Homo sapiens
  CDR3 for beta chain variable domain of TCR clone 38069 (TRBV7-8, TRBJ2-7)
CASSLGDREQYF

SEQ ID NO: 76139 - protein, 14 aa, Homo sapiens
  CDR3 for alpha chain variable domain of TCR clone 38070 (TRAV8-4, TRAJ13)
CTVTLSGGYQKVTF

SEQ ID NO: 76140 - protein, 14 aa, Homo sapiens
  CDR3 for beta chain variable domain of TCR clone 38070 (TRBV7-2, TRBJ1-2)
CASSQTGSTYGYTF

SEQ ID NO: 76141 - protein, 12 aa, Homo sapiens
  CDR3 for alpha chain variable domain of TCR clone 38071 (TRAV38-1, TRAJ20)
RAFIWNDYKLSF

SEQ ID NO: 76142 - protein, 14 aa, Homo sapiens
  CDR3 for beta chain variable domain of TCR clone 38071 (TRBV27, TRBJ1-1)
CASSPQGKRAEAFF

SEQ ID NO: 76143 - protein, 11 aa, Homo sapiens
  CDR3 for alpha chain variable domain of TCR clone 38072 (TRAV8-3, TRAJ49)
CAVNTGNQFYF

SEQ ID NO: 76144 - protein, 12 aa, Homo sapiens
  CDR3 for beta chain variable domain of TCR clone 38072 (TRBV11-2, TRBJ2-7)
CASSPPANEQYF

SEQ ID NO: 76145 - protein, 11 aa, Homo sapiens
  CDR3 for alpha chain variable domain of TCR clone 38073 (TRAV3, TRAJ21)
CAVGNFNNFYF

SEQ ID NO: 76146 - protein, 17 aa, Homo sapiens
  CDR3 for beta chain variable domain of TCR clone 38073 (TRBV24-1, TRBJ2-1)
CATSDVSTSGTYNEQFF

SEQ ID NO: 76147 - protein, 11 aa, Homo sapiens
  CDR3 for alpha chain variable domain of TCR clone 38074 (TRAV2, TRAJ33)
CAVDSNYHLIW

SEQ ID NO: 76148 - protein, 15 aa, Homo sapiens
  CDR3 for beta chain variable domain of TCR clone 38074 (TRBV19, TRBJ1-2)
CASSVGQVLNYGYTF

SEQ ID NO: 76149 - protein, 14 aa, Homo sapiens
  CDR3 for alpha chain variable domain of TCR clone 38075 (TRAV1-2, TRAJ16)
CAVNRFSDGQKLLF

SEQ ID NO: 76150 - protein, 14 aa, Homo sapiens
  CDR3 for beta chain variable domain of TCR clone 38075 (TRBV4-2, TRBJ1-2)
CASSPGGSNYGYTF

SEQ ID NO: 76151 - protein, 14 aa, Homo sapiens
  CDR3 for alpha chain variable domain of TCR clone 38076 (TRAV29/DV5, TRAJ40)
CAAAVASGTYKYIF

SEQ ID NO: 76152 - protein, 13 aa, Homo sapiens
  CDR3 for beta chain variable domain of TCR clone 38076 (TRBV7-9, TRBJ2-7)
CASSFTGAYEQYF

SEQ ID NO: 76153 - protein, 16 aa, Homo sapiens
  CDR3 for alpha chain variable domain of TCR clone 38077 (TRAV3, TRAJ37)
CAVRGKGSGNTGKLIF

SEQ ID NO: 76154 - protein, 16 aa, Homo sapiens
  CDR3 for beta chain variable domain of TCR clone 38077 (TRBV28, TRBJ1-5)
CASSFRGGCSNQPQHF

SEQ ID NO: 76155 - protein, 15 aa, Homo sapiens
  CDR3 for alpha chain variable domain of TCR clone 38078 (TRAV9-2, TRAJ49)
CALSPPDHTGNQFYF

SEQ ID NO: 76156 - protein, 14 aa, Homo sapiens
  CDR3 for beta chain variable domain of TCR clone 38078 (TRBV12-4, TRBJ1-1)
CASSLGTGGAEAFF

SEQ ID NO: 76157 - protein, 14 aa, Homo sapiens
  CDR3 for alpha chain variable domain of TCR clone 38079 (TRAV26-2, TRAJ11)
CIPRLNSGYSTLTF

SEQ ID NO: 76158 - protein, 14 aa, Homo sapiens
  CDR3 for beta chain variable domain of TCR clone 38079 (TRBV15, TRBJ2-3)
CATRSGTSTDTQYF

SEQ ID NO: 76159 - protein, 14 aa, Homo sapiens
  CDR3 for alpha chain variable domain of TCR clone 38080 (TRAV17, TRAJ57)
CATDPQGGSEKLVF

SEQ ID NO: 76160 - protein, 16 aa, Homo sapiens
  CDR3 for beta chain variable domain of TCR clone 38080 (TRBV20-1, TRBJ1-4)
CSAPGQGSLTNEKLFF

SEQ ID NO: 76161 - protein, 13 aa, Homo sapiens
  CDR3 for alpha chain variable domain of TCR clone 38081 (TRAV2, TRAJ15)
CAVASQAGTALIF

SEQ ID NO: 76162 - protein, 18 aa, Homo sapiens
  CDR3 for beta chain variable domain of TCR clone 38081 (TRBV20-1, TRBJ2-6)
CSAETTPTHGSGANVLTF

SEQ ID NO: 76163 - protein, 18 aa, Homo sapiens
  CDR3 for alpha chain variable domain of TCR clone 38082 (TRAV13-1, TRAJ52)
WAAKNPNAGGTSYGKLTF

SEQ ID NO: 76164 - protein, 15 aa, Homo sapiens
  CDR3 for beta chain variable domain of TCR clone 38082 (TRBV6-1, TRBJ2-3)
CASSERGGITDTQYF

SEQ ID NO: 76165 - protein, 12 aa, Homo sapiens
  CDR3 for alpha chain variable domain of TCR clone 38083 (TRAV8-3, TRAJ20)
CAVGANDYKLSF

SEQ ID NO: 76166 - protein, 16 aa, Homo sapiens
  CDR3 for beta chain variable domain of TCR clone 38083 (TRBV19, TRBJ2-2)
CASRSHGTGATGELFF

SEQ ID NO: 76167 - protein, 11 aa, Homo sapiens
  CDR3 for alpha chain variable domain of TCR clone 38084 (TRAV17, TRAJ9)
CATTGGFKTIF

SEQ ID NO: 76168 - protein, 14 aa, Homo sapiens
  CDR3 for beta chain variable domain of TCR clone 38084 (TRBV7-9, TRBJ2-2)
CASSGLADTGELFV

SEQ ID NO: 76169 - protein, 15 aa, Homo sapiens
  CDR3 for alpha chain variable domain of TCR clone 38085 (TRAV2, TRAJ9)
CAVEDRGTGGFKTIF

SEQ ID NO: 76170 - protein, 15 aa, Homo sapiens
  CDR3 for beta chain variable domain of TCR clone 38085 (TRBV2, TRBJ2-7)
CASSEGLARSYEQYF

SEQ ID NO: 76171 - protein, 12 aa, Homo sapiens
  CDR3 for alpha chain variable domain of TCR clone 38086 (TRAV12-1, TRAJ17)
CAMTLTGNKLTF

SEQ ID NO: 76172 - protein, 13 aa, Homo sapiens
  CDR3 for beta chain variable domain of TCR clone 38086 (TRBV7-9, TRBJ1-2)
CASSLKQNYGYTF

SEQ ID NO: 76173 - protein, 11 aa, Homo sapiens
  CDR3 for alpha chain variable domain of TCR clone 38087 (TRAV12-3, TRAJ27)
CAMANAGKSTF

SEQ ID NO: 76174 - protein, 16 aa, Homo sapiens
  CDR3 for beta chain variable domain of TCR clone 38087 (TRBV7-3, TRBJ2-1)
CASSLEGYRSYNEQFF

SEQ ID NO: 76175 - protein, 15 aa, Homo sapiens
  CDR3 for alpha chain variable domain of TCR clone 38088 (TRAV3, TRAJ20)
RAVRDIKLSDYKLSF

SEQ ID NO: 76176 - protein, 15 aa, Homo sapiens
  CDR3 for beta chain variable domain of TCR clone 38088 (TRBV7-9, TRBJ1-6)
CASSSPGRGNSPLHF

SEQ ID NO: 76177 - protein, 13 aa, Homo sapiens
  CDR3 for alpha chain variable domain of TCR clone 38089 (TRAV21, TRAJ57)
CAVTQGGSEKLVF

SEQ ID NO: 76178 - protein, 17 aa, Homo sapiens
  CDR3 for beta chain variable domain of TCR clone 38089 (TRBV7-2, TRBJ2-7)
CASSFETSGSTSSTSGR

SEQ ID NO: 76179 - protein, 12 aa, Homo sapiens
  CDR3 for alpha chain variable domain of TCR clone 38090 (TRAV12-3, TRAJ17)
CAMTLTGNKLTF

SEQ ID NO: 76180 - protein, 15 aa, Homo sapiens
  CDR3 for beta chain variable domain of TCR clone 38090 (TRBV28, TRBJ2-3)
CAPTFRDWSTDTQYF

SEQ ID NO: 76181 - protein, 15 aa, Homo sapiens
  CDR3 for alpha chain variable domain of TCR clone 38091 (TRAV12-2, TRAJ53)
CAVNGGGGSNYKLTF

SEQ ID NO: 76182 - protein, 16 aa, Homo sapiens
  CDR3 for beta chain variable domain of TCR clone 38091 (TRBV11-2, TRBJ2-2)
CASSLRTGNLIGELFF

SEQ ID NO: 76183 - protein, 16 aa, Homo sapiens
  CDR3 for alpha chain variable domain of TCR clone 38092 (TRAV16, TRAJ52)
CALSAAGGTSYGKLTF

SEQ ID NO: 76184 - protein, 17 aa, Homo sapiens
  CDR3 for beta chain variable domain of TCR clone 38092 (TRBV11-2, TRBJ2-1)
CASSLSPPGVEYNEQFF

SEQ ID NO: 76185 - protein, 15 aa, Homo sapiens
  CDR3 for alpha chain variable domain of TCR clone 38093 (TRAV3, TRAJ9)
CAVRARNTGGFKTIL

SEQ ID NO: 76186 - protein, 12 aa, Homo sapiens
  CDR3 for beta chain variable domain of TCR clone 38093 (TRBV11-2, TRBJ2-7)
CASSLPTYEQYF

SEQ ID NO: 76187 - protein, 17 aa, Homo sapiens
  CDR3 for alpha chain variable domain of TCR clone 38094 (TRAV13-1, TRAJ52)
CAAGRNAGGTNYGKLTF

SEQ ID NO: 76188 - protein, 13 aa, Homo sapiens
  CDR3 for beta chain variable domain of TCR clone 38094 (TRBV7-2, TRBJ1-1)
CASNLKGAKVAFF

SEQ ID NO: 76189 - protein, 12 aa, Homo sapiens
  CDR3 for alpha chain variable domain of TCR clone 38095 (TRAV21, TRAJ11)
CAATSGYSTLTF

SEQ ID NO: 76190 - protein, 14 aa, Homo sapiens
  CDR3 for beta chain variable domain of TCR clone 38095 (TRBV20-1, TRBJ2-7)
CSAPELAGVSEQYF

SEQ ID NO: 76191 - protein, 11 aa, Homo sapiens
  CDR3 for alpha chain variable domain of TCR clone 38096 (TRAV12-2, TRAJ33)
CAVTSNYQLIW

SEQ ID NO: 76192 - protein, 14 aa, Homo sapiens
  CDR3 for beta chain variable domain of TCR clone 38096 (TRBV12-4, TRBJ2-2)
CDSNQGANTGELFF

SEQ ID NO: 76193 - protein, 15 aa, Homo sapiens
  CDR3 for alpha chain variable domain of TCR clone 38097 (TRAV17, TRAJ57)
CATGPSQGGSEKLVF

SEQ ID NO: 76194 - protein, 15 aa, Homo sapiens
  CDR3 for beta chain variable domain of TCR clone 38097 (TRBV7-9, TRBJ1-6)
RASSSPGRGNSPLHF

SEQ ID NO: 76195 - protein, 14 aa, Homo sapiens
  CDR3 for alpha chain variable domain of TCR clone 38098 (TRAV16, TRAJ17)
CALSGRAAGNKLTF

SEQ ID NO: 76196 - protein, 13 aa, Homo sapiens
  CDR3 for beta chain variable domain of TCR clone 38098 (TRBV12-5, TRBJ2-3)
CASGDRQSDTQYF

SEQ ID NO: 76197 - protein, 17 aa, Homo sapiens
  CDR3 for alpha chain variable domain of TCR clone 38099 (TRAV3, )
CAISRTLTLPCTSCETL

SEQ ID NO: 76198 - protein, 15 aa, Homo sapiens
  CDR3 for beta chain variable domain of TCR clone 38099 (TRBV19, TRBJ1-5)
CASSDSGPRNQPQHF

SEQ ID NO: 76199 - protein, 13 aa, Homo sapiens
  CDR3 for alpha chain variable domain of TCR clone 38100 (TRAV12-3, TRAJ13)
CAMGTGGYQKVTF

SEQ ID NO: 76200 - protein, 14 aa, Homo sapiens
  CDR3 for beta chain variable domain of TCR clone 38100 (TRBV7-2, TRBJ2-5)
CASSAGGELKTQYF

SEQ ID NO: 76201 - protein, 12 aa, Homo sapiens
  CDR3 for alpha chain variable domain of TCR clone 38101 (TRAV21, TRAJ3)
CCFYSSASKIIF

SEQ ID NO: 76202 - protein, 16 aa, Homo sapiens
  CDR3 for beta chain variable domain of TCR clone 38101 (TRBV19, TRBJ2-1)
CASSKAGPISYNEQFF

SEQ ID NO: 76203 - protein, 15 aa, Homo sapiens
  CDR3 for alpha chain variable domain of TCR clone 38102 (TRAV17, TRAJ13)
CATDAGSGGYQKVTF

SEQ ID NO: 76204 - protein, 17 aa, Homo sapiens
  CDR3 for beta chain variable domain of TCR clone 38102 (TRBV11-2, TRBJ2-1)
CASSLYPPGVEYNEQLF

SEQ ID NO: 76205 - protein, 16 aa, Homo sapiens
  CDR3 for alpha chain variable domain of TCR clone 38103 (TRAV30, TRAJ24)
CGTEIVDADSWGRFQF

SEQ ID NO: 76206 - protein, 15 aa, Homo sapiens
  CDR3 for beta chain variable domain of TCR clone 38103 (TRBV20-1, TRBJ2-6)
CSARDRGPGANVLTF

SEQ ID NO: 76207 - protein, 16 aa, Homo sapiens
  CDR3 for alpha chain variable domain of TCR clone 38104 (TRAV12-3, TRAJ53)
CAMSPGSGGSNYKLTF

SEQ ID NO: 76208 - protein, 15 aa, Homo sapiens
  CDR3 for beta chain variable domain of TCR clone 38104 (TRBV25-1, TRBJ1-4)
CASSPGDSTNEKLFF

SEQ ID NO: 76209 - protein, 15 aa, Homo sapiens
  CDR3 for alpha chain variable domain of TCR clone 38105 (TRAV29/DV5, TRAJ57)
CAASLLRGGSEKLVF

SEQ ID NO: 76210 - protein, 15 aa, Homo sapiens
  CDR3 for beta chain variable domain of TCR clone 38105 (TRBV5-1, TRBJ1-3)
CASSLEGGSGNTMYF

SEQ ID NO: 76211 - protein, 14 aa, Homo sapiens
  CDR3 for alpha chain variable domain of TCR clone 38106 (TRAV3, TRAJ9)
CAVRLNTGGFKTIF

SEQ ID NO: 76212 - protein, 15 aa, Homo sapiens
  CDR3 for beta chain variable domain of TCR clone 38106 (TRBV7-2, TRBJ2-1)
CASRLASGRVNEQFF

SEQ ID NO: 76213 - protein, 15 aa, Homo sapiens
  CDR3 for alpha chain variable domain of TCR clone 38107 (TRAV38-1, TRAJ57)
CAFMDSQGGSEKLVF

SEQ ID NO: 76214 - protein, 16 aa, Homo sapiens
  CDR3 for beta chain variable domain of TCR clone 38107 (TRBV10-3, TRBJ2-1)
WAIRGGGRGDYNEQFF

SEQ ID NO: 76215 - protein, 14 aa, Homo sapiens
  CDR3 for alpha chain variable domain of TCR clone 38108 (TRAV26-1, TRAJ38)
CIADNAGNNRKLIW

SEQ ID NO: 76216 - protein, 14 aa, Homo sapiens
  CDR3 for beta chain variable domain of TCR clone 38108 (TRBV4-1, TRBJ2-2)
CASSQAVNTGELFF

SEQ ID NO: 76217 - protein, 13 aa, Homo sapiens
  CDR3 for alpha chain variable domain of TCR clone 38109 (TRAV1-2, TRAJ31)
CAVRPNNSARLMF

SEQ ID NO: 76218 - protein, 14 aa, Homo sapiens
  CDR3 for beta chain variable domain of TCR clone 38109 (TRBV11-2, TRBJ2-1)
CASSLSGPYNEQFF

SEQ ID NO: 76219 - protein, 11 aa, Homo sapiens
  CDR3 for alpha chain variable domain of TCR clone 38110 (TRAV3, TRAJ13)
CAVTSYQKVTF

SEQ ID NO: 76220 - protein, 15 aa, Homo sapiens
  CDR3 for beta chain variable domain of TCR clone 38110 (TRBV7-9, TRBJ2-7)
CASSSSGLAVYGQYF

SEQ ID NO: 76221 - protein, 15 aa, Homo sapiens
  CDR3 for alpha chain variable domain of TCR clone 38111 (TRAV17, TRAJ23)
CATDAEDSQGGKLIF

SEQ ID NO: 76222 - protein, 12 aa, Homo sapiens
  CDR3 for beta chain variable domain of TCR clone 38111 (TRBV2, TRBJ2-1)
CAKREGYNEQFF

SEQ ID NO: 76223 - protein, 14 aa, Homo sapiens
  CDR3 for alpha chain variable domain of TCR clone 38112 (TRAV8-6, TRAJ12)
RAVKAADSSYKLIF

SEQ ID NO: 76224 - protein, 15 aa, Homo sapiens
  CDR3 for beta chain variable domain of TCR clone 38112 (TRBV5-1, TRBJ2-5)
CASSLGLAEQETQYF

SEQ ID NO: 76225 - protein, 10 aa, Homo sapiens
  CDR3 for alpha chain variable domain of TCR clone 38113 (TRAV8-3, TRAJ33)
CAVGAIATIS

SEQ ID NO: 76226 - protein, 13 aa, Homo sapiens
  CDR3 for beta chain variable domain of TCR clone 38113 (TRBV4-1, TRBJ2-1)
CASSQAGGDEQFF

SEQ ID NO: 76227 - protein, 13 aa, Homo sapiens
  CDR3 for alpha chain variable domain of TCR clone 38114 (TRAV21, TRAJ15)
CAVRNQAGTVLIF

SEQ ID NO: 76228 - protein, 16 aa, Homo sapiens
  CDR3 for beta chain variable domain of TCR clone 38114 (TRBV20-1, TRBJ2-5)
CSPGGTSGGYMETQYF

SEQ ID NO: 76229 - protein, 13 aa, Homo sapiens
  CDR3 for alpha chain variable domain of TCR clone 38115 (TRAV21, TRAJ57)
SAVTQGGSEKLVF

SEQ ID NO: 76230 - protein, 16 aa, Homo sapiens
  CDR3 for beta chain variable domain of TCR clone 38115 (TRBV29-1, TRBJ2-7)
CSVEDAEDGTAYEQYF

SEQ ID NO: 76231 - protein, 15 aa, Homo sapiens
  CDR3 for alpha chain variable domain of TCR clone 38116 (TRAV30, TRAJ32)
CGTEIIGGATNKLIF

SEQ ID NO: 76232 - protein, 13 aa, Homo sapiens
  CDR3 for beta chain variable domain of TCR clone 38116 (TRBV6-3, TRBJ2-7)
CASSFSGGYEQYF

SEQ ID NO: 76233 - protein, 12 aa, Homo sapiens
  CDR3 for alpha chain variable domain of TCR clone 38117 (TRAV10, TRAJ43)
CVAVRVGNDMRF

SEQ ID NO: 76234 - protein, 15 aa, Homo sapiens
  CDR3 for beta chain variable domain of TCR clone 38117 (TRBV2, TRBJ2-7)
CASSEGLARSYEQYF

SEQ ID NO: 76235 - protein, 13 aa, Homo sapiens
  CDR3 for alpha chain variable domain of TCR clone 38118 (TRAV2, TRAJ40)
CAVVTSGTYKYIF

SEQ ID NO: 76236 - protein, 15 aa, Homo sapiens
  CDR3 for beta chain variable domain of TCR clone 38118 (TRBV18, TRBJ1-1)
CAGSPRQGENTEAFF

SEQ ID NO: 76237 - protein, 13 aa, Homo sapiens
  CDR3 for alpha chain variable domain of TCR clone 38119 (TRAV17, TRAJ5)
CAPMDTGRRALTF

SEQ ID NO: 76238 - protein, 15 aa, Homo sapiens
  CDR3 for beta chain variable domain of TCR clone 38119 (TRBV28, TRBJ1-1)
CASTSTRGLNTEAFF

SEQ ID NO: 76239 - protein, 15 aa, Homo sapiens
  CDR3 for alpha chain variable domain of TCR clone 38120 (TRAV17, TRAJ57)
CATGPSQGGSEKLVF

SEQ ID NO: 76240 - protein, 14 aa, Homo sapiens
  CDR3 for beta chain variable domain of TCR clone 38120 (TRBV12-5, TRBJ2-5)
CASGSLTHQETQYF

SEQ ID NO: 76241 - protein, 11 aa, Homo sapiens
  CDR3 for alpha chain variable domain of TCR clone 38121 (TRAV13-1, TRAJ20)
CAASNDYRLSF

SEQ ID NO: 76242 - protein, 14 aa, Homo sapiens
  CDR3 for beta chain variable domain of TCR clone 38121 (TRBV7-2, TRBJ2-7)
CASSPKTSFYEQYF

SEQ ID NO: 76243 - protein, 16 aa, Homo sapiens
  CDR3 for alpha chain variable domain of TCR clone 38122 (TRAV30, TRAJ24)
CGTEIVGADSWGKFQF

SEQ ID NO: 76244 - protein, 15 aa, Homo sapiens
  CDR3 for beta chain variable domain of TCR clone 38122 (TRBV7-9, TRBJ1-4)
CTSSARTGGNEKLFF

SEQ ID NO: 76245 - protein, 13 aa, Homo sapiens
  CDR3 for alpha chain variable domain of TCR clone 38123 (TRAV8-3, TRAJ36)
CAVGATGANNLFF

SEQ ID NO: 76246 - protein, 14 aa, Homo sapiens
  CDR3 for beta chain variable domain of TCR clone 38123 (TRBV11-1, TRBJ1-1)
CASSLEHPNTEAFF

SEQ ID NO: 76247 - protein, 16 aa, Homo sapiens
  CDR3 for alpha chain variable domain of TCR clone 38124 (TRAV26-1, TRAJ37)
CIVRGDGSGNTGKLLF

SEQ ID NO: 76248 - protein, 17 aa, Homo sapiens
  CDR3 for beta chain variable domain of TCR clone 38124 (TRBV4-1, TRBJ2-7)
CASSRDPLGVRGGEQYF

SEQ ID NO: 76249 - protein, 17 aa, Homo sapiens
  CDR3 for alpha chain variable domain of TCR clone 38125 (TRAV3, TRAJ38)
CAARDCLNAGNNRKLIW

SEQ ID NO: 76250 - protein, 14 aa, Homo sapiens
  CDR3 for beta chain variable domain of TCR clone 38125 (TRBV5-5, TRBJ1-5)
CANSGQGVDQPQHF

SEQ ID NO: 76251 - protein, 15 aa, Homo sapiens
  CDR3 for alpha chain variable domain of TCR clone 38126 (TRAV27, TRAJ38)
CAARRNAGNNRKLIW

SEQ ID NO: 76252 - protein, 16 aa, Homo sapiens
  CDR3 for beta chain variable domain of TCR clone 38126 (TRBV13, TRBJ2-3)
CQQPLQGSGGRNTQYF

SEQ ID NO: 76253 - protein, 12 aa, Homo sapiens
  CDR3 for alpha chain variable domain of TCR clone 38127 (TRAV12-2, TRAJ31)
CAVNTPDARLMF

SEQ ID NO: 76254 - protein, 17 aa, Homo sapiens
  CDR3 for beta chain variable domain of TCR clone 38127 (TRBV20-1, TRBJ1-6)
YSARGGYTFSYNSPLHF

SEQ ID NO: 76255 - protein, 16 aa, Homo sapiens
  CDR3 for alpha chain variable domain of TCR clone 38128 (TRAV12-1, TRAJ45)
CVVIRYSGGGADGLTF

SEQ ID NO: 76256 - protein, 12 aa, Homo sapiens
  CDR3 for beta chain variable domain of TCR clone 38128 (TRBV6-5, TRBJ2-2)
CASRQIAGELFF

SEQ ID NO: 76257 - protein, 17 aa, Homo sapiens
  CDR3 for alpha chain variable domain of TCR clone 38129 (TRAV3, TRAJ6)
CAVRDGHRAGGSYIPTF

SEQ ID NO: 76258 - protein, 20 aa, Homo sapiens
  CDR3 for beta chain variable domain of TCR clone 38129 (TRBV28, TRBJ2-1)
CASTPIGRSPGLAGGNEQFF

SEQ ID NO: 76259 - protein, 19 aa, Homo sapiens
  CDR3 for alpha chain variable domain of TCR clone 38130 (TRAV1-2, TRAJ26)
CLLPLCCERPDNYGQNFVF

SEQ ID NO: 76260 - protein, 17 aa, Homo sapiens
  CDR3 for beta chain variable domain of TCR clone 38130 (TRBV13, TRBJ2-3)
CASSLSRVAGGEEYAVF

SEQ ID NO: 76261 - protein, 14 aa, Homo sapiens
  CDR3 for alpha chain variable domain of TCR clone 38131 (TRAV1-2, TRAJ8)
CAVREDTGFQKLVF

SEQ ID NO: 76262 - protein, 15 aa, Homo sapiens
  CDR3 for beta chain variable domain of TCR clone 38131 (TRBV6-1, TRBJ2-2)
CAILTGTRDTGELFF

SEQ ID NO: 76263 - protein, 17 aa, Homo sapiens
  CDR3 for alpha chain variable domain of TCR clone 38132 (TRAV3, TRAJ6)
CAVRDGPRAGGSYIPPF

SEQ ID NO: 76264 - protein, 15 aa, Homo sapiens
  CDR3 for beta chain variable domain of TCR clone 38132 (TRBV20-1, TRBJ1-1)
CSASWDRFLNTEAFF

SEQ ID NO: 76265 - protein, 11 aa, Homo sapiens
  CDR3 for alpha chain variable domain of TCR clone 38133 (TRAV12-3, TRAJ43)
CAMSVSNDMRF

SEQ ID NO: 76266 - protein, 13 aa, Homo sapiens
  CDR3 for beta chain variable domain of TCR clone 38133 (TRBV20-1, TRBJ1-1)
CSAPLGWGTEAFF

SEQ ID NO: 76267 - protein, 10 aa, Homo sapiens
  CDR3 for alpha chain variable domain of TCR clone 38134 (TRAV23/DV6, TRAJ57)
CAASSTLSQG

SEQ ID NO: 76268 - protein, 14 aa, Homo sapiens
  CDR3 for beta chain variable domain of TCR clone 38134 (TRBV5-4, TRBJ1-1)
CASSLDSRRDEAFF

SEQ ID NO: 76269 - protein, 12 aa, Homo sapiens
  CDR3 for alpha chain variable domain of TCR clone 38135 (TRAV4, TRAJ26)
CLGGDYGQNFVF

SEQ ID NO: 76270 - protein, 16 aa, Homo sapiens
  CDR3 for beta chain variable domain of TCR clone 38135 (TRBV7-2, TRBJ1-2)
CASSSNQDRRGHGYTF

SEQ ID NO: 76271 - protein, 17 aa, Homo sapiens
  CDR3 for alpha chain variable domain of TCR clone 38136 (TRAV3, TRAJ6)
CAVRDGPRAGGSYIPTF

SEQ ID NO: 76272 - protein, 18 aa, Homo sapiens
  CDR3 for beta chain variable domain of TCR clone 38136 (TRBV7-9, TRBJ2-7)
CASSLTTSGSRAWYEQYF

SEQ ID NO: 76273 - protein, 17 aa, Homo sapiens
  CDR3 for alpha chain variable domain of TCR clone 38137 (TRAV3, TRAJ6)
CAVRDGPRAGGSYIPTF

SEQ ID NO: 76274 - protein, 14 aa, Homo sapiens
  CDR3 for beta chain variable domain of TCR clone 38137 (TRBV7-3, TRBJ1-1)
CASSLKGGNTEAFF

SEQ ID NO: 76275 - protein, 14 aa, Homo sapiens
  CDR3 for alpha chain variable domain of TCR clone 38138 (TRAV1-2, TRAJ8)
CAVREDTGFQKLVF

SEQ ID NO: 76276 - protein, 13 aa, Homo sapiens
  CDR3 for beta chain variable domain of TCR clone 38138 (TRBV29-1, TRBJ2-3)
SAALQGGADTQYF

SEQ ID NO: 76277 - protein, 14 aa, Homo sapiens
  CDR3 for alpha chain variable domain of TCR clone 38139 (TRAV1-2, TRAJ8)
CAVREDTGFQKLVF

SEQ ID NO: 76278 - protein, 13 aa, Homo sapiens
  CDR3 for beta chain variable domain of TCR clone 38139 (TRBV11-2, TRBJ1-1)
CASSLGNGAEAFF

SEQ ID NO: 76279 - protein, 14 aa, Homo sapiens
  CDR3 for alpha chain variable domain of TCR clone 38140 (TRAV12-2, TRAJ17)
CAVNIKAAGNKLTF

SEQ ID NO: 76280 - protein, 16 aa, Homo sapiens
  CDR3 for beta chain variable domain of TCR clone 38140 (TRBV20-1, TRBJ2-6)
CSASSQGYDGANVLAF

SEQ ID NO: 76281 - protein, 15 aa, Homo sapiens
  CDR3 for alpha chain variable domain of TCR clone 38141 (TRAV27, TRAJ38)
CAARRNAGNNRKLIW

SEQ ID NO: 76282 - protein, 15 aa, Homo sapiens
  CDR3 for beta chain variable domain of TCR clone 38141 (TRBV7-9, TRBJ1-6)
CASSSPGRGNSPLHF

SEQ ID NO: 76283 - protein, 12 aa, Homo sapiens
  CDR3 for alpha chain variable domain of TCR clone 38142 (TRAV1-1, TRAJ39)
CAVPVVGNMLTF

SEQ ID NO: 76284 - protein, 13 aa, Homo sapiens
  CDR3 for beta chain variable domain of TCR clone 38142 (TRBV7-9, TRBJ2-1)
CAGSSSNFNGQFF

SEQ ID NO: 76285 - protein, 12 aa, Homo sapiens
  CDR3 for alpha chain variable domain of TCR clone 38143 (TRAV3, TRAJ43)
CAVRDPNHDMRF

SEQ ID NO: 76286 - protein, 15 aa, Homo sapiens
  CDR3 for beta chain variable domain of TCR clone 38143 (TRBV27, TRBJ1-5)
CASSLGTGFDQPQHF

SEQ ID NO: 76287 - protein, 15 aa, Homo sapiens
  CDR3 for alpha chain variable domain of TCR clone 38144 (TRAV38-1, TRAJ37)
CAFIFGSGNTGKLFF

SEQ ID NO: 76288 - protein, 12 aa, Homo sapiens
  CDR3 for beta chain variable domain of TCR clone 38144 (TRBV7-9, TRBJ2-7)
CASSLEGYEQYF

SEQ ID NO: 76289 - protein, 13 aa, Homo sapiens
  CDR3 for alpha chain variable domain of TCR clone 38145 (TRAV23/DV6, TRAJ16)
CAASISYGQKLLF

SEQ ID NO: 76290 - protein, 15 aa, Homo sapiens
  CDR3 for beta chain variable domain of TCR clone 38145 (TRBV2, TRBJ2-2)
CASSRETVGTGELFF

SEQ ID NO: 76291 - protein, 14 aa, Homo sapiens
  CDR3 for alpha chain variable domain of TCR clone 38146 (TRAV2, TRAJ9)
CAVEDRSGGFKTIS

SEQ ID NO: 76292 - protein, 14 aa, Homo sapiens
  CDR3 for beta chain variable domain of TCR clone 38146 (TRBV18, TRBJ2-7)
CASSPRGGAYEQYF

SEQ ID NO: 76293 - protein, 12 aa, Homo sapiens
  CDR3 for alpha chain variable domain of TCR clone 38147 (TRAV17, TRAJ36)
CATLTGANNLFF

SEQ ID NO: 76294 - protein, 15 aa, Homo sapiens
  CDR3 for beta chain variable domain of TCR clone 38147 (TRBV19, TRBJ1-2)
CASSTKTDTDYGYTF

SEQ ID NO: 76295 - protein, 13 aa, Homo sapiens
  CDR3 for alpha chain variable domain of TCR clone 38148 (TRAV20, TRAJ29)
CAVQAVGNTPLVF

SEQ ID NO: 76296 - protein, 15 aa, Homo sapiens
  CDR3 for beta chain variable domain of TCR clone 38148 (TRBV10-2, TRBJ2-5)
CASRGSGGPQETQYL

SEQ ID NO: 76297 - protein, 14 aa, Homo sapiens
  CDR3 for alpha chain variable domain of TCR clone 38149 (TRAV8-4, TRAJ13)
CAVTLSGGYQKVTF

SEQ ID NO: 76298 - protein, 14 aa, Homo sapiens
  CDR3 for beta chain variable domain of TCR clone 38149 (TRBV7-2, TRBJ1-2)
CASSQTRSTYGYTF

SEQ ID NO: 76299 - protein, 14 aa, Homo sapiens
  CDR3 for alpha chain variable domain of TCR clone 38150 (TRAV1-2, TRAJ16)
CAVNRFSDGQKLLF

SEQ ID NO: 76300 - protein, 13 aa, Homo sapiens
  CDR3 for beta chain variable domain of TCR clone 38150 (TRBV20-1, TRBJ1-1)
CSAGTVGNTEAFF

SEQ ID NO: 76301 - protein, 14 aa, Homo sapiens
  CDR3 for alpha chain variable domain of TCR clone 38151 (TRAV1-2, TRAJ16)
CAVSRFSDGQKLLF

SEQ ID NO: 76302 - protein, 15 aa, Homo sapiens
  CDR3 for beta chain variable domain of TCR clone 38151 (TRBV6-5, TRBJ2-7)
CASSASGRWSYEQYF

SEQ ID NO: 76303 - protein, 15 aa, Homo sapiens
  CDR3 for alpha chain variable domain of TCR clone 38152 (TRAV17, TRAJ13)
CATILGVTRKLPLEL

SEQ ID NO: 76304 - protein, 14 aa, Homo sapiens
  CDR3 for beta chain variable domain of TCR clone 38152 (TRBV7-8, TRBJ2-3)
CASSLEAGTDTQYF

SEQ ID NO: 76305 - protein, 13 aa, Homo sapiens
  CDR3 for alpha chain variable domain of TCR clone 38153 (TRAV20, TRAJ34)
CAVRSYNTDKLIF

SEQ ID NO: 76306 - protein, 12 aa, Homo sapiens
  CDR3 for beta chain variable domain of TCR clone 38153 (TRBV11-2, TRBJ2-1)
RASSPGNNEQFF

SEQ ID NO: 76307 - protein, 17 aa, Homo sapiens
  CDR3 for alpha chain variable domain of TCR clone 38154 (TRAV16, TRAJ37)
CAFWPKNGSSNTGKLIF

SEQ ID NO: 76308 - protein, 12 aa, Homo sapiens
  CDR3 for beta chain variable domain of TCR clone 38154 (TRBV28, TRBJ2-6)
CAIQAGANVLTF

SEQ ID NO: 76309 - protein, 12 aa, Homo sapiens
  CDR3 for alpha chain variable domain of TCR clone 38155 (TRAV21, TRAJ33)
CAKMDSNCQLIW

SEQ ID NO: 76310 - protein, 14 aa, Homo sapiens
  CDR3 for beta chain variable domain of TCR clone 38155 (TRBV2, TRBJ2-7)
CASSLTSGGYEQYF

SEQ ID NO: 76311 - protein, 17 aa, Homo sapiens
  CDR3 for alpha chain variable domain of TCR clone 38156 (TRAV13-1, TRAJ52)
CAAGRNAGGTSYGKLTF

SEQ ID NO: 76312 - protein, 13 aa, Homo sapiens
  CDR3 for beta chain variable domain of TCR clone 38156 (TRBV7-2, TRBJ1-1)
CASDLKGAKVAFF

SEQ ID NO: 76313 - protein, 17 aa, Homo sapiens
  CDR3 for alpha chain variable domain of TCR clone 38157 (TRAV17, TRAJ7)
CATLGRLAFRKGNQVVV

SEQ ID NO: 76314 - protein, 13 aa, Homo sapiens
  CDR3 for beta chain variable domain of TCR clone 38157 (TRBV12-4, TRBJ2-7)
CASSLERVREQYF

SEQ ID NO: 76315 - protein, 14 aa, Homo sapiens
  CDR3 for alpha chain variable domain of TCR clone 38158 (TRAV16, TRAJ57)
CALPAQGGSEKLVF

SEQ ID NO: 76316 - protein, 15 aa, Homo sapiens
  CDR3 for beta chain variable domain of TCR clone 38158 (TRBV28, TRBJ1-3)
CASWGGHLSGNTIYF

SEQ ID NO: 76317 - protein, 16 aa, Homo sapiens
  CDR3 for alpha chain variable domain of TCR clone 38159 (TRAV12-3, TRAJ53)
CAMSPGSGGNNYKLTF

SEQ ID NO: 76318 - protein, 11 aa, Homo sapiens
  CDR3 for beta chain variable domain of TCR clone 38159 (TRBV6-3, TRBJ2-3)
CATGQADTQYF

SEQ ID NO: 76319 - protein, 13 aa, Homo sapiens
  CDR3 for alpha chain variable domain of TCR clone 38160 (TRAV20, TRAJ37)
CAGCSSNTGKLIF

SEQ ID NO: 76320 - protein, 11 aa, Homo sapiens
  CDR3 for beta chain variable domain of TCR clone 38160 (TRBV12-4, TRBJ2-3)
CASTATDTQYL

SEQ ID NO: 76321 - protein, 14 aa, Homo sapiens
  CDR3 for alpha chain variable domain of TCR clone 38161 (TRAV1-2, TRAJ8)
CAVREDTGFQKFVF

SEQ ID NO: 76322 - protein, 16 aa, Homo sapiens
  CDR3 for beta chain variable domain of TCR clone 38161 (TRBV12-4, TRBJ1-5)
CASSRPVGGSNQPQHF

SEQ ID NO: 76323 - protein, 14 aa, Homo sapiens
  CDR3 for alpha chain variable domain of TCR clone 38162 (TRAV38-1, TRAJ40)
CALRPTSGTYKYIF

SEQ ID NO: 76324 - protein, 14 aa, Homo sapiens
  CDR3 for beta chain variable domain of TCR clone 38162 (TRBV25-1, TRBJ1-1)
CASTHLGGTTEAFF

SEQ ID NO: 76325 - protein, 13 aa, Homo sapiens
  CDR3 for alpha chain variable domain of TCR clone 38163 (TRAV8-3, TRAJ48)
CAVVPFGNEKLIF

SEQ ID NO: 76326 - protein, 12 aa, Homo sapiens
  CDR3 for beta chain variable domain of TCR clone 38163 (TRBV11-2, TRBJ2-2)
CASSLGGGELFF

SEQ ID NO: 76327 - protein, 16 aa, Homo sapiens
  CDR3 for alpha chain variable domain of TCR clone 38164 (TRAV16, TRAJ4)
CALSRMFSGGYNKLIF

SEQ ID NO: 76328 - protein, 16 aa, Homo sapiens
  CDR3 for beta chain variable domain of TCR clone 38164 (TRBV24-1, TRBJ2-3)
CATSEPGTGATDTQYF

SEQ ID NO: 76329 - protein, 13 aa, Homo sapiens
  CDR3 for alpha chain variable domain of TCR clone 38165 (TRAV1-2, TRAJ16)
CAVRATDGQKLLF

SEQ ID NO: 76330 - protein, 14 aa, Homo sapiens
  CDR3 for beta chain variable domain of TCR clone 38165 (TRBV4-1, TRBJ1-1)
CASSQEARGTEAFF

SEQ ID NO: 76331 - protein, 11 aa, Homo sapiens
  CDR3 for alpha chain variable domain of TCR clone 38166 (TRAV12-3, TRAJ43)
CAMSVSNDMRV

SEQ ID NO: 76332 - protein, 13 aa, Homo sapiens
  CDR3 for beta chain variable domain of TCR clone 38166 (TRBV20-1, TRBJ1-1)
CSAPLGGGTEAFF

SEQ ID NO: 76333 - protein, 13 aa, Homo sapiens
  CDR3 for alpha chain variable domain of TCR clone 38167 (TRAV38-2/DV8, TRAJ34)
CAYSNYNTDKLIF

SEQ ID NO: 76334 - protein, 15 aa, Homo sapiens
  CDR3 for beta chain variable domain of TCR clone 38167 (TRBV20-1, TRBJ2-5)
CSAEGTGGLQETQYF

SEQ ID NO: 76335 - protein, 13 aa, Homo sapiens
  CDR3 for alpha chain variable domain of TCR clone 38168 (TRAV27, TRAJ49)
CAPRPYTGNQFYF

SEQ ID NO: 76336 - protein, 16 aa, Homo sapiens
  CDR3 for beta chain variable domain of TCR clone 38168 (TRBV4-1, TRBJ1-2)
CTSSQDAGQVLYGYTF

SEQ ID NO: 76337 - protein, 15 aa, Homo sapiens
  CDR3 for alpha chain variable domain of TCR clone 38169 (TRAV8-2, TRAJ40)
CVVLGTTSGTYKYIF

SEQ ID NO: 76338 - protein, 15 aa, Homo sapiens
  CDR3 for beta chain variable domain of TCR clone 38169 (TRBV12-4, TRBJ2-5)
CASSPPTGLQETQYF

SEQ ID NO: 76339 - protein, 11 aa, Homo sapiens
  CDR3 for alpha chain variable domain of TCR clone 38170 (TRAV1-2, TRAJ31)
CAVNNNARLMF

SEQ ID NO: 76340 - protein, 15 aa, Homo sapiens
  CDR3 for beta chain variable domain of TCR clone 38170 (TRBV28, TRBJ2-1)
CASSIRAGGRSEQFF

SEQ ID NO: 76341 - protein, 15 aa, Homo sapiens
  CDR3 for alpha chain variable domain of TCR clone 38171 (TRAV8-3, TRAJ11)
CAVGLLNSGYSTLTF

SEQ ID NO: 76342 - protein, 16 aa, Homo sapiens
  CDR3 for beta chain variable domain of TCR clone 38171 (TRBV7-9, TRBJ1-2)
CASSLGFSSGEDDYTF

SEQ ID NO: 76343 - protein, 14 aa, Homo sapiens
  CDR3 for alpha chain variable domain of TCR clone 38172 (TRAV12-3, TRAJ29)
CAMILLSGNTPLVF

SEQ ID NO: 76344 - protein, 16 aa, Homo sapiens
  CDR3 for beta chain variable domain of TCR clone 38172 (TRBV28, TRBJ2-7)
CAGSSGTSGRGYEQHF

SEQ ID NO: 76345 - protein, 12 aa, Homo sapiens
  CDR3 for alpha chain variable domain of TCR clone 38173 (TRAV12-3, TRAJ17)
CATTLTGNKLTF

SEQ ID NO: 76346 - protein, 13 aa, Homo sapiens
  CDR3 for beta chain variable domain of TCR clone 38173 (TRBV10-3, TRBJ1-2)
CAISERDSYGYTF

SEQ ID NO: 76347 - protein, 15 aa, Homo sapiens
  CDR3 for alpha chain variable domain of TCR clone 38174 (TRAV4, TRAJ39)
CLVGPNNNAGNMLTF

SEQ ID NO: 76348 - protein, 12 aa, Homo sapiens
  CDR3 for beta chain variable domain of TCR clone 38174 (TRBV28, TRBJ2-3)
CASSLYRDTQYF

SEQ ID NO: 76349 - protein, 14 aa, Homo sapiens
  CDR3 for alpha chain variable domain of TCR clone 38175 (TRAV36/DV7, TRAJ45)
CPLYSGGGADGLTF

SEQ ID NO: 76350 - protein, 14 aa, Homo sapiens
  CDR3 for beta chain variable domain of TCR clone 38175 (TRBV4-1, TRBJ2-2)
CASSQAVNTGELFF

SEQ ID NO: 76351 - protein, 14 aa, Homo sapiens
  CDR3 for alpha chain variable domain of TCR clone 38176 (TRAV9-2, TRAJ39)
CALYIYNAGNMLTF

SEQ ID NO: 76352 - protein, 13 aa, Homo sapiens
  CDR3 for beta chain variable domain of TCR clone 38176 (TRBV7-9, TRBJ2-5)
CASLPSGRETQYF

SEQ ID NO: 76353 - protein, 15 aa, Homo sapiens
  CDR3 for alpha chain variable domain of TCR clone 38177 (TRAV12-2, TRAJ43)
CSFDMRFGAGTRLTV

SEQ ID NO: 76354 - protein, 18 aa, Homo sapiens
  CDR3 for beta chain variable domain of TCR clone 38177 (TRBV20-1, TRBJ2-3)
CSASGLAGGPGTTDTQYF

SEQ ID NO: 76355 - protein, 15 aa, Homo sapiens
  CDR3 for alpha chain variable domain of TCR clone 38178 (TRAV26-1, TRAJ23)
CIVRVLNNQGGKLIF

SEQ ID NO: 76356 - protein, 15 aa, Homo sapiens
  CDR3 for beta chain variable domain of TCR clone 38178 (TRBV7-3, TRBJ2-1)
CASSFGQGNYNEQFF

SEQ ID NO: 76357 - protein, 12 aa, Homo sapiens
  CDR3 for alpha chain variable domain of TCR clone 38179 (TRAV12-3, TRAJ41)
CAISYSGYALNF

SEQ ID NO: 76358 - protein, 13 aa, Homo sapiens
  CDR3 for beta chain variable domain of TCR clone 38179 (TRBV7-3, TRBJ2-1)
CASSLDSYNEQFF

SEQ ID NO: 76359 - protein, 18 aa, Homo sapiens
  CDR3 for alpha chain variable domain of TCR clone 38180 (TRAV26-2, TRAJ45)
CILRLWGYSGGGADGLTF

SEQ ID NO: 76360 - protein, 17 aa, Homo sapiens
  CDR3 for beta chain variable domain of TCR clone 38180 (TRBV28, TRBJ2-3)
CASSPTPAGGGVDTQYF

SEQ ID NO: 76361 - protein, 15 aa, Homo sapiens
  CDR3 for alpha chain variable domain of TCR clone 38181 (TRAV12-2, )
CAVEDIQNPDPAVYQ

SEQ ID NO: 76362 - protein, 16 aa, Homo sapiens
  CDR3 for beta chain variable domain of TCR clone 38181 (TRBV6-1, TRBJ1-2)
CASSGAWQGRSHGYTF

SEQ ID NO: 76363 - protein, 13 aa, Homo sapiens
  CDR3 for alpha chain variable domain of TCR clone 38182 (TRAV3, TRAJ21)
CAVREPDFNKFYF

SEQ ID NO: 76364 - protein, 14 aa, Homo sapiens
  CDR3 for beta chain variable domain of TCR clone 38182 (TRBV20-1, TRBJ2-7)
CSARVRDSPYEQYF

SEQ ID NO: 76365 - protein, 14 aa, Homo sapiens
  CDR3 for alpha chain variable domain of TCR clone 38183 (TRAV12-2, TRAJ17)
CAVLYKAAGNKLTF

SEQ ID NO: 76366 - protein, 17 aa, Homo sapiens
  CDR3 for beta chain variable domain of TCR clone 38183 (TRBV20-1, TRBJ2-2)
CSASGSGQGGLTGELFF

SEQ ID NO: 76367 - protein, 13 aa, Homo sapiens
  CDR3 for alpha chain variable domain of TCR clone 38184 (TRAV2, TRAJ40)
CAVVTSGTYKYIF

SEQ ID NO: 76368 - protein, 15 aa, Homo sapiens
  CDR3 for beta chain variable domain of TCR clone 38184 (TRBV11-3, TRBJ2-3)
CASLKDGRKGDTQYF

SEQ ID NO: 76369 - protein, 12 aa, Homo sapiens
  CDR3 for alpha chain variable domain of TCR clone 38185 (TRAV8-3, TRAJ26)
CAGDNYGQNFVF

SEQ ID NO: 76370 - protein, 15 aa, Homo sapiens
  CDR3 for beta chain variable domain of TCR clone 38185 (TRBV9, TRBJ2-1)
CASSLAGSSDNEQFF

SEQ ID NO: 76371 - protein, 16 aa, Homo sapiens
  CDR3 for alpha chain variable domain of TCR clone 38186 (TRAV17, TRAJ21)
CATDAETTSTNFTLDL

SEQ ID NO: 76372 - protein, 15 aa, Homo sapiens
  CDR3 for beta chain variable domain of TCR clone 38186 (TRBV7-8, TRBJ2-1)
CASSPSGTIYNEQFF

SEQ ID NO: 76373 - protein, 12 aa, Homo sapiens
  CDR3 for alpha chain variable domain of TCR clone 38187 (TRAV13-2, TRAJ23)
CAERHRGGKLIF

SEQ ID NO: 76374 - protein, 16 aa, Homo sapiens
  CDR3 for beta chain variable domain of TCR clone 38187 (TRBV20-1, TRBJ1-4)
CSAPGQDLLTNEKLFF

SEQ ID NO: 76375 - protein, 12 aa, Homo sapiens
  CDR3 for alpha chain variable domain of TCR clone 38188 (TRAV8-6, TRAJ11)
CAVSSGYSTLTF

SEQ ID NO: 76376 - protein, 14 aa, Homo sapiens
  CDR3 for beta chain variable domain of TCR clone 38188 (TRBV25-1, TRBJ1-1)
CASTHQGGNTEAFF

SEQ ID NO: 76377 - protein, 14 aa, Homo sapiens
  CDR3 for alpha chain variable domain of TCR clone 38189 (TRAV1-2, TRAJ16)
CAVNRFSDGQKLLF

SEQ ID NO: 76378 - protein, 14 aa, Homo sapiens
  CDR3 for beta chain variable domain of TCR clone 38189 (TRBV7-9, TRBJ2-3)
CASSLEDGTDTQHF

SEQ ID NO: 76379 - protein, 13 aa, Homo sapiens
  CDR3 for alpha chain variable domain of TCR clone 38190 (TRAV12-1, TRAJ39)
CVVPQRAGNMLTF

SEQ ID NO: 76380 - protein, 15 aa, Homo sapiens
  CDR3 for beta chain variable domain of TCR clone 38190 (TRBV9, TRBJ1-6)
CASSVAGTGDSPLHF

SEQ ID NO: 76381 - protein, 20 aa, Homo sapiens
  CDR3 for alpha chain variable domain of TCR clone 38191 (TRAV12-1, TRAJ42)
SSVIQPPTSVKGGRQGNLIF

SEQ ID NO: 76382 - protein, 18 aa, Homo sapiens
  CDR3 for beta chain variable domain of TCR clone 38191 (TRBV11-2, TRBJ2-3)
CASSLGGASRGAPNTQYF

SEQ ID NO: 76383 - protein, 13 aa, Homo sapiens
  CDR3 for alpha chain variable domain of TCR clone 38192 (TRAV8-4, TRAJ48)
CAVSLFGNEKLTF

SEQ ID NO: 76384 - protein, 14 aa, Homo sapiens
  CDR3 for beta chain variable domain of TCR clone 38192 (TRBV7-9, TRBJ2-1)
CASSPRDSLYEQFF

SEQ ID NO: 76385 - protein, 11 aa, Homo sapiens
  CDR3 for alpha chain variable domain of TCR clone 38193 (TRAV12-3, TRAJ43)
CAMSVSNDMRF

SEQ ID NO: 76386 - protein, 12 aa, Homo sapiens
  CDR3 for beta chain variable domain of TCR clone 38193 (TRBV28, TRBJ2-3)
CASSLYRDTQYF

SEQ ID NO: 76387 - protein, 10 aa, Homo sapiens
  CDR3 for alpha chain variable domain of TCR clone 38194 (TRAV30, TRAJ48)
CGIGNEKLTF

SEQ ID NO: 76388 - protein, 13 aa, Homo sapiens
  CDR3 for beta chain variable domain of TCR clone 38194 (TRBV7-3, TRBJ1-1)
CASSQDWGAEAFF

SEQ ID NO: 76389 - protein, 16 aa, Homo sapiens
  CDR3 for alpha chain variable domain of TCR clone 38195 (TRAV12-3, TRAJ53)
CAMSPGSGGSNYKPTF

SEQ ID NO: 76390 - protein, 14 aa, Homo sapiens
  CDR3 for beta chain variable domain of TCR clone 38195 (TRBV4-1, TRBJ2-7)
CASSPVAGGDEQYF

SEQ ID NO: 76391 - protein, 16 aa, Homo sapiens
  CDR3 for alpha chain variable domain of TCR clone 38196 (TRAV30, TRAJ24)
CGTEIVDADSWGKFQF

SEQ ID NO: 76392 - protein, 13 aa, Homo sapiens
  CDR3 for beta chain variable domain of TCR clone 38196 (TRBV13, TRBJ2-1)
CASILGGRGEQFF

SEQ ID NO: 76393 - protein, 13 aa, Homo sapiens
  CDR3 for alpha chain variable domain of TCR clone 38197 (TRAV17, TRAJ5)
CAPMDTGRRALTF

SEQ ID NO: 76394 - protein, 14 aa, Homo sapiens
  CDR3 for beta chain variable domain of TCR clone 38197 (TRBV7-3, TRBJ2-1)
CASSLAGGTNERFF

SEQ ID NO: 76395 - protein, 13 aa, Homo sapiens
  CDR3 for alpha chain variable domain of TCR clone 38198 (TRAV12-2, TRAJ20)
CAVYPSNDYKFSF

SEQ ID NO: 76396 - protein, 15 aa, Homo sapiens
  CDR3 for beta chain variable domain of TCR clone 38198 (TRBV27, TRBJ2-5)
CASSLYPRGGETQYF

SEQ ID NO: 76397 - protein, 12 aa, Homo sapiens
  CDR3 for alpha chain variable domain of TCR clone 38199 (TRAV30, TRAJ43)
CGTEERGNDMRL

SEQ ID NO: 76398 - protein, 13 aa, Homo sapiens
  CDR3 for beta chain variable domain of TCR clone 38199 (TRBV7-9, TRBJ2-3)
CASSPGSTDTQYF

SEQ ID NO: 76399 - protein, 11 aa, Homo sapiens
  CDR3 for alpha chain variable domain of TCR clone 38200 (TRAV12-2, TRAJ43)
CAAHNNNDMRF

SEQ ID NO: 76400 - protein, 14 aa, Homo sapiens
  CDR3 for beta chain variable domain of TCR clone 38200 (TRBV7-8, TRBJ1-2)
CASSAGTAIYGYTF

SEQ ID NO: 76401 - protein, 12 aa, Homo sapiens
  CDR3 for alpha chain variable domain of TCR clone 38201 (TRAV12-1, TRAJ40)
CVVYSGTYKNIF

SEQ ID NO: 76402 - protein, 18 aa, Homo sapiens
  CDR3 for beta chain variable domain of TCR clone 38201 (TRBV11-2, TRBJ2-3)
CASSLGGASRGAPNTQYF

SEQ ID NO: 76403 - protein, 17 aa, Homo sapiens
  CDR3 for alpha chain variable domain of TCR clone 38202 (TRAV3, TRAJ6)
CAVRDSPGAGGSYIPTF

SEQ ID NO: 76404 - protein, 14 aa, Homo sapiens
  CDR3 for beta chain variable domain of TCR clone 38202 (TRBV7-2, TRBJ2-7)
CASSPKTSFYEQYF

SEQ ID NO: 76405 - protein, 13 aa, Homo sapiens
  CDR3 for alpha chain variable domain of TCR clone 38203 (TRAV13-1, TRAJ33)
CAVSRAGNYQLIW

SEQ ID NO: 76406 - protein, 12 aa, Homo sapiens
  CDR3 for beta chain variable domain of TCR clone 38203 (TRBV11-2, TRBJ1-2)
CASSREGDGYTF

SEQ ID NO: 76407 - protein, 14 aa, Homo sapiens
  CDR3 for alpha chain variable domain of TCR clone 38204 (TRAV12-3, TRAJ22)
CAMSLFGSARQLTF

SEQ ID NO: 76408 - protein, 11 aa, Homo sapiens
  CDR3 for beta chain variable domain of TCR clone 38204 (TRBV12-4, TRBJ2-2)
CASSSAGGLFF

SEQ ID NO: 76409 - protein, 20 aa, Homo sapiens
  CDR3 for alpha chain variable domain of TCR clone 38205 (TRAV26-1, TRAJ42)
CYVLLHRQTYYGGSQGNLIF

SEQ ID NO: 76410 - protein, 16 aa, Homo sapiens
  CDR3 for beta chain variable domain of TCR clone 38205 (TRBV7-3, TRBJ2-2)
CDSSLKRGTLSGELFF

SEQ ID NO: 76411 - protein, 15 aa, Homo sapiens
  CDR3 for alpha chain variable domain of TCR clone 38206 (TRAV17, TRAJ56)
CATDANTGANSKLTF

SEQ ID NO: 76412 - protein, 15 aa, Homo sapiens
  CDR3 for beta chain variable domain of TCR clone 38206 (TRBV19, TRBJ2-4)
CASRGPRRGENIQYF

SEQ ID NO: 76413 - protein, 12 aa, Homo sapiens
  CDR3 for alpha chain variable domain of TCR clone 38207 (TRAV17, TRAJ4)
CATDGGYNKLIF

SEQ ID NO: 76414 - protein, 13 aa, Homo sapiens
  CDR3 for beta chain variable domain of TCR clone 38207 (TRBV29-1, TRBJ2-2)
CSITGVNTGELFF

SEQ ID NO: 76415 - protein, 12 aa, Homo sapiens
  CDR3 for alpha chain variable domain of TCR clone 38208 (TRAV17, TRAJ20)
CATQANDYKLSI

SEQ ID NO: 76416 - protein, 14 aa, Homo sapiens
  CDR3 for beta chain variable domain of TCR clone 38208 (TRBV25-1, TRBJ1-1)
CASTHLGGNTEAFF

SEQ ID NO: 76417 - protein, 15 aa, Homo sapiens
  CDR3 for alpha chain variable domain of TCR clone 38209 (TRAV8-3, TRAJ45)
CASSYSGGGADGLTF

SEQ ID NO: 76418 - protein, 17 aa, Homo sapiens
  CDR3 for beta chain variable domain of TCR clone 38209 (TRBV7-8, TRBJ2-6)
CASSAGTGGAGANVLTF

SEQ ID NO: 76419 - protein, 16 aa, Homo sapiens
  CDR3 for alpha chain variable domain of TCR clone 38210 (TRAV8-3, TRAJ13)
CAVGAYPSGGYQKVTS

SEQ ID NO: 76420 - protein, 14 aa, Homo sapiens
  CDR3 for beta chain variable domain of TCR clone 38210 (TRBV18, TRBJ2-5)
CASSPRASSETQYF

SEQ ID NO: 76421 - protein, 12 aa, Homo sapiens
  CDR3 for alpha chain variable domain of TCR clone 38211 (TRAV1-2, TRAJ47)
CAVVGNGNKLVF

SEQ ID NO: 76422 - protein, 12 aa, Homo sapiens
  CDR3 for beta chain variable domain of TCR clone 38211 (TRBV11-2, TRBJ2-2)
CASSLGGGELFF

SEQ ID NO: 76423 - protein, 12 aa, Homo sapiens
  CDR3 for alpha chain variable domain of TCR clone 38212 (TRAV13-2, TRAJ13)
CAENIPEAGSYL

SEQ ID NO: 76424 - protein, 14 aa, Homo sapiens
  CDR3 for beta chain variable domain of TCR clone 38212 (TRBV20-1, TRBJ1-5)
CSARDDRGNQPQHF

SEQ ID NO: 76425 - protein, 18 aa, Homo sapiens
  CDR3 for alpha chain variable domain of TCR clone 38213 (TRAV21, TRAJ52)
CAVRPSPAGGTSYGKLTF

SEQ ID NO: 76426 - protein, 13 aa, Homo sapiens
  CDR3 for beta chain variable domain of TCR clone 38213 (TRBV20-1, TRBJ1-1)
CSARVGGNTEAFF

SEQ ID NO: 76427 - protein, 16 aa, Homo sapiens
  CDR3 for alpha chain variable domain of TCR clone 38214 (TRAV21, TRAJ17)
CAVRAGEEAAGNKLTF

SEQ ID NO: 76428 - protein, 16 aa, Homo sapiens
  CDR3 for beta chain variable domain of TCR clone 38214 (TRBV2, TRBJ2-7)
CASSEPWTGPSYEQYF

SEQ ID NO: 76429 - protein, 14 aa, Homo sapiens
  CDR3 for alpha chain variable domain of TCR clone 38215 (TRAV12-2, TRAJ17)
CAVLFKAAGNKLTF

SEQ ID NO: 76430 - protein, 17 aa, Homo sapiens
  CDR3 for beta chain variable domain of TCR clone 38215 (TRBV20-1, TRBJ2-2)
CRASGSGQGGLTGELFF

SEQ ID NO: 76431 - protein, 14 aa, Homo sapiens
  CDR3 for alpha chain variable domain of TCR clone 38216 (TRAV13-1, TRAJ40)
CAASMTPGTYKYIF

SEQ ID NO: 76432 - protein, 15 aa, Homo sapiens
  CDR3 for beta chain variable domain of TCR clone 38216 (TRBV7-3, TRBJ2-1)
CASSPTGGGEVEQFF

SEQ ID NO: 76433 - protein, 14 aa, Homo sapiens
  CDR3 for alpha chain variable domain of TCR clone 38217 (TRAV8-4, TRAJ9)
CAVRINTGGFKTIF

SEQ ID NO: 76434 - protein, 15 aa, Homo sapiens
  CDR3 for beta chain variable domain of TCR clone 38217 (TRBV6-3, TRBJ2-7)
CASSSPGTVFYEQYF

SEQ ID NO: 76435 - protein, 15 aa, Homo sapiens
  CDR3 for alpha chain variable domain of TCR clone 38218 (TRAV35, TRAJ50)
CAGQLRKTSYAKVIF

SEQ ID NO: 76436 - protein, 12 aa, Homo sapiens
  CDR3 for beta chain variable domain of TCR clone 38218 (TRBV5-1, TRBJ2-5)
CASSLGLETQYF

SEQ ID NO: 76437 - protein, 17 aa, Homo sapiens
  CDR3 for alpha chain variable domain of TCR clone 38219 (TRAV3, TRAJ38)
CAVRDYLNAGNNRKLIW

SEQ ID NO: 76438 - protein, 14 aa, Homo sapiens
  CDR3 for beta chain variable domain of TCR clone 38219 (TRBV12-5, TRBJ2-5)
CASGSRTHQETQYF

SEQ ID NO: 76439 - protein, 13 aa, Homo sapiens
  CDR3 for alpha chain variable domain of TCR clone 38220 (TRAV35, TRAJ48)
CAGHEFGNEKLTF

SEQ ID NO: 76440 - protein, 13 aa, Homo sapiens
  CDR3 for beta chain variable domain of TCR clone 38220 (TRBV11-2, TRBJ2-5)
CASSFSSQETQYF

SEQ ID NO: 76441 - protein, 14 aa, Homo sapiens
  CDR3 for alpha chain variable domain of TCR clone 38221 (TRAV1-2, TRAJ16)
CAVNRFSDGQKLLF

SEQ ID NO: 76442 - protein, 16 aa, Homo sapiens
  CDR3 for beta chain variable domain of TCR clone 38221 (TRBV12-4, TRBJ1-5)
CASSRPVGGSNQPQHS

SEQ ID NO: 76443 - protein, 18 aa, Homo sapiens
  CDR3 for alpha chain variable domain of TCR clone 38222 (TRAV12-3, TRAJ52)
CAMSVGGAGGTSYGKLTF

SEQ ID NO: 76444 - protein, 14 aa, Homo sapiens
  CDR3 for beta chain variable domain of TCR clone 38222 (TRBV7-2, TRBJ2-7)
CASRSRGAAYEQYF

SEQ ID NO: 76445 - protein, 14 aa, Homo sapiens
  CDR3 for alpha chain variable domain of TCR clone 38223 (TRAV12-2, TRAJ24)
CAVTPAYSWGKLQF

SEQ ID NO: 76446 - protein, 16 aa, Homo sapiens
  CDR3 for beta chain variable domain of TCR clone 38223 (TRBV6-4, TRBJ2-3)
APSEGGRAWGTDTQYF

SEQ ID NO: 76447 - protein, 10 aa, Homo sapiens
  CDR3 for alpha chain variable domain of TCR clone 38224 (TRAV38-2/DV8, TRAJ40)
CASGTYKYIF

SEQ ID NO: 76448 - protein, 22 aa, Homo sapiens
  CDR3 for beta chain variable domain of TCR clone 38224 (TRBV7-9, TRBJ2-1)
RGTRPCISVPAAPRDSLYEQFF

SEQ ID NO: 76449 - protein, 15 aa, Homo sapiens
  CDR3 for alpha chain variable domain of TCR clone 38225 (TRAV26-2, TRAJ50)
CILRDEETFYDKVIF

SEQ ID NO: 76450 - protein, 13 aa, Homo sapiens
  CDR3 for beta chain variable domain of TCR clone 38225 (TRBV7-3, TRBJ1-1)
CASSQDWGAEAFF

SEQ ID NO: 76451 - protein, 15 aa, Homo sapiens
  CDR3 for alpha chain variable domain of TCR clone 38226 (TRAV35, TRAJ52)
CAGPRGGTGYGKLTF

SEQ ID NO: 76452 - protein, 14 aa, Homo sapiens
  CDR3 for beta chain variable domain of TCR clone 38226 (TRBV20-1, TRBJ2-7)
CSAWTALSSYEQYF

SEQ ID NO: 76453 - protein, 15 aa, Homo sapiens
  CDR3 for alpha chain variable domain of TCR clone 38227 (TRAV25, TRAJ53)
CAATGGGGSNYKLTF

SEQ ID NO: 76454 - protein, 14 aa, Homo sapiens
  CDR3 for beta chain variable domain of TCR clone 38227 (TRBV5-1, TRBJ1-2)
CASSVDSTNYGYTF

SEQ ID NO: 76455 - protein, 16 aa, Homo sapiens
  CDR3 for alpha chain variable domain of TCR clone 38228 (TRAV12-2, TRAJ40)
CAVIRGGTSGTYKYIF

SEQ ID NO: 76456 - protein, 14 aa, Homo sapiens
  CDR3 for beta chain variable domain of TCR clone 38228 (TRBV20-1, TRBJ2-5)
CSARDGRAGEAQYF

SEQ ID NO: 76457 - protein, 11 aa, Homo sapiens
  CDR3 for alpha chain variable domain of TCR clone 38229 (TRAV17, TRAJ9)
CATTGGFKTIF

SEQ ID NO: 76458 - protein, 14 aa, Homo sapiens
  CDR3 for beta chain variable domain of TCR clone 38229 (TRBV7-9, TRBJ2-2)
CASSGRADTGELFF

SEQ ID NO: 76459 - protein, 13 aa, Homo sapiens
  CDR3 for alpha chain variable domain of TCR clone 38230 (TRAV8-6, TRAJ49)
CDVITNTGNQFYF

SEQ ID NO: 76460 - protein, 14 aa, Homo sapiens
  CDR3 for beta chain variable domain of TCR clone 38230 (TRBV5-1, TRBJ2-7)
CASSRGESLYEQYF

SEQ ID NO: 76461 - protein, 14 aa, Homo sapiens
  CDR3 for alpha chain variable domain of TCR clone 38231 (TRAV12-3, TRAJ9)
CAMSPNTGGFKTIF

SEQ ID NO: 76462 - protein, 15 aa, Homo sapiens
  CDR3 for beta chain variable domain of TCR clone 38231 (TRBV4-1, TRBJ1-4)
CASSDTGGTNEKLFF

SEQ ID NO: 76463 - protein, 13 aa, Homo sapiens
  CDR3 for alpha chain variable domain of TCR clone 38232 (TRAV3, TRAJ27)
CAVRPLGAGKSTF

SEQ ID NO: 76464 - protein, 15 aa, Homo sapiens
  CDR3 for beta chain variable domain of TCR clone 38232 (TRBV19, TRBJ1-6)
CASSTQGAVGSPLHF

SEQ ID NO: 76465 - protein, 13 aa, Homo sapiens
  CDR3 for alpha chain variable domain of TCR clone 38233 (TRAV2, TRAJ15)
CAVASQAGTALIF

SEQ ID NO: 76466 - protein, 16 aa, Homo sapiens
  CDR3 for beta chain variable domain of TCR clone 38233 (TRBV3-1, TRBJ2-7)
CASSQGATGVAYEQYF

SEQ ID NO: 76467 - protein, 13 aa, Homo sapiens
  CDR3 for alpha chain variable domain of TCR clone 38234 (TRAV8-3, TRAJ48)
CAVLPFGNEKLTF

SEQ ID NO: 76468 - protein, 15 aa, Homo sapiens
  CDR3 for beta chain variable domain of TCR clone 38234 (TRBV11-2, TRBJ2-1)
CASSSPSTRYNEQFF

SEQ ID NO: 76469 - protein, 14 aa, Homo sapiens
  CDR3 for alpha chain variable domain of TCR clone 38235 (TRAV1-2, TRAJ8)
CAVREDTGFQKLVF

SEQ ID NO: 76470 - protein, 15 aa, Homo sapiens
  CDR3 for beta chain variable domain of TCR clone 38235 (TRBV19, TRBJ2-1)
CASSISSGGYNEQFF

SEQ ID NO: 76471 - protein, 12 aa, Homo sapiens
  CDR3 for alpha chain variable domain of TCR clone 38236 (TRAV12-2, TRAJ21)
CAVNRNLNKFYF

SEQ ID NO: 76472 - protein, 14 aa, Homo sapiens
  CDR3 for beta chain variable domain of TCR clone 38236 (TRBV12-4, TRBJ2-3)
CASSLSGATDTQYF

SEQ ID NO: 76473 - protein, 12 aa, Homo sapiens
  CDR3 for alpha chain variable domain of TCR clone 38237 (TRAV12-3, TRAJ17)
CAMTLTGNKLTF

SEQ ID NO: 76474 - protein, 13 aa, Homo sapiens
  CDR3 for beta chain variable domain of TCR clone 38237 (TRBV7-7, TRBJ2-5)
CASSRSGQETQYF

SEQ ID NO: 76475 - protein, 14 aa, Homo sapiens
  CDR3 for alpha chain variable domain of TCR clone 38238 (TRAV1-2, TRAJ16)
CAVNRFSDGQKLLF

SEQ ID NO: 76476 - protein, 14 aa, Homo sapiens
  CDR3 for beta chain variable domain of TCR clone 38238 (TRBV19, TRBJ2-1)
CASPTFVVSGEQFF

SEQ ID NO: 76477 - protein, 14 aa, Homo sapiens
  CDR3 for alpha chain variable domain of TCR clone 38239 (TRAV1-2, TRAJ8)
CAAREDTGFQKLVF

SEQ ID NO: 76478 - protein, 16 aa, Homo sapiens
  CDR3 for beta chain variable domain of TCR clone 38239 (TRBV19, TRBJ2-1)
CASSKAGPSSYNEQFF

SEQ ID NO: 76479 - protein, 13 aa, Homo sapiens
  CDR3 for alpha chain variable domain of TCR clone 38240 (TRAV36/DV7, TRAJ54)
CAVDIQGAQKLLF

SEQ ID NO: 76480 - protein, 14 aa, Homo sapiens
  CDR3 for beta chain variable domain of TCR clone 38240 (TRBV19, TRBJ2-7)
CASNFRDTFTGMYF

SEQ ID NO: 76481 - protein, 12 aa, Homo sapiens
  CDR3 for alpha chain variable domain of TCR clone 38241 (TRAV36/DV7, TRAJ40)
CAVGTGTYKYIF

SEQ ID NO: 76482 - protein, 15 aa, Homo sapiens
  CDR3 for beta chain variable domain of TCR clone 38241 (TRBV5-1, TRBJ2-3)
CASSVTSGSTDTQYF

SEQ ID NO: 76483 - protein, 14 aa, Homo sapiens
  CDR3 for alpha chain variable domain of TCR clone 38242 (TRAV17, TRAJ56)
CATVSAGANSKLTF

SEQ ID NO: 76484 - protein, 13 aa, Homo sapiens
  CDR3 for beta chain variable domain of TCR clone 38242 (TRBV12-4, TRBJ2-2)
CASSITGSGELFF

SEQ ID NO: 76485 - protein, 11 aa, Homo sapiens
  CDR3 for alpha chain variable domain of TCR clone 38243 (TRAV2, TRAJ33)
CAVDSNYQLIW

SEQ ID NO: 76486 - protein, 11 aa, Homo sapiens
  CDR3 for beta chain variable domain of TCR clone 38243 (TRBV6-3, TRBJ2-3)
CATGQADTQYF

SEQ ID NO: 76487 - protein, 13 aa, Homo sapiens
  CDR3 for alpha chain variable domain of TCR clone 38244 (TRAV20, TRAJ34)
CAVSSYNTDKLIF

SEQ ID NO: 76488 - protein, 13 aa, Homo sapiens
  CDR3 for beta chain variable domain of TCR clone 38244 (TRBV7-9, TRBJ1-2)
CASSLKQDYGYTF

SEQ ID NO: 76489 - protein, 14 aa, Homo sapiens
  CDR3 for alpha chain variable domain of TCR clone 38245 (TRAV12-2, TRAJ40)
CAVKIPSGTYKYIF

SEQ ID NO: 76490 - protein, 14 aa, Homo sapiens
  CDR3 for beta chain variable domain of TCR clone 38245 (TRBV20-1, TRBJ1-1)
CSAQTRIGGSEAFF

SEQ ID NO: 76491 - protein, 17 aa, Homo sapiens
  CDR3 for alpha chain variable domain of TCR clone 38246 (TRAV4, TRAJ13)
CLVGVRGSSGGYQKVTF

SEQ ID NO: 76492 - protein, 16 aa, Homo sapiens
  CDR3 for beta chain variable domain of TCR clone 38246 (TRBV28, TRBJ2-7)
CASSLFFETGGPEQYF

SEQ ID NO: 76493 - protein, 15 aa, Homo sapiens
  CDR3 for alpha chain variable domain of TCR clone 38247 (TRAV8-4, TRAJ3)
CAVTGENLVQQCFQD

SEQ ID NO: 76494 - protein, 15 aa, Homo sapiens
  CDR3 for beta chain variable domain of TCR clone 38247 (TRBV27, TRBJ2-1)
CASSNGGGSSNEQFF

SEQ ID NO: 76495 - protein, 15 aa, Homo sapiens
  CDR3 for alpha chain variable domain of TCR clone 38248 (TRAV12-3, TRAJ6)
CAMSATTGGGYLPTF

SEQ ID NO: 76496 - protein, 16 aa, Homo sapiens
  CDR3 for beta chain variable domain of TCR clone 38248 (TRBV20-1, TRBJ1-2)
CSASMGQGVANYGYTF

SEQ ID NO: 76497 - protein, 14 aa, Homo sapiens
  CDR3 for alpha chain variable domain of TCR clone 38249 (TRAV13-1, TRAJ40)
CSASMTSGTYKYIF

SEQ ID NO: 76498 - protein, 15 aa, Homo sapiens
  CDR3 for beta chain variable domain of TCR clone 38249 (TRBV7-3, TRBJ2-1)
CASSPTGGGEVEQFF

SEQ ID NO: 76499 - protein, 18 aa, Homo sapiens
  CDR3 for alpha chain variable domain of TCR clone 38250 (TRAV26-1, TRAJ39)
CIVRPPDLYNNAGNMLIF

SEQ ID NO: 76500 - protein, 15 aa, Homo sapiens
  CDR3 for beta chain variable domain of TCR clone 38250 (TRBV7-4, TRBJ1-2)
CQQPLTGGLSYGYTF

SEQ ID NO: 76501 - protein, 15 aa, Homo sapiens
  CDR3 for alpha chain variable domain of TCR clone 38251 (TRAV8-3, TRAJ40)
CAAPFLGSGTYKYIF

SEQ ID NO: 76502 - protein, 16 aa, Homo sapiens
  CDR3 for beta chain variable domain of TCR clone 38251 (TRBV7-3, TRBJ2-3)
CASSLSGYRPEDTQYF

SEQ ID NO: 76503 - protein, 11 aa, Homo sapiens
  CDR3 for alpha chain variable domain of TCR clone 38252 (TRAV1-1, TRAJ23)
CAVRQGGKLIF

SEQ ID NO: 76504 - protein, 20 aa, Homo sapiens
  CDR3 for beta chain variable domain of TCR clone 38252 (TRBV7-8, TRBJ2-2)
CASSHLFPGPTIHSTGELFF

SEQ ID NO: 76505 - protein, 12 aa, Homo sapiens
  CDR3 for alpha chain variable domain of TCR clone 38253 (TRAV38-2/DV8, TRAJ57)
CAWKGGSEKLVF

SEQ ID NO: 76506 - protein, 13 aa, Homo sapiens
  CDR3 for beta chain variable domain of TCR clone 38253 (TRBV5-1, TRBJ1-5)
CVSSLAQDQPQHF

SEQ ID NO: 76507 - protein, 14 aa, Homo sapiens
  CDR3 for alpha chain variable domain of TCR clone 38254 (TRAV35, TRAJ13)
CAGSPSWGYQKVTF

SEQ ID NO: 76508 - protein, 13 aa, Homo sapiens
  CDR3 for beta chain variable domain of TCR clone 38254 (TRBV29-1, TRBJ1-1)
CSVGDSRNTEAFF

SEQ ID NO: 76509 - protein, 12 aa, Homo sapiens
  CDR3 for alpha chain variable domain of TCR clone 38255 (TRAV12-3, TRAJ20)
CAMVRGDYKLSF

SEQ ID NO: 76510 - protein, 15 aa, Homo sapiens
  CDR3 for beta chain variable domain of TCR clone 38255 (TRBV11-3, TRBJ2-3)
CASSAGTVVTNTQYF

SEQ ID NO: 76511 - protein, 14 aa, Homo sapiens
  CDR3 for alpha chain variable domain of TCR clone 38256 (TRAV17, TRAJ57)
CATDPQGGSEKLVF

SEQ ID NO: 76512 - protein, 15 aa, Homo sapiens
  CDR3 for beta chain variable domain of TCR clone 38256 (TRBV12-4, TRBJ2-5)
CASSPPTGLQETQYF

SEQ ID NO: 76513 - protein, 14 aa, Homo sapiens
  CDR3 for alpha chain variable domain of TCR clone 38257 (TRAV1-2, TRAJ8)
CAVREDTGFQKLVF

SEQ ID NO: 76514 - protein, 13 aa, Homo sapiens
  CDR3 for beta chain variable domain of TCR clone 38257 (TRBV24-1, TRBJ2-2)
CATSDWSPGELFF

SEQ ID NO: 76515 - protein, 14 aa, Homo sapiens
  CDR3 for alpha chain variable domain of TCR clone 38258 (TRAV26-1, TRAJ39)
CIVRGSRAGNMLTF

SEQ ID NO: 76516 - protein, 15 aa, Homo sapiens
  CDR3 for beta chain variable domain of TCR clone 38258 (TRBV7-9, TRBJ1-5)
CDSSQGHQPNQPQHF

SEQ ID NO: 76517 - protein, 14 aa, Homo sapiens
  CDR3 for alpha chain variable domain of TCR clone 38259 (TRAV1-2, TRAJ8)
CAVGEDTGFQKLVF

SEQ ID NO: 76518 - protein, 16 aa, Homo sapiens
  CDR3 for beta chain variable domain of TCR clone 38259 (TRBV20-1, TRBJ1-4)
CSAPGQGLLTNEKLFF

SEQ ID NO: 76519 - protein, 13 aa, Homo sapiens
  CDR3 for alpha chain variable domain of TCR clone 38260 (TRAV3, TRAJ27)
CAVRPLGAGKSTF

SEQ ID NO: 76520 - protein, 13 aa, Homo sapiens
  CDR3 for beta chain variable domain of TCR clone 38260 (TRBV9, TRBJ2-5)
CASSPAGLGTQYF

SEQ ID NO: 76521 - protein, 12 aa, Homo sapiens
  CDR3 for alpha chain variable domain of TCR clone 38261 (TRAV17, TRAJ20)
CATYSNDYKFSF

SEQ ID NO: 76522 - protein, 11 aa, Homo sapiens
  CDR3 for beta chain variable domain of TCR clone 38261 (TRBV4-1, TRBJ2-2)
CASEHTGELFF

SEQ ID NO: 76523 - protein, 13 aa, Homo sapiens
  CDR3 for alpha chain variable domain of TCR clone 38262 (TRAV13-2, TRAJ13)
CAERPGGYQKVTF

SEQ ID NO: 76524 - protein, 16 aa, Homo sapiens
  CDR3 for beta chain variable domain of TCR clone 38262 (TRBV2, TRBJ2-3)
CASSTSVEGVTDTQYF

SEQ ID NO: 76525 - protein, 14 aa, Homo sapiens
  CDR3 for alpha chain variable domain of TCR clone 38263 (TRAV2, TRAJ37)
CAVDFTCNTGKLIF

SEQ ID NO: 76526 - protein, 13 aa, Homo sapiens
  CDR3 for beta chain variable domain of TCR clone 38263 (TRBV20-1, TRBJ1-1)
CSAPLGGGTEAFF

SEQ ID NO: 76527 - protein, 15 aa, Homo sapiens
  CDR3 for alpha chain variable domain of TCR clone 38264 (TRAV26-1, TRAJ40)
CIVRVATSGTYKYIF

SEQ ID NO: 76528 - protein, 12 aa, Homo sapiens
  CDR3 for beta chain variable domain of TCR clone 38264 (TRBV7-9, TRBJ1-4)
CASSTDREKLFF

SEQ ID NO: 76529 - protein, 15 aa, Homo sapiens
  CDR3 for alpha chain variable domain of TCR clone 38265 (TRAV17, TRAJ56)
CATEPFTGANSKLTF

SEQ ID NO: 76530 - protein, 14 aa, Homo sapiens
  CDR3 for beta chain variable domain of TCR clone 38265 (TRBV19, TRBJ2-1)
CASPTVVLSGEQFF

SEQ ID NO: 76531 - protein, 11 aa, Homo sapiens
  CDR3 for alpha chain variable domain of TCR clone 38266 (TRAV12-2, TRAJ39)
CAVNNMLTFGG

SEQ ID NO: 76532 - protein, 18 aa, Homo sapiens
  CDR3 for beta chain variable domain of TCR clone 38266 (TRBV11-2, TRBJ2-6)
CASSLNPFLGTGANVLTF

SEQ ID NO: 76533 - protein, 13 aa, Homo sapiens
  CDR3 for alpha chain variable domain of TCR clone 38267 (TRAV21, TRAJ20)
CAVGVFADYKLSF

SEQ ID NO: 76534 - protein, 12 aa, Homo sapiens
  CDR3 for beta chain variable domain of TCR clone 38267 (TRBV11-2, TRBJ2-1)
CASSPGNNEKFF

SEQ ID NO: 76535 - protein, 15 aa, Homo sapiens
  CDR3 for alpha chain variable domain of TCR clone 38268 (TRAV17, TRAJ16)
CATALRFSDGQKLLF

SEQ ID NO: 76536 - protein, 15 aa, Homo sapiens
  CDR3 for beta chain variable domain of TCR clone 38268 (TRBV20-1, TRBJ1-1)
CSASRGVTGNTEAVF

SEQ ID NO: 76537 - protein, 12 aa, Homo sapiens
  CDR3 for alpha chain variable domain of TCR clone 38269 (TRAV12-1, TRAJ39)
CVVREAGNMLTF

SEQ ID NO: 76538 - protein, 15 aa, Homo sapiens
  CDR3 for beta chain variable domain of TCR clone 38269 (TRBV5-1, TRBJ2-2)
CASSLRQGDTGELSF

SEQ ID NO: 76539 - protein, 11 aa, Homo sapiens
  CDR3 for alpha chain variable domain of TCR clone 38270 (TRAV12-3, TRAJ49)
CAANTGNQFYF

SEQ ID NO: 76540 - protein, 14 aa, Homo sapiens
  CDR3 for beta chain variable domain of TCR clone 38270 (TRBV7-2, TRBJ2-7)
CASSPKTSFYEQYF

SEQ ID NO: 76541 - protein, 11 aa, Homo sapiens
  CDR3 for alpha chain variable domain of TCR clone 38271 (TRAV3, TRAJ13)
CAVTSYQKVTF

SEQ ID NO: 76542 - protein, 15 aa, Homo sapiens
  CDR3 for beta chain variable domain of TCR clone 38271 (TRBV7-9, TRBJ2-7)
CASSSSGPAVYEQYF

SEQ ID NO: 76543 - protein, 12 aa, Homo sapiens
  CDR3 for alpha chain variable domain of TCR clone 38272 (TRAV12-2, TRAJ21)
CAVRYNFNKFYF

SEQ ID NO: 76544 - protein, 14 aa, Homo sapiens
  CDR3 for beta chain variable domain of TCR clone 38272 (TRBV28, TRBJ2-1)
CASRYYTAYNEQFF

SEQ ID NO: 76545 - protein, 13 aa, Homo sapiens
  CDR3 for alpha chain variable domain of TCR clone 38273 (TRAV2, TRAJ40)
CAVVTSGTYKYIF

SEQ ID NO: 76546 - protein, 15 aa, Homo sapiens
  CDR3 for beta chain variable domain of TCR clone 38273 (TRBV11-3, TRBJ2-3)
CACLKDGREGDTQYF

SEQ ID NO: 76547 - protein, 14 aa, Homo sapiens
  CDR3 for alpha chain variable domain of TCR clone 38274 (TRAV12-2, TRAJ53)
CAVKGGGSNYKLTL

SEQ ID NO: 76548 - protein, 14 aa, Homo sapiens
  CDR3 for beta chain variable domain of TCR clone 38274 (TRBV7-7, TRBJ2-2)
CATRQDSDTGELFF

SEQ ID NO: 76549 - protein, 20 aa, Homo sapiens
  CDR3 for alpha chain variable domain of TCR clone 38275 (TRAV12-1, TRAJ42)
CSVIQPPTSVKGGSQGNLIF

SEQ ID NO: 76550 - protein, 18 aa, Homo sapiens
  CDR3 for beta chain variable domain of TCR clone 38275 (TRBV11-2, TRBJ2-3)
CASSLGGASRGAPNTQYF

SEQ ID NO: 76551 - protein, 11 aa, Homo sapiens
  CDR3 for alpha chain variable domain of TCR clone 38276 (TRAV12-3, TRAJ49)
CAANTGNQFYF

SEQ ID NO: 76552 - protein, 15 aa, Homo sapiens
  CDR3 for beta chain variable domain of TCR clone 38276 (TRBV20-1, TRBJ2-7)
CSARDRVSGMDEQYF

SEQ ID NO: 76553 - protein, 14 aa, Homo sapiens
  CDR3 for alpha chain variable domain of TCR clone 38277 (TRAV9-2, TRAJ39)
CALYIYNAGNMLTF

SEQ ID NO: 76554 - protein, 13 aa, Homo sapiens
  CDR3 for beta chain variable domain of TCR clone 38277 (TRBV25-1, TRBJ1-1)
CQHPPGGNTEAFF

SEQ ID NO: 76555 - protein, 13 aa, Homo sapiens
  CDR3 for alpha chain variable domain of TCR clone 38278 (TRAV27, TRAJ45)
CRSSGGGADGLTF

SEQ ID NO: 76556 - protein, 17 aa, Homo sapiens
  CDR3 for beta chain variable domain of TCR clone 38278 (TRBV11-2, TRBJ2-1)
CANSLYPPGVEYNEQFF

SEQ ID NO: 76557 - protein, 14 aa, Homo sapiens
  CDR3 for alpha chain variable domain of TCR clone 38279 (TRAV1-1, TRAJ27)
CAVIYNTNAGKSTF

SEQ ID NO: 76558 - protein, 16 aa, Homo sapiens
  CDR3 for beta chain variable domain of TCR clone 38279 (TRBV7-3, TRBJ2-2)
CASSLKRGTLSGELFF

SEQ ID NO: 76559 - protein, 14 aa, Homo sapiens
  CDR3 for alpha chain variable domain of TCR clone 38280 (TRAV23/DV6, TRAJ4)
CAANLSGGYNNLIF

SEQ ID NO: 76560 - protein, 11 aa, Homo sapiens
  CDR3 for beta chain variable domain of TCR clone 38280 (TRBV7-9, TRBJ2-3)
CASSPTDTQYF

SEQ ID NO: 76561 - protein, 14 aa, Homo sapiens
  CDR3 for alpha chain variable domain of TCR clone 38281 (TRAV20, TRAJ20)
CAVRRGYNDYKLSF

SEQ ID NO: 76562 - protein, 15 aa, Homo sapiens
  CDR3 for beta chain variable domain of TCR clone 38281 (TRBV19, TRBJ1-2)
CASSVGQVLNYGYTF

SEQ ID NO: 76563 - protein, 12 aa, Homo sapiens
  CDR3 for alpha chain variable domain of TCR clone 38282 (TRAV2, TRAJ33)
CAVEDSSYQLIW

SEQ ID NO: 76564 - protein, 14 aa, Homo sapiens
  CDR3 for beta chain variable domain of TCR clone 38282 (TRBV19, TRBJ1-4)
CASSINRGGEKLFF

SEQ ID NO: 76565 - protein, 11 aa, Homo sapiens
  CDR3 for alpha chain variable domain of TCR clone 38283 (TRAV4, TRAJ31)
CLVGDNARLMF

SEQ ID NO: 76566 - protein, 16 aa, Homo sapiens
  CDR3 for beta chain variable domain of TCR clone 38283 (TRBV7-2, TRBJ2-5)
CASSSKWLSGHETQYF

SEQ ID NO: 76567 - protein, 11 aa, Homo sapiens
  CDR3 for alpha chain variable domain of TCR clone 38284 (TRAV3, TRAJ21)
CAVGNFNKFYF

SEQ ID NO: 76568 - protein, 17 aa, Homo sapiens
  CDR3 for beta chain variable domain of TCR clone 38284 (TRBV24-1, TRBJ2-1)
CANSDVSTSGTYNEQFF

SEQ ID NO: 76569 - protein, 14 aa, Homo sapiens
  CDR3 for alpha chain variable domain of TCR clone 38285 (TRAV17, TRAJ57)
CATDTQGGSEKLVF

SEQ ID NO: 76570 - protein, 16 aa, Homo sapiens
  CDR3 for beta chain variable domain of TCR clone 38285 (TRBV27, TRBJ2-2)
CASSFRGLVRTGELFF

SEQ ID NO: 76571 - protein, 14 aa, Homo sapiens
  CDR3 for alpha chain variable domain of TCR clone 38286 (TRAV12-2, TRAJ24)
CAVTPADSWGNLQF

SEQ ID NO: 76572 - protein, 12 aa, Homo sapiens
  CDR3 for beta chain variable domain of TCR clone 38286 (TRBV3-1, TRBJ2-1)
CASSQGSSGQFF

SEQ ID NO: 76573 - protein, 14 aa, Homo sapiens
  CDR3 for alpha chain variable domain of TCR clone 38287 (TRAV17, TRAJ16)
CATADFSDGQKLLF

SEQ ID NO: 76574 - protein, 15 aa, Homo sapiens
  CDR3 for beta chain variable domain of TCR clone 38287 (TRBV18, TRBJ2-1)
CASSPPSAYYNEQFF

SEQ ID NO: 76575 - protein, 14 aa, Homo sapiens
  CDR3 for alpha chain variable domain of TCR clone 38288 (TRAV13-1, TRAJ44)
CAAKATGTASKLTF

SEQ ID NO: 76576 - protein, 13 aa, Homo sapiens
  CDR3 for beta chain variable domain of TCR clone 38288 (TRBV7-2, TRBJ2-2)
CASSLAVTGELFF

SEQ ID NO: 76577 - protein, 11 aa, Homo sapiens
  CDR3 for alpha chain variable domain of TCR clone 38289 (TRAV17, TRAJ9)
CGFTGGFKTIF

SEQ ID NO: 76578 - protein, 20 aa, Homo sapiens
  CDR3 for beta chain variable domain of TCR clone 38289 (TRBV7-8, TRBJ2-2)
CASSHLFPGPTIHITGELFF

SEQ ID NO: 76579 - protein, 13 aa, Homo sapiens
  CDR3 for alpha chain variable domain of TCR clone 38290 (TRAV8-3, TRAJ28)
CAVGAVGSYQLTF

SEQ ID NO: 76580 - protein, 14 aa, Homo sapiens
  CDR3 for beta chain variable domain of TCR clone 38290 (TRBV7-2, TRBJ2-7)
CASRAQGAAYEQYF

SEQ ID NO: 76581 - protein, 16 aa, Homo sapiens
  CDR3 for alpha chain variable domain of TCR clone 38291 (TRAV23/DV6, TRAJ9)
CAASIGGNTGGFKTIL

SEQ ID NO: 76582 - protein, 15 aa, Homo sapiens
  CDR3 for beta chain variable domain of TCR clone 38291 (TRBV6-3, TRBJ2-7)
CASSSPGTVLYEQYF

SEQ ID NO: 76583 - protein, 17 aa, Homo sapiens
  CDR3 for alpha chain variable domain of TCR clone 38292 (TRAV3, TRAJ6)
CAVRDGPRAGGSYIPTF

SEQ ID NO: 76584 - protein, 14 aa, Homo sapiens
  CDR3 for beta chain variable domain of TCR clone 38292 (TRBV7-2, TRBJ2-5)
CASSLFGREETQYF

SEQ ID NO: 76585 - protein, 18 aa, Homo sapiens
  CDR3 for alpha chain variable domain of TCR clone 38293 (TRAV21, TRAJ52)
CAVRPSPAVGTSYGKLTF

SEQ ID NO: 76586 - protein, 13 aa, Homo sapiens
  CDR3 for beta chain variable domain of TCR clone 38293 (TRBV7-3, TRBJ1-1)
CASSQDWGAEAFF

SEQ ID NO: 76587 - protein, 16 aa, Homo sapiens
  CDR3 for alpha chain variable domain of TCR clone 38294 (TRAV12-1, TRAJ13)
CVMNLEVSGGYQKVTF

SEQ ID NO: 76588 - protein, 16 aa, Homo sapiens
  CDR3 for beta chain variable domain of TCR clone 38294 (TRBV24-1, TRBJ2-6)
CATSDRRASGANVLTF

SEQ ID NO: 76589 - protein, 13 aa, Homo sapiens
  CDR3 for alpha chain variable domain of TCR clone 38295 (TRAV21, TRAJ27)
CAARPVNAGKSTF

SEQ ID NO: 76590 - protein, 14 aa, Homo sapiens
  CDR3 for beta chain variable domain of TCR clone 38295 (TRBV11-2, TRBJ2-7)
CASSLGAGAYEQYF

SEQ ID NO: 76591 - protein, 14 aa, Homo sapiens
  CDR3 for alpha chain variable domain of TCR clone 38296 (TRAV12-2, TRAJ45)
CALPERGGAYGLTF

SEQ ID NO: 76592 - protein, 14 aa, Homo sapiens
  CDR3 for beta chain variable domain of TCR clone 38296 (TRBV18, TRBJ1-5)
CASSPGNSNQPQHF

SEQ ID NO: 76593 - protein, 13 aa, Homo sapiens
  CDR3 for alpha chain variable domain of TCR clone 38297 (TRAV13-1, TRAJ21)
CAASIYNFNKFYF

SEQ ID NO: 76594 - protein, 15 aa, Homo sapiens
  CDR3 for beta chain variable domain of TCR clone 38297 (TRBV5-5, TRBJ1-5)
CASSLKGGGEQPQRF

SEQ ID NO: 76595 - protein, 11 aa, Homo sapiens
  CDR3 for alpha chain variable domain of TCR clone 38298 (TRAV3, TRAJ21)
CAVGNFNKFYF

SEQ ID NO: 76596 - protein, 16 aa, Homo sapiens
  CDR3 for beta chain variable domain of TCR clone 38298 (TRBV19, TRBJ2-1)
CASSKAGRSSYNEQFF

SEQ ID NO: 76597 - protein, 13 aa, Homo sapiens
  CDR3 for alpha chain variable domain of TCR clone 38299 (TRAV13-1, TRAJ33)
CVASRAGNYQLIW

SEQ ID NO: 76598 - protein, 15 aa, Homo sapiens
  CDR3 for beta chain variable domain of TCR clone 38299 (TRBV2, TRBJ2-7)
EDSAMYFCASSEQYF

SEQ ID NO: 76599 - protein, 15 aa, Homo sapiens
  CDR3 for alpha chain variable domain of TCR clone 38300 (TRAV12-3, TRAJ6)
CAMSATTGGSYIPTF

SEQ ID NO: 76600 - protein, 16 aa, Homo sapiens
  CDR3 for beta chain variable domain of TCR clone 38300 (TRBV12-4, TRBJ1-5)
CASSRPVGGSNQPQHF

SEQ ID NO: 76601 - protein, 13 aa, Homo sapiens
  CDR3 for alpha chain variable domain of TCR clone 38301 (TRAV8-3, TRAJ28)
CAVGAVGSYQLTF

SEQ ID NO: 76602 - protein, 15 aa, Homo sapiens
  CDR3 for beta chain variable domain of TCR clone 38301 (TRBV4-1, TRBJ1-4)
CASSDTGGTNEKLFF

SEQ ID NO: 76603 - protein, 15 aa, Homo sapiens
  CDR3 for alpha chain variable domain of TCR clone 38302 (TRAV17, TRAJ23)
CATDAEDNQGGKPIL

SEQ ID NO: 76604 - protein, 12 aa, Homo sapiens
  CDR3 for beta chain variable domain of TCR clone 38302 (TRBV2, TRBJ2-1)
CAKREGYNEQFF

SEQ ID NO: 76605 - protein, 18 aa, Homo sapiens
  CDR3 for alpha chain variable domain of TCR clone 38303 (TRAV17, TRAJ45)
CATSLDLYSGGGADGLTL

SEQ ID NO: 76606 - protein, 15 aa, Homo sapiens
  CDR3 for beta chain variable domain of TCR clone 38303 (TRBV11-2, TRBJ2-1)
CASSKNRGLIYEQFF

SEQ ID NO: 76607 - protein, 12 aa, Homo sapiens
  CDR3 for alpha chain variable domain of TCR clone 38304 (TRAV2, TRAJ34)
CAVERNTDKLTF

SEQ ID NO: 76608 - protein, 14 aa, Homo sapiens
  CDR3 for beta chain variable domain of TCR clone 38304 (TRBV7-9, TRBJ2-1)
CASSDNSGYNEQFF

SEQ ID NO: 76609 - protein, 12 aa, Homo sapiens
  CDR3 for alpha chain variable domain of TCR clone 38305 (TRAV30, TRAJ43)
FGTEERGNDMRF

SEQ ID NO: 76610 - protein, 13 aa, Homo sapiens
  CDR3 for beta chain variable domain of TCR clone 38305 (TRBV27, TRBJ2-7)
CASSFSQGYEQYF

SEQ ID NO: 76611 - protein, 15 aa, Homo sapiens
  CDR3 for alpha chain variable domain of TCR clone 38306 (TRAV35, TRAJ20)
CAGQLVGSNDYKLSF

SEQ ID NO: 76612 - protein, 13 aa, Homo sapiens
  CDR3 for beta chain variable domain of TCR clone 38306 (TRBV19, TRBJ2-7)
CASSKAGTHEQYF

SEQ ID NO: 76613 - protein, 14 aa, Homo sapiens
  CDR3 for alpha chain variable domain of TCR clone 38307 (TRAV12-1, TRAJ30)
CVVNIGNRDDKIIF

SEQ ID NO: 76614 - protein, 14 aa, Homo sapiens
  CDR3 for beta chain variable domain of TCR clone 38307 (TRBV7-9, TRBJ2-5)
CARSPRPSGETQYF

SEQ ID NO: 76615 - protein, 16 aa, Homo sapiens
  CDR3 for alpha chain variable domain of TCR clone 38308 (TRAV16, TRAJ4)
CALSRMFSGGYNKLIF

SEQ ID NO: 76616 - protein, 14 aa, Homo sapiens
  CDR3 for beta chain variable domain of TCR clone 38308 (TRBV5-1, TRBJ2-7)
CASSRGESLYEQYF

SEQ ID NO: 76617 - protein, 12 aa, Homo sapiens
  CDR3 for alpha chain variable domain of TCR clone 38309 (TRAV12-1, TRAJ34)
CVVAGATAKLIF

SEQ ID NO: 76618 - protein, 12 aa, Homo sapiens
  CDR3 for beta chain variable domain of TCR clone 38309 (TRBV7-9, TRBJ1-1)
CASSLVRGEAFF

SEQ ID NO: 76619 - protein, 13 aa, Homo sapiens
  CDR3 for alpha chain variable domain of TCR clone 38310 (TRAV8-3, TRAJ21)
CAVGAYNFNKFYF

SEQ ID NO: 76620 - protein, 15 aa, Homo sapiens
  CDR3 for beta chain variable domain of TCR clone 38310 (TRBV20-1, TRBJ2-7)
CSARDRVSGMDEQYF

SEQ ID NO: 76621 - protein, 11 aa, Homo sapiens
  CDR3 for alpha chain variable domain of TCR clone 38311 (TRAV27, TRAJ45)
CAGAQEEVLTD

SEQ ID NO: 76622 - protein, 15 aa, Homo sapiens
  CDR3 for beta chain variable domain of TCR clone 38311 (TRBV12-4, TRBJ2-5)
CASSPPTGLQETQYF

SEQ ID NO: 76623 - protein, 15 aa, Homo sapiens
  CDR3 for alpha chain variable domain of TCR clone 38312 (TRAV25, TRAJ52)
CAGRPGGTSYGKLTF

SEQ ID NO: 76624 - protein, 14 aa, Homo sapiens
  CDR3 for beta chain variable domain of TCR clone 38312 (TRBV6-1, TRBJ1-3)
CASVQGGGGNTIYF

SEQ ID NO: 76625 - protein, 20 aa, Homo sapiens
  CDR3 for alpha chain variable domain of TCR clone 38313 (TRAV26-1, TRAJ42)
CCVLLHRQTYYGGSQGNLIF

SEQ ID NO: 76626 - protein, 16 aa, Homo sapiens
  CDR3 for beta chain variable domain of TCR clone 38313 (TRBV4-1, TRBJ1-1)
CASSSMSERPNNEAFF

SEQ ID NO: 76627 - protein, 12 aa, Homo sapiens
  CDR3 for alpha chain variable domain of TCR clone 38314 (TRAV21, TRAJ31)
CVLAGNNARLIF

SEQ ID NO: 76628 - protein, 16 aa, Homo sapiens
  CDR3 for beta chain variable domain of TCR clone 38314 (TRBV27, TRBJ2-5)
CASSFGPGGTKETQYF

SEQ ID NO: 76629 - protein, 13 aa, Homo sapiens
  CDR3 for alpha chain variable domain of TCR clone 38315 (TRAV12-1, TRAJ31)
CVVNMNNNARLMF

SEQ ID NO: 76630 - protein, 13 aa, Homo sapiens
  CDR3 for beta chain variable domain of TCR clone 38315 (TRBV4-2, TRBJ1-1)
CASSQAGNTEAFF

SEQ ID NO: 76631 - protein, 12 aa, Homo sapiens
  CDR3 for alpha chain variable domain of TCR clone 38316 (TRAV17, TRAJ20)
CATDANDYKLGF

SEQ ID NO: 76632 - protein, 17 aa, Homo sapiens
  CDR3 for beta chain variable domain of TCR clone 38316 (TRBV5-1, TRBJ2-2)
CASSMAGLAGGTGELFF

SEQ ID NO: 76633 - protein, 11 aa, Homo sapiens
  CDR3 for alpha chain variable domain of TCR clone 38317 (TRAV3, TRAJ21)
CAVGNFNKFYF

SEQ ID NO: 76634 - protein, 12 aa, Homo sapiens
  CDR3 for beta chain variable domain of TCR clone 38317 (TRBV7-9, TRBJ2-7)
CASSIKREEQYF

SEQ ID NO: 76635 - protein, 14 aa, Homo sapiens
  CDR3 for alpha chain variable domain of TCR clone 38318 (TRAV13-1, TRAJ44)
CAAKATGTASKLPF

SEQ ID NO: 76636 - protein, 13 aa, Homo sapiens
  CDR3 for beta chain variable domain of TCR clone 38318 (TRBV5-5, TRBJ1-2)
CASSFWRGEDYTF

SEQ ID NO: 76637 - protein, 10 aa, Homo sapiens
  CDR3 for alpha chain variable domain of TCR clone 38319 (TRAV30, TRAJ48)
CGIGNEKLTF

SEQ ID NO: 76638 - protein, 14 aa, Homo sapiens
  CDR3 for beta chain variable domain of TCR clone 38319 (TRBV7-6, TRBJ2-3)
CASRVAGGTDTQYF

SEQ ID NO: 76639 - protein, 15 aa, Homo sapiens
  CDR3 for alpha chain variable domain of TCR clone 38320 (TRAV29/DV5, TRAJ39)
CAASGRNNAGNMLTF

SEQ ID NO: 76640 - protein, 14 aa, Homo sapiens
  CDR3 for beta chain variable domain of TCR clone 38320 (TRBV7-3, TRBJ2-1)
CASSLGTSANEQFF

SEQ ID NO: 76641 - protein, 12 aa, Homo sapiens
  CDR3 for alpha chain variable domain of TCR clone 38321 (TRAV35, TRAJ39)
LAPNNAGNMLTF

SEQ ID NO: 76642 - protein, 15 aa, Homo sapiens
  CDR3 for beta chain variable domain of TCR clone 38321 (TRBV2, TRBJ2-3)
CQQHLGGGVTDTQYF

SEQ ID NO: 76643 - protein, 15 aa, Homo sapiens
  CDR3 for alpha chain variable domain of TCR clone 38322 (TRAV25, TRAJ53)
CPTSNSGGSNYKLTF

SEQ ID NO: 76644 - protein, 14 aa, Homo sapiens
  CDR3 for beta chain variable domain of TCR clone 38322 (TRBV11-2, TRBJ2-3)
CASSRLARTDTRYF

SEQ ID NO: 76645 - protein, 23 aa, Homo sapiens
  CDR3 for alpha chain variable domain of TCR clone 38323 (TRAV25, TRAJ41)
CAGLRTQIPDIQNPDPAVYQLRD

SEQ ID NO: 76646 - protein, 16 aa, Homo sapiens
  CDR3 for beta chain variable domain of TCR clone 38323 (TRBV19, TRBJ2-7)
CASSPALGQGLYEQYF

SEQ ID NO: 76647 - protein, 14 aa, Homo sapiens
  CDR3 for alpha chain variable domain of TCR clone 38324 (TRAV17, TRAJ22)
CATSPSGSARQLTF

SEQ ID NO: 76648 - protein, 15 aa, Homo sapiens
  CDR3 for beta chain variable domain of TCR clone 38324 (TRBV4-1, TRBJ2-5)
CASSQWDLHQETQYF

SEQ ID NO: 76649 - protein, 14 aa, Homo sapiens
  CDR3 for alpha chain variable domain of TCR clone 38325 (TRAV1-2, TRAJ16)
CAVNRFSDGQKLLF

SEQ ID NO: 76650 - protein, 15 aa, Homo sapiens
  CDR3 for beta chain variable domain of TCR clone 38325 (TRBV28, TRBJ2-5)
CASSPGQGCIETQYF

SEQ ID NO: 76651 - protein, 14 aa, Homo sapiens
  CDR3 for alpha chain variable domain of TCR clone 38326 (TRAV12-3, TRAJ58)
CAMSTETSGYRLTF

SEQ ID NO: 76652 - protein, 13 aa, Homo sapiens
  CDR3 for beta chain variable domain of TCR clone 38326 (TRBV27, TRBJ2-3)
CASSWGRTDTQYF

SEQ ID NO: 76653 - protein, 10 aa, Homo sapiens
  CDR3 for alpha chain variable domain of TCR clone 38327 (TRAV1-2, TRAJ31)
CAFFDARLMF

SEQ ID NO: 76654 - protein, 13 aa, Homo sapiens
  CDR3 for beta chain variable domain of TCR clone 38327 (TRBV20-1, TRBJ1-1)
CSAPLGGGTEAFF

SEQ ID NO: 76655 - protein, 13 aa, Homo sapiens
  CDR3 for alpha chain variable domain of TCR clone 38328 (TRAV2, TRAJ40)
CAVVTSGTYKYIF

SEQ ID NO: 76656 - protein, 14 aa, Homo sapiens
  CDR3 for beta chain variable domain of TCR clone 38328 (TRBV7-7, TRBJ2-2)
CATRQDSDTGELFF

SEQ ID NO: 76657 - protein, 16 aa, Homo sapiens
  CDR3 for alpha chain variable domain of TCR clone 38329 (TRAV3, TRAJ37)
CAVRRKGSGNTGKLIF

SEQ ID NO: 76658 - protein, 20 aa, Homo sapiens
  CDR3 for beta chain variable domain of TCR clone 38329 (TRBV7-8, TRBJ2-2)
CASSHLFPGPTIHITGELFF

SEQ ID NO: 76659 - protein, 13 aa, Homo sapiens
  CDR3 for alpha chain variable domain of TCR clone 38330 (TRAV3, TRAJ16)
CAVGDRNGQKLLF

SEQ ID NO: 76660 - protein, 15 aa, Homo sapiens
  CDR3 for beta chain variable domain of TCR clone 38330 (TRBV5-1, TRBJ2-1)
CASSPPRAPYNKQFF

SEQ ID NO: 76661 - protein, 15 aa, Homo sapiens
  CDR3 for alpha chain variable domain of TCR clone 38331 (TRAV13-1, TRAJ32)
YAASIYGGATNKLIF

SEQ ID NO: 76662 - protein, 14 aa, Homo sapiens
  CDR3 for beta chain variable domain of TCR clone 38331 (TRBV7-9, TRBJ2-1)
CASSLASGSNEQFF

SEQ ID NO: 76663 - protein, 14 aa, Homo sapiens
  CDR3 for alpha chain variable domain of TCR clone 38332 (TRAV17, TRAJ31)
CAAVLRNNNARLMF

SEQ ID NO: 76664 - protein, 14 aa, Homo sapiens
  CDR3 for beta chain variable domain of TCR clone 38332 (TRBV12-4, TRBJ2-5)
CASSLWQKQETQYF

SEQ ID NO: 76665 - protein, 13 aa, Homo sapiens
  CDR3 for alpha chain variable domain of TCR clone 38333 (TRAV8-3, TRAJ36)
CAVGATGVNNLFF

SEQ ID NO: 76666 - protein, 15 aa, Homo sapiens
  CDR3 for beta chain variable domain of TCR clone 38333 (TRBV7-2, TRBJ1-2)
CASSPRAGWNYGYTF

SEQ ID NO: 76667 - protein, 14 aa, Homo sapiens
  CDR3 for alpha chain variable domain of TCR clone 38334 (TRAV13-1, TRAJ44)
CAAKATGTASKLTF

SEQ ID NO: 76668 - protein, 13 aa, Homo sapiens
  CDR3 for beta chain variable domain of TCR clone 38334 (TRBV19, TRBJ1-5)
CASSARRDQPQHF

SEQ ID NO: 76669 - protein, 12 aa, Homo sapiens
  CDR3 for alpha chain variable domain of TCR clone 38335 (TRAV3, TRAJ7)
CADLLWEQHTRF

SEQ ID NO: 76670 - protein, 13 aa, Homo sapiens
  CDR3 for beta chain variable domain of TCR clone 38335 (TRBV7-3, TRBJ2-5)
CASSFRGGETQYF

SEQ ID NO: 76671 - protein, 18 aa, Homo sapiens
  CDR3 for alpha chain variable domain of TCR clone 38336 (TRAV21, TRAJ52)
CAVRPSPAGGTSYVKLTF

SEQ ID NO: 76672 - protein, 15 aa, Homo sapiens
  CDR3 for beta chain variable domain of TCR clone 38336 (TRBV7-9, TRBJ2-7)
CASSSSGLAVYEQYF

SEQ ID NO: 76673 - protein, 12 aa, Homo sapiens
  CDR3 for alpha chain variable domain of TCR clone 38337 (TRAV12-3, TRAJ20)
CAMVRGDYKLSF

SEQ ID NO: 76674 - protein, 14 aa, Homo sapiens
  CDR3 for beta chain variable domain of TCR clone 38337 (TRBV20-1, TRBJ1-1)
CSAQTRIGGTEAFF

SEQ ID NO: 76675 - protein, 11 aa, Homo sapiens
  CDR3 for alpha chain variable domain of TCR clone 38338 (TRAV21, TRAJ41)
CAVGSGYALNF

SEQ ID NO: 76676 - protein, 13 aa, Homo sapiens
  CDR3 for beta chain variable domain of TCR clone 38338 (TRBV7-9, TRBJ1-2)
CASSLKQNYGYTF

SEQ ID NO: 76677 - protein, 16 aa, Homo sapiens
  CDR3 for alpha chain variable domain of TCR clone 38339 (TRAV3, TRAJ10)
CAMRDMNAGGGNKLTF

SEQ ID NO: 76678 - protein, 16 aa, Homo sapiens
  CDR3 for beta chain variable domain of TCR clone 38339 (TRBV6-3, TRBJ1-2)
CASSYSRRASNYGYTF

SEQ ID NO: 76679 - protein, 14 aa, Homo sapiens
  CDR3 for alpha chain variable domain of TCR clone 38340 (TRAV8-3, TRAJ4)
CAVGAAGGYNKLIF

SEQ ID NO: 76680 - protein, 15 aa, Homo sapiens
  CDR3 for beta chain variable domain of TCR clone 38340 (TRBV6-5, TRBJ2-1)
CASIYDAGAGNEQFF

SEQ ID NO: 76681 - protein, 13 aa, Homo sapiens
  CDR3 for alpha chain variable domain of TCR clone 38341 (TRAV21, TRAJ56)
CAVRLGANSKLTF

SEQ ID NO: 76682 - protein, 12 aa, Homo sapiens
  CDR3 for beta chain variable domain of TCR clone 38341 (TRBV12-4, TRBJ2-3)
CASSSTTDTLYF

SEQ ID NO: 76683 - protein, 13 aa, Homo sapiens
  CDR3 for alpha chain variable domain of TCR clone 38342 (TRAV12-1, TRAJ34)
CGEPLRNTDKLIF

SEQ ID NO: 76684 - protein, 20 aa, Homo sapiens
  CDR3 for beta chain variable domain of TCR clone 38342 (TRBV19, TRBJ2-1)
CASSISRTVTSTRLNNEQIF

SEQ ID NO: 76685 - protein, 13 aa, Homo sapiens
  CDR3 for alpha chain variable domain of TCR clone 38343 (TRAV21, TRAJ27)
CGARPGNAGKSTF

SEQ ID NO: 76686 - protein, 14 aa, Homo sapiens
  CDR3 for beta chain variable domain of TCR clone 38343 (TRBV7-6, TRBJ2-3)
CASSLGTVTDTQYF

SEQ ID NO: 76687 - protein, 14 aa, Homo sapiens
  CDR3 for alpha chain variable domain of TCR clone 38344 (TRAV13-1, TRAJ35)
CAASKGGFGNVLHC

SEQ ID NO: 76688 - protein, 13 aa, Homo sapiens
  CDR3 for beta chain variable domain of TCR clone 38344 (TRBV7-3, TRBJ1-1)
CASSQDWGPEAFF

SEQ ID NO: 76689 - protein, 10 aa, Homo sapiens
  CDR3 for alpha chain variable domain of TCR clone 38345 (TRAV13-1, TRAJ52)
CAAKTPMLVV

SEQ ID NO: 76690 - protein, 14 aa, Homo sapiens
  CDR3 for beta chain variable domain of TCR clone 38345 (TRBV7-8, TRBJ2-3)
CASSLEAGTDTQYF

SEQ ID NO: 76691 - protein, 12 aa, Homo sapiens
  CDR3 for alpha chain variable domain of TCR clone 38346 (TRAV23/DV6, TRAJ17)
CARGSCRQQANF

SEQ ID NO: 76692 - protein, 14 aa, Homo sapiens
  CDR3 for beta chain variable domain of TCR clone 38346 (TRBV7-2, TRBJ1-2)
CASSQTGSTYGYTF

SEQ ID NO: 76693 - protein, 16 aa, Homo sapiens
  CDR3 for alpha chain variable domain of TCR clone 38347 (TRAV3, TRAJ37)
RAVRGKGSGNTGKLIF

SEQ ID NO: 76694 - protein, 13 aa, Homo sapiens
  CDR3 for beta chain variable domain of TCR clone 38347 (TRBV14, TRBJ2-7)
CASSQDRRYEQYF

SEQ ID NO: 76695 - protein, 14 aa, Homo sapiens
  CDR3 for alpha chain variable domain of TCR clone 38348 (TRAV1-2, TRAJ16)
CAVNRFSDGQKLLF

SEQ ID NO: 76696 - protein, 16 aa, Homo sapiens
  CDR3 for beta chain variable domain of TCR clone 38348 (TRBV19, TRBJ2-1)
CASSMGGGSSYNEQFF

SEQ ID NO: 76697 - protein, 14 aa, Homo sapiens
  CDR3 for alpha chain variable domain of TCR clone 38349 (TRAV1-2, TRAJ16)
CAVNRFSDGQKLLF

SEQ ID NO: 76698 - protein, 13 aa, Homo sapiens
  CDR3 for beta chain variable domain of TCR clone 38349 (TRBV19, TRBJ2-7)
CASSIDRTYEQYF

SEQ ID NO: 76699 - protein, 12 aa, Homo sapiens
  CDR3 for alpha chain variable domain of TCR clone 38350 (TRAV36/DV7, TRAJ54)
CALVRGAQKLVF

SEQ ID NO: 76700 - protein, 14 aa, Homo sapiens
  CDR3 for beta chain variable domain of TCR clone 38350 (TRBV7-3, TRBJ1-1)
CASSLKGGNTEAFF

SEQ ID NO: 76701 - protein, 16 aa, Homo sapiens
  CDR3 for alpha chain variable domain of TCR clone 38351 (TRAV2, TRAJ10)
CCGGSTVAGGGNKLTF

SEQ ID NO: 76702 - protein, 16 aa, Homo sapiens
  CDR3 for beta chain variable domain of TCR clone 38351 (TRBV18, TRBJ1-5)
CASSPSTGNSNQPQHF

SEQ ID NO: 76703 - protein, 11 aa, Homo sapiens
  CDR3 for alpha chain variable domain of TCR clone 38352 (TRAV26-1, TRAJ37)
CIVRVGRKLIF

SEQ ID NO: 76704 - protein, 15 aa, Homo sapiens
  CDR3 for beta chain variable domain of TCR clone 38352 (TRBV7-3, TRBJ2-1)
CASSPTGGGEVEQFF

SEQ ID NO: 76705 - protein, 12 aa, Homo sapiens
  CDR3 for alpha chain variable domain of TCR clone 38353 (TRAV1-1, TRAJ8)
CAGGTGFQKLVF

SEQ ID NO: 76706 - protein, 18 aa, Homo sapiens
  CDR3 for beta chain variable domain of TCR clone 38353 (TRBV7-9, TRBJ2-7)
CASSLTTSGSRTWYEQYF

SEQ ID NO: 76707 - protein, 15 aa, Homo sapiens
  CDR3 for alpha chain variable domain of TCR clone 38354 (TRAV25, TRAJ53)
CSTSNSGGSNYKLTF

SEQ ID NO: 76708 - protein, 14 aa, Homo sapiens
  CDR3 for beta chain variable domain of TCR clone 38354 (TRBV11-2, TRBJ2-3)
CASSRLARTDTQYF

SEQ ID NO: 76709 - protein, 14 aa, Homo sapiens
  CDR3 for alpha chain variable domain of TCR clone 38355 (TRAV12-2, TRAJ48)
CAVNAFFGNEKLTL

SEQ ID NO: 76710 - protein, 13 aa, Homo sapiens
  CDR3 for beta chain variable domain of TCR clone 38355 (TRBV28, TRBJ2-7)
CAGAQQGLDEQYF

SEQ ID NO: 76711 - protein, 11 aa, Homo sapiens
  CDR3 for alpha chain variable domain of TCR clone 38356 (TRAV35, TRAJ30)
CAGPGDDKIIF

SEQ ID NO: 76712 - protein, 14 aa, Homo sapiens
  CDR3 for beta chain variable domain of TCR clone 38356 (TRBV7-6, TRBJ1-6)
CASSQAGGGSPHHF

SEQ ID NO: 76713 - protein, 13 aa, Homo sapiens
  CDR3 for alpha chain variable domain of TCR clone 38357 (TRAV21, TRAJ57)
CAVTQGGSEKLVF

SEQ ID NO: 76714 - protein, 15 aa, Homo sapiens
  CDR3 for beta chain variable domain of TCR clone 38357 (TRBV11-3, TRBJ2-3)
CASLKDGREGDTQYF

SEQ ID NO: 76715 - protein, 13 aa, Homo sapiens
  CDR3 for alpha chain variable domain of TCR clone 38358 (TRAV35, TRAJ48)
CAGHEFGNEKLTF

SEQ ID NO: 76716 - protein, 14 aa, Homo sapiens
  CDR3 for beta chain variable domain of TCR clone 38358 (TRBV19, TRBJ2-1)
CASPTIVLSGEQFF

SEQ ID NO: 76717 - protein, 11 aa, Homo sapiens
  CDR3 for alpha chain variable domain of TCR clone 38359 (TRAV21, TRAJ34)
CAVTNTDKLIF

SEQ ID NO: 76718 - protein, 19 aa, Homo sapiens
  CDR3 for beta chain variable domain of TCR clone 38359 (TRBV25-1, TRBJ2-2)
CAILVYRVDRGRKTGELFF

SEQ ID NO: 76719 - protein, 13 aa, Homo sapiens
  CDR3 for alpha chain variable domain of TCR clone 38360 (TRAV27, TRAJ41)
CAGEGNSGYALNF

SEQ ID NO: 76720 - protein, 14 aa, Homo sapiens
  CDR3 for beta chain variable domain of TCR clone 38360 (TRBV7-2, TRBJ1-1)
CASSFLTGTAEAFF

SEQ ID NO: 76721 - protein, 13 aa, Homo sapiens
  CDR3 for alpha chain variable domain of TCR clone 38361 (TRAV23/DV6, TRAJ47)
CAASSQYGNKLVF

SEQ ID NO: 76722 - protein, 15 aa, Homo sapiens
  CDR3 for beta chain variable domain of TCR clone 38361 (TRBV7-3, TRBJ2-1)
CASSLDGNSYNGQFF

SEQ ID NO: 76723 - protein, 12 aa, Homo sapiens
  CDR3 for alpha chain variable domain of TCR clone 38362 (TRAV17, TRAJ30)
CVPERRDDKIIL

SEQ ID NO: 76724 - protein, 14 aa, Homo sapiens
  CDR3 for beta chain variable domain of TCR clone 38362 (TRBV7-7, TRBJ2-2)
CASSRDRSTGELFF

SEQ ID NO: 76725 - protein, 15 aa, Homo sapiens
  CDR3 for alpha chain variable domain of TCR clone 38363 (TRAV3, TRAJ13)
CAVRVYSGGYQKVTF

SEQ ID NO: 76726 - protein, 14 aa, Homo sapiens
  CDR3 for beta chain variable domain of TCR clone 38363 (TRBV11-2, TRBJ2-7)
CASSLGAGAYEQYF

SEQ ID NO: 76727 - protein, 13 aa, Homo sapiens
  CDR3 for alpha chain variable domain of TCR clone 38364 (TRAV27, TRAJ3)
ASLRGSSASKIIF

SEQ ID NO: 76728 - protein, 15 aa, Homo sapiens
  CDR3 for beta chain variable domain of TCR clone 38364 (TRBV28, TRBJ1-3)
CASSMDWASGNTIYF

SEQ ID NO: 76729 - protein, 12 aa, Homo sapiens
  CDR3 for alpha chain variable domain of TCR clone 38365 (TRAV17, TRAJ39)
CATGAAGNMLPF

SEQ ID NO: 76730 - protein, 14 aa, Homo sapiens
  CDR3 for beta chain variable domain of TCR clone 38365 (TRBV7-9, TRBJ1-2)
CASSRQGANYGYTF

SEQ ID NO: 76731 - protein, 15 aa, Homo sapiens
  CDR3 for alpha chain variable domain of TCR clone 38366 (TRAV3, TRAJ29)
CAVRDINSGNTPLVF

SEQ ID NO: 76732 - protein, 16 aa, Homo sapiens
  CDR3 for beta chain variable domain of TCR clone 38366 (TRBV4-1, TRBJ2-5)
CASSQTLYGDQETQYF

SEQ ID NO: 76733 - protein, 12 aa, Homo sapiens
  CDR3 for alpha chain variable domain of TCR clone 38367 (TRAV23/DV6, TRAJ32)
CSMPGATNKLIF

SEQ ID NO: 76734 - protein, 17 aa, Homo sapiens
  CDR3 for beta chain variable domain of TCR clone 38367 (TRBV13, TRBJ2-3)
CASSSLGTSGLTDTQYF

SEQ ID NO: 76735 - protein, 13 aa, Homo sapiens
  CDR3 for alpha chain variable domain of TCR clone 38368 (TRAV1-1, TRAJ9)
CAAKNTGGFKTII

SEQ ID NO: 76736 - protein, 14 aa, Homo sapiens
  CDR3 for beta chain variable domain of TCR clone 38368 (TRBV20-1, TRBJ2-1)
CSAQIGGSANEQFF

SEQ ID NO: 76737 - protein, 13 aa, Homo sapiens
  CDR3 for alpha chain variable domain of TCR clone 38369 (TRAV12-1, TRAJ11)
CVVTRGGYSTLTF

SEQ ID NO: 76738 - protein, 13 aa, Homo sapiens
  CDR3 for beta chain variable domain of TCR clone 38369 (TRBV20-1, TRBJ1-2)
CSARDQGAYGYAF

SEQ ID NO: 76739 - protein, 19 aa, Homo sapiens
  CDR3 for alpha chain variable domain of TCR clone 38370 (TRAV2, TRAJ20)
ILQVREADAAVYRDCKLRF

SEQ ID NO: 76740 - protein, 13 aa, Homo sapiens
  CDR3 for beta chain variable domain of TCR clone 38370 (TRBV15, TRBJ1-6)
CATSGGLNSPLHF

SEQ ID NO: 76741 - protein, 12 aa, Homo sapiens
  CDR3 for alpha chain variable domain of TCR clone 38371 (TRAV1-1, TRAJ43)
FAPRVSSNDMRF

SEQ ID NO: 76742 - protein, 15 aa, Homo sapiens
  CDR3 for beta chain variable domain of TCR clone 38371 (TRBV5-1, TRBJ2-7)
CASSLGDFTTYEQYF

SEQ ID NO: 76743 - protein, 13 aa, Homo sapiens
  CDR3 for alpha chain variable domain of TCR clone 38372 (TRAV12-3, TRAJ53)
CAMRGGSNYRLTF

SEQ ID NO: 76744 - protein, 15 aa, Homo sapiens
  CDR3 for beta chain variable domain of TCR clone 38372 (TRBV2, TRBJ2-1)
CATQARLVMIGEQFF

SEQ ID NO: 76745 - protein, 13 aa, Homo sapiens
  CDR3 for alpha chain variable domain of TCR clone 38373 (TRAV21, TRAJ57)
CAVTQGGSEKLVF

SEQ ID NO: 76746 - protein, 14 aa, Homo sapiens
  CDR3 for beta chain variable domain of TCR clone 38373 (TRBV5-4, TRBJ1-1)
CASSLDSRRDEAFF

SEQ ID NO: 76747 - protein, 15 aa, Homo sapiens
  CDR3 for alpha chain variable domain of TCR clone 38374 (TRAV4, TRAJ10)
CLVGDEEGGGNKLTF

SEQ ID NO: 76748 - protein, 13 aa, Homo sapiens
  CDR3 for beta chain variable domain of TCR clone 38374 (TRBV3-1, TRBJ1-1)
CASSPGVITEAFF

SEQ ID NO: 76749 - protein, 13 aa, Homo sapiens
  CDR3 for alpha chain variable domain of TCR clone 38375 (TRAV13-1, TRAJ21)
CAVSIYNFNKFYF

SEQ ID NO: 76750 - protein, 14 aa, Homo sapiens
  CDR3 for beta chain variable domain of TCR clone 38375 (TRBV4-1, TRBJ2-2)
CASSQAVNTGELFF

SEQ ID NO: 76751 - protein, 14 aa, Homo sapiens
  CDR3 for alpha chain variable domain of TCR clone 38376 (TRAV2, TRAJ37)
CAVDFTSNTGKLIF

SEQ ID NO: 76752 - protein, 13 aa, Homo sapiens
  CDR3 for beta chain variable domain of TCR clone 38376 (TRBV7-7, TRBJ2-3)
CASSLSRADTQYF

SEQ ID NO: 76753 - protein, 14 aa, Homo sapiens
  CDR3 for alpha chain variable domain of TCR clone 38377 (TRAV13-2, TRAJ17)
CAENSKAAGNKLTF

SEQ ID NO: 76754 - protein, 13 aa, Homo sapiens
  CDR3 for beta chain variable domain of TCR clone 38377 (TRBV7-3, TRBJ1-1)
CASSQDWGAEAFF

SEQ ID NO: 76755 - protein, 16 aa, Homo sapiens
  CDR3 for alpha chain variable domain of TCR clone 38378 (TRAV3, TRAJ21)
CAVRDIERGNFNKFYF

SEQ ID NO: 76756 - protein, 15 aa, Homo sapiens
  CDR3 for beta chain variable domain of TCR clone 38378 (TRBV28, TRBJ2-5)
CASSPPWSYQETQYF

SEQ ID NO: 76757 - protein, 18 aa, Homo sapiens
  CDR3 for alpha chain variable domain of TCR clone 38379 (TRAV12-3, TRAJ52)
CAMSRTNAGGTSYGKPTF

SEQ ID NO: 76758 - protein, 17 aa, Homo sapiens
  CDR3 for beta chain variable domain of TCR clone 38379 (TRBV7-3, TRBJ2-3)
CTSSLMKRMRGADTQYF

SEQ ID NO: 76759 - protein, 12 aa, Homo sapiens
  CDR3 for alpha chain variable domain of TCR clone 38380 (TRAV21, TRAJ11)
CAATSGYSTLTF

SEQ ID NO: 76760 - protein, 14 aa, Homo sapiens
  CDR3 for beta chain variable domain of TCR clone 38380 (TRBV20-1, TRBJ2-7)
CSAPEPAGVGEQYF

SEQ ID NO: 76761 - protein, 12 aa, Homo sapiens
  CDR3 for alpha chain variable domain of TCR clone 38381 (TRAV12-3, TRAJ3)
CAIDSSASEIIF

SEQ ID NO: 76762 - protein, 17 aa, Homo sapiens
  CDR3 for beta chain variable domain of TCR clone 38381 (TRBV7-9, TRBJ2-3)
CASSLEEAGAYPDTQYF

SEQ ID NO: 76763 - protein, 13 aa, Homo sapiens
  CDR3 for alpha chain variable domain of TCR clone 38382 (TRAV3, TRAJ15)
CAVRDQAGTALSF

SEQ ID NO: 76764 - protein, 15 aa, Homo sapiens
  CDR3 for beta chain variable domain of TCR clone 38382 (TRBV11-1, TRBJ2-7)
CASSLNYGASYEQYF

SEQ ID NO: 76765 - protein, 13 aa, Homo sapiens
  CDR3 for alpha chain variable domain of TCR clone 38383 (TRAV35, TRAJ48)
GRSRVFGNEKLTF

SEQ ID NO: 76766 - protein, 14 aa, Homo sapiens
  CDR3 for beta chain variable domain of TCR clone 38383 (TRBV20-1, TRBJ2-5)
RSALVPGYQETQYF

SEQ ID NO: 76767 - protein, 14 aa, Homo sapiens
  CDR3 for alpha chain variable domain of TCR clone 38384 (TRAV12-3, TRAJ10)
SHLPLTGGGNKLTF

SEQ ID NO: 76768 - protein, 14 aa, Homo sapiens
  CDR3 for beta chain variable domain of TCR clone 38384 (TRBV6-1, TRBJ1-3)
CASVQGGGGNAIYF

SEQ ID NO: 76769 - protein, 15 aa, Homo sapiens
  CDR3 for alpha chain variable domain of TCR clone 38385 (TRAV6, TRAJ13)
CALGGDSGGYQKVTF

SEQ ID NO: 76770 - protein, 12 aa, Homo sapiens
  CDR3 for beta chain variable domain of TCR clone 38385 (TRBV5-7, TRBJ1-2)
CASSDRIHGYTS

SEQ ID NO: 76771 - protein, 10 aa, Homo sapiens
  CDR3 for alpha chain variable domain of TCR clone 38386 (TRAV30, TRAJ32)
CGTEKDMVVL

SEQ ID NO: 76772 - protein, 13 aa, Homo sapiens
  CDR3 for beta chain variable domain of TCR clone 38386 (TRBV10-3, TRBJ2-7)
SASKLAVNYEQYF

SEQ ID NO: 76773 - protein, 13 aa, Homo sapiens
  CDR3 for alpha chain variable domain of TCR clone 38387 (TRAV12-1, TRAJ39)
CVVPQRAGNMLTF

SEQ ID NO: 76774 - protein, 14 aa, Homo sapiens
  CDR3 for beta chain variable domain of TCR clone 38387 (TRBV13, TRBJ2-5)
CAGSLERVGETQYF

SEQ ID NO: 76775 - protein, 16 aa, Homo sapiens
  CDR3 for alpha chain variable domain of TCR clone 38388 (TRAV3, TRAJ37)
CAVRPHGSGNIGKLIF

SEQ ID NO: 76776 - protein, 16 aa, Homo sapiens
  CDR3 for beta chain variable domain of TCR clone 38388 (TRBV9, TRBJ1-2)
CASSVEEKVSPYGYTF

SEQ ID NO: 76777 - protein, 17 aa, Homo sapiens
  CDR3 for alpha chain variable domain of TCR clone 38389 (TRAV4, TRAJ42)
CLVGVLNYGGSQGNIIF

SEQ ID NO: 76778 - protein, 12 aa, Homo sapiens
  CDR3 for beta chain variable domain of TCR clone 38389 (TRBV20-1, TRBJ2-1)
CSAQYTYNEQFF

SEQ ID NO: 76779 - protein, 12 aa, Homo sapiens
  CDR3 for alpha chain variable domain of TCR clone 38390 (TRAV16, TRAJ56)
CAPTGANSKLTF

SEQ ID NO: 76780 - protein, 17 aa, Homo sapiens
  CDR3 for beta chain variable domain of TCR clone 38390 (TRBV27, TRBJ2-6)
CASSLTGSASGANVLTF

SEQ ID NO: 76781 - protein, 14 aa, Homo sapiens
  CDR3 for alpha chain variable domain of TCR clone 38391 (TRAV1-2, TRAJ8)
CAVREDTGFQKLVF

SEQ ID NO: 76782 - protein, 17 aa, Homo sapiens
  CDR3 for beta chain variable domain of TCR clone 38391 (TRBV5-1, TRBJ2-2)
CASSLAGLSGGTGELFF

SEQ ID NO: 76783 - protein, 13 aa, Homo sapiens
  CDR3 for alpha chain variable domain of TCR clone 38392 (TRAV27, TRAJ6)
CAGGTRGSYIPTF

SEQ ID NO: 76784 - protein, 14 aa, Homo sapiens
  CDR3 for beta chain variable domain of TCR clone 38392 (TRBV6-3, TRBJ1-1)
CASSYQRRDTEAVF

SEQ ID NO: 76785 - protein, 12 aa, Homo sapiens
  CDR3 for alpha chain variable domain of TCR clone 38393 (TRAV4, TRAJ26)
CLVGDYGQNFVF

SEQ ID NO: 76786 - protein, 16 aa, Homo sapiens
  CDR3 for beta chain variable domain of TCR clone 38393 (TRBV7-2, TRBJ1-2)
CASSSSQDRRGHGYTF

SEQ ID NO: 76787 - protein, 12 aa, Homo sapiens
  CDR3 for alpha chain variable domain of TCR clone 38394 (TRAV13-1, TRAJ21)
CAAKEGFNKFYF

SEQ ID NO: 76788 - protein, 11 aa, Homo sapiens
  CDR3 for beta chain variable domain of TCR clone 38394 (TRBV11-2, TRBJ2-2)
CASSLPGELFF

SEQ ID NO: 76789 - protein, 13 aa, Homo sapiens
  CDR3 for alpha chain variable domain of TCR clone 38395 (TRAV36/DV7, TRAJ38)
CVANAGNNRKLIW

SEQ ID NO: 76790 - protein, 17 aa, Homo sapiens
  CDR3 for beta chain variable domain of TCR clone 38395 (TRBV12-4, TRBJ2-1)
CASSPGLAGGRINEQFF

SEQ ID NO: 76791 - protein, 13 aa, Homo sapiens
  CDR3 for alpha chain variable domain of TCR clone 38396 (TRAV8-6, TRAJ9)
CAVWDTGGFKTIF

SEQ ID NO: 76792 - protein, 14 aa, Homo sapiens
  CDR3 for beta chain variable domain of TCR clone 38396 (TRBV2, TRBJ2-1)
CASSEALIYNEQYF

SEQ ID NO: 76793 - protein, 15 aa, Homo sapiens
  CDR3 for alpha chain variable domain of TCR clone 38397 (TRAV29/DV5, TRAJ29)
CAASERSSGNTPLVF

SEQ ID NO: 76794 - protein, 17 aa, Homo sapiens
  CDR3 for beta chain variable domain of TCR clone 38397 (TRBV4-1, TRBJ1-4)
CASSHEGPRGVEEKLFF

SEQ ID NO: 76795 - protein, 14 aa, Homo sapiens
  CDR3 for alpha chain variable domain of TCR clone 38398 (TRAV26-1, TRAJ38)
CIADNAGNNRKLIW

SEQ ID NO: 76796 - protein, 12 aa, Homo sapiens
  CDR3 for beta chain variable domain of TCR clone 38398 (TRBV11-2, TRBJ2-2)
CASSLEGGELFF

SEQ ID NO: 76797 - protein, 16 aa, Homo sapiens
  CDR3 for alpha chain variable domain of TCR clone 38399 (TRAV3, TRAJ10)
CAVRDMRAGGGNKPTF

SEQ ID NO: 76798 - protein, 13 aa, Homo sapiens
  CDR3 for beta chain variable domain of TCR clone 38399 (TRBV6-1, TRBJ1-1)
CASSRQGNTEAFF

SEQ ID NO: 76799 - protein, 18 aa, Homo sapiens
  CDR3 for alpha chain variable domain of TCR clone 38400 (TRAV29/DV5, TRAJ52)
CAAGFRGAGGTSYGKLTF

SEQ ID NO: 76800 - protein, 15 aa, Homo sapiens
  CDR3 for beta chain variable domain of TCR clone 38400 (TRBV20-1, TRBJ2-7)
CSARDRVPGMDEQYF

SEQ ID NO: 76801 - protein, 13 aa, Homo sapiens
  CDR3 for alpha chain variable domain of TCR clone 38401 (TRAV12-2, TRAJ39)
CAVNNNAGNMLTF

SEQ ID NO: 76802 - protein, 13 aa, Homo sapiens
  CDR3 for beta chain variable domain of TCR clone 38401 (TRBV2, TRBJ1-5)
CATAGPGKQPQHF

SEQ ID NO: 76803 - protein, 14 aa, Homo sapiens
  CDR3 for alpha chain variable domain of TCR clone 38402 (TRAV12-3, TRAJ9)
CAMSVETGGFKTIF

SEQ ID NO: 76804 - protein, 14 aa, Homo sapiens
  CDR3 for beta chain variable domain of TCR clone 38402 (TRBV7-2, TRBJ2-7)
CASRPQGAAYEQYF

SEQ ID NO: 76805 - protein, 16 aa, Homo sapiens
  CDR3 for alpha chain variable domain of TCR clone 38403 (TRAV21, TRAJ45)
CAVSWGSGVGADGLTF

SEQ ID NO: 76806 - protein, 14 aa, Homo sapiens
  CDR3 for beta chain variable domain of TCR clone 38403 (TRBV4-2, TRBJ1-2)
CASSPGGSNYGYTF

SEQ ID NO: 76807 - protein, 14 aa, Homo sapiens
  CDR3 for alpha chain variable domain of TCR clone 38404 (TRAV13-1, TRAJ44)
CAAKATGTASNLTF

SEQ ID NO: 76808 - protein, 13 aa, Homo sapiens
  CDR3 for beta chain variable domain of TCR clone 38404 (TRBV5-5, TRBJ1-2)
CASSFWRGEDYTF

SEQ ID NO: 76809 - protein, 16 aa, Homo sapiens
  CDR3 for alpha chain variable domain of TCR clone 38405 (TRAV30, TRAJ24)
CGTEMVDADSWGKFQF

SEQ ID NO: 76810 - protein, 15 aa, Homo sapiens
  CDR3 for beta chain variable domain of TCR clone 38405 (TRBV7-9, TRBJ1-4)
CASSARTGGNEKLFF

SEQ ID NO: 76811 - protein, 13 aa, Homo sapiens
  CDR3 for alpha chain variable domain of TCR clone 38406 (TRAV8-6, TRAJ49)
CAVITNTGNQFYF

SEQ ID NO: 76812 - protein, 14 aa, Homo sapiens
  CDR3 for beta chain variable domain of TCR clone 38406 (TRBV2, TRBJ2-7)
CASSLTSGGYEQYF

SEQ ID NO: 76813 - protein, 14 aa, Homo sapiens
  CDR3 for alpha chain variable domain of TCR clone 38407 (TRAV13-1, TRAJ45)
CAAIGGGGADGLTF

SEQ ID NO: 76814 - protein, 16 aa, Homo sapiens
  CDR3 for beta chain variable domain of TCR clone 38407 (TRBV7-2, TRBJ1-1)
CAGSLGAGWTNTEAFF

SEQ ID NO: 76815 - protein, 13 aa, Homo sapiens
  CDR3 for alpha chain variable domain of TCR clone 38408 (TRAV8-3, TRAJ28)
CAVGAVGSYQLTF

SEQ ID NO: 76816 - protein, 14 aa, Homo sapiens
  CDR3 for beta chain variable domain of TCR clone 38408 (TRBV19, TRBJ2-3)
CASSAPRGTDTQYF

SEQ ID NO: 76817 - protein, 13 aa, Homo sapiens
  CDR3 for alpha chain variable domain of TCR clone 38409 (TRAV13-2, TRAJ8)
CAFMNTGFQKLVF

SEQ ID NO: 76818 - protein, 17 aa, Homo sapiens
  CDR3 for beta chain variable domain of TCR clone 38409 (TRBV28, TRBJ2-1)
CASSSARQAITYNEQFF

SEQ ID NO: 76819 - protein, 23 aa, Homo sapiens
  CDR3 for alpha chain variable domain of TCR clone 38410 (TRAV26-1, TRAJ38)
CIADNAGNNHIQNPDPAVYQLRD

SEQ ID NO: 76820 - protein, 13 aa, Homo sapiens
  CDR3 for beta chain variable domain of TCR clone 38410 (TRBV20-1, TRBJ1-1)
CSASGGGNTEAFF

SEQ ID NO: 76821 - protein, 16 aa, Homo sapiens
  CDR3 for alpha chain variable domain of TCR clone 38411 (TRAV8-3, TRAJ10)
CAVGPILTGGGTKLTF

SEQ ID NO: 76822 - protein, 16 aa, Homo sapiens
  CDR3 for beta chain variable domain of TCR clone 38411 (TRBV7-2, TRBJ2-5)
CASSSKWLSGQETQYF

SEQ ID NO: 76823 - protein, 14 aa, Homo sapiens
  CDR3 for alpha chain variable domain of TCR clone 38412 (TRAV4, TRAJ26)
CLVGPHNYGQNFVS

SEQ ID NO: 76824 - protein, 17 aa, Homo sapiens
  CDR3 for beta chain variable domain of TCR clone 38412 (TRBV24-1, TRBJ2-1)
CATSDVSTSGTYNEQFF

SEQ ID NO: 76825 - protein, 14 aa, Homo sapiens
  CDR3 for alpha chain variable domain of TCR clone 38413 (TRAV17, TRAJ57)
CATDPQGGSEKLVF

SEQ ID NO: 76826 - protein, 14 aa, Homo sapiens
  CDR3 for beta chain variable domain of TCR clone 38413 (TRBV7-2, TRBJ2-7)
CASRSQGAAYEQYF

SEQ ID NO: 76827 - protein, 14 aa, Homo sapiens
  CDR3 for alpha chain variable domain of TCR clone 38414 (TRAV13-1, TRAJ35)
CAASKGGFGNVLHC

SEQ ID NO: 76828 - protein, 13 aa, Homo sapiens
  CDR3 for beta chain variable domain of TCR clone 38414 (TRBV7-3, TRBJ1-1)
CASSQDWGAEASF

SEQ ID NO: 76829 - protein, 13 aa, Homo sapiens
  CDR3 for alpha chain variable domain of TCR clone 38415 (TRAV38-1, TRAJ42)
CARWGGSQGNLLF

SEQ ID NO: 76830 - protein, 17 aa, Homo sapiens
  CDR3 for beta chain variable domain of TCR clone 38415 (TRBV20-1, TRBJ2-1)
CSARDPLAGVWDNEQFF

SEQ ID NO: 76831 - protein, 17 aa, Homo sapiens
  CDR3 for alpha chain variable domain of TCR clone 38416 (TRAV13-1, TRAJ52)
CAAGRNAGGTSHGKLTF

SEQ ID NO: 76832 - protein, 13 aa, Homo sapiens
  CDR3 for beta chain variable domain of TCR clone 38416 (TRBV7-2, TRBJ1-1)
CASNLKGAKVAFF

SEQ ID NO: 76833 - protein, 14 aa, Homo sapiens
  CDR3 for alpha chain variable domain of TCR clone 38417 (TRAV1-2, TRAJ8)
CAVREDTGFQKLVF

SEQ ID NO: 76834 - protein, 18 aa, Homo sapiens
  CDR3 for beta chain variable domain of TCR clone 38417 (TRBV11-2, TRBJ2-6)
CASSLNPFLGTGANVLTF

SEQ ID NO: 76835 - protein, 14 aa, Homo sapiens
  CDR3 for alpha chain variable domain of TCR clone 38418 (TRAV26-1, TRAJ21)
CIVRPLYNFNKFYF

SEQ ID NO: 76836 - protein, 14 aa, Homo sapiens
  CDR3 for beta chain variable domain of TCR clone 38418 (TRBV11-3, TRBJ2-1)
CASSATTSGSIQFF

SEQ ID NO: 76837 - protein, 14 aa, Homo sapiens
  CDR3 for alpha chain variable domain of TCR clone 38419 (TRAV12-2, TRAJ40)
CAVKIPSGTYKYIF

SEQ ID NO: 76838 - protein, 13 aa, Homo sapiens
  CDR3 for beta chain variable domain of TCR clone 38419 (TRBV7-9, TRBJ1-2)
CASSVKQNYGYTF

SEQ ID NO: 76839 - protein, 11 aa, Homo sapiens
  CDR3 for alpha chain variable domain of TCR clone 38420 (TRAV3, TRAJ21)
CAVGNFNKFYF

SEQ ID NO: 76840 - protein, 14 aa, Homo sapiens
  CDR3 for beta chain variable domain of TCR clone 38420 (TRBV12-4, TRBJ2-2)
CASSLEQDTGELFF

SEQ ID NO: 76841 - protein, 10 aa, Homo sapiens
  CDR3 for alpha chain variable domain of TCR clone 38421 (TRAV38-2/DV8, TRAJ40)
CASGTYKYIF

SEQ ID NO: 76842 - protein, 16 aa, Homo sapiens
  CDR3 for beta chain variable domain of TCR clone 38421 (TRBV5-1, TRBJ2-5)
CASSLSLAGAQETQYF

SEQ ID NO: 76843 - protein, 13 aa, Homo sapiens
  CDR3 for alpha chain variable domain of TCR clone 38422 (TRAV13-1, TRAJ10)
CAALEGGGNKLTF

SEQ ID NO: 76844 - protein, 17 aa, Homo sapiens
  CDR3 for beta chain variable domain of TCR clone 38422 (TRBV7-3, TRBJ2-2)
CASRLSGTSGGTGELFF

SEQ ID NO: 76845 - protein, 16 aa, Homo sapiens
  CDR3 for alpha chain variable domain of TCR clone 38423 (TRAV38-1, TRAJ37)
CSFKGDGSSNTGKLIF

SEQ ID NO: 76846 - protein, 13 aa, Homo sapiens
  CDR3 for beta chain variable domain of TCR clone 38423 (TRBV12-4, TRBJ2-5)
CASSLFRRETQYF

SEQ ID NO: 76847 - protein, 16 aa, Homo sapiens
  CDR3 for alpha chain variable domain of TCR clone 38424 (TRAV3, TRAJ42)
CAVRDIEGGSQGNLIS

SEQ ID NO: 76848 - protein, 15 aa, Homo sapiens
  CDR3 for beta chain variable domain of TCR clone 38424 (TRBV9, TRBJ2-2)
CASSDFAGASGELFF

SEQ ID NO: 76849 - protein, 15 aa, Homo sapiens
  CDR3 for alpha chain variable domain of TCR clone 38425 (TRAV3, TRAJ3)
CAVRDRDSSASKIIF

SEQ ID NO: 76850 - protein, 18 aa, Homo sapiens
  CDR3 for beta chain variable domain of TCR clone 38425 (TRBV25-1, TRBJ1-2)
CASSGLQNGQGMIFGYTF

SEQ ID NO: 76851 - protein, 14 aa, Homo sapiens
  CDR3 for alpha chain variable domain of TCR clone 38426 (TRAV8-4, TRAJ13)
CAVTLSGGDQKVTF

SEQ ID NO: 76852 - protein, 14 aa, Homo sapiens
  CDR3 for beta chain variable domain of TCR clone 38426 (TRBV7-2, TRBJ1-2)
CASSQTGSTYGYTF

SEQ ID NO: 76853 - protein, 13 aa, Homo sapiens
  CDR3 for alpha chain variable domain of TCR clone 38427 (TRAV20, TRAJ21)
CAVEGYNFNKFYF

SEQ ID NO: 76854 - protein, 14 aa, Homo sapiens
  CDR3 for beta chain variable domain of TCR clone 38427 (TRBV3-1, TRBJ2-5)
CASSQGPEQETQYF

SEQ ID NO: 76855 - protein, 16 aa, Homo sapiens
  CDR3 for alpha chain variable domain of TCR clone 38428 (TRAV12-2, TRAJ32)
CAVNLGQGGATNKLIF

SEQ ID NO: 76856 - protein, 15 aa, Homo sapiens
  CDR3 for beta chain variable domain of TCR clone 38428 (TRBV24-1, TRBJ1-1)
CATSDSKTVNTEAFF

SEQ ID NO: 76857 - protein, 13 aa, Homo sapiens
  CDR3 for alpha chain variable domain of TCR clone 38429 (TRAV26-1, TRAJ8)
CIVRSTGFQKLVF

SEQ ID NO: 76858 - protein, 11 aa, Homo sapiens
  CDR3 for beta chain variable domain of TCR clone 38429 (TRBV11-2, TRBJ2-2)
CASSLPGELFF

SEQ ID NO: 76859 - protein, 16 aa, Homo sapiens
  CDR3 for alpha chain variable domain of TCR clone 38430 (TRAV30, TRAJ24)
CGTEIVDADSWGKFQF

SEQ ID NO: 76860 - protein, 16 aa, Homo sapiens
  CDR3 for beta chain variable domain of TCR clone 38430 (TRBV28, TRBJ2-7)
CASSLFFETGGPGQYF

SEQ ID NO: 76861 - protein, 15 aa, Homo sapiens
  CDR3 for alpha chain variable domain of TCR clone 38431 (TRAV25, TRAJ52)
CAGTSGGTSYGKLTF

SEQ ID NO: 76862 - protein, 16 aa, Homo sapiens
  CDR3 for beta chain variable domain of TCR clone 38431 (TRBV19, TRBJ2-1)
CASSKAGPSSYNEQFF

SEQ ID NO: 76863 - protein, 14 aa, Homo sapiens
  CDR3 for alpha chain variable domain of TCR clone 38432 (TRAV1-2, TRAJ16)
CAVNRFSDGRKLLF

SEQ ID NO: 76864 - protein, 14 aa, Homo sapiens
  CDR3 for beta chain variable domain of TCR clone 38432 (TRBV13, TRBJ2-5)
CASSLGRGQETQYF

SEQ ID NO: 76865 - protein, 15 aa, Homo sapiens
  CDR3 for alpha chain variable domain of TCR clone 38433 (TRAV12-3, TRAJ6)
RAMSATTGGSYIPTF

SEQ ID NO: 76866 - protein, 13 aa, Homo sapiens
  CDR3 for beta chain variable domain of TCR clone 38433 (TRBV7-9, TRBJ1-2)
CASSLKQNYGYTF

SEQ ID NO: 76867 - protein, 13 aa, Homo sapiens
  CDR3 for alpha chain variable domain of TCR clone 38434 (TRAV38-2/DV8, TRAJ34)
CAYRNYNTDKLIF

SEQ ID NO: 76868 - protein, 15 aa, Homo sapiens
  CDR3 for beta chain variable domain of TCR clone 38434 (TRBV20-1, TRBJ2-5)
CSTEGTGGLQETQYF

SEQ ID NO: 76869 - protein, 12 aa, Homo sapiens
  CDR3 for alpha chain variable domain of TCR clone 38435 (TRAV3, TRAJ43)
CAVRDPNNDMRF

SEQ ID NO: 76870 - protein, 14 aa, Homo sapiens
  CDR3 for beta chain variable domain of TCR clone 38435 (TRBV19, TRBJ2-5)
CASSMAGQQETQYF

SEQ ID NO: 76871 - protein, 13 aa, Homo sapiens
  CDR3 for alpha chain variable domain of TCR clone 38436 (TRAV12-3, TRAJ33)
CAMSVNSNYRLIW

SEQ ID NO: 76872 - protein, 16 aa, Homo sapiens
  CDR3 for beta chain variable domain of TCR clone 38436 (TRBV7-3, TRBJ2-3)
CASSLSGYRPEDTQYF

SEQ ID NO: 76873 - protein, 13 aa, Homo sapiens
  CDR3 for alpha chain variable domain of TCR clone 38437 (TRAV27, TRAJ41)
CAGEGNPGYALNF

SEQ ID NO: 76874 - protein, 14 aa, Homo sapiens
  CDR3 for beta chain variable domain of TCR clone 38437 (TRBV7-2, TRBJ1-1)
CASSFLTGTTEAFF

SEQ ID NO: 76875 - protein, 16 aa, Homo sapiens
  CDR3 for alpha chain variable domain of TCR clone 38438 (TRAV1-2, TRAJ10)
CAVRGVLTGGGNKLTF

SEQ ID NO: 76876 - protein, 12 aa, Homo sapiens
  CDR3 for beta chain variable domain of TCR clone 38438 (TRBV7-8, TRBJ2-7)
CASSLGYREQYF

SEQ ID NO: 76877 - protein, 11 aa, Homo sapiens
  CDR3 for alpha chain variable domain of TCR clone 38439 (TRAV21, TRAJ34)
CAHYNTDKLIF

SEQ ID NO: 76878 - protein, 13 aa, Homo sapiens
  CDR3 for beta chain variable domain of TCR clone 38439 (TRBV19, TRBJ1-2)
CASSVPGQDGYTF

SEQ ID NO: 76879 - protein, 14 aa, Homo sapiens
  CDR3 for alpha chain variable domain of TCR clone 38440 (TRAV16, TRAJ31)
CSKWRRGDNARLMF

SEQ ID NO: 76880 - protein, 16 aa, Homo sapiens
  CDR3 for beta chain variable domain of TCR clone 38440 (TRBV28, TRBJ2-7)
CASSLFFETGGPKQYF

SEQ ID NO: 76881 - protein, 14 aa, Homo sapiens
  CDR3 for alpha chain variable domain of TCR clone 38441 (TRAV12-2, TRAJ40)
CAVKIPSGTYKYIF

SEQ ID NO: 76882 - protein, 17 aa, Homo sapiens
  CDR3 for beta chain variable domain of TCR clone 38441 (TRBV11-2, TRBJ2-1)
CASSLYSPGVEYNEQFF

SEQ ID NO: 76883 - protein, 14 aa, Homo sapiens
  CDR3 for alpha chain variable domain of TCR clone 38442 (TRAV25, TRAJ35)
CARRMEGLGNVLHC

SEQ ID NO: 76884 - protein, 13 aa, Homo sapiens
  CDR3 for beta chain variable domain of TCR clone 38442 (TRBV7-2, TRBJ1-4)
CASSLAGLEKLFF

SEQ ID NO: 76885 - protein, 15 aa, Homo sapiens
  CDR3 for alpha chain variable domain of TCR clone 38443 (TRAV12-1, TRAJ44)
CVVFVNTGTASKLAF

SEQ ID NO: 76886 - protein, 17 aa, Homo sapiens
  CDR3 for beta chain variable domain of TCR clone 38443 (TRBV7-8, TRBJ2-6)
CASSAGTGGAGANVLTF

SEQ ID NO: 76887 - protein, 14 aa, Homo sapiens
  CDR3 for alpha chain variable domain of TCR clone 38444 (TRAV2, TRAJ37)
CAVDFTSNTGKLIF

SEQ ID NO: 76888 - protein, 15 aa, Homo sapiens
  CDR3 for beta chain variable domain of TCR clone 38444 (TRBV20-1, TRBJ1-1)
CSASRGVTWNTEAFF

SEQ ID NO: 76889 - protein, 16 aa, Homo sapiens
  CDR3 for alpha chain variable domain of TCR clone 38445 (TRAV3, TRAJ4)
CAVRPSPSGGYNKMIF

SEQ ID NO: 76890 - protein, 12 aa, Homo sapiens
  CDR3 for beta chain variable domain of TCR clone 38445 (TRBV7-9, TRBJ2-7)
CASSQGVYEQYF

SEQ ID NO: 76891 - protein, 16 aa, Homo sapiens
  CDR3 for alpha chain variable domain of TCR clone 38446 (TRAV35, TRAJ28)
RAGQKYSGAGSYQLTF

SEQ ID NO: 76892 - protein, 16 aa, Homo sapiens
  CDR3 for beta chain variable domain of TCR clone 38446 (TRBV7-3, TRBJ2-2)
CASSLKRGTLSGELFF

SEQ ID NO: 76893 - protein, 14 aa, Homo sapiens
  CDR3 for alpha chain variable domain of TCR clone 38447 (TRAV8-4, TRAJ13)
CAVTLSGGYQKVTS

SEQ ID NO: 76894 - protein, 14 aa, Homo sapiens
  CDR3 for beta chain variable domain of TCR clone 38447 (TRBV7-2, TRBJ1-2)
CASSQTGSTYGYTF

SEQ ID NO: 76895 - protein, 14 aa, Homo sapiens
  CDR3 for alpha chain variable domain of TCR clone 38448 (TRAV2, TRAJ37)
CAVDFTSSTGKLIF

SEQ ID NO: 76896 - protein, 14 aa, Homo sapiens
  CDR3 for beta chain variable domain of TCR clone 38448 (TRBV6-1, TRBJ1-3)
CASVQGGGGNTIYF

SEQ ID NO: 76897 - protein, 11 aa, Homo sapiens
  CDR3 for alpha chain variable domain of TCR clone 38449 (TRAV1-2, TRAJ40)
CAVPGTYKYIF

SEQ ID NO: 76898 - protein, 16 aa, Homo sapiens
  CDR3 for beta chain variable domain of TCR clone 38449 (TRBV29-1, TRBJ2-7)
CSVEAVGTSGSYEQYF

SEQ ID NO: 76899 - protein, 14 aa, Homo sapiens
  CDR3 for alpha chain variable domain of TCR clone 38450 (TRAV29/DV5, TRAJ36)
CAARRKTGANNLFF

SEQ ID NO: 76900 - protein, 13 aa, Homo sapiens
  CDR3 for beta chain variable domain of TCR clone 38450 (TRBV18, TRBJ1-2)
CASSASATEGYTF

SEQ ID NO: 76901 - protein, 14 aa, Homo sapiens
  CDR3 for alpha chain variable domain of TCR clone 38451 (TRAV3, TRAJ21)
CAVESQANFNKFYF

SEQ ID NO: 76902 - protein, 18 aa, Homo sapiens
  CDR3 for beta chain variable domain of TCR clone 38451 (TRBV7-9, TRBJ2-1)
CASSLAVSVTSGRNEQFF

SEQ ID NO: 76903 - protein, 17 aa, Homo sapiens
  CDR3 for alpha chain variable domain of TCR clone 38452 (TRAV8-6, TRAJ58)
CAVSSWVVETSGSRLTF

SEQ ID NO: 76904 - protein, 14 aa, Homo sapiens
  CDR3 for beta chain variable domain of TCR clone 38452 (TRBV4-2, TRBJ2-1)
CASGLDRAYNEQFF

SEQ ID NO: 76905 - protein, 16 aa, Homo sapiens
  CDR3 for alpha chain variable domain of TCR clone 38453 (TRAV30, TRAJ24)
RGTEIVDADSWGKFQF

SEQ ID NO: 76906 - protein, 15 aa, Homo sapiens
  CDR3 for beta chain variable domain of TCR clone 38453 (TRBV20-1, TRBJ2-4)
CSARDLTGGPNIQYF

SEQ ID NO: 76907 - protein, 13 aa, Homo sapiens
  CDR3 for alpha chain variable domain of TCR clone 38454 (TRAV13-1, TRAJ11)
CAAVLAGYSTLTF

SEQ ID NO: 76908 - protein, 17 aa, Homo sapiens
  CDR3 for beta chain variable domain of TCR clone 38454 (TRBV25-1, TRBJ2-7)
CASSDARVVFSSYEQCF

SEQ ID NO: 76909 - protein, 11 aa, Homo sapiens
  CDR3 for alpha chain variable domain of TCR clone 38455 (TRAV2, TRAJ33)
CAVDSNYQLIW

SEQ ID NO: 76910 - protein, 15 aa, Homo sapiens
  CDR3 for beta chain variable domain of TCR clone 38455 (TRBV19, TRBJ1-2)
CASSIGQVLNYGYTF

SEQ ID NO: 76911 - protein, 13 aa, Homo sapiens
  CDR3 for alpha chain variable domain of TCR clone 38456 (TRAV27, TRAJ53)
CAGQGGSNYKLTF

SEQ ID NO: 76912 - protein, 13 aa, Homo sapiens
  CDR3 for beta chain variable domain of TCR clone 38456 (TRBV29-1, TRBJ1-1)
CRVESGFGTEAFF

SEQ ID NO: 76913 - protein, 14 aa, Homo sapiens
  CDR3 for alpha chain variable domain of TCR clone 38457 (TRAV1-2, TRAJ16)
CAVNRFSDGQKLLF

SEQ ID NO: 76914 - protein, 15 aa, Homo sapiens
  CDR3 for beta chain variable domain of TCR clone 38457 (TRBV19, TRBJ2-4)
CASRGPRRGENIQYF

SEQ ID NO: 76915 - protein, 18 aa, Homo sapiens
  CDR3 for alpha chain variable domain of TCR clone 38458 (TRAV13-1, TRAJ52)
CAAKNPNAGGTSYGKPTF

SEQ ID NO: 76916 - protein, 14 aa, Homo sapiens
  CDR3 for beta chain variable domain of TCR clone 38458 (TRBV7-3, TRBJ2-1)
CASSLAGGTNEQFF

SEQ ID NO: 76917 - protein, 12 aa, Homo sapiens
  CDR3 for alpha chain variable domain of TCR clone 38459 (TRAV17, TRAJ28)
WDSGAGSYQLNF

SEQ ID NO: 76918 - protein, 13 aa, Homo sapiens
  CDR3 for beta chain variable domain of TCR clone 38459 (TRBV11-3, TRBJ1-1)
CASSRQPNTEAFF

SEQ ID NO: 76919 - protein, 17 aa, Homo sapiens
  CDR3 for alpha chain variable domain of TCR clone 38460 (TRAV17, TRAJ7)
CATLGRPAFGKGNQVVV

SEQ ID NO: 76920 - protein, 13 aa, Homo sapiens
  CDR3 for beta chain variable domain of TCR clone 38460 (TRBV12-4, TRBJ2-7)
CASSLERVREQYF

SEQ ID NO: 76921 - protein, 14 aa, Homo sapiens
  CDR3 for alpha chain variable domain of TCR clone 38461 (TRAV1-2, TRAJ15)
CAVRDRQAGTALIF

SEQ ID NO: 76922 - protein, 14 aa, Homo sapiens
  CDR3 for beta chain variable domain of TCR clone 38461 (TRBV12-5, TRBJ2-5)
CASGSRTHQETQYF

SEQ ID NO: 76923 - protein, 13 aa, Homo sapiens
  CDR3 for alpha chain variable domain of TCR clone 38462 (TRAV20, TRAJ40)
CAAPFSGTYKYIF

SEQ ID NO: 76924 - protein, 13 aa, Homo sapiens
  CDR3 for beta chain variable domain of TCR clone 38462 (TRBV15, TRBJ2-5)
CATSQIGEETQYF

SEQ ID NO: 76925 - protein, 13 aa, Homo sapiens
  CDR3 for alpha chain variable domain of TCR clone 38463 (TRAV17, TRAJ40)
CAGALGGTYKYIF

SEQ ID NO: 76926 - protein, 15 aa, Homo sapiens
  CDR3 for beta chain variable domain of TCR clone 38463 (TRBV7-2, TRBJ2-2)
CASRRPGQNTGELFF

SEQ ID NO: 76927 - protein, 14 aa, Homo sapiens
  CDR3 for alpha chain variable domain of TCR clone 38464 (TRAV17, TRAJ31)
CATVLRNNNARLMV

SEQ ID NO: 76928 - protein, 14 aa, Homo sapiens
  CDR3 for beta chain variable domain of TCR clone 38464 (TRBV12-4, TRBJ2-5)
CASSLWQKQETQYF

SEQ ID NO: 76929 - protein, 15 aa, Homo sapiens
  CDR3 for alpha chain variable domain of TCR clone 38465 (TRAV3, TRAJ22)
CAMRDRGGSARQLTF

SEQ ID NO: 76930 - protein, 16 aa, Homo sapiens
  CDR3 for beta chain variable domain of TCR clone 38465 (TRBV5-4, TRBJ2-3)
CASQQPGAGGADTQYF

SEQ ID NO: 76931 - protein, 13 aa, Homo sapiens
  CDR3 for alpha chain variable domain of TCR clone 38466 (TRAV13-1, TRAJ39)
CAASIWACNMLTF

SEQ ID NO: 76932 - protein, 15 aa, Homo sapiens
  CDR3 for beta chain variable domain of TCR clone 38466 (TRBV7-9, TRBJ1-1)
CASSLLEQGGTEAFF

SEQ ID NO: 76933 - protein, 16 aa, Homo sapiens
  CDR3 for alpha chain variable domain of TCR clone 38467 (TRAV27, TRAJ52)
CAGASAGGTSYGKLTF

SEQ ID NO: 76934 - protein, 17 aa, Homo sapiens
  CDR3 for beta chain variable domain of TCR clone 38467 (TRBV24-1, TRBJ2-3)
CATSDLPSGEDTDTQYF

SEQ ID NO: 76935 - protein, 16 aa, Homo sapiens
  CDR3 for alpha chain variable domain of TCR clone 38468 (TRAV30, TRAJ24)
CGTEIVDADSWGKFKF

SEQ ID NO: 76936 - protein, 14 aa, Homo sapiens
  CDR3 for beta chain variable domain of TCR clone 38468 (TRBV19, TRBJ2-1)
CASPTFVLSGEQFF

SEQ ID NO: 76937 - protein, 13 aa, Homo sapiens
  CDR3 for alpha chain variable domain of TCR clone 38469 (TRAV3, TRAJ20)
CCEAFCNDYKLSF

SEQ ID NO: 76938 - protein, 14 aa, Homo sapiens
  CDR3 for beta chain variable domain of TCR clone 38469 (TRBV25-1, TRBJ1-1)
CASTHLGGNTEAFF

SEQ ID NO: 76939 - protein, 12 aa, Homo sapiens
  CDR3 for alpha chain variable domain of TCR clone 38470 (TRAV1-1, TRAJ43)
CAPHVSSNDMRF

SEQ ID NO: 76940 - protein, 15 aa, Homo sapiens
  CDR3 for beta chain variable domain of TCR clone 38470 (TRBV5-1, TRBJ2-7)
CASSLGDFTTYEQYF

SEQ ID NO: 76941 - protein, 16 aa, Homo sapiens
  CDR3 for alpha chain variable domain of TCR clone 38471 (TRAV30, TRAJ24)
CGTEMVDADSWGKFQF

SEQ ID NO: 76942 - protein, 15 aa, Homo sapiens
  CDR3 for beta chain variable domain of TCR clone 38471 (TRBV27, TRBJ2-1)
CASSNGGGSSNEQFF

SEQ ID NO: 76943 - protein, 14 aa, Homo sapiens
  CDR3 for alpha chain variable domain of TCR clone 38472 (TRAV26-1, TRAJ45)
CIEVTGGGAEGLTF

SEQ ID NO: 76944 - protein, 16 aa, Homo sapiens
  CDR3 for beta chain variable domain of TCR clone 38472 (TRBV10-2, TRBJ1-1)
CASSEFGEGASTEAFF

SEQ ID NO: 76945 - protein, 11 aa, Homo sapiens
  CDR3 for alpha chain variable domain of TCR clone 38473 (TRAV12-1, TRAJ3)
CGEPGQQCFQD

SEQ ID NO: 76946 - protein, 14 aa, Homo sapiens
  CDR3 for beta chain variable domain of TCR clone 38473 (TRBV20-1, TRBJ2-3)
CSARGGTSTDTQYF

SEQ ID NO: 76947 - protein, 14 aa, Homo sapiens
  CDR3 for alpha chain variable domain of TCR clone 38474 (TRAV13-1, TRAJ40)
CAASMTSGTCKYIF

SEQ ID NO: 76948 - protein, 15 aa, Homo sapiens
  CDR3 for beta chain variable domain of TCR clone 38474 (TRBV7-3, TRBJ2-1)
CASSPTGGGEVEQFF

SEQ ID NO: 76949 - protein, 13 aa, Homo sapiens
  CDR3 for alpha chain variable domain of TCR clone 38475 (TRAV12-3, TRAJ40)
CAMSDSGTYKYIF

SEQ ID NO: 76950 - protein, 13 aa, Homo sapiens
  CDR3 for beta chain variable domain of TCR clone 38475 (TRBV7-9, TRBJ1-2)
CASSLKQNYGYTF

SEQ ID NO: 76951 - protein, 14 aa, Homo sapiens
  CDR3 for alpha chain variable domain of TCR clone 38476 (TRAV13-1, TRAJ44)
CAARRPGTASKLTF

SEQ ID NO: 76952 - protein, 15 aa, Homo sapiens
  CDR3 for beta chain variable domain of TCR clone 38476 (TRBV11-3, TRBJ2-3)
CASLKDGREGDTQYF

SEQ ID NO: 76953 - protein, 14 aa, Homo sapiens
  CDR3 for alpha chain variable domain of TCR clone 38477 (TRAV12-2, TRAJ40)
CAVKIPSGAYKYIF

SEQ ID NO: 76954 - protein, 14 aa, Homo sapiens
  CDR3 for beta chain variable domain of TCR clone 38477 (TRBV7-8, TRBJ2-7)
CASSPRDRVYEQYF

SEQ ID NO: 76955 - protein, 13 aa, Homo sapiens
  CDR3 for alpha chain variable domain of TCR clone 38478 (TRAV2, TRAJ40)
CAVVTSGTYKYIF

SEQ ID NO: 76956 - protein, 14 aa, Homo sapiens
  CDR3 for beta chain variable domain of TCR clone 38478 (TRBV19, TRBJ2-2)
CATTGHANTGELFF

SEQ ID NO: 76957 - protein, 15 aa, Homo sapiens
  CDR3 for alpha chain variable domain of TCR clone 38479 (TRAV17, TRAJ35)
CATAFVIGFGNVLHC

SEQ ID NO: 76958 - protein, 14 aa, Homo sapiens
  CDR3 for beta chain variable domain of TCR clone 38479 (TRBV12-4, TRBJ2-5)
CASSQSGGGETQYF

SEQ ID NO: 76959 - protein, 16 aa, Homo sapiens
  CDR3 for alpha chain variable domain of TCR clone 38480 (TRAV1-2, TRAJ10)
CAVRGALTGGGNKLTF

SEQ ID NO: 76960 - protein, 12 aa, Homo sapiens
  CDR3 for beta chain variable domain of TCR clone 38480 (TRBV7-8, TRBJ2-7)
CASSLGDREQYF

SEQ ID NO: 76961 - protein, 13 aa, Homo sapiens
  CDR3 for alpha chain variable domain of TCR clone 38481 (TRAV29/DV5, TRAJ31)
CAASRNNNARLMF

SEQ ID NO: 76962 - protein, 13 aa, Homo sapiens
  CDR3 for beta chain variable domain of TCR clone 38481 (TRBV13, TRBJ2-1)
CASILGGRGEQFF

SEQ ID NO: 76963 - protein, 11 aa, Homo sapiens
  CDR3 for alpha chain variable domain of TCR clone 38482 (TRAV12-2, TRAJ49)
CAVSTGNQFYF

SEQ ID NO: 76964 - protein, 12 aa, Homo sapiens
  CDR3 for beta chain variable domain of TCR clone 38482 (TRBV2, TRBJ2-3)
CASSGRFDTQYF

SEQ ID NO: 76965 - protein, 13 aa, Homo sapiens
  CDR3 for alpha chain variable domain of TCR clone 38483 (TRAV30, TRAJ24)
CGTVTDSWGKLQF

SEQ ID NO: 76966 - protein, 15 aa, Homo sapiens
  CDR3 for beta chain variable domain of TCR clone 38483 (TRBV5-4, TRBJ2-1)
CASSREGLPYNEQFF

SEQ ID NO: 76967 - protein, 11 aa, Homo sapiens
  CDR3 for alpha chain variable domain of TCR clone 38484 (TRAV21, TRAJ34)
CAYYNTDKLIF

SEQ ID NO: 76968 - protein, 16 aa, Homo sapiens
  CDR3 for beta chain variable domain of TCR clone 38484 (TRBV10-2, TRBJ1-1)
CASSEFGEGASTEAFF

SEQ ID NO: 76969 - protein, 15 aa, Homo sapiens
  CDR3 for alpha chain variable domain of TCR clone 38485 (TRAV8-2, TRAJ40)
CVVLGTTSGTYKYIF

SEQ ID NO: 76970 - protein, 13 aa, Homo sapiens
  CDR3 for beta chain variable domain of TCR clone 38485 (TRBV2, TRBJ1-4)
CASSELGVEKLFF

SEQ ID NO: 76971 - protein, 13 aa, Homo sapiens
  CDR3 for alpha chain variable domain of TCR clone 38486 (TRAV13-1, TRAJ20)
CAARVSNDYKLSF

SEQ ID NO: 76972 - protein, 12 aa, Homo sapiens
  CDR3 for beta chain variable domain of TCR clone 38486 (TRBV20-1, TRBJ2-1)
CSARLGTDEQSF

SEQ ID NO: 76973 - protein, 19 aa, Homo sapiens
  CDR3 for alpha chain variable domain of TCR clone 38487 (TRAV2, TRAJ20)
ILQVRDADAAVYRDCKLSF

SEQ ID NO: 76974 - protein, 13 aa, Homo sapiens
  CDR3 for beta chain variable domain of TCR clone 38487 (TRBV15, TRBJ1-6)
CATSGGLNSPLHF

SEQ ID NO: 76975 - protein, 16 aa, Homo sapiens
  CDR3 for alpha chain variable domain of TCR clone 38488 (TRAV3, TRAJ3)
CAVRDRAKGSASKIIF

SEQ ID NO: 76976 - protein, 16 aa, Homo sapiens
  CDR3 for beta chain variable domain of TCR clone 38488 (TRBV20-1, TRBJ2-4)
CSATSLAELAKNIQYF

SEQ ID NO: 76977 - protein, 13 aa, Homo sapiens
  CDR3 for alpha chain variable domain of TCR clone 38489 (TRAV3, TRAJ20)
CAVRSLNDYKLSF

SEQ ID NO: 76978 - protein, 17 aa, Homo sapiens
  CDR3 for beta chain variable domain of TCR clone 38489 (TRBV4-1, TRBJ2-7)
CASSRDPLGVRGGEQYF

SEQ ID NO: 76979 - protein, 13 aa, Homo sapiens
  CDR3 for alpha chain variable domain of TCR clone 38490 (TRAV20, TRAJ49)
CAVQARTGNQFYF

SEQ ID NO: 76980 - protein, 14 aa, Homo sapiens
  CDR3 for beta chain variable domain of TCR clone 38490 (TRBV7-2, TRBJ2-7)
CTSSPKTSFYEQYF

SEQ ID NO: 76981 - protein, 15 aa, Homo sapiens
  CDR3 for alpha chain variable domain of TCR clone 38491 (TRAV26-1, TRAJ44)
RIVRIGTGTASKLTF

SEQ ID NO: 76982 - protein, 15 aa, Homo sapiens
  CDR3 for beta chain variable domain of TCR clone 38491 (TRBV7-6, TRBJ2-1)
CASSSLAGEGNEQFF

SEQ ID NO: 76983 - protein, 13 aa, Homo sapiens
  CDR3 for alpha chain variable domain of TCR clone 38492 (TRAV38-1, TRAJ43)
CAFMKGNNNDMRF

SEQ ID NO: 76984 - protein, 13 aa, Homo sapiens
  CDR3 for beta chain variable domain of TCR clone 38492 (TRBV20-1, TRBJ2-7)
CSATPWRRYEQYF

SEQ ID NO: 76985 - protein, 13 aa, Homo sapiens
  CDR3 for alpha chain variable domain of TCR clone 38493 (TRAV2, TRAJ40)
CAVVTSGTYKYIF

SEQ ID NO: 76986 - protein, 15 aa, Homo sapiens
  CDR3 for beta chain variable domain of TCR clone 38493 (TRBV15, TRBJ2-3)
CATSGAGFGTDTQYF

SEQ ID NO: 76987 - protein, 12 aa, Homo sapiens
  CDR3 for alpha chain variable domain of TCR clone 38494 (TRAV8-2, TRAJ30)
CVVSDRDDKIIF

SEQ ID NO: 76988 - protein, 16 aa, Homo sapiens
  CDR3 for beta chain variable domain of TCR clone 38494 (TRBV5-4, TRBJ2-5)
CAEGPGLAGTQETQYF

SEQ ID NO: 76989 - protein, 13 aa, Homo sapiens
  CDR3 for alpha chain variable domain of TCR clone 38495 (TRAV13-1, TRAJ9)
CAASGTGGFKTIF

SEQ ID NO: 76990 - protein, 13 aa, Homo sapiens
  CDR3 for beta chain variable domain of TCR clone 38495 (TRBV12-4, TRBJ2-7)
CASSLERVRGQYF

SEQ ID NO: 76991 - protein, 12 aa, Homo sapiens
  CDR3 for alpha chain variable domain of TCR clone 38496 (TRAV30, TRAJ43)
CGTEERGNGMRF

SEQ ID NO: 76992 - protein, 13 aa, Homo sapiens
  CDR3 for beta chain variable domain of TCR clone 38496 (TRBV27, TRBJ2-7)
CASSFSQGYEQYF

SEQ ID NO: 76993 - protein, 17 aa, Homo sapiens
  CDR3 for alpha chain variable domain of TCR clone 38497 (TRAV3, TRAJ42)
CAVRDRDYGGSQGNLIF

SEQ ID NO: 76994 - protein, 13 aa, Homo sapiens
  CDR3 for beta chain variable domain of TCR clone 38497 (TRBV10-3, TRBJ2-7)
CASELAVNYEQYF

SEQ ID NO: 76995 - protein, 16 aa, Homo sapiens
  CDR3 for alpha chain variable domain of TCR clone 38498 (TRAV4, TRAJ22)
CLVVDLYSGSARQLTF

SEQ ID NO: 76996 - protein, 16 aa, Homo sapiens
  CDR3 for beta chain variable domain of TCR clone 38498 (TRBV7-9, TRBJ2-1)
CASSDVAGGSYNEQFF

SEQ ID NO: 76997 - protein, 14 aa, Homo sapiens
  CDR3 for alpha chain variable domain of TCR clone 38499 (TRAV8-6, TRAJ5)
CAVSMDTGRRALTF

SEQ ID NO: 76998 - protein, 14 aa, Homo sapiens
  CDR3 for beta chain variable domain of TCR clone 38499 (TRBV6-1, TRBJ1-3)
CASVQGGGGNTIYF

SEQ ID NO: 76999 - protein, 15 aa, Homo sapiens
  CDR3 for alpha chain variable domain of TCR clone 38500 (TRAV29/DV5, TRAJ40)
CSASAQGSGTYKYIF

SEQ ID NO: 77000 - protein, 15 aa, Homo sapiens
  CDR3 for beta chain variable domain of TCR clone 38500 (TRBV7-2, TRBJ2-3)
CASSLAGAFIDTQYF

SEQ ID NO: 77001 - protein, 11 aa, Homo sapiens
  CDR3 for alpha chain variable domain of TCR clone 38501 (TRAV8-6, TRAJ7)
CAVNGNNRLAF

SEQ ID NO: 77002 - protein, 16 aa, Homo sapiens
  CDR3 for beta chain variable domain of TCR clone 38501 (TRBV6-1, TRBJ2-5)
CASSETLDRGAETQYF

SEQ ID NO: 77003 - protein, 16 aa, Homo sapiens
  CDR3 for alpha chain variable domain of TCR clone 38502 (TRAV16, TRAJ52)
CALSAAGGTSYGKLTF

SEQ ID NO: 77004 - protein, 12 aa, Homo sapiens
  CDR3 for beta chain variable domain of TCR clone 38502 (TRBV12-4, TRBJ1-3)
CASSFSENTIYF

SEQ ID NO: 77005 - protein, 17 aa, Homo sapiens
  CDR3 for alpha chain variable domain of TCR clone 38503 (TRAV3, TRAJ6)
CAVRDGPRAGGSYIPTF

SEQ ID NO: 77006 - protein, 15 aa, Homo sapiens
  CDR3 for beta chain variable domain of TCR clone 38503 (TRBV12-4, TRBJ2-5)
CASIGRTGEGETQYF

SEQ ID NO: 77007 - protein, 17 aa, Homo sapiens
  CDR3 for alpha chain variable domain of TCR clone 38504 (TRAV8-6, TRAJ58)
CAVSSWVGETSGSRLTF

SEQ ID NO: 77008 - protein, 14 aa, Homo sapiens
  CDR3 for beta chain variable domain of TCR clone 38504 (TRBV4-2, TRBJ2-1)
CASGLDRVYNEQFF

SEQ ID NO: 77009 - protein, 13 aa, Homo sapiens
  CDR3 for alpha chain variable domain of TCR clone 38505 (TRAV13-1, TRAJ49)
CAAMLYTGNPFYF

SEQ ID NO: 77010 - protein, 15 aa, Homo sapiens
  CDR3 for beta chain variable domain of TCR clone 38505 (TRBV12-4, TRBJ1-5)
CASTRGSGFGQPQHF

SEQ ID NO: 77011 - protein, 11 aa, Homo sapiens
  CDR3 for alpha chain variable domain of TCR clone 38506 (TRAV21, TRAJ48)
CAVDGNEKLAF

SEQ ID NO: 77012 - protein, 16 aa, Homo sapiens
  CDR3 for beta chain variable domain of TCR clone 38506 (TRBV19, TRBJ2-1)
CASSSKGTRSYNEQFF

SEQ ID NO: 77013 - protein, 19 aa, Homo sapiens
  CDR3 for alpha chain variable domain of TCR clone 38507 (TRAV1-2, TRAJ26)
CLLPLCCERPDNYGHNFVF

SEQ ID NO: 77014 - protein, 15 aa, Homo sapiens
  CDR3 for beta chain variable domain of TCR clone 38507 (TRBV9, TRBJ1-6)
CASSVAGTGDSPLHF

SEQ ID NO: 77015 - protein, 19 aa, Homo sapiens
  CDR3 for alpha chain variable domain of TCR clone 38508 (TRAV12-1, TRAJ42)
SVIQPPTSVKGGSQGNLIF

SEQ ID NO: 77016 - protein, 18 aa, Homo sapiens
  CDR3 for beta chain variable domain of TCR clone 38508 (TRBV11-2, TRBJ2-3)
CASSLGGASRGAPNTQYF

SEQ ID NO: 77017 - protein, 13 aa, Homo sapiens
  CDR3 for alpha chain variable domain of TCR clone 38509 (TRAV12-3, TRAJ13)
CAMSSGGYQKVTF

SEQ ID NO: 77018 - protein, 15 aa, Homo sapiens
  CDR3 for beta chain variable domain of TCR clone 38509 (TRBV10-3, TRBJ2-3)
CAISLTSGGTDTQYF

SEQ ID NO: 77019 - protein, 13 aa, Homo sapiens
  CDR3 for alpha chain variable domain of TCR clone 38510 (TRAV1-2, TRAJ9)
CAVLNTGGFKTIL

SEQ ID NO: 77020 - protein, 14 aa, Homo sapiens
  CDR3 for beta chain variable domain of TCR clone 38510 (TRBV20-1, TRBJ2-3)
CSARGGTSTDTQYF

SEQ ID NO: 77021 - protein, 18 aa, Homo sapiens
  CDR3 for alpha chain variable domain of TCR clone 38511 (TRAV26-2, TRAJ54)
CILRDVEVGIQGAQKLVF

SEQ ID NO: 77022 - protein, 15 aa, Homo sapiens
  CDR3 for beta chain variable domain of TCR clone 38511 (TRBV6-3, TRBJ2-7)
CASSSPGTVFYEQYF

SEQ ID NO: 77023 - protein, 11 aa, Homo sapiens
  CDR3 for alpha chain variable domain of TCR clone 38512 (TRAV12-2, TRAJ36)
CAVDGANNLFF

SEQ ID NO: 77024 - protein, 13 aa, Homo sapiens
  CDR3 for beta chain variable domain of TCR clone 38512 (TRBV7-2, TRBJ2-7)
CASSAPSGSEQYF

SEQ ID NO: 77025 - protein, 18 aa, Homo sapiens
  CDR3 for alpha chain variable domain of TCR clone 38513 (TRAV26-2, TRAJ45)
CILRVDKYSGGGADGLTF

SEQ ID NO: 77026 - protein, 16 aa, Homo sapiens
  CDR3 for beta chain variable domain of TCR clone 38513 (TRBV2, TRBJ1-4)
CASNFLQGATNEKPFF

SEQ ID NO: 77027 - protein, 12 aa, Homo sapiens
  CDR3 for alpha chain variable domain of TCR clone 38514 (TRAV35, TRAJ30)
RAGLNRDDKIIF

SEQ ID NO: 77028 - protein, 15 aa, Homo sapiens
  CDR3 for beta chain variable domain of TCR clone 38514 (TRBV9, TRBJ1-6)
CASSVAGTGDSPLHF

SEQ ID NO: 77029 - protein, 12 aa, Homo sapiens
  CDR3 for alpha chain variable domain of TCR clone 38515 (TRAV2, TRAJ10)
CASTGGGNKLTF

SEQ ID NO: 77030 - protein, 14 aa, Homo sapiens
  CDR3 for beta chain variable domain of TCR clone 38515 (TRBV7-2, TRBJ2-2)
CASRGQGAAGELFS

SEQ ID NO: 77031 - protein, 12 aa, Homo sapiens
  CDR3 for alpha chain variable domain of TCR clone 38516 (TRAV17, TRAJ12)
CATLRSSYKLIF

SEQ ID NO: 77032 - protein, 16 aa, Homo sapiens
  CDR3 for beta chain variable domain of TCR clone 38516 (TRBV28, TRBJ2-7)
CASSLFFEAGGPEQYF

SEQ ID NO: 77033 - protein, 18 aa, Homo sapiens
  CDR3 for alpha chain variable domain of TCR clone 38517 (TRAV26-1, TRAJ52)
CIVRVEGAGGTSYGELTF

SEQ ID NO: 77034 - protein, 13 aa, Homo sapiens
  CDR3 for beta chain variable domain of TCR clone 38517 (TRBV7-3, TRBJ1-2)
CASSLKRGYGYTF

SEQ ID NO: 77035 - protein, 14 aa, Homo sapiens
  CDR3 for alpha chain variable domain of TCR clone 38518 (TRAV1-2, TRAJ16)
CAVNRFSDGRKLLF

SEQ ID NO: 77036 - protein, 13 aa, Homo sapiens
  CDR3 for beta chain variable domain of TCR clone 38518 (TRBV4-1, TRBJ2-1)
CASSQAGGDEQFF

SEQ ID NO: 77037 - protein, 14 aa, Homo sapiens
  CDR3 for alpha chain variable domain of TCR clone 38519 (TRAV26-1, TRAJ21)
CIVRPPYNFNKFYF

SEQ ID NO: 77038 - protein, 14 aa, Homo sapiens
  CDR3 for beta chain variable domain of TCR clone 38519 (TRBV19, TRBJ2-1)
CASPTVVLSGEQFF

SEQ ID NO: 77039 - protein, 12 aa, Homo sapiens
  CDR3 for alpha chain variable domain of TCR clone 38520 (TRAV29/DV5, TRAJ43)
CAAPYNNNDMRF

SEQ ID NO: 77040 - protein, 15 aa, Homo sapiens
  CDR3 for beta chain variable domain of TCR clone 38520 (TRBV20-1, TRBJ2-7)
CSARDRVSGMDEQYF

SEQ ID NO: 77041 - protein, 12 aa, Homo sapiens
  CDR3 for alpha chain variable domain of TCR clone 38521 (TRAV25, TRAJ17)
CAGEAAGNKLTF

SEQ ID NO: 77042 - protein, 14 aa, Homo sapiens
  CDR3 for beta chain variable domain of TCR clone 38521 (TRBV5-1, TRBJ2-1)
CASIALWAGNEQFF

SEQ ID NO: 77043 - protein, 14 aa, Homo sapiens
  CDR3 for alpha chain variable domain of TCR clone 38522 (TRAV26-1, TRAJ38)
CIADNAGNNRKLIW

SEQ ID NO: 77044 - protein, 14 aa, Homo sapiens
  CDR3 for beta chain variable domain of TCR clone 38522 (TRBV2, TRBJ1-5)
CASSGTGFNQPQHF

SEQ ID NO: 77045 - protein, 12 aa, Homo sapiens
  CDR3 for alpha chain variable domain of TCR clone 38523 (TRAV12-3, TRAJ21)
CAMFNNFNKFYF

SEQ ID NO: 77046 - protein, 14 aa, Homo sapiens
  CDR3 for beta chain variable domain of TCR clone 38523 (TRBV12-4, TRBJ1-1)
CASSLGTGGTEAFF

SEQ ID NO: 77047 - protein, 17 aa, Homo sapiens
  CDR3 for alpha chain variable domain of TCR clone 38524 (TRAV12-2, TRAJ6)
CAPQGPPRAGGSYVPTF

SEQ ID NO: 77048 - protein, 16 aa, Homo sapiens
  CDR3 for beta chain variable domain of TCR clone 38524 (TRBV19, TRBJ2-2)
CASSTARASNTGELFF

SEQ ID NO: 77049 - protein, 13 aa, Homo sapiens
  CDR3 for alpha chain variable domain of TCR clone 38525 (TRAV8-3, TRAJ36)
CAVGATGANNLFF

SEQ ID NO: 77050 - protein, 14 aa, Homo sapiens
  CDR3 for beta chain variable domain of TCR clone 38525 (TRBV7-3, TRBJ1-1)
CASSLKGGNTEAFF

SEQ ID NO: 77051 - protein, 12 aa, Homo sapiens
  CDR3 for alpha chain variable domain of TCR clone 38526 (TRAV2, TRAJ31)
CAVEDNNASLMF

SEQ ID NO: 77052 - protein, 16 aa, Homo sapiens
  CDR3 for beta chain variable domain of TCR clone 38526 (TRBV10-3, TRBJ2-1)
CAISGVGDGGGGEQFF

SEQ ID NO: 77053 - protein, 16 aa, Homo sapiens
  CDR3 for alpha chain variable domain of TCR clone 38527 (TRAV3, TRAJ37)
CAVRPHGSSNTGKLIF

SEQ ID NO: 77054 - protein, 16 aa, Homo sapiens
  CDR3 for beta chain variable domain of TCR clone 38527 (TRBV9, TRBJ1-2)
CASSVEEKVSPYGYTF

SEQ ID NO: 77055 - protein, 12 aa, Homo sapiens
  CDR3 for alpha chain variable domain of TCR clone 38528 (TRAV13-1, TRAJ49)
CAASIRSNQFYF

SEQ ID NO: 77056 - protein, 16 aa, Homo sapiens
  CDR3 for beta chain variable domain of TCR clone 38528 (TRBV7-9, TRBJ1-2)
CASSLGFSSGEDGYTF

SEQ ID NO: 77057 - protein, 17 aa, Homo sapiens
  CDR3 for alpha chain variable domain of TCR clone 38529 (TRAV4, TRAJ18)
CLVGERSVGSTLGKLYF

SEQ ID NO: 77058 - protein, 16 aa, Homo sapiens
  CDR3 for beta chain variable domain of TCR clone 38529 (TRBV19, TRBJ2-1)
CASSKAGPSSYNEQFF

SEQ ID NO: 77059 - protein, 14 aa, Homo sapiens
  CDR3 for alpha chain variable domain of TCR clone 38530 (TRAV17, TRAJ33)
CATDARRSNYQLIW

SEQ ID NO: 77060 - protein, 14 aa, Homo sapiens
  CDR3 for beta chain variable domain of TCR clone 38530 (TRBV25-1, TRBJ1-4)
RASSGGGQPEKLFF

SEQ ID NO: 77061 - protein, 16 aa, Homo sapiens
  CDR3 for alpha chain variable domain of TCR clone 38531 (TRAV38-2/DV8, TRAJ47)
RAYRSAIMEYGNKLVF

SEQ ID NO: 77062 - protein, 14 aa, Homo sapiens
  CDR3 for beta chain variable domain of TCR clone 38531 (TRBV19, TRBJ2-7)
CASSIFAGTYEQYF

SEQ ID NO: 77063 - protein, 14 aa, Homo sapiens
  CDR3 for alpha chain variable domain of TCR clone 38532 (TRAV26-1, TRAJ38)
CIADNAGNNRKLIW

SEQ ID NO: 77064 - protein, 15 aa, Homo sapiens
  CDR3 for beta chain variable domain of TCR clone 38532 (TRBV7-6, TRBJ1-4)
CASSLVAGAGEKLFF

SEQ ID NO: 77065 - protein, 11 aa, Homo sapiens
  CDR3 for alpha chain variable domain of TCR clone 38533 (TRAV1-1, TRAJ23)
CAVRQGGKLIF

SEQ ID NO: 77066 - protein, 13 aa, Homo sapiens
  CDR3 for beta chain variable domain of TCR clone 38533 (TRBV4-2, TRBJ1-1)
CASSQAGNTEAFF

SEQ ID NO: 77067 - protein, 13 aa, Homo sapiens
  CDR3 for alpha chain variable domain of TCR clone 38534 (TRAV2, TRAJ15)
CAVASQAGTALIF

SEQ ID NO: 77068 - protein, 13 aa, Homo sapiens
  CDR3 for beta chain variable domain of TCR clone 38534 (TRBV19, TRBJ1-2)
CASSQGQVYGYTF

SEQ ID NO: 77069 - protein, 12 aa, Homo sapiens
  CDR3 for alpha chain variable domain of TCR clone 38535 (TRAV3, TRAJ26)
CAGRDYGQNFVF

SEQ ID NO: 77070 - protein, 16 aa, Homo sapiens
  CDR3 for beta chain variable domain of TCR clone 38535 (TRBV11-2, TRBJ1-2)
CASSPSGREANYGYTF

SEQ ID NO: 77071 - protein, 16 aa, Homo sapiens
  CDR3 for alpha chain variable domain of TCR clone 38536 (TRAV27, TRAJ53)
CAAPEGSGGSNYKLTF

SEQ ID NO: 77072 - protein, 14 aa, Homo sapiens
  CDR3 for beta chain variable domain of TCR clone 38536 (TRBV4-3, TRBJ1-5)
CASSRGGQGWPQHF

SEQ ID NO: 77073 - protein, 12 aa, Homo sapiens
  CDR3 for alpha chain variable domain of TCR clone 38537 (TRAV2, TRAJ33)
CAFMDSNYQLIW

SEQ ID NO: 77074 - protein, 16 aa, Homo sapiens
  CDR3 for beta chain variable domain of TCR clone 38537 (TRBV2, TRBJ2-7)
CASREPWTGPSYEQYF

SEQ ID NO: 77075 - protein, 16 aa, Homo sapiens
  CDR3 for alpha chain variable domain of TCR clone 38538 (TRAV2, TRAJ13)
CCGDFMNSGGYQKVTF

SEQ ID NO: 77076 - protein, 14 aa, Homo sapiens
  CDR3 for beta chain variable domain of TCR clone 38538 (TRBV25-1, TRBJ1-1)
CASTHLGGNTEAFF

SEQ ID NO: 77077 - protein, 12 aa, Homo sapiens
  CDR3 for alpha chain variable domain of TCR clone 38539 (TRAV21, TRAJ31)
CAVWGNNARLMF

SEQ ID NO: 77078 - protein, 16 aa, Homo sapiens
  CDR3 for beta chain variable domain of TCR clone 38539 (TRBV27, TRBJ2-5)
CASSCGPGGQKETQYF

SEQ ID NO: 77079 - protein, 10 aa, Homo sapiens
  CDR3 for alpha chain variable domain of TCR clone 38540 (TRAV21, TRAJ31)
CAVDNARLMF

SEQ ID NO: 77080 - protein, 15 aa, Homo sapiens
  CDR3 for beta chain variable domain of TCR clone 38540 (TRBV19, TRBJ1-1)
CASTSGQIQNTEAFF

SEQ ID NO: 77081 - protein, 13 aa, Homo sapiens
  CDR3 for alpha chain variable domain of TCR clone 38541 (TRAV8-4, TRAJ36)
CAVSEGGANNPFF

SEQ ID NO: 77082 - protein, 12 aa, Homo sapiens
  CDR3 for beta chain variable domain of TCR clone 38541 (TRBV28, TRBJ2-7)
CASTGNHYEQYF

SEQ ID NO: 77083 - protein, 15 aa, Homo sapiens
  CDR3 for alpha chain variable domain of TCR clone 38542 (TRAV17, TRAJ34)
CATDPRMVETDKLIF

SEQ ID NO: 77084 - protein, 12 aa, Homo sapiens
  CDR3 for beta chain variable domain of TCR clone 38542 (TRBV10-2, TRBJ2-3)
CASSEGPGPRYF

SEQ ID NO: 77085 - protein, 14 aa, Homo sapiens
  CDR3 for alpha chain variable domain of TCR clone 38543 (TRAV20, TRAJ29)
CAVQAWVGNTPLVS

SEQ ID NO: 77086 - protein, 15 aa, Homo sapiens
  CDR3 for beta chain variable domain of TCR clone 38543 (TRBV29-1, TRBJ2-7)
CSVEFFDRGSYEQYF

SEQ ID NO: 77087 - protein, 16 aa, Homo sapiens
  CDR3 for alpha chain variable domain of TCR clone 38544 (TRAV26-1, TRAJ37)
CIVRGDGSGNTGKLIF

SEQ ID NO: 77088 - protein, 17 aa, Homo sapiens
  CDR3 for beta chain variable domain of TCR clone 38544 (TRBV4-1, TRBJ2-7)
CASGRDPLGVRGGEQYF

SEQ ID NO: 77089 - protein, 13 aa, Homo sapiens
  CDR3 for alpha chain variable domain of TCR clone 38545 (TRAV2, TRAJ21)
CAVEDLNFNEFYF

SEQ ID NO: 77090 - protein, 15 aa, Homo sapiens
  CDR3 for beta chain variable domain of TCR clone 38545 (TRBV28, TRBJ2-5)
CASSPGQGSIETQYF

SEQ ID NO: 77091 - protein, 13 aa, Homo sapiens
  CDR3 for alpha chain variable domain of TCR clone 38546 (TRAV13-2, TRAJ48)
CAEMDFGNEKLTL

SEQ ID NO: 77092 - protein, 12 aa, Homo sapiens
  CDR3 for beta chain variable domain of TCR clone 38546 (TRBV5-1, TRBJ1-2)
CASSQDTYGYTF

SEQ ID NO: 77093 - protein, 15 aa, Homo sapiens
  CDR3 for alpha chain variable domain of TCR clone 38547 (TRAV1-2, TRAJ13)
CAVRPTSGGYQKVTF

SEQ ID NO: 77094 - protein, 15 aa, Homo sapiens
  CDR3 for beta chain variable domain of TCR clone 38547 (TRBV28, TRBJ2-7)
CASSPGGRGFYEQYF

SEQ ID NO: 77095 - protein, 11 aa, Homo sapiens
  CDR3 for alpha chain variable domain of TCR clone 38548 (TRAV35, TRAJ30)
CAGGRDDKIIF

SEQ ID NO: 77096 - protein, 14 aa, Homo sapiens
  CDR3 for beta chain variable domain of TCR clone 38548 (TRBV15, TRBJ2-5)
CATSGDRGQETQYF

SEQ ID NO: 77097 - protein, 15 aa, Homo sapiens
  CDR3 for alpha chain variable domain of TCR clone 38549 (TRAV13-1, TRAJ17)
CAASIERAAGNKLTF

SEQ ID NO: 77098 - protein, 13 aa, Homo sapiens
  CDR3 for beta chain variable domain of TCR clone 38549 (TRBV20-1, TRBJ2-5)
CSARRGTGATQYF

SEQ ID NO: 77099 - protein, 14 aa, Homo sapiens
  CDR3 for alpha chain variable domain of TCR clone 38550 (TRAV8-2, TRAJ37)
CVVSISGNTGRLIF

SEQ ID NO: 77100 - protein, 11 aa, Homo sapiens
  CDR3 for beta chain variable domain of TCR clone 38550 (TRBV18, TRBJ2-5)
CASSPRETQYF

SEQ ID NO: 77101 - protein, 14 aa, Homo sapiens
  CDR3 for alpha chain variable domain of TCR clone 38551 (TRAV8-3, TRAJ30)
CAVGDMKRDDKIIF

SEQ ID NO: 77102 - protein, 17 aa, Homo sapiens
  CDR3 for beta chain variable domain of TCR clone 38551 (TRBV19, TRBJ2-2)
CASSRNPGGFGTGELFF

SEQ ID NO: 77103 - protein, 11 aa, Homo sapiens
  CDR3 for alpha chain variable domain of TCR clone 38552 (TRAV2, TRAJ13)
CAYGGYQKVTF

SEQ ID NO: 77104 - protein, 13 aa, Homo sapiens
  CDR3 for beta chain variable domain of TCR clone 38552 (TRBV24-1, TRBJ2-3)
CATSTGGTDTQYF

SEQ ID NO: 77105 - protein, 13 aa, Homo sapiens
  CDR3 for alpha chain variable domain of TCR clone 38553 (TRAV35, TRAJ43)
CAGYPYNNNDMLF

SEQ ID NO: 77106 - protein, 15 aa, Homo sapiens
  CDR3 for beta chain variable domain of TCR clone 38553 (TRBV25-1, TRBJ1-4)
CASSKRIATNEKLFF

SEQ ID NO: 77107 - protein, 13 aa, Homo sapiens
  CDR3 for alpha chain variable domain of TCR clone 38554 (TRAV26-1, TRAJ39)
CIVRVVAGNMLTF

SEQ ID NO: 77108 - protein, 16 aa, Homo sapiens
  CDR3 for beta chain variable domain of TCR clone 38554 (TRBV12-5, TRBJ2-5)
CASGPRTSGNQETQYF

SEQ ID NO: 77109 - protein, 15 aa, Homo sapiens
  CDR3 for alpha chain variable domain of TCR clone 38555 (TRAV34, TRAJ38)
CGADFTPGNNRKLIW

SEQ ID NO: 77110 - protein, 14 aa, Homo sapiens
  CDR3 for beta chain variable domain of TCR clone 38555 (TRBV20-1, TRBJ1-1)
CSAQTRIGGTEAFF

SEQ ID NO: 77111 - protein, 15 aa, Homo sapiens
  CDR3 for alpha chain variable domain of TCR clone 38556 (TRAV2, TRAJ9)
CAVVDRGTGGFKTIF

SEQ ID NO: 77112 - protein, 16 aa, Homo sapiens
  CDR3 for beta chain variable domain of TCR clone 38556 (TRBV24-1, TRBJ2-3)
CATSDPGTGATDTQYF

SEQ ID NO: 77113 - protein, 15 aa, Homo sapiens
  CDR3 for alpha chain variable domain of TCR clone 38557 (TRAV27, TRAJ38)
CSARRNAGNNRKLIW

SEQ ID NO: 77114 - protein, 11 aa, Homo sapiens
  CDR3 for beta chain variable domain of TCR clone 38557 (TRBV12-4, TRBJ2-2)
CASSSAGELFF

SEQ ID NO: 77115 - protein, 13 aa, Homo sapiens
  CDR3 for alpha chain variable domain of TCR clone 38558 (TRAV1-2, TRAJ31)
CAVRGYNNARLMF

SEQ ID NO: 77116 - protein, 14 aa, Homo sapiens
  CDR3 for beta chain variable domain of TCR clone 38558 (TRBV12-4, TRBJ1-3)
CASTLTGAGNTIYL

SEQ ID NO: 77117 - protein, 11 aa, Homo sapiens
  CDR3 for alpha chain variable domain of TCR clone 38559 (TRAV1-2, TRAJ20)
CAVANDYKLSF

SEQ ID NO: 77118 - protein, 15 aa, Homo sapiens
  CDR3 for beta chain variable domain of TCR clone 38559 (TRBV2, TRBJ2-1)
CASSELAGSHNEQFF

SEQ ID NO: 77119 - protein, 13 aa, Homo sapiens
  CDR3 for alpha chain variable domain of TCR clone 38560 (TRAV20, TRAJ21)
CAVEGYNSNKFYF

SEQ ID NO: 77120 - protein, 14 aa, Homo sapiens
  CDR3 for beta chain variable domain of TCR clone 38560 (TRBV3-1, TRBJ2-5)
CASSQGPDQETQYF

SEQ ID NO: 77121 - protein, 13 aa, Homo sapiens
  CDR3 for alpha chain variable domain of TCR clone 38561 (TRAV12-1, TRAJ16)
CAVNGPDGQKLLF

SEQ ID NO: 77122 - protein, 13 aa, Homo sapiens
  CDR3 for beta chain variable domain of TCR clone 38561 (TRBV2, TRBJ1-1)
CARNPTGGFHAFF

SEQ ID NO: 77123 - protein, 14 aa, Homo sapiens
  CDR3 for alpha chain variable domain of TCR clone 38562 (TRAV13-1, TRAJ9)
CAASALTGGFKTIF

SEQ ID NO: 77124 - protein, 14 aa, Homo sapiens
  CDR3 for beta chain variable domain of TCR clone 38562 (TRBV19, TRBJ2-1)
CASPTFVLSGEQFF

SEQ ID NO: 77125 - protein, 18 aa, Homo sapiens
  CDR3 for alpha chain variable domain of TCR clone 38563 (TRAV9-2, TRAJ52)
CALSRHNAGGTSYGKLTF

SEQ ID NO: 77126 - protein, 19 aa, Homo sapiens
  CDR3 for beta chain variable domain of TCR clone 38563 (TRBV25-1, TRBJ2-2)
CAILVYRVDRGRKTGELFF

SEQ ID NO: 77127 - protein, 12 aa, Homo sapiens
  CDR3 for alpha chain variable domain of TCR clone 38564 (TRAV12-3, TRAJ17)
CAMTLTGNKLTF

SEQ ID NO: 77128 - protein, 11 aa, Homo sapiens
  CDR3 for beta chain variable domain of TCR clone 38564 (TRBV6-3, TRBJ2-3)
CATGQADTQYF

SEQ ID NO: 77129 - protein, 21 aa, Homo sapiens
  CDR3 for alpha chain variable domain of TCR clone 38565 (TRAV30, TRAJ43)
GLPAQLLRNILPIIELNDMRF

SEQ ID NO: 77130 - protein, 14 aa, Homo sapiens
  CDR3 for beta chain variable domain of TCR clone 38565 (TRBV27, TRBJ2-1)
CASRHLGGGKEQFF

SEQ ID NO: 77131 - protein, 11 aa, Homo sapiens
  CDR3 for alpha chain variable domain of TCR clone 38566 (TRAV13-1, TRAJ39)
CASHAGNMLTF

SEQ ID NO: 77132 - protein, 14 aa, Homo sapiens
  CDR3 for beta chain variable domain of TCR clone 38566 (TRBV6-1, TRBJ1-3)
CASVQGGGGNTIYF

SEQ ID NO: 77133 - protein, 14 aa, Homo sapiens
  CDR3 for alpha chain variable domain of TCR clone 38567 (TRAV12-2, TRAJ13)
CAVKKTGGYQKVTL

SEQ ID NO: 77134 - protein, 14 aa, Homo sapiens
  CDR3 for beta chain variable domain of TCR clone 38567 (TRBV7-2, TRBJ2-7)
CASSPKTSFYEQYF

SEQ ID NO: 77135 - protein, 17 aa, Homo sapiens
  CDR3 for alpha chain variable domain of TCR clone 38568 (TRAV12-2, TRAJ52)
CAVNPYAGGTSYGKLTF

SEQ ID NO: 77136 - protein, 16 aa, Homo sapiens
  CDR3 for beta chain variable domain of TCR clone 38568 (TRBV5-5, TRBJ2-2)
CASGGRREGATGELFF

SEQ ID NO: 77137 - protein, 13 aa, Homo sapiens
  CDR3 for alpha chain variable domain of TCR clone 38569 (TRAV21, TRAJ27)
CTARPGNAGKSTF

SEQ ID NO: 77138 - protein, 15 aa, Homo sapiens
  CDR3 for beta chain variable domain of TCR clone 38569 (TRBV2, TRBJ2-3)
CASSDAGGPPDTQYF

SEQ ID NO: 77139 - protein, 11 aa, Homo sapiens
  CDR3 for alpha chain variable domain of TCR clone 38570 (TRAV2, TRAJ33)
CAVASNYQLIW

SEQ ID NO: 77140 - protein, 14 aa, Homo sapiens
  CDR3 for beta chain variable domain of TCR clone 38570 (TRBV11-2, TRBJ2-3)
CASSRLARTDTQYF

SEQ ID NO: 77141 - protein, 16 aa, Homo sapiens
  CDR3 for alpha chain variable domain of TCR clone 38571 (TRAV8-4, TRAJ9)
CAVTSNTGGFKNYLWS

SEQ ID NO: 77142 - protein, 15 aa, Homo sapiens
  CDR3 for beta chain variable domain of TCR clone 38571 (TRBV7-9, TRBJ2-2)
CASSPETGAGGELFF

SEQ ID NO: 77143 - protein, 16 aa, Homo sapiens
  CDR3 for alpha chain variable domain of TCR clone 38572 (TRAV3, TRAJ37)
CAVRPHGSGNTGKLIF

SEQ ID NO: 77144 - protein, 14 aa, Homo sapiens
  CDR3 for beta chain variable domain of TCR clone 38572 (TRBV2, TRBJ2-1)
CASSGRAYYNEQFF

SEQ ID NO: 77145 - protein, 13 aa, Homo sapiens
  CDR3 for alpha chain variable domain of TCR clone 38573 (TRAV35, TRAJ57)
CAGSQGGSEKLVF

SEQ ID NO: 77146 - protein, 14 aa, Homo sapiens
  CDR3 for beta chain variable domain of TCR clone 38573 (TRBV25-1, TRBJ1-1)
CASTHLGGNTEAVF

SEQ ID NO: 77147 - protein, 14 aa, Homo sapiens
  CDR3 for alpha chain variable domain of TCR clone 38574 (TRAV12-3, TRAJ42)
CAMNYGGSQGNLIF

SEQ ID NO: 77148 - protein, 19 aa, Homo sapiens
  CDR3 for beta chain variable domain of TCR clone 38574 (TRBV25-1, TRBJ2-2)
CAILVYRVDRGRKTGELFF

SEQ ID NO: 77149 - protein, 13 aa, Homo sapiens
  CDR3 for alpha chain variable domain of TCR clone 38575 (TRAV13-2, TRAJ48)
CAETDFGNEKLTF

SEQ ID NO: 77150 - protein, 12 aa, Homo sapiens
  CDR3 for beta chain variable domain of TCR clone 38575 (TRBV29-1, TRBJ2-3)
RSVTGGADTQYF

SEQ ID NO: 77151 - protein, 14 aa, Homo sapiens
  CDR3 for alpha chain variable domain of TCR clone 38576 (TRAV1-1, TRAJ27)
CAVIYNTNAGKSTF

SEQ ID NO: 77152 - protein, 20 aa, Homo sapiens
  CDR3 for beta chain variable domain of TCR clone 38576 (TRBV7-8, TRBJ2-2)
CASSHLFPGPTIHITGELFF

SEQ ID NO: 77153 - protein, 14 aa, Homo sapiens
  CDR3 for alpha chain variable domain of TCR clone 38577 (TRAV24, TRAJ16)
CAFPPFSDGQKLLF

SEQ ID NO: 77154 - protein, 14 aa, Homo sapiens
  CDR3 for beta chain variable domain of TCR clone 38577 (TRBV19, TRBJ1-1)
ISVPVPAGGGEAFF

SEQ ID NO: 77155 - protein, 15 aa, Homo sapiens
  CDR3 for alpha chain variable domain of TCR clone 38578 (TRAV12-3, TRAJ6)
CAMSATTGGSYIPTF

SEQ ID NO: 77156 - protein, 14 aa, Homo sapiens
  CDR3 for beta chain variable domain of TCR clone 38578 (TRBV5-4, TRBJ1-1)
CASSLDSRRDEAFF

SEQ ID NO: 77157 - protein, 12 aa, Homo sapiens
  CDR3 for alpha chain variable domain of TCR clone 38579 (TRAV12-1, TRAJ40)
CVFYSGTYKYIF

SEQ ID NO: 77158 - protein, 12 aa, Homo sapiens
  CDR3 for beta chain variable domain of TCR clone 38579 (TRBV7-3, TRBJ2-1)
CASSFINNGQFF

SEQ ID NO: 77159 - protein, 15 aa, Homo sapiens
  CDR3 for alpha chain variable domain of TCR clone 38580 (TRAV8-6, TRAJ10)
CAVSSKGGGGNKLTF

SEQ ID NO: 77160 - protein, 15 aa, Homo sapiens
  CDR3 for beta chain variable domain of TCR clone 38580 (TRBV28, TRBJ1-2)
CASSTHSIANYGYTF

SEQ ID NO: 77161 - protein, 11 aa, Homo sapiens
  CDR3 for alpha chain variable domain of TCR clone 38581 (TRAV36/DV7, TRAJ45)
LGGGGADGLTF

SEQ ID NO: 77162 - protein, 13 aa, Homo sapiens
  CDR3 for beta chain variable domain of TCR clone 38581 (TRBV28, TRBJ2-7)
CASSPSGTYEQYF

SEQ ID NO: 77163 - protein, 17 aa, Homo sapiens
  CDR3 for alpha chain variable domain of TCR clone 38582 (TRAV12-2, TRAJ52)
CAVNPYAGGTSYGKLTF

SEQ ID NO: 77164 - protein, 16 aa, Homo sapiens
  CDR3 for beta chain variable domain of TCR clone 38582 (TRBV5-5, TRBJ2-2)
CASSGRREGAAGELFF

SEQ ID NO: 77165 - protein, 14 aa, Homo sapiens
  CDR3 for alpha chain variable domain of TCR clone 38583 (TRAV12-3, TRAJ42)
CAMNYGGSQGNLIF

SEQ ID NO: 77166 - protein, 15 aa, Homo sapiens
  CDR3 for beta chain variable domain of TCR clone 38583 (TRBV5-7, TRBJ1-5)
CVSSYGKLWDQPRHF

SEQ ID NO: 77167 - protein, 14 aa, Homo sapiens
  CDR3 for alpha chain variable domain of TCR clone 38584 (TRAV12-3, TRAJ57)
CATSAWGGSEKLVF

SEQ ID NO: 77168 - protein, 16 aa, Homo sapiens
  CDR3 for beta chain variable domain of TCR clone 38584 (TRBV7-3, TRBJ2-2)
CASSLKRGTLSGELFF

SEQ ID NO: 77169 - protein, 17 aa, Homo sapiens
  CDR3 for alpha chain variable domain of TCR clone 38585 (TRAV13-1, TRAJ31)
CAPRDRLMFGYGTQLVV

SEQ ID NO: 77170 - protein, 12 aa, Homo sapiens
  CDR3 for beta chain variable domain of TCR clone 38585 (TRBV7-9, TRBJ2-7)
CASSLEGYEQYF

SEQ ID NO: 77171 - protein, 13 aa, Homo sapiens
  CDR3 for alpha chain variable domain of TCR clone 38586 (TRAV13-1, TRAJ5)
CAASDTGRRALTF

SEQ ID NO: 77172 - protein, 14 aa, Homo sapiens
  CDR3 for beta chain variable domain of TCR clone 38586 (TRBV25-1, TRBJ1-1)
CASTHLGGNTEAFF

SEQ ID NO: 77173 - protein, 15 aa, Homo sapiens
  CDR3 for alpha chain variable domain of TCR clone 38587 (TRAV13-1, TRAJ57)
CAASNTQGGSEKLAF

SEQ ID NO: 77174 - protein, 16 aa, Homo sapiens
  CDR3 for beta chain variable domain of TCR clone 38587 (TRBV19, TRBJ2-1)
CASSKAGPSSYNEQFF

SEQ ID NO: 77175 - protein, 14 aa, Homo sapiens
  CDR3 for alpha chain variable domain of TCR clone 38588 (TRAV12-2, TRAJ17)
CAVNIKAAGNKLTF

SEQ ID NO: 77176 - protein, 16 aa, Homo sapiens
  CDR3 for beta chain variable domain of TCR clone 38588 (TRBV20-1, TRBJ2-6)
CSASSRGYDGANVLTF

SEQ ID NO: 77177 - protein, 11 aa, Homo sapiens
  CDR3 for alpha chain variable domain of TCR clone 38589 (TRAV17, TRAJ49)
CATEAGNQFYF

SEQ ID NO: 77178 - protein, 16 aa, Homo sapiens
  CDR3 for beta chain variable domain of TCR clone 38589 (TRBV7-2, TRBJ1-2)
CASSPTSGTSLGGYTF

SEQ ID NO: 77179 - protein, 12 aa, Homo sapiens
  CDR3 for alpha chain variable domain of TCR clone 38590 (TRAV12-3, TRAJ17)
CAMTLTGNKLTF

SEQ ID NO: 77180 - protein, 15 aa, Homo sapiens
  CDR3 for beta chain variable domain of TCR clone 38590 (TRBV5-7, TRBJ1-5)
CASSYGKLWDQPQHF

SEQ ID NO: 77181 - protein, 13 aa, Homo sapiens
  CDR3 for alpha chain variable domain of TCR clone 38591 (TRAV1-2, TRAJ12)
CAVSMDSSYKLIF

SEQ ID NO: 77182 - protein, 14 aa, Homo sapiens
  CDR3 for beta chain variable domain of TCR clone 38591 (TRBV7-3, TRBJ2-1)
CASSLAGGTNEQFF

SEQ ID NO: 77183 - protein, 17 aa, Homo sapiens
  CDR3 for alpha chain variable domain of TCR clone 38592 (TRAV8-1, TRAJ43)
CAVTNDMRFGAGPRLTV

SEQ ID NO: 77184 - protein, 17 aa, Homo sapiens
  CDR3 for beta chain variable domain of TCR clone 38592 (TRBV5-4, TRBJ2-1)
CASSSAGGRGPYNEQFF

SEQ ID NO: 77185 - protein, 15 aa, Homo sapiens
  CDR3 for alpha chain variable domain of TCR clone 38593 (TRAV13-1, TRAJ42)
CAASIAGGSQGNLIF

SEQ ID NO: 77186 - protein, 15 aa, Homo sapiens
  CDR3 for beta chain variable domain of TCR clone 38593 (TRBV19, TRBJ2-1)
CASSIVRGEGREQFL

SEQ ID NO: 77187 - protein, 16 aa, Homo sapiens
  CDR3 for alpha chain variable domain of TCR clone 38594 (TRAV38-1, TRAJ32)
CAFMPFLGGATNKPIF

SEQ ID NO: 77188 - protein, 13 aa, Homo sapiens
  CDR3 for beta chain variable domain of TCR clone 38594 (TRBV7-9, TRBJ2-7)
CASSFAGAYEQYF

SEQ ID NO: 77189 - protein, 12 aa, Homo sapiens
  CDR3 for alpha chain variable domain of TCR clone 38595 (TRAV12-3, TRAJ17)
CAMTLTGNKLTF

SEQ ID NO: 77190 - protein, 12 aa, Homo sapiens
  CDR3 for beta chain variable domain of TCR clone 38595 (TRBV11-2, TRBJ2-2)
CARSLGGGELFF

SEQ ID NO: 77191 - protein, 15 aa, Homo sapiens
  CDR3 for alpha chain variable domain of TCR clone 38596 (TRAV12-2, TRAJ53)
CAVNGGGGSNYKLTF

SEQ ID NO: 77192 - protein, 10 aa, Homo sapiens
  CDR3 for beta chain variable domain of TCR clone 38596 (TRBV19, TRBJ1-1)
CASRQVEAFF

SEQ ID NO: 77193 - protein, 17 aa, Homo sapiens
  CDR3 for alpha chain variable domain of TCR clone 38597 (TRAV1-1, TRAJ9)
CLLLLRCQKYWRLQTIF

SEQ ID NO: 77194 - protein, 14 aa, Homo sapiens
  CDR3 for beta chain variable domain of TCR clone 38597 (TRBV20-1, TRBJ2-1)
CSAQIGGSANEQFF

SEQ ID NO: 77195 - protein, 14 aa, Homo sapiens
  CDR3 for alpha chain variable domain of TCR clone 38598 (TRAV2, TRAJ9)
CAVDPNTGGFKTIF

SEQ ID NO: 77196 - protein, 14 aa, Homo sapiens
  CDR3 for beta chain variable domain of TCR clone 38598 (TRBV19, TRBJ1-5)
CASRAPDSFLSQHF

SEQ ID NO: 77197 - protein, 14 aa, Homo sapiens
  CDR3 for alpha chain variable domain of TCR clone 38599 (TRAV12-3, TRAJ10)
SHLPLTGGGNKLTF

SEQ ID NO: 77198 - protein, 13 aa, Homo sapiens
  CDR3 for beta chain variable domain of TCR clone 38599 (TRBV4-1, TRBJ2-2)
CASSQENTRELFF

SEQ ID NO: 77199 - protein, 15 aa, Homo sapiens
  CDR3 for alpha chain variable domain of TCR clone 38600 (TRAV26-1, TRAJ15)
CIVRAANQAGTAPIF

SEQ ID NO: 77200 - protein, 15 aa, Homo sapiens
  CDR3 for beta chain variable domain of TCR clone 38600 (TRBV20-1, TRBJ1-1)
CSARSAATSNTEAFF

SEQ ID NO: 77201 - protein, 12 aa, Homo sapiens
  CDR3 for alpha chain variable domain of TCR clone 38601 (TRAV36/DV7, TRAJ54)
CAVVRGAQKRVF

SEQ ID NO: 77202 - protein, 14 aa, Homo sapiens
  CDR3 for beta chain variable domain of TCR clone 38601 (TRBV7-3, TRBJ1-1)
CASSLKGGNTEAFF

SEQ ID NO: 77203 - protein, 16 aa, Homo sapiens
  CDR3 for alpha chain variable domain of TCR clone 38602 (TRAV30, TRAJ24)
CGTEIVDADSWGKFQF

SEQ ID NO: 77204 - protein, 14 aa, Homo sapiens
  CDR3 for beta chain variable domain of TCR clone 38602 (TRBV7-6, TRBJ2-3)
CASSLGTVTDTQYL

SEQ ID NO: 77205 - protein, 12 aa, Homo sapiens
  CDR3 for alpha chain variable domain of TCR clone 38603 (TRAV12-3, TRAJ40)
CAMSSGTYKYIF

SEQ ID NO: 77206 - protein, 14 aa, Homo sapiens
  CDR3 for beta chain variable domain of TCR clone 38603 (TRBV7-6, TRBJ2-3)
CASSLGTVTDTQYF

SEQ ID NO: 77207 - protein, 14 aa, Homo sapiens
  CDR3 for alpha chain variable domain of TCR clone 38604 (TRAV12-1, TRAJ17)
CVVNYKAAGNKLTF

SEQ ID NO: 77208 - protein, 13 aa, Homo sapiens
  CDR3 for beta chain variable domain of TCR clone 38604 (TRBV2, TRBJ2-2)
CASSKKNTGELFF

SEQ ID NO: 77209 - protein, 13 aa, Homo sapiens
  CDR3 for alpha chain variable domain of TCR clone 38605 (TRAV12-2, TRAJ5)
CREQVQGRRALTF

SEQ ID NO: 77210 - protein, 12 aa, Homo sapiens
  CDR3 for beta chain variable domain of TCR clone 38605 (TRBV19, TRBJ1-5)
CASSIAQQPQHF

SEQ ID NO: 77211 - protein, 16 aa, Homo sapiens
  CDR3 for alpha chain variable domain of TCR clone 38606 (TRAV30, TRAJ24)
CGTEIVDADSWGKFQF

SEQ ID NO: 77212 - protein, 17 aa, Homo sapiens
  CDR3 for beta chain variable domain of TCR clone 38606 (TRBV6-5, TRBJ2-1)
CASRKNPRTGGHNEQFF

SEQ ID NO: 77213 - protein, 13 aa, Homo sapiens
  CDR3 for alpha chain variable domain of TCR clone 38607 (TRAV8-3, TRAJ48)
CAVVPFGNEKLTF

SEQ ID NO: 77214 - protein, 15 aa, Homo sapiens
  CDR3 for beta chain variable domain of TCR clone 38607 (TRBV11-2, TRBJ2-1)
CASSSPSTRYKEQFF

SEQ ID NO: 77215 - protein, 13 aa, Homo sapiens
  CDR3 for alpha chain variable domain of TCR clone 38608 (TRAV27, TRAJ58)
CAGAETSGSRLTF

SEQ ID NO: 77216 - protein, 13 aa, Homo sapiens
  CDR3 for beta chain variable domain of TCR clone 38608 (TRBV7-2, TRBJ2-1)
RASNRDRWNEQFF

SEQ ID NO: 77217 - protein, 14 aa, Homo sapiens
  CDR3 for alpha chain variable domain of TCR clone 38609 (TRAV2, TRAJ37)
CAVDFTSNTGELIF

SEQ ID NO: 77218 - protein, 13 aa, Homo sapiens
  CDR3 for beta chain variable domain of TCR clone 38609 (TRBV20-1, TRBJ1-1)
CSAPLGGGTEAFF

SEQ ID NO: 77219 - protein, 18 aa, Homo sapiens
  CDR3 for alpha chain variable domain of TCR clone 38610 (TRAV12-3, TRAJ52)
CAMSVGGAGGTSYGKLTF

SEQ ID NO: 77220 - protein, 15 aa, Homo sapiens
  CDR3 for beta chain variable domain of TCR clone 38610 (TRBV27, TRBJ1-6)
CASSFDRGLGSPLRF

SEQ ID NO: 77221 - protein, 12 aa, Homo sapiens
  CDR3 for alpha chain variable domain of TCR clone 38611 (TRAV8-4, TRAJ43)
CAVSVNNDDMRF

SEQ ID NO: 77222 - protein, 13 aa, Homo sapiens
  CDR3 for beta chain variable domain of TCR clone 38611 (TRBV7-7, TRBJ1-1)
CASSLGANTEAFF

SEQ ID NO: 77223 - protein, 14 aa, Homo sapiens
  CDR3 for alpha chain variable domain of TCR clone 38612 (TRAV14/DV4, TRAJ54)
CAMREAPGAQNLVF

SEQ ID NO: 77224 - protein, 15 aa, Homo sapiens
  CDR3 for beta chain variable domain of TCR clone 38612 (TRBV5-1, TRBJ2-7)
CASSLNGGPAREQYF

SEQ ID NO: 77225 - protein, 14 aa, Homo sapiens
  CDR3 for alpha chain variable domain of TCR clone 38613 (TRAV17, TRAJ16)
CATADFSDGQKLLF

SEQ ID NO: 77226 - protein, 15 aa, Homo sapiens
  CDR3 for beta chain variable domain of TCR clone 38613 (TRBV18, TRBJ2-1)
CASPPPSASYNEQFF

SEQ ID NO: 77227 - protein, 15 aa, Homo sapiens
  CDR3 for alpha chain variable domain of TCR clone 38614 (TRAV27, TRAJ38)
CAARRNAGNNRKLIW

SEQ ID NO: 77228 - protein, 13 aa, Homo sapiens
  CDR3 for beta chain variable domain of TCR clone 38614 (TRBV12-5, TRBJ2-3)
CASGDQQSDTQYF

SEQ ID NO: 77229 - protein, 11 aa, Homo sapiens
  CDR3 for alpha chain variable domain of TCR clone 38615 (TRAV27, TRAJ45)
CAGAQDEVLTD

SEQ ID NO: 77230 - protein, 17 aa, Homo sapiens
  CDR3 for beta chain variable domain of TCR clone 38615 (TRBV11-2, TRBJ2-1)
CASSLYPPGVEYNEQFF

SEQ ID NO: 77231 - protein, 13 aa, Homo sapiens
  CDR3 for alpha chain variable domain of TCR clone 38616 (TRAV12-3, TRAJ54)
CALVPQGAQKLVF

SEQ ID NO: 77232 - protein, 15 aa, Homo sapiens
  CDR3 for beta chain variable domain of TCR clone 38616 (TRBV4-1, TRBJ2-2)
CASSQDPRGTGELFF

SEQ ID NO: 77233 - protein, 17 aa, Homo sapiens
  CDR3 for alpha chain variable domain of TCR clone 38617 (TRAV23/DV6, TRAJ57)
CAASSTLSQGGSVKLVF

SEQ ID NO: 77234 - protein, 14 aa, Homo sapiens
  CDR3 for beta chain variable domain of TCR clone 38617 (TRBV25-1, TRBJ1-1)
CASTHLGGNTEAFF

SEQ ID NO: 77235 - protein, 13 aa, Homo sapiens
  CDR3 for alpha chain variable domain of TCR clone 38618 (TRAV8-3, TRAJ36)
CAVGATGANNLFF

SEQ ID NO: 77236 - protein, 17 aa, Homo sapiens
  CDR3 for beta chain variable domain of TCR clone 38618 (TRBV13, TRBJ2-3)
CASSLSRVAGGRNTQYF

SEQ ID NO: 77237 - protein, 15 aa, Homo sapiens
  CDR3 for alpha chain variable domain of TCR clone 38619 (TRAV26-1, TRAJ29)
CIVTVEGSGNTPLVF

SEQ ID NO: 77238 - protein, 15 aa, Homo sapiens
  CDR3 for beta chain variable domain of TCR clone 38619 (TRBV7-9, TRBJ1-5)
CASSQGHQPNQPQHF

SEQ ID NO: 77239 - protein, 16 aa, Homo sapiens
  CDR3 for alpha chain variable domain of TCR clone 38620 (TRAV12-3, TRAJ53)
CAMSPGSGGSNYKLTS

SEQ ID NO: 77240 - protein, 14 aa, Homo sapiens
  CDR3 for beta chain variable domain of TCR clone 38620 (TRBV4-2, TRBJ2-1)
CASGLDRAYNEQFF

SEQ ID NO: 77241 - protein, 11 aa, Homo sapiens
  CDR3 for alpha chain variable domain of TCR clone 38621 (TRAV12-3, TRAJ43)
CAMSVSNDMRF

SEQ ID NO: 77242 - protein, 15 aa, Homo sapiens
  CDR3 for beta chain variable domain of TCR clone 38621 (TRBV5-1, TRBJ2-1)
CVSSPPRAPYNEQFF

SEQ ID NO: 77243 - protein, 11 aa, Homo sapiens
  CDR3 for alpha chain variable domain of TCR clone 38622 (TRAV2, TRAJ33)
CAVESNYQLIW

SEQ ID NO: 77244 - protein, 14 aa, Homo sapiens
  CDR3 for beta chain variable domain of TCR clone 38622 (TRBV7-9, TRBJ2-1)
CASSPRDSLYEQFF

SEQ ID NO: 77245 - protein, 15 aa, Homo sapiens
  CDR3 for alpha chain variable domain of TCR clone 38623 (TRAV13-1, TRAJ44)
CAASRGGGTASKLTF

SEQ ID NO: 77246 - protein, 13 aa, Homo sapiens
  CDR3 for beta chain variable domain of TCR clone 38623 (TRBV10-3, TRBJ2-7)
CASKLAVNYEQYF

SEQ ID NO: 77247 - protein, 17 aa, Homo sapiens
  CDR3 for alpha chain variable domain of TCR clone 38624 (TRAV8-3, TRAJ28)
CAVGATLGLGVTNSLSG

SEQ ID NO: 77248 - protein, 14 aa, Homo sapiens
  CDR3 for beta chain variable domain of TCR clone 38624 (TRBV7-2, TRBJ2-1)
CASSLGVGYNEQFF

SEQ ID NO: 77249 - protein, 13 aa, Homo sapiens
  CDR3 for alpha chain variable domain of TCR clone 38625 (TRAV27, TRAJ3)
ASLRGSSAAKIIF

SEQ ID NO: 77250 - protein, 15 aa, Homo sapiens
  CDR3 for beta chain variable domain of TCR clone 38625 (TRBV28, TRBJ1-3)
CASSMGWASGNTIYF

SEQ ID NO: 77251 - protein, 14 aa, Homo sapiens
  CDR3 for alpha chain variable domain of TCR clone 38626 (TRAV27, TRAJ22)
CAGVSVLGKRQLTF

SEQ ID NO: 77252 - protein, 17 aa, Homo sapiens
  CDR3 for beta chain variable domain of TCR clone 38626 (TRBV14, TRBJ2-1)
CASSQDRRVTSYNGQFF

SEQ ID NO: 77253 - protein, 13 aa, Homo sapiens
  CDR3 for alpha chain variable domain of TCR clone 38627 (TRAV12-3, TRAJ7)
CAMTPYGNNRLAF

SEQ ID NO: 77254 - protein, 16 aa, Homo sapiens
  CDR3 for beta chain variable domain of TCR clone 38627 (TRBV20-1, TRBJ1-4)
CIARPYGGELNEKLFF

SEQ ID NO: 77255 - protein, 13 aa, Homo sapiens
  CDR3 for alpha chain variable domain of TCR clone 38628 (TRAV3, TRAJ27)
CAVRPLGAGKSTF

SEQ ID NO: 77256 - protein, 13 aa, Homo sapiens
  CDR3 for beta chain variable domain of TCR clone 38628 (TRBV7-9, TRBJ2-3)
YASSPGSTDTQYF

SEQ ID NO: 77257 - protein, 13 aa, Homo sapiens
  CDR3 for alpha chain variable domain of TCR clone 38629 (TRAV8-1, TRAJ30)
CAVIMNRDDKIIF

SEQ ID NO: 77258 - protein, 14 aa, Homo sapiens
  CDR3 for beta chain variable domain of TCR clone 38629 (TRBV7-2, TRBJ1-6)
CASSLQGANSPLHV

SEQ ID NO: 77259 - protein, 15 aa, Homo sapiens
  CDR3 for alpha chain variable domain of TCR clone 38630 (TRAV2, TRAJ22)
YAVPSRGGSARQLTF

SEQ ID NO: 77260 - protein, 11 aa, Homo sapiens
  CDR3 for beta chain variable domain of TCR clone 38630 (TRBV27, TRBJ2-3)
CASSLGDTQYF

SEQ ID NO: 77261 - protein, 12 aa, Homo sapiens
  CDR3 for alpha chain variable domain of TCR clone 38631 (TRAV3, TRAJ7)
CADLLLEQQTRF

SEQ ID NO: 77262 - protein, 13 aa, Homo sapiens
  CDR3 for beta chain variable domain of TCR clone 38631 (TRBV7-3, TRBJ2-5)
CASSFRGGETQYF

SEQ ID NO: 77263 - protein, 16 aa, Homo sapiens
  CDR3 for alpha chain variable domain of TCR clone 38632 (TRAV16, TRAJ52)
CALSAAGGTSYGKLTF

SEQ ID NO: 77264 - protein, 16 aa, Homo sapiens
  CDR3 for beta chain variable domain of TCR clone 38632 (TRBV12-4, TRBJ1-5)
CASSRPVGGSNQTQHF

SEQ ID NO: 77265 - protein, 14 aa, Homo sapiens
  CDR3 for alpha chain variable domain of TCR clone 38633 (TRAV12-1, TRAJ34)
CVVKLDYNTDKLIF

SEQ ID NO: 77266 - protein, 20 aa, Homo sapiens
  CDR3 for beta chain variable domain of TCR clone 38633 (TRBV7-3, TRBJ2-7)
CASSPRGLAGMVAVLRAGHQ

SEQ ID NO: 77267 - protein, 19 aa, Homo sapiens
  CDR3 for alpha chain variable domain of TCR clone 38634 (TRAV38-1, TRAJ53)
CAFMKHGLESGGSNYNLTF

SEQ ID NO: 77268 - protein, 13 aa, Homo sapiens
  CDR3 for beta chain variable domain of TCR clone 38634 (TRBV19, TRBJ2-7)
CASSPRQSYEQYF

SEQ ID NO: 77269 - protein, 15 aa, Homo sapiens
  CDR3 for alpha chain variable domain of TCR clone 38635 (TRAV12-3, TRAJ6)
CAMSATSGGSYIPTF

SEQ ID NO: 77270 - protein, 14 aa, Homo sapiens
  CDR3 for beta chain variable domain of TCR clone 38635 (TRBV7-2, TRBJ2-7)
CASSPKTSFYEQYF

SEQ ID NO: 77271 - protein, 11 aa, Homo sapiens
  CDR3 for alpha chain variable domain of TCR clone 38636 (TRAV2, TRAJ21)
CAVFNFNKFYF

SEQ ID NO: 77272 - protein, 14 aa, Homo sapiens
  CDR3 for beta chain variable domain of TCR clone 38636 (TRBV19, TRBJ2-1)
CASPTFVLSGEQFF

SEQ ID NO: 77273 - protein, 14 aa, Homo sapiens
  CDR3 for alpha chain variable domain of TCR clone 38637 (TRAV3, TRAJ6)
CAVRDWGGSYIPTL

SEQ ID NO: 77274 - protein, 17 aa, Homo sapiens
  CDR3 for beta chain variable domain of TCR clone 38637 (TRBV6-5, TRBJ2-1)
CASRLSGRFESYNEQFF

SEQ ID NO: 77275 - protein, 14 aa, Homo sapiens
  CDR3 for alpha chain variable domain of TCR clone 38638 (TRAV2, TRAJ9)
CAVEDRSGGFKTIF

SEQ ID NO: 77276 - protein, 13 aa, Homo sapiens
  CDR3 for beta chain variable domain of TCR clone 38638 (TRBV19, TRBJ1-2)
CASSQGQVYGYTF

SEQ ID NO: 77277 - protein, 14 aa, Homo sapiens
  CDR3 for alpha chain variable domain of TCR clone 38639 (TRAV16, TRAJ17)
CALSGRAAGNKLTF

SEQ ID NO: 77278 - protein, 15 aa, Homo sapiens
  CDR3 for beta chain variable domain of TCR clone 38639 (TRBV3-1, TRBJ1-2)
CASSPTRLPEGGDTF

SEQ ID NO: 77279 - protein, 15 aa, Homo sapiens
  CDR3 for alpha chain variable domain of TCR clone 38640 (TRAV3, TRAJ20)
CAVRDIKLSDYKLSF

SEQ ID NO: 77280 - protein, 18 aa, Homo sapiens
  CDR3 for beta chain variable domain of TCR clone 38640 (TRBV20-1, TRBJ2-5)
CSQTGDSGRVGGKETQYF

SEQ ID NO: 77281 - protein, 13 aa, Homo sapiens
  CDR3 for alpha chain variable domain of TCR clone 38641 (TRAV1-2, TRAJ9)
CAALNTGGFNTIF

SEQ ID NO: 77282 - protein, 14 aa, Homo sapiens
  CDR3 for beta chain variable domain of TCR clone 38641 (TRBV13, TRBJ2-3)
CASSSGSPTDTQYF

SEQ ID NO: 77283 - protein, 16 aa, Homo sapiens
  CDR3 for alpha chain variable domain of TCR clone 38642 (TRAV30, TRAJ24)
CGTEIVDADSWGKFQF

SEQ ID NO: 77284 - protein, 14 aa, Homo sapiens
  CDR3 for beta chain variable domain of TCR clone 38642 (TRBV4-1, TRBJ2-5)
CASSRSGSGETQYF

SEQ ID NO: 77285 - protein, 13 aa, Homo sapiens
  CDR3 for alpha chain variable domain of TCR clone 38643 (TRAV2, TRAJ15)
CAVASQAGTALIF

SEQ ID NO: 77286 - protein, 11 aa, Homo sapiens
  CDR3 for beta chain variable domain of TCR clone 38643 (TRBV29-1, TRBJ2-5)
CSEDRTGTQYF

SEQ ID NO: 77287 - protein, 16 aa, Homo sapiens
  CDR3 for alpha chain variable domain of TCR clone 38644 (TRAV3, TRAJ37)
CAVRGKGSGNTGKLIF

SEQ ID NO: 77288 - protein, 16 aa, Homo sapiens
  CDR3 for beta chain variable domain of TCR clone 38644 (TRBV12-5, TRBJ2-5)
CSSGPRTSGSQETQYF

SEQ ID NO: 77289 - protein, 14 aa, Homo sapiens
  CDR3 for alpha chain variable domain of TCR clone 38645 (TRAV26-1, TRAJ38)
CIADNAGNNRKLIW

SEQ ID NO: 77290 - protein, 14 aa, Homo sapiens
  CDR3 for beta chain variable domain of TCR clone 38645 (TRBV20-1, TRBJ1-1)
SAVLGVGGNTEAFF

SEQ ID NO: 77291 - protein, 14 aa, Homo sapiens
  CDR3 for alpha chain variable domain of TCR clone 38646 (TRAV38-1, TRAJ45)
CAYYSGGGADGLTF

SEQ ID NO: 77292 - protein, 16 aa, Homo sapiens
  CDR3 for beta chain variable domain of TCR clone 38646 (TRBV2, TRBJ2-1)
CASSVGGSLSYNEQFF

SEQ ID NO: 77293 - protein, 14 aa, Homo sapiens
  CDR3 for alpha chain variable domain of TCR clone 38647 (TRAV1-2, TRAJ8)
CAVREDTGFQKLVF

SEQ ID NO: 77294 - protein, 15 aa, Homo sapiens
  CDR3 for beta chain variable domain of TCR clone 38647 (TRBV28, TRBJ2-4)
CAAGSGTLPMGIQYF

SEQ ID NO: 77295 - protein, 10 aa, Homo sapiens
  CDR3 for alpha chain variable domain of TCR clone 38648 (TRAV26-1, TRAJ22)
CIVSLNFFLF

SEQ ID NO: 77296 - protein, 15 aa, Homo sapiens
  CDR3 for beta chain variable domain of TCR clone 38648 (TRBV4-2, TRBJ1-2)
CASSQRTGGRDGYTF

SEQ ID NO: 77297 - protein, 14 aa, Homo sapiens
  CDR3 for alpha chain variable domain of TCR clone 38649 (TRAV12-3, TRAJ10)
SHLPLTGGGNKLTF

SEQ ID NO: 77298 - protein, 15 aa, Homo sapiens
  CDR3 for beta chain variable domain of TCR clone 38649 (TRBV7-8, TRBJ2-1)
CASSLHGGPYNEQFF

SEQ ID NO: 77299 - protein, 14 aa, Homo sapiens
  CDR3 for alpha chain variable domain of TCR clone 38650 (TRAV12-2, TRAJ45)
CAVNIGGGAEGLTF

SEQ ID NO: 77300 - protein, 13 aa, Homo sapiens
  CDR3 for beta chain variable domain of TCR clone 38650 (TRBV19, TRBJ2-2)
CASSIWSTGELFF

SEQ ID NO: 77301 - protein, 16 aa, Homo sapiens
  CDR3 for alpha chain variable domain of TCR clone 38651 (TRAV14/DV4, TRAJ53)
CAMREGGGGSNYKLTF

SEQ ID NO: 77302 - protein, 17 aa, Homo sapiens
  CDR3 for beta chain variable domain of TCR clone 38651 (TRBV11-2, TRBJ2-1)
CASSLYPPGVEYNEQFF

SEQ ID NO: 77303 - protein, 13 aa, Homo sapiens
  CDR3 for alpha chain variable domain of TCR clone 38652 (TRAV1-2, TRAJ9)
CAALNSGGFKTIF

SEQ ID NO: 77304 - protein, 13 aa, Homo sapiens
  CDR3 for beta chain variable domain of TCR clone 38652 (TRBV19, TRBJ1-2)
CASSVPGQDGYTF

SEQ ID NO: 77305 - protein, 14 aa, Homo sapiens
  CDR3 for alpha chain variable domain of TCR clone 38653 (TRAV1-2, TRAJ16)
CAVNRFSDGQKLLF

SEQ ID NO: 77306 - protein, 15 aa, Homo sapiens
  CDR3 for beta chain variable domain of TCR clone 38653 (TRBV28, TRBJ1-3)
CASGATGKSGNTIYF

SEQ ID NO: 77307 - protein, 14 aa, Homo sapiens
  CDR3 for alpha chain variable domain of TCR clone 38654 (TRAV1-2, TRAJ16)
CAVRSASDGQKLLF

SEQ ID NO: 77308 - protein, 14 aa, Homo sapiens
  CDR3 for beta chain variable domain of TCR clone 38654 (TRBV19, TRBJ2-1)
CASPTFVLSGEQFF

SEQ ID NO: 77309 - protein, 11 aa, Homo sapiens
  CDR3 for alpha chain variable domain of TCR clone 38655 (TRAV12-3, TRAJ49)
CAANTGNQFYF

SEQ ID NO: 77310 - protein, 12 aa, Homo sapiens
  CDR3 for beta chain variable domain of TCR clone 38655 (TRBV6-3, TRBJ2-7)
CASSEPGFGQYF

SEQ ID NO: 77311 - protein, 15 aa, Homo sapiens
  CDR3 for alpha chain variable domain of TCR clone 38656 (TRAV8-3, TRAJ45)
CASSYSGGGADGLTF

SEQ ID NO: 77312 - protein, 13 aa, Homo sapiens
  CDR3 for beta chain variable domain of TCR clone 38656 (TRBV10-3, TRBJ2-7)
CASKLAVNYVQYF

SEQ ID NO: 77313 - protein, 14 aa, Homo sapiens
  CDR3 for alpha chain variable domain of TCR clone 38657 (TRAV17, TRAJ22)
CATSPSGSARQLTF

SEQ ID NO: 77314 - protein, 14 aa, Homo sapiens
  CDR3 for beta chain variable domain of TCR clone 38657 (TRBV19, TRBJ2-1)
CASPTFVLSGEQFF

SEQ ID NO: 77315 - protein, 12 aa, Homo sapiens
  CDR3 for alpha chain variable domain of TCR clone 38658 (TRAV3, TRAJ43)
CAVRDPNNDMRF

SEQ ID NO: 77316 - protein, 14 aa, Homo sapiens
  CDR3 for beta chain variable domain of TCR clone 38658 (TRBV7-9, TRBJ2-4)
CASSLAMGGNIQYF

SEQ ID NO: 77317 - protein, 15 aa, Homo sapiens
  CDR3 for alpha chain variable domain of TCR clone 38659 (TRAV21, TRAJ38)
CAVRQDAANNRKLIW

SEQ ID NO: 77318 - protein, 16 aa, Homo sapiens
  CDR3 for beta chain variable domain of TCR clone 38659 (TRBV4-2, TRBJ1-1)
CASRPLDGGGDTEAFF

SEQ ID NO: 77319 - protein, 13 aa, Homo sapiens
  CDR3 for alpha chain variable domain of TCR clone 38660 (TRAV2, TRAJ40)
CAVVTSGTYKYIF

SEQ ID NO: 77320 - protein, 15 aa, Homo sapiens
  CDR3 for beta chain variable domain of TCR clone 38660 (TRBV2, TRBJ1-5)
CASSPGPTGNQPQHF

SEQ ID NO: 77321 - protein, 16 aa, Homo sapiens
  CDR3 for alpha chain variable domain of TCR clone 38661 (TRAV3, TRAJ18)
CAVRDGRGSTLGRLYF

SEQ ID NO: 77322 - protein, 16 aa, Homo sapiens
  CDR3 for beta chain variable domain of TCR clone 38661 (TRBV12-4, TRBJ2-1)
CASSAVGQGSGDEQFF

SEQ ID NO: 77323 - protein, 13 aa, Homo sapiens
  CDR3 for alpha chain variable domain of TCR clone 38662 (TRAV13-1, TRAJ6)
CAASKGGSYIPTF

SEQ ID NO: 77324 - protein, 15 aa, Homo sapiens
  CDR3 for beta chain variable domain of TCR clone 38662 (TRBV2, TRBJ2-1)
CASSEARSAYNEQFF

SEQ ID NO: 77325 - protein, 10 aa, Homo sapiens
  CDR3 for alpha chain variable domain of TCR clone 38663 (TRAV1-2, TRAJ20)
CAVTDYKLSF

SEQ ID NO: 77326 - protein, 12 aa, Homo sapiens
  CDR3 for beta chain variable domain of TCR clone 38663 (TRBV11-2, TRBJ2-1)
CASSPGNNEQFF

SEQ ID NO: 77327 - protein, 10 aa, Homo sapiens
  CDR3 for alpha chain variable domain of TCR clone 38664 (TRAV13-1, TRAJ26)
CAPYGQNFVF

SEQ ID NO: 77328 - protein, 15 aa, Homo sapiens
  CDR3 for beta chain variable domain of TCR clone 38664 (TRBV28, TRBJ2-3)
CASSQELRGTDTQYF

SEQ ID NO: 77329 - protein, 15 aa, Homo sapiens
  CDR3 for alpha chain variable domain of TCR clone 38665 (TRAV12-3, TRAJ6)
CAMSATTGGSFIPTF

SEQ ID NO: 77330 - protein, 16 aa, Homo sapiens
  CDR3 for beta chain variable domain of TCR clone 38665 (TRBV20-1, TRBJ1-2)
CSASMGQGVANYGYTF

SEQ ID NO: 77331 - protein, 15 aa, Homo sapiens
  CDR3 for alpha chain variable domain of TCR clone 38666 (TRAV34, TRAJ38)
CGADFTPGNNRKLIW

SEQ ID NO: 77332 - protein, 15 aa, Homo sapiens
  CDR3 for beta chain variable domain of TCR clone 38666 (TRBV7-9, TRBJ1-6)
CASSSPGRGNSPLHF

SEQ ID NO: 77333 - protein, 13 aa, Homo sapiens
  CDR3 for alpha chain variable domain of TCR clone 38667 (TRAV26-1, TRAJ30)
CIVRVESNDKIIF

SEQ ID NO: 77334 - protein, 14 aa, Homo sapiens
  CDR3 for beta chain variable domain of TCR clone 38667 (TRBV10-3, TRBJ1-1)
CAISDGSGVTEAFF

SEQ ID NO: 77335 - protein, 12 aa, Homo sapiens
  CDR3 for alpha chain variable domain of TCR clone 38668 (TRAV12-3, TRAJ17)
CAMTLTGNKLTF

SEQ ID NO: 77336 - protein, 13 aa, Homo sapiens
  CDR3 for beta chain variable domain of TCR clone 38668 (TRBV2, TRBJ1-5)
CATAGPGNQPQHF

SEQ ID NO: 77337 - protein, 15 aa, Homo sapiens
  CDR3 for alpha chain variable domain of TCR clone 38669 (TRAV26-1, TRAJ29)
CIVRVEGSGNTPLVF

SEQ ID NO: 77338 - protein, 15 aa, Homo sapiens
  CDR3 for beta chain variable domain of TCR clone 38669 (TRBV28, TRBJ2-5)
CASSPGQGSIETQHF

SEQ ID NO: 77339 - protein, 14 aa, Homo sapiens
  CDR3 for alpha chain variable domain of TCR clone 38670 (TRAV2, TRAJ12)
CAVDAMVSSYKLIF

SEQ ID NO: 77340 - protein, 13 aa, Homo sapiens
  CDR3 for beta chain variable domain of TCR clone 38670 (TRBV19, TRBJ2-1)
CASKVGAGGEQFF

SEQ ID NO: 77341 - protein, 13 aa, Homo sapiens
  CDR3 for alpha chain variable domain of TCR clone 38671 (TRAV8-6, TRAJ50)
CAVIKTSYDKVIF

SEQ ID NO: 77342 - protein, 10 aa, Homo sapiens
  CDR3 for beta chain variable domain of TCR clone 38671 (TRBV7-2, TRBJ2-2)
CASRRPGQNT

SEQ ID NO: 77343 - protein, 14 aa, Homo sapiens
  CDR3 for alpha chain variable domain of TCR clone 38672 (TRAV8-3, TRAJ17)
CAVGAQTAGNKITF

SEQ ID NO: 77344 - protein, 11 aa, Homo sapiens
  CDR3 for beta chain variable domain of TCR clone 38672 (TRBV29-1, TRBJ1-4)
CSVSSGEKLFF

SEQ ID NO: 77345 - protein, 18 aa, Homo sapiens
  CDR3 for alpha chain variable domain of TCR clone 38673 (TRAV21, TRAJ52)
CAVRPSPAGGTSYGKLTF

SEQ ID NO: 77346 - protein, 14 aa, Homo sapiens
  CDR3 for beta chain variable domain of TCR clone 38673 (TRBV7-8, TRBJ2-5)
CASSATGGQETQYF

SEQ ID NO: 77347 - protein, 12 aa, Homo sapiens
  CDR3 for alpha chain variable domain of TCR clone 38674 (TRAV13-1, TRAJ21)
CAAKEGFNKFYF

SEQ ID NO: 77348 - protein, 14 aa, Homo sapiens
  CDR3 for beta chain variable domain of TCR clone 38674 (TRBV5-4, TRBJ1-1)
RASSLDSRRDEAFF

SEQ ID NO: 77349 - protein, 16 aa, Homo sapiens
  CDR3 for alpha chain variable domain of TCR clone 38675 (TRAV30, TRAJ24)
CGTEIVDADSWGKFQF

SEQ ID NO: 77350 - protein, 15 aa, Homo sapiens
  CDR3 for beta chain variable domain of TCR clone 38675 (TRBV11-2, TRBJ2-1)
CASSLTSGGYNEQFF

SEQ ID NO: 77351 - protein, 14 aa, Homo sapiens
  CDR3 for alpha chain variable domain of TCR clone 38676 (TRAV12-2, TRAJ12)
CAVINRDSSYKLIF

SEQ ID NO: 77352 - protein, 15 aa, Homo sapiens
  CDR3 for beta chain variable domain of TCR clone 38676 (TRBV28, TRBJ2-1)
CTSSLDTSSYNEQFF

SEQ ID NO: 77353 - protein, 15 aa, Homo sapiens
  CDR3 for alpha chain variable domain of TCR clone 38677 (TRAV3, TRAJ5)
CAVRDLDTGRRALTF

SEQ ID NO: 77354 - protein, 17 aa, Homo sapiens
  CDR3 for beta chain variable domain of TCR clone 38677 (TRBV4-1, TRBJ2-3)
CASSQSATGGPVDTQYF

SEQ ID NO: 77355 - protein, 18 aa, Homo sapiens
  CDR3 for alpha chain variable domain of TCR clone 38678 (TRAV26-1, TRAJ23)
CIVRVGLEVWNQGGKLIF

SEQ ID NO: 77356 - protein, 16 aa, Homo sapiens
  CDR3 for beta chain variable domain of TCR clone 38678 (TRBV12-4, TRBJ2-5)
CASSFFVRGCQETQYF

SEQ ID NO: 77357 - protein, 14 aa, Homo sapiens
  CDR3 for alpha chain variable domain of TCR clone 38679 (TRAV23/DV6, TRAJ40)
CAARKNSGTYKYIF

SEQ ID NO: 77358 - protein, 14 aa, Homo sapiens
  CDR3 for beta chain variable domain of TCR clone 38679 (TRBV10-3, TRBJ2-5)
CAISERDYHETQYF

SEQ ID NO: 77359 - protein, 14 aa, Homo sapiens
  CDR3 for alpha chain variable domain of TCR clone 38680 (TRAV13-1, TRAJ44)
CAAKATGTASKLTF

SEQ ID NO: 77360 - protein, 14 aa, Homo sapiens
  CDR3 for beta chain variable domain of TCR clone 38680 (TRBV4-2, TRBJ2-1)
CASGLDRAYNEQFF

SEQ ID NO: 77361 - protein, 15 aa, Homo sapiens
  CDR3 for alpha chain variable domain of TCR clone 38681 (TRAV26-1, TRAJ29)
CIVRVEGSRNTPLVF

SEQ ID NO: 77362 - protein, 14 aa, Homo sapiens
  CDR3 for beta chain variable domain of TCR clone 38681 (TRBV18, TRBJ2-5)
CASSPGVSQETQYF

SEQ ID NO: 77363 - protein, 14 aa, Homo sapiens
  CDR3 for alpha chain variable domain of TCR clone 38682 (TRAV13-1, TRAJ36)
CAASMNTGANNLFF

SEQ ID NO: 77364 - protein, 18 aa, Homo sapiens
  CDR3 for beta chain variable domain of TCR clone 38682 (TRBV20-1, TRBJ2-3)
CSARDPWGQGLSTDTQYF

SEQ ID NO: 77365 - protein, 15 aa, Homo sapiens
  CDR3 for alpha chain variable domain of TCR clone 38683 (TRAV1-2, TRAJ15)
CAVDVMGSAGTALIF

SEQ ID NO: 77366 - protein, 13 aa, Homo sapiens
  CDR3 for beta chain variable domain of TCR clone 38683 (TRBV20-1, TRBJ1-1)
CSAFDRESTEAFF

SEQ ID NO: 77367 - protein, 15 aa, Homo sapiens
  CDR3 for alpha chain variable domain of TCR clone 38684 (TRAV3, TRAJ5)
CAVRDRKTGKRALTF

SEQ ID NO: 77368 - protein, 15 aa, Homo sapiens
  CDR3 for beta chain variable domain of TCR clone 38684 (TRBV7-8, TRBJ2-1)
CASSLADSLYNEQFF

SEQ ID NO: 77369 - protein, 16 aa, Homo sapiens
  CDR3 for alpha chain variable domain of TCR clone 38685 (TRAV23/DV6, TRAJ9)
CAANIGGNTGGFKTIF

SEQ ID NO: 77370 - protein, 14 aa, Homo sapiens
  CDR3 for beta chain variable domain of TCR clone 38685 (TRBV9, TRBJ2-7)
CASSVGVGSYEQYF

SEQ ID NO: 77371 - protein, 13 aa, Homo sapiens
  CDR3 for alpha chain variable domain of TCR clone 38686 (TRAV13-2, TRAJ13)
CAERPGGYQKVTF

SEQ ID NO: 77372 - protein, 16 aa, Homo sapiens
  CDR3 for beta chain variable domain of TCR clone 38686 (TRBV18, TRBJ2-5)
CASSPPSSGGVKTQYF

SEQ ID NO: 77373 - protein, 12 aa, Homo sapiens
  CDR3 for alpha chain variable domain of TCR clone 38687 (TRAV29/DV5, TRAJ15)
CASNQAGTDLIF

SEQ ID NO: 77374 - protein, 15 aa, Homo sapiens
  CDR3 for beta chain variable domain of TCR clone 38687 (TRBV11-2, TRBJ2-2)
CASSSDRVNAGELFF

SEQ ID NO: 77375 - protein, 11 aa, Homo sapiens
  CDR3 for alpha chain variable domain of TCR clone 38688 (TRAV2, TRAJ13)
CASGGYQKVTF

SEQ ID NO: 77376 - protein, 16 aa, Homo sapiens
  CDR3 for beta chain variable domain of TCR clone 38688 (TRBV6-1, TRBJ2-5)
CASSETLDRGSETQYF

SEQ ID NO: 77377 - protein, 11 aa, Homo sapiens
  CDR3 for alpha chain variable domain of TCR clone 38689 (TRAV12-3, TRAJ43)
CAMSVSNDMRF

SEQ ID NO: 77378 - protein, 14 aa, Homo sapiens
  CDR3 for beta chain variable domain of TCR clone 38689 (TRBV9, TRBJ2-7)
CASSVRSEGSEQYF

SEQ ID NO: 77379 - protein, 12 aa, Homo sapiens
  CDR3 for alpha chain variable domain of TCR clone 38690 (TRAV3, TRAJ20)
CAVRDGDYKLSF

SEQ ID NO: 77380 - protein, 14 aa, Homo sapiens
  CDR3 for beta chain variable domain of TCR clone 38690 (TRBV25-1, TRBJ1-1)
CASTHLGGNTEAFF

SEQ ID NO: 77381 - protein, 20 aa, Homo sapiens
  CDR3 for alpha chain variable domain of TCR clone 38691 (TRAV26-1, TRAJ42)
CCVLLHRQTYYGGSQGNLIF

SEQ ID NO: 77382 - protein, 16 aa, Homo sapiens
  CDR3 for beta chain variable domain of TCR clone 38691 (TRBV7-3, TRBJ2-2)
CASSLKRGTLSGELFS

SEQ ID NO: 77383 - protein, 12 aa, Homo sapiens
  CDR3 for alpha chain variable domain of TCR clone 38692 (TRAV25, TRAJ11)
CAGASGYSALTF

SEQ ID NO: 77384 - protein, 14 aa, Homo sapiens
  CDR3 for beta chain variable domain of TCR clone 38692 (TRBV5-8, TRBJ2-3)
CASSLGQGTDTQYF

SEQ ID NO: 77385 - protein, 13 aa, Homo sapiens
  CDR3 for alpha chain variable domain of TCR clone 38693 (TRAV17, TRAJ9)
FATDYTGGFKTIF

SEQ ID NO: 77386 - protein, 14 aa, Homo sapiens
  CDR3 for beta chain variable domain of TCR clone 38693 (TRBV19, TRBJ2-5)
CASSMTGQQETQYF

SEQ ID NO: 77387 - protein, 11 aa, Homo sapiens
  CDR3 for alpha chain variable domain of TCR clone 38694 (TRAV1-2, TRAJ40)
CAVPGTYKYIF

SEQ ID NO: 77388 - protein, 16 aa, Homo sapiens
  CDR3 for beta chain variable domain of TCR clone 38694 (TRBV29-1, TRBJ2-7)
CSVEVVGTRGSYEQYF

SEQ ID NO: 77389 - protein, 15 aa, Homo sapiens
  CDR3 for alpha chain variable domain of TCR clone 38695 (TRAV3, TRAJ4)
CAVREGTGGYNKLIF

SEQ ID NO: 77390 - protein, 16 aa, Homo sapiens
  CDR3 for beta chain variable domain of TCR clone 38695 (TRBV27, TRBJ2-2)
CASSSSGVSNTGELFF

SEQ ID NO: 77391 - protein, 15 aa, Homo sapiens
  CDR3 for alpha chain variable domain of TCR clone 38696 (TRAV17, TRAJ57)
CATGPSQGGSEKLVF

SEQ ID NO: 77392 - protein, 15 aa, Homo sapiens
  CDR3 for beta chain variable domain of TCR clone 38696 (TRBV25-1, TRBJ1-4)
CASSPRDSTNEKLFF

SEQ ID NO: 77393 - protein, 14 aa, Homo sapiens
  CDR3 for alpha chain variable domain of TCR clone 38697 (TRAV17, TRAJ4)
CATAPLGGYSKLIF

SEQ ID NO: 77394 - protein, 13 aa, Homo sapiens
  CDR3 for beta chain variable domain of TCR clone 38697 (TRBV12-4, TRBJ1-3)
CASSLASGNTIYF

SEQ ID NO: 77395 - protein, 17 aa, Homo sapiens
  CDR3 for alpha chain variable domain of TCR clone 38698 (TRAV3, TRAJ6)
CAVRDSPRAGGSYIPTF

SEQ ID NO: 77396 - protein, 16 aa, Homo sapiens
  CDR3 for beta chain variable domain of TCR clone 38698 (TRBV4-1, TRBJ2-7)
CASSLTAGQATYEQYF

SEQ ID NO: 77397 - protein, 18 aa, Homo sapiens
  CDR3 for alpha chain variable domain of TCR clone 38699 (TRAV21, TRAJ52)
CAVRPSPAGGTSYGKLTF

SEQ ID NO: 77398 - protein, 13 aa, Homo sapiens
  CDR3 for beta chain variable domain of TCR clone 38699 (TRBV27, TRBJ2-7)
CASSLTTGYEQYF

SEQ ID NO: 77399 - protein, 11 aa, Homo sapiens
  CDR3 for alpha chain variable domain of TCR clone 38700 (TRAV13-1, TRAJ52)
CAPWWYQLWKA

SEQ ID NO: 77400 - protein, 16 aa, Homo sapiens
  CDR3 for beta chain variable domain of TCR clone 38700 (TRBV28, TRBJ2-7)
CASSPWVATGDLSQYF

SEQ ID NO: 77401 - protein, 18 aa, Homo sapiens
  CDR3 for alpha chain variable domain of TCR clone 38701 (TRAV9-2, TRAJ52)
CALSRHNAGGTSYGKLTL

SEQ ID NO: 77402 - protein, 13 aa, Homo sapiens
  CDR3 for beta chain variable domain of TCR clone 38701 (TRBV7-9, TRBJ1-2)
CASSLKQNYGYTF

SEQ ID NO: 77403 - protein, 16 aa, Homo sapiens
  CDR3 for alpha chain variable domain of TCR clone 38702 (TRAV3, TRAJ10)
CAVRDMRAGGGNKLTF

SEQ ID NO: 77404 - protein, 11 aa, Homo sapiens
  CDR3 for beta chain variable domain of TCR clone 38702 (TRBV29-1, TRBJ2-5)
CSEDRTGTQYL

SEQ ID NO: 77405 - protein, 14 aa, Homo sapiens
  CDR3 for alpha chain variable domain of TCR clone 38703 (TRAV1-2, TRAJ16)
CAVNRFSDGQKLLF

SEQ ID NO: 77406 - protein, 17 aa, Homo sapiens
  CDR3 for beta chain variable domain of TCR clone 38703 (TRBV9, TRBJ1-6)
CASSVAGTGIHPSTLGT

SEQ ID NO: 77407 - protein, 13 aa, Homo sapiens
  CDR3 for alpha chain variable domain of TCR clone 38704 (TRAV8-6, TRAJ49)
CAVITNTGNQFYF

SEQ ID NO: 77408 - protein, 13 aa, Homo sapiens
  CDR3 for beta chain variable domain of TCR clone 38704 (TRBV12-4, TRBJ2-7)
CASSPTETYEQYF

SEQ ID NO: 77409 - protein, 12 aa, Homo sapiens
  CDR3 for alpha chain variable domain of TCR clone 38705 (TRAV30, TRAJ43)
CGTEERGNDMRF

SEQ ID NO: 77410 - protein, 13 aa, Homo sapiens
  CDR3 for beta chain variable domain of TCR clone 38705 (TRBV12-4, TRBJ1-2)
CASSSGSKDGYSF

SEQ ID NO: 77411 - protein, 16 aa, Homo sapiens
  CDR3 for alpha chain variable domain of TCR clone 38706 (TRAV30, TRAJ24)
CGTGIVDADSWGKFQF

SEQ ID NO: 77412 - protein, 14 aa, Homo sapiens
  CDR3 for beta chain variable domain of TCR clone 38706 (TRBV7-2, TRBJ2-7)
CASSPKTSFYEQYF

SEQ ID NO: 77413 - protein, 14 aa, Homo sapiens
  CDR3 for alpha chain variable domain of TCR clone 38707 (TRAV35, TRAJ9)
CAVVYNTGGFKTIF

SEQ ID NO: 77414 - protein, 14 aa, Homo sapiens
  CDR3 for beta chain variable domain of TCR clone 38707 (TRBV7-3, TRBJ2-2)
CASSSGGYTGELFF

SEQ ID NO: 77415 - protein, 16 aa, Homo sapiens
  CDR3 for alpha chain variable domain of TCR clone 38708 (TRAV12-3, TRAJ53)
CAMSPGSGGSNHKLTF

SEQ ID NO: 77416 - protein, 17 aa, Homo sapiens
  CDR3 for beta chain variable domain of TCR clone 38708 (TRBV28, TRBJ2-5)
CASSTPEGDALQETQYF

SEQ ID NO: 77417 - protein, 12 aa, Homo sapiens
  CDR3 for alpha chain variable domain of TCR clone 38709 (TRAV8-3, TRAJ20)
CAVDFNDYKLSF

SEQ ID NO: 77418 - protein, 13 aa, Homo sapiens
  CDR3 for beta chain variable domain of TCR clone 38709 (TRBV5-7, TRBJ2-3)
CASSLGRTETQYF

SEQ ID NO: 77419 - protein, 14 aa, Homo sapiens
  CDR3 for alpha chain variable domain of TCR clone 38710 (TRAV17, TRAJ54)
CATDANQGAQKLVF

SEQ ID NO: 77420 - protein, 12 aa, Homo sapiens
  CDR3 for beta chain variable domain of TCR clone 38710 (TRBV7-9, TRBJ2-7)
CASSSKREEQYF

SEQ ID NO: 77421 - protein, 18 aa, Homo sapiens
  CDR3 for alpha chain variable domain of TCR clone 38711 (TRAV3, TRAJ17)
CAVRARRGGRSCRQQANF

SEQ ID NO: 77422 - protein, 15 aa, Homo sapiens
  CDR3 for beta chain variable domain of TCR clone 38711 (TRBV27, TRBJ2-1)
CASSNGGGSSNEQFF

SEQ ID NO: 77423 - protein, 17 aa, Homo sapiens
  CDR3 for alpha chain variable domain of TCR clone 38712 (TRAV17, TRAJ28)
SATDPRRGGAGSYQLTF

SEQ ID NO: 77424 - protein, 16 aa, Homo sapiens
  CDR3 for beta chain variable domain of TCR clone 38712 (TRBV25-1, TRBJ1-1)
CASSGDRDRGRIEAFF

SEQ ID NO: 77425 - protein, 20 aa, Homo sapiens
  CDR3 for alpha chain variable domain of TCR clone 38713 (TRAV12-3, TRAJ41)
SLFIRDSQPSDSATPEALNF

SEQ ID NO: 77426 - protein, 15 aa, Homo sapiens
  CDR3 for beta chain variable domain of TCR clone 38713 (TRBV5-1, TRBJ2-7)
CAGSLDLTSSYEQYF

SEQ ID NO: 77427 - protein, 13 aa, Homo sapiens
  CDR3 for alpha chain variable domain of TCR clone 38714 (TRAV26-1, TRAJ40)
CIVATSGTYKYIF

SEQ ID NO: 77428 - protein, 16 aa, Homo sapiens
  CDR3 for beta chain variable domain of TCR clone 38714 (TRBV7-2, TRBJ2-2)
CASSLYRGPSTGELFF

SEQ ID NO: 77429 - protein, 17 aa, Homo sapiens
  CDR3 for alpha chain variable domain of TCR clone 38715 (TRAV26-1, TRAJ53)
CIVRVDDSGGSNYKLTF

SEQ ID NO: 77430 - protein, 15 aa, Homo sapiens
  CDR3 for beta chain variable domain of TCR clone 38715 (TRBV20-1, TRBJ2-7)
CSASVPAAYFYEQYF

SEQ ID NO: 77431 - protein, 13 aa, Homo sapiens
  CDR3 for alpha chain variable domain of TCR clone 38716 (TRAV26-1, TRAJ48)
CIVRVVGDEKLTF

SEQ ID NO: 77432 - protein, 15 aa, Homo sapiens
  CDR3 for beta chain variable domain of TCR clone 38716 (TRBV15, TRBJ1-5)
CATSRDPVSNQPQHF

SEQ ID NO: 77433 - protein, 17 aa, Homo sapiens
  CDR3 for alpha chain variable domain of TCR clone 38717 (TRAV4, TRAJ13)
CLVGVQGSSGGYQKVNF

SEQ ID NO: 77434 - protein, 18 aa, Homo sapiens
  CDR3 for beta chain variable domain of TCR clone 38717 (TRBV15, TRBJ2-3)
CATSRDGARSWDTDTQYF

SEQ ID NO: 77435 - protein, 11 aa, Homo sapiens
  CDR3 for alpha chain variable domain of TCR clone 38718 (TRAV2, TRAJ33)
CAVDSNYQLIW

SEQ ID NO: 77436 - protein, 14 aa, Homo sapiens
  CDR3 for beta chain variable domain of TCR clone 38718 (TRBV7-2, TRBJ2-7)
CASRSQGAAYEQYF

SEQ ID NO: 77437 - protein, 12 aa, Homo sapiens
  CDR3 for alpha chain variable domain of TCR clone 38719 (TRAV12-2, TRAJ10)
WGVTGGGNKLTF

SEQ ID NO: 77438 - protein, 20 aa, Homo sapiens
  CDR3 for beta chain variable domain of TCR clone 38719 (TRBV19, TRBJ2-1)
CASSISRAVTSTRLNNEQFF

SEQ ID NO: 77439 - protein, 15 aa, Homo sapiens
  CDR3 for alpha chain variable domain of TCR clone 38720 (TRAV38-2/DV8, TRAJ48)
CAYRSGGFGNEKLTF

SEQ ID NO: 77440 - protein, 16 aa, Homo sapiens
  CDR3 for beta chain variable domain of TCR clone 38720 (TRBV28, TRBJ2-7)
CASSPWVATGDRSQYF

SEQ ID NO: 77441 - protein, 15 aa, Homo sapiens
  CDR3 for alpha chain variable domain of TCR clone 38721 (TRAV21, TRAJ32)
CAVNSYGGATNKIIF

SEQ ID NO: 77442 - protein, 18 aa, Homo sapiens
  CDR3 for beta chain variable domain of TCR clone 38721 (TRBV7-9, TRBJ2-1)
CASSTGLAEGSSYNEQFF

SEQ ID NO: 77443 - protein, 11 aa, Homo sapiens
  CDR3 for alpha chain variable domain of TCR clone 38722 (TRAV17, TRAJ9)
CATTGGFKTIF

SEQ ID NO: 77444 - protein, 12 aa, Homo sapiens
  CDR3 for beta chain variable domain of TCR clone 38722 (TRBV12-4, TRBJ1-3)
CASSFSGNTIYF

SEQ ID NO: 77445 - protein, 11 aa, Homo sapiens
  CDR3 for alpha chain variable domain of TCR clone 38723 (TRAV21, TRAJ48)
CAVDRNEKLTF

SEQ ID NO: 77446 - protein, 16 aa, Homo sapiens
  CDR3 for beta chain variable domain of TCR clone 38723 (TRBV12-4, TRBJ1-5)
CASSSGPRGSNQPQHF

SEQ ID NO: 77447 - protein, 11 aa, Homo sapiens
  CDR3 for alpha chain variable domain of TCR clone 38724 (TRAV12-2, TRAJ31)
CAILNNARLMF

SEQ ID NO: 77448 - protein, 13 aa, Homo sapiens
  CDR3 for beta chain variable domain of TCR clone 38724 (TRBV20-1, TRBJ1-1)
CSARLGQGAEAFF

SEQ ID NO: 77449 - protein, 14 aa, Homo sapiens
  CDR3 for alpha chain variable domain of TCR clone 38725 (TRAV36/DV7, TRAJ40)
CAVETTSGTYKYIF

SEQ ID NO: 77450 - protein, 13 aa, Homo sapiens
  CDR3 for beta chain variable domain of TCR clone 38725 (TRBV29-1, TRBJ2-1)
CSVECGRVNEQFF

SEQ ID NO: 77451 - protein, 14 aa, Homo sapiens
  CDR3 for alpha chain variable domain of TCR clone 38726 (TRAV12-1, TRAJ11)
CVVRPNSGYSTLTF

SEQ ID NO: 77452 - protein, 14 aa, Homo sapiens
  CDR3 for beta chain variable domain of TCR clone 38726 (TRBV19, TRBJ2-1)
CASSRLASINEQFF

SEQ ID NO: 77453 - protein, 14 aa, Homo sapiens
  CDR3 for alpha chain variable domain of TCR clone 38727 (TRAV26-1, TRAJ40)
CIVRLLSGTYKYIF

SEQ ID NO: 77454 - protein, 13 aa, Homo sapiens
  CDR3 for beta chain variable domain of TCR clone 38727 (TRBV7-3, TRBJ1-1)
CASSQDWGAEAFF

SEQ ID NO: 77455 - protein, 15 aa, Homo sapiens
  CDR3 for alpha chain variable domain of TCR clone 38728 (TRAV8-3, TRAJ11)
CAVGLLNSGYSTLTF

SEQ ID NO: 77456 - protein, 14 aa, Homo sapiens
  CDR3 for beta chain variable domain of TCR clone 38728 (TRBV25-1, TRBJ1-1)
CASTHLGGNTEAFF

SEQ ID NO: 77457 - protein, 11 aa, Homo sapiens
  CDR3 for alpha chain variable domain of TCR clone 38729 (TRAV21, TRAJ34)
CAVTNTDNLIL

SEQ ID NO: 77458 - protein, 17 aa, Homo sapiens
  CDR3 for beta chain variable domain of TCR clone 38729 (TRBV20-1, TRBJ2-1)
CSARSPSGGPPTMSSSS

SEQ ID NO: 77459 - protein, 15 aa, Homo sapiens
  CDR3 for alpha chain variable domain of TCR clone 38730 (TRAV2, TRAJ9)
CAVAALNTGGFKAIF

SEQ ID NO: 77460 - protein, 14 aa, Homo sapiens
  CDR3 for beta chain variable domain of TCR clone 38730 (TRBV7-8, TRBJ2-5)
CASSATGGQETQYF

SEQ ID NO: 77461 - protein, 16 aa, Homo sapiens
  CDR3 for alpha chain variable domain of TCR clone 38731 (TRAV8-3, TRAJ13)
CAVGAYPSGGFQKVTF

SEQ ID NO: 77462 - protein, 15 aa, Homo sapiens
  CDR3 for beta chain variable domain of TCR clone 38731 (TRBV19, TRBJ1-5)
CASSIVWADNQPQHF

SEQ ID NO: 77463 - protein, 14 aa, Homo sapiens
  CDR3 for alpha chain variable domain of TCR clone 38732 (TRAV8-3, TRAJ39)
CAVGANNAGNMLTF

SEQ ID NO: 77464 - protein, 13 aa, Homo sapiens
  CDR3 for beta chain variable domain of TCR clone 38732 (TRBV20-1, TRBJ1-1)
CSARGGGNTEAFF

SEQ ID NO: 77465 - protein, 12 aa, Homo sapiens
  CDR3 for alpha chain variable domain of TCR clone 38733 (TRAV21, TRAJ13)
PGPSGGYQKVTF

SEQ ID NO: 77466 - protein, 13 aa, Homo sapiens
  CDR3 for beta chain variable domain of TCR clone 38733 (TRBV19, TRBJ1-5)
CASSIGGEQPQHF

SEQ ID NO: 77467 - protein, 20 aa, Homo sapiens
  CDR3 for alpha chain variable domain of TCR clone 38734 (TRAV12-2, TRAJ52)
SPVIQPPTSLRSTSYGKLTF

SEQ ID NO: 77468 - protein, 17 aa, Homo sapiens
  CDR3 for beta chain variable domain of TCR clone 38734 (TRBV14, TRBJ1-2)
CASSQKGSQTFNYGYTF

SEQ ID NO: 77469 - protein, 15 aa, Homo sapiens
  CDR3 for alpha chain variable domain of TCR clone 38735 (TRAV17, TRAJ57)
CATGPSQGGSEKMVF

SEQ ID NO: 77470 - protein, 14 aa, Homo sapiens
  CDR3 for beta chain variable domain of TCR clone 38735 (TRBV12-5, TRBJ2-5)
CASGSRTHQETQYF

SEQ ID NO: 77471 - protein, 13 aa, Homo sapiens
  CDR3 for alpha chain variable domain of TCR clone 38736 (TRAV17, TRAJ9)
CATDYTGGFKTIF

SEQ ID NO: 77472 - protein, 16 aa, Homo sapiens
  CDR3 for beta chain variable domain of TCR clone 38736 (TRBV7-7, TRBJ2-1)
CASRIASGTSYNEQFF

SEQ ID NO: 77473 - protein, 13 aa, Homo sapiens
  CDR3 for alpha chain variable domain of TCR clone 38737 (TRAV3, TRAJ20)
CAARDTPRYKLSF

SEQ ID NO: 77474 - protein, 16 aa, Homo sapiens
  CDR3 for beta chain variable domain of TCR clone 38737 (TRBV20-1, TRBJ2-7)
CSARAPGLALSYEQYF

SEQ ID NO: 77475 - protein, 14 aa, Homo sapiens
  CDR3 for alpha chain variable domain of TCR clone 38738 (TRAV1-2, TRAJ16)
CAVNRFSDGQELLF

SEQ ID NO: 77476 - protein, 14 aa, Homo sapiens
  CDR3 for beta chain variable domain of TCR clone 38738 (TRBV7-3, TRBJ1-1)
CASSLKGGNTEAFF

SEQ ID NO: 77477 - protein, 15 aa, Homo sapiens
  CDR3 for alpha chain variable domain of TCR clone 38739 (TRAV13-1, TRAJ44)
CAASRGGGTASKLTF

SEQ ID NO: 77478 - protein, 14 aa, Homo sapiens
  CDR3 for beta chain variable domain of TCR clone 38739 (TRBV7-2, TRBJ2-5)
CASSPRVSSETQYF

SEQ ID NO: 77479 - protein, 17 aa, Homo sapiens
  CDR3 for alpha chain variable domain of TCR clone 38740 (TRAV13-1, TRAJ31)
CSPRDRLMFGDGTQLVV

SEQ ID NO: 77480 - protein, 12 aa, Homo sapiens
  CDR3 for beta chain variable domain of TCR clone 38740 (TRBV7-9, TRBJ2-7)
CASSLEGYEQYF

SEQ ID NO: 77481 - protein, 12 aa, Homo sapiens
  CDR3 for alpha chain variable domain of TCR clone 38741 (TRAV21, TRAJ29)
CAVTSGNTPLVF

SEQ ID NO: 77482 - protein, 15 aa, Homo sapiens
  CDR3 for beta chain variable domain of TCR clone 38741 (TRBV10-2, TRBJ2-6)
CASSEQGTGANVLAF

SEQ ID NO: 77483 - protein, 15 aa, Homo sapiens
  CDR3 for alpha chain variable domain of TCR clone 38742 (TRAV21, TRAJ53)
CATLNSGGSNYKLTF

SEQ ID NO: 77484 - protein, 12 aa, Homo sapiens
  CDR3 for beta chain variable domain of TCR clone 38742 (TRBV11-2, TRBJ2-1)
CASSPGNNEQFF

SEQ ID NO: 77485 - protein, 16 aa, Homo sapiens
  CDR3 for alpha chain variable domain of TCR clone 38743 (TRAV1-2, TRAJ10)
CAVRVVLTGGGNKLTF

SEQ ID NO: 77486 - protein, 12 aa, Homo sapiens
  CDR3 for beta chain variable domain of TCR clone 38743 (TRBV11-2, TRBJ2-1)
CASSPGNNEQFF

SEQ ID NO: 77487 - protein, 16 aa, Homo sapiens
  CDR3 for alpha chain variable domain of TCR clone 38744 (TRAV1-1, TRAJ8)
CPLLLRGGTGFQKLVF

SEQ ID NO: 77488 - protein, 15 aa, Homo sapiens
  CDR3 for beta chain variable domain of TCR clone 38744 (TRBV7-9, TRBJ1-4)
CASSRTGGFNEKLLF

SEQ ID NO: 77489 - protein, 11 aa, Homo sapiens
  CDR3 for alpha chain variable domain of TCR clone 38745 (TRAV38-1, TRAJ35)
CALMSLDKLWE

SEQ ID NO: 77490 - protein, 13 aa, Homo sapiens
  CDR3 for beta chain variable domain of TCR clone 38745 (TRBV4-1, TRBJ2-5)
CASSQEVQETRYF

SEQ ID NO: 77491 - protein, 12 aa, Homo sapiens
  CDR3 for alpha chain variable domain of TCR clone 38746 (TRAV24, TRAJ32)
CLYGGATNKLIF

SEQ ID NO: 77492 - protein, 14 aa, Homo sapiens
  CDR3 for beta chain variable domain of TCR clone 38746 (TRBV7-2, TRBJ1-5)
CASSTQGAGQPQHF

SEQ ID NO: 77493 - protein, 11 aa, Homo sapiens
  CDR3 for alpha chain variable domain of TCR clone 38747 (TRAV8-3, TRAJ49)
CAVNTGNQFYF

SEQ ID NO: 77494 - protein, 12 aa, Homo sapiens
  CDR3 for beta chain variable domain of TCR clone 38747 (TRBV11-2, TRBJ2-7)
CASSPPADEQYS

SEQ ID NO: 77495 - protein, 12 aa, Homo sapiens
  CDR3 for alpha chain variable domain of TCR clone 38748 (TRAV21, TRAJ33)
CAKMDSNYQLIW

SEQ ID NO: 77496 - protein, 16 aa, Homo sapiens
  CDR3 for beta chain variable domain of TCR clone 38748 (TRBV2, TRBJ1-1)
CASSPPNRGMNTEAFF

SEQ ID NO: 77497 - protein, 16 aa, Homo sapiens
  CDR3 for alpha chain variable domain of TCR clone 38749 (TRAV3, TRAJ37)
CAVRGKGSGNTGKLIF

SEQ ID NO: 77498 - protein, 13 aa, Homo sapiens
  CDR3 for beta chain variable domain of TCR clone 38749 (TRBV28, TRBJ2-7)
CAGAQQGLDEQYF

SEQ ID NO: 77499 - protein, 15 aa, Homo sapiens
  CDR3 for alpha chain variable domain of TCR clone 38750 (TRAV8-3, TRAJ41)
CAVGSNSNSGYALNF

SEQ ID NO: 77500 - protein, 17 aa, Homo sapiens
  CDR3 for beta chain variable domain of TCR clone 38750 (TRBV25-1, TRBJ2-1)
CASSAYGQGRGVYGQFF

SEQ ID NO: 77501 - protein, 13 aa, Homo sapiens
  CDR3 for alpha chain variable domain of TCR clone 38751 (TRAV13-1, TRAJ36)
CAARVTGANNLFF

SEQ ID NO: 77502 - protein, 14 aa, Homo sapiens
  CDR3 for beta chain variable domain of TCR clone 38751 (TRBV2, TRBJ2-3)
CASARDFPADTQYF

SEQ ID NO: 77503 - protein, 14 aa, Homo sapiens
  CDR3 for alpha chain variable domain of TCR clone 38752 (TRAV2, TRAJ37)
CAVDFTSNTGKLIF

SEQ ID NO: 77504 - protein, 13 aa, Homo sapiens
  CDR3 for beta chain variable domain of TCR clone 38752 (TRBV15, TRBJ2-7)
CATSTTGHYEQYF

SEQ ID NO: 77505 - protein, 18 aa, Homo sapiens
  CDR3 for alpha chain variable domain of TCR clone 38753 (TRAV3, TRAJ17)
CAVRARRGGRSCRQQANF

SEQ ID NO: 77506 - protein, 14 aa, Homo sapiens
  CDR3 for beta chain variable domain of TCR clone 38753 (TRBV4-1, TRBJ2-2)
CASSQAVNTGKLFF

SEQ ID NO: 77507 - protein, 13 aa, Homo sapiens
  CDR3 for alpha chain variable domain of TCR clone 38754 (TRAV14/DV4, TRAJ20)
CAMRESNDYKLSF

SEQ ID NO: 77508 - protein, 15 aa, Homo sapiens
  CDR3 for beta chain variable domain of TCR clone 38754 (TRBV7-9, TRBJ1-1)
CASSRPGTANAEAFF

SEQ ID NO: 77509 - protein, 16 aa, Homo sapiens
  CDR3 for alpha chain variable domain of TCR clone 38755 (TRAV30, TRAJ24)
CGTEIVDADSWGKFQF

SEQ ID NO: 77510 - protein, 14 aa, Homo sapiens
  CDR3 for beta chain variable domain of TCR clone 38755 (TRBV12-5, TRBJ2-5)
CASGSRTHQQTQYF

SEQ ID NO: 77511 - protein, 19 aa, Homo sapiens
  CDR3 for alpha chain variable domain of TCR clone 38756 (TRAV38-1, TRAJ53)
CAFMKHGPESGGSNYKLTF

SEQ ID NO: 77512 - protein, 13 aa, Homo sapiens
  CDR3 for beta chain variable domain of TCR clone 38756 (TRBV19, TRBJ2-7)
CASSPRQSYEQYF

SEQ ID NO: 77513 - protein, 14 aa, Homo sapiens
  CDR3 for alpha chain variable domain of TCR clone 38757 (TRAV17, TRAJ57)
CATDPQGGSEKLGF

SEQ ID NO: 77514 - protein, 18 aa, Homo sapiens
  CDR3 for beta chain variable domain of TCR clone 38757 (TRBV6-6, TRBJ1-3)
CASSYSKWDSISGNTIYF

SEQ ID NO: 77515 - protein, 18 aa, Homo sapiens
  CDR3 for alpha chain variable domain of TCR clone 38758 (TRAV21, TRAJ52)
CAVRPSPAGGTSYGKLTF

SEQ ID NO: 77516 - protein, 17 aa, Homo sapiens
  CDR3 for beta chain variable domain of TCR clone 38758 (TRBV13, TRBJ2-3)
CASSLPRVAGGRNTKYF

SEQ ID NO: 77517 - protein, 12 aa, Homo sapiens
  CDR3 for alpha chain variable domain of TCR clone 38759 (TRAV8-3, TRAJ4)
PAVSGGYNKLIF

SEQ ID NO: 77518 - protein, 13 aa, Homo sapiens
  CDR3 for beta chain variable domain of TCR clone 38759 (TRBV20-1, TRBJ1-3)
CSAGAYSGNTIYF

SEQ ID NO: 77519 - protein, 11 aa, Homo sapiens
  CDR3 for alpha chain variable domain of TCR clone 38760 (TRAV3, TRAJ21)
CAVGNFNKFYF

SEQ ID NO: 77520 - protein, 15 aa, Homo sapiens
  CDR3 for beta chain variable domain of TCR clone 38760 (TRBV7-9, TRBJ1-4)
CASSRTGGFNEKLFF

SEQ ID NO: 77521 - protein, 11 aa, Homo sapiens
  CDR3 for alpha chain variable domain of TCR clone 38761 (TRAV12-3, TRAJ49)
CAANTGNRFYF

SEQ ID NO: 77522 - protein, 12 aa, Homo sapiens
  CDR3 for beta chain variable domain of TCR clone 38761 (TRBV6-3, TRBJ2-7)
CASSEPGFEQYF

SEQ ID NO: 77523 - protein, 12 aa, Homo sapiens
  CDR3 for alpha chain variable domain of TCR clone 38762 (TRAV12-3, TRAJ3)
CAIDSSASKIIF

SEQ ID NO: 77524 - protein, 17 aa, Homo sapiens
  CDR3 for beta chain variable domain of TCR clone 38762 (TRBV7-9, TRBJ2-3)
CASSLEEAGAYTDTQYF

SEQ ID NO: 77525 - protein, 14 aa, Homo sapiens
  CDR3 for alpha chain variable domain of TCR clone 38763 (TRAV12-2, TRAJ11)
CAVEDGSGYSTLTF

SEQ ID NO: 77526 - protein, 16 aa, Homo sapiens
  CDR3 for beta chain variable domain of TCR clone 38763 (TRBV6-1, TRBJ1-2)
CASSGAWQGRSHGYTF

SEQ ID NO: 77527 - protein, 14 aa, Homo sapiens
  CDR3 for alpha chain variable domain of TCR clone 38764 (TRAV29/DV5, TRAJ49)
CAASLSNTGNKFYF

SEQ ID NO: 77528 - protein, 21 aa, Homo sapiens
  CDR3 for beta chain variable domain of TCR clone 38764 (TRBV9, TRBJ2-5)
CASRGRLAGGPEDPVLRARHA

SEQ ID NO: 77529 - protein, 14 aa, Homo sapiens
  CDR3 for alpha chain variable domain of TCR clone 38765 (TRAV17, TRAJ16)
CATADFSDGQKLLF

SEQ ID NO: 77530 - protein, 13 aa, Homo sapiens
  CDR3 for beta chain variable domain of TCR clone 38765 (TRBV28, TRBJ2-2)
CASIRESTGELFF

SEQ ID NO: 77531 - protein, 11 aa, Homo sapiens
  CDR3 for alpha chain variable domain of TCR clone 38766 (TRAV12-1, TRAJ21)
CVVYNFNKFYF

SEQ ID NO: 77532 - protein, 14 aa, Homo sapiens
  CDR3 for beta chain variable domain of TCR clone 38766 (TRBV19, TRBJ2-7)
CASSMGQGASEQYF

SEQ ID NO: 77533 - protein, 13 aa, Homo sapiens
  CDR3 for alpha chain variable domain of TCR clone 38767 (TRAV12-3, TRAJ54)
CAMFAQGAQKLVF

SEQ ID NO: 77534 - protein, 16 aa, Homo sapiens
  CDR3 for beta chain variable domain of TCR clone 38767 (TRBV7-6, TRBJ2-3)
RASSPRRGGLGDTQYF

SEQ ID NO: 77535 - protein, 13 aa, Homo sapiens
  CDR3 for alpha chain variable domain of TCR clone 38768 (TRAV35, TRAJ42)
CAGFPGSQGNLVF

SEQ ID NO: 77536 - protein, 13 aa, Homo sapiens
  CDR3 for beta chain variable domain of TCR clone 38768 (TRBV29-1, TRBJ2-1)
CSVEGGRVNEQFF

SEQ ID NO: 77537 - protein, 15 aa, Homo sapiens
  CDR3 for alpha chain variable domain of TCR clone 38769 (TRAV3, TRAJ22)
CAVRDRGGSARQLTF

SEQ ID NO: 77538 - protein, 14 aa, Homo sapiens
  CDR3 for beta chain variable domain of TCR clone 38769 (TRBV7-8, TRBJ2-5)
CASSATGGQETQYF

SEQ ID NO: 77539 - protein, 16 aa, Homo sapiens
  CDR3 for alpha chain variable domain of TCR clone 38770 (TRAV16, TRAJ52)
CSLSAAGGTSYGKLTF

SEQ ID NO: 77540 - protein, 17 aa, Homo sapiens
  CDR3 for beta chain variable domain of TCR clone 38770 (TRBV11-2, TRBJ2-1)
CASSLYPPGVEYNEQFF

SEQ ID NO: 77541 - protein, 13 aa, Homo sapiens
  CDR3 for alpha chain variable domain of TCR clone 38771 (TRAV17, TRAJ6)
CATGFGGSYIPTF

SEQ ID NO: 77542 - protein, 14 aa, Homo sapiens
  CDR3 for beta chain variable domain of TCR clone 38771 (TRBV5-1, TRBJ2-5)
CASSSGGSQETQYF

SEQ ID NO: 77543 - protein, 14 aa, Homo sapiens
  CDR3 for alpha chain variable domain of TCR clone 38772 (TRAV13-1, TRAJ26)
CAASRGNYGQNFVF

SEQ ID NO: 77544 - protein, 18 aa, Homo sapiens
  CDR3 for beta chain variable domain of TCR clone 38772 (TRBV20-1, TRBJ2-3)
CSASGLAGGPGTTDTQYF

SEQ ID NO: 77545 - protein, 16 aa, Homo sapiens
  CDR3 for alpha chain variable domain of TCR clone 38773 (TRAV4, TRAJ9)
CLVGDPNRPGGFKTIF

SEQ ID NO: 77546 - protein, 18 aa, Homo sapiens
  CDR3 for beta chain variable domain of TCR clone 38773 (TRBV28, TRBJ1-4)
CASSPPYRGRSEKLFLAV

SEQ ID NO: 77547 - protein, 15 aa, Homo sapiens
  CDR3 for alpha chain variable domain of TCR clone 38774 (TRAV25, TRAJ53)
CPTSNSGGSNYKLTF

SEQ ID NO: 77548 - protein, 16 aa, Homo sapiens
  CDR3 for beta chain variable domain of TCR clone 38774 (TRBV12-4, TRBJ1-5)
CASSRPVGGSNQPQHF

SEQ ID NO: 77549 - protein, 16 aa, Homo sapiens
  CDR3 for alpha chain variable domain of TCR clone 38775 (TRAV29/DV5, TRAJ44)
CAASALGTASNSPLGL

SEQ ID NO: 77550 - protein, 13 aa, Homo sapiens
  CDR3 for beta chain variable domain of TCR clone 38775 (TRBV29-1, TRBJ2-7)
CSVKRGGNYEQYF

SEQ ID NO: 77551 - protein, 12 aa, Homo sapiens
  CDR3 for alpha chain variable domain of TCR clone 38776 (TRAV13-1, TRAJ20)
CAARQNDYKLSF

SEQ ID NO: 77552 - protein, 14 aa, Homo sapiens
  CDR3 for beta chain variable domain of TCR clone 38776 (TRBV5-1, TRBJ2-7)
CASSLASGVNEQYF

SEQ ID NO: 77553 - protein, 13 aa, Homo sapiens
  CDR3 for alpha chain variable domain of TCR clone 38777 (TRAV35, TRAJ32)
CAGVGGATNKLIF

SEQ ID NO: 77554 - protein, 17 aa, Homo sapiens
  CDR3 for beta chain variable domain of TCR clone 38777 (TRBV4-3, TRBJ2-1)
CASSQFYSGRASGEQFF

SEQ ID NO: 77555 - protein, 14 aa, Homo sapiens
  CDR3 for alpha chain variable domain of TCR clone 38778 (TRAV12-2, TRAJ9)
CAVNSLEGGFKTIF

SEQ ID NO: 77556 - protein, 16 aa, Homo sapiens
  CDR3 for beta chain variable domain of TCR clone 38778 (TRBV19, TRBJ1-6)
CASSVAPVAGNSPLHF

SEQ ID NO: 77557 - protein, 14 aa, Homo sapiens
  CDR3 for alpha chain variable domain of TCR clone 38779 (TRAV8-1, TRAJ34)
CAVITTYNTDKLIF

SEQ ID NO: 77558 - protein, 14 aa, Homo sapiens
  CDR3 for beta chain variable domain of TCR clone 38779 (TRBV11-1, TRBJ1-3)
CASSHNGQGNTIYF

SEQ ID NO: 77559 - protein, 14 aa, Homo sapiens
  CDR3 for alpha chain variable domain of TCR clone 38780 (TRAV17, TRAJ22)
CATSPSGSARQLTF

SEQ ID NO: 77560 - protein, 15 aa, Homo sapiens
  CDR3 for beta chain variable domain of TCR clone 38780 (TRBV4-1, TRBJ2-5)
CASSQWELYQETQYF

SEQ ID NO: 77561 - protein, 14 aa, Homo sapiens
  CDR3 for alpha chain variable domain of TCR clone 38781 (TRAV16, TRAJ33)
CALSAMDSNYQLIW

SEQ ID NO: 77562 - protein, 17 aa, Homo sapiens
  CDR3 for beta chain variable domain of TCR clone 38781 (TRBV25-1, TRBJ2-7)
CASSDARVVSSSYEQYF

SEQ ID NO: 77563 - protein, 11 aa, Homo sapiens
  CDR3 for alpha chain variable domain of TCR clone 38782 (TRAV26-1, TRAJ37)
CIVRVGRKLIF

SEQ ID NO: 77564 - protein, 14 aa, Homo sapiens
  CDR3 for beta chain variable domain of TCR clone 38782 (TRBV7-9, TRBJ2-1)
CASSSDRGLDEQFF

SEQ ID NO: 77565 - protein, 16 aa, Homo sapiens
  CDR3 for alpha chain variable domain of TCR clone 38783 (TRAV8-4, TRAJ16)
CAVSPVGRWPEAALCK

SEQ ID NO: 77566 - protein, 14 aa, Homo sapiens
  CDR3 for beta chain variable domain of TCR clone 38783 (TRBV23-1, TRBJ2-5)
CASSFLRSQETQYF

SEQ ID NO: 77567 - protein, 17 aa, Homo sapiens
  CDR3 for alpha chain variable domain of TCR clone 38784 (TRAV4, TRAJ42)
CLVGALNYGGSQGNLIF

SEQ ID NO: 77568 - protein, 12 aa, Homo sapiens
  CDR3 for beta chain variable domain of TCR clone 38784 (TRBV20-1, TRBJ2-1)
CSAQYTYNEQFF

SEQ ID NO: 77569 - protein, 13 aa, Homo sapiens
  CDR3 for alpha chain variable domain of TCR clone 38785 (TRAV17, TRAJ26)
CATVDNYGQNVVF

SEQ ID NO: 77570 - protein, 16 aa, Homo sapiens
  CDR3 for beta chain variable domain of TCR clone 38785 (TRBV2, TRBJ2-1)
CASSVGGSLSYNEQFF

SEQ ID NO: 77571 - protein, 15 aa, Homo sapiens
  CDR3 for alpha chain variable domain of TCR clone 38786 (TRAV21, TRAJ24)
CAARSSTDSWGKLQF

SEQ ID NO: 77572 - protein, 15 aa, Homo sapiens
  CDR3 for beta chain variable domain of TCR clone 38786 (TRBV20-1, TRBJ1-1)
CSASRGVTGNTEAFS

SEQ ID NO: 77573 - protein, 14 aa, Homo sapiens
  CDR3 for alpha chain variable domain of TCR clone 38787 (TRAV1-1, TRAJ28)
CAAPSGAGSYQLTF

SEQ ID NO: 77574 - protein, 15 aa, Homo sapiens
  CDR3 for beta chain variable domain of TCR clone 38787 (TRBV7-2, TRBJ1-2)
CARSLVSGGDYGYTF

SEQ ID NO: 77575 - protein, 13 aa, Homo sapiens
  CDR3 for alpha chain variable domain of TCR clone 38788 (TRAV8-6, TRAJ24)
CAVSSDSWGKLQF

SEQ ID NO: 77576 - protein, 13 aa, Homo sapiens
  CDR3 for beta chain variable domain of TCR clone 38788 (TRBV7-9, TRBJ2-3)
CASSPGSTDTQYF

SEQ ID NO: 77577 - protein, 12 aa, Homo sapiens
  CDR3 for alpha chain variable domain of TCR clone 38789 (TRAV12-3, TRAJ17)
CAMTLTGNKLTF

SEQ ID NO: 77578 - protein, 15 aa, Homo sapiens
  CDR3 for beta chain variable domain of TCR clone 38789 (TRBV20-1, TRBJ2-7)
CGARDWVSGMDEQYF

SEQ ID NO: 77579 - protein, 18 aa, Homo sapiens
  CDR3 for alpha chain variable domain of TCR clone 38790 (TRAV13-1, TRAJ52)
CAASKRSAGGTSYGKLTF

SEQ ID NO: 77580 - protein, 16 aa, Homo sapiens
  CDR3 for beta chain variable domain of TCR clone 38790 (TRBV2, TRBJ1-5)
CASSELHKSGFQPQHF

SEQ ID NO: 77581 - protein, 16 aa, Homo sapiens
  CDR3 for alpha chain variable domain of TCR clone 38791 (TRAV27, TRAJ13)
CAGAESDSGGYQKVTF

SEQ ID NO: 77582 - protein, 15 aa, Homo sapiens
  CDR3 for beta chain variable domain of TCR clone 38791 (TRBV29-1, TRBJ2-1)
CSVGRHALFYNEQFF

SEQ ID NO: 77583 - protein, 14 aa, Homo sapiens
  CDR3 for alpha chain variable domain of TCR clone 38792 (TRAV12-2, TRAJ13)
CAVKKTGGYQKVTF

SEQ ID NO: 77584 - protein, 14 aa, Homo sapiens
  CDR3 for beta chain variable domain of TCR clone 38792 (TRBV20-1, TRBJ2-7)
CSAKRGRSSYEQYF

SEQ ID NO: 77585 - protein, 11 aa, Homo sapiens
  CDR3 for alpha chain variable domain of TCR clone 38793 (TRAV2, TRAJ13)
CASGGYQKVTF

SEQ ID NO: 77586 - protein, 15 aa, Homo sapiens
  CDR3 for beta chain variable domain of TCR clone 38793 (TRBV5-7, TRBJ1-5)
CASSYGKLWDQPQHF

SEQ ID NO: 77587 - protein, 16 aa, Homo sapiens
  CDR3 for alpha chain variable domain of TCR clone 38794 (TRAV30, TRAJ24)
CGTEIVDADSWRKFRF

SEQ ID NO: 77588 - protein, 14 aa, Homo sapiens
  CDR3 for beta chain variable domain of TCR clone 38794 (TRBV12-5, TRBJ2-5)
CASGSRTHQETQYF

SEQ ID NO: 77589 - protein, 12 aa, Homo sapiens
  CDR3 for alpha chain variable domain of TCR clone 38795 (TRAV13-1, TRAJ15)
CAASQAGTALIF

SEQ ID NO: 77590 - protein, 14 aa, Homo sapiens
  CDR3 for beta chain variable domain of TCR clone 38795 (TRBV19, TRBJ2-2)
CASSTLHRSEELFF

SEQ ID NO: 77591 - protein, 14 aa, Homo sapiens
  CDR3 for alpha chain variable domain of TCR clone 38796 (TRAV1-1, TRAJ27)
CAVIYNTNAGKSTF

SEQ ID NO: 77592 - protein, 18 aa, Homo sapiens
  CDR3 for beta chain variable domain of TCR clone 38796 (TRBV7-3, TRBJ2-1)
CASSLTLASGRAMVSSPS

SEQ ID NO: 77593 - protein, 17 aa, Homo sapiens
  CDR3 for alpha chain variable domain of TCR clone 38797 (TRAV17, TRAJ52)
CATERPPGGTSYGKLTF

SEQ ID NO: 77594 - protein, 15 aa, Homo sapiens
  CDR3 for beta chain variable domain of TCR clone 38797 (TRBV5-1, TRBJ2-1)
CASSLVANSYNEQFF

SEQ ID NO: 77595 - protein, 13 aa, Homo sapiens
  CDR3 for alpha chain variable domain of TCR clone 38798 (TRAV25, TRAJ30)
CAGRVDRDDKIIF

SEQ ID NO: 77596 - protein, 17 aa, Homo sapiens
  CDR3 for beta chain variable domain of TCR clone 38798 (TRBV7-9, TRBJ2-6)
GASSFGAGYSGANVLTF

SEQ ID NO: 77597 - protein, 15 aa, Homo sapiens
  CDR3 for alpha chain variable domain of TCR clone 38799 (TRAV16, TRAJ10)
CSLRELTGGGNKLTF

SEQ ID NO: 77598 - protein, 14 aa, Homo sapiens
  CDR3 for beta chain variable domain of TCR clone 38799 (TRBV5-5, TRBJ2-7)
CASSLGQGTYEQYF

SEQ ID NO: 77599 - protein, 14 aa, Homo sapiens
  CDR3 for alpha chain variable domain of TCR clone 38800 (TRAV38-1, TRAJ45)
CAYYSGGGADGLTF

SEQ ID NO: 77600 - protein, 17 aa, Homo sapiens
  CDR3 for beta chain variable domain of TCR clone 38800 (TRBV7-7, TRBJ1-1)
CASIGDRPNLGVTEAFF

SEQ ID NO: 77601 - protein, 13 aa, Homo sapiens
  CDR3 for alpha chain variable domain of TCR clone 38801 (TRAV12-1, TRAJ21)
RVVTLYNFNKFYF

SEQ ID NO: 77602 - protein, 20 aa, Homo sapiens
  CDR3 for beta chain variable domain of TCR clone 38801 (TRBV7-8, TRBJ2-1)
CASSLAHRLAGVRSYNEQFF

SEQ ID NO: 77603 - protein, 18 aa, Homo sapiens
  CDR3 for alpha chain variable domain of TCR clone 38802 (TRAV13-1, TRAJ52)
CAAKNPNAGGTSYGKLTF

SEQ ID NO: 77604 - protein, 15 aa, Homo sapiens
  CDR3 for beta chain variable domain of TCR clone 38802 (TRBV2, TRBJ2-7)
CASSEGLARSYEQYF

SEQ ID NO: 77605 - protein, 12 aa, Homo sapiens
  CDR3 for alpha chain variable domain of TCR clone 38803 (TRAV12-3, TRAJ40)
FAMSSGTYKYIF

SEQ ID NO: 77606 - protein, 15 aa, Homo sapiens
  CDR3 for beta chain variable domain of TCR clone 38803 (TRBV7-3, TRBJ2-2)
CASSETGQGTGELFF

SEQ ID NO: 77607 - protein, 16 aa, Homo sapiens
  CDR3 for alpha chain variable domain of TCR clone 38804 (TRAV27, TRAJ52)
CAGAGAGGTSHGKLTF

SEQ ID NO: 77608 - protein, 17 aa, Homo sapiens
  CDR3 for beta chain variable domain of TCR clone 38804 (TRBV24-1, TRBJ2-3)
CATSDLPSGEDTDTQYF

SEQ ID NO: 77609 - protein, 14 aa, Homo sapiens
  CDR3 for alpha chain variable domain of TCR clone 38805 (TRAV20, TRAJ42)
CAVQARGSRGNLIF

SEQ ID NO: 77610 - protein, 15 aa, Homo sapiens
  CDR3 for beta chain variable domain of TCR clone 38805 (TRBV2, TRBJ2-1)
CASSELAGSYNEQFF

SEQ ID NO: 77611 - protein, 13 aa, Homo sapiens
  CDR3 for alpha chain variable domain of TCR clone 38806 (TRAV12-3, TRAJ13)
CAMSSGGHQKVTF

SEQ ID NO: 77612 - protein, 14 aa, Homo sapiens
  CDR3 for beta chain variable domain of TCR clone 38806 (TRBV2, TRBJ2-1)
CASRTGSSYNEQFF

SEQ ID NO: 77613 - protein, 16 aa, Homo sapiens
  CDR3 for alpha chain variable domain of TCR clone 38807 (TRAV1-2, TRAJ10)
CAVRGVLAGGGNKLTF

SEQ ID NO: 77614 - protein, 15 aa, Homo sapiens
  CDR3 for beta chain variable domain of TCR clone 38807 (TRBV7-9, TRBJ1-6)
CASSSPGRGNSPLHF

SEQ ID NO: 77615 - protein, 11 aa, Homo sapiens
  CDR3 for alpha chain variable domain of TCR clone 38808 (TRAV12-1, TRAJ34)
CVVNKGRELIF

SEQ ID NO: 77616 - protein, 12 aa, Homo sapiens
  CDR3 for beta chain variable domain of TCR clone 38808 (TRBV11-2, TRBJ2-2)
CASNLGGGELFF

SEQ ID NO: 77617 - protein, 12 aa, Homo sapiens
  CDR3 for alpha chain variable domain of TCR clone 38809 (TRAV12-1, TRAJ40)
CVVYLGTYKYIF

SEQ ID NO: 77618 - protein, 14 aa, Homo sapiens
  CDR3 for beta chain variable domain of TCR clone 38809 (TRBV7-9, TRBJ2-5)
CASSLDTAQETQYF

SEQ ID NO: 77619 - protein, 16 aa, Homo sapiens
  CDR3 for alpha chain variable domain of TCR clone 38810 (TRAV30, TRAJ24)
CGTEIVDADSWGKFQF

SEQ ID NO: 77620 - protein, 11 aa, Homo sapiens
  CDR3 for beta chain variable domain of TCR clone 38810 (TRBV19, TRBJ2-2)
CASRYSGELFF

SEQ ID NO: 77621 - protein, 18 aa, Homo sapiens
  CDR3 for alpha chain variable domain of TCR clone 38811 (TRAV26-2, TRAJ45)
CILRVDKYSGGGADGLTF

SEQ ID NO: 77622 - protein, 16 aa, Homo sapiens
  CDR3 for beta chain variable domain of TCR clone 38811 (TRBV2, TRBJ1-4)
CASNLLQGATNEKLSF

SEQ ID NO: 77623 - protein, 14 aa, Homo sapiens
  CDR3 for alpha chain variable domain of TCR clone 38812 (TRAV8-3, TRAJ9)
CAVVYNTGGFKTIF

SEQ ID NO: 77624 - protein, 14 aa, Homo sapiens
  CDR3 for beta chain variable domain of TCR clone 38812 (TRBV7-3, TRBJ2-2)
CTSSSGGYTGELFF

SEQ ID NO: 77625 - protein, 18 aa, Homo sapiens
  CDR3 for alpha chain variable domain of TCR clone 38813 (TRAV12-3, TRAJ52)
CAMSVGGSGGTSYGKLTF

SEQ ID NO: 77626 - protein, 15 aa, Homo sapiens
  CDR3 for beta chain variable domain of TCR clone 38813 (TRBV27, TRBJ1-6)
CASSFDRGLGSPLHF

SEQ ID NO: 77627 - protein, 14 aa, Homo sapiens
  CDR3 for alpha chain variable domain of TCR clone 38814 (TRAV1-2, TRAJ16)
CAVNRFSDGLKLLF

SEQ ID NO: 77628 - protein, 16 aa, Homo sapiens
  CDR3 for beta chain variable domain of TCR clone 38814 (TRBV20-1, TRBJ1-4)
CSAPGQGLLTNEKLFF

SEQ ID NO: 77629 - protein, 21 aa, Homo sapiens
  CDR3 for alpha chain variable domain of TCR clone 38815 (TRAV1-1, TRAJ6)
CLLLLRCEKLERTGGSYIPTF

SEQ ID NO: 77630 - protein, 13 aa, Homo sapiens
  CDR3 for beta chain variable domain of TCR clone 38815 (TRBV10-2, TRBJ2-7)
CASGASGGYEQYF

SEQ ID NO: 77631 - protein, 12 aa, Homo sapiens
  CDR3 for alpha chain variable domain of TCR clone 38816 (TRAV1-1, TRAJ8)
CAGGTGFQKLVF

SEQ ID NO: 77632 - protein, 15 aa, Homo sapiens
  CDR3 for beta chain variable domain of TCR clone 38816 (TRBV7-9, TRBJ1-4)
CASSRTGGFNEKLFC

SEQ ID NO: 77633 - protein, 15 aa, Homo sapiens
  CDR3 for alpha chain variable domain of TCR clone 38817 (TRAV26-1, TRAJ15)
CIVRAANQAGTALIF

SEQ ID NO: 77634 - protein, 15 aa, Homo sapiens
  CDR3 for beta chain variable domain of TCR clone 38817 (TRBV20-1, TRBJ1-1)
CGARSAATSNTEAFF

SEQ ID NO: 77635 - protein, 13 aa, Homo sapiens
  CDR3 for alpha chain variable domain of TCR clone 38818 (TRAV38-1, TRAJ42)
FARWGGSQGNLIF

SEQ ID NO: 77636 - protein, 17 aa, Homo sapiens
  CDR3 for beta chain variable domain of TCR clone 38818 (TRBV20-1, TRBJ2-1)
CSARDPLAGVWDNEQFF

SEQ ID NO: 77637 - protein, 14 aa, Homo sapiens
  CDR3 for alpha chain variable domain of TCR clone 38819 (TRAV13-1, TRAJ5)
CAASPDTGRRALTF

SEQ ID NO: 77638 - protein, 15 aa, Homo sapiens
  CDR3 for beta chain variable domain of TCR clone 38819 (TRBV7-2, TRBJ2-7)
CASSLTGQGTYVQYF

SEQ ID NO: 77639 - protein, 16 aa, Homo sapiens
  CDR3 for alpha chain variable domain of TCR clone 38820 (TRAV26-1, TRAJ53)
CIVRVAMGGSNYKLTF

SEQ ID NO: 77640 - protein, 15 aa, Homo sapiens
  CDR3 for beta chain variable domain of TCR clone 38820 (TRBV20-1, TRBJ2-7)
CSARDRVSGMDEQYF

SEQ ID NO: 77641 - protein, 10 aa, Homo sapiens
  CDR3 for alpha chain variable domain of TCR clone 38821 (TRAV16, TRAJ22)
SAMYLRQLTF

SEQ ID NO: 77642 - protein, 15 aa, Homo sapiens
  CDR3 for beta chain variable domain of TCR clone 38821 (TRBV7-9, TRBJ1-6)
CASSSPGRGNSPLHS

SEQ ID NO: 77643 - protein, 14 aa, Homo sapiens
  CDR3 for alpha chain variable domain of TCR clone 38822 (TRAV13-1, TRAJ24)
CAASRTDSWGKLQF

SEQ ID NO: 77644 - protein, 15 aa, Homo sapiens
  CDR3 for beta chain variable domain of TCR clone 38822 (TRBV6-1, TRBJ2-7)
CDSSEPIAATTEQYF

SEQ ID NO: 77645 - protein, 12 aa, Homo sapiens
  CDR3 for alpha chain variable domain of TCR clone 38823 (TRAV2, TRAJ31)
CAVEDNNARLMF

SEQ ID NO: 77646 - protein, 16 aa, Homo sapiens
  CDR3 for beta chain variable domain of TCR clone 38823 (TRBV10-3, TRBJ2-1)
CAISGVGDGGGGEKFF

SEQ ID NO: 77647 - protein, 14 aa, Homo sapiens
  CDR3 for alpha chain variable domain of TCR clone 38824 (TRAV13-1, TRAJ13)
CAASRVGGYQKVTF

SEQ ID NO: 77648 - protein, 17 aa, Homo sapiens
  CDR3 for beta chain variable domain of TCR clone 38824 (TRBV15, TRBJ1-5)
CAASRAPPGTRNQPQHF

SEQ ID NO: 77649 - protein, 12 aa, Homo sapiens
  CDR3 for alpha chain variable domain of TCR clone 38825 (TRAV12-3, TRAJ17)
CAMTLTGNKLTF

SEQ ID NO: 77650 - protein, 16 aa, Homo sapiens
  CDR3 for beta chain variable domain of TCR clone 38825 (TRBV7-7, TRBJ2-1)
CASSLASGTSYNEQFF

SEQ ID NO: 77651 - protein, 15 aa, Homo sapiens
  CDR3 for alpha chain variable domain of TCR clone 38826 (TRAV12-3, TRAJ49)
CAMAVTPNAGNQFYF

SEQ ID NO: 77652 - protein, 14 aa, Homo sapiens
  CDR3 for beta chain variable domain of TCR clone 38826 (TRBV7-8, TRBJ2-3)
CASSLEAGTDTQYF

SEQ ID NO: 77653 - protein, 14 aa, Homo sapiens
  CDR3 for alpha chain variable domain of TCR clone 38827 (TRAV26-1, TRAJ38)
GIADNAGNNRKLIW

SEQ ID NO: 77654 - protein, 13 aa, Homo sapiens
  CDR3 for beta chain variable domain of TCR clone 38827 (TRBV20-1, TRBJ1-1)
CSARGGGNTEAFF

SEQ ID NO: 77655 - protein, 12 aa, Homo sapiens
  CDR3 for alpha chain variable domain of TCR clone 38828 (TRAV8-3, TRAJ20)
CAVGANDYKLSF

SEQ ID NO: 77656 - protein, 14 aa, Homo sapiens
  CDR3 for beta chain variable domain of TCR clone 38828 (TRBV6-1, TRBJ1-3)
CASVQGGGGNTIYF

SEQ ID NO: 77657 - protein, 15 aa, Homo sapiens
  CDR3 for alpha chain variable domain of TCR clone 38829 (TRAV21, TRAJ32)
CAVNSYGGSTNKLIF

SEQ ID NO: 77658 - protein, 18 aa, Homo sapiens
  CDR3 for beta chain variable domain of TCR clone 38829 (TRBV7-9, TRBJ2-1)
CASSTGLAEGSSYNEQFF

SEQ ID NO: 77659 - protein, 15 aa, Homo sapiens
  CDR3 for alpha chain variable domain of TCR clone 38830 (TRAV12-3, TRAJ49)
CAMAVTPNTGNQFYF

SEQ ID NO: 77660 - protein, 18 aa, Homo sapiens
  CDR3 for beta chain variable domain of TCR clone 38830 (TRBV4-1, TRBJ1-5)
CASSQDPRGQGLNKPQHF

SEQ ID NO: 77661 - protein, 14 aa, Homo sapiens
  CDR3 for alpha chain variable domain of TCR clone 38831 (TRAV8-3, TRAJ4)
RAVGAAGGYNKLIF

SEQ ID NO: 77662 - protein, 15 aa, Homo sapiens
  CDR3 for beta chain variable domain of TCR clone 38831 (TRBV9, TRBJ1-6)
CASSVAGTGDSPLHF

SEQ ID NO: 77663 - protein, 12 aa, Homo sapiens
  CDR3 for alpha chain variable domain of TCR clone 38832 (TRAV26-2, TRAJ21)
CILKGNFNNFYF

SEQ ID NO: 77664 - protein, 14 aa, Homo sapiens
  CDR3 for beta chain variable domain of TCR clone 38832 (TRBV7-9, TRBJ1-1)
CASTPLQSYTEAFF

SEQ ID NO: 77665 - protein, 14 aa, Homo sapiens
  CDR3 for alpha chain variable domain of TCR clone 38833 (TRAV12-1, TRAJ17)
CVVNYKAAGNKLTF

SEQ ID NO: 77666 - protein, 16 aa, Homo sapiens
  CDR3 for beta chain variable domain of TCR clone 38833 (TRBV7-6, TRBJ2-1)
CASSAPGPSSYNEQFF

SEQ ID NO: 77667 - protein, 13 aa, Homo sapiens
  CDR3 for alpha chain variable domain of TCR clone 38834 (TRAV8-4, TRAJ48)
CAVSLFGNEKLTF

SEQ ID NO: 77668 - protein, 12 aa, Homo sapiens
  CDR3 for beta chain variable domain of TCR clone 38834 (TRBV6-3, TRBJ2-7)
CASSEPGFEQYF

SEQ ID NO: 77669 - protein, 14 aa, Homo sapiens
  CDR3 for alpha chain variable domain of TCR clone 38835 (TRAV23/DV6, TRAJ24)
CAASLSDSWGKLQF

SEQ ID NO: 77670 - protein, 16 aa, Homo sapiens
  CDR3 for beta chain variable domain of TCR clone 38835 (TRBV7-9, TRBJ2-6)
CASSLKGHLRANVLTF

SEQ ID NO: 77671 - protein, 16 aa, Homo sapiens
  CDR3 for alpha chain variable domain of TCR clone 38836 (TRAV20, TRAJ22)
CAVQASSSGSARQLTF

SEQ ID NO: 77672 - protein, 13 aa, Homo sapiens
  CDR3 for beta chain variable domain of TCR clone 38836 (TRBV7-2, TRBJ2-5)
CASSQTRVETQYF

SEQ ID NO: 77673 - protein, 14 aa, Homo sapiens
  CDR3 for alpha chain variable domain of TCR clone 38837 (TRAV17, TRAJ37)
CATDGSSNTGTLIF

SEQ ID NO: 77674 - protein, 13 aa, Homo sapiens
  CDR3 for beta chain variable domain of TCR clone 38837 (TRBV11-2, TRBJ2-1)
CASSLDLVNEQFF

SEQ ID NO: 77675 - protein, 16 aa, Homo sapiens
  CDR3 for alpha chain variable domain of TCR clone 38838 (TRAV30, TRAJ24)
CGTEIVDADSWGKFQF

SEQ ID NO: 77676 - protein, 14 aa, Homo sapiens
  CDR3 for beta chain variable domain of TCR clone 38838 (TRBV13, TRBJ2-5)
CASSPRPRYNEQYF

SEQ ID NO: 77677 - protein, 12 aa, Homo sapiens
  CDR3 for alpha chain variable domain of TCR clone 38839 (TRAV3, TRAJ43)
CCERGRNNDMRF

SEQ ID NO: 77678 - protein, 12 aa, Homo sapiens
  CDR3 for beta chain variable domain of TCR clone 38839 (TRBV5-1, TRBJ2-7)
CASSLDSYEQHF

SEQ ID NO: 77679 - protein, 12 aa, Homo sapiens
  CDR3 for alpha chain variable domain of TCR clone 38840 (TRAV12-3, TRAJ21)
CAMFNNYNKFYF

SEQ ID NO: 77680 - protein, 16 aa, Homo sapiens
  CDR3 for beta chain variable domain of TCR clone 38840 (TRBV7-9, TRBJ1-2)
CASSLAPLRAAYGYTF

SEQ ID NO: 77681 - protein, 15 aa, Homo sapiens
  CDR3 for alpha chain variable domain of TCR clone 38841 (TRAV25, TRAJ52)
CAGTSGGTRYGKLTF

SEQ ID NO: 77682 - protein, 12 aa, Homo sapiens
  CDR3 for beta chain variable domain of TCR clone 38841 (TRBV14, TRBJ2-5)
CASSQLKETQYF

SEQ ID NO: 77683 - protein, 14 aa, Homo sapiens
  CDR3 for alpha chain variable domain of TCR clone 38842 (TRAV4, TRAJ9)
CLVGSGTGGFKTIF

SEQ ID NO: 77684 - protein, 15 aa, Homo sapiens
  CDR3 for beta chain variable domain of TCR clone 38842 (TRBV7-2, TRBJ2-1)
CASRLASGRVNEQFF

SEQ ID NO: 77685 - protein, 13 aa, Homo sapiens
  CDR3 for alpha chain variable domain of TCR clone 38843 (TRAV2, TRAJ40)
CAVVTSGTYKYIL

SEQ ID NO: 77686 - protein, 15 aa, Homo sapiens
  CDR3 for beta chain variable domain of TCR clone 38843 (TRBV27, TRBJ2-1)
CASSNGGGSSNEQFF

SEQ ID NO: 77687 - protein, 16 aa, Homo sapiens
  CDR3 for alpha chain variable domain of TCR clone 38844 (TRAV8-3, TRAJ13)
CAVALMNSGGYQKVTF

SEQ ID NO: 77688 - protein, 15 aa, Homo sapiens
  CDR3 for beta chain variable domain of TCR clone 38844 (TRBV5-4, TRBJ2-5)
CASSLAGGAKETQYF

SEQ ID NO: 77689 - protein, 13 aa, Homo sapiens
  CDR3 for alpha chain variable domain of TCR clone 38845 (TRAV35, TRAJ42)
CARFPGSQGNLIF

SEQ ID NO: 77690 - protein, 14 aa, Homo sapiens
  CDR3 for beta chain variable domain of TCR clone 38845 (TRBV29-1, TRBJ2-2)
CSVLAETNTGELFF

SEQ ID NO: 77691 - protein, 16 aa, Homo sapiens
  CDR3 for alpha chain variable domain of TCR clone 38846 (TRAV3, TRAJ37)
CAVRGKGSGNTGTLIF

SEQ ID NO: 77692 - protein, 13 aa, Homo sapiens
  CDR3 for beta chain variable domain of TCR clone 38846 (TRBV14, TRBJ2-7)
CASSQDRRYEQYF

SEQ ID NO: 77693 - protein, 13 aa, Homo sapiens
  CDR3 for alpha chain variable domain of TCR clone 38847 (TRAV2, TRAJ12)
CAVGEDSSYKLIF

SEQ ID NO: 77694 - protein, 13 aa, Homo sapiens
  CDR3 for beta chain variable domain of TCR clone 38847 (TRBV20-1, TRBJ2-1)
CSARSSPRDEQFF

SEQ ID NO: 77695 - protein, 13 aa, Homo sapiens
  CDR3 for alpha chain variable domain of TCR clone 38848 (TRAV12-3, TRAJ41)
CAIAPNSGYALNF

SEQ ID NO: 77696 - protein, 14 aa, Homo sapiens
  CDR3 for beta chain variable domain of TCR clone 38848 (TRBV7-2, TRBJ1-3)
CARSLGTAGNTIYF

SEQ ID NO: 77697 - protein, 13 aa, Homo sapiens
  CDR3 for alpha chain variable domain of TCR clone 38849 (TRAV29/DV5, TRAJ33)
CAASVESNYQLIW

SEQ ID NO: 77698 - protein, 14 aa, Homo sapiens
  CDR3 for beta chain variable domain of TCR clone 38849 (TRBV5-6, TRBJ1-1)
CASSLAGDWTEAFF

SEQ ID NO: 77699 - protein, 14 aa, Homo sapiens
  CDR3 for alpha chain variable domain of TCR clone 38850 (TRAV13-1, TRAJ35)
CAASKGGFGNVLHC

SEQ ID NO: 77700 - protein, 14 aa, Homo sapiens
  CDR3 for beta chain variable domain of TCR clone 38850 (TRBV12-4, TRBJ1-1)
CASSLGTGGTEAFF

SEQ ID NO: 77701 - protein, 11 aa, Homo sapiens
  CDR3 for alpha chain variable domain of TCR clone 38851 (TRAV12-2, TRAJ31)
CAILNNARLMF

SEQ ID NO: 77702 - protein, 16 aa, Homo sapiens
  CDR3 for beta chain variable domain of TCR clone 38851 (TRBV13, TRBJ2-2)
CASSPRTGERTGELFF

SEQ ID NO: 77703 - protein, 18 aa, Homo sapiens
  CDR3 for alpha chain variable domain of TCR clone 38852 (TRAV21, TRAJ52)
CAVRPSPVGGTSYGKLTF

SEQ ID NO: 77704 - protein, 13 aa, Homo sapiens
  CDR3 for beta chain variable domain of TCR clone 38852 (TRBV10-3, TRBJ2-1)
CAISEFSGREQFF

SEQ ID NO: 77705 - protein, 13 aa, Homo sapiens
  CDR3 for alpha chain variable domain of TCR clone 38853 (TRAV8-6, TRAJ20)
CAVRTADDYKLSF

SEQ ID NO: 77706 - protein, 15 aa, Homo sapiens
  CDR3 for beta chain variable domain of TCR clone 38853 (TRBV11-1, TRBJ2-3)
CASSLLLPSTDTQYF

SEQ ID NO: 77707 - protein, 14 aa, Homo sapiens
  CDR3 for alpha chain variable domain of TCR clone 38854 (TRAV29/DV5, TRAJ45)
CAASFRGGADGLTF

SEQ ID NO: 77708 - protein, 17 aa, Homo sapiens
  CDR3 for beta chain variable domain of TCR clone 38854 (TRBV11-2, TRBJ2-1)
CASSLYPPGVEYNEQFF

SEQ ID NO: 77709 - protein, 14 aa, Homo sapiens
  CDR3 for alpha chain variable domain of TCR clone 38855 (TRAV29/DV5, TRAJ45)
CAASFRGGADGLTF

SEQ ID NO: 77710 - protein, 11 aa, Homo sapiens
  CDR3 for beta chain variable domain of TCR clone 38855 (TRBV11-2, TRBJ2-2)
CASSLPGELFS

SEQ ID NO: 77711 - protein, 14 aa, Homo sapiens
  CDR3 for alpha chain variable domain of TCR clone 38856 (TRAV12-1, TRAJ12)
CVVTRMDSSYKLIF

SEQ ID NO: 77712 - protein, 13 aa, Homo sapiens
  CDR3 for beta chain variable domain of TCR clone 38856 (TRBV3-1, TRBJ2-2)
CASLARGSGELFY

SEQ ID NO: 77713 - protein, 12 aa, Homo sapiens
  CDR3 for alpha chain variable domain of TCR clone 38857 (TRAV16, TRAJ9)
CALSSGGFKTIF

SEQ ID NO: 77714 - protein, 13 aa, Homo sapiens
  CDR3 for beta chain variable domain of TCR clone 38857 (TRBV18, TRBJ1-1)
CASSGGRNTEAFF

SEQ ID NO: 77715 - protein, 14 aa, Homo sapiens
  CDR3 for alpha chain variable domain of TCR clone 38858 (TRAV2, TRAJ9)
CAVGDRSGGFKTIF

SEQ ID NO: 77716 - protein, 15 aa, Homo sapiens
  CDR3 for beta chain variable domain of TCR clone 38858 (TRBV12-4, TRBJ2-5)
CASSLSGAFQETQYF

SEQ ID NO: 77717 - protein, 14 aa, Homo sapiens
  CDR3 for alpha chain variable domain of TCR clone 38859 (TRAV3, TRAJ21)
CAVESQANFNKFYF

SEQ ID NO: 77718 - protein, 18 aa, Homo sapiens
  CDR3 for beta chain variable domain of TCR clone 38859 (TRBV7-9, TRBJ2-1)
CASSLAVSGTSGRNEQFL

SEQ ID NO: 77719 - protein, 16 aa, Homo sapiens
  CDR3 for alpha chain variable domain of TCR clone 38860 (TRAV30, TRAJ24)
CGTEIVDADSWGKFQF

SEQ ID NO: 77720 - protein, 14 aa, Homo sapiens
  CDR3 for beta chain variable domain of TCR clone 38860 (TRBV19, TRBJ2-7)
CASSMGQGAIEQYF

SEQ ID NO: 77721 - protein, 14 aa, Homo sapiens
  CDR3 for alpha chain variable domain of TCR clone 38861 (TRAV19, TRAJ5)
CALKKDTGRRALTS

SEQ ID NO: 77722 - protein, 15 aa, Homo sapiens
  CDR3 for beta chain variable domain of TCR clone 38861 (TRBV2, TRBJ2-5)
CASSEAGTRQETQYF

SEQ ID NO: 77723 - protein, 14 aa, Homo sapiens
  CDR3 for alpha chain variable domain of TCR clone 38862 (TRAV27, TRAJ36)
CAGPPKRGANNLFF

SEQ ID NO: 77724 - protein, 15 aa, Homo sapiens
  CDR3 for beta chain variable domain of TCR clone 38862 (TRBV18, TRBJ2-7)
FASSPASTPNYEQYF

SEQ ID NO: 77725 - protein, 12 aa, Homo sapiens
  CDR3 for alpha chain variable domain of TCR clone 38863 (TRAV13-2, TRAJ23)
CAERHREGKLIF

SEQ ID NO: 77726 - protein, 16 aa, Homo sapiens
  CDR3 for beta chain variable domain of TCR clone 38863 (TRBV20-1, TRBJ1-4)
CSAPGQGLLTNEKLFF

SEQ ID NO: 77727 - protein, 13 aa, Homo sapiens
  CDR3 for alpha chain variable domain of TCR clone 38864 (TRAV12-1, TRAJ11)
CVVNRAGYSTLTF

SEQ ID NO: 77728 - protein, 15 aa, Homo sapiens
  CDR3 for beta chain variable domain of TCR clone 38864 (TRBV27, TRBJ2-2)
CASSETGQGTGELFF

SEQ ID NO: 77729 - protein, 13 aa, Homo sapiens
  CDR3 for alpha chain variable domain of TCR clone 38865 (TRAV16, TRAJ28)
CAPTGAGSHQLTF

SEQ ID NO: 77730 - protein, 16 aa, Homo sapiens
  CDR3 for beta chain variable domain of TCR clone 38865 (TRBV28, TRBJ1-5)
CASSLTGQGWNQPQHF

SEQ ID NO: 77731 - protein, 13 aa, Homo sapiens
  CDR3 for alpha chain variable domain of TCR clone 38866 (TRAV12-3, TRAJ47)
CAMKKEYGNKLVL

SEQ ID NO: 77732 - protein, 16 aa, Homo sapiens
  CDR3 for beta chain variable domain of TCR clone 38866 (TRBV3-1, TRBJ2-6)
CASSLTWVSGANVLTF

SEQ ID NO: 77733 - protein, 11 aa, Homo sapiens
  CDR3 for alpha chain variable domain of TCR clone 38867 (TRAV2, TRAJ33)
CAVDSNYQLIW

SEQ ID NO: 77734 - protein, 15 aa, Homo sapiens
  CDR3 for beta chain variable domain of TCR clone 38867 (TRBV19, TRBJ1-2)
YASSVGQVLNYGYTF

SEQ ID NO: 77735 - protein, 15 aa, Homo sapiens
  CDR3 for alpha chain variable domain of TCR clone 38868 (TRAV12-2, TRAJ53)
CAVNGGGGSNYKLTF

SEQ ID NO: 77736 - protein, 16 aa, Homo sapiens
  CDR3 for beta chain variable domain of TCR clone 38868 (TRBV12-5, TRBJ2-5)
CASGPRTSGNQETQYF

SEQ ID NO: 77737 - protein, 12 aa, Homo sapiens
  CDR3 for alpha chain variable domain of TCR clone 38869 (TRAV13-1, TRAJ21)
CAAKEGFNKFYF

SEQ ID NO: 77738 - protein, 14 aa, Homo sapiens
  CDR3 for beta chain variable domain of TCR clone 38869 (TRBV5-4, TRBJ1-1)
CASSLDGRRDEAFF

SEQ ID NO: 77739 - protein, 14 aa, Homo sapiens
  CDR3 for alpha chain variable domain of TCR clone 38870 (TRAV23/DV6, TRAJ24)
CAASLSDSWGKLQF

SEQ ID NO: 77740 - protein, 16 aa, Homo sapiens
  CDR3 for beta chain variable domain of TCR clone 38870 (TRBV7-9, TRBJ2-6)
CASSWKGPLRANVLTF

SEQ ID NO: 77741 - protein, 14 aa, Homo sapiens
  CDR3 for alpha chain variable domain of TCR clone 38871 (TRAV13-1, TRAJ44)
CAAKATGTASKLTF

SEQ ID NO: 77742 - protein, 17 aa, Homo sapiens
  CDR3 for beta chain variable domain of TCR clone 38871 (TRBV7-3, TRBJ2-3)
RASSLMKRMRGEDTQYF

SEQ ID NO: 77743 - protein, 12 aa, Homo sapiens
  CDR3 for alpha chain variable domain of TCR clone 38872 (TRAV27, TRAJ34)
CAEPYNTDKLIF

SEQ ID NO: 77744 - protein, 16 aa, Homo sapiens
  CDR3 for beta chain variable domain of TCR clone 38872 (TRBV19, TRBJ2-1)
CASSKAGPSSYNEQFF

SEQ ID NO: 77745 - protein, 15 aa, Homo sapiens
  CDR3 for alpha chain variable domain of TCR clone 38873 (TRAV8-3, TRAJ45)
CASSYSGGGADGLTF

SEQ ID NO: 77746 - protein, 13 aa, Homo sapiens
  CDR3 for beta chain variable domain of TCR clone 38873 (TRBV10-3, TRBJ2-7)
CASKLAVNSEQYF

SEQ ID NO: 77747 - protein, 15 aa, Homo sapiens
  CDR3 for alpha chain variable domain of TCR clone 38874 (TRAV3, TRAJ4)
CAVRDGTGGYNKLVF

SEQ ID NO: 77748 - protein, 16 aa, Homo sapiens
  CDR3 for beta chain variable domain of TCR clone 38874 (TRBV27, TRBJ2-2)
CASSSSGVSNTGELFF

SEQ ID NO: 77749 - protein, 13 aa, Homo sapiens
  CDR3 for alpha chain variable domain of TCR clone 38875 (TRAV12-1, TRAJ7)
CVVNMRGNNRLAF

SEQ ID NO: 77750 - protein, 16 aa, Homo sapiens
  CDR3 for beta chain variable domain of TCR clone 38875 (TRBV20-1, TRBJ1-4)
CSAPGQGLLTSEKLFF

SEQ ID NO: 77751 - protein, 15 aa, Homo sapiens
  CDR3 for alpha chain variable domain of TCR clone 38876 (TRAV21, TRAJ24)
CAARSSTDSWGKLQF

SEQ ID NO: 77752 - protein, 13 aa, Homo sapiens
  CDR3 for beta chain variable domain of TCR clone 38876 (TRBV11-2, TRBJ2-5)
CASSSTGEETKYF

SEQ ID NO: 77753 - protein, 15 aa, Homo sapiens
  CDR3 for alpha chain variable domain of TCR clone 38877 (TRAV26-1, TRAJ22)
CIVRVSFRFCKATDL

SEQ ID NO: 77754 - protein, 15 aa, Homo sapiens
  CDR3 for beta chain variable domain of TCR clone 38877 (TRBV20-1, TRBJ2-7)
CSARDRVSGMDEQYF

SEQ ID NO: 77755 - protein, 14 aa, Homo sapiens
  CDR3 for alpha chain variable domain of TCR clone 38878 (TRAV17, TRAJ22)
CATSPSGSARQLTF

SEQ ID NO: 77756 - protein, 15 aa, Homo sapiens
  CDR3 for beta chain variable domain of TCR clone 38878 (TRBV4-1, TRBJ2-5)
CASSQWDRYQETQYF

SEQ ID NO: 77757 - protein, 13 aa, Homo sapiens
  CDR3 for alpha chain variable domain of TCR clone 38879 (TRAV2, TRAJ9)
CAVPHTGGFKTIF

SEQ ID NO: 77758 - protein, 18 aa, Homo sapiens
  CDR3 for beta chain variable domain of TCR clone 38879 (TRBV24-1, TRBJ2-1)
CATSDLMFLGRGVHEQFF

SEQ ID NO: 77759 - protein, 16 aa, Homo sapiens
  CDR3 for alpha chain variable domain of TCR clone 38880 (TRAV13-2, TRAJ16)
CAENNWKMARSCSLQG

SEQ ID NO: 77760 - protein, 14 aa, Homo sapiens
  CDR3 for beta chain variable domain of TCR clone 38880 (TRBV7-9, TRBJ1-1)
CASSLGGLKTEAFF

SEQ ID NO: 77761 - protein, 15 aa, Homo sapiens
  CDR3 for alpha chain variable domain of TCR clone 38881 (TRAV25, TRAJ52)
CAGRPGGTSYGKLTF

SEQ ID NO: 77762 - protein, 14 aa, Homo sapiens
  CDR3 for beta chain variable domain of TCR clone 38881 (TRBV25-1, TRBJ1-1)
CVSTHLGGNTEAFF

SEQ ID NO: 77763 - protein, 15 aa, Homo sapiens
  CDR3 for alpha chain variable domain of TCR clone 38882 (TRAV12-3, TRAJ42)
CAMSGHGGSKGNLIF

SEQ ID NO: 77764 - protein, 13 aa, Homo sapiens
  CDR3 for beta chain variable domain of TCR clone 38882 (TRBV19, TRBJ2-5)
CASSGRAGETQYF

SEQ ID NO: 77765 - protein, 14 aa, Homo sapiens
  CDR3 for alpha chain variable domain of TCR clone 38883 (TRAV13-2, TRAJ26)
CAENLGNYGQNFVF

SEQ ID NO: 77766 - protein, 14 aa, Homo sapiens
  CDR3 for beta chain variable domain of TCR clone 38883 (TRBV19, TRBJ1-3)
CASSRGNSGNTIYF

SEQ ID NO: 77767 - protein, 14 aa, Homo sapiens
  CDR3 for alpha chain variable domain of TCR clone 38884 (TRAV1-2, TRAJ16)
CAVNRFSDGQKLLF

SEQ ID NO: 77768 - protein, 11 aa, Homo sapiens
  CDR3 for beta chain variable domain of TCR clone 38884 (TRBV7-8, TRBJ2-7)
CASSLSLERYF

SEQ ID NO: 77769 - protein, 13 aa, Homo sapiens
  CDR3 for alpha chain variable domain of TCR clone 38885 (TRAV19, TRAJ57)
CALLQGGSGKLVF

SEQ ID NO: 77770 - protein, 13 aa, Homo sapiens
  CDR3 for beta chain variable domain of TCR clone 38885 (TRBV28, TRBJ2-1)
CASRSGGLNEQFF

SEQ ID NO: 77771 - protein, 15 aa, Homo sapiens
  CDR3 for alpha chain variable domain of TCR clone 38886 (TRAV35, TRAJ58)
CAGRRQETSGSRLTF

SEQ ID NO: 77772 - protein, 11 aa, Homo sapiens
  CDR3 for beta chain variable domain of TCR clone 38886 (TRBV11-2, TRBJ1-1)
CASSINTGAFF

SEQ ID NO: 77773 - protein, 11 aa, Homo sapiens
  CDR3 for alpha chain variable domain of TCR clone 38887 (TRAV2, TRAJ13)
CASGGHQKVTF

SEQ ID NO: 77774 - protein, 13 aa, Homo sapiens
  CDR3 for beta chain variable domain of TCR clone 38887 (TRBV10-3, TRBJ1-2)
CAISERDSYGYTF

SEQ ID NO: 77775 - protein, 12 aa, Homo sapiens
  CDR3 for alpha chain variable domain of TCR clone 38888 (TRAV3, TRAJ43)
CAVRDPDNDMRF

SEQ ID NO: 77776 - protein, 15 aa, Homo sapiens
  CDR3 for beta chain variable domain of TCR clone 38888 (TRBV27, TRBJ1-5)
CASSLGTGFDQPQHF

SEQ ID NO: 77777 - protein, 12 aa, Homo sapiens
  CDR3 for alpha chain variable domain of TCR clone 38889 (TRAV21, TRAJ31)
CAVSPARGRLMF

SEQ ID NO: 77778 - protein, 14 aa, Homo sapiens
  CDR3 for beta chain variable domain of TCR clone 38889 (TRBV28, TRBJ2-7)
CASSLPRISYEQYF

SEQ ID NO: 77779 - protein, 18 aa, Homo sapiens
  CDR3 for alpha chain variable domain of TCR clone 38890 (TRAV13-1, TRAJ52)
CAASKRSAGGTSYGKLIF

SEQ ID NO: 77780 - protein, 13 aa, Homo sapiens
  CDR3 for beta chain variable domain of TCR clone 38890 (TRBV12-4, TRBJ1-2)
CASSLRQGKGYTF

SEQ ID NO: 77781 - protein, 13 aa, Homo sapiens
  CDR3 for alpha chain variable domain of TCR clone 38891 (TRAV8-3, TRAJ28)
CAVGAVGSYQLTF

SEQ ID NO: 77782 - protein, 17 aa, Homo sapiens
  CDR3 for beta chain variable domain of TCR clone 38891 (TRBV11-2, TRBJ2-1)
CASSLYPPGVGYNEQFF

SEQ ID NO: 77783 - protein, 17 aa, Homo sapiens
  CDR3 for alpha chain variable domain of TCR clone 38892 (TRAV13-1, TRAJ28)
CAASPPCSGAGSYQLTF

SEQ ID NO: 77784 - protein, 15 aa, Homo sapiens
  CDR3 for beta chain variable domain of TCR clone 38892 (TRBV6-3, TRBJ2-2)
CASSFLATLTGELFF

SEQ ID NO: 77785 - protein, 12 aa, Homo sapiens
  CDR3 for alpha chain variable domain of TCR clone 38893 (TRAV12-2, TRAJ4)
GWPEGGYNKLIF

SEQ ID NO: 77786 - protein, 12 aa, Homo sapiens
  CDR3 for beta chain variable domain of TCR clone 38893 (TRBV11-2, TRBJ2-2)
CASSLGGGELFF

SEQ ID NO: 77787 - protein, 15 aa, Homo sapiens
  CDR3 for alpha chain variable domain of TCR clone 38894 (TRAV8-3, TRAJ40)
CAAPSLGSGTYKYLF

SEQ ID NO: 77788 - protein, 16 aa, Homo sapiens
  CDR3 for beta chain variable domain of TCR clone 38894 (TRBV7-3, TRBJ2-3)
CASSLSGYRPEDTQYF

SEQ ID NO: 77789 - protein, 14 aa, Homo sapiens
  CDR3 for alpha chain variable domain of TCR clone 38895 (TRAV3, TRAJ21)
CAVESQANFNKFYF

SEQ ID NO: 77790 - protein, 14 aa, Homo sapiens
  CDR3 for beta chain variable domain of TCR clone 38895 (TRBV11-2, TRBJ2-1)
CASSLDGSFNEQFF

SEQ ID NO: 77791 - protein, 13 aa, Homo sapiens
  CDR3 for alpha chain variable domain of TCR clone 38896 (TRAV20, TRAJ37)
CAGCSSNTGKLIF

SEQ ID NO: 77792 - protein, 16 aa, Homo sapiens
  CDR3 for beta chain variable domain of TCR clone 38896 (TRBV12-4, TRBJ1-5)
CASSRPVGGSNQPQHF

SEQ ID NO: 77793 - protein, 14 aa, Homo sapiens
  CDR3 for alpha chain variable domain of TCR clone 38897 (TRAV35, TRAJ22)
CAGLRQGSARQLTF

SEQ ID NO: 77794 - protein, 14 aa, Homo sapiens
  CDR3 for beta chain variable domain of TCR clone 38897 (TRBV11-3, TRBJ2-3)
CASSSGQGPDTQYF

SEQ ID NO: 77795 - protein, 12 aa, Homo sapiens
  CDR3 for alpha chain variable domain of TCR clone 38898 (TRAV1-2, TRAJ33)
CAALDSNYQLTW

SEQ ID NO: 77796 - protein, 16 aa, Homo sapiens
  CDR3 for beta chain variable domain of TCR clone 38898 (TRBV6-4, TRBJ1-2)
CASSEAVGDPNYGYTF

SEQ ID NO: 77797 - protein, 14 aa, Homo sapiens
  CDR3 for alpha chain variable domain of TCR clone 38899 (TRAV4, TRAJ26)
CLVGPHNYGQNFVF

SEQ ID NO: 77798 - protein, 17 aa, Homo sapiens
  CDR3 for beta chain variable domain of TCR clone 38899 (TRBV24-1, TRBJ2-1)
CATSGVSTSGTYNEQFF

SEQ ID NO: 77799 - protein, 17 aa, Homo sapiens
  CDR3 for alpha chain variable domain of TCR clone 38900 (TRAV3, TRAJ42)
CAVRDRDYGGSQGNLIF

SEQ ID NO: 77800 - protein, 13 aa, Homo sapiens
  CDR3 for beta chain variable domain of TCR clone 38900 (TRBV12-4, TRBJ2-2)
CASSITGSGELFF

SEQ ID NO: 77801 - protein, 11 aa, Homo sapiens
  CDR3 for alpha chain variable domain of TCR clone 38901 (TRAV26-1, )
CIADNAATTIS

SEQ ID NO: 77802 - protein, 17 aa, Homo sapiens
  CDR3 for beta chain variable domain of TCR clone 38901 (TRBV11-2, TRBJ2-6)
CASSQRDIFSGANVLTF

SEQ ID NO: 77803 - protein, 16 aa, Homo sapiens
  CDR3 for alpha chain variable domain of TCR clone 38902 (TRAV30, TRAJ24)
CGTEIVDADSWGKFQF

SEQ ID NO: 77804 - protein, 15 aa, Homo sapiens
  CDR3 for beta chain variable domain of TCR clone 38902 (TRBV7-9, TRBJ1-4)
CASSARTGGSEKLFF

SEQ ID NO: 77805 - protein, 14 aa, Homo sapiens
  CDR3 for alpha chain variable domain of TCR clone 38903 (TRAV1-2, TRAJ8)
CAVREDTGFQKLVF

SEQ ID NO: 77806 - protein, 15 aa, Homo sapiens
  CDR3 for beta chain variable domain of TCR clone 38903 (TRBV20-1, TRBJ2-7)
CSVRDRVSGMDEQYF

SEQ ID NO: 77807 - protein, 12 aa, Homo sapiens
  CDR3 for alpha chain variable domain of TCR clone 38904 (TRAV8-3, TRAJ4)
WVGSGGYNKLIF

SEQ ID NO: 77808 - protein, 14 aa, Homo sapiens
  CDR3 for beta chain variable domain of TCR clone 38904 (TRBV24-1, TRBJ1-1)
CATSIPRGDTEAFF

SEQ ID NO: 77809 - protein, 10 aa, Homo sapiens
  CDR3 for alpha chain variable domain of TCR clone 38905 (TRAV12-2, TRAJ22)
CAVNETQLTS

SEQ ID NO: 77810 - protein, 13 aa, Homo sapiens
  CDR3 for beta chain variable domain of TCR clone 38905 (TRBV6-5, TRBJ2-6)
CASSTSGPLRLDF

SEQ ID NO: 77811 - protein, 11 aa, Homo sapiens
  CDR3 for alpha chain variable domain of TCR clone 38906 (TRAV2, TRAJ13)
CASGGYQKVTF

SEQ ID NO: 77812 - protein, 18 aa, Homo sapiens
  CDR3 for beta chain variable domain of TCR clone 38906 (TRBV11-2, TRBJ2-3)
CASSLRGASRGAPNTQYF

SEQ ID NO: 77813 - protein, 14 aa, Homo sapiens
  CDR3 for alpha chain variable domain of TCR clone 38907 (TRAV12-3, TRAJ29)
CAMILLSGNTPLVF

SEQ ID NO: 77814 - protein, 15 aa, Homo sapiens
  CDR3 for beta chain variable domain of TCR clone 38907 (TRBV20-1, TRBJ2-7)
CSARDRVSGMDEQYF

SEQ ID NO: 77815 - protein, 14 aa, Homo sapiens
  CDR3 for alpha chain variable domain of TCR clone 38908 (TRAV17, TRAJ57)
CATDPQGGSEKLVF

SEQ ID NO: 77816 - protein, 14 aa, Homo sapiens
  CDR3 for beta chain variable domain of TCR clone 38908 (TRBV7-8, TRBJ2-7)
CASGPRDRVYEQYF

SEQ ID NO: 77817 - protein, 14 aa, Homo sapiens
  CDR3 for alpha chain variable domain of TCR clone 38909 (TRAV1-2, TRAJ8)
CAVREDTGFPKLVF

SEQ ID NO: 77818 - protein, 15 aa, Homo sapiens
  CDR3 for beta chain variable domain of TCR clone 38909 (TRBV6-3, TRBJ2-7)
CASSSPGTVFYEHYF

SEQ ID NO: 77819 - protein, 20 aa, Homo sapiens
  CDR3 for alpha chain variable domain of TCR clone 38910 (TRAV21, TRAJ4)
AASQPGDSATLAGGYNKLIF

SEQ ID NO: 77820 - protein, 15 aa, Homo sapiens
  CDR3 for beta chain variable domain of TCR clone 38910 (TRBV9, TRBJ1-6)
CASSVAGTGDSPLHF

SEQ ID NO: 77821 - protein, 15 aa, Homo sapiens
  CDR3 for alpha chain variable domain of TCR clone 38911 (TRAV16, TRAJ4)
CALPSLSGGYNKLIF

SEQ ID NO: 77822 - protein, 15 aa, Homo sapiens
  CDR3 for beta chain variable domain of TCR clone 38911 (TRBV7-9, TRBJ2-7)
CASSLALAEAYEQYF

SEQ ID NO: 77823 - protein, 14 aa, Homo sapiens
  CDR3 for alpha chain variable domain of TCR clone 38912 (TRAV12-2, TRAJ44)
CAVNKAGTASKLTF

SEQ ID NO: 77824 - protein, 13 aa, Homo sapiens
  CDR3 for beta chain variable domain of TCR clone 38912 (TRBV19, TRBJ1-2)
CASSVPGQDGYTF

SEQ ID NO: 77825 - protein, 14 aa, Homo sapiens
  CDR3 for alpha chain variable domain of TCR clone 38913 (TRAV13-1, TRAJ47)
CAAPIMEYGNKLVF

SEQ ID NO: 77826 - protein, 13 aa, Homo sapiens
  CDR3 for beta chain variable domain of TCR clone 38913 (TRBV7-3, TRBJ1-1)
CASSQDWGAEAFF

SEQ ID NO: 77827 - protein, 12 aa, Homo sapiens
  CDR3 for alpha chain variable domain of TCR clone 38914 (TRAV21, TRAJ21)
CCFYSSASKIIF

SEQ ID NO: 77828 - protein, 16 aa, Homo sapiens
  CDR3 for beta chain variable domain of TCR clone 38914 (TRBV19, TRBJ2-1)
CASSKAGPSSYNEQFF

SEQ ID NO: 77829 - protein, 17 aa, Homo sapiens
  CDR3 for alpha chain variable domain of TCR clone 38915 (TRAV23/DV6, TRAJ57)
CAASSTLSQGGSEKLVF

SEQ ID NO: 77830 - protein, 14 aa, Homo sapiens
  CDR3 for beta chain variable domain of TCR clone 38915 (TRBV25-1, TRBJ1-1)
YASTHLGGNTEAFF

SEQ ID NO: 77831 - protein, 15 aa, Homo sapiens
  CDR3 for alpha chain variable domain of TCR clone 38916 (TRAV23/DV6, TRAJ13)
CAAWTGGGGYQKVTF

SEQ ID NO: 77832 - protein, 14 aa, Homo sapiens
  CDR3 for beta chain variable domain of TCR clone 38916 (TRBV6-1, TRBJ2-1)
CASAGGAIKNEQFF

SEQ ID NO: 77833 - protein, 16 aa, Homo sapiens
  CDR3 for alpha chain variable domain of TCR clone 38917 (TRAV30, TRAJ24)
CGTEIVDADSWGKFQF

SEQ ID NO: 77834 - protein, 13 aa, Homo sapiens
  CDR3 for beta chain variable domain of TCR clone 38917 (TRBV7-6, TRBJ1-2)
CASSLVADYGYTF

SEQ ID NO: 77835 - protein, 14 aa, Homo sapiens
  CDR3 for alpha chain variable domain of TCR clone 38918 (TRAV16, TRAJ17)
CALSCRAAGNKLTF

SEQ ID NO: 77836 - protein, 15 aa, Homo sapiens
  CDR3 for beta chain variable domain of TCR clone 38918 (TRBV3-1, TRBJ1-2)
CASSPTRLPEGGYTF

SEQ ID NO: 77837 - protein, 10 aa, Homo sapiens
  CDR3 for alpha chain variable domain of TCR clone 38919 (TRAV30, TRAJ48)
CGIGNEKLTF

SEQ ID NO: 77838 - protein, 17 aa, Homo sapiens
  CDR3 for beta chain variable domain of TCR clone 38919 (TRBV13, TRBJ2-3)
CASSLSRVAGGRNTQYF

SEQ ID NO: 77839 - protein, 11 aa, Homo sapiens
  CDR3 for alpha chain variable domain of TCR clone 38920 (TRAV21, TRAJ34)
CAHYNTDKLIF

SEQ ID NO: 77840 - protein, 17 aa, Homo sapiens
  CDR3 for beta chain variable domain of TCR clone 38920 (TRBV3-1, TRBJ2-2)
CASSFELGQRNTGELFF

SEQ ID NO: 77841 - protein, 14 aa, Homo sapiens
  CDR3 for alpha chain variable domain of TCR clone 38921 (TRAV38-1, TRAJ45)
CASHSGGGADGLTF

SEQ ID NO: 77842 - protein, 13 aa, Homo sapiens
  CDR3 for beta chain variable domain of TCR clone 38921 (TRBV10-3, TRBJ1-2)
CAVSERDSYGYTF

SEQ ID NO: 77843 - protein, 15 aa, Homo sapiens
  CDR3 for alpha chain variable domain of TCR clone 38922 (TRAV17, TRAJ22)
CATVAPSGSARQLTF

SEQ ID NO: 77844 - protein, 12 aa, Homo sapiens
  CDR3 for beta chain variable domain of TCR clone 38922 (TRBV2, TRBJ2-1)
CAKREGYNEQFF

SEQ ID NO: 77845 - protein, 14 aa, Homo sapiens
  CDR3 for alpha chain variable domain of TCR clone 38923 (TRAV12-2, TRAJ6)
CASKWGGGSYIPTF

SEQ ID NO: 77846 - protein, 14 aa, Homo sapiens
  CDR3 for beta chain variable domain of TCR clone 38923 (TRBV15, TRBJ2-5)
CATSIGGLGETQYF

SEQ ID NO: 77847 - protein, 19 aa, Homo sapiens
  CDR3 for alpha chain variable domain of TCR clone 38924 (TRAV1-2, TRAJ26)
CLLPLCCERPDNYGQNFVF

SEQ ID NO: 77848 - protein, 14 aa, Homo sapiens
  CDR3 for beta chain variable domain of TCR clone 38924 (TRBV25-1, TRBJ1-1)
CASTHLGGNTEAFF

SEQ ID NO: 77849 - protein, 15 aa, Homo sapiens
  CDR3 for alpha chain variable domain of TCR clone 38925 (TRAV26-1, TRAJ13)
CIVRASRGGYQKVTF

SEQ ID NO: 77850 - protein, 14 aa, Homo sapiens
  CDR3 for beta chain variable domain of TCR clone 38925 (TRBV7-2, TRBJ1-5)
CASSTQGAGQPQHF

SEQ ID NO: 77851 - protein, 13 aa, Homo sapiens
  CDR3 for alpha chain variable domain of TCR clone 38926 (TRAV12-3, TRAJ40)
CATSDSGTYKYIF

SEQ ID NO: 77852 - protein, 14 aa, Homo sapiens
  CDR3 for beta chain variable domain of TCR clone 38926 (TRBV7-2, TRBJ1-5)
CASSTQGAGQPQHF

SEQ ID NO: 77853 - protein, 14 aa, Homo sapiens
  CDR3 for alpha chain variable domain of TCR clone 38927 (TRAV20, TRAJ42)
CAVQAGGSQGDLIF

SEQ ID NO: 77854 - protein, 14 aa, Homo sapiens
  CDR3 for beta chain variable domain of TCR clone 38927 (TRBV28, TRBJ1-2)
CASRIQGANYGYTF

SEQ ID NO: 77855 - protein, 15 aa, Homo sapiens
  CDR3 for alpha chain variable domain of TCR clone 38928 (TRAV25, TRAJ53)
CAATGGGGSNYKLTF

SEQ ID NO: 77856 - protein, 14 aa, Homo sapiens
  CDR3 for beta chain variable domain of TCR clone 38928 (TRBV19, TRBJ2-1)
CASPTFVLSGEQFF

SEQ ID NO: 77857 - protein, 14 aa, Homo sapiens
  CDR3 for alpha chain variable domain of TCR clone 38929 (TRAV1-2, TRAJ16)
CAVNRFSDGQKLLF

SEQ ID NO: 77858 - protein, 13 aa, Homo sapiens
  CDR3 for beta chain variable domain of TCR clone 38929 (TRBV2, TRBJ2-5)
CASGTPYQETQYF

SEQ ID NO: 77859 - protein, 15 aa, Homo sapiens
  CDR3 for alpha chain variable domain of TCR clone 38930 (TRAV8-3, TRAJ45)
CAPSYSGGGADGLTF

SEQ ID NO: 77860 - protein, 13 aa, Homo sapiens
  CDR3 for beta chain variable domain of TCR clone 38930 (TRBV10-3, TRBJ2-7)
CASKLAVSYEQYF

SEQ ID NO: 77861 - protein, 18 aa, Homo sapiens
  CDR3 for alpha chain variable domain of TCR clone 38931 (TRAV12-3, TRAJ52)
CAVRPSPAGGTSYGKLTF

SEQ ID NO: 77862 - protein, 17 aa, Homo sapiens
  CDR3 for beta chain variable domain of TCR clone 38931 (TRBV13, TRBJ2-3)
CASSLSRVAGGRNTQYF

SEQ ID NO: 77863 - protein, 14 aa, Homo sapiens
  CDR3 for alpha chain variable domain of TCR clone 38932 (TRAV12-2, TRAJ13)
CAVKKTGGYQKVTF

SEQ ID NO: 77864 - protein, 17 aa, Homo sapiens
  CDR3 for beta chain variable domain of TCR clone 38932 (TRBV13, TRBJ2-3)
CASSLSRVSGGRNTQYF

SEQ ID NO: 77865 - protein, 18 aa, Homo sapiens
  CDR3 for alpha chain variable domain of TCR clone 38933 (TRAV26-2, TRAJ54)
CILRDVEVGIQGAQKLVF

SEQ ID NO: 77866 - protein, 14 aa, Homo sapiens
  CDR3 for beta chain variable domain of TCR clone 38933 (TRBV6-1, TRBJ1-3)
CASVQGGGGNTIYF

SEQ ID NO: 77867 - protein, 16 aa, Homo sapiens
  CDR3 for alpha chain variable domain of TCR clone 38934 (TRAV12-3, TRAJ53)
CAMTPGSGGSNYKLTF

SEQ ID NO: 77868 - protein, 11 aa, Homo sapiens
  CDR3 for beta chain variable domain of TCR clone 38934 (TRBV29-1, TRBJ2-5)
CSEDRTGTQYF

SEQ ID NO: 77869 - protein, 15 aa, Homo sapiens
  CDR3 for alpha chain variable domain of TCR clone 38935 (TRAV17, TRAJ57)
CATGPSQGGSEKLVF

SEQ ID NO: 77870 - protein, 14 aa, Homo sapiens
  CDR3 for beta chain variable domain of TCR clone 38935 (TRBV12-5, TRBJ2-5)
CASGSRAHQETQYF

SEQ ID NO: 77871 - protein, 14 aa, Homo sapiens
  CDR3 for alpha chain variable domain of TCR clone 38936 (TRAV17, TRAJ16)
CATADFSDGHKLLF

SEQ ID NO: 77872 - protein, 15 aa, Homo sapiens
  CDR3 for beta chain variable domain of TCR clone 38936 (TRBV18, TRBJ2-1)
CASSPPSASYNEQFF

SEQ ID NO: 77873 - protein, 13 aa, Homo sapiens
  CDR3 for alpha chain variable domain of TCR clone 38937 (TRAV3, TRAJ33)
CAVGDRSNYQLIW

SEQ ID NO: 77874 - protein, 16 aa, Homo sapiens
  CDR3 for beta chain variable domain of TCR clone 38937 (TRBV4-2, TRBJ2-7)
CASSQDRGTSSYEQYF

SEQ ID NO: 77875 - protein, 13 aa, Homo sapiens
  CDR3 for alpha chain variable domain of TCR clone 38938 (TRAV8-4, TRAJ29)
CAVSATGNTPLVF

SEQ ID NO: 77876 - protein, 14 aa, Homo sapiens
  CDR3 for beta chain variable domain of TCR clone 38938 (TRBV12-4, TRBJ1-4)
CASRMTGRSEKLFF

SEQ ID NO: 77877 - protein, 13 aa, Homo sapiens
  CDR3 for alpha chain variable domain of TCR clone 38939 (TRAV8-6, TRAJ42)
CAVRGRKPRKSHL

SEQ ID NO: 77878 - protein, 13 aa, Homo sapiens
  CDR3 for beta chain variable domain of TCR clone 38939 (TRBV7-3, TRBJ1-1)
CASSQDWGAEAFF

SEQ ID NO: 77879 - protein, 13 aa, Homo sapiens
  CDR3 for alpha chain variable domain of TCR clone 38940 (TRAV12-1, TRAJ11)
CVVNRAGYSTLTF

SEQ ID NO: 77880 - protein, 15 aa, Homo sapiens
  CDR3 for beta chain variable domain of TCR clone 38940 (TRBV7-3, TRBJ2-2)
CANSETGQGTGELFF

SEQ ID NO: 77881 - protein, 16 aa, Homo sapiens
  CDR3 for alpha chain variable domain of TCR clone 38941 (TRAV8-2, TRAJ48)
CVVSDVSNFGNEKLTF

SEQ ID NO: 77882 - protein, 16 aa, Homo sapiens
  CDR3 for beta chain variable domain of TCR clone 38941 (TRBV24-1, TRBJ2-1)
CATSGVTGADYNEQFF

SEQ ID NO: 77883 - protein, 16 aa, Homo sapiens
  CDR3 for alpha chain variable domain of TCR clone 38942 (TRAV4, TRAJ22)
CLVGDLYSGSARQLTF

SEQ ID NO: 77884 - protein, 16 aa, Homo sapiens
  CDR3 for beta chain variable domain of TCR clone 38942 (TRBV7-9, TRBJ2-1)
CTSSDVAGGSYNEQFF

SEQ ID NO: 77885 - protein, 12 aa, Homo sapiens
  CDR3 for alpha chain variable domain of TCR clone 38943 (TRAV12-3, TRAJ17)
CAMTPTGNKLTF

SEQ ID NO: 77886 - protein, 16 aa, Homo sapiens
  CDR3 for beta chain variable domain of TCR clone 38943 (TRBV12-4, TRBJ2-5)
CASSFFVRGRQETQYF

SEQ ID NO: 77887 - protein, 14 aa, Homo sapiens
  CDR3 for alpha chain variable domain of TCR clone 38944 (TRAV2, TRAJ37)
CAVDFTSNTGKLIF

SEQ ID NO: 77888 - protein, 16 aa, Homo sapiens
  CDR3 for beta chain variable domain of TCR clone 38944 (TRBV9, TRBJ1-2)
CASSVEEKVSPYGYTF

SEQ ID NO: 77889 - protein, 13 aa, Homo sapiens
  CDR3 for alpha chain variable domain of TCR clone 38945 (TRAV17, TRAJ9)
CATFLTGGFKTIF

SEQ ID NO: 77890 - protein, 16 aa, Homo sapiens
  CDR3 for beta chain variable domain of TCR clone 38945 (TRBV5-7, TRBJ1-4)
CASSPPGGLKTEKLFF

SEQ ID NO: 77891 - protein, 16 aa, Homo sapiens
  CDR3 for alpha chain variable domain of TCR clone 38946 (TRAV13-1, TRAJ37)
CAASSLGSSDTGKLIF

SEQ ID NO: 77892 - protein, 12 aa, Homo sapiens
  CDR3 for beta chain variable domain of TCR clone 38946 (TRBV6-1, TRBJ2-5)
CASSEGRETQYF

SEQ ID NO: 77893 - protein, 14 aa, Homo sapiens
  CDR3 for alpha chain variable domain of TCR clone 38947 (TRAV2, TRAJ9)
CAVEDRSGGFKTIF

SEQ ID NO: 77894 - protein, 14 aa, Homo sapiens
  CDR3 for beta chain variable domain of TCR clone 38947 (TRBV20-1, TRBJ1-1)
CSAQTRIGGTEAFF

SEQ ID NO: 77895 - protein, 13 aa, Homo sapiens
  CDR3 for alpha chain variable domain of TCR clone 38948 (TRAV27, TRAJ3)
ASLRGSSASKIIF

SEQ ID NO: 77896 - protein, 15 aa, Homo sapiens
  CDR3 for beta chain variable domain of TCR clone 38948 (TRBV28, TRBJ1-3)
CASSMGWASGNAIYF

SEQ ID NO: 77897 - protein, 11 aa, Homo sapiens
  CDR3 for alpha chain variable domain of TCR clone 38949 (TRAV12-1, TRAJ30)
CVVNGQDKIIF

SEQ ID NO: 77898 - protein, 18 aa, Homo sapiens
  CDR3 for beta chain variable domain of TCR clone 38949 (TRBV20-1, TRBJ2-5)
CSAKTGTTTNLYQETQYF

SEQ ID NO: 77899 - protein, 11 aa, Homo sapiens
  CDR3 for alpha chain variable domain of TCR clone 38950 (TRAV1-1, TRAJ23)
RAVRQGGKLIF

SEQ ID NO: 77900 - protein, 15 aa, Homo sapiens
  CDR3 for beta chain variable domain of TCR clone 38950 (TRBV5-7, TRBJ2-7)
CASSLGPGRGHEQYF

SEQ ID NO: 77901 - protein, 13 aa, Homo sapiens
  CDR3 for alpha chain variable domain of TCR clone 38951 (TRAV12-3, TRAJ7)
CAMSASGNNRLAF

SEQ ID NO: 77902 - protein, 14 aa, Homo sapiens
  CDR3 for beta chain variable domain of TCR clone 38951 (TRBV13, TRBJ2-5)
CASNLGPRGETQYF

SEQ ID NO: 77903 - protein, 15 aa, Homo sapiens
  CDR3 for alpha chain variable domain of TCR clone 38952 (TRAV17, TRAJ4)
CATGTWSGSYNKLIF

SEQ ID NO: 77904 - protein, 13 aa, Homo sapiens
  CDR3 for beta chain variable domain of TCR clone 38952 (TRBV6-6, TRBJ2-7)
CASSPKHLAEQYF

SEQ ID NO: 77905 - protein, 18 aa, Homo sapiens
  CDR3 for alpha chain variable domain of TCR clone 38953 (TRAV21, TRAJ52)
CAVRPSPAGGTSYGKLTL

SEQ ID NO: 77906 - protein, 14 aa, Homo sapiens
  CDR3 for beta chain variable domain of TCR clone 38953 (TRBV4-1, TRBJ2-2)
CASSQAVNTGELFF

SEQ ID NO: 77907 - protein, 14 aa, Homo sapiens
  CDR3 for alpha chain variable domain of TCR clone 38954 (TRAV13-1, TRAJ44)
CAAKATGTASKLTF

SEQ ID NO: 77908 - protein, 14 aa, Homo sapiens
  CDR3 for beta chain variable domain of TCR clone 38954 (TRBV7-3, TRBJ2-1)
CASSLAGGTNEQFF

SEQ ID NO: 77909 - protein, 14 aa, Homo sapiens
  CDR3 for alpha chain variable domain of TCR clone 38955 (TRAV8-2, TRAJ6)
CVVISAGGSYIPTF

SEQ ID NO: 77910 - protein, 16 aa, Homo sapiens
  CDR3 for beta chain variable domain of TCR clone 38955 (TRBV7-6, TRBJ2-6)
CASSLPGLSGANVPTF

SEQ ID NO: 77911 - protein, 13 aa, Homo sapiens
  CDR3 for alpha chain variable domain of TCR clone 38956 (TRAV13-1, TRAJ5)
CAASDKGRRALTF

SEQ ID NO: 77912 - protein, 12 aa, Homo sapiens
  CDR3 for beta chain variable domain of TCR clone 38956 (TRBV28, TRBJ2-3)
CASSLYRDTQYF

SEQ ID NO: 77913 - protein, 13 aa, Homo sapiens
  CDR3 for alpha chain variable domain of TCR clone 38957 (TRAV8-3, TRAJ43)
CAVGPDNNNDMRF

SEQ ID NO: 77914 - protein, 12 aa, Homo sapiens
  CDR3 for beta chain variable domain of TCR clone 38957 (TRBV7-2, TRBJ1-6)
CASSLSSSPLRF

SEQ ID NO: 77915 - protein, 11 aa, Homo sapiens
  CDR3 for alpha chain variable domain of TCR clone 38958 (TRAV1-1, TRAJ23)
CAVRQGGKLIF

SEQ ID NO: 77916 - protein, 14 aa, Homo sapiens
  CDR3 for beta chain variable domain of TCR clone 38958 (TRBV7-2, TRBJ2-7)
CASRSQGAAYEQYF

SEQ ID NO: 77917 - protein, 13 aa, Homo sapiens
  CDR3 for alpha chain variable domain of TCR clone 38959 (TRAV3, TRAJ27)
CAVRPLGAGKSTF

SEQ ID NO: 77918 - protein, 13 aa, Homo sapiens
  CDR3 for beta chain variable domain of TCR clone 38959 (TRBV7-9, TRBJ2-3)
CASSPGSSDTQYF

SEQ ID NO: 77919 - protein, 16 aa, Homo sapiens
  CDR3 for alpha chain variable domain of TCR clone 38960 (TRAV4, TRAJ9)
CLVGDPNRHGGFKTIF

SEQ ID NO: 77920 - protein, 16 aa, Homo sapiens
  CDR3 for beta chain variable domain of TCR clone 38960 (TRBV28, TRBJ1-4)
CASSPPYRGRSEKLFF

SEQ ID NO: 77921 - protein, 12 aa, Homo sapiens
  CDR3 for alpha chain variable domain of TCR clone 38961 (TRAV35, TRAJ31)
CAAASNNARLMS

SEQ ID NO: 77922 - protein, 14 aa, Homo sapiens
  CDR3 for beta chain variable domain of TCR clone 38961 (TRBV2, TRBJ2-2)
CASSLFGGNGELFF

SEQ ID NO: 77923 - protein, 14 aa, Homo sapiens
  CDR3 for alpha chain variable domain of TCR clone 38962 (TRAV17, TRAJ22)
CATSPSGSARHLTF

SEQ ID NO: 77924 - protein, 15 aa, Homo sapiens
  CDR3 for beta chain variable domain of TCR clone 38962 (TRBV4-1, TRBJ2-5)
CASSQWDLYQETQYF

SEQ ID NO: 77925 - protein, 15 aa, Homo sapiens
  CDR3 for alpha chain variable domain of TCR clone 38963 (TRAV2, TRAJ15)
CAVENREQAGTALIF

SEQ ID NO: 77926 - protein, 14 aa, Homo sapiens
  CDR3 for beta chain variable domain of TCR clone 38963 (TRBV11-2, TRBJ2-7)
CASSLGAGAYEQYF

SEQ ID NO: 77927 - protein, 13 aa, Homo sapiens
  CDR3 for alpha chain variable domain of TCR clone 38964 (TRAV21, TRAJ20)
CAVGLRVDYKLSF

SEQ ID NO: 77928 - protein, 12 aa, Homo sapiens
  CDR3 for beta chain variable domain of TCR clone 38964 (TRBV11-3, TRBJ1-1)
CASSHRQGGAFF

SEQ ID NO: 77929 - protein, 15 aa, Homo sapiens
  CDR3 for alpha chain variable domain of TCR clone 38965 (TRAV4, TRAJ26)
CLVGDMNNYGKNFVF

SEQ ID NO: 77930 - protein, 16 aa, Homo sapiens
  CDR3 for beta chain variable domain of TCR clone 38965 (TRBV28, TRBJ1-4)
CASSSRTGAANEKLFF

SEQ ID NO: 77931 - protein, 11 aa, Homo sapiens
  CDR3 for alpha chain variable domain of TCR clone 38966 (TRAV21, TRAJ34)
CAHYNTDNLIF

SEQ ID NO: 77932 - protein, 13 aa, Homo sapiens
  CDR3 for beta chain variable domain of TCR clone 38966 (TRBV7-6, TRBJ1-2)
CASSLVADYGYTF

SEQ ID NO: 77933 - protein, 16 aa, Homo sapiens
  CDR3 for alpha chain variable domain of TCR clone 38967 (TRAV2, TRAJ4)
CAVEDRFSGCYNKLIF

SEQ ID NO: 77934 - protein, 13 aa, Homo sapiens
  CDR3 for beta chain variable domain of TCR clone 38967 (TRBV7-7, TRBJ2-5)
CASSRSGQETQYF

SEQ ID NO: 77935 - protein, 12 aa, Homo sapiens
  CDR3 for alpha chain variable domain of TCR clone 38968 (TRAV2, TRAJ31)
CAVEDNNARLMF

SEQ ID NO: 77936 - protein, 14 aa, Homo sapiens
  CDR3 for beta chain variable domain of TCR clone 38968 (TRBV7-2, TRBJ2-7)
CASSPKTSFYEQYF

SEQ ID NO: 77937 - protein, 17 aa, Homo sapiens
  CDR3 for alpha chain variable domain of TCR clone 38969 (TRAV3, TRAJ12)
CAVRDGGRMDSSYKLIF

SEQ ID NO: 77938 - protein, 16 aa, Homo sapiens
  CDR3 for beta chain variable domain of TCR clone 38969 (TRBV19, TRBJ2-1)
CASSKAGPSSYNEQFF

SEQ ID NO: 77939 - protein, 15 aa, Homo sapiens
  CDR3 for alpha chain variable domain of TCR clone 38970 (TRAV3, TRAJ20)
CAVRDIKLSDYKLSF

SEQ ID NO: 77940 - protein, 15 aa, Homo sapiens
  CDR3 for beta chain variable domain of TCR clone 38970 (TRBV7-9, TRBJ1-6)
CASSSPERGNSPLHF

SEQ ID NO: 77941 - protein, 18 aa, Homo sapiens
  CDR3 for alpha chain variable domain of TCR clone 38971 (TRAV20, TRAJ4)
CAVQPCHMFSGGYNKLIF

SEQ ID NO: 77942 - protein, 13 aa, Homo sapiens
  CDR3 for beta chain variable domain of TCR clone 38971 (TRBV19, TRBJ2-3)
CATWDKITDTQYF

SEQ ID NO: 77943 - protein, 15 aa, Homo sapiens
  CDR3 for alpha chain variable domain of TCR clone 38972 (TRAV38-1, TRAJ37)
CAFIFGSSNTGKLIF

SEQ ID NO: 77944 - protein, 12 aa, Homo sapiens
  CDR3 for beta chain variable domain of TCR clone 38972 (TRBV7-9, TRBJ2-7)
CASSLEGYEQYF

SEQ ID NO: 77945 - protein, 11 aa, Homo sapiens
  CDR3 for alpha chain variable domain of TCR clone 38973 (TRAV23/DV6, TRAJ48)
CAPRWGGKLTF

SEQ ID NO: 77946 - protein, 14 aa, Homo sapiens
  CDR3 for beta chain variable domain of TCR clone 38973 (TRBV29-1, TRBJ1-3)
CSVADRVVGNTIYF

SEQ ID NO: 77947 - protein, 13 aa, Homo sapiens
  CDR3 for alpha chain variable domain of TCR clone 38974 (TRAV20, TRAJ37)
YAGCSSNTGKLIF

SEQ ID NO: 77948 - protein, 11 aa, Homo sapiens
  CDR3 for beta chain variable domain of TCR clone 38974 (TRBV12-4, TRBJ2-3)
CASTATDTQYF

SEQ ID NO: 77949 - protein, 12 aa, Homo sapiens
  CDR3 for alpha chain variable domain of TCR clone 38975 (TRAV38-1, TRAJ47)
CAFETYGNKLVF

SEQ ID NO: 77950 - protein, 13 aa, Homo sapiens
  CDR3 for beta chain variable domain of TCR clone 38975 (TRBV7-3, TRBJ1-1)
CASSQDWGAEAFF

SEQ ID NO: 77951 - protein, 13 aa, Homo sapiens
  CDR3 for alpha chain variable domain of TCR clone 38976 (TRAV35, TRAJ42)
CAGFPGSQGNLIF

SEQ ID NO: 77952 - protein, 13 aa, Homo sapiens
  CDR3 for beta chain variable domain of TCR clone 38976 (TRBV29-1, TRBJ2-1)
CSVEGGRVNDQFF

SEQ ID NO: 77953 - protein, 16 aa, Homo sapiens
  CDR3 for alpha chain variable domain of TCR clone 38977 (TRAV35, TRAJ37)
CWAFLRGSGNTGKLIF

SEQ ID NO: 77954 - protein, 13 aa, Homo sapiens
  CDR3 for beta chain variable domain of TCR clone 38977 (TRBV2, TRBJ1-2)
CASSVRGNYGYTF

SEQ ID NO: 77955 - protein, 14 aa, Homo sapiens
  CDR3 for alpha chain variable domain of TCR clone 38978 (TRAV13-1, TRAJ3)
CAASKSSSASKIIF

SEQ ID NO: 77956 - protein, 13 aa, Homo sapiens
  CDR3 for beta chain variable domain of TCR clone 38978 (TRBV25-1, TRBJ2-5)
CAISESGRETQYF

SEQ ID NO: 77957 - protein, 10 aa, Homo sapiens
  CDR3 for alpha chain variable domain of TCR clone 38979 (TRAV16, TRAJ22)
SAMYLRQLTF

SEQ ID NO: 77958 - protein, 15 aa, Homo sapiens
  CDR3 for beta chain variable domain of TCR clone 38979 (TRBV7-9, TRBJ1-6)
CASSSPGRENSPLHF

SEQ ID NO: 77959 - protein, 14 aa, Homo sapiens
  CDR3 for alpha chain variable domain of TCR clone 38980 (TRAV13-1, TRAJ12)
CAASYMNSSYKLIF

SEQ ID NO: 77960 - protein, 13 aa, Homo sapiens
  CDR3 for beta chain variable domain of TCR clone 38980 (TRBV2, TRBJ2-5)
CASSDGIQETQYF

SEQ ID NO: 77961 - protein, 13 aa, Homo sapiens
  CDR3 for alpha chain variable domain of TCR clone 38981 (TRAV13-1, TRAJ21)
CAASIYNFNKFYF

SEQ ID NO: 77962 - protein, 13 aa, Homo sapiens
  CDR3 for beta chain variable domain of TCR clone 38981 (TRBV27, TRBJ1-4)
CASSFMGDEKLFF

SEQ ID NO: 77963 - protein, 17 aa, Homo sapiens
  CDR3 for alpha chain variable domain of TCR clone 38982 (TRAV4, TRAJ13)
CLVGVQGSSGGYQKVTF

SEQ ID NO: 77964 - protein, 18 aa, Homo sapiens
  CDR3 for beta chain variable domain of TCR clone 38982 (TRBV15, TRBJ2-3)
CATSRDGARSGDTDTQYF

SEQ ID NO: 77965 - protein, 23 aa, Homo sapiens
  CDR3 for alpha chain variable domain of TCR clone 38983 (TRAV26-1, )
CIADNAGNSHIQNPDPAVYQLRD

SEQ ID NO: 77966 - protein, 17 aa, Homo sapiens
  CDR3 for beta chain variable domain of TCR clone 38983 (TRBV11-2, TRBJ2-6)
CASSQRDIFSGANVLTF

SEQ ID NO: 77967 - protein, 14 aa, Homo sapiens
  CDR3 for alpha chain variable domain of TCR clone 38984 (TRAV12-3, TRAJ10)
SHLPLTGGGNKLTF

SEQ ID NO: 77968 - protein, 16 aa, Homo sapiens
  CDR3 for beta chain variable domain of TCR clone 38984 (TRBV5-1, TRBJ1-1)
CASSSGGNSLNTEAFF

SEQ ID NO: 77969 - protein, 10 aa, Homo sapiens
  CDR3 for alpha chain variable domain of TCR clone 38985 (TRAV12-1, TRAJ37)
ARGNTGKLIL

SEQ ID NO: 77970 - protein, 15 aa, Homo sapiens
  CDR3 for beta chain variable domain of TCR clone 38985 (TRBV7-2, TRBJ2-3)
CASSLEQGGTDTQYF

SEQ ID NO: 77971 - protein, 13 aa, Homo sapiens
  CDR3 for alpha chain variable domain of TCR clone 38986 (TRAV8-3, TRAJ28)
CAVGAVGSYQLTF

SEQ ID NO: 77972 - protein, 16 aa, Homo sapiens
  CDR3 for beta chain variable domain of TCR clone 38986 (TRBV24-1, TRBJ2-3)
CATSDPGTGATDTQYF

SEQ ID NO: 77973 - protein, 17 aa, Homo sapiens
  CDR3 for alpha chain variable domain of TCR clone 38987 (TRAV12-3, TRAJ6)
CAMSARVGAGGSYIPTF

SEQ ID NO: 77974 - protein, 12 aa, Homo sapiens
  CDR3 for beta chain variable domain of TCR clone 38987 (TRBV12-4, TRBJ2-3)
CASSTLPDTQYF

SEQ ID NO: 77975 - protein, 13 aa, Homo sapiens
  CDR3 for alpha chain variable domain of TCR clone 38988 (TRAV8-2, TRAJ49)
CVVSPSTGNQFYF

SEQ ID NO: 77976 - protein, 14 aa, Homo sapiens
  CDR3 for beta chain variable domain of TCR clone 38988 (TRBV11-2, TRBJ2-7)
CASSRSGGAGGQYF

SEQ ID NO: 77977 - protein, 14 aa, Homo sapiens
  CDR3 for alpha chain variable domain of TCR clone 38989 (TRAV12-2, TRAJ13)
CAVKETGGYQKVTF

SEQ ID NO: 77978 - protein, 13 aa, Homo sapiens
  CDR3 for beta chain variable domain of TCR clone 38989 (TRBV28, TRBJ2-7)
CASKAGGVYEQYF

SEQ ID NO: 77979 - protein, 13 aa, Homo sapiens
  CDR3 for alpha chain variable domain of TCR clone 38990 (TRAV13-1, TRAJ5)
CAASDTGRRALTF

SEQ ID NO: 77980 - protein, 13 aa, Homo sapiens
  CDR3 for beta chain variable domain of TCR clone 38990 (TRBV12-4, TRBJ1-2)
CASSLRQGKGYTF

SEQ ID NO: 77981 - protein, 12 aa, Homo sapiens
  CDR3 for alpha chain variable domain of TCR clone 38991 (TRAV8-3, TRAJ26)
CAGDNYGQNFFF

SEQ ID NO: 77982 - protein, 13 aa, Homo sapiens
  CDR3 for beta chain variable domain of TCR clone 38991 (TRBV20-1, TRBJ1-1)
CSAPLGGGTEAFF

SEQ ID NO: 77983 - protein, 19 aa, Homo sapiens
  CDR3 for alpha chain variable domain of TCR clone 38992 (TRAV2, TRAJ32)
TTVLSTPPSQGGATNKLIF

SEQ ID NO: 77984 - protein, 12 aa, Homo sapiens
  CDR3 for beta chain variable domain of TCR clone 38992 (TRBV20-1, TRBJ2-7)
CSAITPTKEQCF

SEQ ID NO: 77985 - protein, 10 aa, Homo sapiens
  CDR3 for alpha chain variable domain of TCR clone 38993 (TRAV8-4, TRAJ43)
CAASADDMRF

SEQ ID NO: 77986 - protein, 15 aa, Homo sapiens
  CDR3 for beta chain variable domain of TCR clone 38993 (TRBV5-1, TRBJ2-3)
CASSVTSGSTDTQYF

SEQ ID NO: 77987 - protein, 11 aa, Homo sapiens
  CDR3 for alpha chain variable domain of TCR clone 38994 (TRAV29/DV5, TRAJ47)
CAASGEIWKQT

SEQ ID NO: 77988 - protein, 15 aa, Homo sapiens
  CDR3 for beta chain variable domain of TCR clone 38994 (TRBV20-1, TRBJ2-7)
CSARDRVSGMDEQYF

SEQ ID NO: 77989 - protein, 12 aa, Homo sapiens
  CDR3 for alpha chain variable domain of TCR clone 38995 (TRAV12-3, TRAJ17)
CAMTLTGNKLTF

SEQ ID NO: 77990 - protein, 16 aa, Homo sapiens
  CDR3 for beta chain variable domain of TCR clone 38995 (TRBV7-9, TRBJ2-3)
CASSPWREVGTDTQYF

SEQ ID NO: 77991 - protein, 14 aa, Homo sapiens
  CDR3 for alpha chain variable domain of TCR clone 38996 (TRAV1-2, TRAJ8)
CAVREDTGFQKLVF

SEQ ID NO: 77992 - protein, 16 aa, Homo sapiens
  CDR3 for beta chain variable domain of TCR clone 38996 (TRBV12-5, TRBJ2-5)
CASGPRTSGNQETQYS

SEQ ID NO: 77993 - protein, 16 aa, Homo sapiens
  CDR3 for alpha chain variable domain of TCR clone 38997 (TRAV26-1, TRAJ23)
CIVRVHPYNQGGKLIF

SEQ ID NO: 77994 - protein, 13 aa, Homo sapiens
  CDR3 for beta chain variable domain of TCR clone 38997 (TRBV20-1, TRBJ2-5)
CSARGGYQETQYF

SEQ ID NO: 77995 - protein, 18 aa, Homo sapiens
  CDR3 for alpha chain variable domain of TCR clone 38998 (TRAV13-1, TRAJ52)
CAAKNPNAGGTSYGKLTF

SEQ ID NO: 77996 - protein, 17 aa, Homo sapiens
  CDR3 for beta chain variable domain of TCR clone 38998 (TRBV7-3, TRBJ2-3)
CASSLMKRMRGADTQYF

SEQ ID NO: 77997 - protein, 14 aa, Homo sapiens
  CDR3 for alpha chain variable domain of TCR clone 38999 (TRAV1-2, TRAJ16)
CAVNRFSDGQKLLF

SEQ ID NO: 77998 - protein, 14 aa, Homo sapiens
  CDR3 for beta chain variable domain of TCR clone 38999 (TRBV19, TRBJ2-7)
CASNFRDTFTGMYF

SEQ ID NO: 77999 - protein, 10 aa, Homo sapiens
  CDR3 for alpha chain variable domain of TCR clone 39000 (TRAV1-2, TRAJ31)
RAFFDARLMF

SEQ ID NO: 78000 - protein, 15 aa, Homo sapiens
  CDR3 for beta chain variable domain of TCR clone 39000 (TRBV4-1, TRBJ1-4)
CASSDTGGTNEKLFF

SEQ ID NO: 78001 - protein, 16 aa, Homo sapiens
  CDR3 for alpha chain variable domain of TCR clone 39001 (TRAV27, TRAJ53)
CAAPEGSGGSNHKLTF

SEQ ID NO: 78002 - protein, 14 aa, Homo sapiens
  CDR3 for beta chain variable domain of TCR clone 39001 (TRBV4-3, TRBJ1-5)
CASSQGGQGWPQHF

SEQ ID NO: 78003 - protein, 10 aa, Homo sapiens
  CDR3 for alpha chain variable domain of TCR clone 39002 (TRAV38-1, TRAJ34)
CAFMDDKLTF

SEQ ID NO: 78004 - protein, 14 aa, Homo sapiens
  CDR3 for beta chain variable domain of TCR clone 39002 (TRBV7-2, TRBJ2-2)
CASSLNSNTGELFF

SEQ ID NO: 78005 - protein, 14 aa, Homo sapiens
  CDR3 for alpha chain variable domain of TCR clone 39003 (TRAV25, TRAJ50)
CAGPKKTSYDKVIF

SEQ ID NO: 78006 - protein, 16 aa, Homo sapiens
  CDR3 for beta chain variable domain of TCR clone 39003 (TRBV28, TRBJ2-7)
CASSSGTSGRGYEQYF

SEQ ID NO: 78007 - protein, 14 aa, Homo sapiens
  CDR3 for alpha chain variable domain of TCR clone 39004 (TRAV12-3, TRAJ10)
SHLPLTGGGDKLTF

SEQ ID NO: 78008 - protein, 15 aa, Homo sapiens
  CDR3 for beta chain variable domain of TCR clone 39004 (TRBV4-1, TRBJ1-4)
CASSDTGGTNEKLFF

SEQ ID NO: 78009 - protein, 12 aa, Homo sapiens
  CDR3 for alpha chain variable domain of TCR clone 39005 (TRAV3, TRAJ31)
CAVRDGNARLMF

SEQ ID NO: 78010 - protein, 18 aa, Homo sapiens
  CDR3 for beta chain variable domain of TCR clone 39005 (TRBV7-2, TRBJ2-3)
CASSLRREGSGITDTQYF

SEQ ID NO: 78011 - protein, 13 aa, Homo sapiens
  CDR3 for alpha chain variable domain of TCR clone 39006 (TRAV8-6, TRAJ49)
CAVITNTGNQFYF

SEQ ID NO: 78012 - protein, 12 aa, Homo sapiens
  CDR3 for beta chain variable domain of TCR clone 39006 (TRBV12-4, TRBJ2-7)
CASNLGGYEQYF

SEQ ID NO: 78013 - protein, 14 aa, Homo sapiens
  CDR3 for alpha chain variable domain of TCR clone 39007 (TRAV12-1, TRAJ30)
CVVNIGGRGDKIIF

SEQ ID NO: 78014 - protein, 14 aa, Homo sapiens
  CDR3 for beta chain variable domain of TCR clone 39007 (TRBV7-6, TRBJ2-3)
CVSSLGTVTDTQYF

SEQ ID NO: 78015 - protein, 11 aa, Homo sapiens
  CDR3 for alpha chain variable domain of TCR clone 39008 (TRAV1-2, TRAJ20)
CAVANDYKLSF

SEQ ID NO: 78016 - protein, 14 aa, Homo sapiens
  CDR3 for beta chain variable domain of TCR clone 39008 (TRBV7-9, TRBJ1-1)
CASTPLQSYTEAFS

SEQ ID NO: 78017 - protein, 13 aa, Homo sapiens
  CDR3 for alpha chain variable domain of TCR clone 39009 (TRAV3, TRAJ15)
CAVGDQAGTALIF

SEQ ID NO: 78018 - protein, 17 aa, Homo sapiens
  CDR3 for beta chain variable domain of TCR clone 39009 (TRBV28, TRBJ2-5)
CASSTPEGDALQETQYF

SEQ ID NO: 78019 - protein, 15 aa, Homo sapiens
  CDR3 for alpha chain variable domain of TCR clone 39010 (TRAV27, TRAJ50)
CAGVGRGTSYDKVIF

SEQ ID NO: 78020 - protein, 14 aa, Homo sapiens
  CDR3 for beta chain variable domain of TCR clone 39010 (TRBV7-2, TRBJ1-1)
CASSFYDLNTEAFS

SEQ ID NO: 78021 - protein, 11 aa, Homo sapiens
  CDR3 for alpha chain variable domain of TCR clone 39011 (TRAV1-2, TRAJ40)
CAVPGTYKYIF

SEQ ID NO: 78022 - protein, 14 aa, Homo sapiens
  CDR3 for beta chain variable domain of TCR clone 39011 (TRBV25-1, TRBJ1-1)
CASTHLGGNTEAFF

SEQ ID NO: 78023 - protein, 12 aa, Homo sapiens
  CDR3 for alpha chain variable domain of TCR clone 39012 (TRAV12-3, TRAJ17)
CAMTLTGNKLTF

SEQ ID NO: 78024 - protein, 13 aa, Homo sapiens
  CDR3 for beta chain variable domain of TCR clone 39012 (TRBV20-1, TRBJ2-2)
CSASAAGTGELFF

SEQ ID NO: 78025 - protein, 11 aa, Homo sapiens
  CDR3 for alpha chain variable domain of TCR clone 39013 (TRAV17, TRAJ9)
CATTGGFKTIF

SEQ ID NO: 78026 - protein, 14 aa, Homo sapiens
  CDR3 for beta chain variable domain of TCR clone 39013 (TRBV7-9, TRBJ2-2)
CASSGLADTGELFF

SEQ ID NO: 78027 - protein, 22 aa, Homo sapiens
  CDR3 for alpha chain variable domain of TCR clone 39014 (TRAV12-3, TRAJ26)
CSSETHSPVIQPPTSPNQNFVF

SEQ ID NO: 78028 - protein, 15 aa, Homo sapiens
  CDR3 for beta chain variable domain of TCR clone 39014 (TRBV4-1, TRBJ1-4)
CASSDTGGTNEKLFF

SEQ ID NO: 78029 - protein, 13 aa, Homo sapiens
  CDR3 for alpha chain variable domain of TCR clone 39015 (TRAV12-1, TRAJ39)
CVVNHNAGNMLTF

SEQ ID NO: 78030 - protein, 14 aa, Homo sapiens
  CDR3 for beta chain variable domain of TCR clone 39015 (TRBV27, TRBJ2-3)
CASSPLGTTDTQYF

SEQ ID NO: 78031 - protein, 14 aa, Homo sapiens
  CDR3 for alpha chain variable domain of TCR clone 39016 (TRAV12-3, TRAJ10)
SHLPLTGGGNKLTF

SEQ ID NO: 78032 - protein, 13 aa, Homo sapiens
  CDR3 for beta chain variable domain of TCR clone 39016 (TRBV20-1, TRBJ1-1)
CSARVGGNTEAFF

SEQ ID NO: 78033 - protein, 13 aa, Homo sapiens
  CDR3 for alpha chain variable domain of TCR clone 39017 (TRAV35, TRAJ36)
CAGPRIGANSLFF

SEQ ID NO: 78034 - protein, 15 aa, Homo sapiens
  CDR3 for beta chain variable domain of TCR clone 39017 (TRBV28, TRBJ2-5)
CASSPPWSYQETQYF

SEQ ID NO: 78035 - protein, 14 aa, Homo sapiens
  CDR3 for alpha chain variable domain of TCR clone 39018 (TRAV1-2, TRAJ6)
CAVSSSGGSYIPTF

SEQ ID NO: 78036 - protein, 15 aa, Homo sapiens
  CDR3 for beta chain variable domain of TCR clone 39018 (TRBV28, TRBJ2-7)
CASSPGGRGFYEQYF

SEQ ID NO: 78037 - protein, 12 aa, Homo sapiens
  CDR3 for alpha chain variable domain of TCR clone 39019 (TRAV13-1, TRAJ49)
CAASPMGNQFYF

SEQ ID NO: 78038 - protein, 14 aa, Homo sapiens
  CDR3 for beta chain variable domain of TCR clone 39019 (TRBV5-1, TRBJ2-7)
CASSLTSGGYEQYF

SEQ ID NO: 78039 - protein, 15 aa, Homo sapiens
  CDR3 for alpha chain variable domain of TCR clone 39020 (TRAV26-1, TRAJ22)
CIVRVSFWFCKATDL

SEQ ID NO: 78040 - protein, 13 aa, Homo sapiens
  CDR3 for beta chain variable domain of TCR clone 39020 (TRBV7-9, TRBJ1-2)
CASSLKQTYGYTF

SEQ ID NO: 78041 - protein, 13 aa, Homo sapiens
  CDR3 for alpha chain variable domain of TCR clone 39021 (TRAV20, TRAJ40)
CAVPFSGTCKYIF

SEQ ID NO: 78042 - protein, 13 aa, Homo sapiens
  CDR3 for beta chain variable domain of TCR clone 39021 (TRBV15, TRBJ2-5)
CATSQIGEETQYF

SEQ ID NO: 78043 - protein, 15 aa, Homo sapiens
  CDR3 for alpha chain variable domain of TCR clone 39022 (TRAV26-1, TRAJ29)
CIVRVEGSGNTPLVF

SEQ ID NO: 78044 - protein, 14 aa, Homo sapiens
  CDR3 for beta chain variable domain of TCR clone 39022 (TRBV18, TRBJ2-5)
WASSPGVSQETQYF

SEQ ID NO: 78045 - protein, 12 aa, Homo sapiens
  CDR3 for alpha chain variable domain of TCR clone 39023 (TRAV17, TRAJ12)
CATLRSSYKLIF

SEQ ID NO: 78046 - protein, 14 aa, Homo sapiens
  CDR3 for beta chain variable domain of TCR clone 39023 (TRBV19, TRBJ2-1)
CASPTFVLSGEQFF

SEQ ID NO: 78047 - protein, 15 aa, Homo sapiens
  CDR3 for alpha chain variable domain of TCR clone 39024 (TRAV17, TRAJ22)
CATVAPSGSAGQLTF

SEQ ID NO: 78048 - protein, 16 aa, Homo sapiens
  CDR3 for beta chain variable domain of TCR clone 39024 (TRBV10-3, TRBJ2-7)
CAISADFADRPYEQYF

SEQ ID NO: 78049 - protein, 11 aa, Homo sapiens
  CDR3 for alpha chain variable domain of TCR clone 39025 (TRAV17, TRAJ9)
CATTGGFKTIF

SEQ ID NO: 78050 - protein, 14 aa, Homo sapiens
  CDR3 for beta chain variable domain of TCR clone 39025 (TRBV7-9, TRBJ2-2)
CASSGLADTRELFF

SEQ ID NO: 78051 - protein, 10 aa, Homo sapiens
  CDR3 for alpha chain variable domain of TCR clone 39026 (TRAV16, TRAJ22)
SAMCLRQLTF

SEQ ID NO: 78052 - protein, 15 aa, Homo sapiens
  CDR3 for beta chain variable domain of TCR clone 39026 (TRBV7-9, TRBJ1-6)
CASSSPGRGNSPLHF

SEQ ID NO: 78053 - protein, 12 aa, Homo sapiens
  CDR3 for alpha chain variable domain of TCR clone 39027 (TRAV16, TRAJ10)
CSRTGGGNKLTF

SEQ ID NO: 78054 - protein, 14 aa, Homo sapiens
  CDR3 for beta chain variable domain of TCR clone 39027 (TRBV2, TRBJ2-3)
CASSEGQNTDTQYF

SEQ ID NO: 78055 - protein, 13 aa, Homo sapiens
  CDR3 for alpha chain variable domain of TCR clone 39028 (TRAV12-3, TRAJ9)
CAMRNTGGFKTIF

SEQ ID NO: 78056 - protein, 16 aa, Homo sapiens
  CDR3 for beta chain variable domain of TCR clone 39028 (TRBV12-4, TRBJ1-5)
CASSRPVGGSNQPQHF

SEQ ID NO: 78057 - protein, 23 aa, Homo sapiens
  CDR3 for alpha chain variable domain of TCR clone 39029 (TRAV1-1, TRAJ11)
LLQELQMKDSASYFRAGYSTLTF

SEQ ID NO: 78058 - protein, 15 aa, Homo sapiens
  CDR3 for beta chain variable domain of TCR clone 39029 (TRBV6-5, TRBJ2-1)
CASRGDFDSYNEQFF

SEQ ID NO: 78059 - protein, 12 aa, Homo sapiens
  CDR3 for alpha chain variable domain of TCR clone 39030 (TRAV13-1, TRAJ48)
CAANFGNEKLTF

SEQ ID NO: 78060 - protein, 13 aa, Homo sapiens
  CDR3 for beta chain variable domain of TCR clone 39030 (TRBV7-3, TRBJ1-1)
CASSQGWGADAFF

SEQ ID NO: 78061 - protein, 14 aa, Homo sapiens
  CDR3 for alpha chain variable domain of TCR clone 39031 (TRAV12-1, TRAJ17)
CVVNYKAAGNKLTF

SEQ ID NO: 78062 - protein, 13 aa, Homo sapiens
  CDR3 for beta chain variable domain of TCR clone 39031 (TRBV12-4, TRBJ2-2)
CASSITGSGELFF

SEQ ID NO: 78063 - protein, 18 aa, Homo sapiens
  CDR3 for alpha chain variable domain of TCR clone 39032 (TRAV12-3, TRAJ52)
CAMSALNAGDTSYGKLTF

SEQ ID NO: 78064 - protein, 13 aa, Homo sapiens
  CDR3 for beta chain variable domain of TCR clone 39032 (TRBV27, TRBJ1-1)
CASSLSIGAEAFF

SEQ ID NO: 78065 - protein, 14 aa, Homo sapiens
  CDR3 for alpha chain variable domain of TCR clone 39033 (TRAV38-1, TRAJ45)
CAPHSGGGADGLTF

SEQ ID NO: 78066 - protein, 13 aa, Homo sapiens
  CDR3 for beta chain variable domain of TCR clone 39033 (TRBV10-3, TRBJ1-2)
CAISERDSYGYTF

SEQ ID NO: 78067 - protein, 15 aa, Homo sapiens
  CDR3 for alpha chain variable domain of TCR clone 39034 (TRAV12-2, TRAJ53)
CAVNGGGGSNYKLTF

SEQ ID NO: 78068 - protein, 13 aa, Homo sapiens
  CDR3 for beta chain variable domain of TCR clone 39034 (TRBV12-4, TRBJ2-7)
CASSPTETYEQYF

SEQ ID NO: 78069 - protein, 13 aa, Homo sapiens
  CDR3 for alpha chain variable domain of TCR clone 39035 (TRAV8-2, TRAJ34)
CVVSDRRTDELIF

SEQ ID NO: 78070 - protein, 15 aa, Homo sapiens
  CDR3 for beta chain variable domain of TCR clone 39035 (TRBV20-1, TRBJ2-3)
CSARVVGGSTDTQYF

SEQ ID NO: 78071 - protein, 15 aa, Homo sapiens
  CDR3 for alpha chain variable domain of TCR clone 39036 (TRAV14/DV4, TRAJ12)
SAMREGWDSSYKLIF

SEQ ID NO: 78072 - protein, 16 aa, Homo sapiens
  CDR3 for beta chain variable domain of TCR clone 39036 (TRBV2, TRBJ2-5)
CASSETQGVGEETQYF

SEQ ID NO: 78073 - protein, 11 aa, Homo sapiens
  CDR3 for alpha chain variable domain of TCR clone 39037 (TRAV2, TRAJ33)
CAVESNYQLIW

SEQ ID NO: 78074 - protein, 17 aa, Homo sapiens
  CDR3 for beta chain variable domain of TCR clone 39037 (TRBV20-1, TRBJ2-1)
CSASSSGLAGSYNEQFF

SEQ ID NO: 78075 - protein, 14 aa, Homo sapiens
  CDR3 for alpha chain variable domain of TCR clone 39038 (TRAV12-3, TRAJ10)
SHLPLTGGGNKLTF

SEQ ID NO: 78076 - protein, 15 aa, Homo sapiens
  CDR3 for beta chain variable domain of TCR clone 39038 (TRBV6-5, TRBJ2-7)
CASSYSTSGNYEQYF

SEQ ID NO: 78077 - protein, 13 aa, Homo sapiens
  CDR3 for alpha chain variable domain of TCR clone 39039 (TRAV3, TRAJ15)
CAVRDQAGTALIF

SEQ ID NO: 78078 - protein, 15 aa, Homo sapiens
  CDR3 for beta chain variable domain of TCR clone 39039 (TRBV11-1, TRBJ2-7)
CASSLTYGASYEQYF

SEQ ID NO: 78079 - protein, 13 aa, Homo sapiens
  CDR3 for alpha chain variable domain of TCR clone 39040 (TRAV24, TRAJ15)
CALSNQAGTALIF

SEQ ID NO: 78080 - protein, 13 aa, Homo sapiens
  CDR3 for beta chain variable domain of TCR clone 39040 (TRBV6-3, TRBJ1-2)
CASSYRGPDGYTF

SEQ ID NO: 78081 - protein, 12 aa, Homo sapiens
  CDR3 for alpha chain variable domain of TCR clone 39041 (TRAV17, TRAJ12)
CATLRSSYKLIF

SEQ ID NO: 78082 - protein, 15 aa, Homo sapiens
  CDR3 for beta chain variable domain of TCR clone 39041 (TRBV20-1, TRBJ2-7)
CSARDRVSGMDEQYF

SEQ ID NO: 78083 - protein, 16 aa, Homo sapiens
  CDR3 for alpha chain variable domain of TCR clone 39042 (TRAV26-1, TRAJ37)
CIVRGEGSGNTGKLIF

SEQ ID NO: 78084 - protein, 17 aa, Homo sapiens
  CDR3 for beta chain variable domain of TCR clone 39042 (TRBV4-1, TRBJ2-7)
CASSRDPLGVRGGEQYF

SEQ ID NO: 78085 - protein, 16 aa, Homo sapiens
  CDR3 for alpha chain variable domain of TCR clone 39043 (TRAV21, TRAJ37)
CAVRTAGSSKTGKLIF

SEQ ID NO: 78086 - protein, 13 aa, Homo sapiens
  CDR3 for beta chain variable domain of TCR clone 39043 (TRBV7-9, TRBJ2-5)
CASLPSGRETQYF

SEQ ID NO: 78087 - protein, 23 aa, Homo sapiens
  CDR3 for alpha chain variable domain of TCR clone 39044 (TRAV12-2, TRAJ43)
SLLIRDSQPSDSATYLCTFDMRF

SEQ ID NO: 78088 - protein, 18 aa, Homo sapiens
  CDR3 for beta chain variable domain of TCR clone 39044 (TRBV20-1, TRBJ2-3)
CSASGLAGGPGTTDTQYF

SEQ ID NO: 78089 - protein, 13 aa, Homo sapiens
  CDR3 for alpha chain variable domain of TCR clone 39045 (TRAV26-1, TRAJ33)
CIVRVEGNYQLIW

SEQ ID NO: 78090 - protein, 16 aa, Homo sapiens
  CDR3 for beta chain variable domain of TCR clone 39045 (TRBV15, TRBJ2-7)
CATSRDRGRRSGEQYF

SEQ ID NO: 78091 - protein, 11 aa, Homo sapiens
  CDR3 for alpha chain variable domain of TCR clone 39046 (TRAV4, TRAJ23)
CLVAPGGKLIF

SEQ ID NO: 78092 - protein, 15 aa, Homo sapiens
  CDR3 for beta chain variable domain of TCR clone 39046 (TRBV7-2, TRBJ2-1)
CASSFQADEYNEHFF

SEQ ID NO: 78093 - protein, 15 aa, Homo sapiens
  CDR3 for alpha chain variable domain of TCR clone 39047 (TRAV2, TRAJ22)
CAVPSRGGSARQLTF

SEQ ID NO: 78094 - protein, 14 aa, Homo sapiens
  CDR3 for beta chain variable domain of TCR clone 39047 (TRBV7-6, TRBJ2-3)
CASSLGTVTDAQYF

SEQ ID NO: 78095 - protein, 14 aa, Homo sapiens
  CDR3 for alpha chain variable domain of TCR clone 39048 (TRAV29/DV5, TRAJ49)
CAASAQNTGNQVYF

SEQ ID NO: 78096 - protein, 16 aa, Homo sapiens
  CDR3 for beta chain variable domain of TCR clone 39048 (TRBV12-4, TRBJ1-5)
CASRQPVEGSNQPQHF

SEQ ID NO: 78097 - protein, 15 aa, Homo sapiens
  CDR3 for alpha chain variable domain of TCR clone 39049 (TRAV8-1, TRAJ6)
CAVNTPPGGSYIPTF

SEQ ID NO: 78098 - protein, 15 aa, Homo sapiens
  CDR3 for beta chain variable domain of TCR clone 39049 (TRBV11-2, TRBJ2-2)
CASSPDRVNAGELFF

SEQ ID NO: 78099 - protein, 14 aa, Homo sapiens
  CDR3 for alpha chain variable domain of TCR clone 39050 (TRAV12-3, TRAJ10)
SHLPLTGGGNKLTF

SEQ ID NO: 78100 - protein, 17 aa, Homo sapiens
  CDR3 for beta chain variable domain of TCR clone 39050 (TRBV24-1, TRBJ2-1)
CATSDVSTSGTYNEQFF

SEQ ID NO: 78101 - protein, 16 aa, Homo sapiens
  CDR3 for alpha chain variable domain of TCR clone 39051 (TRAV3, TRAJ37)
CAVRGKGSGTTGKLIF

SEQ ID NO: 78102 - protein, 15 aa, Homo sapiens
  CDR3 for beta chain variable domain of TCR clone 39051 (TRBV6-6, TRBJ2-5)
CASSYGKIIQETQYF

SEQ ID NO: 78103 - protein, 13 aa, Homo sapiens
  CDR3 for alpha chain variable domain of TCR clone 39052 (TRAV8-6, TRAJ8)
CAVSNTGFQKLVF

SEQ ID NO: 78104 - protein, 15 aa, Homo sapiens
  CDR3 for beta chain variable domain of TCR clone 39052 (TRBV6-3, TRBJ2-7)
CASSSPGTVFYEQYF

SEQ ID NO: 78105 - protein, 14 aa, Homo sapiens
  CDR3 for alpha chain variable domain of TCR clone 39053 (TRAV8-4, TRAJ43)
CAASDPRNNNDMRF

SEQ ID NO: 78106 - protein, 15 aa, Homo sapiens
  CDR3 for beta chain variable domain of TCR clone 39053 (TRBV4-2, TRBJ1-2)
CASSQRTGGRDGYTF

SEQ ID NO: 78107 - protein, 14 aa, Homo sapiens
  CDR3 for alpha chain variable domain of TCR clone 39054 (TRAV12-2, TRAJ13)
CAVKKTGGYQKVTF

SEQ ID NO: 78108 - protein, 13 aa, Homo sapiens
  CDR3 for beta chain variable domain of TCR clone 39054 (TRBV10-3, TRBJ2-7)
CASKLAVDYEQYF

SEQ ID NO: 78109 - protein, 15 aa, Homo sapiens
  CDR3 for alpha chain variable domain of TCR clone 39055 (TRAV20, TRAJ43)
CAVQAGKSSKNDMRF

SEQ ID NO: 78110 - protein, 13 aa, Homo sapiens
  CDR3 for beta chain variable domain of TCR clone 39055 (TRBV27, TRBJ1-1)
CASSLSIGAEAFF

SEQ ID NO: 78111 - protein, 13 aa, Homo sapiens
  CDR3 for alpha chain variable domain of TCR clone 39056 (TRAV13-1, TRAJ49)
CAAMLYTGNQFYF

SEQ ID NO: 78112 - protein, 15 aa, Homo sapiens
  CDR3 for beta chain variable domain of TCR clone 39056 (TRBV25-1, TRBJ1-4)
CASSKRIATNEKLFF

SEQ ID NO: 78113 - protein, 13 aa, Homo sapiens
  CDR3 for alpha chain variable domain of TCR clone 39057 (TRAV20, TRAJ37)
CAGCSSNTGKLIF

SEQ ID NO: 78114 - protein, 11 aa, Homo sapiens
  CDR3 for beta chain variable domain of TCR clone 39057 (TRBV12-4, TRBJ2-3)
SASTATDTQYF

SEQ ID NO: 78115 - protein, 19 aa, Homo sapiens
  CDR3 for alpha chain variable domain of TCR clone 39058 (TRAV25, TRAJ43)
TATQTTDVGTYFCAVFMRF

SEQ ID NO: 78116 - protein, 13 aa, Homo sapiens
  CDR3 for beta chain variable domain of TCR clone 39058 (TRBV7-9, TRBJ1-2)
RASSLKQNYGYTF

SEQ ID NO: 78117 - protein, 14 aa, Homo sapiens
  CDR3 for alpha chain variable domain of TCR clone 39059 (TRAV8-3, TRAJ9)
CAVVYNTGGFKTIF

SEQ ID NO: 78118 - protein, 14 aa, Homo sapiens
  CDR3 for beta chain variable domain of TCR clone 39059 (TRBV7-3, TRBJ2-2)
CDSSSGGYTGELFF

SEQ ID NO: 78119 - protein, 12 aa, Homo sapiens
  CDR3 for alpha chain variable domain of TCR clone 39060 (TRAV13-1, TRAJ21)
CAAKEGFNKFYF

SEQ ID NO: 78120 - protein, 13 aa, Homo sapiens
  CDR3 for beta chain variable domain of TCR clone 39060 (TRBV4-1, TRBJ2-1)
CASSQEVQYEQFF

SEQ ID NO: 78121 - protein, 13 aa, Homo sapiens
  CDR3 for alpha chain variable domain of TCR clone 39061 (TRAV21, TRAJ27)
CAALNTNAGNSTF

SEQ ID NO: 78122 - protein, 14 aa, Homo sapiens
  CDR3 for beta chain variable domain of TCR clone 39061 (TRBV27, TRBJ1-1)
CASSLLSGLSEAFF

SEQ ID NO: 78123 - protein, 14 aa, Homo sapiens
  CDR3 for alpha chain variable domain of TCR clone 39062 (TRAV17, TRAJ4)
CATAPLGGYNKLIF

SEQ ID NO: 78124 - protein, 15 aa, Homo sapiens
  CDR3 for beta chain variable domain of TCR clone 39062 (TRBV11-3, TRBJ2-3)
CASLKDGREGDTQYF

SEQ ID NO: 78125 - protein, 16 aa, Homo sapiens
  CDR3 for alpha chain variable domain of TCR clone 39063 (TRAV4, TRAJ22)
CLVGDLYSGSARQLTF

SEQ ID NO: 78126 - protein, 15 aa, Homo sapiens
  CDR3 for beta chain variable domain of TCR clone 39063 (TRBV28, TRBJ2-1)
CASSIIAGGRSEQFF

SEQ ID NO: 78127 - protein, 17 aa, Homo sapiens
  CDR3 for alpha chain variable domain of TCR clone 39064 (TRAV8-3, TRAJ52)
CCGCDPPGDYSYGKLTF

SEQ ID NO: 78128 - protein, 18 aa, Homo sapiens
  CDR3 for beta chain variable domain of TCR clone 39064 (TRBV11-2, TRBJ2-6)
CASSLNPFLGTGANVLTF

SEQ ID NO: 78129 - protein, 14 aa, Homo sapiens
  CDR3 for alpha chain variable domain of TCR clone 39065 (TRAV16, TRAJ39)
CALSKNNAGNMLTF

SEQ ID NO: 78130 - protein, 14 aa, Homo sapiens
  CDR3 for beta chain variable domain of TCR clone 39065 (TRBV25-1, TRBJ1-1)
CASTHLGGNTEAFF

SEQ ID NO: 78131 - protein, 14 aa, Homo sapiens
  CDR3 for alpha chain variable domain of TCR clone 39066 (TRAV8-4, TRAJ9)
CAVRINTGGFKTIF

SEQ ID NO: 78132 - protein, 15 aa, Homo sapiens
  CDR3 for beta chain variable domain of TCR clone 39066 (TRBV10-2, TRBJ2-6)
CASSEQGTGANVLTV

SEQ ID NO: 78133 - protein, 13 aa, Homo sapiens
  CDR3 for alpha chain variable domain of TCR clone 39067 (TRAV9-2, TRAJ4)
CALKSGGYNKLIF

SEQ ID NO: 78134 - protein, 13 aa, Homo sapiens
  CDR3 for beta chain variable domain of TCR clone 39067 (TRBV5-7, TRBJ1-2)
CASSLIRAPGYTF

SEQ ID NO: 78135 - protein, 14 aa, Homo sapiens
  CDR3 for alpha chain variable domain of TCR clone 39068 (TRAV13-1, TRAJ44)
CAAKATGTASKLTF

SEQ ID NO: 78136 - protein, 15 aa, Homo sapiens
  CDR3 for beta chain variable domain of TCR clone 39068 (TRBV19, TRBJ1-2)
CASSVGQVLNYGYTF

SEQ ID NO: 78137 - protein, 13 aa, Homo sapiens
  CDR3 for alpha chain variable domain of TCR clone 39069 (TRAV2, TRAJ15)
CAVASHAGTALIF

SEQ ID NO: 78138 - protein, 16 aa, Homo sapiens
  CDR3 for beta chain variable domain of TCR clone 39069 (TRBV5-1, TRBJ1-1)
CASSSGGNSLNTEAFF

SEQ ID NO: 78139 - protein, 17 aa, Homo sapiens
  CDR3 for alpha chain variable domain of TCR clone 39070 (TRAV12-3, TRAJ6)
CAMSARGGAGGSYIPTF

SEQ ID NO: 78140 - protein, 15 aa, Homo sapiens
  CDR3 for beta chain variable domain of TCR clone 39070 (TRBV28, TRBJ2-1)
CASSIIAGGRSEQFF

SEQ ID NO: 78141 - protein, 20 aa, Homo sapiens
  CDR3 for alpha chain variable domain of TCR clone 39071 (TRAV12-1, TRAJ42)
SSVIQPPTSVKGGNQGNLIF

SEQ ID NO: 78142 - protein, 18 aa, Homo sapiens
  CDR3 for beta chain variable domain of TCR clone 39071 (TRBV11-2, TRBJ2-3)
CASSLGGASRGAPNTQYF

SEQ ID NO: 78143 - protein, 14 aa, Homo sapiens
  CDR3 for alpha chain variable domain of TCR clone 39072 (TRAV25, TRAJ22)
CAVRSSGSASQLTF

SEQ ID NO: 78144 - protein, 16 aa, Homo sapiens
  CDR3 for beta chain variable domain of TCR clone 39072 (TRBV4-2, TRBJ1-1)
CASSPSPGRAAPEAFF

SEQ ID NO: 78145 - protein, 14 aa, Homo sapiens
  CDR3 for alpha chain variable domain of TCR clone 39073 (TRAV12-3, TRAJ58)
CAMSTETSGSRLTF

SEQ ID NO: 78146 - protein, 13 aa, Homo sapiens
  CDR3 for beta chain variable domain of TCR clone 39073 (TRBV27, TRBJ2-3)
CASSWGRTDTQYS

SEQ ID NO: 78147 - protein, 15 aa, Homo sapiens
  CDR3 for alpha chain variable domain of TCR clone 39074 (TRAV17, TRAJ40)
CATVSSTSGTYKYIF

SEQ ID NO: 78148 - protein, 12 aa, Homo sapiens
  CDR3 for beta chain variable domain of TCR clone 39074 (TRBV11-2, TRBJ2-1)
CASSPGNNEQFF

SEQ ID NO: 78149 - protein, 14 aa, Homo sapiens
  CDR3 for alpha chain variable domain of TCR clone 39075 (TRAV1-2, TRAJ16)
CAVNRFPDGQKLLF

SEQ ID NO: 78150 - protein, 15 aa, Homo sapiens
  CDR3 for beta chain variable domain of TCR clone 39075 (TRBV27, TRBJ2-1)
CASSNGGGSSNEQFF

SEQ ID NO: 78151 - protein, 18 aa, Homo sapiens
  CDR3 for alpha chain variable domain of TCR clone 39076 (TRAV12-3, TRAJ52)
CAMSVGGAGGTSYGKLTF

SEQ ID NO: 78152 - protein, 15 aa, Homo sapiens
  CDR3 for beta chain variable domain of TCR clone 39076 (TRBV27, TRBJ1-6)
CASSFDGGLGSPLHF

SEQ ID NO: 78153 - protein, 18 aa, Homo sapiens
  CDR3 for alpha chain variable domain of TCR clone 39077 (TRAV35, TRAJ28)
CAGHSYPLSGAGSYQLTF

SEQ ID NO: 78154 - protein, 12 aa, Homo sapiens
  CDR3 for beta chain variable domain of TCR clone 39077 (TRBV7-9, TRBJ1-1)
CASSLEGTEAFF

SEQ ID NO: 78155 - protein, 13 aa, Homo sapiens
  CDR3 for alpha chain variable domain of TCR clone 39078 (TRAV3, TRAJ36)
CAVRDTGANNLFF

SEQ ID NO: 78156 - protein, 15 aa, Homo sapiens
  CDR3 for beta chain variable domain of TCR clone 39078 (TRBV24-1, TRBJ2-1)
CATSGSGGFYNEQLF

SEQ ID NO: 78157 - protein, 16 aa, Homo sapiens
  CDR3 for alpha chain variable domain of TCR clone 39079 (TRAV5, TRAJ23)
CAGDRLIFGQGTELSV

SEQ ID NO: 78158 - protein, 12 aa, Homo sapiens
  CDR3 for beta chain variable domain of TCR clone 39079 (TRBV12-4, TRBJ2-7)
CASSLGGYEQYF

SEQ ID NO: 78159 - protein, 14 aa, Homo sapiens
  CDR3 for alpha chain variable domain of TCR clone 39080 (TRAV12-2, TRAJ13)
CAVKKTGGYQKVTF

SEQ ID NO: 78160 - protein, 13 aa, Homo sapiens
  CDR3 for beta chain variable domain of TCR clone 39080 (TRBV20-1, TRBJ1-1)
CSARLGQETEAFF

SEQ ID NO: 78161 - protein, 13 aa, Homo sapiens
  CDR3 for alpha chain variable domain of TCR clone 39081 (TRAV21, TRAJ36)
CAVIKTGAKNLFF

SEQ ID NO: 78162 - protein, 13 aa, Homo sapiens
  CDR3 for beta chain variable domain of TCR clone 39081 (TRBV29-1, TRBJ2-3)
CSATRGGRDTQYF

SEQ ID NO: 78163 - protein, 14 aa, Homo sapiens
  CDR3 for alpha chain variable domain of TCR clone 39082 (TRAV23/DV6, TRAJ9)
SAASKDTGGFKTIF

SEQ ID NO: 78164 - protein, 12 aa, Homo sapiens
  CDR3 for beta chain variable domain of TCR clone 39082 (TRBV20-1, TRBJ2-1)
CSASGGANEQFF

SEQ ID NO: 78165 - protein, 16 aa, Homo sapiens
  CDR3 for alpha chain variable domain of TCR clone 39083 (TRAV8-3, TRAJ13)
CAVGAYPSGGYQKVTF

SEQ ID NO: 78166 - protein, 13 aa, Homo sapiens
  CDR3 for beta chain variable domain of TCR clone 39083 (TRBV19, TRBJ1-2)
CASSVPGQDGYTF

SEQ ID NO: 78167 - protein, 19 aa, Homo sapiens
  CDR3 for alpha chain variable domain of TCR clone 39084 (TRAV26-1, TRAJ52)
CIVRAHRNAGGTSYGKLTF

SEQ ID NO: 78168 - protein, 15 aa, Homo sapiens
  CDR3 for beta chain variable domain of TCR clone 39084 (TRBV29-1, TRBJ2-1)
CSGRDRESSYNEQFF

SEQ ID NO: 78169 - protein, 15 aa, Homo sapiens
  CDR3 for alpha chain variable domain of TCR clone 39085 (TRAV17, TRAJ57)
CATGPSQGGSEKLVF

SEQ ID NO: 78170 - protein, 16 aa, Homo sapiens
  CDR3 for beta chain variable domain of TCR clone 39085 (TRBV12-4, TRBJ1-5)
CASSRPVGGSNQPQHF

SEQ ID NO: 78171 - protein, 12 aa, Homo sapiens
  CDR3 for alpha chain variable domain of TCR clone 39086 (TRAV17, TRAJ12)
CATLRSSYKLVF

SEQ ID NO: 78172 - protein, 16 aa, Homo sapiens
  CDR3 for beta chain variable domain of TCR clone 39086 (TRBV28, TRBJ2-7)
CASSLFFETGGPEQYF

SEQ ID NO: 78173 - protein, 14 aa, Homo sapiens
  CDR3 for alpha chain variable domain of TCR clone 39087 (TRAV21, TRAJ45)
CAVSSGGGADGLTF

SEQ ID NO: 78174 - protein, 16 aa, Homo sapiens
  CDR3 for beta chain variable domain of TCR clone 39087 (TRBV7-9, TRBJ2-1)
CASSDVAGGSYNEQFF

SEQ ID NO: 78175 - protein, 15 aa, Homo sapiens
  CDR3 for alpha chain variable domain of TCR clone 39088 (TRAV3, TRAJ22)
CAVRDRGGSARQLTF

SEQ ID NO: 78176 - protein, 14 aa, Homo sapiens
  CDR3 for beta chain variable domain of TCR clone 39088 (TRBV19, TRBJ2-1)
CASSRLASINEQSF

SEQ ID NO: 78177 - protein, 15 aa, Homo sapiens
  CDR3 for alpha chain variable domain of TCR clone 39089 (TRAV12-1, TRAJ5)
CVVNMLETGRRALTF

SEQ ID NO: 78178 - protein, 12 aa, Homo sapiens
  CDR3 for beta chain variable domain of TCR clone 39089 (TRBV11-2, TRBJ2-2)
CASSLGGGELFS

SEQ ID NO: 78179 - protein, 13 aa, Homo sapiens
  CDR3 for alpha chain variable domain of TCR clone 39090 (TRAV12-3, TRAJ13)
CTMSSGGYQKVTF

SEQ ID NO: 78180 - protein, 13 aa, Homo sapiens
  CDR3 for beta chain variable domain of TCR clone 39090 (TRBV20-1, TRBJ1-1)
CSAPPGGHTEAFF

SEQ ID NO: 78181 - protein, 12 aa, Homo sapiens
  CDR3 for alpha chain variable domain of TCR clone 39091 (TRAV27, TRAJ36)
ASTPAGANNLFF

SEQ ID NO: 78182 - protein, 13 aa, Homo sapiens
  CDR3 for beta chain variable domain of TCR clone 39091 (TRBV7-9, TRBJ2-3)
CASSPGSIDTQYF

SEQ ID NO: 78183 - protein, 12 aa, Homo sapiens
  CDR3 for alpha chain variable domain of TCR clone 39092 (TRAV27, TRAJ35)
CAGANFGNVLHC

SEQ ID NO: 78184 - protein, 16 aa, Homo sapiens
  CDR3 for beta chain variable domain of TCR clone 39092 (TRBV6-1, TRBJ2-1)
CASILRQGSSYNEQFF

SEQ ID NO: 78185 - protein, 15 aa, Homo sapiens
  CDR3 for alpha chain variable domain of TCR clone 39093 (TRAV12-2, TRAJ53)
CAVNGGGGRNYKLTF

SEQ ID NO: 78186 - protein, 17 aa, Homo sapiens
  CDR3 for beta chain variable domain of TCR clone 39093 (TRBV7-3, TRBJ2-3)
CASSLMKRMRGADTQYF

SEQ ID NO: 78187 - protein, 18 aa, Homo sapiens
  CDR3 for alpha chain variable domain of TCR clone 39094 (TRAV17, TRAJ45)
CATSLALYSGGGADGLTF

SEQ ID NO: 78188 - protein, 15 aa, Homo sapiens
  CDR3 for beta chain variable domain of TCR clone 39094 (TRBV11-2, TRBJ2-1)
CASSKNRGLIYEQFF

SEQ ID NO: 78189 - protein, 13 aa, Homo sapiens
  CDR3 for alpha chain variable domain of TCR clone 39095 (TRAV12-3, TRAJ7)
CAMSASGNNRLAF

SEQ ID NO: 78190 - protein, 14 aa, Homo sapiens
  CDR3 for beta chain variable domain of TCR clone 39095 (TRBV13, TRBJ2-5)
CAGSLGPRGETQYL

SEQ ID NO: 78191 - protein, 13 aa, Homo sapiens
  CDR3 for alpha chain variable domain of TCR clone 39096 (TRAV27, TRAJ49)
CAPRPYTGNQFYL

SEQ ID NO: 78192 - protein, 16 aa, Homo sapiens
  CDR3 for beta chain variable domain of TCR clone 39096 (TRBV4-1, TRBJ1-2)
CASSQDAGQVLYGYTF

SEQ ID NO: 78193 - protein, 18 aa, Homo sapiens
  CDR3 for alpha chain variable domain of TCR clone 39097 (TRAV26-1, TRAJ23)
CIVRVGLEVWNQGGKLIF

SEQ ID NO: 78194 - protein, 16 aa, Homo sapiens
  CDR3 for beta chain variable domain of TCR clone 39097 (TRBV12-4, TRBJ2-5)
CASSFFVRGRQENQYF

SEQ ID NO: 78195 - protein, 13 aa, Homo sapiens
  CDR3 for alpha chain variable domain of TCR clone 39098 (TRAV27, TRAJ45)
CRSSGGGADGLIF

SEQ ID NO: 78196 - protein, 17 aa, Homo sapiens
  CDR3 for beta chain variable domain of TCR clone 39098 (TRBV11-2, TRBJ2-1)
CASSLYPPGVEYNEQFF

SEQ ID NO: 78197 - protein, 14 aa, Homo sapiens
  CDR3 for alpha chain variable domain of TCR clone 39099 (TRAV1-2, TRAJ16)
CAVNRLSDGQKLLF

SEQ ID NO: 78198 - protein, 16 aa, Homo sapiens
  CDR3 for beta chain variable domain of TCR clone 39099 (TRBV12-5, TRBJ2-5)
CASGPRTSGNQETQYF

SEQ ID NO: 78199 - protein, 18 aa, Homo sapiens
  CDR3 for alpha chain variable domain of TCR clone 39100 (TRAV29/DV5, TRAJ52)
CAAGFRGAGGTSYGKLTS

SEQ ID NO: 78200 - protein, 16 aa, Homo sapiens
  CDR3 for beta chain variable domain of TCR clone 39100 (TRBV7-3, TRBJ2-2)
CASSLKRGTLSGELFF

SEQ ID NO: 78201 - protein, 13 aa, Homo sapiens
  CDR3 for alpha chain variable domain of TCR clone 39101 (TRAV27, TRAJ6)
CAGGARGSYIPTF

SEQ ID NO: 78202 - protein, 14 aa, Homo sapiens
  CDR3 for beta chain variable domain of TCR clone 39101 (TRBV6-3, TRBJ1-1)
CASSYQRRDTEAFF

SEQ ID NO: 78203 - protein, 18 aa, Homo sapiens
  CDR3 for alpha chain variable domain of TCR clone 39102 (TRAV13-1, TRAJ52)
CAAKNPNAGGTSYGKLTF

SEQ ID NO: 78204 - protein, 13 aa, Homo sapiens
  CDR3 for beta chain variable domain of TCR clone 39102 (TRBV7-2, TRBJ2-2)
CASSLAVTGELFF

SEQ ID NO: 78205 - protein, 16 aa, Homo sapiens
  CDR3 for alpha chain variable domain of TCR clone 39103 (TRAV8-3, TRAJ44)
CAVGTLMTGTASKLTF

SEQ ID NO: 78206 - protein, 15 aa, Homo sapiens
  CDR3 for beta chain variable domain of TCR clone 39103 (TRBV9, TRBJ1-6)
CASSVAGTGDSPLHF

SEQ ID NO: 78207 - protein, 19 aa, Homo sapiens
  CDR3 for alpha chain variable domain of TCR clone 39104 (TRAV26-1, TRAJ52)
CIVRAHRNAGGTGYGKLTF

SEQ ID NO: 78208 - protein, 15 aa, Homo sapiens
  CDR3 for beta chain variable domain of TCR clone 39104 (TRBV29-1, TRBJ2-1)
CSGRDRKSSYNEQFF

SEQ ID NO: 78209 - protein, 12 aa, Homo sapiens
  CDR3 for alpha chain variable domain of TCR clone 39105 (TRAV30, TRAJ15)
CGTNQAGTALIF

SEQ ID NO: 78210 - protein, 13 aa, Homo sapiens
  CDR3 for beta chain variable domain of TCR clone 39105 (TRBV24-1, TRBJ2-7)
CATSELGPYEQYF

SEQ ID NO: 78211 - protein, 11 aa, Homo sapiens
  CDR3 for alpha chain variable domain of TCR clone 39106 (TRAV12-2, TRAJ31)
CAVTRWDRLMF

SEQ ID NO: 78212 - protein, 15 aa, Homo sapiens
  CDR3 for beta chain variable domain of TCR clone 39106 (TRBV19, TRBJ2-7)
CASSIGGGLVNEQYF

SEQ ID NO: 78213 - protein, 16 aa, Homo sapiens
  CDR3 for alpha chain variable domain of TCR clone 39107 (TRAV4, TRAJ9)
CLVGDPNRPGGFKTIF

SEQ ID NO: 78214 - protein, 16 aa, Homo sapiens
  CDR3 for beta chain variable domain of TCR clone 39107 (TRBV28, TRBJ1-4)
CASSPPYRGRSEKLFL

SEQ ID NO: 78215 - protein, 14 aa, Homo sapiens
  CDR3 for alpha chain variable domain of TCR clone 39108 (TRAV1-2, TRAJ27)
CAVRSGTNAGKSTF

SEQ ID NO: 78216 - protein, 15 aa, Homo sapiens
  CDR3 for beta chain variable domain of TCR clone 39108 (TRBV18, TRBJ2-7)
CASSPLQGRAYEQYF

SEQ ID NO: 78217 - protein, 12 aa, Homo sapiens
  CDR3 for alpha chain variable domain of TCR clone 39109 (TRAV29/DV5, TRAJ49)
CAATDTGNQFYF

SEQ ID NO: 78218 - protein, 12 aa, Homo sapiens
  CDR3 for beta chain variable domain of TCR clone 39109 (TRBV12-4, TRBJ2-7)
CASGLGGYEQYF

SEQ ID NO: 78219 - protein, 12 aa, Homo sapiens
  CDR3 for alpha chain variable domain of TCR clone 39110 (TRAV38-1, TRAJ20)
CAFIWNDYKLSF

SEQ ID NO: 78220 - protein, 14 aa, Homo sapiens
  CDR3 for beta chain variable domain of TCR clone 39110 (TRBV11-3, TRBJ1-1)
CASSHRQGEAFLDK

SEQ ID NO: 78221 - protein, 14 aa, Homo sapiens
  CDR3 for alpha chain variable domain of TCR clone 39111 (TRAV12-3, TRAJ10)
SHLPLTGGGNKLTF

SEQ ID NO: 78222 - protein, 14 aa, Homo sapiens
  CDR3 for beta chain variable domain of TCR clone 39111 (TRBV6-1, TRBJ1-3)
CASVQGEGGNTIYF

SEQ ID NO: 78223 - protein, 12 aa, Homo sapiens
  CDR3 for alpha chain variable domain of TCR clone 39112 (TRAV2, TRAJ10)
CASTGGGNKLTF

SEQ ID NO: 78224 - protein, 14 aa, Homo sapiens
  CDR3 for beta chain variable domain of TCR clone 39112 (TRBV7-2, TRBJ2-2)
CASRGQGAAGELLF

SEQ ID NO: 78225 - protein, 16 aa, Homo sapiens
  CDR3 for alpha chain variable domain of TCR clone 39113 (TRAV16, TRAJ4)
CALSRMFSGGYNKLIF

SEQ ID NO: 78226 - protein, 13 aa, Homo sapiens
  CDR3 for beta chain variable domain of TCR clone 39113 (TRBV4-1, TRBJ2-2)
CASSQENTGELFF

SEQ ID NO: 78227 - protein, 16 aa, Homo sapiens
  CDR3 for alpha chain variable domain of TCR clone 39114 (TRAV2, TRAJ4)
CAVEDRFSGGYNKLSF

SEQ ID NO: 78228 - protein, 13 aa, Homo sapiens
  CDR3 for beta chain variable domain of TCR clone 39114 (TRBV7-7, TRBJ2-5)
CASSRSGQETQYF

SEQ ID NO: 78229 - protein, 15 aa, Homo sapiens
  CDR3 for alpha chain variable domain of TCR clone 39115 (TRAV23/DV6, TRAJ13)
CAAWPGGGGYQKVTF

SEQ ID NO: 78230 - protein, 17 aa, Homo sapiens
  CDR3 for beta chain variable domain of TCR clone 39115 (TRBV19, TRBJ2-7)
CASSISFYGSYPYEQYF

SEQ ID NO: 78231 - protein, 15 aa, Homo sapiens
  CDR3 for alpha chain variable domain of TCR clone 39116 (TRAV20, TRAJ4)
CAVEGSSGGYNKLIF

SEQ ID NO: 78232 - protein, 14 aa, Homo sapiens
  CDR3 for beta chain variable domain of TCR clone 39116 (TRBV7-8, TRBJ2-7)
CAGTLGGALGEQYF

SEQ ID NO: 78233 - protein, 14 aa, Homo sapiens
  CDR3 for alpha chain variable domain of TCR clone 39117 (TRAV1-2, TRAJ8)
CAVGEDTGFQKLVF

SEQ ID NO: 78234 - protein, 15 aa, Homo sapiens
  CDR3 for beta chain variable domain of TCR clone 39117 (TRBV12-4, TRBJ2-5)
CASSPPTGLQETQYF

SEQ ID NO: 78235 - protein, 12 aa, Homo sapiens
  CDR3 for alpha chain variable domain of TCR clone 39118 (TRAV12-3, TRAJ17)
CAMTLTGNKLTF

SEQ ID NO: 78236 - protein, 14 aa, Homo sapiens
  CDR3 for beta chain variable domain of TCR clone 39118 (TRBV4-1, TRBJ2-7)
CASSQDREHVERYF

SEQ ID NO: 78237 - protein, 18 aa, Homo sapiens
  CDR3 for alpha chain variable domain of TCR clone 39119 (TRAV26-2, TRAJ45)
CILRVDKYSGGGADGLTL

SEQ ID NO: 78238 - protein, 16 aa, Homo sapiens
  CDR3 for beta chain variable domain of TCR clone 39119 (TRBV2, TRBJ1-4)
CASNLLQGATNEKLFF

SEQ ID NO: 78239 - protein, 14 aa, Homo sapiens
  CDR3 for alpha chain variable domain of TCR clone 39120 (TRAV4, TRAJ31)
CVLLPRGPDARLIF

SEQ ID NO: 78240 - protein, 15 aa, Homo sapiens
  CDR3 for beta chain variable domain of TCR clone 39120 (TRBV7-8, TRBJ1-2)
CASSLVRDGGLGYTF

SEQ ID NO: 78241 - protein, 13 aa, Homo sapiens
  CDR3 for alpha chain variable domain of TCR clone 39121 (TRAV21, TRAJ27)
CAARPGNAGKSTF

SEQ ID NO: 78242 - protein, 16 aa, Homo sapiens
  CDR3 for beta chain variable domain of TCR clone 39121 (TRBV12-5, TRBJ2-5)
CASGPRTSGNQETQYF

SEQ ID NO: 78243 - protein, 14 aa, Homo sapiens
  CDR3 for alpha chain variable domain of TCR clone 39122 (TRAV1-2, TRAJ8)
CAVREDTGFQKLVF

SEQ ID NO: 78244 - protein, 13 aa, Homo sapiens
  CDR3 for beta chain variable domain of TCR clone 39122 (TRBV4-2, TRBJ2-2)
CASEDRGTGELLF

SEQ ID NO: 78245 - protein, 14 aa, Homo sapiens
  CDR3 for alpha chain variable domain of TCR clone 39123 (TRAV13-1, TRAJ44)
CAAKANGTASKLTF

SEQ ID NO: 78246 - protein, 14 aa, Homo sapiens
  CDR3 for beta chain variable domain of TCR clone 39123 (TRBV19, TRBJ2-2)
CASSTLHRSGELFF

SEQ ID NO: 78247 - protein, 12 aa, Homo sapiens
  CDR3 for alpha chain variable domain of TCR clone 39124 (TRAV13-1, TRAJ48)
CAANFGNEKLTF

SEQ ID NO: 78248 - protein, 14 aa, Homo sapiens
  CDR3 for beta chain variable domain of TCR clone 39124 (TRBV19, TRBJ2-1)
CASPTFVLSGEQFF

SEQ ID NO: 78249 - protein, 18 aa, Homo sapiens
  CDR3 for alpha chain variable domain of TCR clone 39125 (TRAV3, TRAJ17)
CAVRARRGGRSGRQQANF

SEQ ID NO: 78250 - protein, 14 aa, Homo sapiens
  CDR3 for beta chain variable domain of TCR clone 39125 (TRBV4-1, TRBJ2-2)
CASSQAVNTGELFF

SEQ ID NO: 78251 - protein, 11 aa, Homo sapiens
  CDR3 for alpha chain variable domain of TCR clone 39126 (TRAV3, TRAJ13)
CAVTSYQKVTL

SEQ ID NO: 78252 - protein, 15 aa, Homo sapiens
  CDR3 for beta chain variable domain of TCR clone 39126 (TRBV7-9, TRBJ2-7)
CASSSSGLAVYEQYF

SEQ ID NO: 78253 - protein, 14 aa, Homo sapiens
  CDR3 for alpha chain variable domain of TCR clone 39127 (TRAV3, TRAJ7)
CAVREEERGQQTRF

SEQ ID NO: 78254 - protein, 12 aa, Homo sapiens
  CDR3 for beta chain variable domain of TCR clone 39127 (TRBV6-3, TRBJ2-7)
CASSLTPYEQYF

SEQ ID NO: 78255 - protein, 11 aa, Homo sapiens
  CDR3 for alpha chain variable domain of TCR clone 39128 (TRAV12-3, TRAJ43)
CAMSVSNDMRF

SEQ ID NO: 78256 - protein, 16 aa, Homo sapiens
  CDR3 for beta chain variable domain of TCR clone 39128 (TRBV5-4, TRBJ2-3)
CASQQPGAGGADTQYF

SEQ ID NO: 78257 - protein, 13 aa, Homo sapiens
  CDR3 for alpha chain variable domain of TCR clone 39129 (TRAV12-2, TRAJ50)
CAAIVTSYDKVIF

SEQ ID NO: 78258 - protein, 14 aa, Homo sapiens
  CDR3 for beta chain variable domain of TCR clone 39129 (TRBV9, TRBJ2-1)
CASSVDPRGKEQFF

SEQ ID NO: 78259 - protein, 13 aa, Homo sapiens
  CDR3 for alpha chain variable domain of TCR clone 39130 (TRAV3, TRAJ27)
CAVRPLGAGKSTF

SEQ ID NO: 78260 - protein, 13 aa, Homo sapiens
  CDR3 for beta chain variable domain of TCR clone 39130 (TRBV7-9, TRBJ2-3)
CASSPGSTDTQYS

SEQ ID NO: 78261 - protein, 14 aa, Homo sapiens
  CDR3 for alpha chain variable domain of TCR clone 39131 (TRAV12-2, TRAJ13)
CAVKKTGGYQKVTF

SEQ ID NO: 78262 - protein, 13 aa, Homo sapiens
  CDR3 for beta chain variable domain of TCR clone 39131 (TRBV20-1, TRBJ1-1)
CSARVGGNTEAFF

SEQ ID NO: 78263 - protein, 12 aa, Homo sapiens
  CDR3 for alpha chain variable domain of TCR clone 39132 (TRAV12-2, TRAJ17)
CTMTLTGNKLTF

SEQ ID NO: 78264 - protein, 16 aa, Homo sapiens
  CDR3 for beta chain variable domain of TCR clone 39132 (TRBV2, TRBJ2-1)
CASRSPAGGKYNEQFF

SEQ ID NO: 78265 - protein, 14 aa, Homo sapiens
  CDR3 for alpha chain variable domain of TCR clone 39133 (TRAV12-3, TRAJ12)
CAMSEVDSSYKLIF

SEQ ID NO: 78266 - protein, 12 aa, Homo sapiens
  CDR3 for beta chain variable domain of TCR clone 39133 (TRBV18, TRBJ1-4)
CASSPGREKLFF

SEQ ID NO: 78267 - protein, 15 aa, Homo sapiens
  CDR3 for alpha chain variable domain of TCR clone 39134 (TRAV3, TRAJ22)
CAVRDRGGSARQLTF

SEQ ID NO: 78268 - protein, 13 aa, Homo sapiens
  CDR3 for beta chain variable domain of TCR clone 39134 (TRBV20-1, TRBJ1-1)
CNARVGGNTEAFF

SEQ ID NO: 78269 - protein, 12 aa, Homo sapiens
  CDR3 for alpha chain variable domain of TCR clone 39135 (TRAV25, TRAJ11)
CAGASGYSTLTF

SEQ ID NO: 78270 - protein, 15 aa, Homo sapiens
  CDR3 for beta chain variable domain of TCR clone 39135 (TRBV7-8, TRBJ2-1)
CASSLHGGPYNEQFF

SEQ ID NO: 78271 - protein, 18 aa, Homo sapiens
  CDR3 for alpha chain variable domain of TCR clone 39136 (TRAV21, TRAJ52)
CAVRPSPAGGTSYGKLTF

SEQ ID NO: 78272 - protein, 15 aa, Homo sapiens
  CDR3 for beta chain variable domain of TCR clone 39136 (TRBV20-1, TRBJ2-5)
CSAEGTGGLQETQYF

SEQ ID NO: 78273 - protein, 15 aa, Homo sapiens
  CDR3 for alpha chain variable domain of TCR clone 39137 (TRAV8-3, TRAJ11)
CAVGLLNSGYSTLTF

SEQ ID NO: 78274 - protein, 15 aa, Homo sapiens
  CDR3 for beta chain variable domain of TCR clone 39137 (TRBV13, TRBJ2-1)
CASSLLSGLNNEQLF

SEQ ID NO: 78275 - protein, 12 aa, Homo sapiens
  CDR3 for alpha chain variable domain of TCR clone 39138 (TRAV13-1, TRAJ27)
CAAKSDAGKSTF

SEQ ID NO: 78276 - protein, 15 aa, Homo sapiens
  CDR3 for beta chain variable domain of TCR clone 39138 (TRBV7-2, TRBJ1-5)
CASSSNWGAGQPQHF

SEQ ID NO: 78277 - protein, 13 aa, Homo sapiens
  CDR3 for alpha chain variable domain of TCR clone 39139 (TRAV2, TRAJ15)
CAVASQAGTALIF

SEQ ID NO: 78278 - protein, 17 aa, Homo sapiens
  CDR3 for beta chain variable domain of TCR clone 39139 (TRBV7-8, TRBJ2-6)
CASSAGTGGAGANVLTF

SEQ ID NO: 78279 - protein, 14 aa, Homo sapiens
  CDR3 for alpha chain variable domain of TCR clone 39140 (TRAV12-1, TRAJ12)
CVVTRMDSSYKLIF

SEQ ID NO: 78280 - protein, 15 aa, Homo sapiens
  CDR3 for beta chain variable domain of TCR clone 39140 (TRBV20-1, TRBJ2-7)
CSARGRVSGMDEQYF

SEQ ID NO: 78281 - protein, 15 aa, Homo sapiens
  CDR3 for alpha chain variable domain of TCR clone 39141 (TRAV26-1, TRAJ22)
CIVRVSFWFCKATDL

SEQ ID NO: 78282 - protein, 15 aa, Homo sapiens
  CDR3 for beta chain variable domain of TCR clone 39141 (TRBV7-9, TRBJ1-5)
CASSQGHQPNQPQHF

SEQ ID NO: 78283 - protein, 17 aa, Homo sapiens
  CDR3 for alpha chain variable domain of TCR clone 39142 (TRAV3, TRAJ6)
CAVRDGPRAGGSYIPTF

SEQ ID NO: 78284 - protein, 20 aa, Homo sapiens
  CDR3 for beta chain variable domain of TCR clone 39142 (TRBV28, TRBJ2-1)
CASTPIGRSPGIAGGNEQFF

SEQ ID NO: 78285 - protein, 14 aa, Homo sapiens
  CDR3 for alpha chain variable domain of TCR clone 39143 (TRAV3, TRAJ6)
CAVRDPWGSYIPTF

SEQ ID NO: 78286 - protein, 16 aa, Homo sapiens
  CDR3 for beta chain variable domain of TCR clone 39143 (TRBV27, TRBJ2-5)
CASSLSRTAGGETRYF

SEQ ID NO: 78287 - protein, 16 aa, Homo sapiens
  CDR3 for alpha chain variable domain of TCR clone 39144 (TRAV12-2, TRAJ43)
CAGDDMRFGAGTRLTV

SEQ ID NO: 78288 - protein, 16 aa, Homo sapiens
  CDR3 for beta chain variable domain of TCR clone 39144 (TRBV2, TRBJ2-4)
CASSEAPGGEQSIQYF

SEQ ID NO: 78289 - protein, 15 aa, Homo sapiens
  CDR3 for alpha chain variable domain of TCR clone 39145 (TRAV3, TRAJ9)
CAVRARNTGGFKTIF

SEQ ID NO: 78290 - protein, 12 aa, Homo sapiens
  CDR3 for beta chain variable domain of TCR clone 39145 (TRBV11-3, TRBJ2-7)
CASSLPTYEQYF

SEQ ID NO: 78291 - protein, 17 aa, Homo sapiens
  CDR3 for alpha chain variable domain of TCR clone 39146 (TRAV12-2, TRAJ48)
CASNEKLTFGTGTRLTI

SEQ ID NO: 78292 - protein, 14 aa, Homo sapiens
  CDR3 for beta chain variable domain of TCR clone 39146 (TRBV20-1, TRBJ1-1)
CSAQTRIGGTEAFF

SEQ ID NO: 78293 - protein, 12 aa, Homo sapiens
  CDR3 for alpha chain variable domain of TCR clone 39147 (TRAV12-3, TRAJ3)
CAIDSSAYKIIF

SEQ ID NO: 78294 - protein, 17 aa, Homo sapiens
  CDR3 for beta chain variable domain of TCR clone 39147 (TRBV7-9, TRBJ2-3)
CASSLEEAGAYPDTQYF

SEQ ID NO: 78295 - protein, 12 aa, Homo sapiens
  CDR3 for alpha chain variable domain of TCR clone 39148 (TRAV12-1, TRAJ20)
YVVNPDDYKLSF

SEQ ID NO: 78296 - protein, 12 aa, Homo sapiens
  CDR3 for beta chain variable domain of TCR clone 39148 (TRBV11-2, TRBJ2-2)
CASSLGGGELFF

SEQ ID NO: 78297 - protein, 14 aa, Homo sapiens
  CDR3 for alpha chain variable domain of TCR clone 39149 (TRAV20, TRAJ22)
CAVQVSDSARQLTF

SEQ ID NO: 78298 - protein, 13 aa, Homo sapiens
  CDR3 for beta chain variable domain of TCR clone 39149 (TRBV20-1, TRBJ2-5)
CSAREGGKETQYF

SEQ ID NO: 78299 - protein, 15 aa, Homo sapiens
  CDR3 for alpha chain variable domain of TCR clone 39150 (TRAV12-2, TRAJ53)
CAVNGGGGSNYKLTF

SEQ ID NO: 78300 - protein, 14 aa, Homo sapiens
  CDR3 for beta chain variable domain of TCR clone 39150 (TRBV19, TRBJ2-2)
CASSTLHRYGELFF

SEQ ID NO: 78301 - protein, 16 aa, Homo sapiens
  CDR3 for alpha chain variable domain of TCR clone 39151 (TRAV30, TRAJ24)
CGTEIVDADSWGKFQF

SEQ ID NO: 78302 - protein, 13 aa, Homo sapiens
  CDR3 for beta chain variable domain of TCR clone 39151 (TRBV27, TRBJ2-7)
CASSFSQGYEQYF

SEQ ID NO: 78303 - protein, 10 aa, Homo sapiens
  CDR3 for alpha chain variable domain of TCR clone 39152 (TRAV1-2, TRAJ31)
CAFFDARLML

SEQ ID NO: 78304 - protein, 13 aa, Homo sapiens
  CDR3 for beta chain variable domain of TCR clone 39152 (TRBV7-9, TRBJ1-2)
CASSLKQNYGYTF

SEQ ID NO: 78305 - protein, 15 aa, Homo sapiens
  CDR3 for alpha chain variable domain of TCR clone 39153 (TRAV14/DV4, TRAJ26)
CAMREGQNYGQNFGF

SEQ ID NO: 78306 - protein, 13 aa, Homo sapiens
  CDR3 for beta chain variable domain of TCR clone 39153 (TRBV24-1, TRBJ2-2)
CATSDWSTGELFF

SEQ ID NO: 78307 - protein, 15 aa, Homo sapiens
  CDR3 for alpha chain variable domain of TCR clone 39154 (TRAV3, TRAJ20)
CAVRDINLSDYKLSF

SEQ ID NO: 78308 - protein, 15 aa, Homo sapiens
  CDR3 for beta chain variable domain of TCR clone 39154 (TRBV7-9, TRBJ1-6)
CASSSPGRGNSPLHF

SEQ ID NO: 78309 - protein, 15 aa, Homo sapiens
  CDR3 for alpha chain variable domain of TCR clone 39155 (TRAV21, TRAJ10)
RAVPLLTGGGNKLTF

SEQ ID NO: 78310 - protein, 14 aa, Homo sapiens
  CDR3 for beta chain variable domain of TCR clone 39155 (TRBV12-4, TRBJ1-1)
CASSLGTGGTEAFF

SEQ ID NO: 78311 - protein, 15 aa, Homo sapiens
  CDR3 for alpha chain variable domain of TCR clone 39156 (TRAV21, TRAJ53)
CATSNSGGSNYKLTF

SEQ ID NO: 78312 - protein, 16 aa, Homo sapiens
  CDR3 for beta chain variable domain of TCR clone 39156 (TRBV12-4, TRBJ1-5)
CASSRPVGGSNQPQHF

SEQ ID NO: 78313 - protein, 13 aa, Homo sapiens
  CDR3 for alpha chain variable domain of TCR clone 39157 (TRAV34, TRAJ33)
CGADMNSNYQLIW

SEQ ID NO: 78314 - protein, 16 aa, Homo sapiens
  CDR3 for beta chain variable domain of TCR clone 39157 (TRBV2, TRBJ2-1)
CASSVGGSLSYNEQFF

SEQ ID NO: 78315 - protein, 16 aa, Homo sapiens
  CDR3 for alpha chain variable domain of TCR clone 39158 (TRAV27, TRAJ13)
CAGAKSDSGGYQKVTF

SEQ ID NO: 78316 - protein, 14 aa, Homo sapiens
  CDR3 for beta chain variable domain of TCR clone 39158 (TRBV25-1, TRBJ1-1)
CASTHLGGNTEAFF

SEQ ID NO: 78317 - protein, 13 aa, Homo sapiens
  CDR3 for alpha chain variable domain of TCR clone 39159 (TRAV21, TRAJ37)
CAVSSGNTGKLIF

SEQ ID NO: 78318 - protein, 15 aa, Homo sapiens
  CDR3 for beta chain variable domain of TCR clone 39159 (TRBV6-6, TRBJ2-5)
CASSPGGGLEEAQYF

SEQ ID NO: 78319 - protein, 19 aa, Homo sapiens
  CDR3 for alpha chain variable domain of TCR clone 39160 (TRAV1-2, TRAJ26)
CLLPLCCERPDNYGQNFVF

SEQ ID NO: 78320 - protein, 16 aa, Homo sapiens
  CDR3 for beta chain variable domain of TCR clone 39160 (TRBV13, TRBJ2-2)
CASSPRTGEHTGELFF

SEQ ID NO: 78321 - protein, 16 aa, Homo sapiens
  CDR3 for alpha chain variable domain of TCR clone 39161 (TRAV30, TRAJ24)
CGTEIVDADSWGKFQF

SEQ ID NO: 78322 - protein, 14 aa, Homo sapiens
  CDR3 for beta chain variable domain of TCR clone 39161 (TRBV7-2, TRBJ1-2)
CASSQTGSTYGHTF

SEQ ID NO: 78323 - protein, 15 aa, Homo sapiens
  CDR3 for alpha chain variable domain of TCR clone 39162 (TRAV3, TRAJ12)
CTSVPWMDSSYKLIF

SEQ ID NO: 78324 - protein, 13 aa, Homo sapiens
  CDR3 for beta chain variable domain of TCR clone 39162 (TRBV20-1, TRBJ1-1)
CSPRGGGNTEAFF

SEQ ID NO: 78325 - protein, 14 aa, Homo sapiens
  CDR3 for alpha chain variable domain of TCR clone 39163 (TRAV12-3, TRAJ10)
SHLPLTGGGNKLTF

SEQ ID NO: 78326 - protein, 15 aa, Homo sapiens
  CDR3 for beta chain variable domain of TCR clone 39163 (TRBV7-3, TRBJ2-2)
RASSETGQGTGELFF

SEQ ID NO: 78327 - protein, 13 aa, Homo sapiens
  CDR3 for alpha chain variable domain of TCR clone 39164 (TRAV12-2, TRAJ6)
CAVNVSRKLHTYI

SEQ ID NO: 78328 - protein, 14 aa, Homo sapiens
  CDR3 for beta chain variable domain of TCR clone 39164 (TRBV25-1, TRBJ1-1)
CASTHLGGNTEAFF

SEQ ID NO: 78329 - protein, 12 aa, Homo sapiens
  CDR3 for alpha chain variable domain of TCR clone 39165 (TRAV1-2, TRAJ26)
CAVRYYGQNFVF

SEQ ID NO: 78330 - protein, 15 aa, Homo sapiens
  CDR3 for beta chain variable domain of TCR clone 39165 (TRBV28, TRBJ2-1)
CASSIVAGGRSEQFF

SEQ ID NO: 78331 - protein, 14 aa, Homo sapiens
  CDR3 for alpha chain variable domain of TCR clone 39166 (TRAV35, TRAJ13)
CVGSPSGGYQKVTF

SEQ ID NO: 78332 - protein, 13 aa, Homo sapiens
  CDR3 for beta chain variable domain of TCR clone 39166 (TRBV29-1, TRBJ1-1)
CSVGDSRNTEAFF

SEQ ID NO: 78333 - protein, 14 aa, Homo sapiens
  CDR3 for alpha chain variable domain of TCR clone 39167 (TRAV38-2/DV8, TRAJ30)
CAYMDGLGGDKSIF

SEQ ID NO: 78334 - protein, 15 aa, Homo sapiens
  CDR3 for beta chain variable domain of TCR clone 39167 (TRBV7-9, TRBJ2-2)
CASRPADRDTGELFF

SEQ ID NO: 78335 - protein, 12 aa, Homo sapiens
  CDR3 for alpha chain variable domain of TCR clone 39168 (TRAV12-1, TRAJ40)
CVVYSGTYKYIF

SEQ ID NO: 78336 - protein, 15 aa, Homo sapiens
  CDR3 for beta chain variable domain of TCR clone 39168 (TRBV27, TRBJ2-1)
CASSNGGGSSNEQFF

SEQ ID NO: 78337 - protein, 13 aa, Homo sapiens
  CDR3 for alpha chain variable domain of TCR clone 39169 (TRAV27, TRAJ41)
CAGEGNSGYALNF

SEQ ID NO: 78338 - protein, 13 aa, Homo sapiens
  CDR3 for beta chain variable domain of TCR clone 39169 (TRBV25-1, TRBJ1-1)
CQHPPGGNTEAFF

SEQ ID NO: 78339 - protein, 14 aa, Homo sapiens
  CDR3 for alpha chain variable domain of TCR clone 39170 (TRAV8-3, TRAJ4)
CAVGAAGGYNKLIF

SEQ ID NO: 78340 - protein, 15 aa, Homo sapiens
  CDR3 for beta chain variable domain of TCR clone 39170 (TRBV5-1, TRBJ2-1)
CARSPPRAPYNEQFF

SEQ ID NO: 78341 - protein, 15 aa, Homo sapiens
  CDR3 for alpha chain variable domain of TCR clone 39171 (TRAV26-1, TRAJ23)
CIVRVAGYQGGKLIF

SEQ ID NO: 78342 - protein, 18 aa, Homo sapiens
  CDR3 for beta chain variable domain of TCR clone 39171 (TRBV28, TRBJ2-1)
CASSSTSGRAKSYNEQFF

SEQ ID NO: 78343 - protein, 14 aa, Homo sapiens
  CDR3 for alpha chain variable domain of TCR clone 39172 (TRAV16, TRAJ15)
CALSGPQAGTALIF

SEQ ID NO: 78344 - protein, 12 aa, Homo sapiens
  CDR3 for beta chain variable domain of TCR clone 39172 (TRBV18, TRBJ2-5)
CARSPSKETQYF

SEQ ID NO: 78345 - protein, 17 aa, Homo sapiens
  CDR3 for alpha chain variable domain of TCR clone 39173 (TRAV27, TRAJ52)
CAGAGWAGGTSDGKLTF

SEQ ID NO: 78346 - protein, 16 aa, Homo sapiens
  CDR3 for beta chain variable domain of TCR clone 39173 (TRBV19, TRBJ2-1)
CASSKAGPSSYNEQFF

SEQ ID NO: 78347 - protein, 20 aa, Homo sapiens
  CDR3 for alpha chain variable domain of TCR clone 39174 (TRAV12-1, TRAJ42)
SSVIQPPTCVKGGSQGNLIF

SEQ ID NO: 78348 - protein, 18 aa, Homo sapiens
  CDR3 for beta chain variable domain of TCR clone 39174 (TRBV11-2, TRBJ2-3)
CASSLGGASRGAPNTQYF

SEQ ID NO: 78349 - protein, 15 aa, Homo sapiens
  CDR3 for alpha chain variable domain of TCR clone 39175 (TRAV13-1, TRAJ44)
CAASRGGGTASKLTF

SEQ ID NO: 78350 - protein, 16 aa, Homo sapiens
  CDR3 for beta chain variable domain of TCR clone 39175 (TRBV29-1, TRBJ2-7)
CSVEAVGTSGSYEQYF

SEQ ID NO: 78351 - protein, 16 aa, Homo sapiens
  CDR3 for alpha chain variable domain of TCR clone 39176 (TRAV21, TRAJ52)
CAVTNAGGTSYGKLTF

SEQ ID NO: 78352 - protein, 14 aa, Homo sapiens
  CDR3 for beta chain variable domain of TCR clone 39176 (TRBV19, TRBJ2-1)
CASPTFVLSGEQFF

SEQ ID NO: 78353 - protein, 12 aa, Homo sapiens
  CDR3 for alpha chain variable domain of TCR clone 39177 (TRAV3, TRAJ20)
CAVRDPNYKLSF

SEQ ID NO: 78354 - protein, 15 aa, Homo sapiens
  CDR3 for beta chain variable domain of TCR clone 39177 (TRBV20-1, TRBJ2-7)
CSARDRVSGMDEQYF

SEQ ID NO: 78355 - protein, 14 aa, Homo sapiens
  CDR3 for alpha chain variable domain of TCR clone 39178 (TRAV1-2, TRAJ8)
CAVREDTGFQKLVF

SEQ ID NO: 78356 - protein, 15 aa, Homo sapiens
  CDR3 for beta chain variable domain of TCR clone 39178 (TRBV9, TRBJ1-6)
CASSVAGTGDPPLHF

SEQ ID NO: 78357 - protein, 16 aa, Homo sapiens
  CDR3 for alpha chain variable domain of TCR clone 39179 (TRAV16, TRAJ4)
CALSRMFSGGHNKLIF

SEQ ID NO: 78358 - protein, 16 aa, Homo sapiens
  CDR3 for beta chain variable domain of TCR clone 39179 (TRBV24-1, TRBJ2-3)
CATSDPGTGATDTQYF

SEQ ID NO: 78359 - protein, 14 aa, Homo sapiens
  CDR3 for alpha chain variable domain of TCR clone 39180 (TRAV1-2, TRAJ16)
CAVNRFSDGQQLLF

SEQ ID NO: 78360 - protein, 13 aa, Homo sapiens
  CDR3 for beta chain variable domain of TCR clone 39180 (TRBV7-9, TRBJ1-2)
CASSLKQNYGYTF

SEQ ID NO: 78361 - protein, 15 aa, Homo sapiens
  CDR3 for alpha chain variable domain of TCR clone 39181 (TRAV3, TRAJ5)
CAVRDLDTGRRELTF

SEQ ID NO: 78362 - protein, 15 aa, Homo sapiens
  CDR3 for beta chain variable domain of TCR clone 39181 (TRBV20-1, TRBJ2-1)
CSARSPGGPGNEQFF

SEQ ID NO: 78363 - protein, 14 aa, Homo sapiens
  CDR3 for alpha chain variable domain of TCR clone 39182 (TRAV27, TRAJ22)
CAGVSVLGKRQLTF

SEQ ID NO: 78364 - protein, 16 aa, Homo sapiens
  CDR3 for beta chain variable domain of TCR clone 39182 (TRBV13, TRBJ2-2)
CASSPRTGEHTGELFF

SEQ ID NO: 78365 - protein, 14 aa, Homo sapiens
  CDR3 for alpha chain variable domain of TCR clone 39183 (TRAV16, TRAJ39)
CALSKNNAGNMLTF

SEQ ID NO: 78366 - protein, 16 aa, Homo sapiens
  CDR3 for beta chain variable domain of TCR clone 39183 (TRBV6-6, TRBJ2-1)
CASSYSFSGSYNGQFF

SEQ ID NO: 78367 - protein, 15 aa, Homo sapiens
  CDR3 for alpha chain variable domain of TCR clone 39184 (TRAV17, TRAJ37)
CATDGGSSNTGELIF

SEQ ID NO: 78368 - protein, 15 aa, Homo sapiens
  CDR3 for beta chain variable domain of TCR clone 39184 (TRBV28, TRBJ2-5)
CASSSGRTIQETQYF

SEQ ID NO: 78369 - protein, 17 aa, Homo sapiens
  CDR3 for alpha chain variable domain of TCR clone 39185 (TRAV4, TRAJ18)
CLVGERSVGSTLGRLYF

SEQ ID NO: 78370 - protein, 14 aa, Homo sapiens
  CDR3 for beta chain variable domain of TCR clone 39185 (TRBV6-5, TRBJ1-2)
CGSSYDGTGGGYTF

SEQ ID NO: 78371 - protein, 12 aa, Homo sapiens
  CDR3 for alpha chain variable domain of TCR clone 39186 (TRAV21, TRAJ33)
CAKMDSNYQLIW

SEQ ID NO: 78372 - protein, 14 aa, Homo sapiens
  CDR3 for beta chain variable domain of TCR clone 39186 (TRBV2, TRBJ2-7)
CASSLTSGDYEQYF

SEQ ID NO: 78373 - protein, 11 aa, Homo sapiens
  CDR3 for alpha chain variable domain of TCR clone 39187 (TRAV1-2, TRAJ31)
CAVNNNARLMF

SEQ ID NO: 78374 - protein, 15 aa, Homo sapiens
  CDR3 for beta chain variable domain of TCR clone 39187 (TRBV28, TRBJ2-1)
CASSIIEGGRSEQFF

SEQ ID NO: 78375 - protein, 13 aa, Homo sapiens
  CDR3 for alpha chain variable domain of TCR clone 39188 (TRAV8-3, TRAJ28)
CAVGAVGSYQLTF

SEQ ID NO: 78376 - protein, 15 aa, Homo sapiens
  CDR3 for beta chain variable domain of TCR clone 39188 (TRBV7-9, TRBJ1-5)
CASSQGHQPNQPHHF

SEQ ID NO: 78377 - protein, 14 aa, Homo sapiens
  CDR3 for alpha chain variable domain of TCR clone 39189 (TRAV13-1, TRAJ31)
CAASSRPNNARLMF

SEQ ID NO: 78378 - protein, 15 aa, Homo sapiens
  CDR3 for beta chain variable domain of TCR clone 39189 (TRBV4-2, TRBJ2-4)
CASSPLGAAKNSQYF

SEQ ID NO: 78379 - protein, 14 aa, Homo sapiens
  CDR3 for alpha chain variable domain of TCR clone 39190 (TRAV21, TRAJ4)
CAAPGVGGYNKLIF

SEQ ID NO: 78380 - protein, 14 aa, Homo sapiens
  CDR3 for beta chain variable domain of TCR clone 39190 (TRBV7-3, TRBJ2-1)
CASSLSGSYNEQFF

SEQ ID NO: 78381 - protein, 12 aa, Homo sapiens
  CDR3 for alpha chain variable domain of TCR clone 39191 (TRAV12-3, TRAJ17)
CAMTFTGNKLTF

SEQ ID NO: 78382 - protein, 13 aa, Homo sapiens
  CDR3 for beta chain variable domain of TCR clone 39191 (TRBV7-9, TRBJ1-2)
CASSLKQNYGYTF

SEQ ID NO: 78383 - protein, 14 aa, Homo sapiens
  CDR3 for alpha chain variable domain of TCR clone 39192 (TRAV35, TRAJ22)
CAGLRPGSARQLTF

SEQ ID NO: 78384 - protein, 15 aa, Homo sapiens
  CDR3 for beta chain variable domain of TCR clone 39192 (TRBV12-4, TRBJ2-5)
CASIPPTGLQETQYF

SEQ ID NO: 78385 - protein, 17 aa, Homo sapiens
  CDR3 for alpha chain variable domain of TCR clone 39193 (TRAV23/DV6, TRAJ57)
CAASSTLSQGGSEKLDF

SEQ ID NO: 78386 - protein, 14 aa, Homo sapiens
  CDR3 for beta chain variable domain of TCR clone 39193 (TRBV25-1, TRBJ1-1)
CASTHLGGNTEAFF

SEQ ID NO: 78387 - protein, 17 aa, Homo sapiens
  CDR3 for alpha chain variable domain of TCR clone 39194 (TRAV3, TRAJ6)
CAVGDGPRVGGSYIPTF

SEQ ID NO: 78388 - protein, 12 aa, Homo sapiens
  CDR3 for beta chain variable domain of TCR clone 39194 (TRBV11-2, TRBJ2-2)
CASSLGGGELFF

SEQ ID NO: 78389 - protein, 14 aa, Homo sapiens
  CDR3 for alpha chain variable domain of TCR clone 39195 (TRAV29/DV5, TRAJ34)
CAASASRETDKPIF

SEQ ID NO: 78390 - protein, 15 aa, Homo sapiens
  CDR3 for beta chain variable domain of TCR clone 39195 (TRBV7-8, TRBJ2-7)
CASSLERAGSYEQYF

SEQ ID NO: 78391 - protein, 13 aa, Homo sapiens
  CDR3 for alpha chain variable domain of TCR clone 39196 (TRAV17, TRAJ9)
CATDYTGGFKTIS

SEQ ID NO: 78392 - protein, 14 aa, Homo sapiens
  CDR3 for beta chain variable domain of TCR clone 39196 (TRBV19, TRBJ2-5)
CASSMTGQQETQYF

SEQ ID NO: 78393 - protein, 15 aa, Homo sapiens
  CDR3 for alpha chain variable domain of TCR clone 39197 (TRAV25, TRAJ52)
CAGRPGGTSYGKLTF

SEQ ID NO: 78394 - protein, 16 aa, Homo sapiens
  CDR3 for beta chain variable domain of TCR clone 39197 (TRBV5-1, TRBJ1-1)
CASSSGGNSLKTEAFF

SEQ ID NO: 78395 - protein, 14 aa, Homo sapiens
  CDR3 for alpha chain variable domain of TCR clone 39198 (TRAV3, TRAJ20)
CAVRPSVTTTSSAF

SEQ ID NO: 78396 - protein, 15 aa, Homo sapiens
  CDR3 for beta chain variable domain of TCR clone 39198 (TRBV6-5, TRBJ2-1)
CASSYDAGAGNEQFF

SEQ ID NO: 78397 - protein, 15 aa, Homo sapiens
  CDR3 for alpha chain variable domain of TCR clone 39199 (TRAV8-4, TRAJ3)
RAVTGENLVQQCFQD

SEQ ID NO: 78398 - protein, 16 aa, Homo sapiens
  CDR3 for beta chain variable domain of TCR clone 39199 (TRBV4-2, TRBJ1-1)
CASSQAGFGMNTEAFF

SEQ ID NO: 78399 - protein, 14 aa, Homo sapiens
  CDR3 for alpha chain variable domain of TCR clone 39200 (TRAV12-2, TRAJ13)
CAVKKTGGYQKVTF

SEQ ID NO: 78400 - protein, 16 aa, Homo sapiens
  CDR3 for beta chain variable domain of TCR clone 39200 (TRBV28, TRBJ2-7)
CASSSGTSGRGYEQYF

SEQ ID NO: 78401 - protein, 15 aa, Homo sapiens
  CDR3 for alpha chain variable domain of TCR clone 39201 (TRAV25, TRAJ52)
RAGRPGGTSYGKLTF

SEQ ID NO: 78402 - protein, 17 aa, Homo sapiens
  CDR3 for beta chain variable domain of TCR clone 39201 (TRBV7-8, TRBJ2-6)
CASSAGTGGAGANVLTF

SEQ ID NO: 78403 - protein, 14 aa, Homo sapiens
  CDR3 for alpha chain variable domain of TCR clone 39202 (TRAV1-2, TRAJ16)
CAVNRFSDGQKLHF

SEQ ID NO: 78404 - protein, 15 aa, Homo sapiens
  CDR3 for beta chain variable domain of TCR clone 39202 (TRBV7-9, TRBJ1-6)
CASSSPGRGNSPLHF

SEQ ID NO: 78405 - protein, 14 aa, Homo sapiens
  CDR3 for alpha chain variable domain of TCR clone 39203 (TRAV17, TRAJ37)
CATDGSSNTGELIF

SEQ ID NO: 78406 - protein, 13 aa, Homo sapiens
  CDR3 for beta chain variable domain of TCR clone 39203 (TRBV11-2, TRBJ2-1)
CASSLDLVNEQFF

SEQ ID NO: 78407 - protein, 16 aa, Homo sapiens
  CDR3 for alpha chain variable domain of TCR clone 39204 (TRAV26-1, TRAJ32)
CIVRTNYGGATNKLIF

SEQ ID NO: 78408 - protein, 14 aa, Homo sapiens
  CDR3 for beta chain variable domain of TCR clone 39204 (TRBV27, TRBJ1-1)
CASSLLSGLSEAVF

SEQ ID NO: 78409 - protein, 14 aa, Homo sapiens
  CDR3 for alpha chain variable domain of TCR clone 39205 (TRAV16, TRAJ39)
CALSKNNAGNMLTF

SEQ ID NO: 78410 - protein, 15 aa, Homo sapiens
  CDR3 for beta chain variable domain of TCR clone 39205 (TRBV9, TRBJ1-6)
CASSVAGTGDSPLHF

SEQ ID NO: 78411 - protein, 17 aa, Homo sapiens
  CDR3 for alpha chain variable domain of TCR clone 39206 (TRAV26-1, TRAJ11)
CIVRVGQSNSGYSTLTF

SEQ ID NO: 78412 - protein, 15 aa, Homo sapiens
  CDR3 for beta chain variable domain of TCR clone 39206 (TRBV27, TRBJ2-5)
CASSLMPSGGETQYF

SEQ ID NO: 78413 - protein, 12 aa, Homo sapiens
  CDR3 for alpha chain variable domain of TCR clone 39207 (TRAV12-1, TRAJ40)
CVVYSGTYTYIF

SEQ ID NO: 78414 - protein, 14 aa, Homo sapiens
  CDR3 for beta chain variable domain of TCR clone 39207 (TRBV7-9, TRBJ2-5)
CACSLDTAQETQYF

SEQ ID NO: 78415 - protein, 15 aa, Homo sapiens
  CDR3 for alpha chain variable domain of TCR clone 39208 (TRAV12-1, TRAJ44)
CVVDTPQGTASKLTF

SEQ ID NO: 78416 - protein, 13 aa, Homo sapiens
  CDR3 for beta chain variable domain of TCR clone 39208 (TRBV27, TRBJ2-1)
CASSSGSYNEQFL

SEQ ID NO: 78417 - protein, 16 aa, Homo sapiens
  CDR3 for alpha chain variable domain of TCR clone 39209 (TRAV30, TRAJ24)
CGTEIVDADSWGKFQF

SEQ ID NO: 78418 - protein, 12 aa, Homo sapiens
  CDR3 for beta chain variable domain of TCR clone 39209 (TRBV11-2, TRBJ2-2)
FTSSLGGGELFF

SEQ ID NO: 78419 - protein, 16 aa, Homo sapiens
  CDR3 for alpha chain variable domain of TCR clone 39210 (TRAV38-1, TRAJ56)
CAFMKRQTGANSKLTF

SEQ ID NO: 78420 - protein, 13 aa, Homo sapiens
  CDR3 for beta chain variable domain of TCR clone 39210 (TRBV11-2, TRBJ2-5)
CASSRGPSETQYF

SEQ ID NO: 78421 - protein, 16 aa, Homo sapiens
  CDR3 for alpha chain variable domain of TCR clone 39211 (TRAV12-3, TRAJ53)
CAMSPGSGGSNYKLTF

SEQ ID NO: 78422 - protein, 14 aa, Homo sapiens
  CDR3 for beta chain variable domain of TCR clone 39211 (TRBV4-2, TRBJ2-1)
CASSLDRAYNEQFF

SEQ ID NO: 78423 - protein, 13 aa, Homo sapiens
  CDR3 for alpha chain variable domain of TCR clone 39212 (TRAV12-3, TRAJ5)
CAMIYTGRRALTF

SEQ ID NO: 78424 - protein, 12 aa, Homo sapiens
  CDR3 for beta chain variable domain of TCR clone 39212 (TRBV18, TRBJ1-4)
CASAPSREKLFF

SEQ ID NO: 78425 - protein, 15 aa, Homo sapiens
  CDR3 for alpha chain variable domain of TCR clone 39213 (TRAV8-4, TRAJ39)
CAVSHHRGAGNMPTF

SEQ ID NO: 78426 - protein, 15 aa, Homo sapiens
  CDR3 for beta chain variable domain of TCR clone 39213 (TRBV20-1, TRBJ1-1)
CSARPRQGAPTEAFF

SEQ ID NO: 78427 - protein, 14 aa, Homo sapiens
  CDR3 for alpha chain variable domain of TCR clone 39214 (TRAV2, TRAJ9)
CAVEDRSGGFKTIF

SEQ ID NO: 78428 - protein, 12 aa, Homo sapiens
  CDR3 for beta chain variable domain of TCR clone 39214 (TRBV7-3, TRBJ2-5)
CRQLPGGETQYF

SEQ ID NO: 78429 - protein, 15 aa, Homo sapiens
  CDR3 for alpha chain variable domain of TCR clone 39215 (TRAV8-3, TRAJ45)
CASSYSGGGADGLTF

SEQ ID NO: 78430 - protein, 15 aa, Homo sapiens
  CDR3 for beta chain variable domain of TCR clone 39215 (TRBV28, TRBJ2-7)
CASKKPSGRAYEQYF

SEQ ID NO: 78431 - protein, 16 aa, Homo sapiens
  CDR3 for alpha chain variable domain of TCR clone 39216 (TRAV12-3, TRAJ10)
CAMKKGVTGGGNKLTF

SEQ ID NO: 78432 - protein, 12 aa, Homo sapiens
  CDR3 for beta chain variable domain of TCR clone 39216 (TRBV20-1, TRBJ2-7)
CSAITPTKEQYF

SEQ ID NO: 78433 - protein, 13 aa, Homo sapiens
  CDR3 for alpha chain variable domain of TCR clone 39217 (TRAV21, TRAJ57)
CAGTQGGSEKLVF

SEQ ID NO: 78434 - protein, 16 aa, Homo sapiens
  CDR3 for beta chain variable domain of TCR clone 39217 (TRBV29-1, TRBJ2-7)
CSVEDAEDGTAYEQYF

SEQ ID NO: 78435 - protein, 17 aa, Homo sapiens
  CDR3 for alpha chain variable domain of TCR clone 39218 (TRAV26-2, TRAJ42)
CILRDVGYGGSQGDLIF

SEQ ID NO: 78436 - protein, 16 aa, Homo sapiens
  CDR3 for beta chain variable domain of TCR clone 39218 (TRBV12-4, TRBJ2-7)
CASSLIGGTGTYEQYF

SEQ ID NO: 78437 - protein, 15 aa, Homo sapiens
  CDR3 for alpha chain variable domain of TCR clone 39219 (TRAV8-3, TRAJ45)
CASSYSGGGADGLTF

SEQ ID NO: 78438 - protein, 18 aa, Homo sapiens
  CDR3 for beta chain variable domain of TCR clone 39219 (TRBV18, TRBJ1-3)
CASSPRGGAGPSGKTTYF

SEQ ID NO: 78439 - protein, 14 aa, Homo sapiens
  CDR3 for alpha chain variable domain of TCR clone 39220 (TRAV12-3, TRAJ42)
CAMNYGGSQRNLIF

SEQ ID NO: 78440 - protein, 15 aa, Homo sapiens
  CDR3 for beta chain variable domain of TCR clone 39220 (TRBV5-7, TRBJ1-5)
CASSYGKLWDQPQHF

SEQ ID NO: 78441 - protein, 14 aa, Homo sapiens
  CDR3 for alpha chain variable domain of TCR clone 39221 (TRAV1-2, TRAJ16)
CAVNRFSDGQKLLF

SEQ ID NO: 78442 - protein, 16 aa, Homo sapiens
  CDR3 for beta chain variable domain of TCR clone 39221 (TRBV25-1, TRBJ1-1)
CASSGDRDRGRIEAFF

SEQ ID NO: 78443 - protein, 13 aa, Homo sapiens
  CDR3 for alpha chain variable domain of TCR clone 39222 (TRAV12-3, TRAJ33)
CAMSVNSNYQVIW

SEQ ID NO: 78444 - protein, 13 aa, Homo sapiens
  CDR3 for beta chain variable domain of TCR clone 39222 (TRBV7-2, TRBJ2-2)
CASSLAVTGELFF

SEQ ID NO: 78445 - protein, 14 aa, Homo sapiens
  CDR3 for alpha chain variable domain of TCR clone 39223 (TRAV23/DV6, TRAJ13)
CAASETGGYQKVTF

SEQ ID NO: 78446 - protein, 15 aa, Homo sapiens
  CDR3 for beta chain variable domain of TCR clone 39223 (TRBV5-1, TRBJ2-1)
CASSPPRAPYNEQFF

SEQ ID NO: 78447 - protein, 15 aa, Homo sapiens
  CDR3 for alpha chain variable domain of TCR clone 39224 (TRAV27, TRAJ38)
CAARRNAGNNRKLIW

SEQ ID NO: 78448 - protein, 13 aa, Homo sapiens
  CDR3 for beta chain variable domain of TCR clone 39224 (TRBV12-5, TRBJ2-3)
CASGDRQSDTQYL

SEQ ID NO: 78449 - protein, 11 aa, Homo sapiens
  CDR3 for alpha chain variable domain of TCR clone 39225 (TRAV35, TRAJ30)
CAPGGDDKIIF

SEQ ID NO: 78450 - protein, 12 aa, Homo sapiens
  CDR3 for beta chain variable domain of TCR clone 39225 (TRBV11-2, TRBJ2-2)
CASSLGGGELFF

SEQ ID NO: 78451 - protein, 14 aa, Homo sapiens
  CDR3 for alpha chain variable domain of TCR clone 39226 (TRAV17, TRAJ22)
CATSPSGSARQLTF

SEQ ID NO: 78452 - protein, 15 aa, Homo sapiens
  CDR3 for beta chain variable domain of TCR clone 39226 (TRBV4-1, TRBJ2-5)
CASSQWDLYQDTQYF

SEQ ID NO: 78453 - protein, 13 aa, Homo sapiens
  CDR3 for alpha chain variable domain of TCR clone 39227 (TRAV2, TRAJ15)
CAVASQAGTALIF

SEQ ID NO: 78454 - protein, 15 aa, Homo sapiens
  CDR3 for beta chain variable domain of TCR clone 39227 (TRBV20-1, TRBJ2-7)
CSARDRVSGVDEQYF

SEQ ID NO: 78455 - protein, 14 aa, Homo sapiens
  CDR3 for alpha chain variable domain of TCR clone 39228 (TRAV12-2, TRAJ13)
YAVKKTGGYQKVTF

SEQ ID NO: 78456 - protein, 14 aa, Homo sapiens
  CDR3 for beta chain variable domain of TCR clone 39228 (TRBV19, TRBJ2-1)
CASPTFVLSGEQFF

SEQ ID NO: 78457 - protein, 11 aa, Homo sapiens
  CDR3 for alpha chain variable domain of TCR clone 39229 (TRAV12-3, TRAJ27)
CAMANAGKSIF

SEQ ID NO: 78458 - protein, 13 aa, Homo sapiens
  CDR3 for beta chain variable domain of TCR clone 39229 (TRBV20-1, TRBJ1-1)
CSARVGGDTEAFF

SEQ ID NO: 78459 - protein, 15 aa, Homo sapiens
  CDR3 for alpha chain variable domain of TCR clone 39230 (TRAV21, TRAJ52)
CTVRGGGTSYGKLTF

SEQ ID NO: 78460 - protein, 12 aa, Homo sapiens
  CDR3 for beta chain variable domain of TCR clone 39230 (TRBV11-2, TRBJ2-2)
CASSLGGGELFF

SEQ ID NO: 78461 - protein, 14 aa, Homo sapiens
  CDR3 for alpha chain variable domain of TCR clone 39231 (TRAV13-1, TRAJ44)
CAAKATGTASKLTF

SEQ ID NO: 78462 - protein, 14 aa, Homo sapiens
  CDR3 for beta chain variable domain of TCR clone 39231 (TRBV19, TRBJ2-2)
CASSTLHRSGEPFF

SEQ ID NO: 78463 - protein, 22 aa, Homo sapiens
  CDR3 for alpha chain variable domain of TCR clone 39232 (TRAV8-2, TRAJ45)
HLTKPSAYMSDAAEYSADGLTF

SEQ ID NO: 78464 - protein, 13 aa, Homo sapiens
  CDR3 for beta chain variable domain of TCR clone 39232 (TRBV7-3, TRBJ2-1)
CASSPVAYNEQFF

SEQ ID NO: 78465 - protein, 13 aa, Homo sapiens
  CDR3 for alpha chain variable domain of TCR clone 39233 (TRAV12-2, TRAJ39)
CAVSNNAGNMLTF

SEQ ID NO: 78466 - protein, 13 aa, Homo sapiens
  CDR3 for beta chain variable domain of TCR clone 39233 (TRBV2, TRBJ1-5)
CATAGPGNQPQHF

SEQ ID NO: 78467 - protein, 14 aa, Homo sapiens
  CDR3 for alpha chain variable domain of TCR clone 39234 (TRAV1-2, TRAJ16)
CAVNRFSDGQKLLF

SEQ ID NO: 78468 - protein, 18 aa, Homo sapiens
  CDR3 for beta chain variable domain of TCR clone 39234 (TRBV20-1, TRBJ2-6)
CSAGTTPTHGSGANVLTF

SEQ ID NO: 78469 - protein, 15 aa, Homo sapiens
  CDR3 for alpha chain variable domain of TCR clone 39235 (TRAV12-3, TRAJ6)
CAMSATTGGSYIPTF

SEQ ID NO: 78470 - protein, 16 aa, Homo sapiens
  CDR3 for beta chain variable domain of TCR clone 39235 (TRBV13, TRBJ2-2)
CASSPRTGEHTGELLF

SEQ ID NO: 78471 - protein, 13 aa, Homo sapiens
  CDR3 for alpha chain variable domain of TCR clone 39236 (TRAV21, TRAJ58)
CAVRESSGSRLTF

SEQ ID NO: 78472 - protein, 17 aa, Homo sapiens
  CDR3 for beta chain variable domain of TCR clone 39236 (TRBV5-1, TRBJ2-3)
CASSLAGWGSVVDTQYF

SEQ ID NO: 78473 - protein, 13 aa, Homo sapiens
  CDR3 for alpha chain variable domain of TCR clone 39237 (TRAV1-2, TRAJ9)
CAALNTGGFKTIF

SEQ ID NO: 78474 - protein, 14 aa, Homo sapiens
  CDR3 for beta chain variable domain of TCR clone 39237 (TRBV7-2, TRBJ2-7)
CASRSQGAAYEQYF

SEQ ID NO: 78475 - protein, 17 aa, Homo sapiens
  CDR3 for alpha chain variable domain of TCR clone 39238 (TRAV12-2, TRAJ48)
CASNEKLTFGTGTRLTI

SEQ ID NO: 78476 - protein, 15 aa, Homo sapiens
  CDR3 for beta chain variable domain of TCR clone 39238 (TRBV5-1, TRBJ2-1)
CASSQAGYWWNEQVF

SEQ ID NO: 78477 - protein, 15 aa, Homo sapiens
  CDR3 for alpha chain variable domain of TCR clone 39239 (TRAV14/DV4, TRAJ12)
CAMREERDSSHKLIF

SEQ ID NO: 78478 - protein, 17 aa, Homo sapiens
  CDR3 for beta chain variable domain of TCR clone 39239 (TRBV2, TRBJ2-1)
CASSRPGQGVMVNEQFF

SEQ ID NO: 78479 - protein, 14 aa, Homo sapiens
  CDR3 for alpha chain variable domain of TCR clone 39240 (TRAV1-2, TRAJ16)
CAVNRFSDGQKLLF

SEQ ID NO: 78480 - protein, 15 aa, Homo sapiens
  CDR3 for beta chain variable domain of TCR clone 39240 (TRBV11-2, TRBJ2-1)
CASSSPSTRYNEQFF

SEQ ID NO: 78481 - protein, 13 aa, Homo sapiens
  CDR3 for alpha chain variable domain of TCR clone 39241 (TRAV27, TRAJ6)
CAGGTRGSYIPTF

SEQ ID NO: 78482 - protein, 14 aa, Homo sapiens
  CDR3 for beta chain variable domain of TCR clone 39241 (TRBV6-3, TRBJ1-1)
CASSYRRRDTEAFF

SEQ ID NO: 78483 - protein, 14 aa, Homo sapiens
  CDR3 for alpha chain variable domain of TCR clone 39242 (TRAV8-3, TRAJ9)
CAVVYNTGGFKTIF

SEQ ID NO: 78484 - protein, 14 aa, Homo sapiens
  CDR3 for beta chain variable domain of TCR clone 39242 (TRBV7-3, TRBJ2-2)
CASSAGGYTGELFF

SEQ ID NO: 78485 - protein, 14 aa, Homo sapiens
  CDR3 for alpha chain variable domain of TCR clone 39243 (TRAV1-2, TRAJ16)
CAVNRVSDGQKLLF

SEQ ID NO: 78486 - protein, 13 aa, Homo sapiens
  CDR3 for beta chain variable domain of TCR clone 39243 (TRBV29-1, TRBJ1-1)
CSVGDSRNTEAFF

SEQ ID NO: 78487 - protein, 16 aa, Homo sapiens
  CDR3 for alpha chain variable domain of TCR clone 39244 (TRAV26-1, TRAJ23)
CIVRVHPYDQGEKLIF

SEQ ID NO: 78488 - protein, 15 aa, Homo sapiens
  CDR3 for beta chain variable domain of TCR clone 39244 (TRBV5-7, TRBJ2-7)
CASSPYFEGSYEQYF

SEQ ID NO: 78489 - protein, 12 aa, Homo sapiens
  CDR3 for alpha chain variable domain of TCR clone 39245 (TRAV13-1, TRAJ21)
CAAKEGFNKFYF

SEQ ID NO: 78490 - protein, 15 aa, Homo sapiens
  CDR3 for beta chain variable domain of TCR clone 39245 (TRBV27, TRBJ2-3)
CASSLGLAATDTQYF

SEQ ID NO: 78491 - protein, 11 aa, Homo sapiens
  CDR3 for alpha chain variable domain of TCR clone 39246 (TRAV3, TRAJ21)
CALGNFNKFYF

SEQ ID NO: 78492 - protein, 14 aa, Homo sapiens
  CDR3 for beta chain variable domain of TCR clone 39246 (TRBV20-1, TRBJ2-2)
CSAPDTANTGELFF

SEQ ID NO: 78493 - protein, 11 aa, Homo sapiens
  CDR3 for alpha chain variable domain of TCR clone 39247 (TRAV17, TRAJ9)
CGFTGGFKTIL

SEQ ID NO: 78494 - protein, 12 aa, Homo sapiens
  CDR3 for beta chain variable domain of TCR clone 39247 (TRBV29-1, TRBJ2-3)
CSVTGGADTQYF

SEQ ID NO: 78495 - protein, 11 aa, Homo sapiens
  CDR3 for alpha chain variable domain of TCR clone 39248 (TRAV13-1, TRAJ40)
CAVSGTYKYIF

SEQ ID NO: 78496 - protein, 15 aa, Homo sapiens
  CDR3 for beta chain variable domain of TCR clone 39248 (TRBV4-1, TRBJ1-4)
CASSDTGGTNEKLFF

SEQ ID NO: 78497 - protein, 23 aa, Homo sapiens
  CDR3 for alpha chain variable domain of TCR clone 39249 (TRAV26-1, TRAJ38)
CIADNAGNNHIQNPDPAVYQLRD

SEQ ID NO: 78498 - protein, 13 aa, Homo sapiens
  CDR3 for beta chain variable domain of TCR clone 39249 (TRBV20-1, TRBJ1-1)
CSARGGGNTETFF

SEQ ID NO: 78499 - protein, 12 aa, Homo sapiens
  CDR3 for alpha chain variable domain of TCR clone 39250 (TRAV25, TRAJ35)
CAGIGFGDVLHC

SEQ ID NO: 78500 - protein, 12 aa, Homo sapiens
  CDR3 for beta chain variable domain of TCR clone 39250 (TRBV6-3, TRBJ2-7)
CASSRQGYEQYF

SEQ ID NO: 78501 - protein, 13 aa, Homo sapiens
  CDR3 for alpha chain variable domain of TCR clone 39251 (TRAV21, TRAJ11)
CAVPNSGYSTLTL

SEQ ID NO: 78502 - protein, 13 aa, Homo sapiens
  CDR3 for beta chain variable domain of TCR clone 39251 (TRBV3-1, TRBJ2-7)
CASSLRDGYEQYF

SEQ ID NO: 78503 - protein, 15 aa, Homo sapiens
  CDR3 for alpha chain variable domain of TCR clone 39252 (TRAV3, TRAJ5)
CAVRDLDTGRRALTF

SEQ ID NO: 78504 - protein, 15 aa, Homo sapiens
  CDR3 for beta chain variable domain of TCR clone 39252 (TRBV20-1, TRBJ2-1)
CSARSPGGLGNEQFF

SEQ ID NO: 78505 - protein, 14 aa, Homo sapiens
  CDR3 for alpha chain variable domain of TCR clone 39253 (TRAV23/DV6, TRAJ37)
CSASTSSNTGKLIF

SEQ ID NO: 78506 - protein, 13 aa, Homo sapiens
  CDR3 for beta chain variable domain of TCR clone 39253 (TRBV7-7, TRBJ1-1)
CASSLGANTEAFF

SEQ ID NO: 78507 - protein, 13 aa, Homo sapiens
  CDR3 for alpha chain variable domain of TCR clone 39254 (TRAV2, TRAJ40)
CAVVTSGTYKYIF

SEQ ID NO: 78508 - protein, 15 aa, Homo sapiens
  CDR3 for beta chain variable domain of TCR clone 39254 (TRBV6-1, TRBJ2-3)
CASSERGGITDTQYF

SEQ ID NO: 78509 - protein, 15 aa, Homo sapiens
  CDR3 for alpha chain variable domain of TCR clone 39255 (TRAV26-1, TRAJ40)
CIVSFATSGTYKYIF

SEQ ID NO: 78510 - protein, 11 aa, Homo sapiens
  CDR3 for beta chain variable domain of TCR clone 39255 (TRBV29-1, TRBJ2-3)
CSEDRTGTQYF

SEQ ID NO: 78511 - protein, 15 aa, Homo sapiens
  CDR3 for alpha chain variable domain of TCR clone 39256 (TRAV12-1, TRAJ42)
CVVTRDGGSQGNLIF

SEQ ID NO: 78512 - protein, 14 aa, Homo sapiens
  CDR3 for beta chain variable domain of TCR clone 39256 (TRBV11-2, TRBJ2-3)
CASSLGGGANAQYF

SEQ ID NO: 78513 - protein, 12 aa, Homo sapiens
  CDR3 for alpha chain variable domain of TCR clone 39257 (TRAV12-3, TRAJ17)
CAMTLIGNKLTF

SEQ ID NO: 78514 - protein, 12 aa, Homo sapiens
  CDR3 for beta chain variable domain of TCR clone 39257 (TRBV12-4, TRBJ2-3)
CASSTLPDTQYF

SEQ ID NO: 78515 - protein, 20 aa, Homo sapiens
  CDR3 for alpha chain variable domain of TCR clone 39258 (TRAV26-1, TRAJ42)
CCVLLHRQTYYGGSQGNLIF

SEQ ID NO: 78516 - protein, 16 aa, Homo sapiens
  CDR3 for beta chain variable domain of TCR clone 39258 (TRBV7-3, TRBJ2-2)
CASSFKRGTLSGELFF

SEQ ID NO: 78517 - protein, 16 aa, Homo sapiens
  CDR3 for alpha chain variable domain of TCR clone 39259 (TRAV3, TRAJ5)
CAVRNLMDTGRRALTS

SEQ ID NO: 78518 - protein, 16 aa, Homo sapiens
  CDR3 for beta chain variable domain of TCR clone 39259 (TRBV4-2, TRBJ2-7)
CASSQEGLANSYEQYF

SEQ ID NO: 78519 - protein, 17 aa, Homo sapiens
  CDR3 for alpha chain variable domain of TCR clone 39260 (TRAV3, TRAJ42)
CAVRDRDDGGSQGNLIF

SEQ ID NO: 78520 - protein, 14 aa, Homo sapiens
  CDR3 for beta chain variable domain of TCR clone 39260 (TRBV7-2, TRBJ2-5)
CASSPRGSSETQYF

SEQ ID NO: 78521 - protein, 13 aa, Homo sapiens
  CDR3 for alpha chain variable domain of TCR clone 39261 (TRAV3, TRAJ41)
CAVSSNSGYALNF

SEQ ID NO: 78522 - protein, 13 aa, Homo sapiens
  CDR3 for beta chain variable domain of TCR clone 39261 (TRBV7-2, TRBJ1-5)
CASSLVSGQPQHF

SEQ ID NO: 78523 - protein, 12 aa, Homo sapiens
  CDR3 for alpha chain variable domain of TCR clone 39262 (TRAV21, TRAJ11)
CAETSGYSTLTF

SEQ ID NO: 78524 - protein, 14 aa, Homo sapiens
  CDR3 for beta chain variable domain of TCR clone 39262 (TRBV20-1, TRBJ2-7)
CSAPELAGVGEQYF

SEQ ID NO: 78525 - protein, 13 aa, Homo sapiens
  CDR3 for alpha chain variable domain of TCR clone 39263 (TRAV12-3, TRAJ48)
CAMSLVGNEKLTF

SEQ ID NO: 78526 - protein, 11 aa, Homo sapiens
  CDR3 for beta chain variable domain of TCR clone 39263 (TRBV7-2, TRBJ2-7)
CASSSGLWQYL

SEQ ID NO: 78527 - protein, 13 aa, Homo sapiens
  CDR3 for alpha chain variable domain of TCR clone 39264 (TRAV17, TRAJ26)
CDTVDNYGQNFVF

SEQ ID NO: 78528 - protein, 16 aa, Homo sapiens
  CDR3 for beta chain variable domain of TCR clone 39264 (TRBV2, TRBJ2-1)
CASSVGGSLSYNEQFF

SEQ ID NO: 78529 - protein, 14 aa, Homo sapiens
  CDR3 for alpha chain variable domain of TCR clone 39265 (TRAV8-4, TRAJ9)
CAVRINNGGFKTIF

SEQ ID NO: 78530 - protein, 15 aa, Homo sapiens
  CDR3 for beta chain variable domain of TCR clone 39265 (TRBV10-2, TRBJ2-6)
CASSEQGTGANVLTF

SEQ ID NO: 78531 - protein, 11 aa, Homo sapiens
  CDR3 for alpha chain variable domain of TCR clone 39266 (TRAV12-1, TRAJ27)
CVVNNAGKSTF

SEQ ID NO: 78532 - protein, 14 aa, Homo sapiens
  CDR3 for beta chain variable domain of TCR clone 39266 (TRBV25-1, TRBJ1-1)
CASTHLGGNTEAFF

SEQ ID NO: 78533 - protein, 11 aa, Homo sapiens
  CDR3 for alpha chain variable domain of TCR clone 39267 (TRAV21, TRAJ34)
CAPLDTEKLIF

SEQ ID NO: 78534 - protein, 16 aa, Homo sapiens
  CDR3 for beta chain variable domain of TCR clone 39267 (TRBV5-1, TRBJ2-3)
CASSLAGDRGTDTQYF

SEQ ID NO: 78535 - protein, 14 aa, Homo sapiens
  CDR3 for alpha chain variable domain of TCR clone 39268 (TRAV13-1, TRAJ35)
CAEVKEALGMCCIA

SEQ ID NO: 78536 - protein, 13 aa, Homo sapiens
  CDR3 for beta chain variable domain of TCR clone 39268 (TRBV7-3, TRBJ1-1)
CASSQDWGAEAFF

SEQ ID NO: 78537 - protein, 16 aa, Homo sapiens
  CDR3 for alpha chain variable domain of TCR clone 39269 (TRAV13-1, TRAJ48)
CAASIFGNFGNEKLTF

SEQ ID NO: 78538 - protein, 12 aa, Homo sapiens
  CDR3 for beta chain variable domain of TCR clone 39269 (TRBV14, TRBJ2-4)
CASSNLKRIQYF

SEQ ID NO: 78539 - protein, 14 aa, Homo sapiens
  CDR3 for alpha chain variable domain of TCR clone 39270 (TRAV12-1, TRAJ31)
CVVSNRDNNARLMF

SEQ ID NO: 78540 - protein, 16 aa, Homo sapiens
  CDR3 for beta chain variable domain of TCR clone 39270 (TRBV3-1, TRBJ2-3)
CASSRRAAGGRDTQYF

SEQ ID NO: 78541 - protein, 20 aa, Homo sapiens
  CDR3 for alpha chain variable domain of TCR clone 39271 (TRAV26-1, TRAJ42)
CCVLLHSQTYYGGSQGNLIF

SEQ ID NO: 78542 - protein, 16 aa, Homo sapiens
  CDR3 for beta chain variable domain of TCR clone 39271 (TRBV7-3, TRBJ2-2)
CASSLKRGTLSGELFF

SEQ ID NO: 78543 - protein, 16 aa, Homo sapiens
  CDR3 for alpha chain variable domain of TCR clone 39272 (TRAV21, TRAJ45)
CAVSWGSGGGADGLTF

SEQ ID NO: 78544 - protein, 14 aa, Homo sapiens
  CDR3 for beta chain variable domain of TCR clone 39272 (TRBV4-2, TRBJ1-2)
CASSPGGSNYGYAF

SEQ ID NO: 78545 - protein, 16 aa, Homo sapiens
  CDR3 for alpha chain variable domain of TCR clone 39273 (TRAV12-3, TRAJ53)
CAMSPGSGGSNYKLKF

SEQ ID NO: 78546 - protein, 17 aa, Homo sapiens
  CDR3 for beta chain variable domain of TCR clone 39273 (TRBV28, TRBJ2-5)
CASSTPEGDALQETQYF

SEQ ID NO: 78547 - protein, 14 aa, Homo sapiens
  CDR3 for alpha chain variable domain of TCR clone 39274 (TRAV12-3, TRAJ9)
CAMSPNTGGFKTIF

SEQ ID NO: 78548 - protein, 12 aa, Homo sapiens
  CDR3 for beta chain variable domain of TCR clone 39274 (TRBV19, TRBJ1-5)
CASSIAQQSQHF

SEQ ID NO: 78549 - protein, 13 aa, Homo sapiens
  CDR3 for alpha chain variable domain of TCR clone 39275 (TRAV23/DV6, TRAJ22)
CAPYSGSARQLTF

SEQ ID NO: 78550 - protein, 14 aa, Homo sapiens
  CDR3 for beta chain variable domain of TCR clone 39275 (TRBV7-2, TRBJ2-2)
CASRGQGAAGELFF

SEQ ID NO: 78551 - protein, 16 aa, Homo sapiens
  CDR3 for alpha chain variable domain of TCR clone 39276 (TRAV3, TRAJ18)
CAVRDGRGSTLGRLFF

SEQ ID NO: 78552 - protein, 15 aa, Homo sapiens
  CDR3 for beta chain variable domain of TCR clone 39276 (TRBV7-9, TRBJ1-6)
CASSSPGRGNSPLHF

SEQ ID NO: 78553 - protein, 16 aa, Homo sapiens
  CDR3 for alpha chain variable domain of TCR clone 39277 (TRAV1-2, TRAJ10)
CAVRGVLTGGGNKLTF

SEQ ID NO: 78554 - protein, 14 aa, Homo sapiens
  CDR3 for beta chain variable domain of TCR clone 39277 (TRBV7-2, TRBJ2-2)
CASRGQGAAGELFF

SEQ ID NO: 78555 - protein, 15 aa, Homo sapiens
  CDR3 for alpha chain variable domain of TCR clone 39278 (TRAV3, TRAJ3)
CAVRDMGSSASKIIF

SEQ ID NO: 78556 - protein, 17 aa, Homo sapiens
  CDR3 for beta chain variable domain of TCR clone 39278 (TRBV24-1, TRBJ2-1)
CATSDVSTSGTYNEQFF

SEQ ID NO: 78557 - protein, 13 aa, Homo sapiens
  CDR3 for alpha chain variable domain of TCR clone 39279 (TRAV20, TRAJ31)
CAVQAIGGARLMF

SEQ ID NO: 78558 - protein, 14 aa, Homo sapiens
  CDR3 for beta chain variable domain of TCR clone 39279 (TRBV2, TRBJ1-5)
CASSGTASNQPQHF

SEQ ID NO: 78559 - protein, 13 aa, Homo sapiens
  CDR3 for alpha chain variable domain of TCR clone 39280 (TRAV3, TRAJ43)
CAVRDTRGGDMRF

SEQ ID NO: 78560 - protein, 15 aa, Homo sapiens
  CDR3 for beta chain variable domain of TCR clone 39280 (TRBV6-5, TRBJ1-5)
CASSYSGRSNQPQHF

SEQ ID NO: 78561 - protein, 17 aa, Homo sapiens
  CDR3 for alpha chain variable domain of TCR clone 39281 (TRAV3, TRAJ38)
CAVRGCLNAGNNRKLIW

SEQ ID NO: 78562 - protein, 16 aa, Homo sapiens
  CDR3 for beta chain variable domain of TCR clone 39281 (TRBV20-1, TRBJ1-4)
YSAPGQGLLTNEKLFF

SEQ ID NO: 78563 - protein, 13 aa, Homo sapiens
  CDR3 for alpha chain variable domain of TCR clone 39282 (TRAV1-2, TRAJ9)
CAALNTGGFKTIF

SEQ ID NO: 78564 - protein, 14 aa, Homo sapiens
  CDR3 for beta chain variable domain of TCR clone 39282 (TRBV5-1, TRBJ2-3)
CASSLFGPTDTQYF

SEQ ID NO: 78565 - protein, 13 aa, Homo sapiens
  CDR3 for alpha chain variable domain of TCR clone 39283 (TRAV26-2, TRAJ43)
CILRAVNDNDMRF

SEQ ID NO: 78566 - protein, 15 aa, Homo sapiens
  CDR3 for beta chain variable domain of TCR clone 39283 (TRBV7-2, TRBJ2-1)
CASTHGTGIYNEQFF

SEQ ID NO: 78567 - protein, 15 aa, Homo sapiens
  CDR3 for alpha chain variable domain of TCR clone 39284 (TRAV2, TRAJ24)
CAVVRLKNSWGKLQL

SEQ ID NO: 78568 - protein, 16 aa, Homo sapiens
  CDR3 for beta chain variable domain of TCR clone 39284 (TRBV7-7, TRBJ2-3)
CASSPGTSGSTDTQYF

SEQ ID NO: 78569 - protein, 14 aa, Homo sapiens
  CDR3 for alpha chain variable domain of TCR clone 39285 (TRAV8-3, TRAJ9)
CAVVYNTGGFKTIF

SEQ ID NO: 78570 - protein, 14 aa, Homo sapiens
  CDR3 for beta chain variable domain of TCR clone 39285 (TRBV7-3, TRBJ2-2)
RASSSGGYTGELFF

SEQ ID NO: 78571 - protein, 12 aa, Homo sapiens
  CDR3 for alpha chain variable domain of TCR clone 39286 (TRAV12-3, TRAJ17)
CAMTPTGNKLTF

SEQ ID NO: 78572 - protein, 15 aa, Homo sapiens
  CDR3 for beta chain variable domain of TCR clone 39286 (TRBV12-4, TRBJ2-5)
CASSPPTGLQETQYF

SEQ ID NO: 78573 - protein, 14 aa, Homo sapiens
  CDR3 for alpha chain variable domain of TCR clone 39287 (TRAV4, TRAJ26)
CPVGPHNYGQNFVF

SEQ ID NO: 78574 - protein, 17 aa, Homo sapiens
  CDR3 for beta chain variable domain of TCR clone 39287 (TRBV24-1, TRBJ2-1)
CATSDVSTSGTYNEQFF

SEQ ID NO: 78575 - protein, 11 aa, Homo sapiens
  CDR3 for alpha chain variable domain of TCR clone 39288 (TRAV1-1, TRAJ23)
CAVRQGGKPIF

SEQ ID NO: 78576 - protein, 20 aa, Homo sapiens
  CDR3 for beta chain variable domain of TCR clone 39288 (TRBV7-8, TRBJ2-2)
CASSHLFPGPTVHITGELFF

SEQ ID NO: 78577 - protein, 17 aa, Homo sapiens
  CDR3 for alpha chain variable domain of TCR clone 39289 (TRAV4, TRAJ18)
CLVGERSVGTTLGRLYF

SEQ ID NO: 78578 - protein, 16 aa, Homo sapiens
  CDR3 for beta chain variable domain of TCR clone 39289 (TRBV4-2, TRBJ1-1)
CASSPSPGRAAPEAFF

SEQ ID NO: 78579 - protein, 14 aa, Homo sapiens
  CDR3 for alpha chain variable domain of TCR clone 39290 (TRAV20, TRAJ56)
CAVQFGGANSKRTF

SEQ ID NO: 78580 - protein, 14 aa, Homo sapiens
  CDR3 for beta chain variable domain of TCR clone 39290 (TRBV20-1, TRBJ2-7)
CSAKRGRSSYEQYF

SEQ ID NO: 78581 - protein, 16 aa, Homo sapiens
  CDR3 for alpha chain variable domain of TCR clone 39291 (TRAV4, TRAJ9)
CLVGDPNRPGGFKPIF

SEQ ID NO: 78582 - protein, 16 aa, Homo sapiens
  CDR3 for beta chain variable domain of TCR clone 39291 (TRBV28, TRBJ1-4)
CASSPPYRGRSEKLFF

SEQ ID NO: 78583 - protein, 11 aa, Homo sapiens
  CDR3 for alpha chain variable domain of TCR clone 39292 (TRAV12-1, TRAJ30)
CVVNGQDKIIF

SEQ ID NO: 78584 - protein, 16 aa, Homo sapiens
  CDR3 for beta chain variable domain of TCR clone 39292 (TRBV20-1, TRBJ1-4)
CSAPGQGLLTNEKLFF

SEQ ID NO: 78585 - protein, 11 aa, Homo sapiens
  CDR3 for alpha chain variable domain of TCR clone 39293 (TRAV21, TRAJ17)
CAAPAGNKLTF

SEQ ID NO: 78586 - protein, 12 aa, Homo sapiens
  CDR3 for beta chain variable domain of TCR clone 39293 (TRBV11-2, TRBJ2-1)
CASSPGNNEQFF

SEQ ID NO: 78587 - protein, 12 aa, Homo sapiens
  CDR3 for alpha chain variable domain of TCR clone 39294 (TRAV13-1, TRAJ21)
CAAKEGFNKFYF

SEQ ID NO: 78588 - protein, 18 aa, Homo sapiens
  CDR3 for beta chain variable domain of TCR clone 39294 (TRBV20-1, TRBJ2-6)
CSAEATPTHGSGANVLTF

SEQ ID NO: 78589 - protein, 12 aa, Homo sapiens
  CDR3 for alpha chain variable domain of TCR clone 39295 (TRAV13-1, TRAJ49)
CAAGIRSNQFYF

SEQ ID NO: 78590 - protein, 14 aa, Homo sapiens
  CDR3 for beta chain variable domain of TCR clone 39295 (TRBV7-2, TRBJ2-1)
CASSPGLAGNEQFF

SEQ ID NO: 78591 - protein, 13 aa, Homo sapiens
  CDR3 for alpha chain variable domain of TCR clone 39296 (TRAV30, TRAJ24)
CGTVTDSWGKLQF

SEQ ID NO: 78592 - protein, 14 aa, Homo sapiens
  CDR3 for beta chain variable domain of TCR clone 39296 (TRBV6-3, TRBJ2-2)
CASTYAPDTGELFF

SEQ ID NO: 78593 - protein, 13 aa, Homo sapiens
  CDR3 for alpha chain variable domain of TCR clone 39297 (TRAV20, TRAJ30)
SVPGGVGNDKIIF

SEQ ID NO: 78594 - protein, 14 aa, Homo sapiens
  CDR3 for beta chain variable domain of TCR clone 39297 (TRBV7-8, TRBJ2-3)
CASSLDRGTDTQYF

SEQ ID NO: 78595 - protein, 13 aa, Homo sapiens
  CDR3 for alpha chain variable domain of TCR clone 39298 (TRAV27, TRAJ45)
CRSSGGGADGLTF

SEQ ID NO: 78596 - protein, 17 aa, Homo sapiens
  CDR3 for beta chain variable domain of TCR clone 39298 (TRBV11-2, TRBJ2-1)
CASSLYPQGVEYNEQFF

SEQ ID NO: 78597 - protein, 12 aa, Homo sapiens
  CDR3 for alpha chain variable domain of TCR clone 39299 (TRAV17, TRAJ57)
CATDGGSEKLVF

SEQ ID NO: 78598 - protein, 14 aa, Homo sapiens
  CDR3 for beta chain variable domain of TCR clone 39299 (TRBV7-6, TRBJ2-3)
CASSLGTVTDTQYF

SEQ ID NO: 78599 - protein, 10 aa, Homo sapiens
  CDR3 for alpha chain variable domain of TCR clone 39300 (TRAV38-2/DV8, TRAJ40)
CASGTYKYIF

SEQ ID NO: 78600 - protein, 14 aa, Homo sapiens
  CDR3 for beta chain variable domain of TCR clone 39300 (TRBV7-9, TRBJ2-1)
RASSPRDSLYEQFF

SEQ ID NO: 78601 - protein, 16 aa, Homo sapiens
  CDR3 for alpha chain variable domain of TCR clone 39301 (TRAV12-2, TRAJ50)
CAVGTVTKTSYDKVIF

SEQ ID NO: 78602 - protein, 12 aa, Homo sapiens
  CDR3 for beta chain variable domain of TCR clone 39301 (TRBV12-4, TRBJ1-5)
CASSLGRQPQHF

SEQ ID NO: 78603 - protein, 15 aa, Homo sapiens
  CDR3 for alpha chain variable domain of TCR clone 39302 (TRAV3, TRAJ3)
CAVRDGHSSASKIIF

SEQ ID NO: 78604 - protein, 16 aa, Homo sapiens
  CDR3 for beta chain variable domain of TCR clone 39302 (TRBV28, TRBJ1-4)
CASSFGTFDEKLFLAV

SEQ ID NO: 78605 - protein, 14 aa, Homo sapiens
  CDR3 for alpha chain variable domain of TCR clone 39303 (TRAV21, TRAJ37)
CAVKGSSNAGKLIF

SEQ ID NO: 78606 - protein, 14 aa, Homo sapiens
  CDR3 for beta chain variable domain of TCR clone 39303 (TRBV7-2, TRBJ2-1)
CASSRGGARNEQFF

SEQ ID NO: 78607 - protein, 12 aa, Homo sapiens
  CDR3 for alpha chain variable domain of TCR clone 39304 (TRAV12-3, TRAJ3)
CAIESSASKIIF

SEQ ID NO: 78608 - protein, 17 aa, Homo sapiens
  CDR3 for beta chain variable domain of TCR clone 39304 (TRBV7-9, TRBJ2-3)
CASSLEEAGAYPDTQYF

SEQ ID NO: 78609 - protein, 16 aa, Homo sapiens
  CDR3 for alpha chain variable domain of TCR clone 39305 (TRAV30, TRAJ24)
CGTEIVDADSWGNSRL

SEQ ID NO: 78610 - protein, 14 aa, Homo sapiens
  CDR3 for beta chain variable domain of TCR clone 39305 (TRBV12-5, TRBJ2-5)
CASGSRTHQETQYF

SEQ ID NO: 78611 - protein, 16 aa, Homo sapiens
  CDR3 for alpha chain variable domain of TCR clone 39306 (TRAV27, TRAJ52)
CAGAPAGGTSYGKLTF

SEQ ID NO: 78612 - protein, 12 aa, Homo sapiens
  CDR3 for beta chain variable domain of TCR clone 39306 (TRBV27, TRBJ2-1)
CASRGFYNEQLF

SEQ ID NO: 78613 - protein, 12 aa, Homo sapiens
  CDR3 for alpha chain variable domain of TCR clone 39307 (TRAV16, TRAJ9)
CSLRAGGFKTIF

SEQ ID NO: 78614 - protein, 13 aa, Homo sapiens
  CDR3 for beta chain variable domain of TCR clone 39307 (TRBV4-3, TRBJ1-1)
CASSQVEGSMAFF

SEQ ID NO: 78615 - protein, 15 aa, Homo sapiens
  CDR3 for alpha chain variable domain of TCR clone 39308 (TRAV21, TRAJ40)
CAVRPQTSGTYKYIF

SEQ ID NO: 78616 - protein, 12 aa, Homo sapiens
  CDR3 for beta chain variable domain of TCR clone 39308 (TRBV7-8, TRBJ2-7)
CASSLGDREQYF

SEQ ID NO: 78617 - protein, 14 aa, Homo sapiens
  CDR3 for alpha chain variable domain of TCR clone 39309 (TRAV13-1, TRAJ44)
CAAKATGTASKLTF

SEQ ID NO: 78618 - protein, 14 aa, Homo sapiens
  CDR3 for beta chain variable domain of TCR clone 39309 (TRBV19, TRBJ2-2)
CASSTLHGSGELFF

SEQ ID NO: 78619 - protein, 12 aa, Homo sapiens
  CDR3 for alpha chain variable domain of TCR clone 39310 (TRAV2, TRAJ31)
CAVEANNARLMF

SEQ ID NO: 78620 - protein, 16 aa, Homo sapiens
  CDR3 for beta chain variable domain of TCR clone 39310 (TRBV10-3, TRBJ2-1)
CAISGVGDGGGGEQFF

SEQ ID NO: 78621 - protein, 13 aa, Homo sapiens
  CDR3 for alpha chain variable domain of TCR clone 39311 (TRAV2, TRAJ23)
CVVMGNQGGKLIF

SEQ ID NO: 78622 - protein, 14 aa, Homo sapiens
  CDR3 for beta chain variable domain of TCR clone 39311 (TRBV11-2, TRBJ2-1)
CASSRATSYNEQFF

SEQ ID NO: 78623 - protein, 11 aa, Homo sapiens
  CDR3 for alpha chain variable domain of TCR clone 39312 (TRAV2, TRAJ13)
CASGGYQKVTF

SEQ ID NO: 78624 - protein, 15 aa, Homo sapiens
  CDR3 for beta chain variable domain of TCR clone 39312 (TRBV29-1, TRBJ2-1)
CSGRDRKSSYNEQFS

SEQ ID NO: 78625 - protein, 13 aa, Homo sapiens
  CDR3 for alpha chain variable domain of TCR clone 39313 (TRAV13-2, TRAJ48)
GAEMDFGNEKLTF

SEQ ID NO: 78626 - protein, 15 aa, Homo sapiens
  CDR3 for beta chain variable domain of TCR clone 39313 (TRBV7-9, TRBJ1-6)
CASSSPGRGNSPLHF

SEQ ID NO: 78627 - protein, 12 aa, Homo sapiens
  CDR3 for alpha chain variable domain of TCR clone 39314 (TRAV3, TRAJ20)
CAVRDPDYKLSF

SEQ ID NO: 78628 - protein, 14 aa, Homo sapiens
  CDR3 for beta chain variable domain of TCR clone 39314 (TRBV11-2, TRBJ2-5)
CASSRTGGIETQYF

SEQ ID NO: 78629 - protein, 15 aa, Homo sapiens
  CDR3 for alpha chain variable domain of TCR clone 39315 (TRAV12-2, TRAJ53)
CAVNGGGGSNHKLTF

SEQ ID NO: 78630 - protein, 13 aa, Homo sapiens
  CDR3 for beta chain variable domain of TCR clone 39315 (TRBV3-1, TRBJ1-1)
CASSPGVITEAFF

SEQ ID NO: 78631 - protein, 11 aa, Homo sapiens
  CDR3 for alpha chain variable domain of TCR clone 39316 (TRAV12-3, TRAJ27)
CAMDNAGKSTF

SEQ ID NO: 78632 - protein, 14 aa, Homo sapiens
  CDR3 for beta chain variable domain of TCR clone 39316 (TRBV4-1, TRBJ2-2)
CASSQAVNTGELFF

SEQ ID NO: 78633 - protein, 17 aa, Homo sapiens
  CDR3 for alpha chain variable domain of TCR clone 39317 (TRAV3, TRAJ6)
CAVRDGPRAGGSYIPTF

SEQ ID NO: 78634 - protein, 12 aa, Homo sapiens
  CDR3 for beta chain variable domain of TCR clone 39317 (TRBV19, TRBJ1-5)
CASSIAQQPQHF

SEQ ID NO: 78635 - protein, 14 aa, Homo sapiens
  CDR3 for alpha chain variable domain of TCR clone 39318 (TRAV8-3, TRAJ39)
CAVGANNAGNMLTF

SEQ ID NO: 78636 - protein, 13 aa, Homo sapiens
  CDR3 for beta chain variable domain of TCR clone 39318 (TRBV4-2, TRBJ1-1)
CASSQAGNTEAFF

SEQ ID NO: 78637 - protein, 13 aa, Homo sapiens
  CDR3 for alpha chain variable domain of TCR clone 39319 (TRAV27, TRAJ6)
CAGGTRGNYIPTF

SEQ ID NO: 78638 - protein, 15 aa, Homo sapiens
  CDR3 for beta chain variable domain of TCR clone 39319 (TRBV5-7, TRBJ2-7)
CASSLGPGRGHEQYF

SEQ ID NO: 78639 - protein, 14 aa, Homo sapiens
  CDR3 for alpha chain variable domain of TCR clone 39320 (TRAV8-4, TRAJ13)
CAVTLSGGYQKVIF

SEQ ID NO: 78640 - protein, 14 aa, Homo sapiens
  CDR3 for beta chain variable domain of TCR clone 39320 (TRBV7-2, TRBJ1-2)
CASSQTGSTYGYTF

SEQ ID NO: 78641 - protein, 13 aa, Homo sapiens
  CDR3 for alpha chain variable domain of TCR clone 39321 (TRAV3, TRAJ21)
CAVREPDFNKFYF

SEQ ID NO: 78642 - protein, 16 aa, Homo sapiens
  CDR3 for beta chain variable domain of TCR clone 39321 (TRBV28, TRBJ2-6)
CASSNRRGSGANVLTF

SEQ ID NO: 78643 - protein, 14 aa, Homo sapiens
  CDR3 for alpha chain variable domain of TCR clone 39322 (TRAV12-3, TRAJ10)
SHLPLTGGGNKLTF

SEQ ID NO: 78644 - protein, 15 aa, Homo sapiens
  CDR3 for beta chain variable domain of TCR clone 39322 (TRBV13, TRBJ2-1)
CASSLLAGLNNEQFF

SEQ ID NO: 78645 - protein, 14 aa, Homo sapiens
  CDR3 for alpha chain variable domain of TCR clone 39323 (TRAV12-3, TRAJ10)
SHLPLTGGGNKLTF

SEQ ID NO: 78646 - protein, 16 aa, Homo sapiens
  CDR3 for beta chain variable domain of TCR clone 39323 (TRBV12-4, TRBJ2-5)
CASSWRPYGDLETQYF

SEQ ID NO: 78647 - protein, 15 aa, Homo sapiens
  CDR3 for alpha chain variable domain of TCR clone 39324 (TRAV26-2, TRAJ28)
CILVESVAGSYQLTF

SEQ ID NO: 78648 - protein, 16 aa, Homo sapiens
  CDR3 for beta chain variable domain of TCR clone 39324 (TRBV4-2, TRBJ1-2)
CASSQEIGGASYGYTF

SEQ ID NO: 78649 - protein, 16 aa, Homo sapiens
  CDR3 for alpha chain variable domain of TCR clone 39325 (TRAV30, TRAJ24)
CGTEIVDADSWGKFQF

SEQ ID NO: 78650 - protein, 12 aa, Homo sapiens
  CDR3 for beta chain variable domain of TCR clone 39325 (TRBV4-1, TRBJ2-3)
CASSQGTDTQYF

SEQ ID NO: 78651 - protein, 13 aa, Homo sapiens
  CDR3 for alpha chain variable domain of TCR clone 39326 (TRAV8-3, TRAJ28)
CAVGAVGSYQLTF

SEQ ID NO: 78652 - protein, 15 aa, Homo sapiens
  CDR3 for beta chain variable domain of TCR clone 39326 (TRBV7-9, TRBJ1-5)
CASSQGQQPNQPQHF

SEQ ID NO: 78653 - protein, 13 aa, Homo sapiens
  CDR3 for alpha chain variable domain of TCR clone 39327 (TRAV12-3, TRAJ7)
CAISASGNNRLAF

SEQ ID NO: 78654 - protein, 14 aa, Homo sapiens
  CDR3 for beta chain variable domain of TCR clone 39327 (TRBV13, TRBJ2-5)
CASSLGPRGETQYF

SEQ ID NO: 78655 - protein, 17 aa, Homo sapiens
  CDR3 for alpha chain variable domain of TCR clone 39328 (TRAV23/DV6, TRAJ57)
CAASSTLSQGGSEKRVF

SEQ ID NO: 78656 - protein, 14 aa, Homo sapiens
  CDR3 for beta chain variable domain of TCR clone 39328 (TRBV25-1, TRBJ1-1)
CASTHLGGNTEAFF

SEQ ID NO: 78657 - protein, 11 aa, Homo sapiens
  CDR3 for alpha chain variable domain of TCR clone 39329 (TRAV3, TRAJ21)
CAVGNFNKFYF

SEQ ID NO: 78658 - protein, 12 aa, Homo sapiens
  CDR3 for beta chain variable domain of TCR clone 39329 (TRBV24-1, TRBJ1-1)
CATLYPDTEAFF

SEQ ID NO: 78659 - protein, 12 aa, Homo sapiens
  CDR3 for alpha chain variable domain of TCR clone 39330 (TRAV27, TRAJ35)
CAGADFGNVLHC

SEQ ID NO: 78660 - protein, 15 aa, Homo sapiens
  CDR3 for beta chain variable domain of TCR clone 39330 (TRBV27, TRBJ2-1)
CASSNGGGSSNEQFF

SEQ ID NO: 78661 - protein, 15 aa, Homo sapiens
  CDR3 for alpha chain variable domain of TCR clone 39331 (TRAV26-1, TRAJ44)
CIVRANTGTASKLTF

SEQ ID NO: 78662 - protein, 16 aa, Homo sapiens
  CDR3 for beta chain variable domain of TCR clone 39331 (TRBV7-7, TRBJ2-1)
CTSSLASGTSYNEQFF

SEQ ID NO: 78663 - protein, 12 aa, Homo sapiens
  CDR3 for alpha chain variable domain of TCR clone 39332 (TRAV12-1, TRAJ20)
CVVNPDDYKLSF

SEQ ID NO: 78664 - protein, 12 aa, Homo sapiens
  CDR3 for beta chain variable domain of TCR clone 39332 (TRBV11-2, TRBJ2-2)
CASSLGGGELFL

SEQ ID NO: 78665 - protein, 14 aa, Homo sapiens
  CDR3 for alpha chain variable domain of TCR clone 39333 (TRAV12-3, TRAJ9)
CAMSPNTGGFKTIF

SEQ ID NO: 78666 - protein, 14 aa, Homo sapiens
  CDR3 for beta chain variable domain of TCR clone 39333 (TRBV19, TRBJ1-5)
CASRAPDSFLSQHF

SEQ ID NO: 78667 - protein, 14 aa, Homo sapiens
  CDR3 for alpha chain variable domain of TCR clone 39334 (TRAV26-1, TRAJ39)
CTVRGSRAGNMLTF

SEQ ID NO: 78668 - protein, 15 aa, Homo sapiens
  CDR3 for beta chain variable domain of TCR clone 39334 (TRBV7-9, TRBJ1-5)
CASSQGHQPNQPQHF

SEQ ID NO: 78669 - protein, 18 aa, Homo sapiens
  CDR3 for alpha chain variable domain of TCR clone 39335 (TRAV12-2, )
CAVEDIQNPDPAVYQLRD

SEQ ID NO: 78670 - protein, 13 aa, Homo sapiens
  CDR3 for beta chain variable domain of TCR clone 39335 (TRBV7-9, TRBJ1-2)
CASSLKQNYGYTF

SEQ ID NO: 78671 - protein, 13 aa, Homo sapiens
  CDR3 for alpha chain variable domain of TCR clone 39336 (TRAV2, TRAJ23)
CAVMGNQGGKLIF

SEQ ID NO: 78672 - protein, 14 aa, Homo sapiens
  CDR3 for beta chain variable domain of TCR clone 39336 (TRBV11-2, TRBJ2-1)
CASSRATAYNEQFF

SEQ ID NO: 78673 - protein, 16 aa, Homo sapiens
  CDR3 for alpha chain variable domain of TCR clone 39337 (TRAV3, TRAJ37)
CAVRPHGSGNTGKLIF

SEQ ID NO: 78674 - protein, 14 aa, Homo sapiens
  CDR3 for beta chain variable domain of TCR clone 39337 (TRBV19, TRBJ2-1)
CASPTFVLSSEQFF

SEQ ID NO: 78675 - protein, 15 aa, Homo sapiens
  CDR3 for alpha chain variable domain of TCR clone 39338 (TRAV13-2, TRAJ10)
CAENRDTGGGNKLNF

SEQ ID NO: 78676 - protein, 20 aa, Homo sapiens
  CDR3 for beta chain variable domain of TCR clone 39338 (TRBV28, TRBJ2-1)
CASTPIGRSPGLAGGNEQFF

SEQ ID NO: 78677 - protein, 12 aa, Homo sapiens
  CDR3 for alpha chain variable domain of TCR clone 39339 (TRAV25, TRAJ17)
CAGEAAGNKLTF

SEQ ID NO: 78678 - protein, 14 aa, Homo sapiens
  CDR3 for beta chain variable domain of TCR clone 39339 (TRBV5-1, TRBJ2-1)
CASSALWAGSEQFF

SEQ ID NO: 78679 - protein, 16 aa, Homo sapiens
  CDR3 for alpha chain variable domain of TCR clone 39340 (TRAV12-2, TRAJ10)
CAGNRVLTGGGNKLTF

SEQ ID NO: 78680 - protein, 12 aa, Homo sapiens
  CDR3 for beta chain variable domain of TCR clone 39340 (TRBV28, TRBJ2-7)
CASSFSSYEQYF

SEQ ID NO: 78681 - protein, 14 aa, Homo sapiens
  CDR3 for alpha chain variable domain of TCR clone 39341 (TRAV12-2, TRAJ13)
CAVKKTGGYQKVTF

SEQ ID NO: 78682 - protein, 15 aa, Homo sapiens
  CDR3 for beta chain variable domain of TCR clone 39341 (TRBV19, TRBJ1-1)
CANTSGQIQNTEAFF

SEQ ID NO: 78683 - protein, 17 aa, Homo sapiens
  CDR3 for alpha chain variable domain of TCR clone 39342 (TRAV9-2, TRAJ52)
CALRGNAGGTSYGKLTF

SEQ ID NO: 78684 - protein, 20 aa, Homo sapiens
  CDR3 for beta chain variable domain of TCR clone 39342 (TRBV5-1, TRBJ2-2)
CASSYSLPGLAVQNTGELFF

SEQ ID NO: 78685 - protein, 14 aa, Homo sapiens
  CDR3 for alpha chain variable domain of TCR clone 39343 (TRAV12-3, TRAJ12)
CAMSEVDSSYKLIF

SEQ ID NO: 78686 - protein, 12 aa, Homo sapiens
  CDR3 for beta chain variable domain of TCR clone 39343 (TRBV18, TRBJ1-4)
CASSPSREKPFF

SEQ ID NO: 78687 - protein, 15 aa, Homo sapiens
  CDR3 for alpha chain variable domain of TCR clone 39344 (TRAV8-2, TRAJ15)
CVVTMGNQAGTALIF

SEQ ID NO: 78688 - protein, 13 aa, Homo sapiens
  CDR3 for beta chain variable domain of TCR clone 39344 (TRBV11-2, TRBJ1-2)
CASSLDSPSGYTF

SEQ ID NO: 78689 - protein, 18 aa, Homo sapiens
  CDR3 for alpha chain variable domain of TCR clone 39345 (TRAV26-1, TRAJ52)
CIVKVEGAGGTSYGKLTF

SEQ ID NO: 78690 - protein, 13 aa, Homo sapiens
  CDR3 for beta chain variable domain of TCR clone 39345 (TRBV7-3, TRBJ1-2)
CASSLKRGYGYTF

SEQ ID NO: 78691 - protein, 13 aa, Homo sapiens
  CDR3 for alpha chain variable domain of TCR clone 39346 (TRAV21, TRAJ57)
CAVTQGGSEKLVF

SEQ ID NO: 78692 - protein, 13 aa, Homo sapiens
  CDR3 for beta chain variable domain of TCR clone 39346 (TRBV18, TRBJ2-7)
CASSPGRNYEQYF

SEQ ID NO: 78693 - protein, 13 aa, Homo sapiens
  CDR3 for alpha chain variable domain of TCR clone 39347 (TRAV12-1, TRAJ11)
CVVTRGGYSTLTF

SEQ ID NO: 78694 - protein, 13 aa, Homo sapiens
  CDR3 for beta chain variable domain of TCR clone 39347 (TRBV20-1, TRBJ1-2)
CSARDRGAYGYTF

SEQ ID NO: 78695 - protein, 11 aa, Homo sapiens
  CDR3 for alpha chain variable domain of TCR clone 39348 (TRAV3, TRAJ21)
CAVGNFNKFYF

SEQ ID NO: 78696 - protein, 13 aa, Homo sapiens
  CDR3 for beta chain variable domain of TCR clone 39348 (TRBV7-9, TRBJ1-2)
CASSLKQNYGYTV

SEQ ID NO: 78697 - protein, 14 aa, Homo sapiens
  CDR3 for alpha chain variable domain of TCR clone 39349 (TRAV9-2, TRAJ39)
CALYIYNAGNMPTF

SEQ ID NO: 78698 - protein, 13 aa, Homo sapiens
  CDR3 for beta chain variable domain of TCR clone 39349 (TRBV20-1, TRBJ2-7)
CSATHTSGYEQYF

SEQ ID NO: 78699 - protein, 14 aa, Homo sapiens
  CDR3 for alpha chain variable domain of TCR clone 39350 (TRAV12-3, TRAJ9)
CAMSPNTGGFKTIF

SEQ ID NO: 78700 - protein, 15 aa, Homo sapiens
  CDR3 for beta chain variable domain of TCR clone 39350 (TRBV19, TRBJ1-2)
CASSVGQVLNYGYTF

SEQ ID NO: 78701 - protein, 15 aa, Homo sapiens
  CDR3 for alpha chain variable domain of TCR clone 39351 (TRAV38-1, TRAJ37)
CAFIHGSGKTGKLIF

SEQ ID NO: 78702 - protein, 12 aa, Homo sapiens
  CDR3 for beta chain variable domain of TCR clone 39351 (TRBV7-9, TRBJ2-7)
CASSFGSYEQYF

SEQ ID NO: 78703 - protein, 17 aa, Homo sapiens
  CDR3 for alpha chain variable domain of TCR clone 39352 (TRAV3, TRAJ6)
CAVRDGPRAGGGYIPTF

SEQ ID NO: 78704 - protein, 14 aa, Homo sapiens
  CDR3 for beta chain variable domain of TCR clone 39352 (TRBV7-2, TRBJ2-7)
CASSPKASFYEQYF

SEQ ID NO: 78705 - protein, 18 aa, Homo sapiens
  CDR3 for alpha chain variable domain of TCR clone 39353 (TRAV13-1, TRAJ52)
CAAKNPNAGGTSYGKLPF

SEQ ID NO: 78706 - protein, 15 aa, Homo sapiens
  CDR3 for beta chain variable domain of TCR clone 39353 (TRBV6-1, TRBJ2-3)
CASSERGGITDTQYF

SEQ ID NO: 78707 - protein, 10 aa, Homo sapiens
  CDR3 for alpha chain variable domain of TCR clone 39354 (TRAV23/DV6, TRAJ57)
CAASSTLSQG

SEQ ID NO: 78708 - protein, 12 aa, Homo sapiens
  CDR3 for beta chain variable domain of TCR clone 39354 (TRBV11-2, TRBJ2-2)
CASSLGGGELFF

SEQ ID NO: 78709 - protein, 11 aa, Homo sapiens
  CDR3 for alpha chain variable domain of TCR clone 39355 (TRAV21, TRAJ48)
CAVDGNEKLTF

SEQ ID NO: 78710 - protein, 16 aa, Homo sapiens
  CDR3 for beta chain variable domain of TCR clone 39355 (TRBV12-4, TRBJ1-5)
CASSSGPRGSNPPQHF

SEQ ID NO: 78711 - protein, 15 aa, Homo sapiens
  CDR3 for alpha chain variable domain of TCR clone 39356 (TRAV12-3, TRAJ6)
CAMSATTGGSYIPTF

SEQ ID NO: 78712 - protein, 16 aa, Homo sapiens
  CDR3 for beta chain variable domain of TCR clone 39356 (TRBV20-1, TRBJ1-2)
CSASMGQGVANYGYTC

SEQ ID NO: 78713 - protein, 17 aa, Homo sapiens
  CDR3 for alpha chain variable domain of TCR clone 39357 (TRAV13-1, TRAJ5)
CSNPSLSRDTGRRALTF

SEQ ID NO: 78714 - protein, 17 aa, Homo sapiens
  CDR3 for beta chain variable domain of TCR clone 39357 (TRBV24-1, TRBJ2-1)
CATSDVSTSGAYNEQFF

SEQ ID NO: 78715 - protein, 18 aa, Homo sapiens
  CDR3 for alpha chain variable domain of TCR clone 39358 (TRAV26-1, TRAJ52)
CIVRVAGAGGTSYGKLTF

SEQ ID NO: 78716 - protein, 13 aa, Homo sapiens
  CDR3 for beta chain variable domain of TCR clone 39358 (TRBV7-8, TRBJ1-2)
CASSAQSYYGDTF

SEQ ID NO: 78717 - protein, 12 aa, Homo sapiens
  CDR3 for alpha chain variable domain of TCR clone 39359 (TRAV3, TRAJ43)
CAVRDPNKDMRF

SEQ ID NO: 78718 - protein, 15 aa, Homo sapiens
  CDR3 for beta chain variable domain of TCR clone 39359 (TRBV27, TRBJ1-5)
CASSLGTGFDQPQHF

SEQ ID NO: 78719 - protein, 16 aa, Homo sapiens
  CDR3 for alpha chain variable domain of TCR clone 39360 (TRAV3, TRAJ37)
CAVRGKGSGYTGKLIF

SEQ ID NO: 78720 - protein, 13 aa, Homo sapiens
  CDR3 for beta chain variable domain of TCR clone 39360 (TRBV14, TRBJ2-7)
CASSQDRRYEQYF

SEQ ID NO: 78721 - protein, 11 aa, Homo sapiens
  CDR3 for alpha chain variable domain of TCR clone 39361 (TRAV2, TRAJ23)
CAVETQGKLIF

SEQ ID NO: 78722 - protein, 14 aa, Homo sapiens
  CDR3 for beta chain variable domain of TCR clone 39361 (TRBV2, TRBJ2-3)
CASSEGQNTDTQYF

SEQ ID NO: 78723 - protein, 15 aa, Homo sapiens
  CDR3 for alpha chain variable domain of TCR clone 39362 (TRAV17, TRAJ13)
CATEAGSGGYQKVTF

SEQ ID NO: 78724 - protein, 17 aa, Homo sapiens
  CDR3 for beta chain variable domain of TCR clone 39362 (TRBV11-2, TRBJ2-1)
CASSLYPPGVEYNEQFF

SEQ ID NO: 78725 - protein, 13 aa, Homo sapiens
  CDR3 for alpha chain variable domain of TCR clone 39363 (TRAV20, TRAJ54)
CAVQAGGAQKLVF

SEQ ID NO: 78726 - protein, 14 aa, Homo sapiens
  CDR3 for beta chain variable domain of TCR clone 39363 (TRBV19, TRBJ2-1)
CASPTFVLSGEQFF

SEQ ID NO: 78727 - protein, 13 aa, Homo sapiens
  CDR3 for alpha chain variable domain of TCR clone 39364 (TRAV3, TRAJ27)
CAVRPLGAGKSTI

SEQ ID NO: 78728 - protein, 13 aa, Homo sapiens
  CDR3 for beta chain variable domain of TCR clone 39364 (TRBV7-9, TRBJ2-3)
CASSPGSTDTQYF

SEQ ID NO: 78729 - protein, 16 aa, Homo sapiens
  CDR3 for alpha chain variable domain of TCR clone 39365 (TRAV21, TRAJ37)
CAVHTAGSSNTGKLIF

SEQ ID NO: 78730 - protein, 13 aa, Homo sapiens
  CDR3 for beta chain variable domain of TCR clone 39365 (TRBV7-9, TRBJ2-5)
CASLPSGRETQYF

SEQ ID NO: 78731 - protein, 15 aa, Homo sapiens
  CDR3 for alpha chain variable domain of TCR clone 39366 (TRAV26-1, TRAJ40)
CIVRVTTSGTYKYIF

SEQ ID NO: 78732 - protein, 12 aa, Homo sapiens
  CDR3 for beta chain variable domain of TCR clone 39366 (TRBV7-9, TRBJ1-4)
CASSTDQEKLFF

SEQ ID NO: 78733 - protein, 18 aa, Homo sapiens
  CDR3 for alpha chain variable domain of TCR clone 39367 (TRAV3, TRAJ32)
CAVRDIRGYGDATNKLIF

SEQ ID NO: 78734 - protein, 15 aa, Homo sapiens
  CDR3 for beta chain variable domain of TCR clone 39367 (TRBV12-4, TRBJ2-2)
CASSLGVRHTGELFF

SEQ ID NO: 78735 - protein, 11 aa, Homo sapiens
  CDR3 for alpha chain variable domain of TCR clone 39368 (TRAV2, TRAJ13)
CASGGYQKVTF

SEQ ID NO: 78736 - protein, 12 aa, Homo sapiens
  CDR3 for beta chain variable domain of TCR clone 39368 (TRBV7-3, TRBJ2-5)
CASSSPGGTQYF

SEQ ID NO: 78737 - protein, 12 aa, Homo sapiens
  CDR3 for alpha chain variable domain of TCR clone 39369 (TRAV8-3, TRAJ26)
CAGDNYGQNFVF

SEQ ID NO: 78738 - protein, 15 aa, Homo sapiens
  CDR3 for beta chain variable domain of TCR clone 39369 (TRBV9, TRBJ2-1)
CASSLAGSSCNEQFF

SEQ ID NO: 78739 - protein, 15 aa, Homo sapiens
  CDR3 for alpha chain variable domain of TCR clone 39370 (TRAV16, TRAJ20)
CALKGGLRADYKPSF

SEQ ID NO: 78740 - protein, 16 aa, Homo sapiens
  CDR3 for beta chain variable domain of TCR clone 39370 (TRBV11-3, TRBJ2-2)
CASSSRTSPGTGELFF

SEQ ID NO: 78741 - protein, 14 aa, Homo sapiens
  CDR3 for alpha chain variable domain of TCR clone 39371 (TRAV1-2, TRAJ6)
CAVSLSGGSYIPTF

SEQ ID NO: 78742 - protein, 15 aa, Homo sapiens
  CDR3 for beta chain variable domain of TCR clone 39371 (TRBV28, TRBJ2-7)
CASSPGGRGFYGQYF

SEQ ID NO: 78743 - protein, 13 aa, Homo sapiens
  CDR3 for alpha chain variable domain of TCR clone 39372 (TRAV2, TRAJ40)
RAVVTSGTYKYIF

SEQ ID NO: 78744 - protein, 14 aa, Homo sapiens
  CDR3 for beta chain variable domain of TCR clone 39372 (TRBV4-1, TRBJ2-2)
CASSQAVNTGELFF

SEQ ID NO: 78745 - protein, 12 aa, Homo sapiens
  CDR3 for alpha chain variable domain of TCR clone 39373 (TRAV2, TRAJ9)
CAVGAGGFKTIF

SEQ ID NO: 78746 - protein, 13 aa, Homo sapiens
  CDR3 for beta chain variable domain of TCR clone 39373 (TRBV7-3, TRBJ1-1)
CASSQDWGAEAFF

SEQ ID NO: 78747 - protein, 13 aa, Homo sapiens
  CDR3 for alpha chain variable domain of TCR clone 39374 (TRAV17, TRAJ5)
CAPMDTGRRALTF

SEQ ID NO: 78748 - protein, 15 aa, Homo sapiens
  CDR3 for beta chain variable domain of TCR clone 39374 (TRBV6-6, TRBJ2-5)
CASSPGGGLEDTQYF

SEQ ID NO: 78749 - protein, 18 aa, Homo sapiens
  CDR3 for alpha chain variable domain of TCR clone 39375 (TRAV13-1, TRAJ41)
CAASGPDELKFRISRTLT

SEQ ID NO: 78750 - protein, 16 aa, Homo sapiens
  CDR3 for beta chain variable domain of TCR clone 39375 (TRBV18, TRBJ2-3)
CASSPPAGGPRKYAVF

SEQ ID NO: 78751 - protein, 15 aa, Homo sapiens
  CDR3 for alpha chain variable domain of TCR clone 39376 (TRAV3, TRAJ3)
CAVRDGDSSASKIIF

SEQ ID NO: 78752 - protein, 18 aa, Homo sapiens
  CDR3 for beta chain variable domain of TCR clone 39376 (TRBV25-1, TRBJ1-2)
CASSGLQNGQGLIFGYTF

SEQ ID NO: 78753 - protein, 13 aa, Homo sapiens
  CDR3 for alpha chain variable domain of TCR clone 39377 (TRAV26-1, TRAJ33)
CIVRVEGNYQLIW

SEQ ID NO: 78754 - protein, 16 aa, Homo sapiens
  CDR3 for beta chain variable domain of TCR clone 39377 (TRBV15, TRBJ2-7)
CATSRDRGRRRGGQYF

SEQ ID NO: 78755 - protein, 14 aa, Homo sapiens
  CDR3 for alpha chain variable domain of TCR clone 39378 (TRAV2, TRAJ37)
CAVDITSNTGKLIF

SEQ ID NO: 78756 - protein, 15 aa, Homo sapiens
  CDR3 for beta chain variable domain of TCR clone 39378 (TRBV20-1, TRBJ1-1)
CSASRGVTGNTEAFF

SEQ ID NO: 78757 - protein, 11 aa, Homo sapiens
  CDR3 for alpha chain variable domain of TCR clone 39379 (TRAV14/DV4, )
CALREISRTLT

SEQ ID NO: 78758 - protein, 14 aa, Homo sapiens
  CDR3 for beta chain variable domain of TCR clone 39379 (TRBV2, TRBJ2-1)
CASSDRAYYNEQFF

SEQ ID NO: 78759 - protein, 18 aa, Homo sapiens
  CDR3 for alpha chain variable domain of TCR clone 39380 (TRAV13-1, TRAJ52)
CAASKRSAGGTSYGKLTF

SEQ ID NO: 78760 - protein, 16 aa, Homo sapiens
  CDR3 for beta chain variable domain of TCR clone 39380 (TRBV20-1, TRBJ1-4)
CSAPGQGLLTNEKLFF

SEQ ID NO: 78761 - protein, 15 aa, Homo sapiens
  CDR3 for alpha chain variable domain of TCR clone 39381 (TRAV23/DV6, TRAJ18)
CAASFRGSTLGRLYF

SEQ ID NO: 78762 - protein, 13 aa, Homo sapiens
  CDR3 for beta chain variable domain of TCR clone 39381 (TRBV28, TRBJ2-7)
CAILERAGGEQYF

SEQ ID NO: 78763 - protein, 12 aa, Homo sapiens
  CDR3 for alpha chain variable domain of TCR clone 39382 (TRAV16, TRAJ10)
CSRTGGGNKLTF

SEQ ID NO: 78764 - protein, 15 aa, Homo sapiens
  CDR3 for beta chain variable domain of TCR clone 39382 (TRBV6-3, TRBJ2-7)
CASSSPGTVFYAQYF

SEQ ID NO: 78765 - protein, 15 aa, Homo sapiens
  CDR3 for alpha chain variable domain of TCR clone 39383 (TRAV17, TRAJ23)
CATYAEDNQGGKLIF

SEQ ID NO: 78766 - protein, 12 aa, Homo sapiens
  CDR3 for beta chain variable domain of TCR clone 39383 (TRBV2, TRBJ2-1)
CAKREGYNEQFF

SEQ ID NO: 78767 - protein, 12 aa, Homo sapiens
  CDR3 for alpha chain variable domain of TCR clone 39384 (TRAV13-1, TRAJ21)
CAAKGGFNKFYF

SEQ ID NO: 78768 - protein, 20 aa, Homo sapiens
  CDR3 for beta chain variable domain of TCR clone 39384 (TRBV7-8, TRBJ2-2)
CASSHLFPGPTIHITGELFF

SEQ ID NO: 78769 - protein, 14 aa, Homo sapiens
  CDR3 for alpha chain variable domain of TCR clone 39385 (TRAV17, TRAJ31)
CATVLRNNNARLMF

SEQ ID NO: 78770 - protein, 14 aa, Homo sapiens
  CDR3 for beta chain variable domain of TCR clone 39385 (TRBV12-4, TRBJ2-5)
CASNLWQKQETQYF

SEQ ID NO: 78771 - protein, 18 aa, Homo sapiens
  CDR3 for alpha chain variable domain of TCR clone 39386 (TRAV29/DV5, TRAJ52)
CAAGFRGAGGTSYGKLTF

SEQ ID NO: 78772 - protein, 16 aa, Homo sapiens
  CDR3 for beta chain variable domain of TCR clone 39386 (TRBV7-3, TRBJ2-2)
CASSLKRGNLSGELFF

SEQ ID NO: 78773 - protein, 18 aa, Homo sapiens
  CDR3 for alpha chain variable domain of TCR clone 39387 (TRAV13-1, TRAJ52)
CASKNPNAGGTSYGKLTF

SEQ ID NO: 78774 - protein, 15 aa, Homo sapiens
  CDR3 for beta chain variable domain of TCR clone 39387 (TRBV6-1, TRBJ2-3)
CASSERGGITDTQYF

SEQ ID NO: 78775 - protein, 12 aa, Homo sapiens
  CDR3 for alpha chain variable domain of TCR clone 39388 (TRAV30, TRAJ43)
CGTEERGNDMRF

SEQ ID NO: 78776 - protein, 13 aa, Homo sapiens
  CDR3 for beta chain variable domain of TCR clone 39388 (TRBV19, TRBJ1-2)
CASSVPGQDGYTF

SEQ ID NO: 78777 - protein, 17 aa, Homo sapiens
  CDR3 for alpha chain variable domain of TCR clone 39389 (TRAV8-6, TRAJ8)
CAVKEGIENTGFQKPVF

SEQ ID NO: 78778 - protein, 12 aa, Homo sapiens
  CDR3 for beta chain variable domain of TCR clone 39389 (TRBV19, TRBJ1-4)
CASKDWPGGLFF

SEQ ID NO: 78779 - protein, 10 aa, Homo sapiens
  CDR3 for alpha chain variable domain of TCR clone 39390 (TRAV8-4, TRAJ43)
CAVSADDMRF

SEQ ID NO: 78780 - protein, 15 aa, Homo sapiens
  CDR3 for beta chain variable domain of TCR clone 39390 (TRBV5-1, TRBJ2-3)
CASSVTSGSTDTKYF

SEQ ID NO: 78781 - protein, 12 aa, Homo sapiens
  CDR3 for alpha chain variable domain of TCR clone 39391 (TRAV12-3, TRAJ20)
CAMVRGDYKLSF

SEQ ID NO: 78782 - protein, 13 aa, Homo sapiens
  CDR3 for beta chain variable domain of TCR clone 39391 (TRBV7-3, TRBJ2-1)
CASSLDSYNEQFF

SEQ ID NO: 78783 - protein, 12 aa, Homo sapiens
  CDR3 for alpha chain variable domain of TCR clone 39392 (TRAV12-3, TRAJ17)
CAMTLTGNKLTF

SEQ ID NO: 78784 - protein, 17 aa, Homo sapiens
  CDR3 for beta chain variable domain of TCR clone 39392 (TRBV25-1, TRBJ2-1)
CASSAYGQGRGVYEQFF

SEQ ID NO: 78785 - protein, 17 aa, Homo sapiens
  CDR3 for alpha chain variable domain of TCR clone 39393 (TRAV3, TRAJ42)
CAVRDRDYGGSQGNLIF

SEQ ID NO: 78786 - protein, 17 aa, Homo sapiens
  CDR3 for beta chain variable domain of TCR clone 39393 (TRBV20-1, TRBJ2-2)
CSASGSGQGGLTGELFF

SEQ ID NO: 78787 - protein, 15 aa, Homo sapiens
  CDR3 for alpha chain variable domain of TCR clone 39394 (TRAV12-3, TRAJ6)
CAMSATTGGSYIPTF

SEQ ID NO: 78788 - protein, 17 aa, Homo sapiens
  CDR3 for beta chain variable domain of TCR clone 39394 (TRBV13, TRBJ2-3)
CASSLSRVAGGRNTQCF

SEQ ID NO: 78789 - protein, 14 aa, Homo sapiens
  CDR3 for alpha chain variable domain of TCR clone 39395 (TRAV13-1, TRAJ26)
CAASSAHYGQNFVF

SEQ ID NO: 78790 - protein, 13 aa, Homo sapiens
  CDR3 for beta chain variable domain of TCR clone 39395 (TRBV7-9, TRBJ1-2)
CASSLKQNYGYTF

SEQ ID NO: 78791 - protein, 13 aa, Homo sapiens
  CDR3 for alpha chain variable domain of TCR clone 39396 (TRAV2, TRAJ40)
SAVVTSGTYKYIF

SEQ ID NO: 78792 - protein, 15 aa, Homo sapiens
  CDR3 for beta chain variable domain of TCR clone 39396 (TRBV11-3, TRBJ2-3)
CASLKDGREGDTQYF

SEQ ID NO: 78793 - protein, 11 aa, Homo sapiens
  CDR3 for alpha chain variable domain of TCR clone 39397 (TRAV1-2, TRAJ31)
CAVNNNARLRF

SEQ ID NO: 78794 - protein, 15 aa, Homo sapiens
  CDR3 for beta chain variable domain of TCR clone 39397 (TRBV28, TRBJ2-1)
CASSIIAGGRSEQFF

SEQ ID NO: 78795 - protein, 12 aa, Homo sapiens
  CDR3 for alpha chain variable domain of TCR clone 39398 (TRAV12-2, TRAJ7)
CAPEDGNNRLAF

SEQ ID NO: 78796 - protein, 13 aa, Homo sapiens
  CDR3 for beta chain variable domain of TCR clone 39398 (TRBV20-1, TRBJ2-1)
CSASGRALNEQFF

SEQ ID NO: 78797 - protein, 15 aa, Homo sapiens
  CDR3 for alpha chain variable domain of TCR clone 39399 (TRAV26-1, TRAJ22)
CIVRVSFWFCKTTDL

SEQ ID NO: 78798 - protein, 20 aa, Homo sapiens
  CDR3 for beta chain variable domain of TCR clone 39399 (TRBV28, TRBJ2-1)
CASTPIGRSPGLAGGNEQFF

SEQ ID NO: 78799 - protein, 14 aa, Homo sapiens
  CDR3 for alpha chain variable domain of TCR clone 39400 (TRAV1-2, TRAJ8)
CAVIEDTGFQKLVF

SEQ ID NO: 78800 - protein, 13 aa, Homo sapiens
  CDR3 for beta chain variable domain of TCR clone 39400 (TRBV15, TRBJ2-7)
CATSTTGHYEQYF

SEQ ID NO: 78801 - protein, 12 aa, Homo sapiens
  CDR3 for alpha chain variable domain of TCR clone 39401 (TRAV27, TRAJ9)
CAGESGGCKTIF

SEQ ID NO: 78802 - protein, 18 aa, Homo sapiens
  CDR3 for beta chain variable domain of TCR clone 39401 (TRBV10-2, TRBJ2-2)
CISAPAVHRQADAGELFF

SEQ ID NO: 78803 - protein, 13 aa, Homo sapiens
  CDR3 for alpha chain variable domain of TCR clone 39402 (TRAV1-2, TRAJ27)
CAVFNTNAGKSTF

SEQ ID NO: 78804 - protein, 17 aa, Homo sapiens
  CDR3 for beta chain variable domain of TCR clone 39402 (TRBV11-2, TRBJ2-4)
RASSLGEGEGGKNIQYF

SEQ ID NO: 78805 - protein, 10 aa, Homo sapiens
  CDR3 for alpha chain variable domain of TCR clone 39403 (TRAV8-3, TRAJ44)
CAVGAVVYRH

SEQ ID NO: 78806 - protein, 15 aa, Homo sapiens
  CDR3 for beta chain variable domain of TCR clone 39403 (TRBV6-5, TRBJ1-2)
CASSYSQAFNYGYTF

SEQ ID NO: 78807 - protein, 14 aa, Homo sapiens
  CDR3 for alpha chain variable domain of TCR clone 39404 (TRAV23/DV6, TRAJ24)
CAASLSDSWGKLQF

SEQ ID NO: 78808 - protein, 16 aa, Homo sapiens
  CDR3 for beta chain variable domain of TCR clone 39404 (TRBV7-9, TRBJ2-6)
CASSLKGPLRAYVLTF

SEQ ID NO: 78809 - protein, 17 aa, Homo sapiens
  CDR3 for alpha chain variable domain of TCR clone 39405 (TRAV23/DV6, TRAJ57)
CAASSTLSQGGSEKLVF

SEQ ID NO: 78810 - protein, 17 aa, Homo sapiens
  CDR3 for beta chain variable domain of TCR clone 39405 (TRBV4-2, TRBJ1-1)
CASTQFGGGSGNTEAFF

SEQ ID NO: 78811 - protein, 11 aa, Homo sapiens
  CDR3 for alpha chain variable domain of TCR clone 39406 (TRAV12-1, TRAJ15)
CVVSAGTALIF

SEQ ID NO: 78812 - protein, 16 aa, Homo sapiens
  CDR3 for beta chain variable domain of TCR clone 39406 (TRBV28, TRBJ2-1)
CASSSRVRDSYNEQFF

SEQ ID NO: 78813 - protein, 14 aa, Homo sapiens
  CDR3 for alpha chain variable domain of TCR clone 39407 (TRAV1-2, TRAJ29)
CAVRTDSGNTPLVF

SEQ ID NO: 78814 - protein, 16 aa, Homo sapiens
  CDR3 for beta chain variable domain of TCR clone 39407 (TRBV4-1, TRBJ2-7)
CASSLTAGQATYEQYF

SEQ ID NO: 78815 - protein, 10 aa, Homo sapiens
  CDR3 for alpha chain variable domain of TCR clone 39408 (TRAV13-2, TRAJ49)
CADTGNQFYF

SEQ ID NO: 78816 - protein, 12 aa, Homo sapiens
  CDR3 for beta chain variable domain of TCR clone 39408 (TRBV7-9, TRBJ1-4)
CASSTDREKLFF

SEQ ID NO: 78817 - protein, 16 aa, Homo sapiens
  CDR3 for alpha chain variable domain of TCR clone 39409 (TRAV4, TRAJ22)
CLVGDLYSGSARQLTF

SEQ ID NO: 78818 - protein, 16 aa, Homo sapiens
  CDR3 for beta chain variable domain of TCR clone 39409 (TRBV7-9, TRBJ2-1)
CASSAVAGGSYNEQFF

SEQ ID NO: 78819 - protein, 14 aa, Homo sapiens
  CDR3 for alpha chain variable domain of TCR clone 39410 (TRAV12-1, TRAJ12)
CVVISMDSSYKLIF

SEQ ID NO: 78820 - protein, 15 aa, Homo sapiens
  CDR3 for beta chain variable domain of TCR clone 39410 (TRBV28, TRBJ2-3)
CASSFIAGEHRYAVF

SEQ ID NO: 78821 - protein, 13 aa, Homo sapiens
  CDR3 for alpha chain variable domain of TCR clone 39411 (TRAV22, TRAJ12)
CAGRMDSSYKLIF

SEQ ID NO: 78822 - protein, 15 aa, Homo sapiens
  CDR3 for beta chain variable domain of TCR clone 39411 (TRBV10-1, TRBJ2-1)
CASSEWRGRTMSSSS

SEQ ID NO: 78823 - protein, 17 aa, Homo sapiens
  CDR3 for alpha chain variable domain of TCR clone 39412 (TRAV2, TRAJ22)
ILQVREADAAEQRQPTF

SEQ ID NO: 78824 - protein, 16 aa, Homo sapiens
  CDR3 for beta chain variable domain of TCR clone 39412 (TRBV2, TRBJ2-5)
CASSETQGVGEETQYF

SEQ ID NO: 78825 - protein, 14 aa, Homo sapiens
  CDR3 for alpha chain variable domain of TCR clone 39413 (TRAV1-2, TRAJ16)
CAVNRFSDGQKLPF

SEQ ID NO: 78826 - protein, 14 aa, Homo sapiens
  CDR3 for beta chain variable domain of TCR clone 39413 (TRBV19, TRBJ2-1)
CASPTFVLSGEQFF

SEQ ID NO: 78827 - protein, 14 aa, Homo sapiens
  CDR3 for alpha chain variable domain of TCR clone 39414 (TRAV12-2, TRAJ53)
CAVKGGGSNYKLTF

SEQ ID NO: 78828 - protein, 15 aa, Homo sapiens
  CDR3 for beta chain variable domain of TCR clone 39414 (TRBV11-2, TRBJ2-2)
CASSSDRVSAGELFF

SEQ ID NO: 78829 - protein, 12 aa, Homo sapiens
  CDR3 for alpha chain variable domain of TCR clone 39415 (TRAV2, TRAJ33)
CTFMDSNYQLIW

SEQ ID NO: 78830 - protein, 16 aa, Homo sapiens
  CDR3 for beta chain variable domain of TCR clone 39415 (TRBV2, TRBJ2-7)
CASSEPWTGPSYEQYF

SEQ ID NO: 78831 - protein, 11 aa, Homo sapiens
  CDR3 for alpha chain variable domain of TCR clone 39416 (TRAV21, TRAJ34)
CAHYNTDKLIF

SEQ ID NO: 78832 - protein, 13 aa, Homo sapiens
  CDR3 for beta chain variable domain of TCR clone 39416 (TRBV7-6, TRBJ1-2)
CASRLVADYGYTF

SEQ ID NO: 78833 - protein, 16 aa, Homo sapiens
  CDR3 for alpha chain variable domain of TCR clone 39417 (TRAV26-1, )
CIDIQNPDPAVYQLRD

SEQ ID NO: 78834 - protein, 19 aa, Homo sapiens
  CDR3 for beta chain variable domain of TCR clone 39417 (TRBV19, TRBJ2-5)
CASSIGQVTDFFRGETQYF

SEQ ID NO: 78835 - protein, 17 aa, Homo sapiens
  CDR3 for alpha chain variable domain of TCR clone 39418 (TRAV26-2, TRAJ42)
CILRDVGYGGSQGNLIF

SEQ ID NO: 78836 - protein, 16 aa, Homo sapiens
  CDR3 for beta chain variable domain of TCR clone 39418 (TRBV12-4, TRBJ2-7)
CASSLIGGTGTYERYF

SEQ ID NO: 78837 - protein, 14 aa, Homo sapiens
  CDR3 for alpha chain variable domain of TCR clone 39419 (TRAV27, TRAJ17)
CRSTIRAAGNRLTF

SEQ ID NO: 78838 - protein, 16 aa, Homo sapiens
  CDR3 for beta chain variable domain of TCR clone 39419 (TRBV5-7, TRBJ2-5)
CASTLAPAGGRETQYF

SEQ ID NO: 78839 - protein, 15 aa, Homo sapiens
  CDR3 for alpha chain variable domain of TCR clone 39420 (TRAV12-1, TRAJ9)
CVVSFGDTGGFKTIF

SEQ ID NO: 78840 - protein, 14 aa, Homo sapiens
  CDR3 for beta chain variable domain of TCR clone 39420 (TRBV12-4, TRBJ1-1)
CASSSARGYTEAFF

SEQ ID NO: 78841 - protein, 14 aa, Homo sapiens
  CDR3 for alpha chain variable domain of TCR clone 39421 (TRAV17, TRAJ15)
CATAPNQAGTALIF

SEQ ID NO: 78842 - protein, 14 aa, Homo sapiens
  CDR3 for beta chain variable domain of TCR clone 39421 (TRBV19, TRBJ2-7)
CASSMGQGGIEQYF

SEQ ID NO: 78843 - protein, 18 aa, Homo sapiens
  CDR3 for alpha chain variable domain of TCR clone 39422 (TRAV26-2, TRAJ45)
CILRLWGYSRGGADGLTF

SEQ ID NO: 78844 - protein, 17 aa, Homo sapiens
  CDR3 for beta chain variable domain of TCR clone 39422 (TRBV28, TRBJ2-3)
CASSPTPAGGRVDTQYF

SEQ ID NO: 78845 - protein, 12 aa, Homo sapiens
  CDR3 for alpha chain variable domain of TCR clone 39423 (TRAV12-3, TRAJ17)
CAMTLTGNKLTF

SEQ ID NO: 78846 - protein, 20 aa, Homo sapiens
  CDR3 for beta chain variable domain of TCR clone 39423 (TRBV19, TRBJ2-1)
CASSIPRTVTSTRLNNEQFF

SEQ ID NO: 78847 - protein, 16 aa, Homo sapiens
  CDR3 for alpha chain variable domain of TCR clone 39424 (TRAV12-2, TRAJ28)
CAVITDSGAGSYQLTF

SEQ ID NO: 78848 - protein, 17 aa, Homo sapiens
  CDR3 for beta chain variable domain of TCR clone 39424 (TRBV25-1, TRBJ2-1)
CASSAYGQGRGVYEQFF

SEQ ID NO: 78849 - protein, 14 aa, Homo sapiens
  CDR3 for alpha chain variable domain of TCR clone 39425 (TRAV13-1, TRAJ44)
CAAKATGTASKLTF

SEQ ID NO: 78850 - protein, 17 aa, Homo sapiens
  CDR3 for beta chain variable domain of TCR clone 39425 (TRBV7-3, TRBJ2-3)
CASRLMKRMRGADTQYF

SEQ ID NO: 78851 - protein, 15 aa, Homo sapiens
  CDR3 for alpha chain variable domain of TCR clone 39426 (TRAV12-3, TRAJ6)
CAMSATSGGSYIPKF

SEQ ID NO: 78852 - protein, 11 aa, Homo sapiens
  CDR3 for beta chain variable domain of TCR clone 39426 (TRBV20-1, TRBJ1-5)
CSAQGDQPQHF

SEQ ID NO: 78853 - protein, 14 aa, Homo sapiens
  CDR3 for alpha chain variable domain of TCR clone 39427 (TRAV13-1, TRAJ26)
CAASSAPYGQNFVF

SEQ ID NO: 78854 - protein, 17 aa, Homo sapiens
  CDR3 for beta chain variable domain of TCR clone 39427 (TRBV25-1, TRBJ2-5)
CASSRRGGRGGQETQYF

SEQ ID NO: 78855 - protein, 13 aa, Homo sapiens
  CDR3 for alpha chain variable domain of TCR clone 39428 (TRAV22, TRAJ29)
CAVGGSGNTPLVF

SEQ ID NO: 78856 - protein, 18 aa, Homo sapiens
  CDR3 for beta chain variable domain of TCR clone 39428 (TRBV20-1, TRBJ2-6)
CSAETTPTHGSGANVLTF

SEQ ID NO: 78857 - protein, 14 aa, Homo sapiens
  CDR3 for alpha chain variable domain of TCR clone 39429 (TRAV1-2, TRAJ16)
CAVNRFSDGQKLLF

SEQ ID NO: 78858 - protein, 16 aa, Homo sapiens
  CDR3 for beta chain variable domain of TCR clone 39429 (TRBV11-2, TRBJ1-2)
CASSLDTGGADYGYAF

SEQ ID NO: 78859 - protein, 14 aa, Homo sapiens
  CDR3 for alpha chain variable domain of TCR clone 39430 (TRAV1-2, TRAJ8)
CAVREDTGFQKLVF

SEQ ID NO: 78860 - protein, 16 aa, Homo sapiens
  CDR3 for beta chain variable domain of TCR clone 39430 (TRBV18, TRBJ2-3)
CASSPGGLASTDTQYF

SEQ ID NO: 78861 - protein, 15 aa, Homo sapiens
  CDR3 for alpha chain variable domain of TCR clone 39431 (TRAV2, TRAJ15)
CAVEDRGQAGTALIF

SEQ ID NO: 78862 - protein, 14 aa, Homo sapiens
  CDR3 for beta chain variable domain of TCR clone 39431 (TRBV25-1, TRBJ1-1)
CASTHLGGNTEAFF

SEQ ID NO: 78863 - protein, 13 aa, Homo sapiens
  CDR3 for alpha chain variable domain of TCR clone 39432 (TRAV20, TRAJ49)
CAVQARTGNQFYF

SEQ ID NO: 78864 - protein, 14 aa, Homo sapiens
  CDR3 for beta chain variable domain of TCR clone 39432 (TRBV7-2, TRBJ2-7)
RASSPKTSFYEQYF

SEQ ID NO: 78865 - protein, 15 aa, Homo sapiens
  CDR3 for alpha chain variable domain of TCR clone 39433 (TRAV21, TRAJ13)
CAVRPTSGRYQKVTF

SEQ ID NO: 78866 - protein, 15 aa, Homo sapiens
  CDR3 for beta chain variable domain of TCR clone 39433 (TRBV28, TRBJ2-7)
CASSPGGRGFYEQYF

SEQ ID NO: 78867 - protein, 13 aa, Homo sapiens
  CDR3 for alpha chain variable domain of TCR clone 39434 (TRAV12-2, TRAJ42)
CAVKRGSQGNLIF

SEQ ID NO: 78868 - protein, 16 aa, Homo sapiens
  CDR3 for beta chain variable domain of TCR clone 39434 (TRBV9, TRBJ2-2)
CASSAMGKGNIGELFF

SEQ ID NO: 78869 - protein, 15 aa, Homo sapiens
  CDR3 for alpha chain variable domain of TCR clone 39435 (TRAV34, TRAJ38)
CGADFTPGNNRKLIW

SEQ ID NO: 78870 - protein, 16 aa, Homo sapiens
  CDR3 for beta chain variable domain of TCR clone 39435 (TRBV12-5, TRBJ2-5)
CASGPRTSGNQETQYL

SEQ ID NO: 78871 - protein, 12 aa, Homo sapiens
  CDR3 for alpha chain variable domain of TCR clone 39436 (TRAV3, TRAJ43)
CAVGDPNNDMRF

SEQ ID NO: 78872 - protein, 15 aa, Homo sapiens
  CDR3 for beta chain variable domain of TCR clone 39436 (TRBV4-3, TRBJ2-7)
CASSQGDWGDYEQYF

SEQ ID NO: 78873 - protein, 17 aa, Homo sapiens
  CDR3 for alpha chain variable domain of TCR clone 39437 (TRAV36/DV7, TRAJ52)
CAVAQRAGGTSYGKLTF

SEQ ID NO: 78874 - protein, 17 aa, Homo sapiens
  CDR3 for beta chain variable domain of TCR clone 39437 (TRBV28, TRBJ2-5)
CASGTPEGDALQETQYF

SEQ ID NO: 78875 - protein, 15 aa, Homo sapiens
  CDR3 for alpha chain variable domain of TCR clone 39438 (TRAV35, TRAJ58)
CAGRRQETSGSRLTF

SEQ ID NO: 78876 - protein, 11 aa, Homo sapiens
  CDR3 for beta chain variable domain of TCR clone 39438 (TRBV11-2, TRBJ1-1)
CACSINTEAFF

SEQ ID NO: 78877 - protein, 15 aa, Homo sapiens
  CDR3 for alpha chain variable domain of TCR clone 39439 (TRAV8-1, TRAJ6)
CAVNTPPGGSYIPTF

SEQ ID NO: 78878 - protein, 14 aa, Homo sapiens
  CDR3 for beta chain variable domain of TCR clone 39439 (TRBV12-4, TRBJ2-1)
CASSLGQGASEQFL

SEQ ID NO: 78879 - protein, 14 aa, Homo sapiens
  CDR3 for alpha chain variable domain of TCR clone 39440 (TRAV20, TRAJ22)
CAVALGGSARQLTF

SEQ ID NO: 78880 - protein, 15 aa, Homo sapiens
  CDR3 for beta chain variable domain of TCR clone 39440 (TRBV7-2, TRBJ1-1)
CASSFAGEGDTEAFF

SEQ ID NO: 78881 - protein, 13 aa, Homo sapiens
  CDR3 for alpha chain variable domain of TCR clone 39441 (TRAV13-2, TRAJ21)
CAETSDNFNKFYF

SEQ ID NO: 78882 - protein, 14 aa, Homo sapiens
  CDR3 for beta chain variable domain of TCR clone 39441 (TRBV25-1, TRBJ1-1)
CASTHLGGNTEAFF

SEQ ID NO: 78883 - protein, 11 aa, Homo sapiens
  CDR3 for alpha chain variable domain of TCR clone 39442 (TRAV12-3, TRAJ43)
CAMSVSNDMRF

SEQ ID NO: 78884 - protein, 13 aa, Homo sapiens
  CDR3 for beta chain variable domain of TCR clone 39442 (TRBV20-1, TRBJ1-1)
CSGPLGGGTEAFF

SEQ ID NO: 78885 - protein, 17 aa, Homo sapiens
  CDR3 for alpha chain variable domain of TCR clone 39443 (TRAV3, TRAJ42)
CAVRDRDYGGSQGNLIF

SEQ ID NO: 78886 - protein, 17 aa, Homo sapiens
  CDR3 for beta chain variable domain of TCR clone 39443 (TRBV20-1, TRBJ2-1)
CSASSSGLAGSYNEQFF

SEQ ID NO: 78887 - protein, 14 aa, Homo sapiens
  CDR3 for alpha chain variable domain of TCR clone 39444 (TRAV1-2, TRAJ8)
CAVREDTGFQKLVF

SEQ ID NO: 78888 - protein, 14 aa, Homo sapiens
  CDR3 for beta chain variable domain of TCR clone 39444 (TRBV19, TRBJ1-5)
CASRAPDSFLSQHF

SEQ ID NO: 78889 - protein, 13 aa, Homo sapiens
  CDR3 for alpha chain variable domain of TCR clone 39445 (TRAV21, TRAJ57)
CAVIEGGSEKLVF

SEQ ID NO: 78890 - protein, 15 aa, Homo sapiens
  CDR3 for beta chain variable domain of TCR clone 39445 (TRBV10-3, TRBJ2-5)
CASSEFGRGQETQYF

SEQ ID NO: 78891 - protein, 15 aa, Homo sapiens
  CDR3 for alpha chain variable domain of TCR clone 39446 (TRAV27, TRAJ38)
CAARRNAGNNRKLIW

SEQ ID NO: 78892 - protein, 13 aa, Homo sapiens
  CDR3 for beta chain variable domain of TCR clone 39446 (TRBV12-5, TRBJ2-3)
CASGYRQSDTQYF

SEQ ID NO: 78893 - protein, 16 aa, Homo sapiens
  CDR3 for alpha chain variable domain of TCR clone 39447 (TRAV30, TRAJ24)
CGTEIVDADSWGEFQF

SEQ ID NO: 78894 - protein, 14 aa, Homo sapiens
  CDR3 for beta chain variable domain of TCR clone 39447 (TRBV12-5, TRBJ2-5)
CASGSRTHQETQYL

SEQ ID NO: 78895 - protein, 15 aa, Homo sapiens
  CDR3 for alpha chain variable domain of TCR clone 39448 (TRAV3, TRAJ20)
CAVREIKLSDYKLSF

SEQ ID NO: 78896 - protein, 15 aa, Homo sapiens
  CDR3 for beta chain variable domain of TCR clone 39448 (TRBV7-9, TRBJ1-6)
CASSSPGRGNSPLHF

SEQ ID NO: 78897 - protein, 14 aa, Homo sapiens
  CDR3 for alpha chain variable domain of TCR clone 39449 (TRAV12-3, TRAJ10)
SHLPLTGGGNKLTF

SEQ ID NO: 78898 - protein, 13 aa, Homo sapiens
  CDR3 for beta chain variable domain of TCR clone 39449 (TRBV2, TRBJ1-2)
CASTWTGEDGYTF

SEQ ID NO: 78899 - protein, 11 aa, Homo sapiens
  CDR3 for alpha chain variable domain of TCR clone 39450 (TRAV13-2, TRAJ26)
CAEIPGQNFVF

SEQ ID NO: 78900 - protein, 19 aa, Homo sapiens
  CDR3 for beta chain variable domain of TCR clone 39450 (TRBV19, TRBJ2-2)
CASTRPGLAGGRVTWELFF

SEQ ID NO: 78901 - protein, 13 aa, Homo sapiens
  CDR3 for alpha chain variable domain of TCR clone 39451 (TRAV21, TRAJ15)
SAVANQAGTALIF

SEQ ID NO: 78902 - protein, 13 aa, Homo sapiens
  CDR3 for beta chain variable domain of TCR clone 39451 (TRBV10-3, TRBJ2-7)
CASKLAVNYEQYF

SEQ ID NO: 78903 - protein, 10 aa, Homo sapiens
  CDR3 for alpha chain variable domain of TCR clone 39452 (TRAV8-3, TRAJ43)
CAVALADMRF

SEQ ID NO: 78904 - protein, 14 aa, Homo sapiens
  CDR3 for beta chain variable domain of TCR clone 39452 (TRBV4-2, TRBJ2-1)
CASGLDRAYNEQLF

SEQ ID NO: 78905 - protein, 15 aa, Homo sapiens
  CDR3 for alpha chain variable domain of TCR clone 39453 (TRAV3, TRAJ13)
CAVRVYSGGYQKVTF

SEQ ID NO: 78906 - protein, 15 aa, Homo sapiens
  CDR3 for beta chain variable domain of TCR clone 39453 (TRBV11-3, TRBJ2-1)
CASSLAGQTYNEQFF

SEQ ID NO: 78907 - protein, 13 aa, Homo sapiens
  CDR3 for alpha chain variable domain of TCR clone 39454 (TRAV12-3, TRAJ40)
CAMSARGTYKYIF

SEQ ID NO: 78908 - protein, 16 aa, Homo sapiens
  CDR3 for beta chain variable domain of TCR clone 39454 (TRBV20-1, TRBJ2-3)
CSGGAGLAGGQDTQYF

SEQ ID NO: 78909 - protein, 14 aa, Homo sapiens
  CDR3 for alpha chain variable domain of TCR clone 39455 (TRAV12-2, TRAJ13)
CAVKRTGGYQKVTF

SEQ ID NO: 78910 - protein, 11 aa, Homo sapiens
  CDR3 for beta chain variable domain of TCR clone 39455 (TRBV12-4, TRBJ2-3)
CASTATDTQYF

SEQ ID NO: 78911 - protein, 14 aa, Homo sapiens
  CDR3 for alpha chain variable domain of TCR clone 39456 (TRAV8-3, TRAJ4)
CAVGASGGYNKLIF

SEQ ID NO: 78912 - protein, 16 aa, Homo sapiens
  CDR3 for beta chain variable domain of TCR clone 39456 (TRBV4-3, TRBJ2-2)
RASSHLQGSGTGELFF

SEQ ID NO: 78913 - protein, 16 aa, Homo sapiens
  CDR3 for alpha chain variable domain of TCR clone 39457 (TRAV8-3, TRAJ10)
CAVGPIPTGGGNKLTF

SEQ ID NO: 78914 - protein, 16 aa, Homo sapiens
  CDR3 for beta chain variable domain of TCR clone 39457 (TRBV7-2, TRBJ2-5)
CASSSKWLSGQETQYF

SEQ ID NO: 78915 - protein, 14 aa, Homo sapiens
  CDR3 for alpha chain variable domain of TCR clone 39458 (TRAV26-1, TRAJ26)
CIVRATFLGQNFVF

SEQ ID NO: 78916 - protein, 16 aa, Homo sapiens
  CDR3 for beta chain variable domain of TCR clone 39458 (TRBV12-4, TRBJ2-7)
CASRSTGTGPSYEQYL

SEQ ID NO: 78917 - protein, 11 aa, Homo sapiens
  CDR3 for alpha chain variable domain of TCR clone 39459 (TRAV21, TRAJ48)
CAVDGHEKLTF

SEQ ID NO: 78918 - protein, 16 aa, Homo sapiens
  CDR3 for beta chain variable domain of TCR clone 39459 (TRBV12-4, TRBJ1-5)
CASSSGPRGSNQPQHF

SEQ ID NO: 78919 - protein, 12 aa, Homo sapiens
  CDR3 for alpha chain variable domain of TCR clone 39460 (TRAV21, TRAJ23)
CAVILQGGKLIF

SEQ ID NO: 78920 - protein, 14 aa, Homo sapiens
  CDR3 for beta chain variable domain of TCR clone 39460 (TRBV7-9, TRBJ1-4)
CAITEGEANEKLFF

SEQ ID NO: 78921 - protein, 14 aa, Homo sapiens
  CDR3 for alpha chain variable domain of TCR clone 39461 (TRAV1-2, TRAJ16)
CAVNRFSDGQKLLL

SEQ ID NO: 78922 - protein, 13 aa, Homo sapiens
  CDR3 for beta chain variable domain of TCR clone 39461 (TRBV7-9, TRBJ1-2)
CASSLKQNYGYTF

SEQ ID NO: 78923 - protein, 14 aa, Homo sapiens
  CDR3 for alpha chain variable domain of TCR clone 39462 (TRAV12-2, TRAJ53)
CAVKGGGSNYKLTF

SEQ ID NO: 78924 - protein, 14 aa, Homo sapiens
  CDR3 for beta chain variable domain of TCR clone 39462 (TRBV7-7, TRBJ2-2)
CATRKDSDTGELFF

SEQ ID NO: 78925 - protein, 15 aa, Homo sapiens
  CDR3 for alpha chain variable domain of TCR clone 39463 (TRAV12-3, TRAJ6)
CAMSATTGGSYIPTF

SEQ ID NO: 78926 - protein, 16 aa, Homo sapiens
  CDR3 for beta chain variable domain of TCR clone 39463 (TRBV20-1, TRBJ1-2)
FSASMGQGVANYGYTF

SEQ ID NO: 78927 - protein, 13 aa, Homo sapiens
  CDR3 for alpha chain variable domain of TCR clone 39464 (TRAV12-3, TRAJ13)
CAMSSGGYQKVTF

SEQ ID NO: 78928 - protein, 13 aa, Homo sapiens
  CDR3 for beta chain variable domain of TCR clone 39464 (TRBV20-1, TRBJ1-1)
FSAPPGGHTEAFF

SEQ ID NO: 78929 - protein, 14 aa, Homo sapiens
  CDR3 for alpha chain variable domain of TCR clone 39465 (TRAV12-2, TRAJ39)
CAVKGGNAGNMFTF

SEQ ID NO: 78930 - protein, 13 aa, Homo sapiens
  CDR3 for beta chain variable domain of TCR clone 39465 (TRBV12-4, TRBJ1-1)
CASSSGRGTEAFF

SEQ ID NO: 78931 - protein, 11 aa, Homo sapiens
  CDR3 for alpha chain variable domain of TCR clone 39466 (TRAV3, TRAJ21)
CAVGNFNKFYF

SEQ ID NO: 78932 - protein, 15 aa, Homo sapiens
  CDR3 for beta chain variable domain of TCR clone 39466 (TRBV10-2, TRBJ2-6)
CASSEQGTGANVLTF

SEQ ID NO: 78933 - protein, 14 aa, Homo sapiens
  CDR3 for alpha chain variable domain of TCR clone 39467 (TRAV35, TRAJ13)
CAGSPSGGYQKITF

SEQ ID NO: 78934 - protein, 17 aa, Homo sapiens
  CDR3 for beta chain variable domain of TCR clone 39467 (TRBV7-6, TRBJ2-5)
CASSPGLADPWGETQYF

SEQ ID NO: 78935 - protein, 14 aa, Homo sapiens
  CDR3 for alpha chain variable domain of TCR clone 39468 (TRAV8-6, TRAJ54)
CAVTEGRGAQKLVF

SEQ ID NO: 78936 - protein, 14 aa, Homo sapiens
  CDR3 for beta chain variable domain of TCR clone 39468 (TRBV27, TRBJ2-7)
CASGIGQGAQKQYF

SEQ ID NO: 78937 - protein, 14 aa, Homo sapiens
  CDR3 for alpha chain variable domain of TCR clone 39469 (TRAV2, TRAJ37)
CAVDFTSNTGKLIF

SEQ ID NO: 78938 - protein, 16 aa, Homo sapiens
  CDR3 for beta chain variable domain of TCR clone 39469 (TRBV12-4, TRBJ1-5)
CASSRPVGGSNQPQHF

SEQ ID NO: 78939 - protein, 17 aa, Homo sapiens
  CDR3 for alpha chain variable domain of TCR clone 39470 (TRAV17, TRAJ48)
CFLLLCYRRTGNEKLTF

SEQ ID NO: 78940 - protein, 13 aa, Homo sapiens
  CDR3 for beta chain variable domain of TCR clone 39470 (TRBV7-3, TRBJ1-1)
CASSQDWGAEAFF

SEQ ID NO: 78941 - protein, 18 aa, Homo sapiens
  CDR3 for alpha chain variable domain of TCR clone 39471 (TRAV8-3, TRAJ4)
WVRDPTSNDPGGYTKLIF

SEQ ID NO: 78942 - protein, 13 aa, Homo sapiens
  CDR3 for beta chain variable domain of TCR clone 39471 (TRBV20-1, TRBJ1-2)
CSATGIQGSGYTF

SEQ ID NO: 78943 - protein, 16 aa, Homo sapiens
  CDR3 for alpha chain variable domain of TCR clone 39472 (TRAV38-1, TRAJ37)
RAFKGDGSSNTGKLIF

SEQ ID NO: 78944 - protein, 13 aa, Homo sapiens
  CDR3 for beta chain variable domain of TCR clone 39472 (TRBV12-4, TRBJ2-5)
CASSLFRRETQYF

SEQ ID NO: 78945 - protein, 12 aa, Homo sapiens
  CDR3 for alpha chain variable domain of TCR clone 39473 (TRAV26-2, TRAJ21)
FILKGNFNKFYF

SEQ ID NO: 78946 - protein, 14 aa, Homo sapiens
  CDR3 for beta chain variable domain of TCR clone 39473 (TRBV12-4, TRBJ1-1)
CASSLGTGGTEAFF

SEQ ID NO: 78947 - protein, 14 aa, Homo sapiens
  CDR3 for alpha chain variable domain of TCR clone 39474 (TRAV12-3, TRAJ29)
CAMSPYSGNTPLVL

SEQ ID NO: 78948 - protein, 15 aa, Homo sapiens
  CDR3 for beta chain variable domain of TCR clone 39474 (TRBV27, TRBJ2-1)
CASSNGGGSSNEQFF

SEQ ID NO: 78949 - protein, 14 aa, Homo sapiens
  CDR3 for alpha chain variable domain of TCR clone 39475 (TRAV1-2, TRAJ16)
CAVNRFSAGQKLLF

SEQ ID NO: 78950 - protein, 13 aa, Homo sapiens
  CDR3 for beta chain variable domain of TCR clone 39475 (TRBV7-9, TRBJ1-2)
CASSLKQNYGYTF

SEQ ID NO: 78951 - protein, 10 aa, Homo sapiens
  CDR3 for alpha chain variable domain of TCR clone 39476 (TRAV1-2, TRAJ23)
CAGQGGKLIF

SEQ ID NO: 78952 - protein, 16 aa, Homo sapiens
  CDR3 for beta chain variable domain of TCR clone 39476 (TRBV7-9, TRBJ1-2)
CASSLGFSSGEDGYTF

SEQ ID NO: 78953 - protein, 13 aa, Homo sapiens
  CDR3 for alpha chain variable domain of TCR clone 39477 (TRAV8-3, TRAJ28)
CAVGAVGSYQLTF

SEQ ID NO: 78954 - protein, 15 aa, Homo sapiens
  CDR3 for beta chain variable domain of TCR clone 39477 (TRBV7-9, TRBJ1-5)
CASSQGHQPNHPQHF

SEQ ID NO: 78955 - protein, 21 aa, Homo sapiens
  CDR3 for alpha chain variable domain of TCR clone 39478 (TRAV26-1, TRAJ38)
CIVDNAGNNHIQNPDPAVYQL

SEQ ID NO: 78956 - protein, 12 aa, Homo sapiens
  CDR3 for beta chain variable domain of TCR clone 39478 (TRBV11-2, TRBJ2-2)
CASSLGGGELFF

SEQ ID NO: 78957 - protein, 13 aa, Homo sapiens
  CDR3 for alpha chain variable domain of TCR clone 39479 (TRAV13-2, TRAJ48)
CAEMDFGNEKLTF

SEQ ID NO: 78958 - protein, 13 aa, Homo sapiens
  CDR3 for beta chain variable domain of TCR clone 39479 (TRBV7-9, TRBJ1-2)
CASSLKQNYGDTF

SEQ ID NO: 78959 - protein, 14 aa, Homo sapiens
  CDR3 for alpha chain variable domain of TCR clone 39480 (TRAV23/DV6, TRAJ6)
CAASRSGGSYIPTF

SEQ ID NO: 78960 - protein, 17 aa, Homo sapiens
  CDR3 for beta chain variable domain of TCR clone 39480 (TRBV20-1, TRBJ2-1)
CSASASGLAGSYNEQFF

SEQ ID NO: 78961 - protein, 15 aa, Homo sapiens
  CDR3 for alpha chain variable domain of TCR clone 39481 (TRAV8-3, TRAJ45)
CASSYSGGGADGLTF

SEQ ID NO: 78962 - protein, 17 aa, Homo sapiens
  CDR3 for beta chain variable domain of TCR clone 39481 (TRBV7-8, TRBJ1-2)
CASSLRPLQGHLHGYTF

SEQ ID NO: 78963 - protein, 13 aa, Homo sapiens
  CDR3 for alpha chain variable domain of TCR clone 39482 (TRAV8-6, TRAJ49)
CAVITNTGNQFYF

SEQ ID NO: 78964 - protein, 15 aa, Homo sapiens
  CDR3 for beta chain variable domain of TCR clone 39482 (TRBV11-2, TRBJ1-6)
CASSLDPWAVSPLHF

SEQ ID NO: 78965 - protein, 11 aa, Homo sapiens
  CDR3 for alpha chain variable domain of TCR clone 39483 (TRAV2, TRAJ27)
CAVSNAGKSTF

SEQ ID NO: 78966 - protein, 11 aa, Homo sapiens
  CDR3 for beta chain variable domain of TCR clone 39483 (TRBV19, TRBJ1-1)
CASSIGSEAFF

SEQ ID NO: 78967 - protein, 11 aa, Homo sapiens
  CDR3 for alpha chain variable domain of TCR clone 39484 (TRAV13-1, TRAJ20)
CAASNDYKLSF

SEQ ID NO: 78968 - protein, 14 aa, Homo sapiens
  CDR3 for beta chain variable domain of TCR clone 39484 (TRBV5-4, TRBJ1-1)
CASSLDSRRDEAFF

SEQ ID NO: 78969 - protein, 19 aa, Homo sapiens
  CDR3 for alpha chain variable domain of TCR clone 39485 (TRAV2, TRAJ20)
ILQVREADAAVYRDCKLSF

SEQ ID NO: 78970 - protein, 13 aa, Homo sapiens
  CDR3 for beta chain variable domain of TCR clone 39485 (TRBV19, TRBJ1-2)
CASSVPGQDGYTF

SEQ ID NO: 78971 - protein, 14 aa, Homo sapiens
  CDR3 for alpha chain variable domain of TCR clone 39486 (TRAV1-2, TRAJ16)
CAVNRFSDGQKLLF

SEQ ID NO: 78972 - protein, 15 aa, Homo sapiens
  CDR3 for beta chain variable domain of TCR clone 39486 (TRBV9, TRBJ1-6)
CASSVAGTGDSPRHF

SEQ ID NO: 78973 - protein, 18 aa, Homo sapiens
  CDR3 for alpha chain variable domain of TCR clone 39487 (TRAV12-3, TRAJ52)
CAMSVGGAGGTSYGKLTF

SEQ ID NO: 78974 - protein, 13 aa, Homo sapiens
  CDR3 for beta chain variable domain of TCR clone 39487 (TRBV12-4, TRBJ1-2)
CASSLRQGKGYTF

SEQ ID NO: 78975 - protein, 15 aa, Homo sapiens
  CDR3 for alpha chain variable domain of TCR clone 39488 (TRAV8-1, TRAJ37)
CAVKKGSGNTGKLIF

SEQ ID NO: 78976 - protein, 15 aa, Homo sapiens
  CDR3 for beta chain variable domain of TCR clone 39488 (TRBV20-1, TRBJ2-7)
CSARDRVSGMDEQYF

SEQ ID NO: 78977 - protein, 13 aa, Homo sapiens
  CDR3 for alpha chain variable domain of TCR clone 39489 (TRAV1-1, TRAJ9)
CAAKNTGGFKTIF

SEQ ID NO: 78978 - protein, 15 aa, Homo sapiens
  CDR3 for beta chain variable domain of TCR clone 39489 (TRBV28, TRBJ2-1)
CASSIIAGGRSEQFF

SEQ ID NO: 78979 - protein, 15 aa, Homo sapiens
  CDR3 for alpha chain variable domain of TCR clone 39490 (TRAV12-3, TRAJ27)
CATRAYNTNAGKSTF

SEQ ID NO: 78980 - protein, 13 aa, Homo sapiens
  CDR3 for beta chain variable domain of TCR clone 39490 (TRBV11-2, TRBJ2-5)
CASSRGPSETQYF

SEQ ID NO: 78981 - protein, 13 aa, Homo sapiens
  CDR3 for alpha chain variable domain of TCR clone 39491 (TRAV26-1, TRAJ40)
CIVRGTGTYKYIF

SEQ ID NO: 78982 - protein, 16 aa, Homo sapiens
  CDR3 for beta chain variable domain of TCR clone 39491 (TRBV20-1, TRBJ1-1)
CSARDRTLSMNTEASF

SEQ ID NO: 78983 - protein, 15 aa, Homo sapiens
  CDR3 for alpha chain variable domain of TCR clone 39492 (TRAV17, TRAJ13)
CATDAGPGGYQKVTF

SEQ ID NO: 78984 - protein, 17 aa, Homo sapiens
  CDR3 for beta chain variable domain of TCR clone 39492 (TRBV11-2, TRBJ2-1)
CASSLYPPGVEYNEQFF

SEQ ID NO: 78985 - protein, 14 aa, Homo sapiens
  CDR3 for alpha chain variable domain of TCR clone 39493 (TRAV1-2, TRAJ8)
CAVREDTGFQKLVF

SEQ ID NO: 78986 - protein, 19 aa, Homo sapiens
  CDR3 for beta chain variable domain of TCR clone 39493 (TRBV11-3, TRBJ2-2)
CASSTRPGAKTTNTGELFF

SEQ ID NO: 78987 - protein, 16 aa, Homo sapiens
  CDR3 for alpha chain variable domain of TCR clone 39494 (TRAV30, TRAJ24)
CGTEIVDADSWGKFQF

SEQ ID NO: 78988 - protein, 12 aa, Homo sapiens
  CDR3 for beta chain variable domain of TCR clone 39494 (TRBV2, TRBJ2-1)
CAKREGYNEQFF

SEQ ID NO: 78989 - protein, 15 aa, Homo sapiens
  CDR3 for alpha chain variable domain of TCR clone 39495 (TRAV21, TRAJ53)
CATLNSGGSNYKLTF

SEQ ID NO: 78990 - protein, 13 aa, Homo sapiens
  CDR3 for beta chain variable domain of TCR clone 39495 (TRBV7-7, TRBJ2-3)
CASNLSRADTQYF

SEQ ID NO: 78991 - protein, 15 aa, Homo sapiens
  CDR3 for alpha chain variable domain of TCR clone 39496 (TRAV21, TRAJ13)
CAVPRSFWGLPESYL

SEQ ID NO: 78992 - protein, 15 aa, Homo sapiens
  CDR3 for beta chain variable domain of TCR clone 39496 (TRBV20-1, TRBJ2-7)
CSARDRVSGMDEQYF

SEQ ID NO: 78993 - protein, 16 aa, Homo sapiens
  CDR3 for alpha chain variable domain of TCR clone 39497 (TRAV30, TRAJ24)
CGTEIVDADSWGKFQF

SEQ ID NO: 78994 - protein, 17 aa, Homo sapiens
  CDR3 for beta chain variable domain of TCR clone 39497 (TRBV7-6, TRBJ2-5)
CASSSPQAGDPSETQYF

SEQ ID NO: 78995 - protein, 19 aa, Homo sapiens
  CDR3 for alpha chain variable domain of TCR clone 39498 (TRAV1-2, TRAJ26)
CLLPLCCERPDNYGQNFVF

SEQ ID NO: 78996 - protein, 13 aa, Homo sapiens
  CDR3 for beta chain variable domain of TCR clone 39498 (TRBV20-1, TRBJ2-2)
CSASAAGTGELFF

SEQ ID NO: 78997 - protein, 12 aa, Homo sapiens
  CDR3 for alpha chain variable domain of TCR clone 39499 (TRAV12-3, TRAJ40)
CAMSSGTYKYIF

SEQ ID NO: 78998 - protein, 12 aa, Homo sapiens
  CDR3 for beta chain variable domain of TCR clone 39499 (TRBV11-2, TRBJ2-2)
CASSLGGGELFF

SEQ ID NO: 78999 - protein, 14 aa, Homo sapiens
  CDR3 for alpha chain variable domain of TCR clone 39500 (TRAV1-1, TRAJ23)
CAVSIYNQGGKLIF

SEQ ID NO: 79000 - protein, 13 aa, Homo sapiens
  CDR3 for beta chain variable domain of TCR clone 39500 (TRBV7-3, TRBJ1-1)
CASSQDWGAEAFF

SEQ ID NO: 79001 - protein, 12 aa, Homo sapiens
  CDR3 for alpha chain variable domain of TCR clone 39501 (TRAV26-2, TRAJ21)
CILKGNFNKFYF

SEQ ID NO: 79002 - protein, 14 aa, Homo sapiens
  CDR3 for beta chain variable domain of TCR clone 39501 (TRBV7-9, TRBJ1-1)
CASTPLQSYTEAFF

SEQ ID NO: 79003 - protein, 12 aa, Homo sapiens
  CDR3 for alpha chain variable domain of TCR clone 39502 (TRAV10, TRAJ20)
CVASASDYKLSF

SEQ ID NO: 79004 - protein, 15 aa, Homo sapiens
  CDR3 for beta chain variable domain of TCR clone 39502 (TRBV3-1, TRBJ2-1)
CASSQDYTPRGEQFF

SEQ ID NO: 79005 - protein, 13 aa, Homo sapiens
  CDR3 for alpha chain variable domain of TCR clone 39503 (TRAV27, TRAJ42)
CAGARGGQGNLIF

SEQ ID NO: 79006 - protein, 17 aa, Homo sapiens
  CDR3 for beta chain variable domain of TCR clone 39503 (TRBV13, TRBJ2-3)
CASSLSRVAGGRNTQYF

SEQ ID NO: 79007 - protein, 16 aa, Homo sapiens
  CDR3 for alpha chain variable domain of TCR clone 39504 (TRAV8-4, TRAJ44)
CAVSASLTGTASKLTF

SEQ ID NO: 79008 - protein, 12 aa, Homo sapiens
  CDR3 for beta chain variable domain of TCR clone 39504 (TRBV5-1, TRBJ2-7)
CASSLGENEQYF

SEQ ID NO: 79009 - protein, 18 aa, Homo sapiens
  CDR3 for alpha chain variable domain of TCR clone 39505 (TRAV21, TRAJ52)
CAVRPSPAGGTSYGKPTF

SEQ ID NO: 79010 - protein, 13 aa, Homo sapiens
  CDR3 for beta chain variable domain of TCR clone 39505 (TRBV2, TRBJ1-5)
CATAGPGNQPQHF

SEQ ID NO: 79011 - protein, 14 aa, Homo sapiens
  CDR3 for alpha chain variable domain of TCR clone 39506 (TRAV8-3, TRAJ4)
CAVGASGGYNKLVF

SEQ ID NO: 79012 - protein, 16 aa, Homo sapiens
  CDR3 for beta chain variable domain of TCR clone 39506 (TRBV4-3, TRBJ2-2)
CASSHLQGSGTGELFF

SEQ ID NO: 79013 - protein, 14 aa, Homo sapiens
  CDR3 for alpha chain variable domain of TCR clone 39507 (TRAV8-4, TRAJ17)
CAVSEGAAGNKLTF

SEQ ID NO: 79014 - protein, 13 aa, Homo sapiens
  CDR3 for beta chain variable domain of TCR clone 39507 (TRBV19, TRBJ2-1)
CASSMYGVNEQFF

SEQ ID NO: 79015 - protein, 13 aa, Homo sapiens
  CDR3 for alpha chain variable domain of TCR clone 39508 (TRAV35, TRAJ40)
CAGQLSGTYEYIF

SEQ ID NO: 79016 - protein, 14 aa, Homo sapiens
  CDR3 for beta chain variable domain of TCR clone 39508 (TRBV3-1, TRBJ2-5)
CASSLQLAGETQYF

SEQ ID NO: 79017 - protein, 11 aa, Homo sapiens
  CDR3 for alpha chain variable domain of TCR clone 39509 (TRAV2, TRAJ23)
CAVETRGKLIF

SEQ ID NO: 79018 - protein, 14 aa, Homo sapiens
  CDR3 for beta chain variable domain of TCR clone 39509 (TRBV2, TRBJ2-3)
CASSEGQNTDTQYV

SEQ ID NO: 79019 - protein, 14 aa, Homo sapiens
  CDR3 for alpha chain variable domain of TCR clone 39510 (TRAV1-2, TRAJ16)
CAVNRFSDGQKLLF

SEQ ID NO: 79020 - protein, 16 aa, Homo sapiens
  CDR3 for beta chain variable domain of TCR clone 39510 (TRBV11-2, TRBJ1-2)
CASSLDTGGADYGCTF

SEQ ID NO: 79021 - protein, 14 aa, Homo sapiens
  CDR3 for alpha chain variable domain of TCR clone 39511 (TRAV1-2, TRAJ16)
CAANRFSDGQKLLF

SEQ ID NO: 79022 - protein, 13 aa, Homo sapiens
  CDR3 for beta chain variable domain of TCR clone 39511 (TRBV7-9, TRBJ1-2)
CASSLKQNYGYTF

SEQ ID NO: 79023 - protein, 13 aa, Homo sapiens
  CDR3 for alpha chain variable domain of TCR clone 39512 (TRAV29/DV5, TRAJ31)
CAASRNNNAGLMF

SEQ ID NO: 79024 - protein, 12 aa, Homo sapiens
  CDR3 for beta chain variable domain of TCR clone 39512 (TRBV11-2, TRBJ2-2)
CASSLGGGELFF

SEQ ID NO: 79025 - protein, 16 aa, Homo sapiens
  CDR3 for alpha chain variable domain of TCR clone 39513 (TRAV30, TRAJ24)
CGTEIVDADSWGKFQF

SEQ ID NO: 79026 - protein, 14 aa, Homo sapiens
  CDR3 for beta chain variable domain of TCR clone 39513 (TRBV7-3, TRBJ2-2)
CASSSGGYTGELFF

SEQ ID NO: 79027 - protein, 17 aa, Homo sapiens
  CDR3 for alpha chain variable domain of TCR clone 39514 (TRAV1-2, TRAJ6)
CAVRDTTRTGGSYIPTF

SEQ ID NO: 79028 - protein, 12 aa, Homo sapiens
  CDR3 for beta chain variable domain of TCR clone 39514 (TRBV28, TRBJ1-2)
CASSRPNYGYTF

SEQ ID NO: 79029 - protein, 12 aa, Homo sapiens
  CDR3 for alpha chain variable domain of TCR clone 39515 (TRAV13-2, TRAJ23)
CAERHRGGKLIF

SEQ ID NO: 79030 - protein, 15 aa, Homo sapiens
  CDR3 for beta chain variable domain of TCR clone 39515 (TRBV19, TRBJ1-2)
CASSVGQVPNYGYTF

SEQ ID NO: 79031 - protein, 15 aa, Homo sapiens
  CDR3 for alpha chain variable domain of TCR clone 39516 (TRAV26-1, TRAJ44)
CIVRIGTGTASKLTF

SEQ ID NO: 79032 - protein, 15 aa, Homo sapiens
  CDR3 for beta chain variable domain of TCR clone 39516 (TRBV7-6, TRBJ2-1)
CASSSLVGEGNEQFF

SEQ ID NO: 79033 - protein, 16 aa, Homo sapiens
  CDR3 for alpha chain variable domain of TCR clone 39517 (TRAV8-1, TRAJ42)
CAVTSRYGGSQGNLIF

SEQ ID NO: 79034 - protein, 12 aa, Homo sapiens
  CDR3 for beta chain variable domain of TCR clone 39517 (TRBV6-3, TRBJ2-7)
CASSLGRRELYF

SEQ ID NO: 79035 - protein, 15 aa, Homo sapiens
  CDR3 for alpha chain variable domain of TCR clone 39518 (TRAV12-1, TRAJ41)
CVVSSRTGSGYALNF

SEQ ID NO: 79036 - protein, 11 aa, Homo sapiens
  CDR3 for beta chain variable domain of TCR clone 39518 (TRBV6-4, TRBJ2-1)
CASSDSYAQFF

SEQ ID NO: 79037 - protein, 12 aa, Homo sapiens
  CDR3 for alpha chain variable domain of TCR clone 39519 (TRAV3, TRAJ43)
CAVRDPNNDMRF

SEQ ID NO: 79038 - protein, 13 aa, Homo sapiens
  CDR3 for beta chain variable domain of TCR clone 39519 (TRBV19, TRBJ1-2)
CASSVPGQDGYAF

SEQ ID NO: 79039 - protein, 13 aa, Homo sapiens
  CDR3 for alpha chain variable domain of TCR clone 39520 (TRAV39, TRAJ33)
CAANPDSNYPLIW

SEQ ID NO: 79040 - protein, 13 aa, Homo sapiens
  CDR3 for beta chain variable domain of TCR clone 39520 (TRBV18, TRBJ1-1)
CASSGGRNTEAFF

SEQ ID NO: 79041 - protein, 14 aa, Homo sapiens
  CDR3 for alpha chain variable domain of TCR clone 39521 (TRAV38-1, TRAJ40)
CALRPTSGTYKYIF

SEQ ID NO: 79042 - protein, 13 aa, Homo sapiens
  CDR3 for beta chain variable domain of TCR clone 39521 (TRBV6-1, TRBJ1-1)
CASSRQGNTEAFF

SEQ ID NO: 79043 - protein, 14 aa, Homo sapiens
  CDR3 for alpha chain variable domain of TCR clone 39522 (TRAV12-1, TRAJ17)
CVMNPKAAGNKLTF

SEQ ID NO: 79044 - protein, 16 aa, Homo sapiens
  CDR3 for beta chain variable domain of TCR clone 39522 (TRBV20-1, TRBJ2-1)
CSASASGYSSYNEQFF

SEQ ID NO: 79045 - protein, 14 aa, Homo sapiens
  CDR3 for alpha chain variable domain of TCR clone 39523 (TRAV12-3, TRAJ33)
CAMSVPGSNYQLIW

SEQ ID NO: 79046 - protein, 12 aa, Homo sapiens
  CDR3 for beta chain variable domain of TCR clone 39523 (TRBV7-8, TRBJ2-7)
CASSLGDREQYF

SEQ ID NO: 79047 - protein, 19 aa, Homo sapiens
  CDR3 for alpha chain variable domain of TCR clone 39524 (TRAV12-1, TRAJ45)
CVVTHDVGYSGGGADRLTF

SEQ ID NO: 79048 - protein, 14 aa, Homo sapiens
  CDR3 for beta chain variable domain of TCR clone 39524 (TRBV6-1, TRBJ1-2)
CASSAGRGPYGYTF

SEQ ID NO: 79049 - protein, 13 aa, Homo sapiens
  CDR3 for alpha chain variable domain of TCR clone 39525 (TRAV8-3, TRAJ28)
CAVGAVGSYQLTF

SEQ ID NO: 79050 - protein, 15 aa, Homo sapiens
  CDR3 for beta chain variable domain of TCR clone 39525 (TRBV20-1, TRBJ2-7)
CSARDRVSGMDEQYF

SEQ ID NO: 79051 - protein, 14 aa, Homo sapiens
  CDR3 for alpha chain variable domain of TCR clone 39526 (TRAV12-1, TRAJ3)
YVVNPGSSASKIIF

SEQ ID NO: 79052 - protein, 18 aa, Homo sapiens
  CDR3 for beta chain variable domain of TCR clone 39526 (TRBV4-2, TRBJ1-2)
CASSQDKVGHTVNYGYTF

SEQ ID NO: 79053 - protein, 18 aa, Homo sapiens
  CDR3 for alpha chain variable domain of TCR clone 39527 (TRAV13-1, TRAJ52)
CAASKRSAGGTSYGKLTF

SEQ ID NO: 79054 - protein, 13 aa, Homo sapiens
  CDR3 for beta chain variable domain of TCR clone 39527 (TRBV12-4, TRBJ1-2)
CVSSLRQGKGYTF

SEQ ID NO: 79055 - protein, 11 aa, Homo sapiens
  CDR3 for alpha chain variable domain of TCR clone 39528 (TRAV3, TRAJ13)
CAVTSYQKVTF

SEQ ID NO: 79056 - protein, 14 aa, Homo sapiens
  CDR3 for beta chain variable domain of TCR clone 39528 (TRBV5-1, TRBJ1-1)
CASSLQGASTEAFF

SEQ ID NO: 79057 - protein, 15 aa, Homo sapiens
  CDR3 for alpha chain variable domain of TCR clone 39529 (TRAV12-2, TRAJ9)
CAVNNERTGGFKTIF

SEQ ID NO: 79058 - protein, 14 aa, Homo sapiens
  CDR3 for beta chain variable domain of TCR clone 39529 (TRBV4-1, TRBJ1-4)
CASGQERKNEKLFF

SEQ ID NO: 79059 - protein, 15 aa, Homo sapiens
  CDR3 for alpha chain variable domain of TCR clone 39530 (TRAV34, TRAJ38)
CGADFTPGNNRKLIG

SEQ ID NO: 79060 - protein, 16 aa, Homo sapiens
  CDR3 for beta chain variable domain of TCR clone 39530 (TRBV6-1, TRBJ2-3)
CASSEVIGQGTDTQYF

SEQ ID NO: 79061 - protein, 15 aa, Homo sapiens
  CDR3 for alpha chain variable domain of TCR clone 39531 (TRAV2, TRAJ24)
CAVVHLKNSWGKLQF

SEQ ID NO: 79062 - protein, 16 aa, Homo sapiens
  CDR3 for beta chain variable domain of TCR clone 39531 (TRBV7-7, TRBJ2-3)
CASSPGTSGSTDTQYF

SEQ ID NO: 79063 - protein, 13 aa, Homo sapiens
  CDR3 for alpha chain variable domain of TCR clone 39532 (TRAV27, TRAJ6)
CAGGTRGSYIPTF

SEQ ID NO: 79064 - protein, 13 aa, Homo sapiens
  CDR3 for beta chain variable domain of TCR clone 39532 (TRBV3-1, TRBJ1-1)
CASSPGVITEAFF

SEQ ID NO: 79065 - protein, 15 aa, Homo sapiens
  CDR3 for alpha chain variable domain of TCR clone 39533 (TRAV29/DV5, TRAJ24)
CAASGATDRWGKFQF

SEQ ID NO: 79066 - protein, 12 aa, Homo sapiens
  CDR3 for beta chain variable domain of TCR clone 39533 (TRBV11-2, TRBJ2-2)
CASSLPTGELFF

SEQ ID NO: 79067 - protein, 15 aa, Homo sapiens
  CDR3 for alpha chain variable domain of TCR clone 39534 (TRAV35, TRAJ40)
CDGQLGTSGTYKYIF

SEQ ID NO: 79068 - protein, 14 aa, Homo sapiens
  CDR3 for beta chain variable domain of TCR clone 39534 (TRBV7-3, TRBJ2-1)
CVSSLAGGTNEQFF

SEQ ID NO: 79069 - protein, 14 aa, Homo sapiens
  CDR3 for alpha chain variable domain of TCR clone 39535 (TRAV13-1, TRAJ44)
CAAKATGTASKITF

SEQ ID NO: 79070 - protein, 17 aa, Homo sapiens
  CDR3 for beta chain variable domain of TCR clone 39535 (TRBV7-3, TRBJ2-3)
RASSLMKRMRGADTQYF

SEQ ID NO: 79071 - protein, 15 aa, Homo sapiens
  CDR3 for alpha chain variable domain of TCR clone 39536 (TRAV17, TRAJ52)
CATEAGGTSYGKLTF

SEQ ID NO: 79072 - protein, 13 aa, Homo sapiens
  CDR3 for beta chain variable domain of TCR clone 39536 (TRBV28, TRBJ1-5)
CQQFGVLVKPQHF

SEQ ID NO: 79073 - protein, 15 aa, Homo sapiens
  CDR3 for alpha chain variable domain of TCR clone 39537 (TRAV21, TRAJ24)
CAARSSTDSWGKLQF

SEQ ID NO: 79074 - protein, 14 aa, Homo sapiens
  CDR3 for beta chain variable domain of TCR clone 39537 (TRBV6-1, TRBJ1-3)
CASVQGGGGNTIYF

SEQ ID NO: 79075 - protein, 18 aa, Homo sapiens
  CDR3 for alpha chain variable domain of TCR clone 39538 (TRAV1-2, TRAJ36)
CAVRDRRMSQTGANNLFF

SEQ ID NO: 79076 - protein, 14 aa, Homo sapiens
  CDR3 for beta chain variable domain of TCR clone 39538 (TRBV7-2, TRBJ2-5)
CASSPRGSSETQYF

SEQ ID NO: 79077 - protein, 14 aa, Homo sapiens
  CDR3 for alpha chain variable domain of TCR clone 39539 (TRAV12-3, TRAJ10)
SHLPLTGGGNKLTF

SEQ ID NO: 79078 - protein, 13 aa, Homo sapiens
  CDR3 for beta chain variable domain of TCR clone 39539 (TRBV19, TRBJ2-2)
CASSQRSTGELFF

SEQ ID NO: 79079 - protein, 15 aa, Homo sapiens
  CDR3 for alpha chain variable domain of TCR clone 39540 (TRAV21, TRAJ40)
CAVRPQTSGAYKYIF

SEQ ID NO: 79080 - protein, 13 aa, Homo sapiens
  CDR3 for beta chain variable domain of TCR clone 39540 (TRBV7-2, TRBJ2-2)
CASSSVRAGELFF

SEQ ID NO: 79081 - protein, 12 aa, Homo sapiens
  CDR3 for alpha chain variable domain of TCR clone 39541 (TRAV13-1, TRAJ27)
CASHTNAGKSTF

SEQ ID NO: 79082 - protein, 14 aa, Homo sapiens
  CDR3 for beta chain variable domain of TCR clone 39541 (TRBV19, TRBJ2-2)
CASSGQGIAGELFF

SEQ ID NO: 79083 - protein, 15 aa, Homo sapiens
  CDR3 for alpha chain variable domain of TCR clone 39542 (TRAV17, TRAJ57)
CATGPSQGGSEKLVF

SEQ ID NO: 79084 - protein, 16 aa, Homo sapiens
  CDR3 for beta chain variable domain of TCR clone 39542 (TRBV12-4, TRBJ1-5)
CASSRPVGGSNEPQHF

SEQ ID NO: 79085 - protein, 17 aa, Homo sapiens
  CDR3 for alpha chain variable domain of TCR clone 39543 (TRAV3, TRAJ6)
CAVRDGPRAGGSYIPTF

SEQ ID NO: 79086 - protein, 18 aa, Homo sapiens
  CDR3 for beta chain variable domain of TCR clone 39543 (TRBV25-1, TRBJ1-2)
CASSGPQNGQGLIFGYTF

SEQ ID NO: 79087 - protein, 15 aa, Homo sapiens
  CDR3 for alpha chain variable domain of TCR clone 39544 (TRAV8-3, TRAJ11)
CAVGLLKSGYSTLTF

SEQ ID NO: 79088 - protein, 16 aa, Homo sapiens
  CDR3 for beta chain variable domain of TCR clone 39544 (TRBV7-9, TRBJ1-2)
CASSLGFSSGEDGYTF

SEQ ID NO: 79089 - protein, 12 aa, Homo sapiens
  CDR3 for alpha chain variable domain of TCR clone 39545 (TRAV12-3, TRAJ5)
CAMDTGRIALTF

SEQ ID NO: 79090 - protein, 13 aa, Homo sapiens
  CDR3 for beta chain variable domain of TCR clone 39545 (TRBV7-7, TRBJ2-2)
CASSLTSAGELFF

SEQ ID NO: 79091 - protein, 16 aa, Homo sapiens
  CDR3 for alpha chain variable domain of TCR clone 39546 (TRAV8-3, TRAJ44)
CAVGTLMTGTASKLTL

SEQ ID NO: 79092 - protein, 13 aa, Homo sapiens
  CDR3 for beta chain variable domain of TCR clone 39546 (TRBV11-2, TRBJ2-1)
CASSLRLTHEQFF

SEQ ID NO: 79093 - protein, 16 aa, Homo sapiens
  CDR3 for alpha chain variable domain of TCR clone 39547 (TRAV3, TRAJ10)
CAVRDMRAGGGKKLTF

SEQ ID NO: 79094 - protein, 15 aa, Homo sapiens
  CDR3 for beta chain variable domain of TCR clone 39547 (TRBV11-2, TRBJ1-6)
CASTGFGTAVSPLHF

SEQ ID NO: 79095 - protein, 17 aa, Homo sapiens
  CDR3 for alpha chain variable domain of TCR clone 39548 (TRAV26-1, TRAJ53)
CIVRVDDSGGSNYKLTF

SEQ ID NO: 79096 - protein, 13 aa, Homo sapiens
  CDR3 for beta chain variable domain of TCR clone 39548 (TRBV10-3, TRBJ2-7)
CASKLAVNYEQYF

SEQ ID NO: 79097 - protein, 12 aa, Homo sapiens
  CDR3 for alpha chain variable domain of TCR clone 39549 (TRAV1-1, TRAJ9)
CAVDTGGFKTIF

SEQ ID NO: 79098 - protein, 20 aa, Homo sapiens
  CDR3 for beta chain variable domain of TCR clone 39549 (TRBV7-8, TRBJ2-2)
CASSHLFPGPTIHITGELFF

SEQ ID NO: 79099 - protein, 15 aa, Homo sapiens
  CDR3 for alpha chain variable domain of TCR clone 39550 (TRAV36/DV7, TRAJ53)
WEGENSGGSNYKLTF

SEQ ID NO: 79100 - protein, 13 aa, Homo sapiens
  CDR3 for beta chain variable domain of TCR clone 39550 (TRBV10-3, TRBJ2-7)
CASKLAVNYEQYF

SEQ ID NO: 79101 - protein, 13 aa, Homo sapiens
  CDR3 for alpha chain variable domain of TCR clone 39551 (TRAV21, TRAJ20)
CAVGLRVDYKLSF

SEQ ID NO: 79102 - protein, 13 aa, Homo sapiens
  CDR3 for beta chain variable domain of TCR clone 39551 (TRBV6-1, TRBJ1-1)
CASSLQGNTEAFF

SEQ ID NO: 79103 - protein, 15 aa, Homo sapiens
  CDR3 for alpha chain variable domain of TCR clone 39552 (TRAV17, TRAJ57)
CATGPSQGGSEKLVF

SEQ ID NO: 79104 - protein, 14 aa, Homo sapiens
  CDR3 for beta chain variable domain of TCR clone 39552 (TRBV7-6, TRBJ2-3)
CASSLGTVTDTQYF

SEQ ID NO: 79105 - protein, 11 aa, Homo sapiens
  CDR3 for alpha chain variable domain of TCR clone 39553 (TRAV12-1, TRAJ30)
CVVKGQDKIIF

SEQ ID NO: 79106 - protein, 12 aa, Homo sapiens
  CDR3 for beta chain variable domain of TCR clone 39553 (TRBV27, TRBJ2-2)
CASKLFTGELFF

SEQ ID NO: 79107 - protein, 11 aa, Homo sapiens
  CDR3 for alpha chain variable domain of TCR clone 39554 (TRAV21, TRAJ31)
CAVRNNARLMF

SEQ ID NO: 79108 - protein, 15 aa, Homo sapiens
  CDR3 for beta chain variable domain of TCR clone 39554 (TRBV27, TRBJ2-1)
CASSNGGGSSNEQFF

SEQ ID NO: 79109 - protein, 13 aa, Homo sapiens
  CDR3 for alpha chain variable domain of TCR clone 39555 (TRAV8-3, TRAJ40)
CAVVVSGAYKYIF

SEQ ID NO: 79110 - protein, 15 aa, Homo sapiens
  CDR3 for beta chain variable domain of TCR clone 39555 (TRBV7-2, TRBJ2-1)
CASRKTGSSYNEQFF

SEQ ID NO: 79111 - protein, 14 aa, Homo sapiens
  CDR3 for alpha chain variable domain of TCR clone 39556 (TRAV38-1, TRAJ40)
CALRPTSGTYKYIF

SEQ ID NO: 79112 - protein, 14 aa, Homo sapiens
  CDR3 for beta chain variable domain of TCR clone 39556 (TRBV25-1, TRBJ1-1)
CASTHLGGKTEAFF

SEQ ID NO: 79113 - protein, 15 aa, Homo sapiens
  CDR3 for alpha chain variable domain of TCR clone 39557 (TRAV3, TRAJ11)
CAVRDRGSGYSTLTF

SEQ ID NO: 79114 - protein, 13 aa, Homo sapiens
  CDR3 for beta chain variable domain of TCR clone 39557 (TRBV7-9, TRBJ1-2)
CANSLKQNYGYTF

SEQ ID NO: 79115 - protein, 13 aa, Homo sapiens
  CDR3 for alpha chain variable domain of TCR clone 39558 (TRAV17, TRAJ15)
CATDARAGTALIF

SEQ ID NO: 79116 - protein, 15 aa, Homo sapiens
  CDR3 for beta chain variable domain of TCR clone 39558 (TRBV20-1, TRBJ2-7)
CSTRDRVSGMDEQYF

SEQ ID NO: 79117 - protein, 14 aa, Homo sapiens
  CDR3 for alpha chain variable domain of TCR clone 39559 (TRAV16, TRAJ15)
CALSGPQAGTALIF

SEQ ID NO: 79118 - protein, 12 aa, Homo sapiens
  CDR3 for beta chain variable domain of TCR clone 39559 (TRBV18, TRBJ2-5)
CASPPSKETQYF

SEQ ID NO: 79119 - protein, 14 aa, Homo sapiens
  CDR3 for alpha chain variable domain of TCR clone 39560 (TRAV21, TRAJ35)
CAVMPIGFVNVLHC

SEQ ID NO: 79120 - protein, 12 aa, Homo sapiens
  CDR3 for beta chain variable domain of TCR clone 39560 (TRBV7-9, TRBJ2-7)
CASSIKREEQYF

SEQ ID NO: 79121 - protein, 14 aa, Homo sapiens
  CDR3 for alpha chain variable domain of TCR clone 39561 (TRAV1-2, TRAJ16)
CAVNRSSDGQKLLF

SEQ ID NO: 79122 - protein, 13 aa, Homo sapiens
  CDR3 for beta chain variable domain of TCR clone 39561 (TRBV7-9, TRBJ1-2)
CASSLKQNYGYTF

SEQ ID NO: 79123 - protein, 17 aa, Homo sapiens
  CDR3 for alpha chain variable domain of TCR clone 39562 (TRAV4, TRAJ42)
CLAGVLNYGGSQGNLIF

SEQ ID NO: 79124 - protein, 12 aa, Homo sapiens
  CDR3 for beta chain variable domain of TCR clone 39562 (TRBV20-1, TRBJ2-1)
CSAQYTYNEQFF

SEQ ID NO: 79125 - protein, 14 aa, Homo sapiens
  CDR3 for alpha chain variable domain of TCR clone 39563 (TRAV8-6, TRAJ34)
CAVSDQGNTDKLIF

SEQ ID NO: 79126 - protein, 15 aa, Homo sapiens
  CDR3 for beta chain variable domain of TCR clone 39563 (TRBV2, TRBJ2-7)
CASGEGLARSYEQYF

SEQ ID NO: 79127 - protein, 15 aa, Homo sapiens
  CDR3 for alpha chain variable domain of TCR clone 39564 (TRAV17, TRAJ13)
CATDAGSGGYQEVTF

SEQ ID NO: 79128 - protein, 17 aa, Homo sapiens
  CDR3 for beta chain variable domain of TCR clone 39564 (TRBV11-2, TRBJ2-1)
CASSLYPPGVEYNEQFF

SEQ ID NO: 79129 - protein, 10 aa, Homo sapiens
  CDR3 for alpha chain variable domain of TCR clone 39565 (TRAV26-1, TRAJ22)
CIVSLNFLWF

SEQ ID NO: 79130 - protein, 15 aa, Homo sapiens
  CDR3 for beta chain variable domain of TCR clone 39565 (TRBV4-2, TRBJ1-2)
CASSQRTGGRDGYTF

SEQ ID NO: 79131 - protein, 10 aa, Homo sapiens
  CDR3 for alpha chain variable domain of TCR clone 39566 (TRAV16, TRAJ22)
SAMYLRQLTF

SEQ ID NO: 79132 - protein, 15 aa, Homo sapiens
  CDR3 for beta chain variable domain of TCR clone 39566 (TRBV12-4, TRBJ2-5)
CQQFFVRGRRETQYF

SEQ ID NO: 79133 - protein, 16 aa, Homo sapiens
  CDR3 for alpha chain variable domain of TCR clone 39567 (TRAV38-1, TRAJ37)
CAFEGDGSSNTGKLIF

SEQ ID NO: 79134 - protein, 13 aa, Homo sapiens
  CDR3 for beta chain variable domain of TCR clone 39567 (TRBV12-4, TRBJ2-5)
CASSLFRRETQYF

SEQ ID NO: 79135 - protein, 14 aa, Homo sapiens
  CDR3 for alpha chain variable domain of TCR clone 39568 (TRAV12-3, TRAJ10)
SHLPLTGGGNKLTF

SEQ ID NO: 79136 - protein, 14 aa, Homo sapiens
  CDR3 for beta chain variable domain of TCR clone 39568 (TRBV7-8, TRBJ2-5)
CASSATGGQETQYF

SEQ ID NO: 79137 - protein, 11 aa, Homo sapiens
  CDR3 for alpha chain variable domain of TCR clone 39569 (TRAV16, TRAJ31)
CALFNNARLMF

SEQ ID NO: 79138 - protein, 15 aa, Homo sapiens
  CDR3 for beta chain variable domain of TCR clone 39569 (TRBV18, TRBJ1-1)
CASSPRQGGNTEAFF

SEQ ID NO: 79139 - protein, 15 aa, Homo sapiens
  CDR3 for alpha chain variable domain of TCR clone 39570 (TRAV8-1, TRAJ6)
CAVNTSPGGSYIPTF

SEQ ID NO: 79140 - protein, 15 aa, Homo sapiens
  CDR3 for beta chain variable domain of TCR clone 39570 (TRBV11-2, TRBJ2-2)
CASSSDRVNAGELFF

SEQ ID NO: 79141 - protein, 14 aa, Homo sapiens
  CDR3 for alpha chain variable domain of TCR clone 39571 (TRAV12-1, TRAJ30)
CVVNIGGRDDKIIV

SEQ ID NO: 79142 - protein, 13 aa, Homo sapiens
  CDR3 for beta chain variable domain of TCR clone 39571 (TRBV12-5, TRBJ2-1)
CASGLGRGNEQFF

SEQ ID NO: 79143 - protein, 13 aa, Homo sapiens
  CDR3 for alpha chain variable domain of TCR clone 39572 (TRAV17, TRAJ54)
CATSWGGAQKLVF

SEQ ID NO: 79144 - protein, 15 aa, Homo sapiens
  CDR3 for beta chain variable domain of TCR clone 39572 (TRBV4-3, TRBJ2-3)
CASSPSLLSTDAQYF

SEQ ID NO: 79145 - protein, 15 aa, Homo sapiens
  CDR3 for alpha chain variable domain of TCR clone 39573 (TRAV13-2, TRAJ50)
CAEEPLKTSYDKVIF

SEQ ID NO: 79146 - protein, 16 aa, Homo sapiens
  CDR3 for beta chain variable domain of TCR clone 39573 (TRBV5-1, TRBJ1-1)
CASSSGGNSLTTEAFF

SEQ ID NO: 79147 - protein, 11 aa, Homo sapiens
  CDR3 for alpha chain variable domain of TCR clone 39574 (TRAV35, TRAJ30)
CAGEGDDKIIF

SEQ ID NO: 79148 - protein, 17 aa, Homo sapiens
  CDR3 for beta chain variable domain of TCR clone 39574 (TRBV11-2, TRBJ2-1)
CASSLYPPGVEYNEQFF

SEQ ID NO: 79149 - protein, 16 aa, Homo sapiens
  CDR3 for alpha chain variable domain of TCR clone 39575 (TRAV30, TRAJ24)
CGTEIVDADSWGKFHF

SEQ ID NO: 79150 - protein, 15 aa, Homo sapiens
  CDR3 for beta chain variable domain of TCR clone 39575 (TRBV20-1, TRBJ2-7)
CSARDRVSGMDEQYF

SEQ ID NO: 79151 - protein, 14 aa, Homo sapiens
  CDR3 for alpha chain variable domain of TCR clone 39576 (TRAV2, TRAJ37)
CAVEDQGNTGELIF

SEQ ID NO: 79152 - protein, 14 aa, Homo sapiens
  CDR3 for beta chain variable domain of TCR clone 39576 (TRBV18, TRBJ2-1)
CASSPQGRFNEQFF

SEQ ID NO: 79153 - protein, 15 aa, Homo sapiens
  CDR3 for alpha chain variable domain of TCR clone 39577 (TRAV12-2, TRAJ43)
CAFDVRFGAGTRLTV

SEQ ID NO: 79154 - protein, 18 aa, Homo sapiens
  CDR3 for beta chain variable domain of TCR clone 39577 (TRBV20-1, TRBJ2-3)
CSASGLAGGPGTTDTQYF

SEQ ID NO: 79155 - protein, 14 aa, Homo sapiens
  CDR3 for alpha chain variable domain of TCR clone 39578 (TRAV1-1, TRAJ27)
CAVIYNTMQANQPL

SEQ ID NO: 79156 - protein, 15 aa, Homo sapiens
  CDR3 for beta chain variable domain of TCR clone 39578 (TRBV7-2, TRBJ2-1)
CASSSGLAGGNEQFF

SEQ ID NO: 79157 - protein, 19 aa, Homo sapiens
  CDR3 for alpha chain variable domain of TCR clone 39579 (TRAV3, TRAJ6)
CAVRDRSPSRSGGSYIPTF

SEQ ID NO: 79158 - protein, 15 aa, Homo sapiens
  CDR3 for beta chain variable domain of TCR clone 39579 (TRBV18, TRBJ2-7)
CASSPTFMDSYEQYF

SEQ ID NO: 79159 - protein, 13 aa, Homo sapiens
  CDR3 for alpha chain variable domain of TCR clone 39580 (TRAV17, TRAJ29)
CATDAFRKHTPCL

SEQ ID NO: 79160 - protein, 13 aa, Homo sapiens
  CDR3 for beta chain variable domain of TCR clone 39580 (TRBV5-7, TRBJ2-6)
CASTSSGANVLTF

SEQ ID NO: 79161 - protein, 10 aa, Homo sapiens
  CDR3 for alpha chain variable domain of TCR clone 39581 (TRAV12-1, TRAJ37)
ARGNTGKLIF

SEQ ID NO: 79162 - protein, 14 aa, Homo sapiens
  CDR3 for beta chain variable domain of TCR clone 39581 (TRBV7-2, TRBJ2-3)
CQQLRTGGTDTQYF

SEQ ID NO: 79163 - protein, 14 aa, Homo sapiens
  CDR3 for alpha chain variable domain of TCR clone 39582 (TRAV1-2, TRAJ16)
CAVNRFSDGQKLLF

SEQ ID NO: 79164 - protein, 16 aa, Homo sapiens
  CDR3 for beta chain variable domain of TCR clone 39582 (TRBV20-1, TRBJ1-4)
CSATGQGLLTNEKLFF

SEQ ID NO: 79165 - protein, 14 aa, Homo sapiens
  CDR3 for alpha chain variable domain of TCR clone 39583 (TRAV12-2, TRAJ17)
CAVLFKTAGNKLTF

SEQ ID NO: 79166 - protein, 17 aa, Homo sapiens
  CDR3 for beta chain variable domain of TCR clone 39583 (TRBV20-1, TRBJ2-2)
CSASGSGQGGLTGELFF

SEQ ID NO: 79167 - protein, 11 aa, Homo sapiens
  CDR3 for alpha chain variable domain of TCR clone 39584 (TRAV13-1, TRAJ8)
CAARGFQKPVF

SEQ ID NO: 79168 - protein, 16 aa, Homo sapiens
  CDR3 for beta chain variable domain of TCR clone 39584 (TRBV19, TRBJ1-5)
CASSTRGTRSNQPQHF

SEQ ID NO: 79169 - protein, 12 aa, Homo sapiens
  CDR3 for alpha chain variable domain of TCR clone 39585 (TRAV13-1, TRAJ48)
CAANFGNEKLTF

SEQ ID NO: 79170 - protein, 15 aa, Homo sapiens
  CDR3 for beta chain variable domain of TCR clone 39585 (TRBV9, TRBJ1-6)
CASSVAGTGDSPLHF

SEQ ID NO: 79171 - protein, 17 aa, Homo sapiens
  CDR3 for alpha chain variable domain of TCR clone 39586 (TRAV3, TRAJ6)
CAVRDGPRAGGSYIPTF

SEQ ID NO: 79172 - protein, 14 aa, Homo sapiens
  CDR3 for beta chain variable domain of TCR clone 39586 (TRBV20-1, TRBJ1-1)
CSAQTRIGGTEAFS

SEQ ID NO: 79173 - protein, 14 aa, Homo sapiens
  CDR3 for alpha chain variable domain of TCR clone 39587 (TRAV9-2, TRAJ39)
CALYIYNAGNMLTF

SEQ ID NO: 79174 - protein, 17 aa, Homo sapiens
  CDR3 for beta chain variable domain of TCR clone 39587 (TRBV20-1, TRBJ2-1)
CSARDPLAGVWDNEQFF

SEQ ID NO: 79175 - protein, 12 aa, Homo sapiens
  CDR3 for alpha chain variable domain of TCR clone 39588 (TRAV21, TRAJ23)
CAVPNQGGKLIF

SEQ ID NO: 79176 - protein, 15 aa, Homo sapiens
  CDR3 for beta chain variable domain of TCR clone 39588 (TRBV27, TRBJ2-1)
CASSSGAGTGPEQFF

SEQ ID NO: 79177 - protein, 11 aa, Homo sapiens
  CDR3 for alpha chain variable domain of TCR clone 39589 (TRAV1-2, TRAJ20)
CAVANDYKLSF

SEQ ID NO: 79178 - protein, 13 aa, Homo sapiens
  CDR3 for beta chain variable domain of TCR clone 39589 (TRBV7-3, TRBJ1-1)
CASSQDWGAEALF

SEQ ID NO: 79179 - protein, 12 aa, Homo sapiens
  CDR3 for alpha chain variable domain of TCR clone 39590 (TRAV13-1, TRAJ5)
CAAKAGRRALTF

SEQ ID NO: 79180 - protein, 13 aa, Homo sapiens
  CDR3 for beta chain variable domain of TCR clone 39590 (TRBV7-9, TRBJ1-2)
CASSLKQNYGYAF

SEQ ID NO: 79181 - protein, 14 aa, Homo sapiens
  CDR3 for alpha chain variable domain of TCR clone 39591 (TRAV12-3, TRAJ10)
SHLPLTGGGNKLTF

SEQ ID NO: 79182 - protein, 16 aa, Homo sapiens
  CDR3 for beta chain variable domain of TCR clone 39591 (TRBV19, TRBJ2-3)
CASSPGAASRTDTQYF

SEQ ID NO: 79183 - protein, 14 aa, Homo sapiens
  CDR3 for alpha chain variable domain of TCR clone 39592 (TRAV16, TRAJ15)
CALRPNQAGTALTF

SEQ ID NO: 79184 - protein, 16 aa, Homo sapiens
  CDR3 for beta chain variable domain of TCR clone 39592 (TRBV6-5, TRBJ2-2)
CASSYGRVPDTGELFF

SEQ ID NO: 79185 - protein, 10 aa, Homo sapiens
  CDR3 for alpha chain variable domain of TCR clone 39593 (TRAV23/DV6, TRAJ57)
CAATSTLSQG

SEQ ID NO: 79186 - protein, 14 aa, Homo sapiens
  CDR3 for beta chain variable domain of TCR clone 39593 (TRBV25-1, TRBJ1-1)
CASTHLGGNTEAFF

SEQ ID NO: 79187 - protein, 15 aa, Homo sapiens
  CDR3 for alpha chain variable domain of TCR clone 39594 (TRAV12-2, TRAJ43)
CAFDMRFGAGTRLTV

SEQ ID NO: 79188 - protein, 18 aa, Homo sapiens
  CDR3 for beta chain variable domain of TCR clone 39594 (TRBV20-1, TRBJ2-3)
CSDSGLAGGPGTTDTQYF

SEQ ID NO: 79189 - protein, 15 aa, Homo sapiens
  CDR3 for alpha chain variable domain of TCR clone 39595 (TRAV8-2, TRAJ40)
CVVLGTTSGTYKYIF

SEQ ID NO: 79190 - protein, 16 aa, Homo sapiens
  CDR3 for beta chain variable domain of TCR clone 39595 (TRBV7-3, TRBJ2-1)
CASGLEGYRSYNEQFF

SEQ ID NO: 79191 - protein, 17 aa, Homo sapiens
  CDR3 for alpha chain variable domain of TCR clone 39596 (TRAV26-1, TRAJ27)
CIVSTPWINTNAGKSTF

SEQ ID NO: 79192 - protein, 16 aa, Homo sapiens
  CDR3 for beta chain variable domain of TCR clone 39596 (TRBV7-9, TRBJ2-1)
CASSLDPGLAIDKQFF

SEQ ID NO: 79193 - protein, 12 aa, Homo sapiens
  CDR3 for alpha chain variable domain of TCR clone 39597 (TRAV2, TRAJ9)
CAVGAGGFKTIF

SEQ ID NO: 79194 - protein, 15 aa, Homo sapiens
  CDR3 for beta chain variable domain of TCR clone 39597 (TRBV11-3, TRBJ2-3)
CASLKDGREGDTQYF

SEQ ID NO: 79195 - protein, 13 aa, Homo sapiens
  CDR3 for alpha chain variable domain of TCR clone 39598 (TRAV21, TRAJ20)
CAVGLRVDYKLSF

SEQ ID NO: 79196 - protein, 13 aa, Homo sapiens
  CDR3 for beta chain variable domain of TCR clone 39598 (TRBV6-1, TRBJ1-1)
CAGSRQGNTEAFF

SEQ ID NO: 79197 - protein, 12 aa, Homo sapiens
  CDR3 for alpha chain variable domain of TCR clone 39599 (TRAV12-3, TRAJ21)
CAMFDNFNKFYF

SEQ ID NO: 79198 - protein, 14 aa, Homo sapiens
  CDR3 for beta chain variable domain of TCR clone 39599 (TRBV28, TRBJ2-1)
CASSIQGTVGEQFF

SEQ ID NO: 79199 - protein, 17 aa, Homo sapiens
  CDR3 for alpha chain variable domain of TCR clone 39600 (TRAV3, TRAJ6)
CAVTDGPRAGGSYIPTF

SEQ ID NO: 79200 - protein, 14 aa, Homo sapiens
  CDR3 for beta chain variable domain of TCR clone 39600 (TRBV7-2, TRBJ2-7)
CASSPKTSFYEQYF

SEQ ID NO: 79201 - protein, 16 aa, Homo sapiens
  CDR3 for alpha chain variable domain of TCR clone 39601 (TRAV3, TRAJ21)
CAVRDIERGNFNKFYF

SEQ ID NO: 79202 - protein, 16 aa, Homo sapiens
  CDR3 for beta chain variable domain of TCR clone 39601 (TRBV12-4, TRBJ1-5)
CASGRPVGGSNQPQHF

SEQ ID NO: 79203 - protein, 16 aa, Homo sapiens
  CDR3 for alpha chain variable domain of TCR clone 39602 (TRAV21, TRAJ37)
CAVRTAGSSNTDKLIF

SEQ ID NO: 79204 - protein, 13 aa, Homo sapiens
  CDR3 for beta chain variable domain of TCR clone 39602 (TRBV7-9, TRBJ2-5)
CASLPSGRETQYF

SEQ ID NO: 79205 - protein, 13 aa, Homo sapiens
  CDR3 for alpha chain variable domain of TCR clone 39603 (TRAV5, TRAJ6)
CAESNSVSYIPTF

SEQ ID NO: 79206 - protein, 14 aa, Homo sapiens
  CDR3 for beta chain variable domain of TCR clone 39603 (TRBV5-1, TRBJ2-3)
CASSPGLAADTQYF

SEQ ID NO: 79207 - protein, 14 aa, Homo sapiens
  CDR3 for alpha chain variable domain of TCR clone 39604 (TRAV3, TRAJ9)
CAVRLNTGGFKTIF

SEQ ID NO: 79208 - protein, 13 aa, Homo sapiens
  CDR3 for beta chain variable domain of TCR clone 39604 (TRBV7-9, TRBJ1-2)
CASSLKQNYGYTF

SEQ ID NO: 79209 - protein, 15 aa, Homo sapiens
  CDR3 for alpha chain variable domain of TCR clone 39605 (TRAV3, TRAJ22)
CAVRDRGGSARQLTF

SEQ ID NO: 79210 - protein, 14 aa, Homo sapiens
  CDR3 for beta chain variable domain of TCR clone 39605 (TRBV19, TRBJ2-1)
CASSRPASINEQFF

SEQ ID NO: 79211 - protein, 15 aa, Homo sapiens
  CDR3 for alpha chain variable domain of TCR clone 39606 (TRAV3, TRAJ22)
CAVRDRGGSARQLTF

SEQ ID NO: 79212 - protein, 14 aa, Homo sapiens
  CDR3 for beta chain variable domain of TCR clone 39606 (TRBV7-9, TRBJ2-3)
CASSLEDGTDTQYF

SEQ ID NO: 79213 - protein, 15 aa, Homo sapiens
  CDR3 for alpha chain variable domain of TCR clone 39607 (TRAV2, TRAJ9)
CAVEDRGTGGFKTIS

SEQ ID NO: 79214 - protein, 16 aa, Homo sapiens
  CDR3 for beta chain variable domain of TCR clone 39607 (TRBV24-1, TRBJ2-3)
CATSDPGTGAKDTQYF

SEQ ID NO: 79215 - protein, 14 aa, Homo sapiens
  CDR3 for alpha chain variable domain of TCR clone 39608 (TRAV30, TRAJ26)
CGTEIVSYGQNFVF

SEQ ID NO: 79216 - protein, 12 aa, Homo sapiens
  CDR3 for beta chain variable domain of TCR clone 39608 (TRBV7-8, TRBJ2-7)
CASSLGDREQYF

SEQ ID NO: 79217 - protein, 13 aa, Homo sapiens
  CDR3 for alpha chain variable domain of TCR clone 39609 (TRAV13-1, TRAJ5)
CAAEHTGRRALTF

SEQ ID NO: 79218 - protein, 15 aa, Homo sapiens
  CDR3 for beta chain variable domain of TCR clone 39609 (TRBV20-1, TRBJ2-7)
CSARDRVSGMDEQYF

SEQ ID NO: 79219 - protein, 13 aa, Homo sapiens
  CDR3 for alpha chain variable domain of TCR clone 39610 (TRAV13-2, TRAJ13)
CADLSGCYQKVTF

SEQ ID NO: 79220 - protein, 15 aa, Homo sapiens
  CDR3 for beta chain variable domain of TCR clone 39610 (TRBV19, TRBJ1-1)
CASSIGGGRNTEAFF

SEQ ID NO: 79221 - protein, 16 aa, Homo sapiens
  CDR3 for alpha chain variable domain of TCR clone 39611 (TRAV3, TRAJ37)
CAVRGKGSGNTGKLIF

SEQ ID NO: 79222 - protein, 13 aa, Homo sapiens
  CDR3 for beta chain variable domain of TCR clone 39611 (TRBV14, TRBJ2-7)
CASSQDRRCEQYF

SEQ ID NO: 79223 - protein, 13 aa, Homo sapiens
  CDR3 for alpha chain variable domain of TCR clone 39612 (TRAV27, TRAJ54)
CAGAGQGAQKLVF

SEQ ID NO: 79224 - protein, 15 aa, Homo sapiens
  CDR3 for beta chain variable domain of TCR clone 39612 (TRBV18, TRBJ2-6)
CASSPSDAGANVLTF

SEQ ID NO: 79225 - protein, 16 aa, Homo sapiens
  CDR3 for alpha chain variable domain of TCR clone 39613 (TRAV16, TRAJ52)
CALSAAGGTSYGKLTF

SEQ ID NO: 79226 - protein, 12 aa, Homo sapiens
  CDR3 for beta chain variable domain of TCR clone 39613 (TRBV12-4, TRBJ1-3)
CASSFSGNTIYV

SEQ ID NO: 79227 - protein, 15 aa, Homo sapiens
  CDR3 for alpha chain variable domain of TCR clone 39614 (TRAV3, TRAJ3)
CALRDRDSSASKIIF

SEQ ID NO: 79228 - protein, 18 aa, Homo sapiens
  CDR3 for beta chain variable domain of TCR clone 39614 (TRBV25-1, TRBJ1-2)
CASSGLQNGQGLIFGYTF

SEQ ID NO: 79229 - protein, 15 aa, Homo sapiens
  CDR3 for alpha chain variable domain of TCR clone 39615 (TRAV3, TRAJ27)
CAMRAYNTNAGKSTF

SEQ ID NO: 79230 - protein, 13 aa, Homo sapiens
  CDR3 for beta chain variable domain of TCR clone 39615 (TRBV11-2, TRBJ2-5)
CASSRGPSETQYF

SEQ ID NO: 79231 - protein, 14 aa, Homo sapiens
  CDR3 for alpha chain variable domain of TCR clone 39616 (TRAV16, TRAJ42)
CALSGMGSQGNLIF

SEQ ID NO: 79232 - protein, 13 aa, Homo sapiens
  CDR3 for beta chain variable domain of TCR clone 39616 (TRBV10-3, TRBJ2-7)
CAPKLAVNYEQYF

SEQ ID NO: 79233 - protein, 12 aa, Homo sapiens
  CDR3 for alpha chain variable domain of TCR clone 39617 (TRAV35, TRAJ34)
CAGRGTPTSSSL

SEQ ID NO: 79234 - protein, 14 aa, Homo sapiens
  CDR3 for beta chain variable domain of TCR clone 39617 (TRBV5-1, TRBJ2-7)
CASSRGESLYEQYF

SEQ ID NO: 79235 - protein, 16 aa, Homo sapiens
  CDR3 for alpha chain variable domain of TCR clone 39618 (TRAV4, TRAJ9)
CLVGDPNRPGGFKTIF

SEQ ID NO: 79236 - protein, 13 aa, Homo sapiens
  CDR3 for beta chain variable domain of TCR clone 39618 (TRBV5-5, TRBJ1-2)
CASSFWRGEDYAF

SEQ ID NO: 79237 - protein, 16 aa, Homo sapiens
  CDR3 for alpha chain variable domain of TCR clone 39619 (TRAV30, TRAJ24)
CGTEIVDADSWGKFQF

SEQ ID NO: 79238 - protein, 16 aa, Homo sapiens
  CDR3 for beta chain variable domain of TCR clone 39619 (TRBV27, TRBJ2-5)
CASSYGPGGQKETQYF

SEQ ID NO: 79239 - protein, 16 aa, Homo sapiens
  CDR3 for alpha chain variable domain of TCR clone 39620 (TRAV27, TRAJ42)
CREGHYYGGSQGNLIF

SEQ ID NO: 79240 - protein, 14 aa, Homo sapiens
  CDR3 for beta chain variable domain of TCR clone 39620 (TRBV6-6, TRBJ2-3)
CASRLQREADTQYF

SEQ ID NO: 79241 - protein, 13 aa, Homo sapiens
  CDR3 for alpha chain variable domain of TCR clone 39621 (TRAV21, TRAJ20)
CAVSRLGDYKLSF

SEQ ID NO: 79242 - protein, 13 aa, Homo sapiens
  CDR3 for beta chain variable domain of TCR clone 39621 (TRBV7-3, TRBJ1-1)
CASSPAGGLEALF

SEQ ID NO: 79243 - protein, 15 aa, Homo sapiens
  CDR3 for alpha chain variable domain of TCR clone 39622 (TRAV12-3, TRAJ27)
CAMRAYNTNAGKSTS

SEQ ID NO: 79244 - protein, 13 aa, Homo sapiens
  CDR3 for beta chain variable domain of TCR clone 39622 (TRBV11-2, TRBJ2-5)
CASSRGPSETQYF

SEQ ID NO: 79245 - protein, 15 aa, Homo sapiens
  CDR3 for alpha chain variable domain of TCR clone 39623 (TRAV8-3, TRAJ45)
CASSYSGGGADGLNF

SEQ ID NO: 79246 - protein, 18 aa, Homo sapiens
  CDR3 for beta chain variable domain of TCR clone 39623 (TRBV18, TRBJ1-3)
CASSPRGGAGPSGNTIYF

SEQ ID NO: 79247 - protein, 14 aa, Homo sapiens
  CDR3 for alpha chain variable domain of TCR clone 39624 (TRAV12-1, TRAJ34)
CVVDLDYNTDKLIF

SEQ ID NO: 79248 - protein, 17 aa, Homo sapiens
  CDR3 for beta chain variable domain of TCR clone 39624 (TRBV20-1, TRBJ2-7)
CSAAGTSGGGSSYEQYF

SEQ ID NO: 79249 - protein, 13 aa, Homo sapiens
  CDR3 for alpha chain variable domain of TCR clone 39625 (TRAV26-2, TRAJ43)
CILRAVNNNDMRF

SEQ ID NO: 79250 - protein, 15 aa, Homo sapiens
  CDR3 for beta chain variable domain of TCR clone 39625 (TRBV7-2, TRBJ2-1)
CASAHGTGIYNEQFF

SEQ ID NO: 79251 - protein, 18 aa, Homo sapiens
  CDR3 for alpha chain variable domain of TCR clone 39626 (TRAV26-2, TRAJ45)
CILRVDKYSGGGADGLTF

SEQ ID NO: 79252 - protein, 16 aa, Homo sapiens
  CDR3 for beta chain variable domain of TCR clone 39626 (TRBV2, TRBJ1-4)
CASNLLQGATNEKLFC

SEQ ID NO: 79253 - protein, 12 aa, Homo sapiens
  CDR3 for alpha chain variable domain of TCR clone 39627 (TRAV12-3, TRAJ5)
CAMDTGRRALTF

SEQ ID NO: 79254 - protein, 13 aa, Homo sapiens
  CDR3 for beta chain variable domain of TCR clone 39627 (TRBV7-7, TRBJ2-2)
CVSSLTSAGELFF

SEQ ID NO: 79255 - protein, 14 aa, Homo sapiens
  CDR3 for alpha chain variable domain of TCR clone 39628 (TRAV17, TRAJ56)
CATVPAGANSKLTF

SEQ ID NO: 79256 - protein, 13 aa, Homo sapiens
  CDR3 for beta chain variable domain of TCR clone 39628 (TRBV12-4, TRBJ2-2)
CASSIAGSGELFF

SEQ ID NO: 79257 - protein, 14 aa, Homo sapiens
  CDR3 for alpha chain variable domain of TCR clone 39629 (TRAV17, TRAJ22)
CATSPSGSARQLTF

SEQ ID NO: 79258 - protein, 15 aa, Homo sapiens
  CDR3 for beta chain variable domain of TCR clone 39629 (TRBV4-1, TRBJ2-5)
CASSKWDLYQETQYF

SEQ ID NO: 79259 - protein, 14 aa, Homo sapiens
  CDR3 for alpha chain variable domain of TCR clone 39630 (TRAV8-4, TRAJ13)
CAVTLSGGYQKVTF

SEQ ID NO: 79260 - protein, 14 aa, Homo sapiens
  CDR3 for beta chain variable domain of TCR clone 39630 (TRBV7-2, TRBJ1-2)
CASSQTGSTYGYIF

SEQ ID NO: 79261 - protein, 13 aa, Homo sapiens
  CDR3 for alpha chain variable domain of TCR clone 39631 (TRAV12-1, TRAJ29)
RVVRNSGNTPLVF

SEQ ID NO: 79262 - protein, 14 aa, Homo sapiens
  CDR3 for beta chain variable domain of TCR clone 39631 (TRBV7-2, TRBJ2-7)
CASRSQGAAYEQYF

SEQ ID NO: 79263 - protein, 14 aa, Homo sapiens
  CDR3 for alpha chain variable domain of TCR clone 39632 (TRAV12-2, TRAJ17)
CAALFKAAGNKLTF

SEQ ID NO: 79264 - protein, 16 aa, Homo sapiens
  CDR3 for beta chain variable domain of TCR clone 39632 (TRBV20-1, TRBJ2-2)
CSASASGIPGAGKLFF

SEQ ID NO: 79265 - protein, 11 aa, Homo sapiens
  CDR3 for alpha chain variable domain of TCR clone 39633 (TRAV35, TRAJ34)
CWARNTDKLIF

SEQ ID NO: 79266 - protein, 16 aa, Homo sapiens
  CDR3 for beta chain variable domain of TCR clone 39633 (TRBV5-1, TRBJ2-7)
CASSRGNHCTSSTSGR

SEQ ID NO: 79267 - protein, 12 aa, Homo sapiens
  CDR3 for alpha chain variable domain of TCR clone 39634 (TRAV8-3, TRAJ41)
CAVALSGYALNF

SEQ ID NO: 79268 - protein, 16 aa, Homo sapiens
  CDR3 for beta chain variable domain of TCR clone 39634 (TRBV27, TRBJ2-7)
CAGSSERRDSAYEQYF

SEQ ID NO: 79269 - protein, 13 aa, Homo sapiens
  CDR3 for alpha chain variable domain of TCR clone 39635 (TRAV29/DV5, TRAJ31)
CAASRNNNARLMF

SEQ ID NO: 79270 - protein, 14 aa, Homo sapiens
  CDR3 for beta chain variable domain of TCR clone 39635 (TRBV7-2, TRBJ2-7)
CASRSQGAAYEQYF

SEQ ID NO: 79271 - protein, 13 aa, Homo sapiens
  CDR3 for alpha chain variable domain of TCR clone 39636 (TRAV13-2, TRAJ8)
CVFMNTGFQKLVF

SEQ ID NO: 79272 - protein, 17 aa, Homo sapiens
  CDR3 for beta chain variable domain of TCR clone 39636 (TRBV28, TRBJ2-1)
CASSSARQALTYNEQFF

SEQ ID NO: 79273 - protein, 18 aa, Homo sapiens
  CDR3 for alpha chain variable domain of TCR clone 39637 (TRAV12-3, TRAJ52)
CAMSVGGAGGTSYGKLTF

SEQ ID NO: 79274 - protein, 15 aa, Homo sapiens
  CDR3 for beta chain variable domain of TCR clone 39637 (TRBV27, TRBJ1-6)
CASSFDRGLGSPHHF

SEQ ID NO: 79275 - protein, 18 aa, Homo sapiens
  CDR3 for alpha chain variable domain of TCR clone 39638 (TRAV21, TRAJ52)
CAVRPSPAGGTSYGQLTF

SEQ ID NO: 79276 - protein, 13 aa, Homo sapiens
  CDR3 for beta chain variable domain of TCR clone 39638 (TRBV7-3, TRBJ1-1)
CASSQDWGAEAFF

SEQ ID NO: 79277 - protein, 14 aa, Homo sapiens
  CDR3 for alpha chain variable domain of TCR clone 39639 (TRAV12-1, TRAJ12)
CVVISMDSSYKLIF

SEQ ID NO: 79278 - protein, 13 aa, Homo sapiens
  CDR3 for beta chain variable domain of TCR clone 39639 (TRBV20-1, TRBJ1-1)
CSARGGGNTEAFF

SEQ ID NO: 79279 - protein, 12 aa, Homo sapiens
  CDR3 for alpha chain variable domain of TCR clone 39640 (TRAV23/DV6, TRAJ30)
CAASKGDDKIIF

SEQ ID NO: 79280 - protein, 15 aa, Homo sapiens
  CDR3 for beta chain variable domain of TCR clone 39640 (TRBV12-4, TRBJ2-1)
CASRLTRTGYNEQFF

SEQ ID NO: 79281 - protein, 14 aa, Homo sapiens
  CDR3 for alpha chain variable domain of TCR clone 39641 (TRAV21, TRAJ23)
CAIMIYNQGGKLTF

SEQ ID NO: 79282 - protein, 18 aa, Homo sapiens
  CDR3 for beta chain variable domain of TCR clone 39641 (TRBV20-1, TRBJ2-6)
CSAETTPTHGSGANVLTF

SEQ ID NO: 79283 - protein, 15 aa, Homo sapiens
  CDR3 for alpha chain variable domain of TCR clone 39642 (TRAV26-1, TRAJ3)
CIVRSGYSSASKIIF

SEQ ID NO: 79284 - protein, 14 aa, Homo sapiens
  CDR3 for beta chain variable domain of TCR clone 39642 (TRBV13, TRBJ2-5)
CASYRRLAGETQYF

SEQ ID NO: 79285 - protein, 17 aa, Homo sapiens
  CDR3 for alpha chain variable domain of TCR clone 39643 (TRAV4, TRAJ42)
CLVGVLNYGGSQGNLIF

SEQ ID NO: 79286 - protein, 12 aa, Homo sapiens
  CDR3 for beta chain variable domain of TCR clone 39643 (TRBV20-1, TRBJ2-1)
CSAKYTYNEQFF

SEQ ID NO: 79287 - protein, 13 aa, Homo sapiens
  CDR3 for alpha chain variable domain of TCR clone 39644 (TRAV17, TRAJ22)
CAHHSGSARQLTF

SEQ ID NO: 79288 - protein, 12 aa, Homo sapiens
  CDR3 for beta chain variable domain of TCR clone 39644 (TRBV11-2, TRBJ2-2)
CASSLGGGELFF

SEQ ID NO: 79289 - protein, 17 aa, Homo sapiens
  CDR3 for alpha chain variable domain of TCR clone 39645 (TRAV3, TRAJ6)
CAVREGPRAGGSYIPTF

SEQ ID NO: 79290 - protein, 15 aa, Homo sapiens
  CDR3 for beta chain variable domain of TCR clone 39645 (TRBV7-8, TRBJ1-5)
CASSLERRGLEPQHF

SEQ ID NO: 79291 - protein, 11 aa, Homo sapiens
  CDR3 for alpha chain variable domain of TCR clone 39646 (TRAV1-2, TRAJ31)
CAVDNNARLMF

SEQ ID NO: 79292 - protein, 15 aa, Homo sapiens
  CDR3 for beta chain variable domain of TCR clone 39646 (TRBV28, TRBJ2-1)
CASSIIAGGRSERFF

SEQ ID NO: 79293 - protein, 15 aa, Homo sapiens
  CDR3 for alpha chain variable domain of TCR clone 39647 (TRAV3, TRAJ5)
CAVRDLDTGRRALTF

SEQ ID NO: 79294 - protein, 15 aa, Homo sapiens
  CDR3 for beta chain variable domain of TCR clone 39647 (TRBV19, TRBJ1-2)
CASSVGQVLNYGYTF

SEQ ID NO: 79295 - protein, 15 aa, Homo sapiens
  CDR3 for alpha chain variable domain of TCR clone 39648 (TRAV27, TRAJ38)
CAARRNAGNNRKLTW

SEQ ID NO: 79296 - protein, 13 aa, Homo sapiens
  CDR3 for beta chain variable domain of TCR clone 39648 (TRBV12-4, TRBJ2-7)
CASSPTETYEQYF

SEQ ID NO: 79297 - protein, 13 aa, Homo sapiens
  CDR3 for alpha chain variable domain of TCR clone 39649 (TRAV35, TRAJ57)
CAGSQGGSEKLVF

SEQ ID NO: 79298 - protein, 15 aa, Homo sapiens
  CDR3 for beta chain variable domain of TCR clone 39649 (TRBV7-9, TRBJ1-4)
CASSRTGGFNEKLFF

SEQ ID NO: 79299 - protein, 11 aa, Homo sapiens
  CDR3 for alpha chain variable domain of TCR clone 39650 (TRAV13-1, TRAJ39)
CASHAGNMLTF

SEQ ID NO: 79300 - protein, 12 aa, Homo sapiens
  CDR3 for beta chain variable domain of TCR clone 39650 (TRBV5-1, TRBJ2-3)
CASSLAADTQYF

SEQ ID NO: 79301 - protein, 13 aa, Homo sapiens
  CDR3 for alpha chain variable domain of TCR clone 39651 (TRAV29/DV5, TRAJ31)
CAASRNNNARLMF

SEQ ID NO: 79302 - protein, 15 aa, Homo sapiens
  CDR3 for beta chain variable domain of TCR clone 39651 (TRBV19, TRBJ2-7)
CASSIGGGLVNEQYF

SEQ ID NO: 79303 - protein, 14 aa, Homo sapiens
  CDR3 for alpha chain variable domain of TCR clone 39652 (TRAV1-2, TRAJ8)
CAVREDTGFQKLVF

SEQ ID NO: 79304 - protein, 12 aa, Homo sapiens
  CDR3 for beta chain variable domain of TCR clone 39652 (TRBV29-1, TRBJ2-3)
CSVTGGADTRYF

SEQ ID NO: 79305 - protein, 14 aa, Homo sapiens
  CDR3 for alpha chain variable domain of TCR clone 39653 (TRAV21, TRAJ15)
CAVSLSQAGTALIF

SEQ ID NO: 79306 - protein, 11 aa, Homo sapiens
  CDR3 for beta chain variable domain of TCR clone 39653 (TRBV20-1, TRBJ2-7)
CSARTSYEQYF

SEQ ID NO: 79307 - protein, 14 aa, Homo sapiens
  CDR3 for alpha chain variable domain of TCR clone 39654 (TRAV35, TRAJ40)
CAGSTTSGTYKYIF

SEQ ID NO: 79308 - protein, 13 aa, Homo sapiens
  CDR3 for beta chain variable domain of TCR clone 39654 (TRBV20-1, TRBJ1-6)
CSAPLGVGSPLLF

SEQ ID NO: 79309 - protein, 12 aa, Homo sapiens
  CDR3 for alpha chain variable domain of TCR clone 39655 (TRAV13-1, TRAJ42)
VNYGGSQGNLIF

SEQ ID NO: 79310 - protein, 15 aa, Homo sapiens
  CDR3 for beta chain variable domain of TCR clone 39655 (TRBV20-1, TRBJ2-1)
CSASSAGSSYDEQFF

SEQ ID NO: 79311 - protein, 14 aa, Homo sapiens
  CDR3 for alpha chain variable domain of TCR clone 39656 (TRAV1-2, TRAJ16)
CAVNRFSDGQKLLF

SEQ ID NO: 79312 - protein, 13 aa, Homo sapiens
  CDR3 for beta chain variable domain of TCR clone 39656 (TRBV13, TRBJ2-5)
CASSPEVGETQYF

SEQ ID NO: 79313 - protein, 12 aa, Homo sapiens
  CDR3 for alpha chain variable domain of TCR clone 39657 (TRAV12-3, TRAJ17)
CAMTLTGNKLTF

SEQ ID NO: 79314 - protein, 14 aa, Homo sapiens
  CDR3 for beta chain variable domain of TCR clone 39657 (TRBV7-2, TRBJ2-7)
CASRPQGAAYEQYF

SEQ ID NO: 79315 - protein, 15 aa, Homo sapiens
  CDR3 for alpha chain variable domain of TCR clone 39658 (TRAV29/DV5, TRAJ42)
CAAKTDGGSQGNLIL

SEQ ID NO: 79316 - protein, 15 aa, Homo sapiens
  CDR3 for beta chain variable domain of TCR clone 39658 (TRBV5-1, TRBJ2-2)
CASSSQGGNTGELFF

SEQ ID NO: 79317 - protein, 14 aa, Homo sapiens
  CDR3 for alpha chain variable domain of TCR clone 39659 (TRAV12-1, TRAJ23)
CVVIVYNQGGKLIF

SEQ ID NO: 79318 - protein, 15 aa, Homo sapiens
  CDR3 for beta chain variable domain of TCR clone 39659 (TRBV20-1, TRBJ1-5)
CSAKPPGQGSQPQHF

SEQ ID NO: 79319 - protein, 14 aa, Homo sapiens
  CDR3 for alpha chain variable domain of TCR clone 39660 (TRAV2, TRAJ21)
CAVEDLNNFNKFYF

SEQ ID NO: 79320 - protein, 11 aa, Homo sapiens
  CDR3 for beta chain variable domain of TCR clone 39660 (TRBV10-3, TRBJ2-1)
CAISDRGWQFF

SEQ ID NO: 79321 - protein, 13 aa, Homo sapiens
  CDR3 for alpha chain variable domain of TCR clone 39661 (TRAV3, TRAJ21)
CAVREPGFNKFYF

SEQ ID NO: 79322 - protein, 13 aa, Homo sapiens
  CDR3 for beta chain variable domain of TCR clone 39661 (TRBV9, TRBJ2-1)
CASSPSGGNEQFF

SEQ ID NO: 79323 - protein, 15 aa, Homo sapiens
  CDR3 for alpha chain variable domain of TCR clone 39662 (TRAV17, TRAJ57)
CATGPSQGGSEKLVF

SEQ ID NO: 79324 - protein, 18 aa, Homo sapiens
  CDR3 for beta chain variable domain of TCR clone 39662 (TRBV7-9, TRBJ2-7)
YASSLTTSGSRTWYEQYF

SEQ ID NO: 79325 - protein, 14 aa, Homo sapiens
  CDR3 for alpha chain variable domain of TCR clone 39663 (TRAV12-1, TRAJ30)
CVVNIGGRDEKIIF

SEQ ID NO: 79326 - protein, 13 aa, Homo sapiens
  CDR3 for beta chain variable domain of TCR clone 39663 (TRBV12-5, TRBJ2-1)
CASGLGRGNEQFF

SEQ ID NO: 79327 - protein, 13 aa, Homo sapiens
  CDR3 for alpha chain variable domain of TCR clone 39664 (TRAV12-3, TRAJ33)
CAMSVNSNYQLIW

SEQ ID NO: 79328 - protein, 16 aa, Homo sapiens
  CDR3 for beta chain variable domain of TCR clone 39664 (TRBV13, TRBJ2-5)
CAISLRTGGSWETQYF

SEQ ID NO: 79329 - protein, 14 aa, Homo sapiens
  CDR3 for alpha chain variable domain of TCR clone 39665 (TRAV27, TRAJ52)
CAGAGGTSYGKLTF

SEQ ID NO: 79330 - protein, 16 aa, Homo sapiens
  CDR3 for beta chain variable domain of TCR clone 39665 (TRBV7-3, TRBJ2-2)
CASSSKRGTLSGELFF

SEQ ID NO: 79331 - protein, 11 aa, Homo sapiens
  CDR3 for alpha chain variable domain of TCR clone 39666 (TRAV2, TRAJ13)
CASGGYQKFTF

SEQ ID NO: 79332 - protein, 14 aa, Homo sapiens
  CDR3 for beta chain variable domain of TCR clone 39666 (TRBV7-3, TRBJ2-1)
CASSLAGGTNEQFF

SEQ ID NO: 79333 - protein, 14 aa, Homo sapiens
  CDR3 for alpha chain variable domain of TCR clone 39667 (TRAV12-2, TRAJ13)
CAVKKTGGYQKVTF

SEQ ID NO: 79334 - protein, 15 aa, Homo sapiens
  CDR3 for beta chain variable domain of TCR clone 39667 (TRBV27, TRBJ2-1)
FSSSNGGGSSNEQFF

SEQ ID NO: 79335 - protein, 14 aa, Homo sapiens
  CDR3 for alpha chain variable domain of TCR clone 39668 (TRAV12-3, TRAJ54)
CAMRIIQGAQKLVF

SEQ ID NO: 79336 - protein, 16 aa, Homo sapiens
  CDR3 for beta chain variable domain of TCR clone 39668 (TRBV28, TRBJ2-1)
CAIRAPASGRIGEQFF

SEQ ID NO: 79337 - protein, 15 aa, Homo sapiens
  CDR3 for alpha chain variable domain of TCR clone 39669 (TRAV13-2, TRAJ35)
CAESPNIGFGNVLHC

SEQ ID NO: 79338 - protein, 13 aa, Homo sapiens
  CDR3 for beta chain variable domain of TCR clone 39669 (TRBV10-2, TRBJ2-5)
CASSTLARETQYF

SEQ ID NO: 79339 - protein, 14 aa, Homo sapiens
  CDR3 for alpha chain variable domain of TCR clone 39670 (TRAV13-1, TRAJ44)
CAAKATGTASILTF

SEQ ID NO: 79340 - protein, 17 aa, Homo sapiens
  CDR3 for beta chain variable domain of TCR clone 39670 (TRBV7-3, TRBJ2-3)
CASSLMKRMRGADTQYF

SEQ ID NO: 79341 - protein, 14 aa, Homo sapiens
  CDR3 for alpha chain variable domain of TCR clone 39671 (TRAV1-2, TRAJ16)
CAVNRFSDGQKLLF

SEQ ID NO: 79342 - protein, 14 aa, Homo sapiens
  CDR3 for beta chain variable domain of TCR clone 39671 (TRBV4-1, TRBJ2-2)
CASSRAVNTGELFF

SEQ ID NO: 79343 - protein, 14 aa, Homo sapiens
  CDR3 for alpha chain variable domain of TCR clone 39672 (TRAV1-2, TRAJ16)
CAVNRFSDGQKLLF

SEQ ID NO: 79344 - protein, 14 aa, Homo sapiens
  CDR3 for beta chain variable domain of TCR clone 39672 (TRBV7-8, TRBJ2-3)
CASSSRDSTDTQYF

SEQ ID NO: 79345 - protein, 14 aa, Homo sapiens
  CDR3 for alpha chain variable domain of TCR clone 39673 (TRAV8-3, TRAJ4)
CAVGAYGGYNKLIF

SEQ ID NO: 79346 - protein, 16 aa, Homo sapiens
  CDR3 for beta chain variable domain of TCR clone 39673 (TRBV4-3, TRBJ2-2)
CASSHLQGSGTGELFF

SEQ ID NO: 79347 - protein, 13 aa, Homo sapiens
  CDR3 for alpha chain variable domain of TCR clone 39674 (TRAV20, TRAJ21)
CAVEGYNFNKFYF

SEQ ID NO: 79348 - protein, 14 aa, Homo sapiens
  CDR3 for beta chain variable domain of TCR clone 39674 (TRBV3-1, TRBJ2-5)
CASSQGPDQVTQYF

SEQ ID NO: 79349 - protein, 15 aa, Homo sapiens
  CDR3 for alpha chain variable domain of TCR clone 39675 (TRAV26-1, TRAJ29)
CIVRVEGSGNTPLVF

SEQ ID NO: 79350 - protein, 14 aa, Homo sapiens
  CDR3 for beta chain variable domain of TCR clone 39675 (TRBV4-1, TRBJ2-2)
CASSQAVNTGELFF

SEQ ID NO: 79351 - protein, 16 aa, Homo sapiens
  CDR3 for alpha chain variable domain of TCR clone 39676 (TRAV26-1, )
CIDIQNPDPAVYQLRD

SEQ ID NO: 79352 - protein, 17 aa, Homo sapiens
  CDR3 for beta chain variable domain of TCR clone 39676 (TRBV11-2, TRBJ2-1)
CASSLYPPGVEYNEQFF

SEQ ID NO: 79353 - protein, 14 aa, Homo sapiens
  CDR3 for alpha chain variable domain of TCR clone 39677 (TRAV27, TRAJ21)
CAGVRQLQQILLCI

SEQ ID NO: 79354 - protein, 14 aa, Homo sapiens
  CDR3 for beta chain variable domain of TCR clone 39677 (TRBV7-9, TRBJ1-4)
CASSLEGQSEKLFF

SEQ ID NO: 79355 - protein, 15 aa, Homo sapiens
  CDR3 for alpha chain variable domain of TCR clone 39678 (TRAV26-1, TRAJ22)
CIVRVSFWFCKATDL

SEQ ID NO: 79356 - protein, 13 aa, Homo sapiens
  CDR3 for beta chain variable domain of TCR clone 39678 (TRBV7-9, TRBJ1-2)
CAISLKQNYGYTF

SEQ ID NO: 79357 - protein, 12 aa, Homo sapiens
  CDR3 for alpha chain variable domain of TCR clone 39679 (TRAV21, TRAJ31)
CAVWGNNARLMF

SEQ ID NO: 79358 - protein, 16 aa, Homo sapiens
  CDR3 for beta chain variable domain of TCR clone 39679 (TRBV27, TRBJ2-5)
CASSYGPGGQKETRYF

SEQ ID NO: 79359 - protein, 12 aa, Homo sapiens
  CDR3 for alpha chain variable domain of TCR clone 39680 (TRAV12-3, TRAJ41)
CAMSYSGYALNF

SEQ ID NO: 79360 - protein, 13 aa, Homo sapiens
  CDR3 for beta chain variable domain of TCR clone 39680 (TRBV7-3, TRBJ2-1)
CASSLDSYNDQFF

SEQ ID NO: 79361 - protein, 12 aa, Homo sapiens
  CDR3 for alpha chain variable domain of TCR clone 39681 (TRAV29/DV5, TRAJ49)
CAATDTGNQFYF

SEQ ID NO: 79362 - protein, 19 aa, Homo sapiens
  CDR3 for beta chain variable domain of TCR clone 39681 (TRBV25-1, TRBJ2-2)
CAILAYRVDRGRKTGELFF

SEQ ID NO: 79363 - protein, 15 aa, Homo sapiens
  CDR3 for alpha chain variable domain of TCR clone 39682 (TRAV17, TRAJ57)
CATGPSKGGSEKLVF

SEQ ID NO: 79364 - protein, 14 aa, Homo sapiens
  CDR3 for beta chain variable domain of TCR clone 39682 (TRBV12-5, TRBJ2-5)
CASGSRTHQETQYF

SEQ ID NO: 79365 - protein, 14 aa, Homo sapiens
  CDR3 for alpha chain variable domain of TCR clone 39683 (TRAV1-2, TRAJ16)
CAVNRFSDGQKLLF

SEQ ID NO: 79366 - protein, 16 aa, Homo sapiens
  CDR3 for beta chain variable domain of TCR clone 39683 (TRBV4-3, TRBJ2-1)
CASSPALDRGVNEQFF

SEQ ID NO: 79367 - protein, 14 aa, Homo sapiens
  CDR3 for alpha chain variable domain of TCR clone 39684 (TRAV23/DV6, TRAJ11)
CAASLESGYSTLTF

SEQ ID NO: 79368 - protein, 15 aa, Homo sapiens
  CDR3 for beta chain variable domain of TCR clone 39684 (TRBV28, TRBJ2-7)
CARSSPGTEPFEQYF

SEQ ID NO: 79369 - protein, 14 aa, Homo sapiens
  CDR3 for alpha chain variable domain of TCR clone 39685 (TRAV25, TRAJ22)
CAVRSSGSARQLTF

SEQ ID NO: 79370 - protein, 14 aa, Homo sapiens
  CDR3 for beta chain variable domain of TCR clone 39685 (TRBV25-1, TRBJ1-1)
CASTHLGGNTEAFF

SEQ ID NO: 79371 - protein, 14 aa, Homo sapiens
  CDR3 for alpha chain variable domain of TCR clone 39686 (TRAV17, TRAJ6)
CATDASGGSYIPTF

SEQ ID NO: 79372 - protein, 19 aa, Homo sapiens
  CDR3 for beta chain variable domain of TCR clone 39686 (TRBV4-3, TRBJ2-7)
CASSHEFIGWQVTPYEQYF

SEQ ID NO: 79373 - protein, 15 aa, Homo sapiens
  CDR3 for alpha chain variable domain of TCR clone 39687 (TRAV8-3, TRAJ23)
CAVGDRYNQGGKLIF

SEQ ID NO: 79374 - protein, 22 aa, Homo sapiens
  CDR3 for beta chain variable domain of TCR clone 39687 (TRBV29-1, TRBJ2-5)
TVSNMSPEDRSIYLCSAGTQYF

SEQ ID NO: 79375 - protein, 13 aa, Homo sapiens
  CDR3 for alpha chain variable domain of TCR clone 39688 (TRAV13-2, TRAJ48)
CAEMDFGNEKLTF

SEQ ID NO: 79376 - protein, 15 aa, Homo sapiens
  CDR3 for beta chain variable domain of TCR clone 39688 (TRBV19, TRBJ1-1)
CASTSGQIQNTEAFF

SEQ ID NO: 79377 - protein, 14 aa, Homo sapiens
  CDR3 for alpha chain variable domain of TCR clone 39689 (TRAV8-4, TRAJ9)
CALRINTGGFKTIF

SEQ ID NO: 79378 - protein, 15 aa, Homo sapiens
  CDR3 for beta chain variable domain of TCR clone 39689 (TRBV10-2, TRBJ2-6)
CASSEQGTGANVLTF

SEQ ID NO: 79379 - protein, 19 aa, Homo sapiens
  CDR3 for alpha chain variable domain of TCR clone 39690 (TRAV38-1, TRAJ53)
CAFMKHGLESGDSNYKLTF

SEQ ID NO: 79380 - protein, 13 aa, Homo sapiens
  CDR3 for beta chain variable domain of TCR clone 39690 (TRBV19, TRBJ2-7)
CASSPRQSYEQYF

SEQ ID NO: 79381 - protein, 15 aa, Homo sapiens
  CDR3 for alpha chain variable domain of TCR clone 39691 (TRAV3, TRAJ22)
CAVRDRGGSARQLTF

SEQ ID NO: 79382 - protein, 15 aa, Homo sapiens
  CDR3 for beta chain variable domain of TCR clone 39691 (TRBV7-3, TRBJ2-1)
CASSPTGGGEVEQLF

SEQ ID NO: 79383 - protein, 11 aa, Homo sapiens
  CDR3 for alpha chain variable domain of TCR clone 39692 (TRAV21, TRAJ34)
CAVTNTDKLIF

SEQ ID NO: 79384 - protein, 15 aa, Homo sapiens
  CDR3 for beta chain variable domain of TCR clone 39692 (TRBV28, TRBJ2-1)
CASSIIAGGRSEQFF

SEQ ID NO: 79385 - protein, 14 aa, Homo sapiens
  CDR3 for alpha chain variable domain of TCR clone 39693 (TRAV12-2, TRAJ17)
CAVLFKAAGNKLTF

SEQ ID NO: 79386 - protein, 13 aa, Homo sapiens
  CDR3 for beta chain variable domain of TCR clone 39693 (TRBV7-9, TRBJ2-3)
CASSPGSTDTQYF

SEQ ID NO: 79387 - protein, 14 aa, Homo sapiens
  CDR3 for alpha chain variable domain of TCR clone 39694 (TRAV26-1, TRAJ21)
CIARPPYNFNKFYF

SEQ ID NO: 79388 - protein, 14 aa, Homo sapiens
  CDR3 for beta chain variable domain of TCR clone 39694 (TRBV11-3, TRBJ2-1)
CASSATTSGSIQFF

SEQ ID NO: 79389 - protein, 18 aa, Homo sapiens
  CDR3 for alpha chain variable domain of TCR clone 39695 (TRAV9-2, TRAJ52)
CALSRHNAGGTSYGKMTF

SEQ ID NO: 79390 - protein, 13 aa, Homo sapiens
  CDR3 for beta chain variable domain of TCR clone 39695 (TRBV7-9, TRBJ1-2)
CASSLKQNYGYTF

SEQ ID NO: 79391 - protein, 16 aa, Homo sapiens
  CDR3 for alpha chain variable domain of TCR clone 39696 (TRAV3, TRAJ37)
CAVRPHGSGNTGKLIF

SEQ ID NO: 79392 - protein, 14 aa, Homo sapiens
  CDR3 for beta chain variable domain of TCR clone 39696 (TRBV7-2, TRBJ2-7)
CASRSQGAAYEQYF

SEQ ID NO: 79393 - protein, 15 aa, Homo sapiens
  CDR3 for alpha chain variable domain of TCR clone 39697 (TRAV3, TRAJ9)
CAVRDSNTGGFETIF

SEQ ID NO: 79394 - protein, 16 aa, Homo sapiens
  CDR3 for beta chain variable domain of TCR clone 39697 (TRBV15, TRBJ2-5)
CATSPTTGQGMETQYF

SEQ ID NO: 79395 - protein, 14 aa, Homo sapiens
  CDR3 for alpha chain variable domain of TCR clone 39698 (TRAV17, TRAJ32)
CAKDPGGATNKLIF

SEQ ID NO: 79396 - protein, 14 aa, Homo sapiens
  CDR3 for beta chain variable domain of TCR clone 39698 (TRBV2, TRBJ1-5)
CASSENRGGQPQHF

SEQ ID NO: 79397 - protein, 13 aa, Homo sapiens
  CDR3 for alpha chain variable domain of TCR clone 39699 (TRAV12-2, TRAJ18)
CAVRGSTLGRLYF

SEQ ID NO: 79398 - protein, 20 aa, Homo sapiens
  CDR3 for beta chain variable domain of TCR clone 39699 (TRBV7-8, TRBJ2-2)
CASSHLLPGPTIHITGELFF

SEQ ID NO: 79399 - protein, 14 aa, Homo sapiens
  CDR3 for alpha chain variable domain of TCR clone 39700 (TRAV13-1, TRAJ44)
CAANATGTASKLTF

SEQ ID NO: 79400 - protein, 17 aa, Homo sapiens
  CDR3 for beta chain variable domain of TCR clone 39700 (TRBV7-3, TRBJ2-3)
CASSLMKRMRGADTQYF

SEQ ID NO: 79401 - protein, 18 aa, Homo sapiens
  CDR3 for alpha chain variable domain of TCR clone 39701 (TRAV26-1, TRAJ23)
CIVRGGLEVWNQGGKLIF

SEQ ID NO: 79402 - protein, 16 aa, Homo sapiens
  CDR3 for beta chain variable domain of TCR clone 39701 (TRBV12-4, TRBJ2-5)
CASSFFVRGRQETQYF

SEQ ID NO: 79403 - protein, 13 aa, Homo sapiens
  CDR3 for alpha chain variable domain of TCR clone 39702 (TRAV1-2, TRAJ9)
CAALNTGGFKTIF

SEQ ID NO: 79404 - protein, 17 aa, Homo sapiens
  CDR3 for beta chain variable domain of TCR clone 39702 (TRBV7-8, TRBJ2-6)
CASSAGTGGAGANVLTF

SEQ ID NO: 79405 - protein, 14 aa, Homo sapiens
  CDR3 for alpha chain variable domain of TCR clone 39703 (TRAV38-1, TRAJ28)
CAFTSGAGSYQLTF

SEQ ID NO: 79406 - protein, 18 aa, Homo sapiens
  CDR3 for beta chain variable domain of TCR clone 39703 (TRBV7-9, TRBJ1-1)
CASSKPWDAMGMNTEAFF

SEQ ID NO: 79407 - protein, 13 aa, Homo sapiens
  CDR3 for alpha chain variable domain of TCR clone 39704 (TRAV21, TRAJ27)
CAARPGNAGKSTF

SEQ ID NO: 79408 - protein, 14 aa, Homo sapiens
  CDR3 for beta chain variable domain of TCR clone 39704 (TRBV7-6, TRBJ2-3)
CASSLGTVTDTEYF

SEQ ID NO: 79409 - protein, 13 aa, Homo sapiens
  CDR3 for alpha chain variable domain of TCR clone 39705 (TRAV8-4, TRAJ39)
SAPHSDAGNMLTF

SEQ ID NO: 79410 - protein, 13 aa, Homo sapiens
  CDR3 for beta chain variable domain of TCR clone 39705 (TRBV12-4, TRBJ2-7)
CASSPTETYEQYF

SEQ ID NO: 79411 - protein, 16 aa, Homo sapiens
  CDR3 for alpha chain variable domain of TCR clone 39706 (TRAV16, TRAJ57)
CAPYLITHGGSEKLVF

SEQ ID NO: 79412 - protein, 17 aa, Homo sapiens
  CDR3 for beta chain variable domain of TCR clone 39706 (TRBV24-1, TRBJ2-4)
CATSDAEARGVRNIQYF

SEQ ID NO: 79413 - protein, 16 aa, Homo sapiens
  CDR3 for alpha chain variable domain of TCR clone 39707 (TRAV13-1, TRAJ37)
CAASYLGSSNTGKLIF

SEQ ID NO: 79414 - protein, 12 aa, Homo sapiens
  CDR3 for beta chain variable domain of TCR clone 39707 (TRBV6-1, TRBJ2-5)
CASSEGRETQYF

SEQ ID NO: 79415 - protein, 14 aa, Homo sapiens
  CDR3 for alpha chain variable domain of TCR clone 39708 (TRAV26-1, TRAJ34)
CIVRVAYNTDKLIF

SEQ ID NO: 79416 - protein, 14 aa, Homo sapiens
  CDR3 for beta chain variable domain of TCR clone 39708 (TRBV20-1, TRBJ2-1)
CSAQIGGSANEQFF

SEQ ID NO: 79417 - protein, 16 aa, Homo sapiens
  CDR3 for alpha chain variable domain of TCR clone 39709 (TRAV4, TRAJ18)
CCVLLFGGSTLGRLYF

SEQ ID NO: 79418 - protein, 12 aa, Homo sapiens
  CDR3 for beta chain variable domain of TCR clone 39709 (TRBV6-3, TRBJ2-7)
CASSLTPYEQYF

SEQ ID NO: 79419 - protein, 16 aa, Homo sapiens
  CDR3 for alpha chain variable domain of TCR clone 39710 (TRAV12-3, TRAJ53)
CAMSPGSGGSNYKLTF

SEQ ID NO: 79420 - protein, 20 aa, Homo sapiens
  CDR3 for beta chain variable domain of TCR clone 39710 (TRBV7-8, TRBJ2-2)
CASSHLFPGPTVHITGELFF

SEQ ID NO: 79421 - protein, 13 aa, Homo sapiens
  CDR3 for alpha chain variable domain of TCR clone 39711 (TRAV1-2, TRAJ9)
CAVLNTGGFKTIF

SEQ ID NO: 79422 - protein, 14 aa, Homo sapiens
  CDR3 for beta chain variable domain of TCR clone 39711 (TRBV20-1, TRBJ2-3)
CSAGGGASTDTQYF

SEQ ID NO: 79423 - protein, 12 aa, Homo sapiens
  CDR3 for alpha chain variable domain of TCR clone 39712 (TRAV10, TRAJ31)
CVVSANNARLMF

SEQ ID NO: 79424 - protein, 15 aa, Homo sapiens
  CDR3 for beta chain variable domain of TCR clone 39712 (TRBV5-5, TRBJ1-2)
CASSLVGTDVYGYTF

SEQ ID NO: 79425 - protein, 11 aa, Homo sapiens
  CDR3 for alpha chain variable domain of TCR clone 39713 (TRAV12-3, TRAJ43)
CAMSVSNDMRF

SEQ ID NO: 79426 - protein, 14 aa, Homo sapiens
  CDR3 for beta chain variable domain of TCR clone 39713 (TRBV12-5, TRBJ2-5)
CASGSRTHQEAQYF

SEQ ID NO: 79427 - protein, 15 aa, Homo sapiens
  CDR3 for alpha chain variable domain of TCR clone 39714 (TRAV12-3, TRAJ6)
CAMSATKGGSYIPTF

SEQ ID NO: 79428 - protein, 13 aa, Homo sapiens
  CDR3 for beta chain variable domain of TCR clone 39714 (TRBV6-3, TRBJ2-7)
CASSFSGGYEQYF

SEQ ID NO: 79429 - protein, 15 aa, Homo sapiens
  CDR3 for alpha chain variable domain of TCR clone 39715 (TRAV13-1, TRAJ18)
CAARGGGSTLGRLYF

SEQ ID NO: 79430 - protein, 13 aa, Homo sapiens
  CDR3 for beta chain variable domain of TCR clone 39715 (TRBV18, TRBJ2-1)
CASGLASNNEQFF

SEQ ID NO: 79431 - protein, 15 aa, Homo sapiens
  CDR3 for alpha chain variable domain of TCR clone 39716 (TRAV13-1, TRAJ17)
CAASTERAAGNKLTF

SEQ ID NO: 79432 - protein, 12 aa, Homo sapiens
  CDR3 for beta chain variable domain of TCR clone 39716 (TRBV5-7, TRBJ1-1)
CASSLGRGKAFF

SEQ ID NO: 79433 - protein, 14 aa, Homo sapiens
  CDR3 for alpha chain variable domain of TCR clone 39717 (TRAV1-2, TRAJ8)
CAVREDTGFQKLVF

SEQ ID NO: 79434 - protein, 16 aa, Homo sapiens
  CDR3 for beta chain variable domain of TCR clone 39717 (TRBV5-1, TRBJ1-1)
CASSSGGNSLNTEAFF

SEQ ID NO: 79435 - protein, 14 aa, Homo sapiens
  CDR3 for alpha chain variable domain of TCR clone 39718 (TRAV1-2, TRAJ16)
CAVNRFSDGQKLLF

SEQ ID NO: 79436 - protein, 17 aa, Homo sapiens
  CDR3 for beta chain variable domain of TCR clone 39718 (TRBV15, TRBJ1-5)
CATSRAPPGTRNQPQHF

SEQ ID NO: 79437 - protein, 14 aa, Homo sapiens
  CDR3 for alpha chain variable domain of TCR clone 39719 (TRAV1-2, TRAJ16)
CAVNRFSDGQKLLF

SEQ ID NO: 79438 - protein, 15 aa, Homo sapiens
  CDR3 for beta chain variable domain of TCR clone 39719 (TRBV5-1, TRBJ1-1)
CASSLIRGTYTEAFF

SEQ ID NO: 79439 - protein, 15 aa, Homo sapiens
  CDR3 for alpha chain variable domain of TCR clone 39720 (TRAV19, TRAJ23)
CALSEVGNQGGKLIF

SEQ ID NO: 79440 - protein, 15 aa, Homo sapiens
  CDR3 for beta chain variable domain of TCR clone 39720 (TRBV5-1, TRBJ2-3)
CASSVTSGSTDTQYF

SEQ ID NO: 79441 - protein, 16 aa, Homo sapiens
  CDR3 for alpha chain variable domain of TCR clone 39721 (TRAV16, TRAJ4)
CARSRMFSGGYNKRIF

SEQ ID NO: 79442 - protein, 16 aa, Homo sapiens
  CDR3 for beta chain variable domain of TCR clone 39721 (TRBV24-1, TRBJ2-3)
CATSDPGTGATDTQYF

SEQ ID NO: 79443 - protein, 14 aa, Homo sapiens
  CDR3 for alpha chain variable domain of TCR clone 39722 (TRAV1-2, TRAJ16)
CAVNRFSDGQKLLF

SEQ ID NO: 79444 - protein, 12 aa, Homo sapiens
  CDR3 for beta chain variable domain of TCR clone 39722 (TRBV11-2, TRBJ2-5)
CASSLGQETQYF

SEQ ID NO: 79445 - protein, 15 aa, Homo sapiens
  CDR3 for alpha chain variable domain of TCR clone 39723 (TRAV38-1, TRAJ30)
CAFMMSYGGDDKIIF

SEQ ID NO: 79446 - protein, 16 aa, Homo sapiens
  CDR3 for beta chain variable domain of TCR clone 39723 (TRBV7-9, TRBJ2-7)
CASGFGLAGPSYEQYF

SEQ ID NO: 79447 - protein, 14 aa, Homo sapiens
  CDR3 for alpha chain variable domain of TCR clone 39724 (TRAV23/DV6, TRAJ4)
CAAPSSGGYNKLIF

SEQ ID NO: 79448 - protein, 15 aa, Homo sapiens
  CDR3 for beta chain variable domain of TCR clone 39724 (TRBV28, TRBJ1-3)
CASSMGWASGNTIYF

SEQ ID NO: 79449 - protein, 13 aa, Homo sapiens
  CDR3 for alpha chain variable domain of TCR clone 39725 (TRAV13-1, TRAJ40)
CAASKGGAYKYIF

SEQ ID NO: 79450 - protein, 13 aa, Homo sapiens
  CDR3 for beta chain variable domain of TCR clone 39725 (TRBV7-6, TRBJ1-2)
CASSLVADYGYTF

SEQ ID NO: 79451 - protein, 11 aa, Homo sapiens
  CDR3 for alpha chain variable domain of TCR clone 39726 (TRAV12-3, TRAJ27)
CAMANAGKSTF

SEQ ID NO: 79452 - protein, 13 aa, Homo sapiens
  CDR3 for beta chain variable domain of TCR clone 39726 (TRBV20-1, TRBJ1-1)
CSARVGWNTEAFF

SEQ ID NO: 79453 - protein, 14 aa, Homo sapiens
  CDR3 for alpha chain variable domain of TCR clone 39727 (TRAV12-1, TRAJ17)
CVVNYKAAGNKLTF

SEQ ID NO: 79454 - protein, 20 aa, Homo sapiens
  CDR3 for beta chain variable domain of TCR clone 39727 (TRBV28, TRBJ2-1)
CASTPIGRSPGLAGGNEQFF

SEQ ID NO: 79455 - protein, 16 aa, Homo sapiens
  CDR3 for alpha chain variable domain of TCR clone 39728 (TRAV3, TRAJ37)
CAVRGKGSGNTGKLIF

SEQ ID NO: 79456 - protein, 11 aa, Homo sapiens
  CDR3 for beta chain variable domain of TCR clone 39728 (TRBV29-1, TRBJ2-5)
CSEDRTGTQYF

SEQ ID NO: 79457 - protein, 13 aa, Homo sapiens
  CDR3 for alpha chain variable domain of TCR clone 39729 (TRAV25, TRAJ47)
CAGHREYGNKLVF

SEQ ID NO: 79458 - protein, 17 aa, Homo sapiens
  CDR3 for beta chain variable domain of TCR clone 39729 (TRBV7-8, TRBJ2-5)
CASSLASGGRSQETQYF

SEQ ID NO: 79459 - protein, 13 aa, Homo sapiens
  CDR3 for alpha chain variable domain of TCR clone 39730 (TRAV13-2, TRAJ13)
CAERPGGYQKVTF

SEQ ID NO: 79460 - protein, 16 aa, Homo sapiens
  CDR3 for beta chain variable domain of TCR clone 39730 (TRBV19, TRBJ2-1)
CASSKAGPSSYNEQFF

SEQ ID NO: 79461 - protein, 14 aa, Homo sapiens
  CDR3 for alpha chain variable domain of TCR clone 39731 (TRAV12-2, TRAJ5)
CAMSTYTGRRALTF

SEQ ID NO: 79462 - protein, 13 aa, Homo sapiens
  CDR3 for beta chain variable domain of TCR clone 39731 (TRBV28, TRBJ2-3)
CASSTGGGDTQYF

SEQ ID NO: 79463 - protein, 11 aa, Homo sapiens
  CDR3 for alpha chain variable domain of TCR clone 39732 (TRAV12-1, TRAJ21)
CVVNNFNKFYF

SEQ ID NO: 79464 - protein, 16 aa, Homo sapiens
  CDR3 for beta chain variable domain of TCR clone 39732 (TRBV19, TRBJ2-1)
CASSKAGPSSYNEQFF

SEQ ID NO: 79465 - protein, 13 aa, Homo sapiens
  CDR3 for alpha chain variable domain of TCR clone 39733 (TRAV25, TRAJ30)
CAGRVDRDDKIIF

SEQ ID NO: 79466 - protein, 17 aa, Homo sapiens
  CDR3 for beta chain variable domain of TCR clone 39733 (TRBV11-2, TRBJ2-1)
CASSLYPPGVEYNEQFF

SEQ ID NO: 79467 - protein, 13 aa, Homo sapiens
  CDR3 for alpha chain variable domain of TCR clone 39734 (TRAV12-1, TRAJ16)
CVVNGPDGQQLLF

SEQ ID NO: 79468 - protein, 13 aa, Homo sapiens
  CDR3 for beta chain variable domain of TCR clone 39734 (TRBV2, TRBJ1-1)
CARNPTGGFHAFF

SEQ ID NO: 79469 - protein, 15 aa, Homo sapiens
  CDR3 for alpha chain variable domain of TCR clone 39735 (TRAV26-1, TRAJ56)
CIVRVDNGANSKLTF

SEQ ID NO: 79470 - protein, 14 aa, Homo sapiens
  CDR3 for beta chain variable domain of TCR clone 39735 (TRBV5-1, TRBJ2-7)
CASSRGESLYEQHF

SEQ ID NO: 79471 - protein, 13 aa, Homo sapiens
  CDR3 for alpha chain variable domain of TCR clone 39736 (TRAV13-1, TRAJ5)
CAASDTGRTALTF

SEQ ID NO: 79472 - protein, 12 aa, Homo sapiens
  CDR3 for beta chain variable domain of TCR clone 39736 (TRBV28, TRBJ2-3)
CASSLYRDTQYF

SEQ ID NO: 79473 - protein, 13 aa, Homo sapiens
  CDR3 for alpha chain variable domain of TCR clone 39737 (TRAV27, TRAJ9)
CAGAKTGGFKTIF

SEQ ID NO: 79474 - protein, 15 aa, Homo sapiens
  CDR3 for beta chain variable domain of TCR clone 39737 (TRBV11-2, TRBJ1-3)
CASSLDGTVGNTIYF

SEQ ID NO: 79475 - protein, 16 aa, Homo sapiens
  CDR3 for alpha chain variable domain of TCR clone 39738 (TRAV23/DV6, TRAJ9)
CAASIGGNTGGFKTIF

SEQ ID NO: 79476 - protein, 14 aa, Homo sapiens
  CDR3 for beta chain variable domain of TCR clone 39738 (TRBV9, TRBJ2-7)
CASSVGVGSYERYF

SEQ ID NO: 79477 - protein, 14 aa, Homo sapiens
  CDR3 for alpha chain variable domain of TCR clone 39739 (TRAV8-3, TRAJ20)
CAVGPRGNDYKLSF

SEQ ID NO: 79478 - protein, 11 aa, Homo sapiens
  CDR3 for beta chain variable domain of TCR clone 39739 (TRBV10-3, TRBJ2-2)
CATKGTGEMFF

SEQ ID NO: 79479 - protein, 12 aa, Homo sapiens
  CDR3 for alpha chain variable domain of TCR clone 39740 (TRAV12-3, TRAJ17)
CAMTLTGNKLTF

SEQ ID NO: 79480 - protein, 14 aa, Homo sapiens
  CDR3 for beta chain variable domain of TCR clone 39740 (TRBV11-2, TRBJ1-2)
CASSLGTANYGYTF

SEQ ID NO: 79481 - protein, 13 aa, Homo sapiens
  CDR3 for alpha chain variable domain of TCR clone 39741 (TRAV17, TRAJ5)
CAPMDTGRRALTF

SEQ ID NO: 79482 - protein, 14 aa, Homo sapiens
  CDR3 for beta chain variable domain of TCR clone 39741 (TRBV4-1, TRBJ2-2)
CASSQAVNTGELFF

SEQ ID NO: 79483 - protein, 15 aa, Homo sapiens
  CDR3 for alpha chain variable domain of TCR clone 39742 (TRAV12-3, TRAJ6)
CAMSATTGGSYIPTF

SEQ ID NO: 79484 - protein, 16 aa, Homo sapiens
  CDR3 for beta chain variable domain of TCR clone 39742 (TRBV20-1, TRBJ1-2)
CSAAMGQGVANYGYTF

SEQ ID NO: 79485 - protein, 16 aa, Homo sapiens
  CDR3 for alpha chain variable domain of TCR clone 39743 (TRAV30, TRAJ24)
CGTEIVDADSWGKFQF

SEQ ID NO: 79486 - protein, 17 aa, Homo sapiens
  CDR3 for beta chain variable domain of TCR clone 39743 (TRBV20-1, TRBJ2-2)
CSASGSGQGGLTGELLF

SEQ ID NO: 79487 - protein, 16 aa, Homo sapiens
  CDR3 for alpha chain variable domain of TCR clone 39744 (TRAV21, TRAJ37)
CAVRTAGSSNTGKLIF

SEQ ID NO: 79488 - protein, 13 aa, Homo sapiens
  CDR3 for beta chain variable domain of TCR clone 39744 (TRBV7-9, TRBJ2-5)
CASLPSGRESQYF

SEQ ID NO: 79489 - protein, 16 aa, Homo sapiens
  CDR3 for alpha chain variable domain of TCR clone 39745 (TRAV30, TRAJ24)
CGTEVVDADSWGKFQF

SEQ ID NO: 79490 - protein, 16 aa, Homo sapiens
  CDR3 for beta chain variable domain of TCR clone 39745 (TRBV12-5, TRBJ2-5)
CASGPRTSGNQETQYF

SEQ ID NO: 79491 - protein, 11 aa, Homo sapiens
  CDR3 for alpha chain variable domain of TCR clone 39746 (TRAV3, TRAJ21)
CAVGNFNKFYF

SEQ ID NO: 79492 - protein, 13 aa, Homo sapiens
  CDR3 for beta chain variable domain of TCR clone 39746 (TRBV7-3, TRBJ2-5)
CASSFRGGETQYF

SEQ ID NO: 79493 - protein, 14 aa, Homo sapiens
  CDR3 for alpha chain variable domain of TCR clone 39747 (TRAV8-4, TRAJ9)
CAVRVNTGGFKTIF

SEQ ID NO: 79494 - protein, 15 aa, Homo sapiens
  CDR3 for beta chain variable domain of TCR clone 39747 (TRBV10-2, TRBJ2-6)
CASSEQGTGANVLTF

SEQ ID NO: 79495 - protein, 17 aa, Homo sapiens
  CDR3 for alpha chain variable domain of TCR clone 39748 (TRAV26-1, TRAJ53)
CIIRVDDSGGSNYKLTF

SEQ ID NO: 79496 - protein, 15 aa, Homo sapiens
  CDR3 for beta chain variable domain of TCR clone 39748 (TRBV20-1, TRBJ2-7)
CSARDRVSGMDEQYF

SEQ ID NO: 79497 - protein, 11 aa, Homo sapiens
  CDR3 for alpha chain variable domain of TCR clone 39749 (TRAV1-1, TRAJ23)
CAVRQGGKLIF

SEQ ID NO: 79498 - protein, 12 aa, Homo sapiens
  CDR3 for beta chain variable domain of TCR clone 39749 (TRBV19, TRBJ1-5)
CASSIAQQTQHF

SEQ ID NO: 79499 - protein, 13 aa, Homo sapiens
  CDR3 for alpha chain variable domain of TCR clone 39750 (TRAV13-1, TRAJ5)
CAEGVTGRRALTF

SEQ ID NO: 79500 - protein, 15 aa, Homo sapiens
  CDR3 for beta chain variable domain of TCR clone 39750 (TRBV7-9, TRBJ2-7)
CASSPGGGLTYEQYF

SEQ ID NO: 79501 - protein, 11 aa, Homo sapiens
  CDR3 for alpha chain variable domain of TCR clone 39751 (TRAV21, TRAJ41)
CAVRSRYALNF

SEQ ID NO: 79502 - protein, 13 aa, Homo sapiens
  CDR3 for beta chain variable domain of TCR clone 39751 (TRBV7-9, TRBJ1-2)
CASSLKQNYGYTF

SEQ ID NO: 79503 - protein, 14 aa, Homo sapiens
  CDR3 for alpha chain variable domain of TCR clone 39752 (TRAV35, TRAJ22)
CAGLRPGSARQLTF

SEQ ID NO: 79504 - protein, 14 aa, Homo sapiens
  CDR3 for beta chain variable domain of TCR clone 39752 (TRBV25-1, TRBJ1-1)
CASTHLGGNTEAFF

SEQ ID NO: 79505 - protein, 15 aa, Homo sapiens
  CDR3 for alpha chain variable domain of TCR clone 39753 (TRAV8-2, TRAJ40)
CVVLGTTSGTYRYIF

SEQ ID NO: 79506 - protein, 16 aa, Homo sapiens
  CDR3 for beta chain variable domain of TCR clone 39753 (TRBV7-3, TRBJ2-1)
CASSLEGYRSYNEQFF

SEQ ID NO: 79507 - protein, 15 aa, Homo sapiens
  CDR3 for alpha chain variable domain of TCR clone 39754 (TRAV26-2, TRAJ13)
CILRDLSGGYQKVTF

SEQ ID NO: 79508 - protein, 17 aa, Homo sapiens
  CDR3 for beta chain variable domain of TCR clone 39754 (TRBV28, TRBJ1-1)
CASSLSGTGYENTEAFF

SEQ ID NO: 79509 - protein, 12 aa, Homo sapiens
  CDR3 for alpha chain variable domain of TCR clone 39755 (TRAV12-3, TRAJ40)
CAMSSGTYKYIF

SEQ ID NO: 79510 - protein, 13 aa, Homo sapiens
  CDR3 for beta chain variable domain of TCR clone 39755 (TRBV7-3, TRBJ1-1)
CASSQDWGAEAFF

SEQ ID NO: 79511 - protein, 12 aa, Homo sapiens
  CDR3 for alpha chain variable domain of TCR clone 39756 (TRAV3, TRAJ39)
CAVIEWSNMLTF

SEQ ID NO: 79512 - protein, 14 aa, Homo sapiens
  CDR3 for beta chain variable domain of TCR clone 39756 (TRBV7-8, TRBJ2-3)
CASSFPEGQDTQYF

SEQ ID NO: 79513 - protein, 13 aa, Homo sapiens
  CDR3 for alpha chain variable domain of TCR clone 39757 (TRAV30, TRAJ6)
CGFIEGGSYIPTF

SEQ ID NO: 79514 - protein, 13 aa, Homo sapiens
  CDR3 for beta chain variable domain of TCR clone 39757 (TRBV5-4, TRBJ2-5)
CASSPISQETQYF

SEQ ID NO: 79515 - protein, 14 aa, Homo sapiens
  CDR3 for alpha chain variable domain of TCR clone 39758 (TRAV1-2, TRAJ8)
CAVREDTGFQKLVF

SEQ ID NO: 79516 - protein, 15 aa, Homo sapiens
  CDR3 for beta chain variable domain of TCR clone 39758 (TRBV27, TRBJ2-1)
CASSNGGGPSNEQFF

SEQ ID NO: 79517 - protein, 11 aa, Homo sapiens
  CDR3 for alpha chain variable domain of TCR clone 39759 (TRAV1-2, TRAJ8)
CAVSSFQKLVF

SEQ ID NO: 79518 - protein, 17 aa, Homo sapiens
  CDR3 for beta chain variable domain of TCR clone 39759 (TRBV18, TRBJ2-1)
CASSKGLSGGADNEQFF

SEQ ID NO: 79519 - protein, 12 aa, Homo sapiens
  CDR3 for alpha chain variable domain of TCR clone 39760 (TRAV21, TRAJ33)
CAKMDSNYQLIR

SEQ ID NO: 79520 - protein, 18 aa, Homo sapiens
  CDR3 for beta chain variable domain of TCR clone 39760 (TRBV15, TRBJ2-3)
CATSRDGARSWDTDTQYF

SEQ ID NO: 79521 - protein, 17 aa, Homo sapiens
  CDR3 for alpha chain variable domain of TCR clone 39761 (TRAV3, TRAJ6)
CAVRDGPRAGGSYIPTF

SEQ ID NO: 79522 - protein, 14 aa, Homo sapiens
  CDR3 for beta chain variable domain of TCR clone 39761 (TRBV7-2, TRBJ2-7)
CASSPKPSFYEQYF

SEQ ID NO: 79523 - protein, 13 aa, Homo sapiens
  CDR3 for alpha chain variable domain of TCR clone 39762 (TRAV21, TRAJ56)
CAVRTGANSKLTF

SEQ ID NO: 79524 - protein, 15 aa, Homo sapiens
  CDR3 for beta chain variable domain of TCR clone 39762 (TRBV7-9, TRBJ1-1)
CASSHRGTVNTEALF

SEQ ID NO: 79525 - protein, 13 aa, Homo sapiens
  CDR3 for alpha chain variable domain of TCR clone 39763 (TRAV12-1, TRAJ16)
RVVNGPDGQKLLF

SEQ ID NO: 79526 - protein, 15 aa, Homo sapiens
  CDR3 for beta chain variable domain of TCR clone 39763 (TRBV6-3, TRBJ2-7)
CASSSPGTVFYEQYF

SEQ ID NO: 79527 - protein, 13 aa, Homo sapiens
  CDR3 for alpha chain variable domain of TCR clone 39764 (TRAV13-2, TRAJ40)
CAEFTSGTYKYIF

SEQ ID NO: 79528 - protein, 13 aa, Homo sapiens
  CDR3 for beta chain variable domain of TCR clone 39764 (TRBV12-4, TRBJ1-2)
CASSLRQGKGYTF

SEQ ID NO: 79529 - protein, 12 aa, Homo sapiens
  CDR3 for alpha chain variable domain of TCR clone 39765 (TRAV12-3, TRAJ17)
CAMTLTGNKLTF

SEQ ID NO: 79530 - protein, 13 aa, Homo sapiens
  CDR3 for beta chain variable domain of TCR clone 39765 (TRBV5-5, TRBJ1-2)
CASSFWRGEDYTF

SEQ ID NO: 79531 - protein, 17 aa, Homo sapiens
  CDR3 for alpha chain variable domain of TCR clone 39766 (TRAV13-1, TRAJ31)
CAPRDRLMFGDGTQLVV

SEQ ID NO: 79532 - protein, 14 aa, Homo sapiens
  CDR3 for beta chain variable domain of TCR clone 39766 (TRBV19, TRBJ2-1)
CASPTFVLSGEQFF

SEQ ID NO: 79533 - protein, 12 aa, Homo sapiens
  CDR3 for alpha chain variable domain of TCR clone 39767 (TRAV21, TRAJ31)
CAVSPARGRLLF

SEQ ID NO: 79534 - protein, 14 aa, Homo sapiens
  CDR3 for beta chain variable domain of TCR clone 39767 (TRBV28, TRBJ2-7)
CASSLLRISYEQYF

SEQ ID NO: 79535 - protein, 10 aa, Homo sapiens
  CDR3 for alpha chain variable domain of TCR clone 39768 (TRAV12-1, TRAJ37)
ARGNTDKLIF

SEQ ID NO: 79536 - protein, 15 aa, Homo sapiens
  CDR3 for beta chain variable domain of TCR clone 39768 (TRBV7-2, TRBJ2-3)
CASSLEQGGTDTQYF

SEQ ID NO: 79537 - protein, 12 aa, Homo sapiens
  CDR3 for alpha chain variable domain of TCR clone 39769 (TRAV3, TRAJ26)
CAVRDYGQNFVL

SEQ ID NO: 79538 - protein, 12 aa, Homo sapiens
  CDR3 for beta chain variable domain of TCR clone 39769 (TRBV29-1, TRBJ2-3)
CSVTGGADTQYF

SEQ ID NO: 79539 - protein, 16 aa, Homo sapiens
  CDR3 for alpha chain variable domain of TCR clone 39770 (TRAV14/DV4, TRAJ21)
CAMREGPENNFNKFYF

SEQ ID NO: 79540 - protein, 12 aa, Homo sapiens
  CDR3 for beta chain variable domain of TCR clone 39770 (TRBV29-1, TRBJ2-2)
CSFDKYTGELFF

SEQ ID NO: 79541 - protein, 12 aa, Homo sapiens
  CDR3 for alpha chain variable domain of TCR clone 39771 (TRAV23/DV6, TRAJ30)
CAASKGDDKIIF

SEQ ID NO: 79542 - protein, 16 aa, Homo sapiens
  CDR3 for beta chain variable domain of TCR clone 39771 (TRBV13, TRBJ2-3)
CQQPLQGSGGRNTQYF

SEQ ID NO: 79543 - protein, 17 aa, Homo sapiens
  CDR3 for alpha chain variable domain of TCR clone 39772 (TRAV26-1, TRAJ21)
CVAKGKFYFGSGTKLNV

SEQ ID NO: 79544 - protein, 15 aa, Homo sapiens
  CDR3 for beta chain variable domain of TCR clone 39772 (TRBV7-2, TRBJ2-1)
CASSFGLAGGNEQFF

SEQ ID NO: 79545 - protein, 14 aa, Homo sapiens
  CDR3 for alpha chain variable domain of TCR clone 39773 (TRAV30, TRAJ33)
CGTVAPRSNYQLIC

SEQ ID NO: 79546 - protein, 16 aa, Homo sapiens
  CDR3 for beta chain variable domain of TCR clone 39773 (TRBV3-1, TRBJ2-5)
CASSPGQFNGFGTQYF

SEQ ID NO: 79547 - protein, 21 aa, Homo sapiens
  CDR3 for alpha chain variable domain of TCR clone 39774 (TRAV25, TRAJ47)
TATQTTDVGTYSWEYGNKLVF

SEQ ID NO: 79548 - protein, 13 aa, Homo sapiens
  CDR3 for beta chain variable domain of TCR clone 39774 (TRBV20-1, TRBJ2-5)
CSAREAFQETQYF

SEQ ID NO: 79549 - protein, 14 aa, Homo sapiens
  CDR3 for alpha chain variable domain of TCR clone 39775 (TRAV13-1, TRAJ9)
CAASALNGGFKTIF

SEQ ID NO: 79550 - protein, 16 aa, Homo sapiens
  CDR3 for beta chain variable domain of TCR clone 39775 (TRBV12-4, TRBJ2-3)
CASSFGTGGISDTQYF

SEQ ID NO: 79551 - protein, 14 aa, Homo sapiens
  CDR3 for alpha chain variable domain of TCR clone 39776 (TRAV12-3, TRAJ58)
CAMSTETSGSRLTF

SEQ ID NO: 79552 - protein, 13 aa, Homo sapiens
  CDR3 for beta chain variable domain of TCR clone 39776 (TRBV27, TRBJ2-3)
CASSWGCTDTQYF

SEQ ID NO: 79553 - protein, 14 aa, Homo sapiens
  CDR3 for alpha chain variable domain of TCR clone 39777 (TRAV12-3, TRAJ42)
RAMNYGGSQGNLIF

SEQ ID NO: 79554 - protein, 15 aa, Homo sapiens
  CDR3 for beta chain variable domain of TCR clone 39777 (TRBV5-7, TRBJ1-5)
CASSYGKLWDQPQHF

SEQ ID NO: 79555 - protein, 11 aa, Homo sapiens
  CDR3 for alpha chain variable domain of TCR clone 39778 (TRAV2, TRAJ13)
CASGGYQKVTF

SEQ ID NO: 79556 - protein, 15 aa, Homo sapiens
  CDR3 for beta chain variable domain of TCR clone 39778 (TRBV11-2, TRBJ2-3)
CASSPGGGATDTQYF

SEQ ID NO: 79557 - protein, 16 aa, Homo sapiens
  CDR3 for alpha chain variable domain of TCR clone 39779 (TRAV12-3, TRAJ53)
CAMSPGSGGSDYKLTF

SEQ ID NO: 79558 - protein, 16 aa, Homo sapiens
  CDR3 for beta chain variable domain of TCR clone 39779 (TRBV4-2, TRBJ1-1)
CASSQAGFGMNTEAFF

SEQ ID NO: 79559 - protein, 16 aa, Homo sapiens
  CDR3 for alpha chain variable domain of TCR clone 39780 (TRAV3, TRAJ21)
CAVRDIGRGNFNKFYF

SEQ ID NO: 79560 - protein, 16 aa, Homo sapiens
  CDR3 for beta chain variable domain of TCR clone 39780 (TRBV12-4, TRBJ1-5)
CASSRPVGGSNQPQHF

SEQ ID NO: 79561 - protein, 12 aa, Homo sapiens
  CDR3 for alpha chain variable domain of TCR clone 39781 (TRAV3, TRAJ20)
CAVRDPDYKPSF

SEQ ID NO: 79562 - protein, 14 aa, Homo sapiens
  CDR3 for beta chain variable domain of TCR clone 39781 (TRBV4-2, TRBJ2-1)
CASGLDRAYNEQFF

SEQ ID NO: 79563 - protein, 12 aa, Homo sapiens
  CDR3 for alpha chain variable domain of TCR clone 39782 (TRAV3, TRAJ20)
CAVRDPDYKLSF

SEQ ID NO: 79564 - protein, 16 aa, Homo sapiens
  CDR3 for beta chain variable domain of TCR clone 39782 (TRBV7-3, TRBJ2-2)
CASSLKRGTLSGELFF

SEQ ID NO: 79565 - protein, 12 aa, Homo sapiens
  CDR3 for alpha chain variable domain of TCR clone 39783 (TRAV21, TRAJ39)
CAADDAGNMLTF

SEQ ID NO: 79566 - protein, 13 aa, Homo sapiens
  CDR3 for beta chain variable domain of TCR clone 39783 (TRBV12-4, TRBJ1-1)
CASSPGTGFEAFF

SEQ ID NO: 79567 - protein, 14 aa, Homo sapiens
  CDR3 for alpha chain variable domain of TCR clone 39784 (TRAV26-1, TRAJ38)
CIADNAGNNRKLIW

SEQ ID NO: 79568 - protein, 13 aa, Homo sapiens
  CDR3 for beta chain variable domain of TCR clone 39784 (TRBV19, TRBJ1-2)
CASSVPGQDDYTF

SEQ ID NO: 79569 - protein, 14 aa, Homo sapiens
  CDR3 for alpha chain variable domain of TCR clone 39785 (TRAV12-2, TRAJ13)
CAVKKTGGYQKVTF

SEQ ID NO: 79570 - protein, 13 aa, Homo sapiens
  CDR3 for beta chain variable domain of TCR clone 39785 (TRBV11-3, TRBJ2-1)
CASSSRRVDEQFF

SEQ ID NO: 79571 - protein, 14 aa, Homo sapiens
  CDR3 for alpha chain variable domain of TCR clone 39786 (TRAV1-1, TRAJ27)
CTVIYNTNAGKSTF

SEQ ID NO: 79572 - protein, 15 aa, Homo sapiens
  CDR3 for beta chain variable domain of TCR clone 39786 (TRBV7-2, TRBJ2-1)
RASSSGLAGGNEQFF

SEQ ID NO: 79573 - protein, 14 aa, Homo sapiens
  CDR3 for alpha chain variable domain of TCR clone 39787 (TRAV30, TRAJ26)
CGTEIVSYGKNFVF

SEQ ID NO: 79574 - protein, 13 aa, Homo sapiens
  CDR3 for beta chain variable domain of TCR clone 39787 (TRBV19, TRBJ1-3)
CASRLSLGNTIYF

SEQ ID NO: 79575 - protein, 14 aa, Homo sapiens
  CDR3 for alpha chain variable domain of TCR clone 39788 (TRAV8-2, TRAJ4)
CVVSPSGGYNTLIF

SEQ ID NO: 79576 - protein, 15 aa, Homo sapiens
  CDR3 for beta chain variable domain of TCR clone 39788 (TRBV4-1, TRBJ1-4)
CASSDTGGTNEKLFF

SEQ ID NO: 79577 - protein, 11 aa, Homo sapiens
  CDR3 for alpha chain variable domain of TCR clone 39789 (TRAV2, TRAJ20)
CAVVNDYKLSS

SEQ ID NO: 79578 - protein, 17 aa, Homo sapiens
  CDR3 for beta chain variable domain of TCR clone 39789 (TRBV28, TRBJ1-1)
CASSLSGTGYENTEAFF

SEQ ID NO: 79579 - protein, 13 aa, Homo sapiens
  CDR3 for alpha chain variable domain of TCR clone 39790 (TRAV8-3, TRAJ44)
CAVVPGNASKLTF

SEQ ID NO: 79580 - protein, 14 aa, Homo sapiens
  CDR3 for beta chain variable domain of TCR clone 39790 (TRBV11-2, TRBJ2-3)
CASRRLARTDTQYF

SEQ ID NO: 79581 - protein, 11 aa, Homo sapiens
  CDR3 for alpha chain variable domain of TCR clone 39791 (TRAV21, TRAJ11)
CAVNGYSTLTS

SEQ ID NO: 79582 - protein, 13 aa, Homo sapiens
  CDR3 for beta chain variable domain of TCR clone 39791 (TRBV19, TRBJ2-7)
CASSIDRTYEQYF

SEQ ID NO: 79583 - protein, 13 aa, Homo sapiens
  CDR3 for alpha chain variable domain of TCR clone 39792 (TRAV13-1, TRAJ49)
CAAMLYTGNQFYF

SEQ ID NO: 79584 - protein, 15 aa, Homo sapiens
  CDR3 for beta chain variable domain of TCR clone 39792 (TRBV12-4, TRBJ1-5)
CASTRGSGLGQPQHF

SEQ ID NO: 79585 - protein, 14 aa, Homo sapiens
  CDR3 for alpha chain variable domain of TCR clone 39793 (TRAV23/DV6, TRAJ6)
CSASRSGGSYIPTF

SEQ ID NO: 79586 - protein, 17 aa, Homo sapiens
  CDR3 for beta chain variable domain of TCR clone 39793 (TRBV20-1, TRBJ2-1)
CSASASGLAGSYNEQFF

SEQ ID NO: 79587 - protein, 11 aa, Homo sapiens
  CDR3 for alpha chain variable domain of TCR clone 39794 (TRAV8-4, TRAJ20)
CAVTNVLTTTS

SEQ ID NO: 79588 - protein, 15 aa, Homo sapiens
  CDR3 for beta chain variable domain of TCR clone 39794 (TRBV20-1, TRBJ2-7)
CSARDRVSGMDEQYF

SEQ ID NO: 79589 - protein, 14 aa, Homo sapiens
  CDR3 for alpha chain variable domain of TCR clone 39795 (TRAV12-2, TRAJ40)
CAVKIPSGTYKYIF

SEQ ID NO: 79590 - protein, 14 aa, Homo sapiens
  CDR3 for beta chain variable domain of TCR clone 39795 (TRBV20-1, TRBJ1-1)
GSAQTRIGGTEAFF

SEQ ID NO: 79591 - protein, 14 aa, Homo sapiens
  CDR3 for alpha chain variable domain of TCR clone 39796 (TRAV13-1, TRAJ44)
CAAKATGTASKLTF

SEQ ID NO: 79592 - protein, 11 aa, Homo sapiens
  CDR3 for beta chain variable domain of TCR clone 39796 (TRBV29-1, TRBJ2-5)
CSEDRTGTQYF

SEQ ID NO: 79593 - protein, 13 aa, Homo sapiens
  CDR3 for alpha chain variable domain of TCR clone 39797 (TRAV2, TRAJ15)
CAVASQAGTALIF

SEQ ID NO: 79594 - protein, 14 aa, Homo sapiens
  CDR3 for beta chain variable domain of TCR clone 39797 (TRBV20-1, TRBJ2-7)
CSAPELAGVGEQYF

SEQ ID NO: 79595 - protein, 23 aa, Homo sapiens
  CDR3 for alpha chain variable domain of TCR clone 39798 (TRAV26-1, TRAJ38)
CIADNAGNNHIQNPDPAVYQLRD

SEQ ID NO: 79596 - protein, 13 aa, Homo sapiens
  CDR3 for beta chain variable domain of TCR clone 39798 (TRBV20-1, TRBJ1-1)
SSARGGGNTEAFF

SEQ ID NO: 79597 - protein, 14 aa, Homo sapiens
  CDR3 for alpha chain variable domain of TCR clone 39799 (TRAV17, TRAJ54)
CATDANQGAQKLVF

SEQ ID NO: 79598 - protein, 12 aa, Homo sapiens
  CDR3 for beta chain variable domain of TCR clone 39799 (TRBV6-3, TRBJ2-1)
CASSGSYNEQFL

SEQ ID NO: 79599 - protein, 13 aa, Homo sapiens
  CDR3 for alpha chain variable domain of TCR clone 39800 (TRAV26-2, TRAJ43)
CILRAVNNNDMRF

SEQ ID NO: 79600 - protein, 15 aa, Homo sapiens
  CDR3 for beta chain variable domain of TCR clone 39800 (TRBV7-2, TRBJ2-1)
CASTHGTGIYNGRFF

SEQ ID NO: 79601 - protein, 15 aa, Homo sapiens
  CDR3 for alpha chain variable domain of TCR clone 39801 (TRAV8-3, TRAJ40)
CAAPSLGSGTYRYIF

SEQ ID NO: 79602 - protein, 12 aa, Homo sapiens
  CDR3 for beta chain variable domain of TCR clone 39801 (TRBV7-3, TRBJ2-2)
CASSLGGGELFF

SEQ ID NO: 79603 - protein, 13 aa, Homo sapiens
  CDR3 for alpha chain variable domain of TCR clone 39802 (TRAV23/DV6, TRAJ58)
CAATGTSGPRLTF

SEQ ID NO: 79604 - protein, 13 aa, Homo sapiens
  CDR3 for beta chain variable domain of TCR clone 39802 (TRBV5-5, TRBJ1-2)
CASSFWRGEDYTF

SEQ ID NO: 79605 - protein, 15 aa, Homo sapiens
  CDR3 for alpha chain variable domain of TCR clone 39803 (TRAV3, TRAJ4)
CAVRDGTGGYNKLIF

SEQ ID NO: 79606 - protein, 14 aa, Homo sapiens
  CDR3 for beta chain variable domain of TCR clone 39803 (TRBV6-1, TRBJ1-3)
CASVQGGGGNTIYF

SEQ ID NO: 79607 - protein, 11 aa, Homo sapiens
  CDR3 for alpha chain variable domain of TCR clone 39804 (TRAV12-3, TRAJ43)
CAMSVSNDMRF

SEQ ID NO: 79608 - protein, 13 aa, Homo sapiens
  CDR3 for beta chain variable domain of TCR clone 39804 (TRBV20-1, TRBJ1-1)
CSAPVGGGTEAFF

SEQ ID NO: 79609 - protein, 13 aa, Homo sapiens
  CDR3 for alpha chain variable domain of TCR clone 39805 (TRAV21, TRAJ57)
CAVTQGGSEKLVF

SEQ ID NO: 79610 - protein, 13 aa, Homo sapiens
  CDR3 for beta chain variable domain of TCR clone 39805 (TRBV6-6, TRBJ1-5)
CASRAYQDQPQHF

SEQ ID NO: 79611 - protein, 11 aa, Homo sapiens
  CDR3 for alpha chain variable domain of TCR clone 39806 (TRAV3, TRAJ21)
CAVGNFNKFYF

SEQ ID NO: 79612 - protein, 13 aa, Homo sapiens
  CDR3 for beta chain variable domain of TCR clone 39806 (TRBV7-9, TRBJ1-2)
CASSLKQNYGYTF

SEQ ID NO: 79613 - protein, 14 aa, Homo sapiens
  CDR3 for alpha chain variable domain of TCR clone 39807 (TRAV17, TRAJ16)
CATADFSDGQKLLF

SEQ ID NO: 79614 - protein, 20 aa, Homo sapiens
  CDR3 for beta chain variable domain of TCR clone 39807 (TRBV28, TRBJ2-1)
CASTPIGRSPGLAGGNEQFF

SEQ ID NO: 79615 - protein, 14 aa, Homo sapiens
  CDR3 for alpha chain variable domain of TCR clone 39808 (TRAV13-1, TRAJ35)
CAASKGGYGNVLHC

SEQ ID NO: 79616 - protein, 13 aa, Homo sapiens
  CDR3 for beta chain variable domain of TCR clone 39808 (TRBV7-3, TRBJ1-1)
CASSQDWGAEAFF

SEQ ID NO: 79617 - protein, 12 aa, Homo sapiens
  CDR3 for alpha chain variable domain of TCR clone 39809 (TRAV2, TRAJ5)
CALDTGRRALTL

SEQ ID NO: 79618 - protein, 15 aa, Homo sapiens
  CDR3 for beta chain variable domain of TCR clone 39809 (TRBV10-3, TRBJ2-1)
CAISDVQDRAYEQFF

SEQ ID NO: 79619 - protein, 10 aa, Homo sapiens
  CDR3 for alpha chain variable domain of TCR clone 39810 (TRAV5, TRAJ34)
CAEDTDKLIF

SEQ ID NO: 79620 - protein, 14 aa, Homo sapiens
  CDR3 for beta chain variable domain of TCR clone 39810 (TRBV25-1, TRBJ1-1)
CASTHLGGNTEAFF

SEQ ID NO: 79621 - protein, 16 aa, Homo sapiens
  CDR3 for alpha chain variable domain of TCR clone 39811 (TRAV12-3, TRAJ53)
CAMSVGSGGSNYKLTF

SEQ ID NO: 79622 - protein, 13 aa, Homo sapiens
  CDR3 for beta chain variable domain of TCR clone 39811 (TRBV7-6, TRBJ1-2)
CASSVVADYGYTF

SEQ ID NO: 79623 - protein, 15 aa, Homo sapiens
  CDR3 for alpha chain variable domain of TCR clone 39812 (TRAV25, TRAJ53)
CAATGGGGSNYKLTF

SEQ ID NO: 79624 - protein, 15 aa, Homo sapiens
  CDR3 for beta chain variable domain of TCR clone 39812 (TRBV5-4, TRBJ2-1)
CASSFGQGLNNEQFF

SEQ ID NO: 79625 - protein, 14 aa, Homo sapiens
  CDR3 for alpha chain variable domain of TCR clone 39813 (TRAV12-3, TRAJ10)
SHLPLTGGGNKLTF

SEQ ID NO: 79626 - protein, 15 aa, Homo sapiens
  CDR3 for beta chain variable domain of TCR clone 39813 (TRBV11-2, TRBJ1-3)
RASSLDGTVGNTIYF

SEQ ID NO: 79627 - protein, 14 aa, Homo sapiens
  CDR3 for alpha chain variable domain of TCR clone 39814 (TRAV1-2, TRAJ29)
CAVRELTSATPLVF

SEQ ID NO: 79628 - protein, 15 aa, Homo sapiens
  CDR3 for beta chain variable domain of TCR clone 39814 (TRBV20-1, TRBJ2-7)
CSARDRVSGMDEQYF

SEQ ID NO: 79629 - protein, 14 aa, Homo sapiens
  CDR3 for alpha chain variable domain of TCR clone 39815 (TRAV29/DV5, TRAJ36)
CAARRKTGVNNLFF

SEQ ID NO: 79630 - protein, 14 aa, Homo sapiens
  CDR3 for beta chain variable domain of TCR clone 39815 (TRBV12-5, TRBJ2-5)
CASGSRTHQETQYF

SEQ ID NO: 79631 - protein, 13 aa, Homo sapiens
  CDR3 for alpha chain variable domain of TCR clone 39816 (TRAV21, TRAJ56)
CAVRTGASSKLTF

SEQ ID NO: 79632 - protein, 15 aa, Homo sapiens
  CDR3 for beta chain variable domain of TCR clone 39816 (TRBV7-9, TRBJ1-1)
CASSHRGTVNTEAFF

SEQ ID NO: 79633 - protein, 13 aa, Homo sapiens
  CDR3 for alpha chain variable domain of TCR clone 39817 (TRAV12-2, TRAJ37)
CAGGSGNTGKLIF

SEQ ID NO: 79634 - protein, 14 aa, Homo sapiens
  CDR3 for beta chain variable domain of TCR clone 39817 (TRBV6-1, TRBJ2-6)
CASQQGAGANGLTF

SEQ ID NO: 79635 - protein, 14 aa, Homo sapiens
  CDR3 for alpha chain variable domain of TCR clone 39818 (TRAV12-3, TRAJ10)
SHLPLTGGGNKLTF

SEQ ID NO: 79636 - protein, 15 aa, Homo sapiens
  CDR3 for beta chain variable domain of TCR clone 39818 (TRBV7-9, TRBJ1-6)
CASSSPGRGNSPLHC

SEQ ID NO: 79637 - protein, 13 aa, Homo sapiens
  CDR3 for alpha chain variable domain of TCR clone 39819 (TRAV21, TRAJ57)
CAVTQGGSEKLVF

SEQ ID NO: 79638 - protein, 16 aa, Homo sapiens
  CDR3 for beta chain variable domain of TCR clone 39819 (TRBV29-1, TRBJ2-7)
CSVEDAEDGTVYEQYF

SEQ ID NO: 79639 - protein, 13 aa, Homo sapiens
  CDR3 for alpha chain variable domain of TCR clone 39820 (TRAV20, TRAJ45)
CGYSVGGADGLTF

SEQ ID NO: 79640 - protein, 15 aa, Homo sapiens
  CDR3 for beta chain variable domain of TCR clone 39820 (TRBV27, TRBJ2-7)
CASSTAGTGSYEQYF

SEQ ID NO: 79641 - protein, 16 aa, Homo sapiens
  CDR3 for alpha chain variable domain of TCR clone 39821 (TRAV30, TRAJ24)
CGTEIVDADSWGKFQF

SEQ ID NO: 79642 - protein, 13 aa, Homo sapiens
  CDR3 for beta chain variable domain of TCR clone 39821 (TRBV4-1, TRBJ1-1)
CASSRKMNTEAFF

SEQ ID NO: 79643 - protein, 12 aa, Homo sapiens
  CDR3 for alpha chain variable domain of TCR clone 39822 (TRAV25, TRAJ7)
CAGSYGNNRLAF

SEQ ID NO: 79644 - protein, 16 aa, Homo sapiens
  CDR3 for beta chain variable domain of TCR clone 39822 (TRBV5-8, TRBJ2-2)
CASSLINPGGAGELFF

SEQ ID NO: 79645 - protein, 14 aa, Homo sapiens
  CDR3 for alpha chain variable domain of TCR clone 39823 (TRAV13-1, TRAJ35)
CAASKGGFGNVLHC

SEQ ID NO: 79646 - protein, 15 aa, Homo sapiens
  CDR3 for beta chain variable domain of TCR clone 39823 (TRBV5-1, TRBJ2-1)
CASSPPRAPYNEQFF

SEQ ID NO: 79647 - protein, 13 aa, Homo sapiens
  CDR3 for alpha chain variable domain of TCR clone 39824 (TRAV8-3, TRAJ48)
CAVVPFGNEKLTF

SEQ ID NO: 79648 - protein, 15 aa, Homo sapiens
  CDR3 for beta chain variable domain of TCR clone 39824 (TRBV11-2, TRBJ2-1)
RASSSPSTRYNEQFF

SEQ ID NO: 79649 - protein, 15 aa, Homo sapiens
  CDR3 for alpha chain variable domain of TCR clone 39825 (TRAV23/DV6, TRAJ18)
CAARYRGSTLGRLYF

SEQ ID NO: 79650 - protein, 14 aa, Homo sapiens
  CDR3 for beta chain variable domain of TCR clone 39825 (TRBV19, TRBJ2-1)
CASPTFVLSGEQFF

SEQ ID NO: 79651 - protein, 14 aa, Homo sapiens
  CDR3 for alpha chain variable domain of TCR clone 39826 (TRAV26-1, TRAJ38)
CIADNAGNNRKLIW

SEQ ID NO: 79652 - protein, 15 aa, Homo sapiens
  CDR3 for beta chain variable domain of TCR clone 39826 (TRBV7-9, TRBJ1-5)
CASSQGHQPNQPQHF

SEQ ID NO: 79653 - protein, 13 aa, Homo sapiens
  CDR3 for alpha chain variable domain of TCR clone 39827 (TRAV8-3, TRAJ44)
CAVVPGTAGKLTF

SEQ ID NO: 79654 - protein, 14 aa, Homo sapiens
  CDR3 for beta chain variable domain of TCR clone 39827 (TRBV11-2, TRBJ2-3)
CASSRLARTDTQYF

SEQ ID NO: 79655 - protein, 14 aa, Homo sapiens
  CDR3 for alpha chain variable domain of TCR clone 39828 (TRAV35, TRAJ33)
CAGSSQDSNYQLIW

SEQ ID NO: 79656 - protein, 15 aa, Homo sapiens
  CDR3 for beta chain variable domain of TCR clone 39828 (TRBV20-1, TRBJ2-7)
CSAESGTSGAYEQCF

SEQ ID NO: 79657 - protein, 13 aa, Homo sapiens
  CDR3 for alpha chain variable domain of TCR clone 39829 (TRAV3, TRAJ40)
CAVVTSGTYKYIF

SEQ ID NO: 79658 - protein, 14 aa, Homo sapiens
  CDR3 for beta chain variable domain of TCR clone 39829 (TRBV19, TRBJ2-1)
CASPTFVLSGEQFF

SEQ ID NO: 79659 - protein, 16 aa, Homo sapiens
  CDR3 for alpha chain variable domain of TCR clone 39830 (TRAV12-2, TRAJ32)
CAVNLGQGGATNKLIF

SEQ ID NO: 79660 - protein, 15 aa, Homo sapiens
  CDR3 for beta chain variable domain of TCR clone 39830 (TRBV20-1, TRBJ2-7)
CGARGPLAGGREQYF

SEQ ID NO: 79661 - protein, 12 aa, Homo sapiens
  CDR3 for alpha chain variable domain of TCR clone 39831 (TRAV12-2, TRAJ30)
CAVRNRDDKIIF

SEQ ID NO: 79662 - protein, 17 aa, Homo sapiens
  CDR3 for beta chain variable domain of TCR clone 39831 (TRBV13, TRBJ2-3)
CASSLSRVAGGRNTQYL

SEQ ID NO: 79663 - protein, 11 aa, Homo sapiens
  CDR3 for alpha chain variable domain of TCR clone 39832 (TRAV23/DV6, TRAJ48)
CAPRWGEKLTF

SEQ ID NO: 79664 - protein, 13 aa, Homo sapiens
  CDR3 for beta chain variable domain of TCR clone 39832 (TRBV12-4, TRBJ2-5)
CASGPGTEETQYF

SEQ ID NO: 79665 - protein, 19 aa, Homo sapiens
  CDR3 for alpha chain variable domain of TCR clone 39833 (TRAV3, TRAJ6)
CAVRDRNPSRSGGSSIPTF

SEQ ID NO: 79666 - protein, 15 aa, Homo sapiens
  CDR3 for beta chain variable domain of TCR clone 39833 (TRBV18, TRBJ2-7)
CASSPTFMDSYEQYF

SEQ ID NO: 79667 - protein, 18 aa, Homo sapiens
  CDR3 for alpha chain variable domain of TCR clone 39834 (TRAV12-3, TRAJ52)
CAMSVGGAGGTSYGKLTF

SEQ ID NO: 79668 - protein, 15 aa, Homo sapiens
  CDR3 for beta chain variable domain of TCR clone 39834 (TRBV27, TRBJ1-4)
CASSAQQDLNEKLFF

SEQ ID NO: 79669 - protein, 12 aa, Homo sapiens
  CDR3 for alpha chain variable domain of TCR clone 39835 (TRAV12-2, TRAJ10)
WGVTGGGNKLTF

SEQ ID NO: 79670 - protein, 16 aa, Homo sapiens
  CDR3 for beta chain variable domain of TCR clone 39835 (TRBV27, TRBJ2-2)
CASSFRGLVRTGELFF

SEQ ID NO: 79671 - protein, 14 aa, Homo sapiens
  CDR3 for alpha chain variable domain of TCR clone 39836 (TRAV1-2, TRAJ16)
CAVNRFSDGQKLPF

SEQ ID NO: 79672 - protein, 16 aa, Homo sapiens
  CDR3 for beta chain variable domain of TCR clone 39836 (TRBV4-1, TRBJ1-1)
CASSQDAGMGNTEAFF

SEQ ID NO: 79673 - protein, 14 aa, Homo sapiens
  CDR3 for alpha chain variable domain of TCR clone 39837 (TRAV30, TRAJ33)
CGTVAPRSNYQLIW

SEQ ID NO: 79674 - protein, 13 aa, Homo sapiens
  CDR3 for beta chain variable domain of TCR clone 39837 (TRBV7-3, TRBJ1-1)
CASSQDWGAEAFF

SEQ ID NO: 79675 - protein, 15 aa, Homo sapiens
  CDR3 for alpha chain variable domain of TCR clone 39838 (TRAV26-1, TRAJ56)
CIVRADNGANSKLTF

SEQ ID NO: 79676 - protein, 15 aa, Homo sapiens
  CDR3 for beta chain variable domain of TCR clone 39838 (TRBV20-1, TRBJ2-7)
CSARDPTEVGHEQYF

SEQ ID NO: 79677 - protein, 11 aa, Homo sapiens
  CDR3 for alpha chain variable domain of TCR clone 39839 (TRAV13-1, TRAJ39)
CSSHAGNMLTF

SEQ ID NO: 79678 - protein, 14 aa, Homo sapiens
  CDR3 for beta chain variable domain of TCR clone 39839 (TRBV11-2, TRBJ1-5)
CASSLDRGRQPQHF

SEQ ID NO: 79679 - protein, 16 aa, Homo sapiens
  CDR3 for alpha chain variable domain of TCR clone 39840 (TRAV1-2, TRAJ10)
CAVRGVLTGGGNKLTF

SEQ ID NO: 79680 - protein, 15 aa, Homo sapiens
  CDR3 for beta chain variable domain of TCR clone 39840 (TRBV11-3, TRBJ2-7)
CASSPGPASSYEQYF

SEQ ID NO: 79681 - protein, 14 aa, Homo sapiens
  CDR3 for alpha chain variable domain of TCR clone 39841 (TRAV12-2, TRAJ5)
CAVNRSTGRRALTF

SEQ ID NO: 79682 - protein, 12 aa, Homo sapiens
  CDR3 for beta chain variable domain of TCR clone 39841 (TRBV19, TRBJ1-5)
CAISIAQQPQHF

SEQ ID NO: 79683 - protein, 12 aa, Homo sapiens
  CDR3 for alpha chain variable domain of TCR clone 39842 (TRAV1-1, TRAJ24)
CAVRGSWGKFQF

SEQ ID NO: 79684 - protein, 15 aa, Homo sapiens
  CDR3 for beta chain variable domain of TCR clone 39842 (TRBV11-3, TRBJ2-3)
CASLKDGREGDTQYF

SEQ ID NO: 79685 - protein, 16 aa, Homo sapiens
  CDR3 for alpha chain variable domain of TCR clone 39843 (TRAV1-2, TRAJ10)
CAVRGVLTGGGNKLTF

SEQ ID NO: 79686 - protein, 14 aa, Homo sapiens
  CDR3 for beta chain variable domain of TCR clone 39843 (TRBV7-6, TRBJ2-3)
CASSLGTVTDTQYF

SEQ ID NO: 79687 - protein, 23 aa, Homo sapiens
  CDR3 for alpha chain variable domain of TCR clone 39844 (TRAV26-1, )
CIVRPLNAGNDHIQNPDPAVYQL

SEQ ID NO: 79688 - protein, 13 aa, Homo sapiens
  CDR3 for beta chain variable domain of TCR clone 39844 (TRBV18, TRBJ1-1)
CASSPNGDTEAFF

SEQ ID NO: 79689 - protein, 15 aa, Homo sapiens
  CDR3 for alpha chain variable domain of TCR clone 39845 (TRAV8-2, TRAJ40)
CVVLGTTSGTYKCIF

SEQ ID NO: 79690 - protein, 16 aa, Homo sapiens
  CDR3 for beta chain variable domain of TCR clone 39845 (TRBV7-3, TRBJ2-1)
CASSLEGYRSYNEQFF

SEQ ID NO: 79691 - protein, 15 aa, Homo sapiens
  CDR3 for alpha chain variable domain of TCR clone 39846 (TRAV17, TRAJ57)
CATGPSQGGSEKLVF

SEQ ID NO: 79692 - protein, 16 aa, Homo sapiens
  CDR3 for beta chain variable domain of TCR clone 39846 (TRBV12-4, TRBJ1-5)
CASSLPVGGSNQPQHF

SEQ ID NO: 79693 - protein, 16 aa, Homo sapiens
  CDR3 for alpha chain variable domain of TCR clone 39847 (TRAV3, TRAJ37)
CAVRPHGSGTTGKLIF

SEQ ID NO: 79694 - protein, 16 aa, Homo sapiens
  CDR3 for beta chain variable domain of TCR clone 39847 (TRBV9, TRBJ1-2)
CASSVEEKVSPYGYTF

SEQ ID NO: 79695 - protein, 10 aa, Homo sapiens
  CDR3 for alpha chain variable domain of TCR clone 39848 (TRAV13-2, TRAJ49)
CADTGNQFYF

SEQ ID NO: 79696 - protein, 14 aa, Homo sapiens
  CDR3 for beta chain variable domain of TCR clone 39848 (TRBV19, TRBJ2-1)
CASPTFVLSGEQFF

SEQ ID NO: 79697 - protein, 14 aa, Homo sapiens
  CDR3 for alpha chain variable domain of TCR clone 39849 (TRAV13-1, TRAJ44)
CAAKATGTASKLTF

SEQ ID NO: 79698 - protein, 14 aa, Homo sapiens
  CDR3 for beta chain variable domain of TCR clone 39849 (TRBV18, TRBJ2-7)
CASSPRGGAYEQYF

SEQ ID NO: 79699 - protein, 13 aa, Homo sapiens
  CDR3 for alpha chain variable domain of TCR clone 39850 (TRAV1-2, TRAJ9)
CAALSTGGFKTIF

SEQ ID NO: 79700 - protein, 17 aa, Homo sapiens
  CDR3 for beta chain variable domain of TCR clone 39850 (TRBV13, TRBJ2-3)
CASSLSRVAGGRNTQYF

SEQ ID NO: 79701 - protein, 11 aa, Homo sapiens
  CDR3 for alpha chain variable domain of TCR clone 39851 (TRAV21, TRAJ34)
CAVTNTDKLIF

SEQ ID NO: 79702 - protein, 13 aa, Homo sapiens
  CDR3 for beta chain variable domain of TCR clone 39851 (TRBV29-1, TRBJ1-3)
CSVEGGSGKTIYF

SEQ ID NO: 79703 - protein, 19 aa, Homo sapiens
  CDR3 for alpha chain variable domain of TCR clone 39852 (TRAV8-3, TRAJ34)
LSTSVPWVWGLRNTDKLIF

SEQ ID NO: 79704 - protein, 13 aa, Homo sapiens
  CDR3 for beta chain variable domain of TCR clone 39852 (TRBV12-4, TRBJ2-7)
CASSLSGVYEQYF

SEQ ID NO: 79705 - protein, 13 aa, Homo sapiens
  CDR3 for alpha chain variable domain of TCR clone 39853 (TRAV8-3, TRAJ48)
CAVVHFGNEKLTF

SEQ ID NO: 79706 - protein, 15 aa, Homo sapiens
  CDR3 for beta chain variable domain of TCR clone 39853 (TRBV11-2, TRBJ2-1)
CASSSPSTRYNEQFF

SEQ ID NO: 79707 - protein, 11 aa, Homo sapiens
  CDR3 for alpha chain variable domain of TCR clone 39854 (TRAV2, TRAJ13)
CASGGYQKVTF

SEQ ID NO: 79708 - protein, 13 aa, Homo sapiens
  CDR3 for beta chain variable domain of TCR clone 39854 (TRBV20-1, TRBJ1-1)
CSTPLGGGTEAFF

SEQ ID NO: 79709 - protein, 13 aa, Homo sapiens
  CDR3 for alpha chain variable domain of TCR clone 39855 (TRAV8-3, TRAJ36)
CAVGATGANNLFF

SEQ ID NO: 79710 - protein, 13 aa, Homo sapiens
  CDR3 for beta chain variable domain of TCR clone 39855 (TRBV4-2, TRBJ1-1)
CASSQAGNTEAFF

SEQ ID NO: 79711 - protein, 13 aa, Homo sapiens
  CDR3 for alpha chain variable domain of TCR clone 39856 (TRAV27, TRAJ45)
CRSSGGGADGLTF

SEQ ID NO: 79712 - protein, 17 aa, Homo sapiens
  CDR3 for beta chain variable domain of TCR clone 39856 (TRBV11-2, TRBJ2-1)
CASSLYPPGVDYNEQFF

SEQ ID NO: 79713 - protein, 16 aa, Homo sapiens
  CDR3 for alpha chain variable domain of TCR clone 39857 (TRAV3, TRAJ5)
CAVRNLMDTGRRALTF

SEQ ID NO: 79714 - protein, 15 aa, Homo sapiens
  CDR3 for beta chain variable domain of TCR clone 39857 (TRBV20-1, TRBJ2-7)
CSARDRVSGMDEQYF

SEQ ID NO: 79715 - protein, 14 aa, Homo sapiens
  CDR3 for alpha chain variable domain of TCR clone 39858 (TRAV1-2, TRAJ16)
CAVNRFSDGQKLLF

SEQ ID NO: 79716 - protein, 14 aa, Homo sapiens
  CDR3 for beta chain variable domain of TCR clone 39858 (TRBV7-2, TRBJ1-1)
CASSLLTGTTEAFF

SEQ ID NO: 79717 - protein, 12 aa, Homo sapiens
  CDR3 for alpha chain variable domain of TCR clone 39859 (TRAV25, TRAJ33)
CEGPDSNYQLIW

SEQ ID NO: 79718 - protein, 20 aa, Homo sapiens
  CDR3 for beta chain variable domain of TCR clone 39859 (TRBV4-1, TRBJ2-2)
CASSQASPPGLASNTGELFF

SEQ ID NO: 79719 - protein, 18 aa, Homo sapiens
  CDR3 for alpha chain variable domain of TCR clone 39860 (TRAV13-1, TRAJ52)
CAAKNPNAGGTSYGKLTF

SEQ ID NO: 79720 - protein, 15 aa, Homo sapiens
  CDR3 for beta chain variable domain of TCR clone 39860 (TRBV11-2, TRBJ2-2)
CASSSDRVNAGELFF

SEQ ID NO: 79721 - protein, 17 aa, Homo sapiens
  CDR3 for alpha chain variable domain of TCR clone 39861 (TRAV13-1, TRAJ52)
CAASSGAGGTSYGKLTF

SEQ ID NO: 79722 - protein, 15 aa, Homo sapiens
  CDR3 for beta chain variable domain of TCR clone 39861 (TRBV2, TRBJ2-1)
CAISELAGSYNEQFF

SEQ ID NO: 79723 - protein, 13 aa, Homo sapiens
  CDR3 for alpha chain variable domain of TCR clone 39862 (TRAV20, TRAJ34)
CAVSSYNTDKLVF

SEQ ID NO: 79724 - protein, 13 aa, Homo sapiens
  CDR3 for beta chain variable domain of TCR clone 39862 (TRBV7-9, TRBJ1-2)
CASSLKQNYGYTF

SEQ ID NO: 79725 - protein, 15 aa, Homo sapiens
  CDR3 for alpha chain variable domain of TCR clone 39863 (TRAV13-1, TRAJ10)
CAATILTGGGNKLTF

SEQ ID NO: 79726 - protein, 15 aa, Homo sapiens
  CDR3 for beta chain variable domain of TCR clone 39863 (TRBV2, TRBJ2-7)
CASTLLGSEATEQYF

SEQ ID NO: 79727 - protein, 14 aa, Homo sapiens
  CDR3 for alpha chain variable domain of TCR clone 39864 (TRAV13-1, TRAJ44)
CAAKATGTASKLTF

SEQ ID NO: 79728 - protein, 14 aa, Homo sapiens
  CDR3 for beta chain variable domain of TCR clone 39864 (TRBV19, TRBJ2-2)
RASSTLHRSGELFF

SEQ ID NO: 79729 - protein, 15 aa, Homo sapiens
  CDR3 for alpha chain variable domain of TCR clone 39865 (TRAV17, TRAJ23)
CATDAEDNQGGKLIF

SEQ ID NO: 79730 - protein, 12 aa, Homo sapiens
  CDR3 for beta chain variable domain of TCR clone 39865 (TRBV2, TRBJ2-1)
CAKREGYDEQFF

SEQ ID NO: 79731 - protein, 13 aa, Homo sapiens
  CDR3 for alpha chain variable domain of TCR clone 39866 (TRAV13-1, TRAJ43)
CAASKNNNNDMRF

SEQ ID NO: 79732 - protein, 13 aa, Homo sapiens
  CDR3 for beta chain variable domain of TCR clone 39866 (TRBV19, TRBJ2-2)
CASSIWSTGELFF

SEQ ID NO: 79733 - protein, 13 aa, Homo sapiens
  CDR3 for alpha chain variable domain of TCR clone 39867 (TRAV2, TRAJ15)
CAVASQAGTALIF

SEQ ID NO: 79734 - protein, 13 aa, Homo sapiens
  CDR3 for beta chain variable domain of TCR clone 39867 (TRBV6-4, TRBJ1-5)
CASSADLNQPQHF

SEQ ID NO: 79735 - protein, 11 aa, Homo sapiens
  CDR3 for alpha chain variable domain of TCR clone 39868 (TRAV13-2, TRAJ23)
CAESPRGKLIF

SEQ ID NO: 79736 - protein, 20 aa, Homo sapiens
  CDR3 for beta chain variable domain of TCR clone 39868 (TRBV6-5, TRBJ1-1)
CASSYSAPGGQGALKLSLDK

SEQ ID NO: 79737 - protein, 13 aa, Homo sapiens
  CDR3 for alpha chain variable domain of TCR clone 39869 (TRAV8-3, TRAJ43)
CAVGPDTNNDMRF

SEQ ID NO: 79738 - protein, 12 aa, Homo sapiens
  CDR3 for beta chain variable domain of TCR clone 39869 (TRBV7-2, TRBJ1-6)
CASSLSSSPLHF

SEQ ID NO: 79739 - protein, 17 aa, Homo sapiens
  CDR3 for alpha chain variable domain of TCR clone 39870 (TRAV13-1, TRAJ52)
CAAGRNAGGTSYGKLTF

SEQ ID NO: 79740 - protein, 20 aa, Homo sapiens
  CDR3 for beta chain variable domain of TCR clone 39870 (TRBV7-8, TRBJ2-2)
CASSHLFPGPTIHITGELFF

SEQ ID NO: 79741 - protein, 11 aa, Homo sapiens
  CDR3 for alpha chain variable domain of TCR clone 39871 (TRAV2, TRAJ33)
CAVESNYQLIW

SEQ ID NO: 79742 - protein, 14 aa, Homo sapiens
  CDR3 for beta chain variable domain of TCR clone 39871 (TRBV19, TRBJ2-1)
CASSPGLAPNEQFF

SEQ ID NO: 79743 - protein, 16 aa, Homo sapiens
  CDR3 for alpha chain variable domain of TCR clone 39872 (TRAV16, TRAJ4)
CALSRMFSGGYNKLIF

SEQ ID NO: 79744 - protein, 16 aa, Homo sapiens
  CDR3 for beta chain variable domain of TCR clone 39872 (TRBV24-1, TRBJ2-3)
CATSDPGTGATDAQYF

SEQ ID NO: 79745 - protein, 14 aa, Homo sapiens
  CDR3 for alpha chain variable domain of TCR clone 39873 (TRAV29/DV5, TRAJ36)
CAARRKTGANNLFF

SEQ ID NO: 79746 - protein, 14 aa, Homo sapiens
  CDR3 for beta chain variable domain of TCR clone 39873 (TRBV7-7, TRBJ2-2)
CASSTRASGGELFF

SEQ ID NO: 79747 - protein, 11 aa, Homo sapiens
  CDR3 for alpha chain variable domain of TCR clone 39874 (TRAV21, TRAJ11)
CAVNGYSTLTF

SEQ ID NO: 79748 - protein, 14 aa, Homo sapiens
  CDR3 for beta chain variable domain of TCR clone 39874 (TRBV7-2, TRBJ1-1)
CASSFLTGTTEAFF

SEQ ID NO: 79749 - protein, 13 aa, Homo sapiens
  CDR3 for alpha chain variable domain of TCR clone 39875 (TRAV8-3, TRAJ48)
CAVVPFRNEKLTF

SEQ ID NO: 79750 - protein, 15 aa, Homo sapiens
  CDR3 for beta chain variable domain of TCR clone 39875 (TRBV11-2, TRBJ2-1)
CASSSPSTRYNEQFF

SEQ ID NO: 79751 - protein, 17 aa, Homo sapiens
  CDR3 for alpha chain variable domain of TCR clone 39876 (TRAV3, TRAJ42)
CAVRDRDYGGSQGNLIF

SEQ ID NO: 79752 - protein, 14 aa, Homo sapiens
  CDR3 for beta chain variable domain of TCR clone 39876 (TRBV6-1, TRBJ1-3)
CASVQGGGGNTIYF

SEQ ID NO: 79753 - protein, 13 aa, Homo sapiens
  CDR3 for alpha chain variable domain of TCR clone 39877 (TRAV16, TRAJ29)
CALSRRGNTPLVF

SEQ ID NO: 79754 - protein, 15 aa, Homo sapiens
  CDR3 for beta chain variable domain of TCR clone 39877 (TRBV4-1, TRBJ2-3)
CASSRGQGVPDTQYF

SEQ ID NO: 79755 - protein, 15 aa, Homo sapiens
  CDR3 for alpha chain variable domain of TCR clone 39878 (TRAV17, TRAJ57)
CATGPSQGGSEKLVF

SEQ ID NO: 79756 - protein, 16 aa, Homo sapiens
  CDR3 for beta chain variable domain of TCR clone 39878 (TRBV4-2, TRBJ1-1)
CASSQAGFGMNTEAFF

SEQ ID NO: 79757 - protein, 16 aa, Homo sapiens
  CDR3 for alpha chain variable domain of TCR clone 39879 (TRAV12-3, TRAJ53)
CAMSPGRGGSNYKLTF

SEQ ID NO: 79758 - protein, 12 aa, Homo sapiens
  CDR3 for beta chain variable domain of TCR clone 39879 (TRBV11-2, TRBJ2-2)
CASSLGGGELFF

SEQ ID NO: 79759 - protein, 14 aa, Homo sapiens
  CDR3 for alpha chain variable domain of TCR clone 39880 (TRAV12-3, TRAJ10)
SHLPLTGGGNKLTF

SEQ ID NO: 79760 - protein, 13 aa, Homo sapiens
  CDR3 for beta chain variable domain of TCR clone 39880 (TRBV15, TRBJ2-7)
CATSTTGHYEQYF

SEQ ID NO: 79761 - protein, 18 aa, Homo sapiens
  CDR3 for alpha chain variable domain of TCR clone 39881 (TRAV21, TRAJ52)
CAVRPSPAGGTSYGKLTF

SEQ ID NO: 79762 - protein, 15 aa, Homo sapiens
  CDR3 for beta chain variable domain of TCR clone 39881 (TRBV19, TRBJ1-1)
CASTSGQIQNTEDFF

SEQ ID NO: 79763 - protein, 14 aa, Homo sapiens
  CDR3 for alpha chain variable domain of TCR clone 39882 (TRAV12-1, TRAJ54)
CVVNIYQGAQKLVF

SEQ ID NO: 79764 - protein, 14 aa, Homo sapiens
  CDR3 for beta chain variable domain of TCR clone 39882 (TRBV25-1, TRBJ1-1)
CASTHLGGNTEAFF

SEQ ID NO: 79765 - protein, 16 aa, Homo sapiens
  CDR3 for alpha chain variable domain of TCR clone 39883 (TRAV27, TRAJ13)
CAGAKSDSGGYQKVPF

SEQ ID NO: 79766 - protein, 15 aa, Homo sapiens
  CDR3 for beta chain variable domain of TCR clone 39883 (TRBV29-1, TRBJ2-1)
CSVGRHALFYNEQFF

SEQ ID NO: 79767 - protein, 15 aa, Homo sapiens
  CDR3 for alpha chain variable domain of TCR clone 39884 (TRAV16, TRAJ17)
CSLSGNKAAGNKLTF

SEQ ID NO: 79768 - protein, 16 aa, Homo sapiens
  CDR3 for beta chain variable domain of TCR clone 39884 (TRBV7-6, TRBJ1-6)
CASSSLPAGEYSPLHF

SEQ ID NO: 79769 - protein, 14 aa, Homo sapiens
  CDR3 for alpha chain variable domain of TCR clone 39885 (TRAV12-1, TRAJ13)
CVVIDSGGYQKVTF

SEQ ID NO: 79770 - protein, 12 aa, Homo sapiens
  CDR3 for beta chain variable domain of TCR clone 39885 (TRBV29-1, TRBJ2-3)
CGVTGGADTQYF

SEQ ID NO: 79771 - protein, 15 aa, Homo sapiens
  CDR3 for alpha chain variable domain of TCR clone 39886 (TRAV8-3, TRAJ27)
SAVGPSKTNAGKSTF

SEQ ID NO: 79772 - protein, 15 aa, Homo sapiens
  CDR3 for beta chain variable domain of TCR clone 39886 (TRBV7-2, TRBJ2-1)
CASSSGLAGGNEQFF

SEQ ID NO: 79773 - protein, 14 aa, Homo sapiens
  CDR3 for alpha chain variable domain of TCR clone 39887 (TRAV13-1, TRAJ9)
CAASALAGGFKTIF

SEQ ID NO: 79774 - protein, 13 aa, Homo sapiens
  CDR3 for beta chain variable domain of TCR clone 39887 (TRBV20-1, TRBJ1-1)
CSAGTVGNTEAFF

SEQ ID NO: 79775 - protein, 13 aa, Homo sapiens
  CDR3 for alpha chain variable domain of TCR clone 39888 (TRAV12-3, TRAJ9)
CAMRNTGDFKTIF

SEQ ID NO: 79776 - protein, 14 aa, Homo sapiens
  CDR3 for beta chain variable domain of TCR clone 39888 (TRBV11-2, TRBJ2-7)
CASSSTGEGYEQYF

SEQ ID NO: 79777 - protein, 22 aa, Homo sapiens
  CDR3 for alpha chain variable domain of TCR clone 39889 (TRAV1-2, TRAJ6)
CAVSLSGGSYIPTLEEEPALLF

SEQ ID NO: 79778 - protein, 15 aa, Homo sapiens
  CDR3 for beta chain variable domain of TCR clone 39889 (TRBV28, TRBJ2-7)
CASSPGGRGFYEQYF

SEQ ID NO: 79779 - protein, 14 aa, Homo sapiens
  CDR3 for alpha chain variable domain of TCR clone 39890 (TRAV16, TRAJ15)
CALSGPQAGTALIF

SEQ ID NO: 79780 - protein, 12 aa, Homo sapiens
  CDR3 for beta chain variable domain of TCR clone 39890 (TRBV18, TRBJ2-5)
CASSPSKEAQYF

SEQ ID NO: 79781 - protein, 14 aa, Homo sapiens
  CDR3 for alpha chain variable domain of TCR clone 39891 (TRAV17, TRAJ54)
CATDANQGAQKLGF

SEQ ID NO: 79782 - protein, 12 aa, Homo sapiens
  CDR3 for beta chain variable domain of TCR clone 39891 (TRBV7-9, TRBJ2-7)
CASSIKREEQYF

SEQ ID NO: 79783 - protein, 13 aa, Homo sapiens
  CDR3 for alpha chain variable domain of TCR clone 39892 (TRAV27, TRAJ17)
CAGAATAGNKLTF

SEQ ID NO: 79784 - protein, 16 aa, Homo sapiens
  CDR3 for beta chain variable domain of TCR clone 39892 (TRBV13, TRBJ2-2)
CASSPRTGEHTGELFF

SEQ ID NO: 79785 - protein, 17 aa, Homo sapiens
  CDR3 for alpha chain variable domain of TCR clone 39893 (TRAV3, TRAJ42)
CAVRDRDYGGSQGNLIF

SEQ ID NO: 79786 - protein, 11 aa, Homo sapiens
  CDR3 for beta chain variable domain of TCR clone 39893 (TRBV28, TRBJ2-7)
CASGPLPEQYF

SEQ ID NO: 79787 - protein, 15 aa, Homo sapiens
  CDR3 for alpha chain variable domain of TCR clone 39894 (TRAV3, TRAJ22)
CAVRDRGGSARQLTF

SEQ ID NO: 79788 - protein, 16 aa, Homo sapiens
  CDR3 for beta chain variable domain of TCR clone 39894 (TRBV5-4, TRBJ2-3)
CASQQPGAGGADTKYF

SEQ ID NO: 79789 - protein, 14 aa, Homo sapiens
  CDR3 for alpha chain variable domain of TCR clone 39895 (TRAV20, TRAJ26)
CAVQAAIYGQNFVF

SEQ ID NO: 79790 - protein, 14 aa, Homo sapiens
  CDR3 for beta chain variable domain of TCR clone 39895 (TRBV27, TRBJ2-2)
CASSLGDTTGELSF

SEQ ID NO: 79791 - protein, 20 aa, Homo sapiens
  CDR3 for alpha chain variable domain of TCR clone 39896 (TRAV26-1, TRAJ42)
CCVLSHRQTYYGGSQGNLIF

SEQ ID NO: 79792 - protein, 16 aa, Homo sapiens
  CDR3 for beta chain variable domain of TCR clone 39896 (TRBV7-3, TRBJ2-2)
CASSLKRGTLSGELFF

SEQ ID NO: 79793 - protein, 14 aa, Homo sapiens
  CDR3 for alpha chain variable domain of TCR clone 39897 (TRAV12-2, TRAJ13)
CAVKKTGGYQKLTF

SEQ ID NO: 79794 - protein, 15 aa, Homo sapiens
  CDR3 for beta chain variable domain of TCR clone 39897 (TRBV27, TRBJ2-1)
CASSNGGGSSNEQFF

SEQ ID NO: 79795 - protein, 11 aa, Homo sapiens
  CDR3 for alpha chain variable domain of TCR clone 39898 (TRAV1-2, TRAJ40)
CAVPGTYKYIF

SEQ ID NO: 79796 - protein, 16 aa, Homo sapiens
  CDR3 for beta chain variable domain of TCR clone 39898 (TRBV29-1, TRBJ2-7)
CSVEVVGTSGRYEQYF

SEQ ID NO: 79797 - protein, 15 aa, Homo sapiens
  CDR3 for alpha chain variable domain of TCR clone 39899 (TRAV38-1, TRAJ57)
CAFMDSQGGSEKLVF

SEQ ID NO: 79798 - protein, 16 aa, Homo sapiens
  CDR3 for beta chain variable domain of TCR clone 39899 (TRBV10-3, TRBJ2-1)
CAIREGGRGDYNEQFF

SEQ ID NO: 79799 - protein, 12 aa, Homo sapiens
  CDR3 for alpha chain variable domain of TCR clone 39900 (TRAV12-3, TRAJ21)
CAMFNNFNKFYF

SEQ ID NO: 79800 - protein, 17 aa, Homo sapiens
  CDR3 for beta chain variable domain of TCR clone 39900 (TRBV7-9, TRBJ2-3)
CASSPTVAGDLTDTQYF

SEQ ID NO: 79801 - protein, 16 aa, Homo sapiens
  CDR3 for alpha chain variable domain of TCR clone 39901 (TRAV3, TRAJ42)
RAVRDIEGGSQGNLIL

SEQ ID NO: 79802 - protein, 15 aa, Homo sapiens
  CDR3 for beta chain variable domain of TCR clone 39901 (TRBV9, TRBJ2-2)
CASSDFAGASGELFF

SEQ ID NO: 79803 - protein, 18 aa, Homo sapiens
  CDR3 for alpha chain variable domain of TCR clone 39902 (TRAV13-1, TRAJ52)
CAASKRSAGGTSYGKLTF

SEQ ID NO: 79804 - protein, 14 aa, Homo sapiens
  CDR3 for beta chain variable domain of TCR clone 39902 (TRBV7-2, TRBJ2-5)
CASSTGGELKTRYF

SEQ ID NO: 79805 - protein, 19 aa, Homo sapiens
  CDR3 for alpha chain variable domain of TCR clone 39903 (TRAV35, TRAJ30)
CAPGGMTRSSLEKGHDFIF

SEQ ID NO: 79806 - protein, 14 aa, Homo sapiens
  CDR3 for beta chain variable domain of TCR clone 39903 (TRBV7-6, TRBJ2-1)
CASSLGGGADEQFF

SEQ ID NO: 79807 - protein, 22 aa, Homo sapiens
  CDR3 for alpha chain variable domain of TCR clone 39904 (TRAV2, TRAJ38)
CAVEGFPNAGNNHIQNPDPAVY

SEQ ID NO: 79808 - protein, 14 aa, Homo sapiens
  CDR3 for beta chain variable domain of TCR clone 39904 (TRBV29-1, TRBJ1-4)
CSVSGRQGGEKLFF

SEQ ID NO: 79809 - protein, 15 aa, Homo sapiens
  CDR3 for alpha chain variable domain of TCR clone 39905 (TRAV35, TRAJ58)
CAGRRQETSGSRLTF

SEQ ID NO: 79810 - protein, 13 aa, Homo sapiens
  CDR3 for beta chain variable domain of TCR clone 39905 (TRBV7-3, TRBJ1-1)
CASSQDWGAEAFF

SEQ ID NO: 79811 - protein, 13 aa, Homo sapiens
  CDR3 for alpha chain variable domain of TCR clone 39906 (TRAV8-3, TRAJ20)
CAVGRPNDYRLSF

SEQ ID NO: 79812 - protein, 14 aa, Homo sapiens
  CDR3 for beta chain variable domain of TCR clone 39906 (TRBV12-5, TRBJ2-5)
CASGSRTHQETQYF

SEQ ID NO: 79813 - protein, 10 aa, Homo sapiens
  CDR3 for alpha chain variable domain of TCR clone 39907 (TRAV8-1, TRAJ21)
CAVNGTKFYF

SEQ ID NO: 79814 - protein, 16 aa, Homo sapiens
  CDR3 for beta chain variable domain of TCR clone 39907 (TRBV7-2, TRBJ1-5)
CASSPWGPEGNQLQHF

SEQ ID NO: 79815 - protein, 13 aa, Homo sapiens
  CDR3 for alpha chain variable domain of TCR clone 39908 (TRAV21, TRAJ27)
CAARPGHAGKSTF

SEQ ID NO: 79816 - protein, 14 aa, Homo sapiens
  CDR3 for beta chain variable domain of TCR clone 39908 (TRBV11-2, TRBJ2-7)
CASSLGAGAYEQYF

SEQ ID NO: 79817 - protein, 14 aa, Homo sapiens
  CDR3 for alpha chain variable domain of TCR clone 39909 (TRAV17, TRAJ6)
CATNPAGGSYIPTF

SEQ ID NO: 79818 - protein, 14 aa, Homo sapiens
  CDR3 for beta chain variable domain of TCR clone 39909 (TRBV7-9, TRBJ2-2)
CASSLVQDTGELFF

SEQ ID NO: 79819 - protein, 14 aa, Homo sapiens
  CDR3 for alpha chain variable domain of TCR clone 39910 (TRAV1-2, TRAJ16)
CAVNRFSDGQKLLF

SEQ ID NO: 79820 - protein, 14 aa, Homo sapiens
  CDR3 for beta chain variable domain of TCR clone 39910 (TRBV12-4, TRBJ1-3)
CSSGQTVSGNTIYF

SEQ ID NO: 79821 - protein, 11 aa, Homo sapiens
  CDR3 for alpha chain variable domain of TCR clone 39911 (TRAV12-3, TRAJ43)
CAMSVSNDMRF

SEQ ID NO: 79822 - protein, 13 aa, Homo sapiens
  CDR3 for beta chain variable domain of TCR clone 39911 (TRBV20-1, TRBJ1-1)
CIAPLGGGTEAFF

SEQ ID NO: 79823 - protein, 10 aa, Homo sapiens
  CDR3 for alpha chain variable domain of TCR clone 39912 (TRAV1-2, TRAJ31)
CVSEDARLMF

SEQ ID NO: 79824 - protein, 14 aa, Homo sapiens
  CDR3 for beta chain variable domain of TCR clone 39912 (TRBV19, TRBJ2-1)
CASPTFVFSGEQFF

SEQ ID NO: 79825 - protein, 14 aa, Homo sapiens
  CDR3 for alpha chain variable domain of TCR clone 39913 (TRAV1-2, TRAJ16)
CAVDRFSDGQKLLF

SEQ ID NO: 79826 - protein, 13 aa, Homo sapiens
  CDR3 for beta chain variable domain of TCR clone 39913 (TRBV10-3, TRBJ2-1)
CATGLADNNEQFF

SEQ ID NO: 79827 - protein, 14 aa, Homo sapiens
  CDR3 for alpha chain variable domain of TCR clone 39914 (TRAV12-2, TRAJ17)
CAVPFKAAGNKLTF

SEQ ID NO: 79828 - protein, 17 aa, Homo sapiens
  CDR3 for beta chain variable domain of TCR clone 39914 (TRBV20-1, TRBJ2-2)
RSASGSGQGGLTGELFF

SEQ ID NO: 79829 - protein, 14 aa, Homo sapiens
  CDR3 for alpha chain variable domain of TCR clone 39915 (TRAV9-2, TRAJ39)
CALYIYNAGNMLTF

SEQ ID NO: 79830 - protein, 13 aa, Homo sapiens
  CDR3 for beta chain variable domain of TCR clone 39915 (TRBV12-4, TRBJ2-7)
CASSLSGVYEQYF

SEQ ID NO: 79831 - protein, 14 aa, Homo sapiens
  CDR3 for alpha chain variable domain of TCR clone 39916 (TRAV1-2, TRAJ16)
CAVNRFSDGQKLLF

SEQ ID NO: 79832 - protein, 17 aa, Homo sapiens
  CDR3 for beta chain variable domain of TCR clone 39916 (TRBV18, TRBJ2-1)
CASSPLAAGAGDNEQFF

SEQ ID NO: 79833 - protein, 14 aa, Homo sapiens
  CDR3 for alpha chain variable domain of TCR clone 39917 (TRAV8-3, TRAJ10)
CAVGNAGGGNKLTF

SEQ ID NO: 79834 - protein, 16 aa, Homo sapiens
  CDR3 for beta chain variable domain of TCR clone 39917 (TRBV11-2, TRBJ1-2)
CASSLDTGGADHGYTF

SEQ ID NO: 79835 - protein, 16 aa, Homo sapiens
  CDR3 for alpha chain variable domain of TCR clone 39918 (TRAV30, TRAJ24)
CGTEVVDADSWGKFQF

SEQ ID NO: 79836 - protein, 12 aa, Homo sapiens
  CDR3 for beta chain variable domain of TCR clone 39918 (TRBV11-2, TRBJ2-1)
CASSPGNNEQFF

SEQ ID NO: 79837 - protein, 14 aa, Homo sapiens
  CDR3 for alpha chain variable domain of TCR clone 39919 (TRAV12-1, TRAJ23)
CVVIVYNQGGKLIF

SEQ ID NO: 79838 - protein, 13 aa, Homo sapiens
  CDR3 for beta chain variable domain of TCR clone 39919 (TRBV18, TRBJ1-1)
CASSPETKPEAFF

SEQ ID NO: 79839 - protein, 15 aa, Homo sapiens
  CDR3 for alpha chain variable domain of TCR clone 39920 (TRAV12-3, TRAJ6)
CAMSATTGGSYIPTF

SEQ ID NO: 79840 - protein, 12 aa, Homo sapiens
  CDR3 for beta chain variable domain of TCR clone 39920 (TRBV19, TRBJ1-1)
CASSTTGIEAFF

SEQ ID NO: 79841 - protein, 14 aa, Homo sapiens
  CDR3 for alpha chain variable domain of TCR clone 39921 (TRAV1-2, TRAJ8)
CAVREDTSFQKLVF

SEQ ID NO: 79842 - protein, 12 aa, Homo sapiens
  CDR3 for beta chain variable domain of TCR clone 39921 (TRBV29-1, TRBJ2-3)
CSVTGGADTQYF

SEQ ID NO: 79843 - protein, 14 aa, Homo sapiens
  CDR3 for alpha chain variable domain of TCR clone 39922 (TRAV12-3, TRAJ52)
CAMKRGTSYGKLTF

SEQ ID NO: 79844 - protein, 12 aa, Homo sapiens
  CDR3 for beta chain variable domain of TCR clone 39922 (TRBV12-4, TRBJ1-1)
CASSPPDGGAFF

SEQ ID NO: 79845 - protein, 14 aa, Homo sapiens
  CDR3 for alpha chain variable domain of TCR clone 39923 (TRAV1-2, TRAJ16)
CAVNRSSDGQKLLF

SEQ ID NO: 79846 - protein, 11 aa, Homo sapiens
  CDR3 for beta chain variable domain of TCR clone 39923 (TRBV29-1, TRBJ2-5)
CSEDRTGTQYF

SEQ ID NO: 79847 - protein, 10 aa, Homo sapiens
  CDR3 for alpha chain variable domain of TCR clone 39924 (TRAV23/DV6, TRAJ57)
CAASSTLSQG

SEQ ID NO: 79848 - protein, 17 aa, Homo sapiens
  CDR3 for beta chain variable domain of TCR clone 39924 (TRBV7-8, TRBJ2-6)
CASSAGTGGAGANVLTF

SEQ ID NO: 79849 - protein, 11 aa, Homo sapiens
  CDR3 for alpha chain variable domain of TCR clone 39925 (TRAV12-1, TRAJ21)
CVVNNFNEFYF

SEQ ID NO: 79850 - protein, 14 aa, Homo sapiens
  CDR3 for beta chain variable domain of TCR clone 39925 (TRBV15, TRBJ1-5)
CATSREQSNQPQHF

SEQ ID NO: 79851 - protein, 12 aa, Homo sapiens
  CDR3 for alpha chain variable domain of TCR clone 39926 (TRAV29/DV5, TRAJ49)
CAATDTGNQFYF

SEQ ID NO: 79852 - protein, 13 aa, Homo sapiens
  CDR3 for beta chain variable domain of TCR clone 39926 (TRBV10-2, TRBJ2-7)
RASGASGGYEQYF

SEQ ID NO: 79853 - protein, 16 aa, Homo sapiens
  CDR3 for alpha chain variable domain of TCR clone 39927 (TRAV3, TRAJ10)
CAVRDMRAGGGNKLTF

SEQ ID NO: 79854 - protein, 14 aa, Homo sapiens
  CDR3 for beta chain variable domain of TCR clone 39927 (TRBV25-1, TRBJ1-1)
CASTHLGGNTKAFF

SEQ ID NO: 79855 - protein, 15 aa, Homo sapiens
  CDR3 for alpha chain variable domain of TCR clone 39928 (TRAV8-3, TRAJ15)
CALGAPNQAGTALIF

SEQ ID NO: 79856 - protein, 14 aa, Homo sapiens
  CDR3 for beta chain variable domain of TCR clone 39928 (TRBV20-1, TRBJ2-1)
CSPNDEASYNEQFF

SEQ ID NO: 79857 - protein, 23 aa, Homo sapiens
  CDR3 for alpha chain variable domain of TCR clone 39929 (TRAV30, TRAJ43)
GLPAQLLRNLLLWHRERGNDMRF

SEQ ID NO: 79858 - protein, 13 aa, Homo sapiens
  CDR3 for beta chain variable domain of TCR clone 39929 (TRBV27, TRBJ2-7)
CASSFSQGYEQYF

SEQ ID NO: 79859 - protein, 11 aa, Homo sapiens
  CDR3 for alpha chain variable domain of TCR clone 39930 (TRAV2, TRAJ13)
CASGGYQKVTF

SEQ ID NO: 79860 - protein, 13 aa, Homo sapiens
  CDR3 for beta chain variable domain of TCR clone 39930 (TRBV25-1, TRBJ2-6)
CASRGPGANVLTF

SEQ ID NO: 79861 - protein, 16 aa, Homo sapiens
  CDR3 for alpha chain variable domain of TCR clone 39931 (TRAV26-1, TRAJ45)
CIVEKYSGGGADGPTF

SEQ ID NO: 79862 - protein, 15 aa, Homo sapiens
  CDR3 for beta chain variable domain of TCR clone 39931 (TRBV15, TRBJ2-7)
CHQQRPIQQAYEQYF

SEQ ID NO: 79863 - protein, 13 aa, Homo sapiens
  CDR3 for alpha chain variable domain of TCR clone 39932 (TRAV1-2, TRAJ9)
CAVLSTGGFKTIF

SEQ ID NO: 79864 - protein, 14 aa, Homo sapiens
  CDR3 for beta chain variable domain of TCR clone 39932 (TRBV20-1, TRBJ2-3)
CSARGGTSTDTQYF

SEQ ID NO: 79865 - protein, 11 aa, Homo sapiens
  CDR3 for alpha chain variable domain of TCR clone 39933 (TRAV35, TRAJ30)
CAGPGDDKIIF

SEQ ID NO: 79866 - protein, 13 aa, Homo sapiens
  CDR3 for beta chain variable domain of TCR clone 39933 (TRBV7-9, TRBJ2-5)
CASLPSGRETQYF

SEQ ID NO: 79867 - protein, 13 aa, Homo sapiens
  CDR3 for alpha chain variable domain of TCR clone 39934 (TRAV12-1, TRAJ7)
CVVNMRGNNRLAF

SEQ ID NO: 79868 - protein, 17 aa, Homo sapiens
  CDR3 for beta chain variable domain of TCR clone 39934 (TRBV28, TRBJ1-1)
CASSLSRTGYENTEAFF

SEQ ID NO: 79869 - protein, 10 aa, Homo sapiens
  CDR3 for alpha chain variable domain of TCR clone 39935 (TRAV12-1, TRAJ37)
ARGNTGKLIF

SEQ ID NO: 79870 - protein, 15 aa, Homo sapiens
  CDR3 for beta chain variable domain of TCR clone 39935 (TRBV7-2, TRBJ2-3)
CASSLGQGGTDTQYF

SEQ ID NO: 79871 - protein, 12 aa, Homo sapiens
  CDR3 for alpha chain variable domain of TCR clone 39936 (TRAV20, TRAJ39)
CAVGNAGNMLTF

SEQ ID NO: 79872 - protein, 16 aa, Homo sapiens
  CDR3 for beta chain variable domain of TCR clone 39936 (TRBV15, TRBJ1-2)
CATSRGPRTGGGGYTV

SEQ ID NO: 79873 - protein, 16 aa, Homo sapiens
  CDR3 for alpha chain variable domain of TCR clone 39937 (TRAV20, TRAJ53)
CAVQGNSGGSNYKLTF

SEQ ID NO: 79874 - protein, 15 aa, Homo sapiens
  CDR3 for beta chain variable domain of TCR clone 39937 (TRBV20-1, TRBJ2-5)
CSAPPRTGFGETQYF

SEQ ID NO: 79875 - protein, 14 aa, Homo sapiens
  CDR3 for alpha chain variable domain of TCR clone 39938 (TRAV12-2, TRAJ40)
CAVKIPSGTYKYIF

SEQ ID NO: 79876 - protein, 20 aa, Homo sapiens
  CDR3 for beta chain variable domain of TCR clone 39938 (TRBV28, TRBJ2-1)
CASTPIGRSPGLAGGNEQSF

SEQ ID NO: 79877 - protein, 14 aa, Homo sapiens
  CDR3 for alpha chain variable domain of TCR clone 39939 (TRAV12-3, TRAJ58)
CAMSTETSGSRLTF

SEQ ID NO: 79878 - protein, 15 aa, Homo sapiens
  CDR3 for beta chain variable domain of TCR clone 39939 (TRBV4-1, TRBJ1-4)
CASSDIGGTNEKLFF

SEQ ID NO: 79879 - protein, 13 aa, Homo sapiens
  CDR3 for alpha chain variable domain of TCR clone 39940 (TRAV12-1, TRAJ40)
CVVNSSGTYKYIF

SEQ ID NO: 79880 - protein, 14 aa, Homo sapiens
  CDR3 for beta chain variable domain of TCR clone 39940 (TRBV2, TRBJ1-6)
CASEVSSYNSPLHL

SEQ ID NO: 79881 - protein, 13 aa, Homo sapiens
  CDR3 for alpha chain variable domain of TCR clone 39941 (TRAV3, TRAJ21)
CAVREPDFNKFYF

SEQ ID NO: 79882 - protein, 15 aa, Homo sapiens
  CDR3 for beta chain variable domain of TCR clone 39941 (TRBV11-3, TRBJ2-3)
CASLKDGREGDTQYF

SEQ ID NO: 79883 - protein, 12 aa, Homo sapiens
  CDR3 for alpha chain variable domain of TCR clone 39942 (TRAV8-3, TRAJ20)
CAVGANDYKLSF

SEQ ID NO: 79884 - protein, 14 aa, Homo sapiens
  CDR3 for beta chain variable domain of TCR clone 39942 (TRBV12-5, TRBJ2-5)
CASGSRTHQETQYF

SEQ ID NO: 79885 - protein, 14 aa, Homo sapiens
  CDR3 for alpha chain variable domain of TCR clone 39943 (TRAV1-2, TRAJ8)
CAVREDTGFQKLVF

SEQ ID NO: 79886 - protein, 17 aa, Homo sapiens
  CDR3 for beta chain variable domain of TCR clone 39943 (TRBV4-2, TRBJ1-1)
CASTQFGGGSGNTEAFF

SEQ ID NO: 79887 - protein, 14 aa, Homo sapiens
  CDR3 for alpha chain variable domain of TCR clone 39944 (TRAV12-2, TRAJ44)
CAVNPAGTASKLTF

SEQ ID NO: 79888 - protein, 13 aa, Homo sapiens
  CDR3 for beta chain variable domain of TCR clone 39944 (TRBV7-9, TRBJ1-2)
CASSLKQNYGYTF

SEQ ID NO: 79889 - protein, 15 aa, Homo sapiens
  CDR3 for alpha chain variable domain of TCR clone 39945 (TRAV34, TRAJ38)
CGADFTPGNNRKLIW

SEQ ID NO: 79890 - protein, 15 aa, Homo sapiens
  CDR3 for beta chain variable domain of TCR clone 39945 (TRBV7-3, TRBJ2-1)
CASSLDRNSYNEQFF

SEQ ID NO: 79891 - protein, 15 aa, Homo sapiens
  CDR3 for alpha chain variable domain of TCR clone 39946 (TRAV4, TRAJ39)
CLVGPNNNAGNMLTF

SEQ ID NO: 79892 - protein, 15 aa, Homo sapiens
  CDR3 for beta chain variable domain of TCR clone 39946 (TRBV6-6, TRBJ2-5)
CASSPGGGLEETQYF

SEQ ID NO: 79893 - protein, 11 aa, Homo sapiens
  CDR3 for alpha chain variable domain of TCR clone 39947 (TRAV21, TRAJ34)
CAPLDTGKLIF

SEQ ID NO: 79894 - protein, 16 aa, Homo sapiens
  CDR3 for beta chain variable domain of TCR clone 39947 (TRBV5-1, TRBJ2-3)
CASSLAGDRGTDTQYF

SEQ ID NO: 79895 - protein, 13 aa, Homo sapiens
  CDR3 for alpha chain variable domain of TCR clone 39948 (TRAV24, TRAJ15)
CAFKDQAGTALIF

SEQ ID NO: 79896 - protein, 14 aa, Homo sapiens
  CDR3 for beta chain variable domain of TCR clone 39948 (TRBV2, TRBJ2-1)
CARGLSGSQGEQFF

SEQ ID NO: 79897 - protein, 13 aa, Homo sapiens
  CDR3 for alpha chain variable domain of TCR clone 39949 (TRAV8-1, TRAJ30)
CAVIMNRDDKIIF

SEQ ID NO: 79898 - protein, 14 aa, Homo sapiens
  CDR3 for beta chain variable domain of TCR clone 39949 (TRBV7-2, TRBJ1-6)
CDSSLQGANSPLHF

SEQ ID NO: 79899 - protein, 15 aa, Homo sapiens
  CDR3 for alpha chain variable domain of TCR clone 39950 (TRAV26-2, TRAJ13)
CILRDLSGGYQKVTF

SEQ ID NO: 79900 - protein, 14 aa, Homo sapiens
  CDR3 for beta chain variable domain of TCR clone 39950 (TRBV25-1, TRBJ1-1)
CASTHLGGNTEAFF

SEQ ID NO: 79901 - protein, 11 aa, Homo sapiens
  CDR3 for alpha chain variable domain of TCR clone 39951 (TRAV3, TRAJ21)
CTVGNFNKFYL

SEQ ID NO: 79902 - protein, 16 aa, Homo sapiens
  CDR3 for beta chain variable domain of TCR clone 39951 (TRBV19, TRBJ2-1)
CASSKAGPSSYNEQFF

SEQ ID NO: 79903 - protein, 14 aa, Homo sapiens
  CDR3 for alpha chain variable domain of TCR clone 39952 (TRAV4, TRAJ17)
CLVGDMAAGNKLTF

SEQ ID NO: 79904 - protein, 16 aa, Homo sapiens
  CDR3 for beta chain variable domain of TCR clone 39952 (TRBV12-5, TRBJ2-5)
CASGPRTSGNQETQYF

SEQ ID NO: 79905 - protein, 17 aa, Homo sapiens
  CDR3 for alpha chain variable domain of TCR clone 39953 (TRAV26-2, TRAJ42)
CILRDVGYGGSQGNLIF

SEQ ID NO: 79906 - protein, 16 aa, Homo sapiens
  CDR3 for beta chain variable domain of TCR clone 39953 (TRBV12-4, TRBJ2-7)
CASSLIGGTGTCEQYF

SEQ ID NO: 79907 - protein, 15 aa, Homo sapiens
  CDR3 for alpha chain variable domain of TCR clone 39954 (TRAV3, TRAJ9)
CAVRARNTGGFKTIF

SEQ ID NO: 79908 - protein, 19 aa, Homo sapiens
  CDR3 for beta chain variable domain of TCR clone 39954 (TRBV25-1, TRBJ2-2)
CAILVYRVDRGRKTGELFF

SEQ ID NO: 79909 - protein, 14 aa, Homo sapiens
  CDR3 for alpha chain variable domain of TCR clone 39955 (TRAV20, TRAJ29)
CAVQVWVGNTPLVF

SEQ ID NO: 79910 - protein, 15 aa, Homo sapiens
  CDR3 for beta chain variable domain of TCR clone 39955 (TRBV29-1, TRBJ2-7)
CSVEFFDRGSYEQYF

SEQ ID NO: 79911 - protein, 15 aa, Homo sapiens
  CDR3 for alpha chain variable domain of TCR clone 39956 (TRAV29/DV5, TRAJ24)
CAASGATDSWGKFQF

SEQ ID NO: 79912 - protein, 12 aa, Homo sapiens
  CDR3 for beta chain variable domain of TCR clone 39956 (TRBV11-2, TRBJ2-2)
CASSPPTGELFF

SEQ ID NO: 79913 - protein, 13 aa, Homo sapiens
  CDR3 for alpha chain variable domain of TCR clone 39957 (TRAV8-6, TRAJ49)
CAVITNTGNQFYF

SEQ ID NO: 79914 - protein, 14 aa, Homo sapiens
  CDR3 for beta chain variable domain of TCR clone 39957 (TRBV4-2, TRBJ2-7)
CASSHRTGEYEQYF

SEQ ID NO: 79915 - protein, 15 aa, Homo sapiens
  CDR3 for alpha chain variable domain of TCR clone 39958 (TRAV3, TRAJ17)
CAVSPKEAAGNTLTF

SEQ ID NO: 79916 - protein, 12 aa, Homo sapiens
  CDR3 for beta chain variable domain of TCR clone 39958 (TRBV7-9, TRBJ1-6)
CASSLMTSPLHF

SEQ ID NO: 79917 - protein, 16 aa, Homo sapiens
  CDR3 for alpha chain variable domain of TCR clone 39959 (TRAV3, TRAJ13)
CAVRGFESGGYQKVTF

SEQ ID NO: 79918 - protein, 16 aa, Homo sapiens
  CDR3 for beta chain variable domain of TCR clone 39959 (TRBV27, TRBJ2-5)
CASSYGPGGQKETQYF

SEQ ID NO: 79919 - protein, 15 aa, Homo sapiens
  CDR3 for alpha chain variable domain of TCR clone 39960 (TRAV12-2, TRAJ53)
CAVNGGGGSNYKLTF

SEQ ID NO: 79920 - protein, 13 aa, Homo sapiens
  CDR3 for beta chain variable domain of TCR clone 39960 (TRBV4-2, TRBJ1-1)
CASSQAGNTEAFF

SEQ ID NO: 79921 - protein, 13 aa, Homo sapiens
  CDR3 for alpha chain variable domain of TCR clone 39961 (TRAV12-3, TRAJ40)
CAMSARGTYKYII

SEQ ID NO: 79922 - protein, 16 aa, Homo sapiens
  CDR3 for beta chain variable domain of TCR clone 39961 (TRBV20-1, TRBJ2-3)
CSGEAGLAGGQDTQYF

SEQ ID NO: 79923 - protein, 11 aa, Homo sapiens
  CDR3 for alpha chain variable domain of TCR clone 39962 (TRAV12-3, TRAJ49)
CAVSSGNQFYF

SEQ ID NO: 79924 - protein, 17 aa, Homo sapiens
  CDR3 for beta chain variable domain of TCR clone 39962 (TRBV5-7, TRBJ2-7)
CASSLWRVLAGSYEQYF

SEQ ID NO: 79925 - protein, 11 aa, Homo sapiens
  CDR3 for alpha chain variable domain of TCR clone 39963 (TRAV13-2, TRAJ54)
RAVQGAQKLVF

SEQ ID NO: 79926 - protein, 15 aa, Homo sapiens
  CDR3 for beta chain variable domain of TCR clone 39963 (TRBV20-1, TRBJ2-7)
CSAGSGTSGAYEQYF

SEQ ID NO: 79927 - protein, 11 aa, Homo sapiens
  CDR3 for alpha chain variable domain of TCR clone 39964 (TRAV17, TRAJ9)
CATTGGFKTIF

SEQ ID NO: 79928 - protein, 14 aa, Homo sapiens
  CDR3 for beta chain variable domain of TCR clone 39964 (TRBV7-9, TRBJ2-2)
CDSSGLADTGELFF

SEQ ID NO: 79929 - protein, 14 aa, Homo sapiens
  CDR3 for alpha chain variable domain of TCR clone 39965 (TRAV20, TRAJ47)
CAVTFGEYGNKLVF

SEQ ID NO: 79930 - protein, 14 aa, Homo sapiens
  CDR3 for beta chain variable domain of TCR clone 39965 (TRBV11-2, TRBJ2-7)
CASSLGAGAYEQYF

SEQ ID NO: 79931 - protein, 13 aa, Homo sapiens
  CDR3 for alpha chain variable domain of TCR clone 39966 (TRAV3, TRAJ15)
CAVRDQAGTALIF

SEQ ID NO: 79932 - protein, 17 aa, Homo sapiens
  CDR3 for beta chain variable domain of TCR clone 39966 (TRBV7-8, TRBJ2-6)
CASSAGTGGAGANVLTF

SEQ ID NO: 79933 - protein, 10 aa, Homo sapiens
  CDR3 for alpha chain variable domain of TCR clone 39967 (TRAV23/DV6, TRAJ57)
CAASSTLSQG

SEQ ID NO: 79934 - protein, 14 aa, Homo sapiens
  CDR3 for beta chain variable domain of TCR clone 39967 (TRBV25-1, TRBJ1-1)
CASTHLGVNTEAFF

SEQ ID NO: 79935 - protein, 12 aa, Homo sapiens
  CDR3 for alpha chain variable domain of TCR clone 39968 (TRAV8-3, TRAJ27)
CAVGAEAGESTF

SEQ ID NO: 79936 - protein, 14 aa, Homo sapiens
  CDR3 for beta chain variable domain of TCR clone 39968 (TRBV2, TRBJ2-1)
CASRLIVGHDEQFF

SEQ ID NO: 79937 - protein, 14 aa, Homo sapiens
  CDR3 for alpha chain variable domain of TCR clone 39969 (TRAV26-1, TRAJ45)
CIEVTGGGADGLTF

SEQ ID NO: 79938 - protein, 16 aa, Homo sapiens
  CDR3 for beta chain variable domain of TCR clone 39969 (TRBV7-3, TRBJ2-2)
CASSLKRGTLSGELFF

SEQ ID NO: 79939 - protein, 13 aa, Homo sapiens
  CDR3 for alpha chain variable domain of TCR clone 39970 (TRAV13-1, TRAJ21)
CAASIYNFDKFYF

SEQ ID NO: 79940 - protein, 15 aa, Homo sapiens
  CDR3 for beta chain variable domain of TCR clone 39970 (TRBV27, TRBJ2-1)
CASSNGGGSSNEQFF

SEQ ID NO: 79941 - protein, 15 aa, Homo sapiens
  CDR3 for alpha chain variable domain of TCR clone 39971 (TRAV26-2, TRAJ57)
CILRDIRGGSGKLVF

SEQ ID NO: 79942 - protein, 15 aa, Homo sapiens
  CDR3 for beta chain variable domain of TCR clone 39971 (TRBV2, TRBJ2-1)
CASDIGLAGEGEQFF

SEQ ID NO: 79943 - protein, 12 aa, Homo sapiens
  CDR3 for alpha chain variable domain of TCR clone 39972 (TRAV29/DV5, TRAJ43)
CAAPYNNNDIRF

SEQ ID NO: 79944 - protein, 17 aa, Homo sapiens
  CDR3 for beta chain variable domain of TCR clone 39972 (TRBV19, TRBJ2-6)
CASSTGQVFSGANVLTF

SEQ ID NO: 79945 - protein, 15 aa, Homo sapiens
  CDR3 for alpha chain variable domain of TCR clone 39973 (TRAV3, TRAJ17)
CAVRDTGAAGNKPTF

SEQ ID NO: 79946 - protein, 14 aa, Homo sapiens
  CDR3 for beta chain variable domain of TCR clone 39973 (TRBV6-3, TRBJ1-1)
CASSNLLPGAEAFF

SEQ ID NO: 79947 - protein, 10 aa, Homo sapiens
  CDR3 for alpha chain variable domain of TCR clone 39974 (TRAV27, TRAJ20)
ASTSADKLSF

SEQ ID NO: 79948 - protein, 13 aa, Homo sapiens
  CDR3 for beta chain variable domain of TCR clone 39974 (TRBV4-2, TRBJ1-1)
CASSQAGNTEAFF

SEQ ID NO: 79949 - protein, 13 aa, Homo sapiens
  CDR3 for alpha chain variable domain of TCR clone 39975 (TRAV12-3, TRAJ56)
CALATGANSKLTF

SEQ ID NO: 79950 - protein, 12 aa, Homo sapiens
  CDR3 for beta chain variable domain of TCR clone 39975 (TRBV10-2, TRBJ2-3)
CASSPESDTRYF

SEQ ID NO: 79951 - protein, 12 aa, Homo sapiens
  CDR3 for alpha chain variable domain of TCR clone 39976 (TRAV13-1, TRAJ27)
CAAHTNAGKSTF

SEQ ID NO: 79952 - protein, 14 aa, Homo sapiens
  CDR3 for beta chain variable domain of TCR clone 39976 (TRBV19, TRBJ2-2)
CASSGQGIAEELFF

SEQ ID NO: 79953 - protein, 14 aa, Homo sapiens
  CDR3 for alpha chain variable domain of TCR clone 39977 (TRAV38-1, TRAJ45)
CAYYSGGGADGLTF

SEQ ID NO: 79954 - protein, 20 aa, Homo sapiens
  CDR3 for beta chain variable domain of TCR clone 39977 (TRBV28, TRBJ2-1)
CASTPIGRSPGLAGGNEQFY

SEQ ID NO: 79955 - protein, 11 aa, Homo sapiens
  CDR3 for alpha chain variable domain of TCR clone 39978 (TRAV12-2, TRAJ49)
CALQGGNQFYF

SEQ ID NO: 79956 - protein, 14 aa, Homo sapiens
  CDR3 for beta chain variable domain of TCR clone 39978 (TRBV7-2, TRBJ2-7)
CASSPKTSFYGQYF

SEQ ID NO: 79957 - protein, 13 aa, Homo sapiens
  CDR3 for alpha chain variable domain of TCR clone 39979 (TRAV21, TRAJ57)
CAVIEGGSERLVF

SEQ ID NO: 79958 - protein, 14 aa, Homo sapiens
  CDR3 for beta chain variable domain of TCR clone 39979 (TRBV12-5, TRBJ2-5)
CASGSRTHQETQYF

SEQ ID NO: 79959 - protein, 13 aa, Homo sapiens
  CDR3 for alpha chain variable domain of TCR clone 39980 (TRAV21, TRAJ57)
CAVTQGGSEKLVF

SEQ ID NO: 79960 - protein, 16 aa, Homo sapiens
  CDR3 for beta chain variable domain of TCR clone 39980 (TRBV29-1, TRBJ2-7)
CSVKDAEDGTAYEQYF

SEQ ID NO: 79961 - protein, 16 aa, Homo sapiens
  CDR3 for alpha chain variable domain of TCR clone 39981 (TRAV12-2, TRAJ32)
CAVNMNYGGATNKLIF

SEQ ID NO: 79962 - protein, 13 aa, Homo sapiens
  CDR3 for beta chain variable domain of TCR clone 39981 (TRBV4-2, TRBJ1-1)
CASSQAGNTEAFF

SEQ ID NO: 79963 - protein, 15 aa, Homo sapiens
  CDR3 for alpha chain variable domain of TCR clone 39982 (TRAV12-3, TRAJ27)
CAMRAYNTNAGESTF

SEQ ID NO: 79964 - protein, 13 aa, Homo sapiens
  CDR3 for beta chain variable domain of TCR clone 39982 (TRBV11-2, TRBJ2-5)
CASSRGPSETQYF

SEQ ID NO: 79965 - protein, 13 aa, Homo sapiens
  CDR3 for alpha chain variable domain of TCR clone 39983 (TRAV12-3, TRAJ56)
CASATGANSKLTF

SEQ ID NO: 79966 - protein, 12 aa, Homo sapiens
  CDR3 for beta chain variable domain of TCR clone 39983 (TRBV10-2, TRBJ2-3)
CASSPESDTQYF

SEQ ID NO: 79967 - protein, 10 aa, Homo sapiens
  CDR3 for alpha chain variable domain of TCR clone 39984 (TRAV1-2, TRAJ20)
CALNDYKLSF

SEQ ID NO: 79968 - protein, 16 aa, Homo sapiens
  CDR3 for beta chain variable domain of TCR clone 39984 (TRBV20-1, TRBJ1-1)
RSARALTQGMNTEAFF

SEQ ID NO: 79969 - protein, 14 aa, Homo sapiens
  CDR3 for alpha chain variable domain of TCR clone 39985 (TRAV1-2, TRAJ8)
CAVREDTGFQKLVF

SEQ ID NO: 79970 - protein, 18 aa, Homo sapiens
  CDR3 for beta chain variable domain of TCR clone 39985 (TRBV7-9, TRBJ2-7)
CASSLTTSGSRTWYEQYF

SEQ ID NO: 79971 - protein, 12 aa, Homo sapiens
  CDR3 for alpha chain variable domain of TCR clone 39986 (TRAV21, TRAJ3)
CCFYSSASKIVF

SEQ ID NO: 79972 - protein, 16 aa, Homo sapiens
  CDR3 for beta chain variable domain of TCR clone 39986 (TRBV19, TRBJ2-1)
CASSKAGPSSYNEQFF

SEQ ID NO: 79973 - protein, 13 aa, Homo sapiens
  CDR3 for alpha chain variable domain of TCR clone 39987 (TRAV29/DV5, TRAJ31)
CAASRNNNARLMF

SEQ ID NO: 79974 - protein, 16 aa, Homo sapiens
  CDR3 for beta chain variable domain of TCR clone 39987 (TRBV7-3, TRBJ2-2)
CASSLKRGTLSGELFF

SEQ ID NO: 79975 - protein, 13 aa, Homo sapiens
  CDR3 for alpha chain variable domain of TCR clone 39988 (TRAV23/DV6, TRAJ22)
CAPYSGSARQLTF

SEQ ID NO: 79976 - protein, 14 aa, Homo sapiens
  CDR3 for beta chain variable domain of TCR clone 39988 (TRBV12-5, TRBJ2-5)
RASGSRTHQETQYF

SEQ ID NO: 79977 - protein, 15 aa, Homo sapiens
  CDR3 for alpha chain variable domain of TCR clone 39989 (TRAV35, TRAJ50)
CSGQLRKTSYDKVIF

SEQ ID NO: 79978 - protein, 12 aa, Homo sapiens
  CDR3 for beta chain variable domain of TCR clone 39989 (TRBV5-1, TRBJ2-5)
CASSLGLETQYF

SEQ ID NO: 79979 - protein, 14 aa, Homo sapiens
  CDR3 for alpha chain variable domain of TCR clone 39990 (TRAV14/DV4, TRAJ32)
SNVLPLTPTNKLIF

SEQ ID NO: 79980 - protein, 14 aa, Homo sapiens
  CDR3 for beta chain variable domain of TCR clone 39990 (TRBV7-2, TRBJ2-7)
CASSPKTSFYEQYF

SEQ ID NO: 79981 - protein, 13 aa, Homo sapiens
  CDR3 for alpha chain variable domain of TCR clone 39991 (TRAV8-3, TRAJ48)
CAVVPFGNEKLTF

SEQ ID NO: 79982 - protein, 19 aa, Homo sapiens
  CDR3 for beta chain variable domain of TCR clone 39991 (TRBV25-1, TRBJ2-2)
CAILVCRVDRGRKTGELFF

SEQ ID NO: 79983 - protein, 15 aa, Homo sapiens
  CDR3 for alpha chain variable domain of TCR clone 39992 (TRAV3, TRAJ3)
CAVRDRDSSASKIIF

SEQ ID NO: 79984 - protein, 18 aa, Homo sapiens
  CDR3 for beta chain variable domain of TCR clone 39992 (TRBV25-1, TRBJ1-2)
CASSGLQNGQGLIFGYTF

SEQ ID NO: 79985 - protein, 14 aa, Homo sapiens
  CDR3 for alpha chain variable domain of TCR clone 39993 (TRAV13-1, TRAJ44)
CAAKATGSASKLTF

SEQ ID NO: 79986 - protein, 17 aa, Homo sapiens
  CDR3 for beta chain variable domain of TCR clone 39993 (TRBV7-3, TRBJ2-3)
CASSLMKRMRGADTQYF

SEQ ID NO: 79987 - protein, 11 aa, Homo sapiens
  CDR3 for alpha chain variable domain of TCR clone 39994 (TRAV35, TRAJ47)
CAGAFGLSDSY

SEQ ID NO: 79988 - protein, 11 aa, Homo sapiens
  CDR3 for beta chain variable domain of TCR clone 39994 (TRBV29-1, TRBJ1-1)
CSVEVGTRTFF

SEQ ID NO: 79989 - protein, 14 aa, Homo sapiens
  CDR3 for alpha chain variable domain of TCR clone 39995 (TRAV30, TRAJ26)
CGTEIVGYGQNFVF

SEQ ID NO: 79990 - protein, 13 aa, Homo sapiens
  CDR3 for beta chain variable domain of TCR clone 39995 (TRBV19, TRBJ1-3)
CASRLSLGNTIYF

SEQ ID NO: 79991 - protein, 16 aa, Homo sapiens
  CDR3 for alpha chain variable domain of TCR clone 39996 (TRAV27, TRAJ13)
CAGAKSDSGGYQKVTF

SEQ ID NO: 79992 - protein, 13 aa, Homo sapiens
  CDR3 for beta chain variable domain of TCR clone 39996 (TRBV7-9, TRBJ1-2)
CASSLKQNYGYTF

SEQ ID NO: 79993 - protein, 13 aa, Homo sapiens
  CDR3 for alpha chain variable domain of TCR clone 39997 (TRAV20, TRAJ40)
CAVPFSGTYKYIF

SEQ ID NO: 79994 - protein, 13 aa, Homo sapiens
  CDR3 for beta chain variable domain of TCR clone 39997 (TRBV15, TRBJ2-5)
CATSQIGEKTQYF

SEQ ID NO: 79995 - protein, 19 aa, Homo sapiens
  CDR3 for alpha chain variable domain of TCR clone 39998 (TRAV17, TRAJ17)
CATDGRPGVIKAAGNKLTF

SEQ ID NO: 79996 - protein, 15 aa, Homo sapiens
  CDR3 for beta chain variable domain of TCR clone 39998 (TRBV27, TRBJ2-1)
CASSNGGGSSNEQFF

SEQ ID NO: 79997 - protein, 14 aa, Homo sapiens
  CDR3 for alpha chain variable domain of TCR clone 39999 (TRAV12-2, TRAJ13)
CAVRKTEGYQKVTF

SEQ ID NO: 79998 - protein, 15 aa, Homo sapiens
  CDR3 for beta chain variable domain of TCR clone 39999 (TRBV12-4, TRBJ2-5)
CASSPPTGLQETQYF

SEQ ID NO: 79999 - protein, 14 aa, Homo sapiens
  CDR3 for alpha chain variable domain of TCR clone 40000 (TRAV3, TRAJ9)
FAVRLNTGGFKTIF

SEQ ID NO: 80000 - protein, 15 aa, Homo sapiens
  CDR3 for beta chain variable domain of TCR clone 40000 (TRBV7-2, TRBJ2-1)
CASSLASGRVNEQFF

SEQ ID NO: 80001 - protein, 10 aa, Homo sapiens
  CDR3 for alpha chain variable domain of TCR clone 40001 (TRAV21, TRAJ31)
CAVDNARLMF

SEQ ID NO: 80002 - protein, 13 aa, Homo sapiens
  CDR3 for beta chain variable domain of TCR clone 40001 (TRBV4-1, TRBJ1-1)
CASSRKVNTEAFF

SEQ ID NO: 80003 - protein, 14 aa, Homo sapiens
  CDR3 for alpha chain variable domain of TCR clone 40002 (TRAV8-3, TRAJ39)
CAVGANNAGNMLTF

SEQ ID NO: 80004 - protein, 15 aa, Homo sapiens
  CDR3 for beta chain variable domain of TCR clone 40002 (TRBV4-3, TRBJ1-1)
CASSRELGRGTEAFF

SEQ ID NO: 80005 - protein, 16 aa, Homo sapiens
  CDR3 for alpha chain variable domain of TCR clone 40003 (TRAV14/DV4, TRAJ15)
CAMGEGPAQAGTALIF

SEQ ID NO: 80006 - protein, 12 aa, Homo sapiens
  CDR3 for beta chain variable domain of TCR clone 40003 (TRBV28, TRBJ2-6)
CAIQAGANVLTF

SEQ ID NO: 80007 - protein, 12 aa, Homo sapiens
  CDR3 for alpha chain variable domain of TCR clone 40004 (TRAV12-3, TRAJ17)
CAMTLTGSKLTF

SEQ ID NO: 80008 - protein, 15 aa, Homo sapiens
  CDR3 for beta chain variable domain of TCR clone 40004 (TRBV10-2, TRBJ2-6)
CASSEQGTGANVLTF

SEQ ID NO: 80009 - protein, 20 aa, Homo sapiens
  CDR3 for alpha chain variable domain of TCR clone 40005 (TRAV26-1, TRAJ42)
CCVLLHRQTYYGGSQGNLIF

SEQ ID NO: 80010 - protein, 16 aa, Homo sapiens
  CDR3 for beta chain variable domain of TCR clone 40005 (TRBV7-3, TRBJ2-2)
CDSSLKRGTLSGELFF

SEQ ID NO: 80011 - protein, 12 aa, Homo sapiens
  CDR3 for alpha chain variable domain of TCR clone 40006 (TRAV12-3, TRAJ20)
CAMVRGDYKLSF

SEQ ID NO: 80012 - protein, 13 aa, Homo sapiens
  CDR3 for beta chain variable domain of TCR clone 40006 (TRBV23-1, TRBJ1-4)
CASRGKFNEKLFL

SEQ ID NO: 80013 - protein, 14 aa, Homo sapiens
  CDR3 for alpha chain variable domain of TCR clone 40007 (TRAV3, TRAJ36)
CAVRDGTGANTLFF

SEQ ID NO: 80014 - protein, 16 aa, Homo sapiens
  CDR3 for beta chain variable domain of TCR clone 40007 (TRBV20-1, TRBJ2-6)
CSAREGPGVGANVLTF

SEQ ID NO: 80015 - protein, 14 aa, Homo sapiens
  CDR3 for alpha chain variable domain of TCR clone 40008 (TRAV12-3, TRAJ22)
CAMSLFGSARQLTF

SEQ ID NO: 80016 - protein, 13 aa, Homo sapiens
  CDR3 for beta chain variable domain of TCR clone 40008 (TRBV12-4, TRBJ2-7)
CASSPTETYEQYF

SEQ ID NO: 80017 - protein, 14 aa, Homo sapiens
  CDR3 for alpha chain variable domain of TCR clone 40009 (TRAV12-2, TRAJ13)
CAVEKTGGYQKVTF

SEQ ID NO: 80018 - protein, 16 aa, Homo sapiens
  CDR3 for beta chain variable domain of TCR clone 40009 (TRBV20-1, TRBJ1-4)
CSAPGQGLLTNEKLFF

SEQ ID NO: 80019 - protein, 17 aa, Homo sapiens
  CDR3 for alpha chain variable domain of TCR clone 40010 (TRAV8-6, TRAJ8)
CAVKEGIENTGFQKLVF

SEQ ID NO: 80020 - protein, 12 aa, Homo sapiens
  CDR3 for beta chain variable domain of TCR clone 40010 (TRBV19, TRBJ1-4)
CTSKDWPGGLFF

SEQ ID NO: 80021 - protein, 13 aa, Homo sapiens
  CDR3 for alpha chain variable domain of TCR clone 40011 (TRAV21, TRAJ45)
CAVMGGGADGLTL

SEQ ID NO: 80022 - protein, 14 aa, Homo sapiens
  CDR3 for beta chain variable domain of TCR clone 40011 (TRBV4-3, TRBJ1-4)
CASSPLQRNEKLFF

SEQ ID NO: 80023 - protein, 13 aa, Homo sapiens
  CDR3 for alpha chain variable domain of TCR clone 40012 (TRAV8-3, TRAJ6)
CAVGSGGSYIPTF

SEQ ID NO: 80024 - protein, 14 aa, Homo sapiens
  CDR3 for beta chain variable domain of TCR clone 40012 (TRBV11-2, TRBJ1-1)
CASSTQRGRTGAFF

SEQ ID NO: 80025 - protein, 14 aa, Homo sapiens
  CDR3 for alpha chain variable domain of TCR clone 40013 (TRAV8-4, TRAJ9)
CAVILNTGGFKTIF

SEQ ID NO: 80026 - protein, 11 aa, Homo sapiens
  CDR3 for beta chain variable domain of TCR clone 40013 (TRBV7-9, TRBJ2-6)
CASQRANVLTF

SEQ ID NO: 80027 - protein, 14 aa, Homo sapiens
  CDR3 for alpha chain variable domain of TCR clone 40014 (TRAV17, TRAJ16)
CATADFSDGQKLLF

SEQ ID NO: 80028 - protein, 12 aa, Homo sapiens
  CDR3 for beta chain variable domain of TCR clone 40014 (TRBV24-1, TRBJ1-1)
CATLHPDTEAFF

SEQ ID NO: 80029 - protein, 15 aa, Homo sapiens
  CDR3 for alpha chain variable domain of TCR clone 40015 (TRAV26-2, TRAJ57)
CILRDIRGGSEKLVF

SEQ ID NO: 80030 - protein, 15 aa, Homo sapiens
  CDR3 for beta chain variable domain of TCR clone 40015 (TRBV2, TRBJ2-1)
CASGIGLAGEGEQFF

SEQ ID NO: 80031 - protein, 14 aa, Homo sapiens
  CDR3 for alpha chain variable domain of TCR clone 40016 (TRAV3, TRAJ21)
CAVGDKYNFNKFYF

SEQ ID NO: 80032 - protein, 14 aa, Homo sapiens
  CDR3 for beta chain variable domain of TCR clone 40016 (TRBV27, TRBJ2-3)
CASRDSPITDTQYF

SEQ ID NO: 80033 - protein, 16 aa, Homo sapiens
  CDR3 for alpha chain variable domain of TCR clone 40017 (TRAV3, TRAJ37)
CSVRGKGSGNTGKLIF

SEQ ID NO: 80034 - protein, 13 aa, Homo sapiens
  CDR3 for beta chain variable domain of TCR clone 40017 (TRBV14, TRBJ2-7)
CASSQDRRYEQYF

SEQ ID NO: 80035 - protein, 12 aa, Homo sapiens
  CDR3 for alpha chain variable domain of TCR clone 40018 (TRAV27, TRAJ35)
CAGADFGNVLHF

SEQ ID NO: 80036 - protein, 15 aa, Homo sapiens
  CDR3 for beta chain variable domain of TCR clone 40018 (TRBV20-1, TRBJ2-7)
CSARDRVSGMDEQYF

SEQ ID NO: 80037 - protein, 12 aa, Homo sapiens
  CDR3 for alpha chain variable domain of TCR clone 40019 (TRAV25, TRAJ11)
CAGASGYSTLTF

SEQ ID NO: 80038 - protein, 14 aa, Homo sapiens
  CDR3 for beta chain variable domain of TCR clone 40019 (TRBV5-8, TRBJ2-3)
CASSLGQRTDTQYF

SEQ ID NO: 80039 - protein, 11 aa, Homo sapiens
  CDR3 for alpha chain variable domain of TCR clone 40020 (TRAV2, TRAJ13)
CASGGYQKVTS

SEQ ID NO: 80040 - protein, 15 aa, Homo sapiens
  CDR3 for beta chain variable domain of TCR clone 40020 (TRBV7-9, TRBJ1-6)
CASSSPGRGNSPLHF

SEQ ID NO: 80041 - protein, 14 aa, Homo sapiens
  CDR3 for alpha chain variable domain of TCR clone 40021 (TRAV21, TRAJ28)
CAVGSGAGSYQLTF

SEQ ID NO: 80042 - protein, 14 aa, Homo sapiens
  CDR3 for beta chain variable domain of TCR clone 40021 (TRBV18, TRBJ1-4)
CASSPGPNGEKLFL

SEQ ID NO: 80043 - protein, 14 aa, Homo sapiens
  CDR3 for alpha chain variable domain of TCR clone 40022 (TRAV12-3, TRAJ9)
CAMSPNTGGFKTIF

SEQ ID NO: 80044 - protein, 15 aa, Homo sapiens
  CDR3 for beta chain variable domain of TCR clone 40022 (TRBV10-3, TRBJ2-1)
CAIRNGTSGHNEQFF

SEQ ID NO: 80045 - protein, 11 aa, Homo sapiens
  CDR3 for alpha chain variable domain of TCR clone 40023 (TRAV17, TRAJ9)
CATTGGFKTIF

SEQ ID NO: 80046 - protein, 20 aa, Homo sapiens
  CDR3 for beta chain variable domain of TCR clone 40023 (TRBV28, TRBJ2-1)
CASTPIGRSPGLAGGNEQFF

SEQ ID NO: 80047 - protein, 14 aa, Homo sapiens
  CDR3 for alpha chain variable domain of TCR clone 40024 (TRAV26-1, TRAJ38)
CIADNAGNNRKLIW

SEQ ID NO: 80048 - protein, 13 aa, Homo sapiens
  CDR3 for beta chain variable domain of TCR clone 40024 (TRBV4-1, TRBJ2-1)
CASSQAGGDEQFF

SEQ ID NO: 80049 - protein, 14 aa, Homo sapiens
  CDR3 for alpha chain variable domain of TCR clone 40025 (TRAV27, TRAJ36)
CAGPPKRGANNLFF

SEQ ID NO: 80050 - protein, 15 aa, Homo sapiens
  CDR3 for beta chain variable domain of TCR clone 40025 (TRBV18, TRBJ2-7)
CASSPAATPNYEQYF

SEQ ID NO: 80051 - protein, 17 aa, Homo sapiens
  CDR3 for alpha chain variable domain of TCR clone 40026 (TRAV16, TRAJ26)
CALSGSEFCLWSRNQIF

SEQ ID NO: 80052 - protein, 12 aa, Homo sapiens
  CDR3 for beta chain variable domain of TCR clone 40026 (TRBV11-2, TRBJ2-1)
CASSPGNNEQFF

SEQ ID NO: 80053 - protein, 14 aa, Homo sapiens
  CDR3 for alpha chain variable domain of TCR clone 40027 (TRAV8-6, TRAJ49)
CAVSDPGTGNQFYF

SEQ ID NO: 80054 - protein, 16 aa, Homo sapiens
  CDR3 for beta chain variable domain of TCR clone 40027 (TRBV24-1, TRBJ2-1)
CATSGVAGANYSEQFF

SEQ ID NO: 80055 - protein, 12 aa, Homo sapiens
  CDR3 for alpha chain variable domain of TCR clone 40028 (TRAV8-3, TRAJ26)
CAGDNYGQNFDF

SEQ ID NO: 80056 - protein, 15 aa, Homo sapiens
  CDR3 for beta chain variable domain of TCR clone 40028 (TRBV9, TRBJ2-1)
CASSLAGSSYNEQFF

SEQ ID NO: 80057 - protein, 12 aa, Homo sapiens
  CDR3 for alpha chain variable domain of TCR clone 40029 (TRAV20, TRAJ56)
CAVTGANSKLTF

SEQ ID NO: 80058 - protein, 14 aa, Homo sapiens
  CDR3 for beta chain variable domain of TCR clone 40029 (TRBV6-1, TRBJ1-3)
CASVQGGGGNTIYF

SEQ ID NO: 80059 - protein, 12 aa, Homo sapiens
  CDR3 for alpha chain variable domain of TCR clone 40030 (TRAV2, TRAJ9)
CAVGAGGFKTIF

SEQ ID NO: 80060 - protein, 16 aa, Homo sapiens
  CDR3 for beta chain variable domain of TCR clone 40030 (TRBV13, TRBJ2-2)
CASSPRTGQHTGELFF

SEQ ID NO: 80061 - protein, 15 aa, Homo sapiens
  CDR3 for alpha chain variable domain of TCR clone 40031 (TRAV4, TRAJ39)
CLVGPNNNAGNMLTF

SEQ ID NO: 80062 - protein, 13 aa, Homo sapiens
  CDR3 for beta chain variable domain of TCR clone 40031 (TRBV11-2, TRBJ2-5)
CTSSSTGEETQYF

SEQ ID NO: 80063 - protein, 14 aa, Homo sapiens
  CDR3 for alpha chain variable domain of TCR clone 40032 (TRAV17, TRAJ39)
CATDPVRAGNMLTF

SEQ ID NO: 80064 - protein, 15 aa, Homo sapiens
  CDR3 for beta chain variable domain of TCR clone 40032 (TRBV13, TRBJ1-5)
CASSFGQGGVRPQHF

SEQ ID NO: 80065 - protein, 11 aa, Homo sapiens
  CDR3 for alpha chain variable domain of TCR clone 40033 (TRAV27, TRAJ20)
CAGADDYKLSF

SEQ ID NO: 80066 - protein, 12 aa, Homo sapiens
  CDR3 for beta chain variable domain of TCR clone 40033 (TRBV2, TRBJ1-1)
CAAPSRGTEAFF

SEQ ID NO: 80067 - protein, 14 aa, Homo sapiens
  CDR3 for alpha chain variable domain of TCR clone 40034 (TRAV6, TRAJ6)
CALPTSGGSYIPTF

SEQ ID NO: 80068 - protein, 12 aa, Homo sapiens
  CDR3 for beta chain variable domain of TCR clone 40034 (TRBV5-1, TRBJ2-5)
CASSPVPWDRTK

SEQ ID NO: 80069 - protein, 14 aa, Homo sapiens
  CDR3 for alpha chain variable domain of TCR clone 40035 (TRAV8-4, TRAJ13)
CAVTLSGCYQKVTF

SEQ ID NO: 80070 - protein, 14 aa, Homo sapiens
  CDR3 for beta chain variable domain of TCR clone 40035 (TRBV7-2, TRBJ1-2)
CASSQTGSTYGYTF

SEQ ID NO: 80071 - protein, 13 aa, Homo sapiens
  CDR3 for alpha chain variable domain of TCR clone 40036 (TRAV13-1, TRAJ9)
CAARGTGGFKTIF

SEQ ID NO: 80072 - protein, 12 aa, Homo sapiens
  CDR3 for beta chain variable domain of TCR clone 40036 (TRBV2, TRBJ2-1)
CAYGPPGNEQFS

SEQ ID NO: 80073 - protein, 14 aa, Homo sapiens
  CDR3 for alpha chain variable domain of TCR clone 40037 (TRAV29/DV5, TRAJ47)
CAASSIEYGNKLVF

SEQ ID NO: 80074 - protein, 14 aa, Homo sapiens
  CDR3 for beta chain variable domain of TCR clone 40037 (TRBV10-2, TRBJ1-5)
CASSSTGRNQPQHF

SEQ ID NO: 80075 - protein, 15 aa, Homo sapiens
  CDR3 for alpha chain variable domain of TCR clone 40038 (TRAV20, TRAJ53)
CAVQASGGSNYKLTF

SEQ ID NO: 80076 - protein, 12 aa, Homo sapiens
  CDR3 for beta chain variable domain of TCR clone 40038 (TRBV7-6, TRBJ2-5)
CASSLSQENQYF

SEQ ID NO: 80077 - protein, 15 aa, Homo sapiens
  CDR3 for alpha chain variable domain of TCR clone 40039 (TRAV6, TRAJ52)
CALTAGGTSYGKLTF

SEQ ID NO: 80078 - protein, 12 aa, Homo sapiens
  CDR3 for beta chain variable domain of TCR clone 40039 (TRBV11-2, TRBJ2-1)
CASSPGNNEQFF

SEQ ID NO: 80079 - protein, 14 aa, Homo sapiens
  CDR3 for alpha chain variable domain of TCR clone 40040 (TRAV9-2, TRAJ39)
CALYIYNAGNMLTF

SEQ ID NO: 80080 - protein, 15 aa, Homo sapiens
  CDR3 for beta chain variable domain of TCR clone 40040 (TRBV27, TRBJ2-1)
CASSNGGGSSNEQFF

SEQ ID NO: 80081 - protein, 17 aa, Homo sapiens
  CDR3 for alpha chain variable domain of TCR clone 40041 (TRAV13-2, TRAJ42)
CAEKGKNYGGSQGNLIL

SEQ ID NO: 80082 - protein, 16 aa, Homo sapiens
  CDR3 for beta chain variable domain of TCR clone 40041 (TRBV7-9, TRBJ2-1)
CASSLGTGWDYNEQFF

SEQ ID NO: 80083 - protein, 12 aa, Homo sapiens
  CDR3 for alpha chain variable domain of TCR clone 40042 (TRAV29/DV5, TRAJ34)
CAASGNTDKLIF

SEQ ID NO: 80084 - protein, 16 aa, Homo sapiens
  CDR3 for beta chain variable domain of TCR clone 40042 (TRBV12-4, TRBJ1-5)
CASRQPVEGSSQPQHF

SEQ ID NO: 80085 - protein, 14 aa, Homo sapiens
  CDR3 for alpha chain variable domain of TCR clone 40043 (TRAV17, TRAJ39)
CATGPVRAGNMLTF

SEQ ID NO: 80086 - protein, 15 aa, Homo sapiens
  CDR3 for beta chain variable domain of TCR clone 40043 (TRBV13, TRBJ1-5)
CASSFGQGGVQPQHF

SEQ ID NO: 80087 - protein, 12 aa, Homo sapiens
  CDR3 for alpha chain variable domain of TCR clone 40044 (TRAV13-2, TRAJ23)
CAERHRGGKLIF

SEQ ID NO: 80088 - protein, 15 aa, Homo sapiens
  CDR3 for beta chain variable domain of TCR clone 40044 (TRBV7-9, TRBJ1-4)
CASSARTGGNEKLFF

SEQ ID NO: 80089 - protein, 13 aa, Homo sapiens
  CDR3 for alpha chain variable domain of TCR clone 40045 (TRAV27, TRAJ57)
CRSARGGSEKLVF

SEQ ID NO: 80090 - protein, 11 aa, Homo sapiens
  CDR3 for beta chain variable domain of TCR clone 40045 (TRBV11-2, TRBJ1-1)
CASSINTEAFF

SEQ ID NO: 80091 - protein, 10 aa, Homo sapiens
  CDR3 for alpha chain variable domain of TCR clone 40046 (TRAV8-4, TRAJ43)
CAVSAEDMRF

SEQ ID NO: 80092 - protein, 15 aa, Homo sapiens
  CDR3 for beta chain variable domain of TCR clone 40046 (TRBV5-1, TRBJ2-3)
CASSVTSGSTDTQYF

SEQ ID NO: 80093 - protein, 13 aa, Homo sapiens
  CDR3 for alpha chain variable domain of TCR clone 40047 (TRAV12-3, TRAJ7)
CAMSASGHNRLAF

SEQ ID NO: 80094 - protein, 14 aa, Homo sapiens
  CDR3 for beta chain variable domain of TCR clone 40047 (TRBV13, TRBJ2-5)
CASSLGPRGETQYF

SEQ ID NO: 80095 - protein, 13 aa, Homo sapiens
  CDR3 for alpha chain variable domain of TCR clone 40048 (TRAV12-3, TRAJ40)
CAMSARGTYKYIS

SEQ ID NO: 80096 - protein, 16 aa, Homo sapiens
  CDR3 for beta chain variable domain of TCR clone 40048 (TRBV20-1, TRBJ2-3)
CSGEAGLAGGQDTQYF

SEQ ID NO: 80097 - protein, 14 aa, Homo sapiens
  CDR3 for alpha chain variable domain of TCR clone 40049 (TRAV21, TRAJ35)
CAVMPIGFGNVLHC

SEQ ID NO: 80098 - protein, 12 aa, Homo sapiens
  CDR3 for beta chain variable domain of TCR clone 40049 (TRBV7-9, TRBJ2-7)
CASSIKGEEQYF

SEQ ID NO: 80099 - protein, 16 aa, Homo sapiens
  CDR3 for alpha chain variable domain of TCR clone 40050 (TRAV30, TRAJ24)
CGTEIVDADSWGKFQF

SEQ ID NO: 80100 - protein, 13 aa, Homo sapiens
  CDR3 for beta chain variable domain of TCR clone 40050 (TRBV19, TRBJ2-2)
CASSIWSTGELFF

SEQ ID NO: 80101 - protein, 16 aa, Homo sapiens
  CDR3 for alpha chain variable domain of TCR clone 40051 (TRAV30, TRAJ24)
CGTEIVDADSWGKFKF

SEQ ID NO: 80102 - protein, 15 aa, Homo sapiens
  CDR3 for beta chain variable domain of TCR clone 40051 (TRBV28, TRBJ2-1)
CASSIIAGGRSEQFF

SEQ ID NO: 80103 - protein, 15 aa, Homo sapiens
  CDR3 for alpha chain variable domain of TCR clone 40052 (TRAV17, TRAJ4)
CATGTWSGGYDKLIF

SEQ ID NO: 80104 - protein, 13 aa, Homo sapiens
  CDR3 for beta chain variable domain of TCR clone 40052 (TRBV6-6, TRBJ2-7)
CASSPKHLAEQYF

SEQ ID NO: 80105 - protein, 13 aa, Homo sapiens
  CDR3 for alpha chain variable domain of TCR clone 40053 (TRAV13-1, TRAJ39)
CAASIWAGNMLTF

SEQ ID NO: 80106 - protein, 14 aa, Homo sapiens
  CDR3 for beta chain variable domain of TCR clone 40053 (TRBV2, TRBJ2-1)
CASSEALIYNEQFF

SEQ ID NO: 80107 - protein, 16 aa, Homo sapiens
  CDR3 for alpha chain variable domain of TCR clone 40054 (TRAV17, TRAJ22)
CATGPISSGSARQLTF

SEQ ID NO: 80108 - protein, 13 aa, Homo sapiens
  CDR3 for beta chain variable domain of TCR clone 40054 (TRBV11-2, TRBJ2-1)
CASSLGLAGRRFF

SEQ ID NO: 80109 - protein, 15 aa, Homo sapiens
  CDR3 for alpha chain variable domain of TCR clone 40055 (TRAV25, TRAJ10)
CAGPLLTGGGNKLNF

SEQ ID NO: 80110 - protein, 15 aa, Homo sapiens
  CDR3 for beta chain variable domain of TCR clone 40055 (TRBV12-5, TRBJ2-2)
CASGRLGGNTGELFF

SEQ ID NO: 80111 - protein, 17 aa, Homo sapiens
  CDR3 for alpha chain variable domain of TCR clone 40056 (TRAV3, TRAJ12)
CAVRDGGRMDSSYKLIF

SEQ ID NO: 80112 - protein, 14 aa, Homo sapiens
  CDR3 for beta chain variable domain of TCR clone 40056 (TRBV7-9, TRBJ1-2)
CASSRQGANYDYTF

SEQ ID NO: 80113 - protein, 13 aa, Homo sapiens
  CDR3 for alpha chain variable domain of TCR clone 40057 (TRAV20, TRAJ54)
CAVQAGGAQELVF

SEQ ID NO: 80114 - protein, 14 aa, Homo sapiens
  CDR3 for beta chain variable domain of TCR clone 40057 (TRBV20-1, TRBJ2-7)
CSAKTGTGGYEQYF

SEQ ID NO: 80115 - protein, 15 aa, Homo sapiens
  CDR3 for alpha chain variable domain of TCR clone 40058 (TRAV23/DV6, TRAJ13)
CAAWPGGGGYQQVTF

SEQ ID NO: 80116 - protein, 17 aa, Homo sapiens
  CDR3 for beta chain variable domain of TCR clone 40058 (TRBV19, TRBJ2-7)
CASSISFYDSYPYEQYF

SEQ ID NO: 80117 - protein, 14 aa, Homo sapiens
  CDR3 for alpha chain variable domain of TCR clone 40059 (TRAV13-1, TRAJ35)
CAASKGGFGNVLHC

SEQ ID NO: 80118 - protein, 15 aa, Homo sapiens
  CDR3 for beta chain variable domain of TCR clone 40059 (TRBV11-3, TRBJ2-3)
CASLKDGREGDTQYF

SEQ ID NO: 80119 - protein, 14 aa, Homo sapiens
  CDR3 for alpha chain variable domain of TCR clone 40060 (TRAV20, TRAJ10)
CAVRVEGGGNKLTF

SEQ ID NO: 80120 - protein, 18 aa, Homo sapiens
  CDR3 for beta chain variable domain of TCR clone 40060 (TRBV24-1, TRBJ2-1)
CATSDWMFLGRGVHEQFF

SEQ ID NO: 80121 - protein, 13 aa, Homo sapiens
  CDR3 for alpha chain variable domain of TCR clone 40061 (TRAV30, TRAJ34)
CGTAGYNTDKLIF

SEQ ID NO: 80122 - protein, 16 aa, Homo sapiens
  CDR3 for beta chain variable domain of TCR clone 40061 (TRBV7-9, TRBJ1-2)
CASSLGFSSGEDGYTF

SEQ ID NO: 80123 - protein, 15 aa, Homo sapiens
  CDR3 for alpha chain variable domain of TCR clone 40062 (TRAV12-3, TRAJ27)
CAMRAYNTNAGKSTF

SEQ ID NO: 80124 - protein, 13 aa, Homo sapiens
  CDR3 for beta chain variable domain of TCR clone 40062 (TRBV11-2, TRBJ2-5)
RASSRGPSETQYF

SEQ ID NO: 80125 - protein, 14 aa, Homo sapiens
  CDR3 for alpha chain variable domain of TCR clone 40063 (TRAV16, TRAJ17)
FAPRIKAAGNKLTF

SEQ ID NO: 80126 - protein, 17 aa, Homo sapiens
  CDR3 for beta chain variable domain of TCR clone 40063 (TRBV7-2, TRBJ2-3)
CASSSYSGTRRADTQYF

SEQ ID NO: 80127 - protein, 12 aa, Homo sapiens
  CDR3 for alpha chain variable domain of TCR clone 40064 (TRAV8-4, TRAJ43)
CAVSVNNNDMCF

SEQ ID NO: 80128 - protein, 14 aa, Homo sapiens
  CDR3 for beta chain variable domain of TCR clone 40064 (TRBV11-2, TRBJ1-2)
CASSLGTANYGYTF

SEQ ID NO: 80129 - protein, 14 aa, Homo sapiens
  CDR3 for alpha chain variable domain of TCR clone 40065 (TRAV17, TRAJ22)
SATVLSGSARQLTF

SEQ ID NO: 80130 - protein, 14 aa, Homo sapiens
  CDR3 for beta chain variable domain of TCR clone 40065 (TRBV12-4, TRBJ2-5)
CASSLGDRGETQYF

SEQ ID NO: 80131 - protein, 15 aa, Homo sapiens
  CDR3 for alpha chain variable domain of TCR clone 40066 (TRAV21, TRAJ53)
CATLNSGGSNYKLTF

SEQ ID NO: 80132 - protein, 17 aa, Homo sapiens
  CDR3 for beta chain variable domain of TCR clone 40066 (TRBV7-3, TRBJ2-3)
CASSLMKRMRGADTQYF

SEQ ID NO: 80133 - protein, 15 aa, Homo sapiens
  CDR3 for alpha chain variable domain of TCR clone 40067 (TRAV2, TRAJ11)
CAVEDPNSGYGTLTF

SEQ ID NO: 80134 - protein, 15 aa, Homo sapiens
  CDR3 for beta chain variable domain of TCR clone 40067 (TRBV20-1, TRBJ2-7)
CSARDRVSGMDEQYF

SEQ ID NO: 80135 - protein, 17 aa, Homo sapiens
  CDR3 for alpha chain variable domain of TCR clone 40068 (TRAV13-1, TRAJ28)
CAASPPYSGAGSYQLTF

SEQ ID NO: 80136 - protein, 15 aa, Homo sapiens
  CDR3 for beta chain variable domain of TCR clone 40068 (TRBV6-3, TRBJ2-2)
CASSLLATLTGELFF

SEQ ID NO: 80137 - protein, 16 aa, Homo sapiens
  CDR3 for alpha chain variable domain of TCR clone 40069 (TRAV30, TRAJ24)
CGTEIVDADSWGKFQF

SEQ ID NO: 80138 - protein, 16 aa, Homo sapiens
  CDR3 for beta chain variable domain of TCR clone 40069 (TRBV20-1, TRBJ2-2)
CSASASGIPGAGELFF

SEQ ID NO: 80139 - protein, 18 aa, Homo sapiens
  CDR3 for alpha chain variable domain of TCR clone 40070 (TRAV21, TRAJ52)
CAVRPSPAGGTSYGKLTF

SEQ ID NO: 80140 - protein, 13 aa, Homo sapiens
  CDR3 for beta chain variable domain of TCR clone 40070 (TRBV19, TRBJ1-5)
CASSEGSNQPQHF

SEQ ID NO: 80141 - protein, 14 aa, Homo sapiens
  CDR3 for alpha chain variable domain of TCR clone 40071 (TRAV23/DV6, TRAJ11)
CAASLESGYSTLTL

SEQ ID NO: 80142 - protein, 13 aa, Homo sapiens
  CDR3 for beta chain variable domain of TCR clone 40071 (TRBV4-1, TRBJ2-5)
CASSLTRGETQYF

SEQ ID NO: 80143 - protein, 13 aa, Homo sapiens
  CDR3 for alpha chain variable domain of TCR clone 40072 (TRAV27, TRAJ41)
CAGEGNSGYAFNF

SEQ ID NO: 80144 - protein, 14 aa, Homo sapiens
  CDR3 for beta chain variable domain of TCR clone 40072 (TRBV7-2, TRBJ1-1)
CASSFLTGTTEAFF

SEQ ID NO: 80145 - protein, 13 aa, Homo sapiens
  CDR3 for alpha chain variable domain of TCR clone 40073 (TRAV8-3, TRAJ28)
CAVGAVGSYQLTF

SEQ ID NO: 80146 - protein, 15 aa, Homo sapiens
  CDR3 for beta chain variable domain of TCR clone 40073 (TRBV7-9, TRBJ1-5)
CASSQGLQPNQPQHF

SEQ ID NO: 80147 - protein, 16 aa, Homo sapiens
  CDR3 for alpha chain variable domain of TCR clone 40074 (TRAV26-1, TRAJ56)
CIVRARERGANSKLTF

SEQ ID NO: 80148 - protein, 13 aa, Homo sapiens
  CDR3 for beta chain variable domain of TCR clone 40074 (TRBV7-2, TRBJ1-1)
CASSLRANTEAFL

SEQ ID NO: 80149 - protein, 12 aa, Homo sapiens
  CDR3 for alpha chain variable domain of TCR clone 40075 (TRAV21, TRAJ33)
CAKMDSNYQLIW

SEQ ID NO: 80150 - protein, 14 aa, Homo sapiens
  CDR3 for beta chain variable domain of TCR clone 40075 (TRBV2, TRBJ2-7)
CASRLTSGGYEQYF

SEQ ID NO: 80151 - protein, 12 aa, Homo sapiens
  CDR3 for alpha chain variable domain of TCR clone 40076 (TRAV8-3, TRAJ26)
CAGDNYGQNFVF

SEQ ID NO: 80152 - protein, 15 aa, Homo sapiens
  CDR3 for beta chain variable domain of TCR clone 40076 (TRBV9, TRBJ2-1)
CASSLAGGSYNEQFF

SEQ ID NO: 80153 - protein, 14 aa, Homo sapiens
  CDR3 for alpha chain variable domain of TCR clone 40077 (TRAV1-2, TRAJ16)
CAVNRFSDGQKLLF

SEQ ID NO: 80154 - protein, 14 aa, Homo sapiens
  CDR3 for beta chain variable domain of TCR clone 40077 (TRBV5-4, TRBJ2-2)
CASRLDGGTGELFF

SEQ ID NO: 80155 - protein, 13 aa, Homo sapiens
  CDR3 for alpha chain variable domain of TCR clone 40078 (TRAV5, TRAJ30)
CAESSNRDDKIIF

SEQ ID NO: 80156 - protein, 15 aa, Homo sapiens
  CDR3 for beta chain variable domain of TCR clone 40078 (TRBV4-1, TRBJ2-7)
CASSQQGQGFDEQYF

SEQ ID NO: 80157 - protein, 17 aa, Homo sapiens
  CDR3 for alpha chain variable domain of TCR clone 40079 (TRAV3, TRAJ38)
CAVRDCLNAGNNRKLIW

SEQ ID NO: 80158 - protein, 16 aa, Homo sapiens
  CDR3 for beta chain variable domain of TCR clone 40079 (TRBV20-1, TRBJ1-4)
CSARPYGGEINEKLFF

SEQ ID NO: 80159 - protein, 13 aa, Homo sapiens
  CDR3 for alpha chain variable domain of TCR clone 40080 (TRAV24, TRAJ43)
CALTRHNNNDMRF

SEQ ID NO: 80160 - protein, 13 aa, Homo sapiens
  CDR3 for beta chain variable domain of TCR clone 40080 (TRBV2, TRBJ1-1)
CASSVLMNTEAFF

SEQ ID NO: 80161 - protein, 16 aa, Homo sapiens
  CDR3 for alpha chain variable domain of TCR clone 40081 (TRAV19, TRAJ17)
CAPWGQIKAAGNKLTF

SEQ ID NO: 80162 - protein, 16 aa, Homo sapiens
  CDR3 for beta chain variable domain of TCR clone 40081 (TRBV7-3, TRBJ2-1)
CASSLSSGGGAKEQFF

SEQ ID NO: 80163 - protein, 13 aa, Homo sapiens
  CDR3 for alpha chain variable domain of TCR clone 40082 (TRAV27, TRAJ6)
CAGGTRGSYIPTF

SEQ ID NO: 80164 - protein, 17 aa, Homo sapiens
  CDR3 for beta chain variable domain of TCR clone 40082 (TRBV13, TRBJ2-3)
CASSLSRVAGGRNTQYF

SEQ ID NO: 80165 - protein, 11 aa, Homo sapiens
  CDR3 for alpha chain variable domain of TCR clone 40083 (TRAV12-1, TRAJ30)
CVVNGQDKIIF

SEQ ID NO: 80166 - protein, 16 aa, Homo sapiens
  CDR3 for beta chain variable domain of TCR clone 40083 (TRBV24-1, TRBJ2-3)
CVTSDAISGITDTQYF

SEQ ID NO: 80167 - protein, 10 aa, Homo sapiens
  CDR3 for alpha chain variable domain of TCR clone 40084 (TRAV12-3, TRAJ18)
CAMSAEAQPW

SEQ ID NO: 80168 - protein, 15 aa, Homo sapiens
  CDR3 for beta chain variable domain of TCR clone 40084 (TRBV19, TRBJ2-4)
CASRGPRRGENIQYF

SEQ ID NO: 80169 - protein, 12 aa, Homo sapiens
  CDR3 for alpha chain variable domain of TCR clone 40085 (TRAV13-1, TRAJ21)
CAAKEGFNKFYF

SEQ ID NO: 80170 - protein, 15 aa, Homo sapiens
  CDR3 for beta chain variable domain of TCR clone 40085 (TRBV7-3, TRBJ2-1)
CASSPTGGGEVEQFF

SEQ ID NO: 80171 - protein, 14 aa, Homo sapiens
  CDR3 for alpha chain variable domain of TCR clone 40086 (TRAV12-2, TRAJ13)
CAVKKTGGYQKVTF

SEQ ID NO: 80172 - protein, 13 aa, Homo sapiens
  CDR3 for beta chain variable domain of TCR clone 40086 (TRBV10-3, TRBJ2-7)
CASKLAVNYEQHF

SEQ ID NO: 80173 - protein, 14 aa, Homo sapiens
  CDR3 for alpha chain variable domain of TCR clone 40087 (TRAV29/DV5, TRAJ45)
CAASFRGGSDGLTF

SEQ ID NO: 80174 - protein, 11 aa, Homo sapiens
  CDR3 for beta chain variable domain of TCR clone 40087 (TRBV11-2, TRBJ2-2)
CASSLPGELFF

SEQ ID NO: 80175 - protein, 17 aa, Homo sapiens
  CDR3 for alpha chain variable domain of TCR clone 40088 (TRAV3, TRAJ42)
CAVRDRDYGGSQGNLIF

SEQ ID NO: 80176 - protein, 14 aa, Homo sapiens
  CDR3 for beta chain variable domain of TCR clone 40088 (TRBV19, TRBJ2-2)
CASSRQGIAGELFF

SEQ ID NO: 80177 - protein, 12 aa, Homo sapiens
  CDR3 for alpha chain variable domain of TCR clone 40089 (TRAV13-2, TRAJ23)
CAERHRGGKLIF

SEQ ID NO: 80178 - protein, 15 aa, Homo sapiens
  CDR3 for beta chain variable domain of TCR clone 40089 (TRBV12-4, TRBJ2-5)
CASSPPTGPQETQYF

SEQ ID NO: 80179 - protein, 14 aa, Homo sapiens
  CDR3 for alpha chain variable domain of TCR clone 40090 (TRAV8-6, TRAJ5)
CAVSMDTGRRALTF

SEQ ID NO: 80180 - protein, 11 aa, Homo sapiens
  CDR3 for beta chain variable domain of TCR clone 40090 (TRBV7-3, TRBJ2-5)
CASSLSETQYF

SEQ ID NO: 80181 - protein, 13 aa, Homo sapiens
  CDR3 for alpha chain variable domain of TCR clone 40091 (TRAV12-1, TRAJ6)
CVVFPGGSYIPTF

SEQ ID NO: 80182 - protein, 17 aa, Homo sapiens
  CDR3 for beta chain variable domain of TCR clone 40091 (TRBV13, TRBJ2-3)
CASSLSRVAGGRNTQYF

SEQ ID NO: 80183 - protein, 15 aa, Homo sapiens
  CDR3 for alpha chain variable domain of TCR clone 40092 (TRAV14/DV4, TRAJ12)
CAMSEERDSSYKLIF

SEQ ID NO: 80184 - protein, 16 aa, Homo sapiens
  CDR3 for beta chain variable domain of TCR clone 40092 (TRBV11-2, TRBJ1-2)
CASSLDTGGADYGYTF

SEQ ID NO: 80185 - protein, 17 aa, Homo sapiens
  CDR3 for alpha chain variable domain of TCR clone 40093 (TRAV35, TRAJ47)
GLLDCRTHTEYGNKLVF

SEQ ID NO: 80186 - protein, 11 aa, Homo sapiens
  CDR3 for beta chain variable domain of TCR clone 40093 (TRBV29-1, TRBJ1-1)
RSVEVGTRTFF

SEQ ID NO: 80187 - protein, 13 aa, Homo sapiens
  CDR3 for alpha chain variable domain of TCR clone 40094 (TRAV12-3, TRAJ43)
CAMIRPNNNDMRF

SEQ ID NO: 80188 - protein, 14 aa, Homo sapiens
  CDR3 for beta chain variable domain of TCR clone 40094 (TRBV7-2, TRBJ2-5)
CASSTGGELKTQYF

SEQ ID NO: 80189 - protein, 16 aa, Homo sapiens
  CDR3 for alpha chain variable domain of TCR clone 40095 (TRAV26-2, TRAJ57)
CILRDVGSGGSEKLVV

SEQ ID NO: 80190 - protein, 13 aa, Homo sapiens
  CDR3 for beta chain variable domain of TCR clone 40095 (TRBV18, TRBJ2-3)
CASSPGVTDTQYF

SEQ ID NO: 80191 - protein, 13 aa, Homo sapiens
  CDR3 for alpha chain variable domain of TCR clone 40096 (TRAV12-2, TRAJ20)
CAVYPSNDYKLSF

SEQ ID NO: 80192 - protein, 13 aa, Homo sapiens
  CDR3 for beta chain variable domain of TCR clone 40096 (TRBV11-2, TRBJ2-5)
CASSSTGEETQYF

SEQ ID NO: 80193 - protein, 12 aa, Homo sapiens
  CDR3 for alpha chain variable domain of TCR clone 40097 (TRAV16, TRAJ9)
CALRGGGFKTIF

SEQ ID NO: 80194 - protein, 16 aa, Homo sapiens
  CDR3 for beta chain variable domain of TCR clone 40097 (TRBV7-2, TRBJ1-2)
CASSSNQDRRGHGYTF

SEQ ID NO: 80195 - protein, 12 aa, Homo sapiens
  CDR3 for alpha chain variable domain of TCR clone 40098 (TRAV2, TRAJ33)
CAVPDSNYQLIW

SEQ ID NO: 80196 - protein, 15 aa, Homo sapiens
  CDR3 for beta chain variable domain of TCR clone 40098 (TRBV15, TRBJ1-5)
CATSRDPVSNQPQHL

SEQ ID NO: 80197 - protein, 14 aa, Homo sapiens
  CDR3 for alpha chain variable domain of TCR clone 40099 (TRAV12-2, TRAJ17)
CAVNIKAAGNKLTF

SEQ ID NO: 80198 - protein, 15 aa, Homo sapiens
  CDR3 for beta chain variable domain of TCR clone 40099 (TRBV20-1, TRBJ2-7)
CSARDRVSGMDEQYF

SEQ ID NO: 80199 - protein, 11 aa, Homo sapiens
  CDR3 for alpha chain variable domain of TCR clone 40100 (TRAV1-2, TRAJ40)
CAVPGTYKYIF

SEQ ID NO: 80200 - protein, 16 aa, Homo sapiens
  CDR3 for beta chain variable domain of TCR clone 40100 (TRBV29-1, TRBJ2-7)
CSVEVVATSGSYEQYF

SEQ ID NO: 80201 - protein, 15 aa, Homo sapiens
  CDR3 for alpha chain variable domain of TCR clone 40101 (TRAV8-3, TRAJ15)
CAVGAPNQAGTALIF

SEQ ID NO: 80202 - protein, 14 aa, Homo sapiens
  CDR3 for beta chain variable domain of TCR clone 40101 (TRBV20-1, TRBJ2-1)
CSPNDEAPYNEQFF

SEQ ID NO: 80203 - protein, 15 aa, Homo sapiens
  CDR3 for alpha chain variable domain of TCR clone 40102 (TRAV8-3, TRAJ45)
CASSYSVGGADGLTF

SEQ ID NO: 80204 - protein, 16 aa, Homo sapiens
  CDR3 for beta chain variable domain of TCR clone 40102 (TRBV20-1, TRBJ2-2)
CSASASGIPGAGELFF

SEQ ID NO: 80205 - protein, 13 aa, Homo sapiens
  CDR3 for alpha chain variable domain of TCR clone 40103 (TRAV20, TRAJ56)
CAVQAGANSRLTF

SEQ ID NO: 80206 - protein, 14 aa, Homo sapiens
  CDR3 for beta chain variable domain of TCR clone 40103 (TRBV28, TRBJ1-1)
CASSPRTRWAEAFF

SEQ ID NO: 80207 - protein, 12 aa, Homo sapiens
  CDR3 for alpha chain variable domain of TCR clone 40104 (TRAV1-2, TRAJ20)
CAVRERDYKLSF

SEQ ID NO: 80208 - protein, 13 aa, Homo sapiens
  CDR3 for beta chain variable domain of TCR clone 40104 (TRBV7-2, TRBJ2-3)
CASSLAGVDTQYF

SEQ ID NO: 80209 - protein, 19 aa, Homo sapiens
  CDR3 for alpha chain variable domain of TCR clone 40105 (TRAV17, TRAJ57)
CFLLLCYGPLQGGSEKLVF

SEQ ID NO: 80210 - protein, 14 aa, Homo sapiens
  CDR3 for beta chain variable domain of TCR clone 40105 (TRBV12-5, TRBJ2-5)
CASGSRTHQETQYF

SEQ ID NO: 80211 - protein, 23 aa, Homo sapiens
  CDR3 for alpha chain variable domain of TCR clone 40106 (TRAV26-1, TRAJ38)
CIADNAGNNHIQHPDPAVYQLRD

SEQ ID NO: 80212 - protein, 13 aa, Homo sapiens
  CDR3 for beta chain variable domain of TCR clone 40106 (TRBV20-1, TRBJ1-1)
CSARGGGNTEAFF

SEQ ID NO: 80213 - protein, 14 aa, Homo sapiens
  CDR3 for alpha chain variable domain of TCR clone 40107 (TRAV1-2, TRAJ16)
CAVNRFSGGQKLLF

SEQ ID NO: 80214 - protein, 13 aa, Homo sapiens
  CDR3 for beta chain variable domain of TCR clone 40107 (TRBV7-9, TRBJ1-2)
CASSLKQNYGYTF

SEQ ID NO: 80215 - protein, 11 aa, Homo sapiens
  CDR3 for alpha chain variable domain of TCR clone 40108 (TRAV1-1, TRAJ23)
CAGRQGGKLIF

SEQ ID NO: 80216 - protein, 20 aa, Homo sapiens
  CDR3 for beta chain variable domain of TCR clone 40108 (TRBV7-8, TRBJ2-2)
CASSHLFPGPTIHITGELFF

SEQ ID NO: 80217 - protein, 12 aa, Homo sapiens
  CDR3 for alpha chain variable domain of TCR clone 40109 (TRAV13-2, TRAJ23)
CAERHRGGKLIF

SEQ ID NO: 80218 - protein, 16 aa, Homo sapiens
  CDR3 for beta chain variable domain of TCR clone 40109 (TRBV11-2, TRBJ2-7)
CASSPTTGGVSYEQYF

SEQ ID NO: 80219 - protein, 11 aa, Homo sapiens
  CDR3 for alpha chain variable domain of TCR clone 40110 (TRAV2, TRAJ13)
CASGGYQEVTF

SEQ ID NO: 80220 - protein, 15 aa, Homo sapiens
  CDR3 for beta chain variable domain of TCR clone 40110 (TRBV29-1, TRBJ2-1)
CSGRDRKSSYNEQFF

SEQ ID NO: 80221 - protein, 13 aa, Homo sapiens
  CDR3 for alpha chain variable domain of TCR clone 40111 (TRAV1-2, TRAJ9)
CAALNTGGFKTIF

SEQ ID NO: 80222 - protein, 13 aa, Homo sapiens
  CDR3 for beta chain variable domain of TCR clone 40111 (TRBV19, TRBJ1-2)
CASSVRGQDGYTF

SEQ ID NO: 80223 - protein, 11 aa, Homo sapiens
  CDR3 for alpha chain variable domain of TCR clone 40112 (TRAV17, TRAJ9)
CGFTGGFKTIF

SEQ ID NO: 80224 - protein, 14 aa, Homo sapiens
  CDR3 for beta chain variable domain of TCR clone 40112 (TRBV7-9, TRBJ2-2)
CASSLVQDTGELVF

SEQ ID NO: 80225 - protein, 14 aa, Homo sapiens
  CDR3 for alpha chain variable domain of TCR clone 40113 (TRAV26-1, TRAJ34)
CIVRVAHNTDKLIF

SEQ ID NO: 80226 - protein, 15 aa, Homo sapiens
  CDR3 for beta chain variable domain of TCR clone 40113 (TRBV20-1, TRBJ2-7)
CSARVPAAYFYEQYF

SEQ ID NO: 80227 - protein, 15 aa, Homo sapiens
  CDR3 for alpha chain variable domain of TCR clone 40114 (TRAV8-3, TRAJ27)
CAVGPSKTIAGKSTF

SEQ ID NO: 80228 - protein, 15 aa, Homo sapiens
  CDR3 for beta chain variable domain of TCR clone 40114 (TRBV7-2, TRBJ2-1)
CASSSGLAGGNEQFF

SEQ ID NO: 80229 - protein, 15 aa, Homo sapiens
  CDR3 for alpha chain variable domain of TCR clone 40115 (TRAV21, TRAJ38)
CAVRQDAGNNRKLIC

SEQ ID NO: 80230 - protein, 16 aa, Homo sapiens
  CDR3 for beta chain variable domain of TCR clone 40115 (TRBV4-2, TRBJ1-1)
CASRPLDGGGDTEAFF

SEQ ID NO: 80231 - protein, 15 aa, Homo sapiens
  CDR3 for alpha chain variable domain of TCR clone 40116 (TRAV3, TRAJ3)
CAARDRDSSASKIIF

SEQ ID NO: 80232 - protein, 18 aa, Homo sapiens
  CDR3 for beta chain variable domain of TCR clone 40116 (TRBV25-1, TRBJ1-2)
CASSGLQNGQGLIFGYTF

SEQ ID NO: 80233 - protein, 14 aa, Homo sapiens
  CDR3 for alpha chain variable domain of TCR clone 40117 (TRAV12-2, TRAJ15)
CAPHTGQAGTALIF

SEQ ID NO: 80234 - protein, 14 aa, Homo sapiens
  CDR3 for beta chain variable domain of TCR clone 40117 (TRBV25-1, TRBJ1-1)
CASTHLGGNIEAFF

SEQ ID NO: 80235 - protein, 20 aa, Homo sapiens
  CDR3 for alpha chain variable domain of TCR clone 40118 (TRAV27, TRAJ10)
ASTSVPSRGILTGGGNKLTF

SEQ ID NO: 80236 - protein, 16 aa, Homo sapiens
  CDR3 for beta chain variable domain of TCR clone 40118 (TRBV12-5, TRBJ2-5)
CASGPRTSGNQETQYF

SEQ ID NO: 80237 - protein, 15 aa, Homo sapiens
  CDR3 for alpha chain variable domain of TCR clone 40119 (TRAV17, TRAJ10)
CATVLLTGGGNKLTF

SEQ ID NO: 80238 - protein, 17 aa, Homo sapiens
  CDR3 for beta chain variable domain of TCR clone 40119 (TRBV11-2, TRBJ2-1)
CASSLHPPGVEYNEQFF

SEQ ID NO: 80239 - protein, 16 aa, Homo sapiens
  CDR3 for alpha chain variable domain of TCR clone 40120 (TRAV8-2, TRAJ7)
CVVSEGPYYGDNRLAF

SEQ ID NO: 80240 - protein, 15 aa, Homo sapiens
  CDR3 for beta chain variable domain of TCR clone 40120 (TRBV27, TRBJ2-3)
CASSLGLAATDTQYF

SEQ ID NO: 80241 - protein, 16 aa, Homo sapiens
  CDR3 for alpha chain variable domain of TCR clone 40121 (TRAV3, TRAJ10)
CAVRDMRAGGGNKLTF

SEQ ID NO: 80242 - protein, 15 aa, Homo sapiens
  CDR3 for beta chain variable domain of TCR clone 40121 (TRBV15, TRBJ1-5)
CATSTTGAVNQPQHF

SEQ ID NO: 80243 - protein, 14 aa, Homo sapiens
  CDR3 for alpha chain variable domain of TCR clone 40122 (TRAV25, TRAJ35)
CARRMEGFGNVLHC

SEQ ID NO: 80244 - protein, 20 aa, Homo sapiens
  CDR3 for beta chain variable domain of TCR clone 40122 (TRBV7-8, TRBJ2-2)
CASSHLFPGPTIHITGELFF

SEQ ID NO: 80245 - protein, 11 aa, Homo sapiens
  CDR3 for alpha chain variable domain of TCR clone 40123 (TRAV21, TRAJ11)
CALNGYSTLTF

SEQ ID NO: 80246 - protein, 11 aa, Homo sapiens
  CDR3 for beta chain variable domain of TCR clone 40123 (TRBV19, TRBJ1-1)
CASSIGSEAFF

SEQ ID NO: 80247 - protein, 14 aa, Homo sapiens
  CDR3 for alpha chain variable domain of TCR clone 40124 (TRAV12-1, TRAJ26)
CVVKGSNYGQNFVF

SEQ ID NO: 80248 - protein, 17 aa, Homo sapiens
  CDR3 for beta chain variable domain of TCR clone 40124 (TRBV11-2, TRBJ2-6)
CASSQRDIFSGANGLTF

SEQ ID NO: 80249 - protein, 13 aa, Homo sapiens
  CDR3 for alpha chain variable domain of TCR clone 40125 (TRAV21, TRAJ20)
CAVGLRVDYKRSF

SEQ ID NO: 80250 - protein, 13 aa, Homo sapiens
  CDR3 for beta chain variable domain of TCR clone 40125 (TRBV6-1, TRBJ1-1)
CASSRQGNTEAFF

SEQ ID NO: 80251 - protein, 13 aa, Homo sapiens
  CDR3 for alpha chain variable domain of TCR clone 40126 (TRAV3, TRAJ27)
CAVRPLGAGKSTF

SEQ ID NO: 80252 - protein, 14 aa, Homo sapiens
  CDR3 for beta chain variable domain of TCR clone 40126 (TRBV6-1, TRBJ1-3)
CASVQGGGGNTIYF

SEQ ID NO: 80253 - protein, 14 aa, Homo sapiens
  CDR3 for alpha chain variable domain of TCR clone 40127 (TRAV35, TRAJ33)
CWPRGRDSNYQLIW

SEQ ID NO: 80254 - protein, 11 aa, Homo sapiens
  CDR3 for beta chain variable domain of TCR clone 40127 (TRBV10-3, TRBJ2-7)
RAISEGLEQYF

SEQ ID NO: 80255 - protein, 14 aa, Homo sapiens
  CDR3 for alpha chain variable domain of TCR clone 40128 (TRAV23/DV6, TRAJ24)
CAASLSDSWGRLQF

SEQ ID NO: 80256 - protein, 16 aa, Homo sapiens
  CDR3 for beta chain variable domain of TCR clone 40128 (TRBV7-9, TRBJ2-6)
CASSLKGPLRANVLTF

SEQ ID NO: 80257 - protein, 20 aa, Homo sapiens
  CDR3 for alpha chain variable domain of TCR clone 40129 (TRAV12-2, TRAJ52)
SPVIQPPARAGGISYGKLTF

SEQ ID NO: 80258 - protein, 16 aa, Homo sapiens
  CDR3 for beta chain variable domain of TCR clone 40129 (TRBV15, TRBJ1-2)
CATSRGPRTGGGGYTF

SEQ ID NO: 80259 - protein, 10 aa, Homo sapiens
  CDR3 for alpha chain variable domain of TCR clone 40130 (TRAV36/DV7, TRAJ48)
CAVGNEKLTF

SEQ ID NO: 80260 - protein, 12 aa, Homo sapiens
  CDR3 for beta chain variable domain of TCR clone 40130 (TRBV19, TRBJ1-5)
CASSIAQQPQHF

SEQ ID NO: 80261 - protein, 15 aa, Homo sapiens
  CDR3 for alpha chain variable domain of TCR clone 40131 (TRAV13-1, TRAJ44)
CAASRGGGNASKLTF

SEQ ID NO: 80262 - protein, 12 aa, Homo sapiens
  CDR3 for beta chain variable domain of TCR clone 40131 (TRBV11-2, TRBJ2-2)
CASSLGGGELFF

SEQ ID NO: 80263 - protein, 10 aa, Homo sapiens
  CDR3 for alpha chain variable domain of TCR clone 40132 (TRAV8-4, TRAJ43)
CAVSADDMSF

SEQ ID NO: 80264 - protein, 15 aa, Homo sapiens
  CDR3 for beta chain variable domain of TCR clone 40132 (TRBV5-1, TRBJ2-3)
CASSVTSGSTDTQYF

SEQ ID NO: 80265 - protein, 14 aa, Homo sapiens
  CDR3 for alpha chain variable domain of TCR clone 40133 (TRAV4, TRAJ9)
CLVGSGTGGFKTIF

SEQ ID NO: 80266 - protein, 14 aa, Homo sapiens
  CDR3 for beta chain variable domain of TCR clone 40133 (TRBV19, TRBJ2-7)
CASTVQGRPYEQYF

SEQ ID NO: 80267 - protein, 15 aa, Homo sapiens
  CDR3 for alpha chain variable domain of TCR clone 40134 (TRAV35, TRAJ50)
CAGQLRKTSYDKVIF

SEQ ID NO: 80268 - protein, 12 aa, Homo sapiens
  CDR3 for beta chain variable domain of TCR clone 40134 (TRBV5-1, TRBJ2-5)
CDSSLGLETQYF

SEQ ID NO: 80269 - protein, 17 aa, Homo sapiens
  CDR3 for alpha chain variable domain of TCR clone 40135 (TRAV2, TRAJ36)
CAVEDRGNWGKQPLLWD

SEQ ID NO: 80270 - protein, 14 aa, Homo sapiens
  CDR3 for beta chain variable domain of TCR clone 40135 (TRBV7-9, TRBJ2-5)
CASSLYTAQETQYF

SEQ ID NO: 80271 - protein, 12 aa, Homo sapiens
  CDR3 for alpha chain variable domain of TCR clone 40136 (TRAV13-1, TRAJ21)
CAAKEGFNKFYF

SEQ ID NO: 80272 - protein, 14 aa, Homo sapiens
  CDR3 for beta chain variable domain of TCR clone 40136 (TRBV5-4, TRBJ1-1)
CASSLDSRRDEAFS

SEQ ID NO: 80273 - protein, 13 aa, Homo sapiens
  CDR3 for alpha chain variable domain of TCR clone 40137 (TRAV13-1, TRAJ21)
CAASIYNFNKFYF

SEQ ID NO: 80274 - protein, 15 aa, Homo sapiens
  CDR3 for beta chain variable domain of TCR clone 40137 (TRBV9, TRBJ2-1)
CAISLAGSSYNEQFF

SEQ ID NO: 80275 - protein, 12 aa, Homo sapiens
  CDR3 for alpha chain variable domain of TCR clone 40138 (TRAV26-2, TRAJ48)
CILRKGNEKLTF

SEQ ID NO: 80276 - protein, 13 aa, Homo sapiens
  CDR3 for beta chain variable domain of TCR clone 40138 (TRBV7-3, TRBJ1-1)
CASSQDWGAEAFF

SEQ ID NO: 80277 - protein, 15 aa, Homo sapiens
  CDR3 for alpha chain variable domain of TCR clone 40139 (TRAV2, TRAJ22)
CAAPSRGGSARQLTF

SEQ ID NO: 80278 - protein, 11 aa, Homo sapiens
  CDR3 for beta chain variable domain of TCR clone 40139 (TRBV27, TRBJ2-3)
CASSLGDTQYF

SEQ ID NO: 80279 - protein, 15 aa, Homo sapiens
  CDR3 for alpha chain variable domain of TCR clone 40140 (TRAV20, TRAJ4)
CAVEGSSGGYNKLIF

SEQ ID NO: 80280 - protein, 13 aa, Homo sapiens
  CDR3 for beta chain variable domain of TCR clone 40140 (TRBV7-8, TRBJ2-7)
CQHPRGALGEQYF

SEQ ID NO: 80281 - protein, 13 aa, Homo sapiens
  CDR3 for alpha chain variable domain of TCR clone 40141 (TRAV1-1, TRAJ30)
CAVRSDRDDKIIF

SEQ ID NO: 80282 - protein, 14 aa, Homo sapiens
  CDR3 for beta chain variable domain of TCR clone 40141 (TRBV28, TRBJ2-7)
CASTFYVRAHEQYF

SEQ ID NO: 80283 - protein, 14 aa, Homo sapiens
  CDR3 for alpha chain variable domain of TCR clone 40142 (TRAV3, TRAJ22)
CAVRDYGSARKLTF

SEQ ID NO: 80284 - protein, 13 aa, Homo sapiens
  CDR3 for beta chain variable domain of TCR clone 40142 (TRBV11-2, TRBJ2-5)
CASGHGAKETQYF

SEQ ID NO: 80285 - protein, 18 aa, Homo sapiens
  CDR3 for alpha chain variable domain of TCR clone 40143 (TRAV13-1, TRAJ52)
CAASKRSAGGTSYGKLTS

SEQ ID NO: 80286 - protein, 12 aa, Homo sapiens
  CDR3 for beta chain variable domain of TCR clone 40143 (TRBV12-4, TRBJ2-7)
CASSLGGYEQYF

SEQ ID NO: 80287 - protein, 14 aa, Homo sapiens
  CDR3 for alpha chain variable domain of TCR clone 40144 (TRAV1-1, TRAJ28)
CAAPSGAGSYQLTL

SEQ ID NO: 80288 - protein, 15 aa, Homo sapiens
  CDR3 for beta chain variable domain of TCR clone 40144 (TRBV7-2, TRBJ1-2)
CASSLVSGGDYGYTF

SEQ ID NO: 80289 - protein, 10 aa, Homo sapiens
  CDR3 for alpha chain variable domain of TCR clone 40145 (TRAV3, TRAJ30)
CAVREIEIIF

SEQ ID NO: 80290 - protein, 13 aa, Homo sapiens
  CDR3 for beta chain variable domain of TCR clone 40145 (TRBV7-2, TRBJ2-2)
CASSLAVTGELFF

SEQ ID NO: 80291 - protein, 14 aa, Homo sapiens
  CDR3 for alpha chain variable domain of TCR clone 40146 (TRAV4, TRAJ17)
CLVGDMAAGNTLTF

SEQ ID NO: 80292 - protein, 13 aa, Homo sapiens
  CDR3 for beta chain variable domain of TCR clone 40146 (TRBV18, TRBJ2-7)
CASQSGGGYEQYF

SEQ ID NO: 80293 - protein, 18 aa, Homo sapiens
  CDR3 for alpha chain variable domain of TCR clone 40147 (TRAV13-1, TRAJ52)
CAAKNPNAGGTSYGKLTF

SEQ ID NO: 80294 - protein, 15 aa, Homo sapiens
  CDR3 for beta chain variable domain of TCR clone 40147 (TRBV19, TRBJ1-6)
CASSTQGAVGSPLHF

SEQ ID NO: 80295 - protein, 12 aa, Homo sapiens
  CDR3 for alpha chain variable domain of TCR clone 40148 (TRAV29/DV5, TRAJ15)
CASNQAGTALIF

SEQ ID NO: 80296 - protein, 14 aa, Homo sapiens
  CDR3 for beta chain variable domain of TCR clone 40148 (TRBV7-9, TRBJ1-1)
CASSLGGANTEAFF

SEQ ID NO: 80297 - protein, 18 aa, Homo sapiens
  CDR3 for alpha chain variable domain of TCR clone 40149 (TRAV12-3, TRAJ52)
CAMSRTNAGGTSYGKLTF

SEQ ID NO: 80298 - protein, 17 aa, Homo sapiens
  CDR3 for beta chain variable domain of TCR clone 40149 (TRBV7-3, TRBJ2-3)
CANSLMKRMRGADTQYF

SEQ ID NO: 80299 - protein, 13 aa, Homo sapiens
  CDR3 for alpha chain variable domain of TCR clone 40150 (TRAV2, TRAJ40)
CAVVTSGTYKYIF

SEQ ID NO: 80300 - protein, 14 aa, Homo sapiens
  CDR3 for beta chain variable domain of TCR clone 40150 (TRBV2, TRBJ1-1)
CASTQVGENTEAFF

SEQ ID NO: 80301 - protein, 14 aa, Homo sapiens
  CDR3 for alpha chain variable domain of TCR clone 40151 (TRAV30, TRAJ33)
CGTERRFSNCQLIW

SEQ ID NO: 80302 - protein, 16 aa, Homo sapiens
  CDR3 for beta chain variable domain of TCR clone 40151 (TRBV7-3, TRBJ2-2)
CASSLKRGTLSGELFF

SEQ ID NO: 80303 - protein, 14 aa, Homo sapiens
  CDR3 for alpha chain variable domain of TCR clone 40152 (TRAV16, TRAJ33)
CALSAMDSNYQLIW

SEQ ID NO: 80304 - protein, 12 aa, Homo sapiens
  CDR3 for beta chain variable domain of TCR clone 40152 (TRBV5-1, TRBJ1-2)
CASSQDTCGYTF

SEQ ID NO: 80305 - protein, 13 aa, Homo sapiens
  CDR3 for alpha chain variable domain of TCR clone 40153 (TRAV12-2, TRAJ9)
CAMRNTGGFKTIF

SEQ ID NO: 80306 - protein, 14 aa, Homo sapiens
  CDR3 for beta chain variable domain of TCR clone 40153 (TRBV11-2, TRBJ2-7)
CASSSTGEGYEQYF

SEQ ID NO: 80307 - protein, 11 aa, Homo sapiens
  CDR3 for alpha chain variable domain of TCR clone 40154 (TRAV12-3, TRAJ6)
CAMSGSYIPTF

SEQ ID NO: 80308 - protein, 14 aa, Homo sapiens
  CDR3 for beta chain variable domain of TCR clone 40154 (TRBV7-2, TRBJ2-3)
CASSGGISTDTQYF

SEQ ID NO: 80309 - protein, 15 aa, Homo sapiens
  CDR3 for alpha chain variable domain of TCR clone 40155 (TRAV3, TRAJ30)
CAVRDEYGRDDKTIF

SEQ ID NO: 80310 - protein, 16 aa, Homo sapiens
  CDR3 for beta chain variable domain of TCR clone 40155 (TRBV5-1, TRBJ2-5)
CASSLANHRGRETQYF

SEQ ID NO: 80311 - protein, 14 aa, Homo sapiens
  CDR3 for alpha chain variable domain of TCR clone 40156 (TRAV12-3, TRAJ10)
SHLPLTGGGNKLTF

SEQ ID NO: 80312 - protein, 13 aa, Homo sapiens
  CDR3 for beta chain variable domain of TCR clone 40156 (TRBV28, TRBJ1-5)
CASSDRGNQPQHF

SEQ ID NO: 80313 - protein, 13 aa, Homo sapiens
  CDR3 for alpha chain variable domain of TCR clone 40157 (TRAV8-3, TRAJ44)
CAVVPGTASELTF

SEQ ID NO: 80314 - protein, 14 aa, Homo sapiens
  CDR3 for beta chain variable domain of TCR clone 40157 (TRBV11-2, TRBJ2-3)
CASSRLARTDTQYF

SEQ ID NO: 80315 - protein, 18 aa, Homo sapiens
  CDR3 for alpha chain variable domain of TCR clone 40158 (TRAV26-1, TRAJ23)
CIVRVGLEVWNQGGKLIF

SEQ ID NO: 80316 - protein, 16 aa, Homo sapiens
  CDR3 for beta chain variable domain of TCR clone 40158 (TRBV12-4, TRBJ2-5)
CASSFFVRGRQETQCF

SEQ ID NO: 80317 - protein, 14 aa, Homo sapiens
  CDR3 for alpha chain variable domain of TCR clone 40159 (TRAV41, TRAJ48)
CAVRPHFGNEKLTF

SEQ ID NO: 80318 - protein, 16 aa, Homo sapiens
  CDR3 for beta chain variable domain of TCR clone 40159 (TRBV6-6, TRBJ1-5)
CASSYSTLVGNQPQHF

SEQ ID NO: 80319 - protein, 10 aa, Homo sapiens
  CDR3 for alpha chain variable domain of TCR clone 40160 (TRAV13-1, TRAJ21)
WAASLNKFYF

SEQ ID NO: 80320 - protein, 13 aa, Homo sapiens
  CDR3 for beta chain variable domain of TCR clone 40160 (TRBV7-9, TRBJ2-7)
CASSFYGSYEQYF

SEQ ID NO: 80321 - protein, 16 aa, Homo sapiens
  CDR3 for alpha chain variable domain of TCR clone 40161 (TRAV21, TRAJ17)
CAVRPGEEAAGNTLTF

SEQ ID NO: 80322 - protein, 16 aa, Homo sapiens
  CDR3 for beta chain variable domain of TCR clone 40161 (TRBV2, TRBJ2-7)
CASSEPWTGPSYEQYF

SEQ ID NO: 80323 - protein, 12 aa, Homo sapiens
  CDR3 for alpha chain variable domain of TCR clone 40162 (TRAV13-2, TRAJ23)
RAERHRGGKLIF

SEQ ID NO: 80324 - protein, 15 aa, Homo sapiens
  CDR3 for beta chain variable domain of TCR clone 40162 (TRBV7-9, TRBJ1-6)
CASSSPGRGNSPLHF

SEQ ID NO: 80325 - protein, 13 aa, Homo sapiens
  CDR3 for alpha chain variable domain of TCR clone 40163 (TRAV2, TRAJ40)
CAVVTSGTYKYIF

SEQ ID NO: 80326 - protein, 16 aa, Homo sapiens
  CDR3 for beta chain variable domain of TCR clone 40163 (TRBV29-1, TRBJ1-2)
CSVEANRDIANYGYAF

SEQ ID NO: 80327 - protein, 14 aa, Homo sapiens
  CDR3 for alpha chain variable domain of TCR clone 40164 (TRAV17, TRAJ57)
CATDPQGGSEKLVF

SEQ ID NO: 80328 - protein, 13 aa, Homo sapiens
  CDR3 for beta chain variable domain of TCR clone 40164 (TRBV13, TRBJ2-1)
CASTPGSYNEQFF

SEQ ID NO: 80329 - protein, 16 aa, Homo sapiens
  CDR3 for alpha chain variable domain of TCR clone 40165 (TRAV30, TRAJ24)
CGTEIVDADSWGKFQF

SEQ ID NO: 80330 - protein, 12 aa, Homo sapiens
  CDR3 for beta chain variable domain of TCR clone 40165 (TRBV3-1, TRBJ2-1)
CASSQGSSGQFF

SEQ ID NO: 80331 - protein, 14 aa, Homo sapiens
  CDR3 for alpha chain variable domain of TCR clone 40166 (TRAV8-3, TRAJ7)
CAAIELYGNNRLAF

SEQ ID NO: 80332 - protein, 15 aa, Homo sapiens
  CDR3 for beta chain variable domain of TCR clone 40166 (TRBV20-1, TRBJ1-5)
CSAKPPGQGPQPQHF

SEQ ID NO: 80333 - protein, 11 aa, Homo sapiens
  CDR3 for alpha chain variable domain of TCR clone 40167 (TRAV21, TRAJ34)
CAHYNTDKLIF

SEQ ID NO: 80334 - protein, 12 aa, Homo sapiens
  CDR3 for beta chain variable domain of TCR clone 40167 (TRBV7-6, TRBJ1-2)
CQQLVADYGYTF

SEQ ID NO: 80335 - protein, 16 aa, Homo sapiens
  CDR3 for alpha chain variable domain of TCR clone 40168 (TRAV30, TRAJ24)
CGTEIVDADSWGRFQF

SEQ ID NO: 80336 - protein, 15 aa, Homo sapiens
  CDR3 for beta chain variable domain of TCR clone 40168 (TRBV12-4, TRBJ2-7)
CASSQRTSGNYEQYF

SEQ ID NO: 80337 - protein, 14 aa, Homo sapiens
  CDR3 for alpha chain variable domain of TCR clone 40169 (TRAV35, TRAJ50)
CAGHRKTSYDEVIF

SEQ ID NO: 80338 - protein, 13 aa, Homo sapiens
  CDR3 for beta chain variable domain of TCR clone 40169 (TRBV7-7, TRBJ2-3)
CASSLSRADTQYF

SEQ ID NO: 80339 - protein, 18 aa, Homo sapiens
  CDR3 for alpha chain variable domain of TCR clone 40170 (TRAV21, TRAJ52)
CAVRPSPAGGTSYGKLTF

SEQ ID NO: 80340 - protein, 16 aa, Homo sapiens
  CDR3 for beta chain variable domain of TCR clone 40170 (TRBV2, TRBJ2-1)
CASSVGGSLSYNEQFF

SEQ ID NO: 80341 - protein, 11 aa, Homo sapiens
  CDR3 for alpha chain variable domain of TCR clone 40171 (TRAV8-6, TRAJ42)
CAVRGRKPRRS

SEQ ID NO: 80342 - protein, 13 aa, Homo sapiens
  CDR3 for beta chain variable domain of TCR clone 40171 (TRBV7-3, TRBJ1-1)
CASSQDWGAEAFF

SEQ ID NO: 80343 - protein, 13 aa, Homo sapiens
  CDR3 for alpha chain variable domain of TCR clone 40172 (TRAV13-1, TRAJ21)
CAASIYNINKFYF

SEQ ID NO: 80344 - protein, 13 aa, Homo sapiens
  CDR3 for beta chain variable domain of TCR clone 40172 (TRBV27, TRBJ1-4)
CASSLMGDEKLFF

SEQ ID NO: 80345 - protein, 14 aa, Homo sapiens
  CDR3 for alpha chain variable domain of TCR clone 40173 (TRAV16, TRAJ54)
CALSDGQGAQKLVF

SEQ ID NO: 80346 - protein, 13 aa, Homo sapiens
  CDR3 for beta chain variable domain of TCR clone 40173 (TRBV20-1, TRBJ2-4)
RSAPTWAGNIQYF

SEQ ID NO: 80347 - protein, 18 aa, Homo sapiens
  CDR3 for alpha chain variable domain of TCR clone 40174 (TRAV12-3, TRAJ52)
CAMSVGGAGGTSYGKLTF

SEQ ID NO: 80348 - protein, 15 aa, Homo sapiens
  CDR3 for beta chain variable domain of TCR clone 40174 (TRBV7-2, TRBJ2-5)
CASSLVAGEQETQYF

SEQ ID NO: 80349 - protein, 11 aa, Homo sapiens
  CDR3 for alpha chain variable domain of TCR clone 40175 (TRAV23/DV6, TRAJ49)
CAVAPVTSSIL

SEQ ID NO: 80350 - protein, 14 aa, Homo sapiens
  CDR3 for beta chain variable domain of TCR clone 40175 (TRBV12-5, TRBJ2-5)
CASGSRTHQETQYF

SEQ ID NO: 80351 - protein, 16 aa, Homo sapiens
  CDR3 for alpha chain variable domain of TCR clone 40176 (TRAV30, TRAJ24)
CGTEIVDADSWGKFQF

SEQ ID NO: 80352 - protein, 17 aa, Homo sapiens
  CDR3 for beta chain variable domain of TCR clone 40176 (TRBV28, TRBJ2-3)
CASSSPPTGLSTDTQYF

SEQ ID NO: 80353 - protein, 14 aa, Homo sapiens
  CDR3 for alpha chain variable domain of TCR clone 40177 (TRAV16, TRAJ15)
CALIGPQAGTALIF

SEQ ID NO: 80354 - protein, 12 aa, Homo sapiens
  CDR3 for beta chain variable domain of TCR clone 40177 (TRBV18, TRBJ2-5)
CASSPSKETQYF

SEQ ID NO: 80355 - protein, 12 aa, Homo sapiens
  CDR3 for alpha chain variable domain of TCR clone 40178 (TRAV12-3, TRAJ5)
CAMDTGRGALTF

SEQ ID NO: 80356 - protein, 14 aa, Homo sapiens
  CDR3 for beta chain variable domain of TCR clone 40178 (TRBV20-1, TRBJ2-1)
CSAQIGGSANEQFF

SEQ ID NO: 80357 - protein, 18 aa, Homo sapiens
  CDR3 for alpha chain variable domain of TCR clone 40179 (TRAV13-1, TRAJ52)
CAASKRSAGGTSYGKLTF

SEQ ID NO: 80358 - protein, 13 aa, Homo sapiens
  CDR3 for beta chain variable domain of TCR clone 40179 (TRBV12-4, TRBJ1-2)
CASSLRHGKGYTF

SEQ ID NO: 80359 - protein, 17 aa, Homo sapiens
  CDR3 for alpha chain variable domain of TCR clone 40180 (TRAV3, TRAJ6)
CAVRDGPRAGGSYIPTF

SEQ ID NO: 80360 - protein, 20 aa, Homo sapiens
  CDR3 for beta chain variable domain of TCR clone 40180 (TRBV28, TRBJ2-1)
CAITPIGRSPGLAGGNEQFF

SEQ ID NO: 80361 - protein, 14 aa, Homo sapiens
  CDR3 for alpha chain variable domain of TCR clone 40181 (TRAV16, TRAJ33)
CALSAMGSNYQLIW

SEQ ID NO: 80362 - protein, 15 aa, Homo sapiens
  CDR3 for beta chain variable domain of TCR clone 40181 (TRBV28, TRBJ2-7)
CASSLEAYPIYEQYF

SEQ ID NO: 80363 - protein, 13 aa, Homo sapiens
  CDR3 for alpha chain variable domain of TCR clone 40182 (TRAV3, TRAJ20)
CCEAFCNDYKLSF

SEQ ID NO: 80364 - protein, 14 aa, Homo sapiens
  CDR3 for beta chain variable domain of TCR clone 40182 (TRBV7-2, TRBJ2-7)
CASRSQGAAYEQYF

SEQ ID NO: 80365 - protein, 14 aa, Homo sapiens
  CDR3 for alpha chain variable domain of TCR clone 40183 (TRAV9-2, TRAJ38)
CALSNAGNNRKLIW

SEQ ID NO: 80366 - protein, 15 aa, Homo sapiens
  CDR3 for beta chain variable domain of TCR clone 40183 (TRBV9, TRBJ2-1)
CASSLAGGSYNEQFF

SEQ ID NO: 80367 - protein, 14 aa, Homo sapiens
  CDR3 for alpha chain variable domain of TCR clone 40184 (TRAV1-1, TRAJ27)
CAVIYNTNAGKSTF

SEQ ID NO: 80368 - protein, 13 aa, Homo sapiens
  CDR3 for beta chain variable domain of TCR clone 40184 (TRBV19, TRBJ1-2)
CASSVPGQDGYTF

SEQ ID NO: 80369 - protein, 12 aa, Homo sapiens
  CDR3 for alpha chain variable domain of TCR clone 40185 (TRAV13-1, TRAJ49)
CAASPTGNQFYF

SEQ ID NO: 80370 - protein, 13 aa, Homo sapiens
  CDR3 for beta chain variable domain of TCR clone 40185 (TRBV20-1, TRBJ2-2)
CSASAAGTGELFF

SEQ ID NO: 80371 - protein, 15 aa, Homo sapiens
  CDR3 for alpha chain variable domain of TCR clone 40186 (TRAV34, TRAJ38)
CGADFTPGNNRKLIW

SEQ ID NO: 80372 - protein, 10 aa, Homo sapiens
  CDR3 for beta chain variable domain of TCR clone 40186 (TRBV6-3, TRBJ2-2)
CASRDGELFF

SEQ ID NO: 80373 - protein, 16 aa, Homo sapiens
  CDR3 for alpha chain variable domain of TCR clone 40187 (TRAV38-1, TRAJ37)
CAFKGDGSSNTGRLIF

SEQ ID NO: 80374 - protein, 13 aa, Homo sapiens
  CDR3 for beta chain variable domain of TCR clone 40187 (TRBV12-4, TRBJ2-5)
CASSLFRRETQYF

SEQ ID NO: 80375 - protein, 15 aa, Homo sapiens
  CDR3 for alpha chain variable domain of TCR clone 40188 (TRAV26-1, TRAJ38)
CIVRAEGGNNRKLIW

SEQ ID NO: 80376 - protein, 14 aa, Homo sapiens
  CDR3 for beta chain variable domain of TCR clone 40188 (TRBV7-6, TRBJ2-5)
CASSSPSGSGTQYF

SEQ ID NO: 80377 - protein, 16 aa, Homo sapiens
  CDR3 for alpha chain variable domain of TCR clone 40189 (TRAV12-3, TRAJ53)
CAMSPGSGGSNYKLTF

SEQ ID NO: 80378 - protein, 15 aa, Homo sapiens
  CDR3 for beta chain variable domain of TCR clone 40189 (TRBV7-3, TRBJ2-2)
CASSETGQGTGELFF

SEQ ID NO: 80379 - protein, 14 aa, Homo sapiens
  CDR3 for alpha chain variable domain of TCR clone 40190 (TRAV1-2, TRAJ8)
CAVREDTGFQKLVF

SEQ ID NO: 80380 - protein, 15 aa, Homo sapiens
  CDR3 for beta chain variable domain of TCR clone 40190 (TRBV11-2, TRBJ2-1)
CASSLGPDSYNEQFF

SEQ ID NO: 80381 - protein, 11 aa, Homo sapiens
  CDR3 for alpha chain variable domain of TCR clone 40191 (TRAV3, TRAJ13)
CAVTSYQKVTF

SEQ ID NO: 80382 - protein, 15 aa, Homo sapiens
  CDR3 for beta chain variable domain of TCR clone 40191 (TRBV7-9, TRBJ2-7)
CASSSSRLAVYEQYF

SEQ ID NO: 80383 - protein, 16 aa, Homo sapiens
  CDR3 for alpha chain variable domain of TCR clone 40192 (TRAV20, TRAJ28)
CAVRDPSGAGSYQLTF

SEQ ID NO: 80384 - protein, 13 aa, Homo sapiens
  CDR3 for beta chain variable domain of TCR clone 40192 (TRBV7-9, TRBJ1-2)
CASSLKQNYGYTF

SEQ ID NO: 80385 - protein, 17 aa, Homo sapiens
  CDR3 for alpha chain variable domain of TCR clone 40193 (TRAV3, TRAJ6)
CAVRDGPRAGGSYIPTF

SEQ ID NO: 80386 - protein, 15 aa, Homo sapiens
  CDR3 for beta chain variable domain of TCR clone 40193 (TRBV20-1, TRBJ1-1)
CSASRGVTGNTEAFF

SEQ ID NO: 80387 - protein, 14 aa, Homo sapiens
  CDR3 for alpha chain variable domain of TCR clone 40194 (TRAV26-1, TRAJ34)
CIVRVAYNTDKLIF

SEQ ID NO: 80388 - protein, 15 aa, Homo sapiens
  CDR3 for beta chain variable domain of TCR clone 40194 (TRBV20-1, TRBJ2-7)
CSARVLAAYFYEQYF

SEQ ID NO: 80389 - protein, 13 aa, Homo sapiens
  CDR3 for alpha chain variable domain of TCR clone 40195 (TRAV27, TRAJ42)
CAGARGSKGNLIF

SEQ ID NO: 80390 - protein, 14 aa, Homo sapiens
  CDR3 for beta chain variable domain of TCR clone 40195 (TRBV20-1, TRBJ1-1)
CSAQTRIGGTEAFF

SEQ ID NO: 80391 - protein, 22 aa, Homo sapiens
  CDR3 for alpha chain variable domain of TCR clone 40196 (TRAV26-1, TRAJ38)
CIADNAGNNHIQNPDPAVYQLR

SEQ ID NO: 80392 - protein, 13 aa, Homo sapiens
  CDR3 for beta chain variable domain of TCR clone 40196 (TRBV20-1, TRBJ1-1)
CSARGGGNTEAFF

SEQ ID NO: 80393 - protein, 14 aa, Homo sapiens
  CDR3 for alpha chain variable domain of TCR clone 40197 (TRAV12-2, TRAJ13)
RAVKKTGGYQKVTF

SEQ ID NO: 80394 - protein, 14 aa, Homo sapiens
  CDR3 for beta chain variable domain of TCR clone 40197 (TRBV5-1, TRBJ2-7)
CASSRGESLYEQYF

SEQ ID NO: 80395 - protein, 16 aa, Homo sapiens
  CDR3 for alpha chain variable domain of TCR clone 40198 (TRAV30, TRAJ24)
CGTEIVDADSWGKFQF

SEQ ID NO: 80396 - protein, 15 aa, Homo sapiens
  CDR3 for beta chain variable domain of TCR clone 40198 (TRBV20-1, TRBJ2-7)
CSARDRVSGMDEQYF

SEQ ID NO: 80397 - protein, 13 aa, Homo sapiens
  CDR3 for alpha chain variable domain of TCR clone 40199 (TRAV8-3, TRAJ28)
CAVGAVGSYQLTF

SEQ ID NO: 80398 - protein, 17 aa, Homo sapiens
  CDR3 for beta chain variable domain of TCR clone 40199 (TRBV7-8, TRBJ2-6)
CASSAGTGGAGANVLTF

SEQ ID NO: 80399 - protein, 11 aa, Homo sapiens
  CDR3 for alpha chain variable domain of TCR clone 40200 (TRAV12-1, TRAJ30)
CVVNGQDKIIF

SEQ ID NO: 80400 - protein, 11 aa, Homo sapiens
  CDR3 for beta chain variable domain of TCR clone 40200 (TRBV19, TRBJ1-1)
CASSIGSEAFF

SEQ ID NO: 80401 - protein, 17 aa, Homo sapiens
  CDR3 for alpha chain variable domain of TCR clone 40201 (TRAV3, TRAJ42)
CAVRDRDYGGSQGNLIF

SEQ ID NO: 80402 - protein, 16 aa, Homo sapiens
  CDR3 for beta chain variable domain of TCR clone 40201 (TRBV7-7, TRBJ2-1)
CASSLASGTSYNEQFF

SEQ ID NO: 80403 - protein, 12 aa, Homo sapiens
  CDR3 for alpha chain variable domain of TCR clone 40202 (TRAV21, TRAJ33)
CAKMDSNYQLIW

SEQ ID NO: 80404 - protein, 14 aa, Homo sapiens
  CDR3 for beta chain variable domain of TCR clone 40202 (TRBV7-3, TRBJ1-1)
CASSLKGGNTEASF

SEQ ID NO: 80405 - protein, 16 aa, Homo sapiens
  CDR3 for alpha chain variable domain of TCR clone 40203 (TRAV30, TRAJ24)
CGTEIVDADSWGKFQF

SEQ ID NO: 80406 - protein, 16 aa, Homo sapiens
  CDR3 for beta chain variable domain of TCR clone 40203 (TRBV7-9, TRBJ2-2)
CASSGFGGANTGELFF

SEQ ID NO: 80407 - protein, 13 aa, Homo sapiens
  CDR3 for alpha chain variable domain of TCR clone 40204 (TRAV1-2, TRAJ9)
CAALNTGGLKTIF

SEQ ID NO: 80408 - protein, 16 aa, Homo sapiens
  CDR3 for beta chain variable domain of TCR clone 40204 (TRBV28, TRBJ2-2)
CASSLEGGSNTGELFF

SEQ ID NO: 80409 - protein, 14 aa, Homo sapiens
  CDR3 for alpha chain variable domain of TCR clone 40205 (TRAV20, TRAJ42)
CAVQAGGSQGNLIF

SEQ ID NO: 80410 - protein, 14 aa, Homo sapiens
  CDR3 for beta chain variable domain of TCR clone 40205 (TRBV28, TRBJ1-2)
CASRIQGANYGYIF

SEQ ID NO: 80411 - protein, 13 aa, Homo sapiens
  CDR3 for alpha chain variable domain of TCR clone 40206 (TRAV12-2, TRAJ9)
CAAKWAGGFKTIF

SEQ ID NO: 80412 - protein, 15 aa, Homo sapiens
  CDR3 for beta chain variable domain of TCR clone 40206 (TRBV5-1, TRBJ1-4)
CASSLTADSDEKLFF

SEQ ID NO: 80413 - protein, 16 aa, Homo sapiens
  CDR3 for alpha chain variable domain of TCR clone 40207 (TRAV30, TRAJ24)
CGTEIVDADSWGKFQF

SEQ ID NO: 80414 - protein, 14 aa, Homo sapiens
  CDR3 for beta chain variable domain of TCR clone 40207 (TRBV19, TRBJ2-7)
CASSIFAGTYEQYF

SEQ ID NO: 80415 - protein, 14 aa, Homo sapiens
  CDR3 for alpha chain variable domain of TCR clone 40208 (TRAV12-2, TRAJ40)
CAVKIPSGTYKYFF

SEQ ID NO: 80416 - protein, 15 aa, Homo sapiens
  CDR3 for beta chain variable domain of TCR clone 40208 (TRBV2, TRBJ2-7)
CASSEGLARSYEQYF

SEQ ID NO: 80417 - protein, 13 aa, Homo sapiens
  CDR3 for alpha chain variable domain of TCR clone 40209 (TRAV12-1, TRAJ16)
CVVNGPDGKKLLF

SEQ ID NO: 80418 - protein, 13 aa, Homo sapiens
  CDR3 for beta chain variable domain of TCR clone 40209 (TRBV2, TRBJ1-1)
CARNPTGGFHAFF

SEQ ID NO: 80419 - protein, 15 aa, Homo sapiens
  CDR3 for alpha chain variable domain of TCR clone 40210 (TRAV3, TRAJ22)
CAVRDRGGSARQLTF

SEQ ID NO: 80420 - protein, 16 aa, Homo sapiens
  CDR3 for beta chain variable domain of TCR clone 40210 (TRBV19, TRBJ2-1)
CASSKAGPSSYNEQFF

SEQ ID NO: 80421 - protein, 16 aa, Homo sapiens
  CDR3 for alpha chain variable domain of TCR clone 40211 (TRAV8-1, TRAJ39)
RAVNVPSYNAGNMLTF

SEQ ID NO: 80422 - protein, 15 aa, Homo sapiens
  CDR3 for beta chain variable domain of TCR clone 40211 (TRBV4-1, TRBJ2-3)
CASRSTRAGTDTQYF

SEQ ID NO: 80423 - protein, 14 aa, Homo sapiens
  CDR3 for alpha chain variable domain of TCR clone 40212 (TRAV12-3, TRAJ10)
SHLPLTGGGNKLTF

SEQ ID NO: 80424 - protein, 12 aa, Homo sapiens
  CDR3 for beta chain variable domain of TCR clone 40212 (TRBV7-8, TRBJ2-7)
CASNLGDRGQYF

SEQ ID NO: 80425 - protein, 14 aa, Homo sapiens
  CDR3 for alpha chain variable domain of TCR clone 40213 (TRAV30, TRAJ26)
CGPEIVSYGQNFVF

SEQ ID NO: 80426 - protein, 13 aa, Homo sapiens
  CDR3 for beta chain variable domain of TCR clone 40213 (TRBV19, TRBJ1-3)
CASRLSLGNTIYF

SEQ ID NO: 80427 - protein, 11 aa, Homo sapiens
  CDR3 for alpha chain variable domain of TCR clone 40214 (TRAV1-1, TRAJ23)
CAVRQGGKLIF

SEQ ID NO: 80428 - protein, 15 aa, Homo sapiens
  CDR3 for beta chain variable domain of TCR clone 40214 (TRBV19, TRBJ1-6)
CASSTQGAVGSPLHL

SEQ ID NO: 80429 - protein, 15 aa, Homo sapiens
  CDR3 for alpha chain variable domain of TCR clone 40215 (TRAV16, TRAJ16)
CALQGGGSDGQKLLF

SEQ ID NO: 80430 - protein, 15 aa, Homo sapiens
  CDR3 for beta chain variable domain of TCR clone 40215 (TRBV20-1, TRBJ2-7)
CSARDRVSGMDEQYL

SEQ ID NO: 80431 - protein, 13 aa, Homo sapiens
  CDR3 for alpha chain variable domain of TCR clone 40216 (TRAV2, TRAJ40)
CAVVTSGTYKYIF

SEQ ID NO: 80432 - protein, 13 aa, Homo sapiens
  CDR3 for beta chain variable domain of TCR clone 40216 (TRBV19, TRBJ2-1)
CSPTFVLSGEQFF

SEQ ID NO: 80433 - protein, 14 aa, Homo sapiens
  CDR3 for alpha chain variable domain of TCR clone 40217 (TRAV17, TRAJ39)
CATDPVRAGNMLTF

SEQ ID NO: 80434 - protein, 15 aa, Homo sapiens
  CDR3 for beta chain variable domain of TCR clone 40217 (TRBV13, TRBJ1-5)
CASSFGQGGVQLQHF

SEQ ID NO: 80435 - protein, 11 aa, Homo sapiens
  CDR3 for alpha chain variable domain of TCR clone 40218 (TRAV4, TRAJ31)
CLVGDNARLMF

SEQ ID NO: 80436 - protein, 16 aa, Homo sapiens
  CDR3 for beta chain variable domain of TCR clone 40218 (TRBV7-2, TRBJ2-5)
CASSSTWLSGQETQYF

SEQ ID NO: 80437 - protein, 12 aa, Homo sapiens
  CDR3 for alpha chain variable domain of TCR clone 40219 (TRAV12-3, TRAJ17)
CAMTLTGNKLTF

SEQ ID NO: 80438 - protein, 15 aa, Homo sapiens
  CDR3 for beta chain variable domain of TCR clone 40219 (TRBV12-4, TRBJ2-7)
CASSQRTSGNYEQYF

SEQ ID NO: 80439 - protein, 14 aa, Homo sapiens
  CDR3 for alpha chain variable domain of TCR clone 40220 (TRAV2, TRAJ37)
CAVDFTSNTGKLIF

SEQ ID NO: 80440 - protein, 13 aa, Homo sapiens
  CDR3 for beta chain variable domain of TCR clone 40220 (TRBV4-2, TRBJ1-1)
CASSQAGNTKAFF

SEQ ID NO: 80441 - protein, 14 aa, Homo sapiens
  CDR3 for alpha chain variable domain of TCR clone 40221 (TRAV1-2, TRAJ16)
CAVNRFSDGQKLLF

SEQ ID NO: 80442 - protein, 17 aa, Homo sapiens
  CDR3 for beta chain variable domain of TCR clone 40221 (TRBV7-3, TRBJ2-2)
CASSLSGTSGGTGELFF

SEQ ID NO: 80443 - protein, 16 aa, Homo sapiens
  CDR3 for alpha chain variable domain of TCR clone 40222 (TRAV3, TRAJ4)
CAVRPSPSGGFNKLIF

SEQ ID NO: 80444 - protein, 12 aa, Homo sapiens
  CDR3 for beta chain variable domain of TCR clone 40222 (TRBV7-9, TRBJ2-7)
CASSQGVYEQYF

SEQ ID NO: 80445 - protein, 13 aa, Homo sapiens
  CDR3 for alpha chain variable domain of TCR clone 40223 (TRAV8-3, TRAJ44)
CAVVPGTASKLTS

SEQ ID NO: 80446 - protein, 13 aa, Homo sapiens
  CDR3 for beta chain variable domain of TCR clone 40223 (TRBV10-3, TRBJ2-7)
CASKLAVNYEQYF

SEQ ID NO: 80447 - protein, 11 aa, Homo sapiens
  CDR3 for alpha chain variable domain of TCR clone 40224 (TRAV12-1, TRAJ21)
CVVNNFNKFYF

SEQ ID NO: 80448 - protein, 15 aa, Homo sapiens
  CDR3 for beta chain variable domain of TCR clone 40224 (TRBV3-1, TRBJ2-5)
CASSANLGGPETQYF

SEQ ID NO: 80449 - protein, 14 aa, Homo sapiens
  CDR3 for alpha chain variable domain of TCR clone 40225 (TRAV17, TRAJ54)
CATDANQGSQKLVF

SEQ ID NO: 80450 - protein, 12 aa, Homo sapiens
  CDR3 for beta chain variable domain of TCR clone 40225 (TRBV7-9, TRBJ2-7)
CASSIKREEQYF

SEQ ID NO: 80451 - protein, 11 aa, Homo sapiens
  CDR3 for alpha chain variable domain of TCR clone 40226 (TRAV12-3, TRAJ43)
CAMSVSNDMRF

SEQ ID NO: 80452 - protein, 15 aa, Homo sapiens
  CDR3 for beta chain variable domain of TCR clone 40226 (TRBV19, TRBJ1-1)
CASMGFRDVNTEAFF

SEQ ID NO: 80453 - protein, 16 aa, Homo sapiens
  CDR3 for alpha chain variable domain of TCR clone 40227 (TRAV12-3, TRAJ53)
CAMSPGSGGSNYKLTF

SEQ ID NO: 80454 - protein, 16 aa, Homo sapiens
  CDR3 for beta chain variable domain of TCR clone 40227 (TRBV19, TRBJ2-1)
CAGSKAGPSSYNEQFF

SEQ ID NO: 80455 - protein, 13 aa, Homo sapiens
  CDR3 for alpha chain variable domain of TCR clone 40228 (TRAV21, TRAJ27)
CAARPGNAGKSTF

SEQ ID NO: 80456 - protein, 15 aa, Homo sapiens
  CDR3 for beta chain variable domain of TCR clone 40228 (TRBV6-6, TRBJ1-1)
CASSYPTAMNTEAFF

SEQ ID NO: 80457 - protein, 17 aa, Homo sapiens
  CDR3 for alpha chain variable domain of TCR clone 40229 (TRAV13-1, TRAJ52)
CAASSGAGGTSYGKLTF

SEQ ID NO: 80458 - protein, 12 aa, Homo sapiens
  CDR3 for beta chain variable domain of TCR clone 40229 (TRBV11-2, TRBJ2-2)
CSSSLGGGELFF

SEQ ID NO: 80459 - protein, 11 aa, Homo sapiens
  CDR3 for alpha chain variable domain of TCR clone 40230 (TRAV3, TRAJ21)
CAVGNFNKFYF

SEQ ID NO: 80460 - protein, 12 aa, Homo sapiens
  CDR3 for beta chain variable domain of TCR clone 40230 (TRBV2, TRBJ2-1)
CAYGPPGNEQFF

SEQ ID NO: 80461 - protein, 18 aa, Homo sapiens
  CDR3 for alpha chain variable domain of TCR clone 40231 (TRAV12-3, TRAJ52)
CAMSVGGAGGTNYGKLTF

SEQ ID NO: 80462 - protein, 15 aa, Homo sapiens
  CDR3 for beta chain variable domain of TCR clone 40231 (TRBV27, TRBJ1-6)
CASSFDRGLGSPLHF

SEQ ID NO: 80463 - protein, 10 aa, Homo sapiens
  CDR3 for alpha chain variable domain of TCR clone 40232 (TRAV30, TRAJ16)
CGTGGQKLLF

SEQ ID NO: 80464 - protein, 13 aa, Homo sapiens
  CDR3 for beta chain variable domain of TCR clone 40232 (TRBV7-9, TRBJ1-2)
CASSLKQNYGYTF

SEQ ID NO: 80465 - protein, 12 aa, Homo sapiens
  CDR3 for alpha chain variable domain of TCR clone 40233 (TRAV2, TRAJ33)
CAFMDSNYQLIW

SEQ ID NO: 80466 - protein, 16 aa, Homo sapiens
  CDR3 for beta chain variable domain of TCR clone 40233 (TRBV2, TRBJ2-7)
CAGSEPWTGPSYEQYF

SEQ ID NO: 80467 - protein, 15 aa, Homo sapiens
  CDR3 for alpha chain variable domain of TCR clone 40234 (TRAV17, TRAJ56)
CATDANTGANSKLTF

SEQ ID NO: 80468 - protein, 14 aa, Homo sapiens
  CDR3 for beta chain variable domain of TCR clone 40234 (TRBV19, TRBJ1-5)
CASSLGTGVQPQHF

SEQ ID NO: 80469 - protein, 14 aa, Homo sapiens
  CDR3 for alpha chain variable domain of TCR clone 40235 (TRAV26-1, TRAJ38)
CIADNAGNNRKLIW

SEQ ID NO: 80470 - protein, 13 aa, Homo sapiens
  CDR3 for beta chain variable domain of TCR clone 40235 (TRBV20-1, TRBJ1-1)
CSARGGGNTEAYF

SEQ ID NO: 80471 - protein, 13 aa, Homo sapiens
  CDR3 for alpha chain variable domain of TCR clone 40236 (TRAV17, TRAJ15)
CAADARAGTALIF

SEQ ID NO: 80472 - protein, 14 aa, Homo sapiens
  CDR3 for beta chain variable domain of TCR clone 40236 (TRBV7-2, TRBJ2-5)
CASSIRLTQETQYF

SEQ ID NO: 80473 - protein, 12 aa, Homo sapiens
  CDR3 for alpha chain variable domain of TCR clone 40237 (TRAV13-2, TRAJ23)
CAERHRGGKLIF

SEQ ID NO: 80474 - protein, 13 aa, Homo sapiens
  CDR3 for beta chain variable domain of TCR clone 40237 (TRBV7-2, TRBJ1-4)
CASSLAGLEKLFF

SEQ ID NO: 80475 - protein, 10 aa, Homo sapiens
  CDR3 for alpha chain variable domain of TCR clone 40238 (TRAV25, TRAJ20)
CAVNDYKLSF

SEQ ID NO: 80476 - protein, 13 aa, Homo sapiens
  CDR3 for beta chain variable domain of TCR clone 40238 (TRBV6-3, TRBJ2-7)
CASSVSGGYEQYF

SEQ ID NO: 80477 - protein, 13 aa, Homo sapiens
  CDR3 for alpha chain variable domain of TCR clone 40239 (TRAV12-3, TRAJ9)
CAMRNTGGFKTIF

SEQ ID NO: 80478 - protein, 14 aa, Homo sapiens
  CDR3 for beta chain variable domain of TCR clone 40239 (TRBV11-2, TRBJ2-7)
CASSSTGEGYEQYL

SEQ ID NO: 80479 - protein, 15 aa, Homo sapiens
  CDR3 for alpha chain variable domain of TCR clone 40240 (TRAV16, TRAJ23)
CALSGPYNQGGKLIF

SEQ ID NO: 80480 - protein, 18 aa, Homo sapiens
  CDR3 for beta chain variable domain of TCR clone 40240 (TRBV3-1, TRBJ2-1)
CASSSVLTSGGSTVEQFF

SEQ ID NO: 80481 - protein, 16 aa, Homo sapiens
  CDR3 for alpha chain variable domain of TCR clone 40241 (TRAV30, TRAJ24)
CGTEIVDAESWGKFQF

SEQ ID NO: 80482 - protein, 14 aa, Homo sapiens
  CDR3 for beta chain variable domain of TCR clone 40241 (TRBV7-2, TRBJ1-2)
CASSQTGSTYGYTF

SEQ ID NO: 80483 - protein, 11 aa, Homo sapiens
  CDR3 for alpha chain variable domain of TCR clone 40242 (TRAV21, TRAJ34)
CAHYNTDELIF

SEQ ID NO: 80484 - protein, 18 aa, Homo sapiens
  CDR3 for beta chain variable domain of TCR clone 40242 (TRBV12-4, TRBJ2-2)
CASSFKSAGGPVTEELFF

SEQ ID NO: 80485 - protein, 14 aa, Homo sapiens
  CDR3 for alpha chain variable domain of TCR clone 40243 (TRAV1-2, TRAJ8)
CAVREDTGFQKLVF

SEQ ID NO: 80486 - protein, 13 aa, Homo sapiens
  CDR3 for beta chain variable domain of TCR clone 40243 (TRBV2, TRBJ1-1)
CARNPTGGFHSFF

SEQ ID NO: 80487 - protein, 14 aa, Homo sapiens
  CDR3 for alpha chain variable domain of TCR clone 40244 (TRAV12-2, TRAJ17)
CATLFKAAGNKLTF

SEQ ID NO: 80488 - protein, 16 aa, Homo sapiens
  CDR3 for beta chain variable domain of TCR clone 40244 (TRBV20-1, TRBJ2-2)
CSASASGIPGAGELFF

SEQ ID NO: 80489 - protein, 13 aa, Homo sapiens
  CDR3 for alpha chain variable domain of TCR clone 40245 (TRAV17, TRAJ9)
CATAITGGFKTIF

SEQ ID NO: 80490 - protein, 16 aa, Homo sapiens
  CDR3 for beta chain variable domain of TCR clone 40245 (TRBV15, TRBJ2-1)
CATSRNLAGGYNKQFF

SEQ ID NO: 80491 - protein, 10 aa, Homo sapiens
  CDR3 for alpha chain variable domain of TCR clone 40246 (TRAV26-1, TRAJ22)
RSGSARQLTF

SEQ ID NO: 80492 - protein, 20 aa, Homo sapiens
  CDR3 for beta chain variable domain of TCR clone 40246 (TRBV28, TRBJ2-1)
CASTPIGRSPGLAGGNEQFF

SEQ ID NO: 80493 - protein, 17 aa, Homo sapiens
  CDR3 for alpha chain variable domain of TCR clone 40247 (TRAV3, TRAJ42)
CAVRDRDYGGSQGNLIS

SEQ ID NO: 80494 - protein, 15 aa, Homo sapiens
  CDR3 for beta chain variable domain of TCR clone 40247 (TRBV3-1, TRBJ2-1)
CASSQVVDDGEEQFF

SEQ ID NO: 80495 - protein, 13 aa, Homo sapiens
  CDR3 for alpha chain variable domain of TCR clone 40248 (TRAV8-3, TRAJ36)
CAVGATGANNLFF

SEQ ID NO: 80496 - protein, 15 aa, Homo sapiens
  CDR3 for beta chain variable domain of TCR clone 40248 (TRBV7-2, TRBJ1-2)
RASSPRAGWNYGYTF

SEQ ID NO: 80497 - protein, 15 aa, Homo sapiens
  CDR3 for alpha chain variable domain of TCR clone 40249 (TRAV26-1, TRAJ22)
CIVRVSFWFCMATDL

SEQ ID NO: 80498 - protein, 13 aa, Homo sapiens
  CDR3 for beta chain variable domain of TCR clone 40249 (TRBV7-9, TRBJ1-2)
CASSLKQNYGYTF

SEQ ID NO: 80499 - protein, 17 aa, Homo sapiens
  CDR3 for alpha chain variable domain of TCR clone 40250 (TRAV2, TRAJ36)
CAVEDRGNRGKQPLLWD

SEQ ID NO: 80500 - protein, 14 aa, Homo sapiens
  CDR3 for beta chain variable domain of TCR clone 40250 (TRBV7-9, TRBJ2-5)
CASSLDTAQETQYF

SEQ ID NO: 80501 - protein, 13 aa, Homo sapiens
  CDR3 for alpha chain variable domain of TCR clone 40251 (TRAV17, TRAJ15)
CATDARAGTALIF

SEQ ID NO: 80502 - protein, 15 aa, Homo sapiens
  CDR3 for beta chain variable domain of TCR clone 40251 (TRBV20-1, TRBJ2-7)
CSARDRVYGMDEQYF

SEQ ID NO: 80503 - protein, 14 aa, Homo sapiens
  CDR3 for alpha chain variable domain of TCR clone 40252 (TRAV1-2, TRAJ8)
SAVREDTGFQKLVF

SEQ ID NO: 80504 - protein, 15 aa, Homo sapiens
  CDR3 for beta chain variable domain of TCR clone 40252 (TRBV6-3, TRBJ2-7)
CASSSPGAVFYEQYF

SEQ ID NO: 80505 - protein, 13 aa, Homo sapiens
  CDR3 for alpha chain variable domain of TCR clone 40253 (TRAV2, TRAJ40)
CAVVTLGTYKYIF

SEQ ID NO: 80506 - protein, 16 aa, Homo sapiens
  CDR3 for beta chain variable domain of TCR clone 40253 (TRBV2, TRBJ2-1)
CASSVGGSLSYNEQFF

SEQ ID NO: 80507 - protein, 16 aa, Homo sapiens
  CDR3 for alpha chain variable domain of TCR clone 40254 (TRAV3, TRAJ37)
CAVRGKGSGNTGKLIF

SEQ ID NO: 80508 - protein, 13 aa, Homo sapiens
  CDR3 for beta chain variable domain of TCR clone 40254 (TRBV7-8, TRBJ2-1)
CASSLERLGEQFF

SEQ ID NO: 80509 - protein, 14 aa, Homo sapiens
  CDR3 for alpha chain variable domain of TCR clone 40255 (TRAV8-3, TRAJ39)
CAVGANNAGNMPTF

SEQ ID NO: 80510 - protein, 15 aa, Homo sapiens
  CDR3 for beta chain variable domain of TCR clone 40255 (TRBV4-3, TRBJ1-1)
CASSQELGRGTEAFF

SEQ ID NO: 80511 - protein, 15 aa, Homo sapiens
  CDR3 for alpha chain variable domain of TCR clone 40256 (TRAV23/DV6, TRAJ28)
CAALLAYSGAGRYQL

SEQ ID NO: 80512 - protein, 13 aa, Homo sapiens
  CDR3 for beta chain variable domain of TCR clone 40256 (TRBV4-2, TRBJ2-3)
CASSQGNTDTQYF

SEQ ID NO: 80513 - protein, 14 aa, Homo sapiens
  CDR3 for alpha chain variable domain of TCR clone 40257 (TRAV13-1, TRAJ10)
CAAKEPGGGNKLTF

SEQ ID NO: 80514 - protein, 14 aa, Homo sapiens
  CDR3 for beta chain variable domain of TCR clone 40257 (TRBV6-6, TRBJ2-7)
CASSDSGAGHEQYF

SEQ ID NO: 80515 - protein, 15 aa, Homo sapiens
  CDR3 for alpha chain variable domain of TCR clone 40258 (TRAV23/DV6, TRAJ13)
CAAWPGGGGYQKVTF

SEQ ID NO: 80516 - protein, 17 aa, Homo sapiens
  CDR3 for beta chain variable domain of TCR clone 40258 (TRBV19, TRBJ2-7)
CASSIPFYDSYPYEQYF

SEQ ID NO: 80517 - protein, 15 aa, Homo sapiens
  CDR3 for alpha chain variable domain of TCR clone 40259 (TRAV12-3, TRAJ10)
CASYILTGGGNKLTF

SEQ ID NO: 80518 - protein, 13 aa, Homo sapiens
  CDR3 for beta chain variable domain of TCR clone 40259 (TRBV4-2, TRBJ1-1)
CASSQAGNTEAFF

SEQ ID NO: 80519 - protein, 13 aa, Homo sapiens
  CDR3 for alpha chain variable domain of TCR clone 40260 (TRAV2, TRAJ15)
CAAASQAGTALIF

SEQ ID NO: 80520 - protein, 16 aa, Homo sapiens
  CDR3 for beta chain variable domain of TCR clone 40260 (TRBV5-1, TRBJ1-1)
CASSSGGNSLNTEAFF

SEQ ID NO: 80521 - protein, 16 aa, Homo sapiens
  CDR3 for alpha chain variable domain of TCR clone 40261 (TRAV8-3, TRAJ10)
CAVGPGVTGGGNKLTS

SEQ ID NO: 80522 - protein, 13 aa, Homo sapiens
  CDR3 for beta chain variable domain of TCR clone 40261 (TRBV18, TRBJ1-1)
CASSPGPSGEAFF

SEQ ID NO: 80523 - protein, 14 aa, Homo sapiens
  CDR3 for alpha chain variable domain of TCR clone 40262 (TRAV35, TRAJ34)
CAGRGTPTSPSLGL

SEQ ID NO: 80524 - protein, 14 aa, Homo sapiens
  CDR3 for beta chain variable domain of TCR clone 40262 (TRBV5-1, TRBJ2-7)
CASSRGESLYEQYF

SEQ ID NO: 80525 - protein, 14 aa, Homo sapiens
  CDR3 for alpha chain variable domain of TCR clone 40263 (TRAV26-1, TRAJ48)
CTVRVGFGNEKLTF

SEQ ID NO: 80526 - protein, 13 aa, Homo sapiens
  CDR3 for beta chain variable domain of TCR clone 40263 (TRBV11-3, TRBJ2-3)
CASSHDTKDTQYF

SEQ ID NO: 80527 - protein, 11 aa, Homo sapiens
  CDR3 for alpha chain variable domain of TCR clone 40264 (TRAV4, TRAJ23)
CLVAPGGKLIF

SEQ ID NO: 80528 - protein, 15 aa, Homo sapiens
  CDR3 for beta chain variable domain of TCR clone 40264 (TRBV7-2, TRBJ2-1)
RASSFQADEYNEQFF

SEQ ID NO: 80529 - protein, 13 aa, Homo sapiens
  CDR3 for alpha chain variable domain of TCR clone 40265 (TRAV4, TRAJ9)
CLVAEGGVFKTIF

SEQ ID NO: 80530 - protein, 17 aa, Homo sapiens
  CDR3 for beta chain variable domain of TCR clone 40265 (TRBV27, TRBJ2-1)
CASSPMKGQGSYNEQFF

SEQ ID NO: 80531 - protein, 14 aa, Homo sapiens
  CDR3 for alpha chain variable domain of TCR clone 40266 (TRAV13-1, TRAJ35)
WAASKGGFGNVLHC

SEQ ID NO: 80532 - protein, 13 aa, Homo sapiens
  CDR3 for beta chain variable domain of TCR clone 40266 (TRBV7-3, TRBJ1-1)
CASSQDWGAEAFF

SEQ ID NO: 80533 - protein, 14 aa, Homo sapiens
  CDR3 for alpha chain variable domain of TCR clone 40267 (TRAV13-1, TRAJ39)
CAASYNNAGNMLTF

SEQ ID NO: 80534 - protein, 13 aa, Homo sapiens
  CDR3 for beta chain variable domain of TCR clone 40267 (TRBV24-1, TRBJ1-4)
CATNNGRSGKLFF

SEQ ID NO: 80535 - protein, 13 aa, Homo sapiens
  CDR3 for alpha chain variable domain of TCR clone 40268 (TRAV26-1, TRAJ54)
CIVRVKGAQKLVF

SEQ ID NO: 80536 - protein, 15 aa, Homo sapiens
  CDR3 for beta chain variable domain of TCR clone 40268 (TRBV20-1, TRBJ2-1)
RSAQPGGGPYNEQFF

SEQ ID NO: 80537 - protein, 13 aa, Homo sapiens
  CDR3 for alpha chain variable domain of TCR clone 40269 (TRAV20, TRAJ37)
CAGRSSNTGKLIF

SEQ ID NO: 80538 - protein, 17 aa, Homo sapiens
  CDR3 for beta chain variable domain of TCR clone 40269 (TRBV28, TRBJ2-5)
CASSRQGGLAGAETQYF

SEQ ID NO: 80539 - protein, 13 aa, Homo sapiens
  CDR3 for alpha chain variable domain of TCR clone 40270 (TRAV3, TRAJ21)
CAVREPDFNKFYF

SEQ ID NO: 80540 - protein, 14 aa, Homo sapiens
  CDR3 for beta chain variable domain of TCR clone 40270 (TRBV4-1, TRBJ2-2)
CASSQAVNTGELFF

SEQ ID NO: 80541 - protein, 10 aa, Homo sapiens
  CDR3 for alpha chain variable domain of TCR clone 40271 (TRAV12-1, TRAJ43)
CVVHNNDMRF

SEQ ID NO: 80542 - protein, 13 aa, Homo sapiens
  CDR3 for beta chain variable domain of TCR clone 40271 (TRBV12-4, TRBJ1-2)
CASSSGLTVRSTF

SEQ ID NO: 80543 - protein, 14 aa, Homo sapiens
  CDR3 for alpha chain variable domain of TCR clone 40272 (TRAV12-2, TRAJ13)
CAVKRTGGYQKVTL

SEQ ID NO: 80544 - protein, 15 aa, Homo sapiens
  CDR3 for beta chain variable domain of TCR clone 40272 (TRBV27, TRBJ2-1)
CASSNGGGSSNEQFF

SEQ ID NO: 80545 - protein, 15 aa, Homo sapiens
  CDR3 for alpha chain variable domain of TCR clone 40273 (TRAV8-3, TRAJ11)
CAVGLLNPGYSTLTF

SEQ ID NO: 80546 - protein, 15 aa, Homo sapiens
  CDR3 for beta chain variable domain of TCR clone 40273 (TRBV13, TRBJ2-1)
CASSLLSGLNNEQFF

SEQ ID NO: 80547 - protein, 16 aa, Homo sapiens
  CDR3 for alpha chain variable domain of TCR clone 40274 (TRAV21, TRAJ17)
CAVRPGGEAAGNKLTF

SEQ ID NO: 80548 - protein, 16 aa, Homo sapiens
  CDR3 for beta chain variable domain of TCR clone 40274 (TRBV2, TRBJ2-7)
CASSEPWTGPSYEQYF

SEQ ID NO: 80549 - protein, 12 aa, Homo sapiens
  CDR3 for alpha chain variable domain of TCR clone 40275 (TRAV21, TRAJ39)
CAADNAGNMLTF

SEQ ID NO: 80550 - protein, 14 aa, Homo sapiens
  CDR3 for beta chain variable domain of TCR clone 40275 (TRBV19, TRBJ2-2)
CASSGQGIAGELFF

SEQ ID NO: 80551 - protein, 11 aa, Homo sapiens
  CDR3 for alpha chain variable domain of TCR clone 40276 (TRAV2, TRAJ13)
CASGGYQKVTF

SEQ ID NO: 80552 - protein, 16 aa, Homo sapiens
  CDR3 for beta chain variable domain of TCR clone 40276 (TRBV2, TRBJ2-3)
CASSTSVEGVTDTQYF

SEQ ID NO: 80553 - protein, 13 aa, Homo sapiens
  CDR3 for alpha chain variable domain of TCR clone 40277 (TRAV36/DV7, TRAJ49)
CAGDSNTGNQFYF

SEQ ID NO: 80554 - protein, 12 aa, Homo sapiens
  CDR3 for beta chain variable domain of TCR clone 40277 (TRBV11-2, TRBJ2-2)
CASSLGDGELFF

SEQ ID NO: 80555 - protein, 12 aa, Homo sapiens
  CDR3 for alpha chain variable domain of TCR clone 40278 (TRAV12-3, TRAJ5)
CAMDTGRRALTF

SEQ ID NO: 80556 - protein, 13 aa, Homo sapiens
  CDR3 for beta chain variable domain of TCR clone 40278 (TRBV7-7, TRBJ2-2)
CASSLTSAGELLF

SEQ ID NO: 80557 - protein, 11 aa, Homo sapiens
  CDR3 for alpha chain variable domain of TCR clone 40279 (TRAV3, TRAJ49)
CAPITGNQFYF

SEQ ID NO: 80558 - protein, 16 aa, Homo sapiens
  CDR3 for beta chain variable domain of TCR clone 40279 (TRBV5-1, TRBJ2-3)
CASSVFPMSSTDMQYF

SEQ ID NO: 80559 - protein, 15 aa, Homo sapiens
  CDR3 for alpha chain variable domain of TCR clone 40280 (TRAV17, TRAJ52)
CTTEAGGTSHGKLTF

SEQ ID NO: 80560 - protein, 14 aa, Homo sapiens
  CDR3 for beta chain variable domain of TCR clone 40280 (TRBV28, TRBJ1-5)
CASSLGVLVKPQHF

SEQ ID NO: 80561 - protein, 11 aa, Homo sapiens
  CDR3 for alpha chain variable domain of TCR clone 40281 (TRAV35, TRAJ34)
CWARNTDRLIF

SEQ ID NO: 80562 - protein, 14 aa, Homo sapiens
  CDR3 for beta chain variable domain of TCR clone 40281 (TRBV5-1, TRBJ2-7)
CASSRGESLYEQYF

SEQ ID NO: 80563 - protein, 14 aa, Homo sapiens
  CDR3 for alpha chain variable domain of TCR clone 40282 (TRAV1-2, TRAJ16)
CAVNRFSDGQKLLF

SEQ ID NO: 80564 - protein, 15 aa, Homo sapiens
  CDR3 for beta chain variable domain of TCR clone 40282 (TRBV5-1, TRBJ2-1)
CASSPPRALYNEQFF

SEQ ID NO: 80565 - protein, 13 aa, Homo sapiens
  CDR3 for alpha chain variable domain of TCR clone 40283 (TRAV2, TRAJ21)
CAVEDLNFNKFYF

SEQ ID NO: 80566 - protein, 13 aa, Homo sapiens
  CDR3 for beta chain variable domain of TCR clone 40283 (TRBV7-3, TRBJ1-1)
CASSQDWGAEAFF

SEQ ID NO: 80567 - protein, 13 aa, Homo sapiens
  CDR3 for alpha chain variable domain of TCR clone 40284 (TRAV8-4, TRAJ30)
CAVSVNRDDKIIF

SEQ ID NO: 80568 - protein, 12 aa, Homo sapiens
  CDR3 for beta chain variable domain of TCR clone 40284 (TRBV14, TRBJ2-5)
CASSHLKETQYF

SEQ ID NO: 80569 - protein, 14 aa, Homo sapiens
  CDR3 for alpha chain variable domain of TCR clone 40285 (TRAV23/DV6, TRAJ58)
CAGMRETSGPRLTF

SEQ ID NO: 80570 - protein, 13 aa, Homo sapiens
  CDR3 for beta chain variable domain of TCR clone 40285 (TRBV28, TRBJ2-7)
CASRSSGVYEQYF

SEQ ID NO: 80571 - protein, 14 aa, Homo sapiens
  CDR3 for alpha chain variable domain of TCR clone 40286 (TRAV8-4, TRAJ8)
CAVSVGTGFQKLVF

SEQ ID NO: 80572 - protein, 15 aa, Homo sapiens
  CDR3 for beta chain variable domain of TCR clone 40286 (TRBV2, TRBJ2-3)
CVSSGEGTGTDTQYF

SEQ ID NO: 80573 - protein, 11 aa, Homo sapiens
  CDR3 for alpha chain variable domain of TCR clone 40287 (TRAV1-1, TRAJ23)
CAVRQGGKLIF

SEQ ID NO: 80574 - protein, 17 aa, Homo sapiens
  CDR3 for beta chain variable domain of TCR clone 40287 (TRBV20-1, TRBJ2-1)
CSASSSGLAGSYNEQFF

SEQ ID NO: 80575 - protein, 13 aa, Homo sapiens
  CDR3 for alpha chain variable domain of TCR clone 40288 (TRAV13-1, TRAJ40)
CAAISPGTYKYIF

SEQ ID NO: 80576 - protein, 13 aa, Homo sapiens
  CDR3 for beta chain variable domain of TCR clone 40288 (TRBV10-3, TRBJ2-7)
CAIRAGGPHEHYF

SEQ ID NO: 80577 - protein, 13 aa, Homo sapiens
  CDR3 for alpha chain variable domain of TCR clone 40289 (TRAV3, TRAJ15)
CAVRDQAGTALIF

SEQ ID NO: 80578 - protein, 17 aa, Homo sapiens
  CDR3 for beta chain variable domain of TCR clone 40289 (TRBV20-1, TRBJ2-2)
CSASGSGQGGLTGELFF

SEQ ID NO: 80579 - protein, 14 aa, Homo sapiens
  CDR3 for alpha chain variable domain of TCR clone 40290 (TRAV12-2, TRAJ44)
CAVNPAGTASKLTF

SEQ ID NO: 80580 - protein, 12 aa, Homo sapiens
  CDR3 for beta chain variable domain of TCR clone 40290 (TRBV7-3, TRBJ2-1)
CASSFQSGPQFF

SEQ ID NO: 80581 - protein, 15 aa, Homo sapiens
  CDR3 for alpha chain variable domain of TCR clone 40291 (TRAV8-3, TRAJ41)
CSVGSNSNSGYALNF

SEQ ID NO: 80582 - protein, 17 aa, Homo sapiens
  CDR3 for beta chain variable domain of TCR clone 40291 (TRBV25-1, TRBJ2-1)
CASSAYGQGRGVYEQFF

SEQ ID NO: 80583 - protein, 15 aa, Homo sapiens
  CDR3 for alpha chain variable domain of TCR clone 40292 (TRAV2, TRAJ9)
CAVEDRGTGGLKTIF

SEQ ID NO: 80584 - protein, 19 aa, Homo sapiens
  CDR3 for beta chain variable domain of TCR clone 40292 (TRBV28, TRBJ2-7)
CASSYSGTSRLGWVYEQYF

SEQ ID NO: 80585 - protein, 14 aa, Homo sapiens
  CDR3 for alpha chain variable domain of TCR clone 40293 (TRAV26-1, TRAJ38)
CIADNAGNNRKLIW

SEQ ID NO: 80586 - protein, 12 aa, Homo sapiens
  CDR3 for beta chain variable domain of TCR clone 40293 (TRBV11-3, TRBJ2-3)
CASAFGGRSQYF

SEQ ID NO: 80587 - protein, 12 aa, Homo sapiens
  CDR3 for alpha chain variable domain of TCR clone 40294 (TRAV1-1, TRAJ39)
CAVPVVGNMLTF

SEQ ID NO: 80588 - protein, 18 aa, Homo sapiens
  CDR3 for beta chain variable domain of TCR clone 40294 (TRBV7-9, TRBJ2-7)
CASSLTTSGSRTWYEQYS

SEQ ID NO: 80589 - protein, 14 aa, Homo sapiens
  CDR3 for alpha chain variable domain of TCR clone 40295 (TRAV12-2, TRAJ13)
CAVKKTGGYQKVTF

SEQ ID NO: 80590 - protein, 13 aa, Homo sapiens
  CDR3 for beta chain variable domain of TCR clone 40295 (TRBV10-3, TRBJ2-7)
CASKLAVNYGQYF

SEQ ID NO: 80591 - protein, 14 aa, Homo sapiens
  CDR3 for alpha chain variable domain of TCR clone 40296 (TRAV17, TRAJ57)
CATDPQGGPEKLVF

SEQ ID NO: 80592 - protein, 16 aa, Homo sapiens
  CDR3 for beta chain variable domain of TCR clone 40296 (TRBV20-1, TRBJ1-4)
CSAPGQGLLTNEKLFF

SEQ ID NO: 80593 - protein, 10 aa, Homo sapiens
  CDR3 for alpha chain variable domain of TCR clone 40297 (TRAV25, TRAJ20)
CAVNDYKLSF

SEQ ID NO: 80594 - protein, 17 aa, Homo sapiens
  CDR3 for beta chain variable domain of TCR clone 40297 (TRBV4-3, TRBJ2-1)
CASSQFSSGRASGEQFF

SEQ ID NO: 80595 - protein, 13 aa, Homo sapiens
  CDR3 for alpha chain variable domain of TCR clone 40298 (TRAV36/DV7, TRAJ41)
CAVEANSGYALNF

SEQ ID NO: 80596 - protein, 14 aa, Homo sapiens
  CDR3 for beta chain variable domain of TCR clone 40298 (TRBV7-3, TRBJ2-7)
CASSLSGVSYEQYF

SEQ ID NO: 80597 - protein, 16 aa, Homo sapiens
  CDR3 for alpha chain variable domain of TCR clone 40299 (TRAV3, TRAJ10)
CAVRDMRAGGGSKLTF

SEQ ID NO: 80598 - protein, 13 aa, Homo sapiens
  CDR3 for beta chain variable domain of TCR clone 40299 (TRBV7-9, TRBJ1-2)
CASSLKQSYGYTF

SEQ ID NO: 80599 - protein, 11 aa, Homo sapiens
  CDR3 for alpha chain variable domain of TCR clone 40300 (TRAV12-2, TRAJ31)
CAVTRWARLMF

SEQ ID NO: 80600 - protein, 15 aa, Homo sapiens
  CDR3 for beta chain variable domain of TCR clone 40300 (TRBV19, TRBJ2-7)
CASSSGGGLVNEQYF

SEQ ID NO: 80601 - protein, 14 aa, Homo sapiens
  CDR3 for alpha chain variable domain of TCR clone 40301 (TRAV9-2, TRAJ6)
CALSDPGGSYIPTF

SEQ ID NO: 80602 - protein, 17 aa, Homo sapiens
  CDR3 for beta chain variable domain of TCR clone 40301 (TRBV11-2, TRBJ2-1)
CASSLYPPGVEYNEQFF

SEQ ID NO: 80603 - protein, 15 aa, Homo sapiens
  CDR3 for alpha chain variable domain of TCR clone 40302 (TRAV17, TRAJ57)
CATGPSQGGSEELVF

SEQ ID NO: 80604 - protein, 14 aa, Homo sapiens
  CDR3 for beta chain variable domain of TCR clone 40302 (TRBV12-5, TRBJ2-5)
CASGSRTHQETQYF

SEQ ID NO: 80605 - protein, 18 aa, Homo sapiens
  CDR3 for alpha chain variable domain of TCR clone 40303 (TRAV1-2, TRAJ18)
CAVPPSADRGSTLGRLYF

SEQ ID NO: 80606 - protein, 13 aa, Homo sapiens
  CDR3 for beta chain variable domain of TCR clone 40303 (TRBV4-1, TRBJ2-7)
CASSQGQAYEQYF

SEQ ID NO: 80607 - protein, 14 aa, Homo sapiens
  CDR3 for alpha chain variable domain of TCR clone 40304 (TRAV8-3, TRAJ39)
CAVGASNAGNMLTF

SEQ ID NO: 80608 - protein, 12 aa, Homo sapiens
  CDR3 for beta chain variable domain of TCR clone 40304 (TRBV28, TRBJ1-3)
CASVSSGNTIYF

SEQ ID NO: 80609 - protein, 13 aa, Homo sapiens
  CDR3 for alpha chain variable domain of TCR clone 40305 (TRAV12-3, TRAJ33)
CAMSVNSNYQLIW

SEQ ID NO: 80610 - protein, 15 aa, Homo sapiens
  CDR3 for beta chain variable domain of TCR clone 40305 (TRBV7-9, TRBJ1-6)
CASSSPGRGNSPLHF

SEQ ID NO: 80611 - protein, 17 aa, Homo sapiens
  CDR3 for alpha chain variable domain of TCR clone 40306 (TRAV3, TRAJ6)
CAVRDGPRAGGSYIPTF

SEQ ID NO: 80612 - protein, 15 aa, Homo sapiens
  CDR3 for beta chain variable domain of TCR clone 40306 (TRBV10-2, TRBJ2-6)
CASSEQGTGANVLTF

SEQ ID NO: 80613 - protein, 15 aa, Homo sapiens
  CDR3 for alpha chain variable domain of TCR clone 40307 (TRAV21, TRAJ37)
CAVRPTLSNTGKLIL

SEQ ID NO: 80614 - protein, 16 aa, Homo sapiens
  CDR3 for beta chain variable domain of TCR clone 40307 (TRBV24-1, TRBJ2-3)
CATSDRRQDLTDTQYF

SEQ ID NO: 80615 - protein, 13 aa, Homo sapiens
  CDR3 for alpha chain variable domain of TCR clone 40308 (TRAV21, TRAJ57)
CAVTQGGSEKLVF

SEQ ID NO: 80616 - protein, 16 aa, Homo sapiens
  CDR3 for beta chain variable domain of TCR clone 40308 (TRBV29-1, TRBJ2-7)
CSVEDDEDGTAYEQYF

SEQ ID NO: 80617 - protein, 14 aa, Homo sapiens
  CDR3 for alpha chain variable domain of TCR clone 40309 (TRAV12-2, TRAJ36)
CAVTPPTGANNLFF

SEQ ID NO: 80618 - protein, 13 aa, Homo sapiens
  CDR3 for beta chain variable domain of TCR clone 40309 (TRBV20-1, TRBJ1-6)
CSAPTGLGSPLHF

SEQ ID NO: 80619 - protein, 14 aa, Homo sapiens
  CDR3 for alpha chain variable domain of TCR clone 40310 (TRAV26-1, TRAJ45)
CIEVTGGGADGLTL

SEQ ID NO: 80620 - protein, 16 aa, Homo sapiens
  CDR3 for beta chain variable domain of TCR clone 40310 (TRBV10-2, TRBJ1-1)
CASSEFGEGASTEAFF

SEQ ID NO: 80621 - protein, 16 aa, Homo sapiens
  CDR3 for alpha chain variable domain of TCR clone 40311 (TRAV1-2, TRAJ10)
CAVRGVLTGGVNKLTF

SEQ ID NO: 80622 - protein, 12 aa, Homo sapiens
  CDR3 for beta chain variable domain of TCR clone 40311 (TRBV7-8, TRBJ2-7)
CASSLGDREQYF

SEQ ID NO: 80623 - protein, 10 aa, Homo sapiens
  CDR3 for alpha chain variable domain of TCR clone 40312 (TRAV21, TRAJ31)
CAVDNARLMF

SEQ ID NO: 80624 - protein, 14 aa, Homo sapiens
  CDR3 for beta chain variable domain of TCR clone 40312 (TRBV19, TRBJ2-1)
CASPTFVLSGEQFF

SEQ ID NO: 80625 - protein, 14 aa, Homo sapiens
  CDR3 for alpha chain variable domain of TCR clone 40313 (TRAV12-3, TRAJ9)
CAMSPNNGGFKTIF

SEQ ID NO: 80626 - protein, 12 aa, Homo sapiens
  CDR3 for beta chain variable domain of TCR clone 40313 (TRBV19, TRBJ1-5)
CASSIAQQPQHF

SEQ ID NO: 80627 - protein, 11 aa, Homo sapiens
  CDR3 for alpha chain variable domain of TCR clone 40314 (TRAV13-1, TRAJ43)
FAAHNNNDMRF

SEQ ID NO: 80628 - protein, 15 aa, Homo sapiens
  CDR3 for beta chain variable domain of TCR clone 40314 (TRBV6-1, TRBJ2-2)
CASSRLRGDTGELFF

SEQ ID NO: 80629 - protein, 17 aa, Homo sapiens
  CDR3 for alpha chain variable domain of TCR clone 40315 (TRAV26-1, TRAJ37)
CIVRVITVSSNTGKLIF

SEQ ID NO: 80630 - protein, 14 aa, Homo sapiens
  CDR3 for beta chain variable domain of TCR clone 40315 (TRBV19, TRBJ2-1)
CTSPTFVLSGEQFF

SEQ ID NO: 80631 - protein, 15 aa, Homo sapiens
  CDR3 for alpha chain variable domain of TCR clone 40316 (TRAV12-1, TRAJ44)
CVVFVNTGTACKLTF

SEQ ID NO: 80632 - protein, 17 aa, Homo sapiens
  CDR3 for beta chain variable domain of TCR clone 40316 (TRBV7-8, TRBJ2-6)
CASSAGTGGAGANVLTF

SEQ ID NO: 80633 - protein, 15 aa, Homo sapiens
  CDR3 for alpha chain variable domain of TCR clone 40317 (TRAV16, TRAJ20)
CALKGGLRADYKLSF

SEQ ID NO: 80634 - protein, 16 aa, Homo sapiens
  CDR3 for beta chain variable domain of TCR clone 40317 (TRBV11-3, TRBJ2-2)
CASSPRTSPGTGELFF

SEQ ID NO: 80635 - protein, 12 aa, Homo sapiens
  CDR3 for alpha chain variable domain of TCR clone 40318 (TRAV12-3, TRAJ17)
CVMTLTVNKLTF

SEQ ID NO: 80636 - protein, 15 aa, Homo sapiens
  CDR3 for beta chain variable domain of TCR clone 40318 (TRBV20-1, TRBJ2-7)
CSARDRVSGMDEQYF

SEQ ID NO: 80637 - protein, 17 aa, Homo sapiens
  CDR3 for alpha chain variable domain of TCR clone 40319 (TRAV3, TRAJ42)
CAVRDRDYGGSQGNLIF

SEQ ID NO: 80638 - protein, 20 aa, Homo sapiens
  CDR3 for beta chain variable domain of TCR clone 40319 (TRBV7-8, TRBJ2-2)
CASSHLFPGPTIHITGELFF

SEQ ID NO: 80639 - protein, 14 aa, Homo sapiens
  CDR3 for alpha chain variable domain of TCR clone 40320 (TRAV26-1, TRAJ45)
CIEVTGGGADGLAF

SEQ ID NO: 80640 - protein, 13 aa, Homo sapiens
  CDR3 for beta chain variable domain of TCR clone 40320 (TRBV7-6, TRBJ1-2)
CASSLVADYGYTF

SEQ ID NO: 80641 - protein, 15 aa, Homo sapiens
  CDR3 for alpha chain variable domain of TCR clone 40321 (TRAV12-2, TRAJ8)
CAVREENTGFQKLVF

SEQ ID NO: 80642 - protein, 15 aa, Homo sapiens
  CDR3 for beta chain variable domain of TCR clone 40321 (TRBV28, TRBJ2-4)
CAAGSGTLLMGSQYF

SEQ ID NO: 80643 - protein, 14 aa, Homo sapiens
  CDR3 for alpha chain variable domain of TCR clone 40322 (TRAV17, TRAJ16)
CATTDFSDGQKLLF

SEQ ID NO: 80644 - protein, 15 aa, Homo sapiens
  CDR3 for beta chain variable domain of TCR clone 40322 (TRBV18, TRBJ2-1)
CASSPPSASYNEQFF

SEQ ID NO: 80645 - protein, 15 aa, Homo sapiens
  CDR3 for alpha chain variable domain of TCR clone 40323 (TRAV8-3, TRAJ45)
CASSYSGGGADGLTF

SEQ ID NO: 80646 - protein, 13 aa, Homo sapiens
  CDR3 for beta chain variable domain of TCR clone 40323 (TRBV12-4, TRBJ2-3)
CASISPLGGTQYF

SEQ ID NO: 80647 - protein, 15 aa, Homo sapiens
  CDR3 for alpha chain variable domain of TCR clone 40324 (TRAV35, TRAJ40)
CAGQLWDSGTYKYIS

SEQ ID NO: 80648 - protein, 12 aa, Homo sapiens
  CDR3 for beta chain variable domain of TCR clone 40324 (TRBV7-8, TRBJ2-7)
CASSLAGYEQYF

SEQ ID NO: 80649 - protein, 13 aa, Homo sapiens
  CDR3 for alpha chain variable domain of TCR clone 40325 (TRAV21, TRAJ27)
CAARPGNAGKSTF

SEQ ID NO: 80650 - protein, 13 aa, Homo sapiens
  CDR3 for beta chain variable domain of TCR clone 40325 (TRBV3-1, TRBJ1-1)
CASSPGVITEAFF

SEQ ID NO: 80651 - protein, 13 aa, Homo sapiens
  CDR3 for alpha chain variable domain of TCR clone 40326 (TRAV13-2, TRAJ48)
CAEMDFGIEKLTF

SEQ ID NO: 80652 - protein, 15 aa, Homo sapiens
  CDR3 for beta chain variable domain of TCR clone 40326 (TRBV7-9, TRBJ1-6)
CASSSPGRGNSPLHF

SEQ ID NO: 80653 - protein, 16 aa, Homo sapiens
  CDR3 for alpha chain variable domain of TCR clone 40327 (TRAV3, TRAJ10)
CAVRDMRAGGGNKPTF

SEQ ID NO: 80654 - protein, 19 aa, Homo sapiens
  CDR3 for beta chain variable domain of TCR clone 40327 (TRBV6-3, TRBJ1-2)
CASSYSKGRTGPPNYGYTF

SEQ ID NO: 80655 - protein, 12 aa, Homo sapiens
  CDR3 for alpha chain variable domain of TCR clone 40328 (TRAV8-3, TRAJ45)
CASSYSEEVLTD

SEQ ID NO: 80656 - protein, 13 aa, Homo sapiens
  CDR3 for beta chain variable domain of TCR clone 40328 (TRBV10-3, TRBJ2-7)
CASKLAVNYEQYF

SEQ ID NO: 80657 - protein, 14 aa, Homo sapiens
  CDR3 for alpha chain variable domain of TCR clone 40329 (TRAV26-2, TRAJ27)
CILRDISDAGKSTF

SEQ ID NO: 80658 - protein, 13 aa, Homo sapiens
  CDR3 for beta chain variable domain of TCR clone 40329 (TRBV11-2, TRBJ2-5)
CASSRGPSETQYF

SEQ ID NO: 80659 - protein, 14 aa, Homo sapiens
  CDR3 for alpha chain variable domain of TCR clone 40330 (TRAV13-2, TRAJ17)
CAENSKAAGNKLTF

SEQ ID NO: 80660 - protein, 15 aa, Homo sapiens
  CDR3 for beta chain variable domain of TCR clone 40330 (TRBV12-4, TRBJ2-7)
CASSQRTSGNYEQYF

SEQ ID NO: 80661 - protein, 14 aa, Homo sapiens
  CDR3 for alpha chain variable domain of TCR clone 40331 (TRAV21, TRAJ45)
CAVSSGGGADGLTF

SEQ ID NO: 80662 - protein, 15 aa, Homo sapiens
  CDR3 for beta chain variable domain of TCR clone 40331 (TRBV6-1, TRBJ2-4)
CASSEAVWNINIQYF

SEQ ID NO: 80663 - protein, 15 aa, Homo sapiens
  CDR3 for alpha chain variable domain of TCR clone 40332 (TRAV26-1, TRAJ36)
CLVGDRQTGANNLFF

SEQ ID NO: 80664 - protein, 15 aa, Homo sapiens
  CDR3 for beta chain variable domain of TCR clone 40332 (TRBV7-6, TRBJ2-1)
CASSSLAGEGNEQFF

SEQ ID NO: 80665 - protein, 13 aa, Homo sapiens
  CDR3 for alpha chain variable domain of TCR clone 40333 (TRAV8-6, TRAJ9)
CAVSDTGGFKTIF

SEQ ID NO: 80666 - protein, 16 aa, Homo sapiens
  CDR3 for beta chain variable domain of TCR clone 40333 (TRBV12-5, TRBJ2-5)
CASGPRTSGNQETQYF

SEQ ID NO: 80667 - protein, 14 aa, Homo sapiens
  CDR3 for alpha chain variable domain of TCR clone 40334 (TRAV12-2, TRAJ17)
CAVLFKAAGNKLTF

SEQ ID NO: 80668 - protein, 15 aa, Homo sapiens
  CDR3 for beta chain variable domain of TCR clone 40334 (TRBV4-1, TRBJ1-4)
CASSDTGGTNEKLFF

SEQ ID NO: 80669 - protein, 13 aa, Homo sapiens
  CDR3 for alpha chain variable domain of TCR clone 40335 (TRAV2, TRAJ40)
CAVVTSGTYKYIF

SEQ ID NO: 80670 - protein, 15 aa, Homo sapiens
  CDR3 for beta chain variable domain of TCR clone 40335 (TRBV18, TRBJ1-1)
CASSPRQGENTEALF

SEQ ID NO: 80671 - protein, 12 aa, Homo sapiens
  CDR3 for alpha chain variable domain of TCR clone 40336 (TRAV3, TRAJ20)
CAVRDGDYKLSF

SEQ ID NO: 80672 - protein, 13 aa, Homo sapiens
  CDR3 for beta chain variable domain of TCR clone 40336 (TRBV9, TRBJ2-1)
CASSVGQGGEQFL

SEQ ID NO: 80673 - protein, 15 aa, Homo sapiens
  CDR3 for alpha chain variable domain of TCR clone 40337 (TRAV3, TRAJ3)
CAVRDMSSSASKIIF

SEQ ID NO: 80674 - protein, 14 aa, Homo sapiens
  CDR3 for beta chain variable domain of TCR clone 40337 (TRBV19, TRBJ2-1)
CASPTFVSSGEQFF

SEQ ID NO: 80675 - protein, 12 aa, Homo sapiens
  CDR3 for alpha chain variable domain of TCR clone 40338 (TRAV30, TRAJ20)
CGTESNDYKLGF

SEQ ID NO: 80676 - protein, 15 aa, Homo sapiens
  CDR3 for beta chain variable domain of TCR clone 40338 (TRBV20-1, TRBJ2-7)
CSARDRVSGMDEQYF

SEQ ID NO: 80677 - protein, 12 aa, Homo sapiens
  CDR3 for alpha chain variable domain of TCR clone 40339 (TRAV13-1, TRAJ34)
CAASKGTDKLIF

SEQ ID NO: 80678 - protein, 16 aa, Homo sapiens
  CDR3 for beta chain variable domain of TCR clone 40339 (TRBV28, TRBJ2-1)
CASSSRVRDSYNEQFF

SEQ ID NO: 80679 - protein, 12 aa, Homo sapiens
  CDR3 for alpha chain variable domain of TCR clone 40340 (TRAV1-1, TRAJ8)
CAGGTGFQKLVF

SEQ ID NO: 80680 - protein, 15 aa, Homo sapiens
  CDR3 for beta chain variable domain of TCR clone 40340 (TRBV4-1, TRBJ1-4)
CASSDTGGTNEKLFF

SEQ ID NO: 80681 - protein, 12 aa, Homo sapiens
  CDR3 for alpha chain variable domain of TCR clone 40341 (TRAV12-3, TRAJ17)
CAMTLTGNKLTF

SEQ ID NO: 80682 - protein, 12 aa, Homo sapiens
  CDR3 for beta chain variable domain of TCR clone 40341 (TRBV27, TRBJ2-1)
CASRGFYNEQFF

SEQ ID NO: 80683 - protein, 14 aa, Homo sapiens
  CDR3 for alpha chain variable domain of TCR clone 40342 (TRAV12-3, TRAJ10)
SHLPLTGGGNKLTF

SEQ ID NO: 80684 - protein, 12 aa, Homo sapiens
  CDR3 for beta chain variable domain of TCR clone 40342 (TRBV7-9, TRBJ2-7)
CATRTEAYEQYF

SEQ ID NO: 80685 - protein, 15 aa, Homo sapiens
  CDR3 for alpha chain variable domain of TCR clone 40343 (TRAV17, TRAJ56)
CATEPFTGANSKLTF

SEQ ID NO: 80686 - protein, 15 aa, Homo sapiens
  CDR3 for beta chain variable domain of TCR clone 40343 (TRBV28, TRBJ1-5)
CVSSRTGGYVQPQHF

SEQ ID NO: 80687 - protein, 18 aa, Homo sapiens
  CDR3 for alpha chain variable domain of TCR clone 40344 (TRAV13-1, TRAJ52)
CAASKRSAGGTSYGKLTF

SEQ ID NO: 80688 - protein, 13 aa, Homo sapiens
  CDR3 for beta chain variable domain of TCR clone 40344 (TRBV12-4, TRBJ1-2)
CASSLRQGKGYPF

SEQ ID NO: 80689 - protein, 15 aa, Homo sapiens
  CDR3 for alpha chain variable domain of TCR clone 40345 (TRAV12-2, TRAJ53)
CAVNTGRGSNYKLTF

SEQ ID NO: 80690 - protein, 15 aa, Homo sapiens
  CDR3 for beta chain variable domain of TCR clone 40345 (TRBV5-1, TRBJ2-5)
CASSLGLGEIKTQYF

SEQ ID NO: 80691 - protein, 15 aa, Homo sapiens
  CDR3 for alpha chain variable domain of TCR clone 40346 (TRAV21, TRAJ52)
CAGRGGGTSYGKLTF

SEQ ID NO: 80692 - protein, 15 aa, Homo sapiens
  CDR3 for beta chain variable domain of TCR clone 40346 (TRBV18, TRBJ1-5)
CASSPSDRSNQPQHF

SEQ ID NO: 80693 - protein, 17 aa, Homo sapiens
  CDR3 for alpha chain variable domain of TCR clone 40347 (TRAV23/DV6, TRAJ57)
CAASSTLSQGGSEKLVF

SEQ ID NO: 80694 - protein, 14 aa, Homo sapiens
  CDR3 for beta chain variable domain of TCR clone 40347 (TRBV25-1, TRBJ1-1)
CARTHLGGNTEAFF

SEQ ID NO: 80695 - protein, 15 aa, Homo sapiens
  CDR3 for alpha chain variable domain of TCR clone 40348 (TRAV8-3, TRAJ27)
YAVGPSKTNAGKSTF

SEQ ID NO: 80696 - protein, 15 aa, Homo sapiens
  CDR3 for beta chain variable domain of TCR clone 40348 (TRBV7-2, TRBJ2-1)
CASSSGLAGGNEQFF

SEQ ID NO: 80697 - protein, 16 aa, Homo sapiens
  CDR3 for alpha chain variable domain of TCR clone 40349 (TRAV30, TRAJ24)
CGTEIVDVDSWGKFQF

SEQ ID NO: 80698 - protein, 15 aa, Homo sapiens
  CDR3 for beta chain variable domain of TCR clone 40349 (TRBV27, TRBJ2-1)
CASSNGGGSSNEQFF

SEQ ID NO: 80699 - protein, 12 aa, Homo sapiens
  CDR3 for alpha chain variable domain of TCR clone 40350 (TRAV21, TRAJ31)
CAVWGNNARLMF

SEQ ID NO: 80700 - protein, 16 aa, Homo sapiens
  CDR3 for beta chain variable domain of TCR clone 40350 (TRBV27, TRBJ2-5)
LASSYGPGGQKETQYF

SEQ ID NO: 80701 - protein, 18 aa, Homo sapiens
  CDR3 for alpha chain variable domain of TCR clone 40351 (TRAV26-1, TRAJ22)
CIVRVALISSGSARPLTF

SEQ ID NO: 80702 - protein, 13 aa, Homo sapiens
  CDR3 for beta chain variable domain of TCR clone 40351 (TRBV13, TRBJ2-5)
CASSPEVGETQYF

SEQ ID NO: 80703 - protein, 13 aa, Homo sapiens
  CDR3 for alpha chain variable domain of TCR clone 40352 (TRAV12-3, TRAJ7)
CAMTPYGNNRLAF

SEQ ID NO: 80704 - protein, 16 aa, Homo sapiens
  CDR3 for beta chain variable domain of TCR clone 40352 (TRBV20-1, TRBJ1-4)
CSARPYGGELNEELFF

SEQ ID NO: 80705 - protein, 14 aa, Homo sapiens
  CDR3 for alpha chain variable domain of TCR clone 40353 (TRAV17, TRAJ34)
CATDSLVGTDKLIF

SEQ ID NO: 80706 - protein, 13 aa, Homo sapiens
  CDR3 for beta chain variable domain of TCR clone 40353 (TRBV11-2, TRBJ2-7)
CASSGTRPYEQYF

SEQ ID NO: 80707 - protein, 12 aa, Homo sapiens
  CDR3 for alpha chain variable domain of TCR clone 40354 (TRAV21, TRAJ3)
CCFYSSASKIIF

SEQ ID NO: 80708 - protein, 16 aa, Homo sapiens
  CDR3 for beta chain variable domain of TCR clone 40354 (TRBV19, TRBJ2-1)
CDSSKAGPSSYNEQFF

SEQ ID NO: 80709 - protein, 15 aa, Homo sapiens
  CDR3 for alpha chain variable domain of TCR clone 40355 (TRAV12-1, TRAJ10)
CVVNKLTGGGNKLTL

SEQ ID NO: 80710 - protein, 17 aa, Homo sapiens
  CDR3 for beta chain variable domain of TCR clone 40355 (TRBV5-1, TRBJ1-6)
CASSPSLQGSDNSPLHF

SEQ ID NO: 80711 - protein, 18 aa, Homo sapiens
  CDR3 for alpha chain variable domain of TCR clone 40356 (TRAV9-2, TRAJ52)
CALSRHNAGGTSYGKLTF

SEQ ID NO: 80712 - protein, 13 aa, Homo sapiens
  CDR3 for beta chain variable domain of TCR clone 40356 (TRBV7-9, TRBJ1-2)
CASSLKQSYGYTF

SEQ ID NO: 80713 - protein, 14 aa, Homo sapiens
  CDR3 for alpha chain variable domain of TCR clone 40357 (TRAV12-2, TRAJ17)
YAVLFKAAGNKLTF

SEQ ID NO: 80714 - protein, 15 aa, Homo sapiens
  CDR3 for beta chain variable domain of TCR clone 40357 (TRBV20-1, TRBJ2-7)
CSARDRVSGMDEQYF

SEQ ID NO: 80715 - protein, 11 aa, Homo sapiens
  CDR3 for alpha chain variable domain of TCR clone 40358 (TRAV2, TRAJ33)
CAVESNYQLIW

SEQ ID NO: 80716 - protein, 20 aa, Homo sapiens
  CDR3 for beta chain variable domain of TCR clone 40358 (TRBV7-8, TRBJ2-2)
CASSHLFPGPTIHITGELFF

SEQ ID NO: 80717 - protein, 13 aa, Homo sapiens
  CDR3 for alpha chain variable domain of TCR clone 40359 (TRAV12-1, TRAJ11)
CVVTRGGYSTLTF

SEQ ID NO: 80718 - protein, 13 aa, Homo sapiens
  CDR3 for beta chain variable domain of TCR clone 40359 (TRBV20-1, TRBJ1-2)
CSARDQGAYGYTL

SEQ ID NO: 80719 - protein, 13 aa, Homo sapiens
  CDR3 for alpha chain variable domain of TCR clone 40360 (TRAV8-3, TRAJ43)
CAVGPDNNNDMRF

SEQ ID NO: 80720 - protein, 12 aa, Homo sapiens
  CDR3 for beta chain variable domain of TCR clone 40360 (TRBV7-2, TRBJ1-6)
CASSLSRSPLHF

SEQ ID NO: 80721 - protein, 17 aa, Homo sapiens
  CDR3 for alpha chain variable domain of TCR clone 40361 (TRAV8-3, TRAJ52)
CAVGAEAGGTSYGKPTF

SEQ ID NO: 80722 - protein, 15 aa, Homo sapiens
  CDR3 for beta chain variable domain of TCR clone 40361 (TRBV5-1, TRBJ2-5)
CASSRQGLGQETQYF

SEQ ID NO: 80723 - protein, 15 aa, Homo sapiens
  CDR3 for alpha chain variable domain of TCR clone 40362 (TRAV13-1, TRAJ49)
CAASTEGNTGNQSYF

SEQ ID NO: 80724 - protein, 12 aa, Homo sapiens
  CDR3 for beta chain variable domain of TCR clone 40362 (TRBV11-2, TRBJ2-2)
CASSLGGGELFF

SEQ ID NO: 80725 - protein, 17 aa, Homo sapiens
  CDR3 for alpha chain variable domain of TCR clone 40363 (TRAV3, TRAJ6)
CAVRDGPRAGGSYIPTF

SEQ ID NO: 80726 - protein, 15 aa, Homo sapiens
  CDR3 for beta chain variable domain of TCR clone 40363 (TRBV19, TRBJ1-5)
CASSIVWADNQPQHF

SEQ ID NO: 80727 - protein, 11 aa, Homo sapiens
  CDR3 for alpha chain variable domain of TCR clone 40364 (TRAV1-2, TRAJ31)
CAVNNNARLMF

SEQ ID NO: 80728 - protein, 15 aa, Homo sapiens
  CDR3 for beta chain variable domain of TCR clone 40364 (TRBV28, TRBJ2-1)
CASSVIAGGRSEQFF

SEQ ID NO: 80729 - protein, 17 aa, Homo sapiens
  CDR3 for alpha chain variable domain of TCR clone 40365 (TRAV35, TRAJ38)
CAGQLQRSAGNNRKLIW

SEQ ID NO: 80730 - protein, 15 aa, Homo sapiens
  CDR3 for beta chain variable domain of TCR clone 40365 (TRBV7-9, TRBJ2-1)
CASSLGLAGGTEQFF

SEQ ID NO: 80731 - protein, 16 aa, Homo sapiens
  CDR3 for alpha chain variable domain of TCR clone 40366 (TRAV30, TRAJ24)
CGTEIVDADSWGKFQF

SEQ ID NO: 80732 - protein, 14 aa, Homo sapiens
  CDR3 for beta chain variable domain of TCR clone 40366 (TRBV12-5, TRBJ2-5)
CACGSRTHQETQYS

SEQ ID NO: 80733 - protein, 14 aa, Homo sapiens
  CDR3 for alpha chain variable domain of TCR clone 40367 (TRAV1-2, TRAJ8)
CAVREDTGFQKLVF

SEQ ID NO: 80734 - protein, 14 aa, Homo sapiens
  CDR3 for beta chain variable domain of TCR clone 40367 (TRBV7-9, TRBJ1-1)
CACTPLQSYTEAFF

SEQ ID NO: 80735 - protein, 12 aa, Homo sapiens
  CDR3 for alpha chain variable domain of TCR clone 40368 (TRAV12-3, TRAJ17)
CAMTLTGNELTF

SEQ ID NO: 80736 - protein, 15 aa, Homo sapiens
  CDR3 for beta chain variable domain of TCR clone 40368 (TRBV19, TRBJ1-1)
CASTSGQIQNTEAFF

SEQ ID NO: 80737 - protein, 14 aa, Homo sapiens
  CDR3 for alpha chain variable domain of TCR clone 40369 (TRAV8-2, TRAJ4)
CVVSPSGGYNKLIF

SEQ ID NO: 80738 - protein, 13 aa, Homo sapiens
  CDR3 for beta chain variable domain of TCR clone 40369 (TRBV14, TRBJ1-1)
CASSQEAGTEAFF

SEQ ID NO: 80739 - protein, 17 aa, Homo sapiens
  CDR3 for alpha chain variable domain of TCR clone 40370 (TRAV3, TRAJ6)
CAVRDGPRAGGSYIPTF

SEQ ID NO: 80740 - protein, 14 aa, Homo sapiens
  CDR3 for beta chain variable domain of TCR clone 40370 (TRBV4-3, TRBJ1-6)
CASSPGTDNSPLHF

SEQ ID NO: 80741 - protein, 18 aa, Homo sapiens
  CDR3 for alpha chain variable domain of TCR clone 40371 (TRAV21, TRAJ52)
CAVRPSPAGGPSYGKLTF

SEQ ID NO: 80742 - protein, 13 aa, Homo sapiens
  CDR3 for beta chain variable domain of TCR clone 40371 (TRBV7-3, TRBJ1-1)
CASSQDWGAEAFF

SEQ ID NO: 80743 - protein, 15 aa, Homo sapiens
  CDR3 for alpha chain variable domain of TCR clone 40372 (TRAV4, TRAJ39)
CLVGPNNNAGNMLTF

SEQ ID NO: 80744 - protein, 13 aa, Homo sapiens
  CDR3 for beta chain variable domain of TCR clone 40372 (TRBV11-2, TRBJ2-5)
CASSSTGEETQCF

SEQ ID NO: 80745 - protein, 15 aa, Homo sapiens
  CDR3 for alpha chain variable domain of TCR clone 40373 (TRAV2, TRAJ15)
CAVEDRGRAGTALIF

SEQ ID NO: 80746 - protein, 13 aa, Homo sapiens
  CDR3 for beta chain variable domain of TCR clone 40373 (TRBV10-2, TRBJ2-7)
CASGASGGYEQYF

SEQ ID NO: 80747 - protein, 14 aa, Homo sapiens
  CDR3 for alpha chain variable domain of TCR clone 40374 (TRAV1-2, TRAJ16)
CAVNRFSDGQKLLF

SEQ ID NO: 80748 - protein, 14 aa, Homo sapiens
  CDR3 for beta chain variable domain of TCR clone 40374 (TRBV25-1, TRBJ1-1)
RASTHLGGNTEAFF

SEQ ID NO: 80749 - protein, 12 aa, Homo sapiens
  CDR3 for alpha chain variable domain of TCR clone 40375 (TRAV38-1, TRAJ47)
CAFETYGNKLVF

SEQ ID NO: 80750 - protein, 15 aa, Homo sapiens
  CDR3 for beta chain variable domain of TCR clone 40375 (TRBV5-6, TRBJ2-7)
CASSGGRPVPYEQYF

SEQ ID NO: 80751 - protein, 14 aa, Homo sapiens
  CDR3 for alpha chain variable domain of TCR clone 40376 (TRAV1-2, TRAJ16)
CAVNRFSDGQKLPF

SEQ ID NO: 80752 - protein, 13 aa, Homo sapiens
  CDR3 for beta chain variable domain of TCR clone 40376 (TRBV20-1, TRBJ1-1)
CSARGGGNTEAFF

SEQ ID NO: 80753 - protein, 11 aa, Homo sapiens
  CDR3 for alpha chain variable domain of TCR clone 40377 (TRAV1-2, TRAJ20)
CAVANDYKLSF

SEQ ID NO: 80754 - protein, 18 aa, Homo sapiens
  CDR3 for beta chain variable domain of TCR clone 40377 (TRBV20-1, TRBJ2-6)
CSAETTPTHGSGDNVLTF

SEQ ID NO: 80755 - protein, 13 aa, Homo sapiens
  CDR3 for alpha chain variable domain of TCR clone 40378 (TRAV13-1, TRAJ10)
CAALEGGGSKLTF

SEQ ID NO: 80756 - protein, 17 aa, Homo sapiens
  CDR3 for beta chain variable domain of TCR clone 40378 (TRBV7-3, TRBJ2-2)
CASSLSGTSGGTGELFF

SEQ ID NO: 80757 - protein, 12 aa, Homo sapiens
  CDR3 for alpha chain variable domain of TCR clone 40379 (TRAV13-1, TRAJ17)
CAARTADNKLTF

SEQ ID NO: 80758 - protein, 15 aa, Homo sapiens
  CDR3 for beta chain variable domain of TCR clone 40379 (TRBV7-6, TRBJ1-1)
CASSPQGGANTEAFF

SEQ ID NO: 80759 - protein, 14 aa, Homo sapiens
  CDR3 for alpha chain variable domain of TCR clone 40380 (TRAV12-3, TRAJ10)
SHLPLTGGGNKLTF

SEQ ID NO: 80760 - protein, 19 aa, Homo sapiens
  CDR3 for beta chain variable domain of TCR clone 40380 (TRBV28, TRBJ2-7)
CASSYSGTSRLGWVYEQYF

SEQ ID NO: 80761 - protein, 14 aa, Homo sapiens
  CDR3 for alpha chain variable domain of TCR clone 40381 (TRAV29/DV5, TRAJ36)
CEARRKTGANNLFF

SEQ ID NO: 80762 - protein, 14 aa, Homo sapiens
  CDR3 for beta chain variable domain of TCR clone 40381 (TRBV12-5, TRBJ2-5)
CASGSRTHQETQYF

SEQ ID NO: 80763 - protein, 14 aa, Homo sapiens
  CDR3 for alpha chain variable domain of TCR clone 40382 (TRAV12-3, TRAJ56)
CAMSVTGANSKLTF

SEQ ID NO: 80764 - protein, 15 aa, Homo sapiens
  CDR3 for beta chain variable domain of TCR clone 40382 (TRBV4-2, TRBJ1-1)
CASSQEDLPRTEAFF

SEQ ID NO: 80765 - protein, 14 aa, Homo sapiens
  CDR3 for alpha chain variable domain of TCR clone 40383 (TRAV26-1, TRAJ45)
CIEVTGGGADGLTF

SEQ ID NO: 80766 - protein, 13 aa, Homo sapiens
  CDR3 for beta chain variable domain of TCR clone 40383 (TRBV7-6, TRBJ1-2)
CASSLAADYGYTF

SEQ ID NO: 80767 - protein, 15 aa, Homo sapiens
  CDR3 for alpha chain variable domain of TCR clone 40384 (TRAV8-6, TRAJ45)
CAVSEQGGGADGLTF

SEQ ID NO: 80768 - protein, 14 aa, Homo sapiens
  CDR3 for beta chain variable domain of TCR clone 40384 (TRBV28, TRBJ2-5)
CASRGSSFWETQYL

SEQ ID NO: 80769 - protein, 13 aa, Homo sapiens
  CDR3 for alpha chain variable domain of TCR clone 40385 (TRAV12-3, TRAJ56)
CALATGANSKLTF

SEQ ID NO: 80770 - protein, 12 aa, Homo sapiens
  CDR3 for beta chain variable domain of TCR clone 40385 (TRBV10-2, TRBJ2-3)
CASSPESDTQYF

SEQ ID NO: 80771 - protein, 16 aa, Homo sapiens
  CDR3 for alpha chain variable domain of TCR clone 40386 (TRAV13-1, TRAJ48)
CSKYRESNFGSEKLTF

SEQ ID NO: 80772 - protein, 17 aa, Homo sapiens
  CDR3 for beta chain variable domain of TCR clone 40386 (TRBV28, TRBJ2-1)
CASSSARQALTYNEQFF

SEQ ID NO: 80773 - protein, 15 aa, Homo sapiens
  CDR3 for alpha chain variable domain of TCR clone 40387 (TRAV17, TRAJ57)
CATGPSQGGSEKLVF

SEQ ID NO: 80774 - protein, 14 aa, Homo sapiens
  CDR3 for beta chain variable domain of TCR clone 40387 (TRBV6-1, TRBJ1-3)
CASVQGGGGNTIYF

SEQ ID NO: 80775 - protein, 12 aa, Homo sapiens
  CDR3 for alpha chain variable domain of TCR clone 40388 (TRAV8-3, TRAJ26)
CAGDNYGQNFVF

SEQ ID NO: 80776 - protein, 15 aa, Homo sapiens
  CDR3 for beta chain variable domain of TCR clone 40388 (TRBV9, TRBJ2-1)
CARSLAGSSYNEQFF

SEQ ID NO: 80777 - protein, 14 aa, Homo sapiens
  CDR3 for alpha chain variable domain of TCR clone 40389 (TRAV17, TRAJ5)
CATVALTGRRALTF

SEQ ID NO: 80778 - protein, 14 aa, Homo sapiens
  CDR3 for beta chain variable domain of TCR clone 40389 (TRBV28, TRBJ2-7)
CASSPYGMAYEQYF

SEQ ID NO: 80779 - protein, 15 aa, Homo sapiens
  CDR3 for alpha chain variable domain of TCR clone 40390 (TRAV2, TRAJ11)
CAVEDPNSGYSTLTF

SEQ ID NO: 80780 - protein, 16 aa, Homo sapiens
  CDR3 for beta chain variable domain of TCR clone 40390 (TRBV7-9, TRBJ1-2)
CASSLGFSSGEDGYTF

SEQ ID NO: 80781 - protein, 16 aa, Homo sapiens
  CDR3 for alpha chain variable domain of TCR clone 40391 (TRAV1-2, TRAJ10)
CAVRGVLTGGGNKLTF

SEQ ID NO: 80782 - protein, 11 aa, Homo sapiens
  CDR3 for beta chain variable domain of TCR clone 40391 (TRBV20-1, TRBJ2-7)
CSARLSYEQYF

SEQ ID NO: 80783 - protein, 15 aa, Homo sapiens
  CDR3 for alpha chain variable domain of TCR clone 40392 (TRAV17, TRAJ57)
CATCPSQGGSEKLVF

SEQ ID NO: 80784 - protein, 15 aa, Homo sapiens
  CDR3 for beta chain variable domain of TCR clone 40392 (TRBV6-3, TRBJ2-7)
CASSSPGTVFYEQYF

SEQ ID NO: 80785 - protein, 11 aa, Homo sapiens
  CDR3 for alpha chain variable domain of TCR clone 40393 (TRAV35, TRAJ30)
CAPGGDDKIIF

SEQ ID NO: 80786 - protein, 14 aa, Homo sapiens
  CDR3 for beta chain variable domain of TCR clone 40393 (TRBV7-6, TRBJ2-1)
CARSLGGGADEQFF

SEQ ID NO: 80787 - protein, 12 aa, Homo sapiens
  CDR3 for alpha chain variable domain of TCR clone 40394 (TRAV12-3, TRAJ17)
CAMTLTGNKLTF

SEQ ID NO: 80788 - protein, 23 aa, Homo sapiens
  CDR3 for beta chain variable domain of TCR clone 40394 (TRBV4-2, TRBJ2-3)
CASSQDPPRASSISGGRGDTQYF

SEQ ID NO: 80789 - protein, 15 aa, Homo sapiens
  CDR3 for alpha chain variable domain of TCR clone 40395 (TRAV26-2, TRAJ39)
CILRVPSRMQATCSP

SEQ ID NO: 80790 - protein, 14 aa, Homo sapiens
  CDR3 for beta chain variable domain of TCR clone 40395 (TRBV12-4, TRBJ1-4)
CASRMTGRSEKLFF

SEQ ID NO: 80791 - protein, 11 aa, Homo sapiens
  CDR3 for alpha chain variable domain of TCR clone 40396 (TRAV4, TRAJ23)
CLVAPGGKLIF

SEQ ID NO: 80792 - protein, 15 aa, Homo sapiens
  CDR3 for beta chain variable domain of TCR clone 40396 (TRBV7-9, TRBJ1-6)
CASSSPGRGNSPLHF

SEQ ID NO: 80793 - protein, 11 aa, Homo sapiens
  CDR3 for alpha chain variable domain of TCR clone 40397 (TRAV2, TRAJ33)
CAVDSNYQLIW

SEQ ID NO: 80794 - protein, 15 aa, Homo sapiens
  CDR3 for beta chain variable domain of TCR clone 40397 (TRBV19, TRBJ1-2)
CASSVGQVLIYGYTF

SEQ ID NO: 80795 - protein, 15 aa, Homo sapiens
  CDR3 for alpha chain variable domain of TCR clone 40398 (TRAV8-3, TRAJ11)
CAVGLLNSGSSTLTF

SEQ ID NO: 80796 - protein, 16 aa, Homo sapiens
  CDR3 for beta chain variable domain of TCR clone 40398 (TRBV7-9, TRBJ1-2)
CASSLGFSSGEDGYTF

SEQ ID NO: 80797 - protein, 12 aa, Homo sapiens
  CDR3 for alpha chain variable domain of TCR clone 40399 (TRAV13-1, TRAJ21)
CAAKEGFNKFYF

SEQ ID NO: 80798 - protein, 18 aa, Homo sapiens
  CDR3 for beta chain variable domain of TCR clone 40399 (TRBV25-1, TRBJ1-2)
CASSGLQNGQGLIFGYTF

SEQ ID NO: 80799 - protein, 12 aa, Homo sapiens
  CDR3 for alpha chain variable domain of TCR clone 40400 (TRAV1-2, TRAJ33)
CAALDSNYQLIW

SEQ ID NO: 80800 - protein, 15 aa, Homo sapiens
  CDR3 for beta chain variable domain of TCR clone 40400 (TRBV27, TRBJ2-1)
RASSNGGGSSNEQFF

SEQ ID NO: 80801 - protein, 16 aa, Homo sapiens
  CDR3 for alpha chain variable domain of TCR clone 40401 (TRAV12-3, TRAJ53)
CAMSPGSGGSNYKLTF

SEQ ID NO: 80802 - protein, 16 aa, Homo sapiens
  CDR3 for beta chain variable domain of TCR clone 40401 (TRBV11-3, TRBJ2-5)
CASSSVVAGSTETQYF

SEQ ID NO: 80803 - protein, 13 aa, Homo sapiens
  CDR3 for alpha chain variable domain of TCR clone 40402 (TRAV36/DV7, TRAJ53)
CALSGGSNYKLTF

SEQ ID NO: 80804 - protein, 13 aa, Homo sapiens
  CDR3 for beta chain variable domain of TCR clone 40402 (TRBV28, TRBJ2-7)
CASSPPSRYEQYF

SEQ ID NO: 80805 - protein, 13 aa, Homo sapiens
  CDR3 for alpha chain variable domain of TCR clone 40403 (TRAV8-4, TRAJ30)
CAVSGNRDDKIIF

SEQ ID NO: 80806 - protein, 13 aa, Homo sapiens
  CDR3 for beta chain variable domain of TCR clone 40403 (TRBV3-1, TRBJ2-2)
CASLARGSGELFF

SEQ ID NO: 80807 - protein, 13 aa, Homo sapiens
  CDR3 for alpha chain variable domain of TCR clone 40404 (TRAV3, TRAJ21)
CAVREPDFNKFYF

SEQ ID NO: 80808 - protein, 13 aa, Homo sapiens
  CDR3 for beta chain variable domain of TCR clone 40404 (TRBV9, TRBJ2-1)
CASSPSGVNEQFF

SEQ ID NO: 80809 - protein, 14 aa, Homo sapiens
  CDR3 for alpha chain variable domain of TCR clone 40405 (TRAV17, TRAJ32)
CDTDPGGATNKLIF

SEQ ID NO: 80810 - protein, 14 aa, Homo sapiens
  CDR3 for beta chain variable domain of TCR clone 40405 (TRBV2, TRBJ1-5)
CASSENRGGQPQHF

SEQ ID NO: 80811 - protein, 15 aa, Homo sapiens
  CDR3 for alpha chain variable domain of TCR clone 40406 (TRAV25, TRAJ52)
CAGRPGGTSYGKLTF

SEQ ID NO: 80812 - protein, 14 aa, Homo sapiens
  CDR3 for beta chain variable domain of TCR clone 40406 (TRBV25-1, TRBJ1-1)
CASTHLGGNTEAFF

SEQ ID NO: 80813 - protein, 14 aa, Homo sapiens
  CDR3 for alpha chain variable domain of TCR clone 40407 (TRAV12-1, TRAJ17)
CVVNYKAAGNKLTF

SEQ ID NO: 80814 - protein, 13 aa, Homo sapiens
  CDR3 for beta chain variable domain of TCR clone 40407 (TRBV19, TRBJ2-7)
CASRKAGGSEQYY

SEQ ID NO: 80815 - protein, 16 aa, Homo sapiens
  CDR3 for alpha chain variable domain of TCR clone 40408 (TRAV3, TRAJ37)
CAVRGKGSGNTGKLIF

SEQ ID NO: 80816 - protein, 15 aa, Homo sapiens
  CDR3 for beta chain variable domain of TCR clone 40408 (TRBV7-9, TRBJ2-2)
CASGPLDTSPGELFF

SEQ ID NO: 80817 - protein, 14 aa, Homo sapiens
  CDR3 for alpha chain variable domain of TCR clone 40409 (TRAV26-1, TRAJ22)
CIVRVYGSARQLTF

SEQ ID NO: 80818 - protein, 16 aa, Homo sapiens
  CDR3 for beta chain variable domain of TCR clone 40409 (TRBV12-4, TRBJ1-5)
CASSRPVGGSNQPQHF

SEQ ID NO: 80819 - protein, 13 aa, Homo sapiens
  CDR3 for alpha chain variable domain of TCR clone 40410 (TRAV21, TRAJ57)
CAVTQGGSEKLVF

SEQ ID NO: 80820 - protein, 17 aa, Homo sapiens
  CDR3 for beta chain variable domain of TCR clone 40410 (TRBV5-1, TRBJ1-1)
CASSSTTGTNTEAFLDK

SEQ ID NO: 80821 - protein, 11 aa, Homo sapiens
  CDR3 for alpha chain variable domain of TCR clone 40411 (TRAV12-3, TRAJ43)
CAMSVSNDMRF

SEQ ID NO: 80822 - protein, 13 aa, Homo sapiens
  CDR3 for beta chain variable domain of TCR clone 40411 (TRBV20-1, TRBJ1-1)
CSSPLGGGTEAFF

SEQ ID NO: 80823 - protein, 13 aa, Homo sapiens
  CDR3 for alpha chain variable domain of TCR clone 40412 (TRAV20, TRAJ54)
CAVQAGVAQKLVF

SEQ ID NO: 80824 - protein, 14 aa, Homo sapiens
  CDR3 for beta chain variable domain of TCR clone 40412 (TRBV20-1, TRBJ2-7)
CSAKTGTGGYEQYF

SEQ ID NO: 80825 - protein, 14 aa, Homo sapiens
  CDR3 for alpha chain variable domain of TCR clone 40413 (TRAV3, TRAJ27)
CAVRDDTNAGKPTF

SEQ ID NO: 80826 - protein, 15 aa, Homo sapiens
  CDR3 for beta chain variable domain of TCR clone 40413 (TRBV7-7, TRBJ2-2)
CATSKLAKNTGELFS

SEQ ID NO: 80827 - protein, 14 aa, Homo sapiens
  CDR3 for alpha chain variable domain of TCR clone 40414 (TRAV25, TRAJ6)
CAGRESGGSYIPTF

SEQ ID NO: 80828 - protein, 14 aa, Homo sapiens
  CDR3 for beta chain variable domain of TCR clone 40414 (TRBV10-2, TRBJ1-5)
CASSPTGRNQPQHF

SEQ ID NO: 80829 - protein, 13 aa, Homo sapiens
  CDR3 for alpha chain variable domain of TCR clone 40415 (TRAV27, TRAJ39)
CAGDTPAGNMLAF

SEQ ID NO: 80830 - protein, 13 aa, Homo sapiens
  CDR3 for beta chain variable domain of TCR clone 40415 (TRBV4-1, TRBJ2-4)
CASSQVGIDIQYF

SEQ ID NO: 80831 - protein, 12 aa, Homo sapiens
  CDR3 for alpha chain variable domain of TCR clone 40416 (TRAV21, TRAJ31)
CTVWGNNARLMF

SEQ ID NO: 80832 - protein, 16 aa, Homo sapiens
  CDR3 for beta chain variable domain of TCR clone 40416 (TRBV27, TRBJ2-5)
CASSYGPGGQKETQYF

SEQ ID NO: 80833 - protein, 11 aa, Homo sapiens
  CDR3 for alpha chain variable domain of TCR clone 40417 (TRAV17, TRAJ9)
CGFTGGFKTIF

SEQ ID NO: 80834 - protein, 14 aa, Homo sapiens
  CDR3 for beta chain variable domain of TCR clone 40417 (TRBV7-9, TRBJ2-2)
CASSLVQDTGELFF

SEQ ID NO: 80835 - protein, 16 aa, Homo sapiens
  CDR3 for alpha chain variable domain of TCR clone 40418 (TRAV3, TRAJ37)
CAVRGKGSGNTGKLIF

SEQ ID NO: 80836 - protein, 13 aa, Homo sapiens
  CDR3 for beta chain variable domain of TCR clone 40418 (TRBV14, TRBJ2-7)
CASSQDRLYEQYF

SEQ ID NO: 80837 - protein, 12 aa, Homo sapiens
  CDR3 for alpha chain variable domain of TCR clone 40419 (TRAV8-3, TRAJ26)
CAGDNYGQNFVF

SEQ ID NO: 80838 - protein, 13 aa, Homo sapiens
  CDR3 for beta chain variable domain of TCR clone 40419 (TRBV7-9, TRBJ1-1)
CASSLSGETEAFF

SEQ ID NO: 80839 - protein, 14 aa, Homo sapiens
  CDR3 for alpha chain variable domain of TCR clone 40420 (TRAV1-2, TRAJ16)
CAVNRFSDGQKLLF

SEQ ID NO: 80840 - protein, 10 aa, Homo sapiens
  CDR3 for beta chain variable domain of TCR clone 40420 (TRBV2, TRBJ2-5)
CASSAATQYF

SEQ ID NO: 80841 - protein, 15 aa, Homo sapiens
  CDR3 for alpha chain variable domain of TCR clone 40421 (TRAV35, TRAJ50)
CAGQLRKTSYDKVRF

SEQ ID NO: 80842 - protein, 12 aa, Homo sapiens
  CDR3 for beta chain variable domain of TCR clone 40421 (TRBV5-1, TRBJ2-5)
CASSLGLETQYF

SEQ ID NO: 80843 - protein, 11 aa, Homo sapiens
  CDR3 for alpha chain variable domain of TCR clone 40422 (TRAV3, TRAJ17)
CAEAAGSKLTF

SEQ ID NO: 80844 - protein, 15 aa, Homo sapiens
  CDR3 for beta chain variable domain of TCR clone 40422 (TRBV12-4, TRBJ2-7)
CASSLGSGGPYEQYF

SEQ ID NO: 80845 - protein, 13 aa, Homo sapiens
  CDR3 for alpha chain variable domain of TCR clone 40423 (TRAV26-2, TRAJ43)
CILRAVNKNDMRF

SEQ ID NO: 80846 - protein, 15 aa, Homo sapiens
  CDR3 for beta chain variable domain of TCR clone 40423 (TRBV7-2, TRBJ2-1)
CASTHGTGIYNEQFF

SEQ ID NO: 80847 - protein, 15 aa, Homo sapiens
  CDR3 for alpha chain variable domain of TCR clone 40424 (TRAV3, TRAJ22)
CAVRDRGDSARQLTF

SEQ ID NO: 80848 - protein, 16 aa, Homo sapiens
  CDR3 for beta chain variable domain of TCR clone 40424 (TRBV5-4, TRBJ2-3)
CASQQPGAGGADTQYF

SEQ ID NO: 80849 - protein, 18 aa, Homo sapiens
  CDR3 for alpha chain variable domain of TCR clone 40425 (TRAV21, TRAJ52)
CAVRPSPAGGTSYGKLTI

SEQ ID NO: 80850 - protein, 17 aa, Homo sapiens
  CDR3 for beta chain variable domain of TCR clone 40425 (TRBV13, TRBJ2-3)
CASSLSRVAGGRNTQYF

SEQ ID NO: 80851 - protein, 16 aa, Homo sapiens
  CDR3 for alpha chain variable domain of TCR clone 40426 (TRAV16, TRAJ4)
CALSRMFSGGYNKLIF

SEQ ID NO: 80852 - protein, 14 aa, Homo sapiens
  CDR3 for beta chain variable domain of TCR clone 40426 (TRBV12-5, TRBJ2-5)
CASGSRTHQETQYF

SEQ ID NO: 80853 - protein, 14 aa, Homo sapiens
  CDR3 for alpha chain variable domain of TCR clone 40427 (TRAV8-2, TRAJ4)
CVVSPSGGYNKLIF

SEQ ID NO: 80854 - protein, 14 aa, Homo sapiens
  CDR3 for beta chain variable domain of TCR clone 40427 (TRBV19, TRBJ2-1)
CASPTFVLSGEQFF

SEQ ID NO: 80855 - protein, 11 aa, Homo sapiens
  CDR3 for alpha chain variable domain of TCR clone 40428 (TRAV21, TRAJ34)
CAHYNTDKLIF

SEQ ID NO: 80856 - protein, 13 aa, Homo sapiens
  CDR3 for beta chain variable domain of TCR clone 40428 (TRBV7-6, TRBJ1-2)
CASSLVADYGHTF

SEQ ID NO: 80857 - protein, 15 aa, Homo sapiens
  CDR3 for alpha chain variable domain of TCR clone 40429 (TRAV6, TRAJ13)
CALGGDSGGYQKVTF

SEQ ID NO: 80858 - protein, 16 aa, Homo sapiens
  CDR3 for beta chain variable domain of TCR clone 40429 (TRBV9, TRBJ2-2)
CASSAMGKGNTGELFF

SEQ ID NO: 80859 - protein, 14 aa, Homo sapiens
  CDR3 for alpha chain variable domain of TCR clone 40430 (TRAV26-1, TRAJ26)
CIVRATFLGQHFVF

SEQ ID NO: 80860 - protein, 16 aa, Homo sapiens
  CDR3 for beta chain variable domain of TCR clone 40430 (TRBV12-4, TRBJ2-7)
CASRSTGTGPSYEQYF

SEQ ID NO: 80861 - protein, 16 aa, Homo sapiens
  CDR3 for alpha chain variable domain of TCR clone 40431 (TRAV30, TRAJ24)
CGTEIVDAGSWGKFQF

SEQ ID NO: 80862 - protein, 12 aa, Homo sapiens
  CDR3 for beta chain variable domain of TCR clone 40431 (TRBV11-2, TRBJ2-1)
CASSPGNNEQFF

SEQ ID NO: 80863 - protein, 14 aa, Homo sapiens
  CDR3 for alpha chain variable domain of TCR clone 40432 (TRAV26-1, TRAJ45)
CIEVTGGGADGLTF

SEQ ID NO: 80864 - protein, 13 aa, Homo sapiens
  CDR3 for beta chain variable domain of TCR clone 40432 (TRBV7-3, TRBJ1-1)
CASSQDWGAEAFF

SEQ ID NO: 80865 - protein, 14 aa, Homo sapiens
  CDR3 for alpha chain variable domain of TCR clone 40433 (TRAV6, TRAJ37)
CALGPQGNTGKLIF

SEQ ID NO: 80866 - protein, 15 aa, Homo sapiens
  CDR3 for beta chain variable domain of TCR clone 40433 (TRBV2, TRBJ2-1)
CASSEEREGDNEQFF

SEQ ID NO: 80867 - protein, 15 aa, Homo sapiens
  CDR3 for alpha chain variable domain of TCR clone 40434 (TRAV26-2, TRAJ28)
CVLVESGAGSYQLTF

SEQ ID NO: 80868 - protein, 16 aa, Homo sapiens
  CDR3 for beta chain variable domain of TCR clone 40434 (TRBV4-2, TRBJ1-2)
CASSQEIGGASYGYTF

SEQ ID NO: 80869 - protein, 11 aa, Homo sapiens
  CDR3 for alpha chain variable domain of TCR clone 40435 (TRAV2, TRAJ21)
CAVFNLNKFYF

SEQ ID NO: 80870 - protein, 14 aa, Homo sapiens
  CDR3 for beta chain variable domain of TCR clone 40435 (TRBV15, TRBJ2-3)
CATRSGTSTDTQYL

SEQ ID NO: 80871 - protein, 12 aa, Homo sapiens
  CDR3 for alpha chain variable domain of TCR clone 40436 (TRAV12-3, TRAJ17)
CAMTLTGSKLTF

SEQ ID NO: 80872 - protein, 15 aa, Homo sapiens
  CDR3 for beta chain variable domain of TCR clone 40436 (TRBV20-1, TRBJ2-7)
CSARDRVPGMDEQYF

SEQ ID NO: 80873 - protein, 14 aa, Homo sapiens
  CDR3 for alpha chain variable domain of TCR clone 40437 (TRAV3, TRAJ9)
CAVRLNTGGFKTNF

SEQ ID NO: 80874 - protein, 15 aa, Homo sapiens
  CDR3 for beta chain variable domain of TCR clone 40437 (TRBV7-2, TRBJ2-1)
CASSLASGRVNEQFF

SEQ ID NO: 80875 - protein, 15 aa, Homo sapiens
  CDR3 for alpha chain variable domain of TCR clone 40438 (TRAV3, TRAJ22)
CAVGDRGGSARQLTF

SEQ ID NO: 80876 - protein, 14 aa, Homo sapiens
  CDR3 for beta chain variable domain of TCR clone 40438 (TRBV20-1, TRBJ1-1)
CSAQTRIGGTEAFF

SEQ ID NO: 80877 - protein, 11 aa, Homo sapiens
  CDR3 for alpha chain variable domain of TCR clone 40439 (TRAV23/DV6, TRAJ48)
CAPRWGENLTF

SEQ ID NO: 80878 - protein, 13 aa, Homo sapiens
  CDR3 for beta chain variable domain of TCR clone 40439 (TRBV12-4, TRBJ2-5)
CASSPGTEETQYF

SEQ ID NO: 80879 - protein, 12 aa, Homo sapiens
  CDR3 for alpha chain variable domain of TCR clone 40440 (TRAV3, TRAJ20)
CAVRDGDYKLSF

SEQ ID NO: 80880 - protein, 12 aa, Homo sapiens
  CDR3 for beta chain variable domain of TCR clone 40440 (TRBV7-8, TRBJ2-7)
CASSLGDREQYF

SEQ ID NO: 80881 - protein, 14 aa, Homo sapiens
  CDR3 for alpha chain variable domain of TCR clone 40441 (TRAV23/DV6, TRAJ37)
CAASTSSNTGELIF

SEQ ID NO: 80882 - protein, 12 aa, Homo sapiens
  CDR3 for beta chain variable domain of TCR clone 40441 (TRBV27, TRBJ2-2)
CASKLFTGELFF

SEQ ID NO: 80883 - protein, 14 aa, Homo sapiens
  CDR3 for alpha chain variable domain of TCR clone 40442 (TRAV29/DV5, TRAJ36)
CAARRKTGANNLFF

SEQ ID NO: 80884 - protein, 14 aa, Homo sapiens
  CDR3 for beta chain variable domain of TCR clone 40442 (TRBV12-5, TRBJ2-5)
CASGSRTHQEAQYF

SEQ ID NO: 80885 - protein, 11 aa, Homo sapiens
  CDR3 for alpha chain variable domain of TCR clone 40443 (TRAV2, TRAJ13)
CASGGYQKVTF

SEQ ID NO: 80886 - protein, 15 aa, Homo sapiens
  CDR3 for beta chain variable domain of TCR clone 40443 (TRBV10-3, TRBJ2-1)
CAISGVGDGGGEQFF

SEQ ID NO: 80887 - protein, 16 aa, Homo sapiens
  CDR3 for alpha chain variable domain of TCR clone 40444 (TRAV3, TRAJ18)
CAVRDGRGSALGRLYF

SEQ ID NO: 80888 - protein, 15 aa, Homo sapiens
  CDR3 for beta chain variable domain of TCR clone 40444 (TRBV7-9, TRBJ1-6)
CASSSPGRGNSPLHF

SEQ ID NO: 80889 - protein, 13 aa, Homo sapiens
  CDR3 for alpha chain variable domain of TCR clone 40445 (TRAV12-3, TRAJ7)
CAMSASGNNRLAF

SEQ ID NO: 80890 - protein, 16 aa, Homo sapiens
  CDR3 for beta chain variable domain of TCR clone 40445 (TRBV7-3, TRBJ2-2)
CASSLKRGTLSGELFF

SEQ ID NO: 80891 - protein, 14 aa, Homo sapiens
  CDR3 for alpha chain variable domain of TCR clone 40446 (TRAV23/DV6, TRAJ57)
CAANNQGGSEKLVF

SEQ ID NO: 80892 - protein, 13 aa, Homo sapiens
  CDR3 for beta chain variable domain of TCR clone 40446 (TRBV11-2, TRBJ2-7)
CASSSYPSYEQYF

SEQ ID NO: 80893 - protein, 16 aa, Homo sapiens
  CDR3 for alpha chain variable domain of TCR clone 40447 (TRAV12-3, TRAJ53)
CAMSPGGGGSNYKLTF

SEQ ID NO: 80894 - protein, 14 aa, Homo sapiens
  CDR3 for beta chain variable domain of TCR clone 40447 (TRBV4-2, TRBJ2-1)
CASGLDRAYNEQFF

SEQ ID NO: 80895 - protein, 16 aa, Homo sapiens
  CDR3 for alpha chain variable domain of TCR clone 40448 (TRAV3, TRAJ18)
CAVRDGRGSTLGRLYF

SEQ ID NO: 80896 - protein, 15 aa, Homo sapiens
  CDR3 for beta chain variable domain of TCR clone 40448 (TRBV7-9, TRBJ1-6)
CASSPPGRGNSPLHF

SEQ ID NO: 80897 - protein, 11 aa, Homo sapiens
  CDR3 for alpha chain variable domain of TCR clone 40449 (TRAV3, TRAJ21)
CAVGNFNNFYF

SEQ ID NO: 80898 - protein, 15 aa, Homo sapiens
  CDR3 for beta chain variable domain of TCR clone 40449 (TRBV5-1, TRBJ2-1)
CASSLVANSYNEQFF

SEQ ID NO: 80899 - protein, 12 aa, Homo sapiens
  CDR3 for alpha chain variable domain of TCR clone 40450 (TRAV21, TRAJ13)
PGPSGGYQKVTF

SEQ ID NO: 80900 - protein, 15 aa, Homo sapiens
  CDR3 for beta chain variable domain of TCR clone 40450 (TRBV7-9, TRBJ1-6)
CASSSPGRGNSPLHL

SEQ ID NO: 80901 - protein, 16 aa, Homo sapiens
  CDR3 for alpha chain variable domain of TCR clone 40451 (TRAV3, TRAJ37)
CAVRGKGSGNTGKLIF

SEQ ID NO: 80902 - protein, 17 aa, Homo sapiens
  CDR3 for beta chain variable domain of TCR clone 40451 (TRBV7-8, TRBJ2-6)
CASSAGTGGAGANVLTF

SEQ ID NO: 80903 - protein, 16 aa, Homo sapiens
  CDR3 for alpha chain variable domain of TCR clone 40452 (TRAV3, TRAJ18)
CAGRDGRGSTLGRLYF

SEQ ID NO: 80904 - protein, 15 aa, Homo sapiens
  CDR3 for beta chain variable domain of TCR clone 40452 (TRBV7-9, TRBJ1-6)
CASSSPGRGNSPLHF

SEQ ID NO: 80905 - protein, 16 aa, Homo sapiens
  CDR3 for alpha chain variable domain of TCR clone 40453 (TRAV3, TRAJ10)
CAVRDMRAGGGNKLTF

SEQ ID NO: 80906 - protein, 15 aa, Homo sapiens
  CDR3 for beta chain variable domain of TCR clone 40453 (TRBV7-2, TRBJ1-2)
CASSPRAGWNYGYTF

SEQ ID NO: 80907 - protein, 17 aa, Homo sapiens
  CDR3 for alpha chain variable domain of TCR clone 40454 (TRAV29/DV5, TRAJ52)
CAASVNAGGTSYGKLTF

SEQ ID NO: 80908 - protein, 14 aa, Homo sapiens
  CDR3 for beta chain variable domain of TCR clone 40454 (TRBV19, TRBJ2-1)
CASSSGRDYNEQFF

SEQ ID NO: 80909 - protein, 12 aa, Homo sapiens
  CDR3 for alpha chain variable domain of TCR clone 40455 (TRAV17, TRAJ20)
CATALNDYELSF

SEQ ID NO: 80910 - protein, 12 aa, Homo sapiens
  CDR3 for beta chain variable domain of TCR clone 40455 (TRBV10-3, TRBJ2-7)
CAHGADSGEQYF

SEQ ID NO: 80911 - protein, 13 aa, Homo sapiens
  CDR3 for alpha chain variable domain of TCR clone 40456 (TRAV12-1, TRAJ22)
CVASGGSARQLTF

SEQ ID NO: 80912 - protein, 12 aa, Homo sapiens
  CDR3 for beta chain variable domain of TCR clone 40456 (TRBV29-1, TRBJ2-3)
CSVTGGAGKQYF

SEQ ID NO: 80913 - protein, 14 aa, Homo sapiens
  CDR3 for alpha chain variable domain of TCR clone 40457 (TRAV1-2, TRAJ12)
CAVSGTDSSYRLIF

SEQ ID NO: 80914 - protein, 15 aa, Homo sapiens
  CDR3 for beta chain variable domain of TCR clone 40457 (TRBV2, TRBJ2-4)
CASSGTNLAKNIQYF

SEQ ID NO: 80915 - protein, 17 aa, Homo sapiens
  CDR3 for alpha chain variable domain of TCR clone 40458 (TRAV3, TRAJ6)
CAVRDGPRAGGSYIPTF

SEQ ID NO: 80916 - protein, 14 aa, Homo sapiens
  CDR3 for beta chain variable domain of TCR clone 40458 (TRBV15, TRBJ2-5)
CATSIGGLGETQYF

SEQ ID NO: 80917 - protein, 13 aa, Homo sapiens
  CDR3 for alpha chain variable domain of TCR clone 40459 (TRAV9-2, TRAJ53)
CALSGGSNYKLTF

SEQ ID NO: 80918 - protein, 14 aa, Homo sapiens
  CDR3 for beta chain variable domain of TCR clone 40459 (TRBV7-2, TRBJ2-7)
CASSPKTSFYEQYF

SEQ ID NO: 80919 - protein, 12 aa, Homo sapiens
  CDR3 for alpha chain variable domain of TCR clone 40460 (TRAV3, TRAJ20)
CAVRDPDYKLSF

SEQ ID NO: 80920 - protein, 19 aa, Homo sapiens
  CDR3 for beta chain variable domain of TCR clone 40460 (TRBV25-1, TRBJ2-2)
CAILVYRVDRGRKTGELFF

SEQ ID NO: 80921 - protein, 18 aa, Homo sapiens
  CDR3 for alpha chain variable domain of TCR clone 40461 (TRAV26-1, TRAJ44)
CIVRVAGGGISTASKLTF

SEQ ID NO: 80922 - protein, 16 aa, Homo sapiens
  CDR3 for beta chain variable domain of TCR clone 40461 (TRBV5-1, TRBJ2-2)
CASSLWDTTNTGELFF

SEQ ID NO: 80923 - protein, 15 aa, Homo sapiens
  CDR3 for alpha chain variable domain of TCR clone 40462 (TRAV27, TRAJ53)
CRAINSGGSNYKLKF

SEQ ID NO: 80924 - protein, 14 aa, Homo sapiens
  CDR3 for beta chain variable domain of TCR clone 40462 (TRBV7-3, TRBJ2-1)
CASSLAGGTNEQFF

SEQ ID NO: 80925 - protein, 15 aa, Homo sapiens
  CDR3 for alpha chain variable domain of TCR clone 40463 (TRAV25, TRAJ52)
CAGTSSGTSYGKLTF

SEQ ID NO: 80926 - protein, 16 aa, Homo sapiens
  CDR3 for beta chain variable domain of TCR clone 40463 (TRBV15, TRBJ1-2)
CATSRGPRTGGGGYTF

SEQ ID NO: 80927 - protein, 12 aa, Homo sapiens
  CDR3 for alpha chain variable domain of TCR clone 40464 (TRAV27, TRAJ42)
CAGGGSQGNLIF

SEQ ID NO: 80928 - protein, 13 aa, Homo sapiens
  CDR3 for beta chain variable domain of TCR clone 40464 (TRBV19, TRBJ2-7)
CASSIRSSYEQYS

SEQ ID NO: 80929 - protein, 14 aa, Homo sapiens
  CDR3 for alpha chain variable domain of TCR clone 40465 (TRAV2, TRAJ37)
CAVDFTSNTGKLNF

SEQ ID NO: 80930 - protein, 15 aa, Homo sapiens
  CDR3 for beta chain variable domain of TCR clone 40465 (TRBV20-1, TRBJ1-1)
CSASRGVTGNTEAFF

SEQ ID NO: 80931 - protein, 12 aa, Homo sapiens
  CDR3 for alpha chain variable domain of TCR clone 40466 (TRAV17, TRAJ20)
CATQSNDYRLSF

SEQ ID NO: 80932 - protein, 13 aa, Homo sapiens
  CDR3 for beta chain variable domain of TCR clone 40466 (TRBV10-3, TRBJ1-1)
CAIIPEGGTEAFF

SEQ ID NO: 80933 - protein, 14 aa, Homo sapiens
  CDR3 for alpha chain variable domain of TCR clone 40467 (TRAV30, TRAJ33)
CGTVAPRSNYQLIW

SEQ ID NO: 80934 - protein, 19 aa, Homo sapiens
  CDR3 for beta chain variable domain of TCR clone 40467 (TRBV28, TRBJ2-7)
CASSYSGTSRLGWVYEQYF

SEQ ID NO: 80935 - protein, 12 aa, Homo sapiens
  CDR3 for alpha chain variable domain of TCR clone 40468 (TRAV21, TRAJ23)
CAVGPQGGKLIF

SEQ ID NO: 80936 - protein, 13 aa, Homo sapiens
  CDR3 for beta chain variable domain of TCR clone 40468 (TRBV20-1, TRBJ2-7)
CSARAGAGYEQYF

SEQ ID NO: 80937 - protein, 14 aa, Homo sapiens
  CDR3 for alpha chain variable domain of TCR clone 40469 (TRAV26-1, TRAJ22)
CIVRVYGSARQLTF

SEQ ID NO: 80938 - protein, 16 aa, Homo sapiens
  CDR3 for beta chain variable domain of TCR clone 40469 (TRBV7-3, TRBJ2-2)
GGTQPCIQWNTGELFF

SEQ ID NO: 80939 - protein, 18 aa, Homo sapiens
  CDR3 for alpha chain variable domain of TCR clone 40470 (TRAV29/DV5, TRAJ52)
RAAGFRGAGGTSYGKLTF

SEQ ID NO: 80940 - protein, 16 aa, Homo sapiens
  CDR3 for beta chain variable domain of TCR clone 40470 (TRBV7-3, TRBJ2-2)
CASSLKRGTLSGELFF

SEQ ID NO: 80941 - protein, 15 aa, Homo sapiens
  CDR3 for alpha chain variable domain of TCR clone 40471 (TRAV12-2, TRAJ9)
CAVSNERTGGFKTIF

SEQ ID NO: 80942 - protein, 14 aa, Homo sapiens
  CDR3 for beta chain variable domain of TCR clone 40471 (TRBV4-1, TRBJ1-4)
CASSQERKNEKLFF

SEQ ID NO: 80943 - protein, 13 aa, Homo sapiens
  CDR3 for alpha chain variable domain of TCR clone 40472 (TRAV22, TRAJ26)
FAVEHNYGQNFVF

SEQ ID NO: 80944 - protein, 16 aa, Homo sapiens
  CDR3 for beta chain variable domain of TCR clone 40472 (TRBV7-2, TRBJ2-6)
CASSERRASGANVLTF

SEQ ID NO: 80945 - protein, 14 aa, Homo sapiens
  CDR3 for alpha chain variable domain of TCR clone 40473 (TRAV35, TRAJ22)
CAGLRPGSARQLTF

SEQ ID NO: 80946 - protein, 14 aa, Homo sapiens
  CDR3 for beta chain variable domain of TCR clone 40473 (TRBV12-5, TRBJ2-5)
CASGSRTHQETQYF

SEQ ID NO: 80947 - protein, 16 aa, Homo sapiens
  CDR3 for alpha chain variable domain of TCR clone 40474 (TRAV3, TRAJ21)
CAVRDIERGNFNKFYF

SEQ ID NO: 80948 - protein, 14 aa, Homo sapiens
  CDR3 for beta chain variable domain of TCR clone 40474 (TRBV7-2, TRBJ2-7)
CASRSQGAAYEQYF

SEQ ID NO: 80949 - protein, 14 aa, Homo sapiens
  CDR3 for alpha chain variable domain of TCR clone 40475 (TRAV21, TRAJ15)
CAVSLNQAGTALLF

SEQ ID NO: 80950 - protein, 11 aa, Homo sapiens
  CDR3 for beta chain variable domain of TCR clone 40475 (TRBV20-1, TRBJ2-7)
CSARTSYEQYF

SEQ ID NO: 80951 - protein, 12 aa, Homo sapiens
  CDR3 for alpha chain variable domain of TCR clone 40476 (TRAV1-1, TRAJ8)
CAGGTGFQKLVF

SEQ ID NO: 80952 - protein, 15 aa, Homo sapiens
  CDR3 for beta chain variable domain of TCR clone 40476 (TRBV7-9, TRBJ1-4)
RASSRTGGFNEKLFF

SEQ ID NO: 80953 - protein, 11 aa, Homo sapiens
  CDR3 for alpha chain variable domain of TCR clone 40477 (TRAV13-2, TRAJ23)
CAESPRGKLTF

SEQ ID NO: 80954 - protein, 15 aa, Homo sapiens
  CDR3 for beta chain variable domain of TCR clone 40477 (TRBV28, TRBJ2-1)
CASSGLAEVDNEQFF

SEQ ID NO: 80955 - protein, 13 aa, Homo sapiens
  CDR3 for alpha chain variable domain of TCR clone 40478 (TRAV41, TRAJ48)
SVPVNFGNEKLTF

SEQ ID NO: 80956 - protein, 13 aa, Homo sapiens
  CDR3 for beta chain variable domain of TCR clone 40478 (TRBV7-2, TRBJ1-6)
CASSLVGSSPLHF

SEQ ID NO: 80957 - protein, 14 aa, Homo sapiens
  CDR3 for alpha chain variable domain of TCR clone 40479 (TRAV12-3, TRAJ39)
SATYLSNAGNMLTF

SEQ ID NO: 80958 - protein, 13 aa, Homo sapiens
  CDR3 for beta chain variable domain of TCR clone 40479 (TRBV28, TRBJ1-2)
CASSPGSRSGYTF

SEQ ID NO: 80959 - protein, 14 aa, Homo sapiens
  CDR3 for alpha chain variable domain of TCR clone 40480 (TRAV12-2, TRAJ17)
CAVNIKAAGNKLTF

SEQ ID NO: 80960 - protein, 16 aa, Homo sapiens
  CDR3 for beta chain variable domain of TCR clone 40480 (TRBV20-1, TRBJ2-6)
CSASPQGYDGANVLTF

SEQ ID NO: 80961 - protein, 16 aa, Homo sapiens
  CDR3 for alpha chain variable domain of TCR clone 40481 (TRAV20, TRAJ53)
CAVRRGGGGSNYKLTF

SEQ ID NO: 80962 - protein, 12 aa, Homo sapiens
  CDR3 for beta chain variable domain of TCR clone 40481 (TRBV29-1, TRBJ2-3)
CSVVLGADTQYF

SEQ ID NO: 80963 - protein, 15 aa, Homo sapiens
  CDR3 for alpha chain variable domain of TCR clone 40482 (TRAV12-3, TRAJ27)
CAMRADNTNAGKSTF

SEQ ID NO: 80964 - protein, 13 aa, Homo sapiens
  CDR3 for beta chain variable domain of TCR clone 40482 (TRBV11-2, TRBJ2-5)
CASSRGPSETQYF

SEQ ID NO: 80965 - protein, 16 aa, Homo sapiens
  CDR3 for alpha chain variable domain of TCR clone 40483 (TRAV12-3, TRAJ50)
CAMRDPMRTSYDKVIF

SEQ ID NO: 80966 - protein, 13 aa, Homo sapiens
  CDR3 for beta chain variable domain of TCR clone 40483 (TRBV4-1, TRBJ2-3)
CASSLDFTDTQYF

SEQ ID NO: 80967 - protein, 16 aa, Homo sapiens
  CDR3 for alpha chain variable domain of TCR clone 40484 (TRAV12-3, TRAJ53)
CAMSPGSGGSNYKLTF

SEQ ID NO: 80968 - protein, 13 aa, Homo sapiens
  CDR3 for beta chain variable domain of TCR clone 40484 (TRBV4-1, TRBJ2-2)
CASSQENTGELFF

SEQ ID NO: 80969 - protein, 13 aa, Homo sapiens
  CDR3 for alpha chain variable domain of TCR clone 40485 (TRAV21, TRAJ27)
CAARPGMQANQPL

SEQ ID NO: 80970 - protein, 14 aa, Homo sapiens
  CDR3 for beta chain variable domain of TCR clone 40485 (TRBV7-6, TRBJ2-3)
CASSLGTVTDTQYF

SEQ ID NO: 80971 - protein, 13 aa, Homo sapiens
  CDR3 for alpha chain variable domain of TCR clone 40486 (TRAV20, TRAJ37)
SAGCSSNTGKLIF

SEQ ID NO: 80972 - protein, 21 aa, Homo sapiens
  CDR3 for beta chain variable domain of TCR clone 40486 (TRBV4-2, TRBJ2-3)
PCSQKTRPCISVPAAPDTQYF

SEQ ID NO: 80973 - protein, 18 aa, Homo sapiens
  CDR3 for alpha chain variable domain of TCR clone 40487 (TRAV21, TRAJ52)
CAVRPSPAGGTSYGKLTF

SEQ ID NO: 80974 - protein, 14 aa, Homo sapiens
  CDR3 for beta chain variable domain of TCR clone 40487 (TRBV2, TRBJ2-7)
CASSLTSGGYEQYF

SEQ ID NO: 80975 - protein, 16 aa, Homo sapiens
  CDR3 for alpha chain variable domain of TCR clone 40488 (TRAV20, TRAJ53)
CAVRRGSGGSNYKLTF

SEQ ID NO: 80976 - protein, 12 aa, Homo sapiens
  CDR3 for beta chain variable domain of TCR clone 40488 (TRBV29-1, TRBJ2-3)
CSVVSGADTQYF

SEQ ID NO: 80977 - protein, 13 aa, Homo sapiens
  CDR3 for alpha chain variable domain of TCR clone 40489 (TRAV3, TRAJ15)
CAVRDQAGNALIF

SEQ ID NO: 80978 - protein, 15 aa, Homo sapiens
  CDR3 for beta chain variable domain of TCR clone 40489 (TRBV11-1, TRBJ2-7)
CASSLNYGASYEQYF

SEQ ID NO: 80979 - protein, 14 aa, Homo sapiens
  CDR3 for alpha chain variable domain of TCR clone 40490 (TRAV9-2, TRAJ24)
CALNPRGSWGKLQF

SEQ ID NO: 80980 - protein, 15 aa, Homo sapiens
  CDR3 for beta chain variable domain of TCR clone 40490 (TRBV7-2, TRBJ2-3)
CASSSTGLETDTQYL

SEQ ID NO: 80981 - protein, 12 aa, Homo sapiens
  CDR3 for alpha chain variable domain of TCR clone 40491 (TRAV13-2, TRAJ23)
CAERHRGGKLIF

SEQ ID NO: 80982 - protein, 13 aa, Homo sapiens
  CDR3 for beta chain variable domain of TCR clone 40491 (TRBV24-1, TRBJ2-3)
CATSTGGTDTQYF

SEQ ID NO: 80983 - protein, 14 aa, Homo sapiens
  CDR3 for alpha chain variable domain of TCR clone 40492 (TRAV17, TRAJ12)
CATDEKDSRYKLIF

SEQ ID NO: 80984 - protein, 16 aa, Homo sapiens
  CDR3 for beta chain variable domain of TCR clone 40492 (TRBV11-2, TRBJ2-1)
CASSPRLAGVYNEQFF

SEQ ID NO: 80985 - protein, 14 aa, Homo sapiens
  CDR3 for alpha chain variable domain of TCR clone 40493 (TRAV12-2, TRAJ40)
CAVKIPSGTYKYIF

SEQ ID NO: 80986 - protein, 13 aa, Homo sapiens
  CDR3 for beta chain variable domain of TCR clone 40493 (TRBV12-5, TRBJ2-3)
CASGDRQSDTQYF

SEQ ID NO: 80987 - protein, 12 aa, Homo sapiens
  CDR3 for alpha chain variable domain of TCR clone 40494 (TRAV30, TRAJ43)
CGTGERGNDMRF

SEQ ID NO: 80988 - protein, 13 aa, Homo sapiens
  CDR3 for beta chain variable domain of TCR clone 40494 (TRBV27, TRBJ2-7)
CASSFSQGYEQYF

SEQ ID NO: 80989 - protein, 14 aa, Homo sapiens
  CDR3 for alpha chain variable domain of TCR clone 40495 (TRAV14/DV4, TRAJ54)
CAMREAPGAQKLVV

SEQ ID NO: 80990 - protein, 15 aa, Homo sapiens
  CDR3 for beta chain variable domain of TCR clone 40495 (TRBV5-1, TRBJ2-7)
CASSLNGGPAREQYF

SEQ ID NO: 80991 - protein, 22 aa, Homo sapiens
  CDR3 for alpha chain variable domain of TCR clone 40496 (TRAV21, )
CAVRQDAGNNHIQNPDPAVYQL

SEQ ID NO: 80992 - protein, 16 aa, Homo sapiens
  CDR3 for beta chain variable domain of TCR clone 40496 (TRBV4-2, TRBJ1-1)
CASRTLDGGGDTEAFF

SEQ ID NO: 80993 - protein, 13 aa, Homo sapiens
  CDR3 for alpha chain variable domain of TCR clone 40497 (TRAV21, TRAJ27)
CAARPGNAGKSSF

SEQ ID NO: 80994 - protein, 14 aa, Homo sapiens
  CDR3 for beta chain variable domain of TCR clone 40497 (TRBV7-6, TRBJ2-3)
CASSLGTVTDTQYF

SEQ ID NO: 80995 - protein, 18 aa, Homo sapiens
  CDR3 for alpha chain variable domain of TCR clone 40498 (TRAV21, TRAJ52)
CAVRPSPAGGTSYGMLTF

SEQ ID NO: 80996 - protein, 17 aa, Homo sapiens
  CDR3 for beta chain variable domain of TCR clone 40498 (TRBV13, TRBJ2-3)
CASSLSRVAGGRNTQYF

SEQ ID NO: 80997 - protein, 13 aa, Homo sapiens
  CDR3 for alpha chain variable domain of TCR clone 40499 (TRAV8-3, TRAJ28)
CAVGAVGSYQLTF

SEQ ID NO: 80998 - protein, 15 aa, Homo sapiens
  CDR3 for beta chain variable domain of TCR clone 40499 (TRBV7-9, TRBJ1-5)
CASSQCHQPNQPQHF

SEQ ID NO: 80999 - protein, 15 aa, Homo sapiens
  CDR3 for alpha chain variable domain of TCR clone 40500 (TRAV26-1, TRAJ40)
CIGRYATSGTYKYIF

SEQ ID NO: 81000 - protein, 11 aa, Homo sapiens
  CDR3 for beta chain variable domain of TCR clone 40500 (TRBV7-9, TRBJ2-1)
CASSSQNEQFF

SEQ ID NO: 81001 - protein, 15 aa, Homo sapiens
  CDR3 for alpha chain variable domain of TCR clone 40501 (TRAV17, TRAJ52)
CATEAGGTSYGKLTF

SEQ ID NO: 81002 - protein, 14 aa, Homo sapiens
  CDR3 for beta chain variable domain of TCR clone 40501 (TRBV28, TRBJ1-5)
RASSLGVLVKPQHF

SEQ ID NO: 81003 - protein, 17 aa, Homo sapiens
  CDR3 for alpha chain variable domain of TCR clone 40502 (TRAV29/DV5, TRAJ52)
CAASSGAGGTSYGKLTF

SEQ ID NO: 81004 - protein, 15 aa, Homo sapiens
  CDR3 for beta chain variable domain of TCR clone 40502 (TRBV2, TRBJ2-1)
CASSELAGSYNEQFF

SEQ ID NO: 81005 - protein, 13 aa, Homo sapiens
  CDR3 for alpha chain variable domain of TCR clone 40503 (TRAV29/DV5, TRAJ36)
CAASAPGANNLFF

SEQ ID NO: 81006 - protein, 14 aa, Homo sapiens
  CDR3 for beta chain variable domain of TCR clone 40503 (TRBV5-4, TRBJ1-4)
CASSFSGGAEKLFF

SEQ ID NO: 81007 - protein, 13 aa, Homo sapiens
  CDR3 for alpha chain variable domain of TCR clone 40504 (TRAV38-1, TRAJ42)
CARWGGSQGNLIF

SEQ ID NO: 81008 - protein, 15 aa, Homo sapiens
  CDR3 for beta chain variable domain of TCR clone 40504 (TRBV19, TRBJ1-5)
CASSIVWADNQPQHF

SEQ ID NO: 81009 - protein, 12 aa, Homo sapiens
  CDR3 for alpha chain variable domain of TCR clone 40505 (TRAV3, TRAJ20)
CAVRDPDYKLSF

SEQ ID NO: 81010 - protein, 14 aa, Homo sapiens
  CDR3 for beta chain variable domain of TCR clone 40505 (TRBV19, TRBJ2-2)
CASSTLHRSGELFF

SEQ ID NO: 81011 - protein, 16 aa, Homo sapiens
  CDR3 for alpha chain variable domain of TCR clone 40506 (TRAV26-2, TRAJ57)
CILRDVGAGGSEKLVF

SEQ ID NO: 81012 - protein, 13 aa, Homo sapiens
  CDR3 for beta chain variable domain of TCR clone 40506 (TRBV18, TRBJ2-3)
CASSPGVTDTQYF

SEQ ID NO: 81013 - protein, 13 aa, Homo sapiens
  CDR3 for alpha chain variable domain of TCR clone 40507 (TRAV8-3, TRAJ28)
CAVGAVGSYQLTF

SEQ ID NO: 81014 - protein, 15 aa, Homo sapiens
  CDR3 for beta chain variable domain of TCR clone 40507 (TRBV5-1, TRBJ2-1)
CASKGLAGVYNEQFF

SEQ ID NO: 81015 - protein, 14 aa, Homo sapiens
  CDR3 for alpha chain variable domain of TCR clone 40508 (TRAV1-2, TRAJ16)
CAVNRFSDGQKMLF

SEQ ID NO: 81016 - protein, 12 aa, Homo sapiens
  CDR3 for beta chain variable domain of TCR clone 40508 (TRBV11-2, TRBJ2-2)
CASSLGGGELFF

SEQ ID NO: 81017 - protein, 10 aa, Homo sapiens
  CDR3 for alpha chain variable domain of TCR clone 40509 (TRAV38-2/DV8, TRAJ40)
CASGTYKYIF

SEQ ID NO: 81018 - protein, 14 aa, Homo sapiens
  CDR3 for beta chain variable domain of TCR clone 40509 (TRBV27, TRBJ2-5)
CASSSLKGWETQYF

SEQ ID NO: 81019 - protein, 12 aa, Homo sapiens
  CDR3 for alpha chain variable domain of TCR clone 40510 (TRAV13-2, TRAJ8)
CAPWLGFQKLVF

SEQ ID NO: 81020 - protein, 18 aa, Homo sapiens
  CDR3 for beta chain variable domain of TCR clone 40510 (TRBV11-2, TRBJ2-3)
CASSLGGAARGAPNTQYF

SEQ ID NO: 81021 - protein, 14 aa, Homo sapiens
  CDR3 for alpha chain variable domain of TCR clone 40511 (TRAV20, TRAJ56)
CAVQFGGANSKLTF

SEQ ID NO: 81022 - protein, 16 aa, Homo sapiens
  CDR3 for beta chain variable domain of TCR clone 40511 (TRBV13, TRBJ2-2)
CASSLGRGYGTGELFF

SEQ ID NO: 81023 - protein, 20 aa, Homo sapiens
  CDR3 for alpha chain variable domain of TCR clone 40512 (TRAV12-1, TRAJ42)
SSVIQPPTSVKGGSQGNLIF

SEQ ID NO: 81024 - protein, 18 aa, Homo sapiens
  CDR3 for beta chain variable domain of TCR clone 40512 (TRBV11-2, TRBJ2-3)
CASRLGGASRGAPNTQYF

SEQ ID NO: 81025 - protein, 16 aa, Homo sapiens
  CDR3 for alpha chain variable domain of TCR clone 40513 (TRAV3, TRAJ10)
CAVRDMRAGRGNKLTF

SEQ ID NO: 81026 - protein, 19 aa, Homo sapiens
  CDR3 for beta chain variable domain of TCR clone 40513 (TRBV6-3, TRBJ1-2)
CASSYSKGRTGPPNYGYTF

SEQ ID NO: 81027 - protein, 14 aa, Homo sapiens
  CDR3 for alpha chain variable domain of TCR clone 40514 (TRAV16, TRAJ54)
CALSGVQGAQRLVF

SEQ ID NO: 81028 - protein, 15 aa, Homo sapiens
  CDR3 for beta chain variable domain of TCR clone 40514 (TRBV18, TRBJ2-2)
CASSTSGLHTGELFF

SEQ ID NO: 81029 - protein, 10 aa, Homo sapiens
  CDR3 for alpha chain variable domain of TCR clone 40515 (TRAV13-1, TRAJ5)
CAAGRRALTF

SEQ ID NO: 81030 - protein, 16 aa, Homo sapiens
  CDR3 for beta chain variable domain of TCR clone 40515 (TRBV4-3, TRBJ2-3)
CASSQGGLAGTDTQYF

SEQ ID NO: 81031 - protein, 13 aa, Homo sapiens
  CDR3 for alpha chain variable domain of TCR clone 40516 (TRAV12-2, TRAJ10)
CAVPTGGGNKLTF

SEQ ID NO: 81032 - protein, 11 aa, Homo sapiens
  CDR3 for beta chain variable domain of TCR clone 40516 (TRBV6-1, TRBJ2-1)
CASTSSNEQFF

SEQ ID NO: 81033 - protein, 13 aa, Homo sapiens
  CDR3 for alpha chain variable domain of TCR clone 40517 (TRAV2, TRAJ15)
CAVASQAGTALIF

SEQ ID NO: 81034 - protein, 16 aa, Homo sapiens
  CDR3 for beta chain variable domain of TCR clone 40517 (TRBV18, TRBJ1-5)
CASSPYRVEGNQPQYF

SEQ ID NO: 81035 - protein, 16 aa, Homo sapiens
  CDR3 for alpha chain variable domain of TCR clone 40518 (TRAV3, TRAJ23)
CAVKIGIYNQGGKLIF

SEQ ID NO: 81036 - protein, 17 aa, Homo sapiens
  CDR3 for beta chain variable domain of TCR clone 40518 (TRBV10-3, TRBJ2-6)
CAISESTAPSGANVPTF

SEQ ID NO: 81037 - protein, 12 aa, Homo sapiens
  CDR3 for alpha chain variable domain of TCR clone 40519 (TRAV8-3, TRAJ20)
CAVGANDYKLSF

SEQ ID NO: 81038 - protein, 12 aa, Homo sapiens
  CDR3 for beta chain variable domain of TCR clone 40519 (TRBV11-2, TRBJ2-1)
CASSPGNNEQFF

SEQ ID NO: 81039 - protein, 14 aa, Homo sapiens
  CDR3 for alpha chain variable domain of TCR clone 40520 (TRAV8-2, TRAJ4)
CVVSPSCGYNKLIF

SEQ ID NO: 81040 - protein, 15 aa, Homo sapiens
  CDR3 for beta chain variable domain of TCR clone 40520 (TRBV4-1, TRBJ1-4)
CASSDTGGTNEKLFF

SEQ ID NO: 81041 - protein, 12 aa, Homo sapiens
  CDR3 for alpha chain variable domain of TCR clone 40521 (TRAV3, TRAJ39)
CAVIEWSNMLTF

SEQ ID NO: 81042 - protein, 11 aa, Homo sapiens
  CDR3 for beta chain variable domain of TCR clone 40521 (TRBV12-4, TRBJ2-2)
CASSSAGELFF

SEQ ID NO: 81043 - protein, 15 aa, Homo sapiens
  CDR3 for alpha chain variable domain of TCR clone 40522 (TRAV13-1, TRAJ18)
CAASGGGSTLGRLYF

SEQ ID NO: 81044 - protein, 13 aa, Homo sapiens
  CDR3 for beta chain variable domain of TCR clone 40522 (TRBV18, TRBJ2-1)
CASGLASNNEQFL

SEQ ID NO: 81045 - protein, 14 aa, Homo sapiens
  CDR3 for alpha chain variable domain of TCR clone 40523 (TRAV12-1, TRAJ38)
CGELKAGNNRKLIW

SEQ ID NO: 81046 - protein, 17 aa, Homo sapiens
  CDR3 for beta chain variable domain of TCR clone 40523 (TRBV20-1, TRBJ2-1)
CSASSSGLAGSYNEQFF

SEQ ID NO: 81047 - protein, 15 aa, Homo sapiens
  CDR3 for alpha chain variable domain of TCR clone 40524 (TRAV8-3, TRAJ45)
CASSYSGGGADGLTF

SEQ ID NO: 81048 - protein, 14 aa, Homo sapiens
  CDR3 for beta chain variable domain of TCR clone 40524 (TRBV18, TRBJ2-5)
CASSPGVSQETQYF

SEQ ID NO: 81049 - protein, 14 aa, Homo sapiens
  CDR3 for alpha chain variable domain of TCR clone 40525 (TRAV1-2, TRAJ16)
CAVNRFSDGQKLLF

SEQ ID NO: 81050 - protein, 15 aa, Homo sapiens
  CDR3 for beta chain variable domain of TCR clone 40525 (TRBV7-3, TRBJ2-1)
CASSLDGNSYNEQFF

SEQ ID NO: 81051 - protein, 13 aa, Homo sapiens
  CDR3 for alpha chain variable domain of TCR clone 40526 (TRAV12-1, TRAJ34)
CVVTGYNTDKPIF

SEQ ID NO: 81052 - protein, 13 aa, Homo sapiens
  CDR3 for beta chain variable domain of TCR clone 40526 (TRBV28, TRBJ2-7)
CASKAGGVYEQYF

SEQ ID NO: 81053 - protein, 16 aa, Homo sapiens
  CDR3 for alpha chain variable domain of TCR clone 40527 (TRAV30, TRAJ24)
CGAEIVDADSWGKFQF

SEQ ID NO: 81054 - protein, 15 aa, Homo sapiens
  CDR3 for beta chain variable domain of TCR clone 40527 (TRBV7-9, TRBJ1-4)
CASSARTGGNEKLFF

SEQ ID NO: 81055 - protein, 14 aa, Homo sapiens
  CDR3 for alpha chain variable domain of TCR clone 40528 (TRAV12-3, TRAJ10)
SHLPLTVGGNKLTF

SEQ ID NO: 81056 - protein, 14 aa, Homo sapiens
  CDR3 for beta chain variable domain of TCR clone 40528 (TRBV6-1, TRBJ1-3)
CASVQGGGGNTIYF

SEQ ID NO: 81057 - protein, 13 aa, Homo sapiens
  CDR3 for alpha chain variable domain of TCR clone 40529 (TRAV3, TRAJ21)
CAVREPDFNKFYF

SEQ ID NO: 81058 - protein, 13 aa, Homo sapiens
  CDR3 for beta chain variable domain of TCR clone 40529 (TRBV9, TRBJ2-1)
CASSPSDGNEQFF

SEQ ID NO: 81059 - protein, 14 aa, Homo sapiens
  CDR3 for alpha chain variable domain of TCR clone 40530 (TRAV8-3, TRAJ48)
CCGCGQFGNEKLTF

SEQ ID NO: 81060 - protein, 13 aa, Homo sapiens
  CDR3 for beta chain variable domain of TCR clone 40530 (TRBV12-4, TRBJ1-2)
CASSLRQGKGYTF

SEQ ID NO: 81061 - protein, 14 aa, Homo sapiens
  CDR3 for alpha chain variable domain of TCR clone 40531 (TRAV1-2, TRAJ16)
CAVNRFSDGQKLLF

SEQ ID NO: 81062 - protein, 16 aa, Homo sapiens
  CDR3 for beta chain variable domain of TCR clone 40531 (TRBV20-1, TRBJ1-4)
CSAPGQGLSTNEKLFF

SEQ ID NO: 81063 - protein, 12 aa, Homo sapiens
  CDR3 for alpha chain variable domain of TCR clone 40532 (TRAV12-3, TRAJ21)
CAMFNNFNKFYF

SEQ ID NO: 81064 - protein, 14 aa, Homo sapiens
  CDR3 for beta chain variable domain of TCR clone 40532 (TRBV28, TRBJ2-1)
RASSIQGTVGEQFF

SEQ ID NO: 81065 - protein, 12 aa, Homo sapiens
  CDR3 for alpha chain variable domain of TCR clone 40533 (TRAV12-3, TRAJ20)
CAMVRGDYKLSF

SEQ ID NO: 81066 - protein, 14 aa, Homo sapiens
  CDR3 for beta chain variable domain of TCR clone 40533 (TRBV7-2, TRBJ2-7)
CASSPKTSFYEQYF

SEQ ID NO: 81067 - protein, 16 aa, Homo sapiens
  CDR3 for alpha chain variable domain of TCR clone 40534 (TRAV8-3, TRAJ13)
CAVGAYPSGGYQKVTF

SEQ ID NO: 81068 - protein, 16 aa, Homo sapiens
  CDR3 for beta chain variable domain of TCR clone 40534 (TRBV7-3, TRBJ2-2)
CASSLKRGTLSGELFF

SEQ ID NO: 81069 - protein, 13 aa, Homo sapiens
  CDR3 for alpha chain variable domain of TCR clone 40535 (TRAV36/DV7, TRAJ37)
CAVFSSNTGKLIF

SEQ ID NO: 81070 - protein, 11 aa, Homo sapiens
  CDR3 for beta chain variable domain of TCR clone 40535 (TRBV7-8, TRBJ2-7)
CASSLSLEQYF

SEQ ID NO: 81071 - protein, 14 aa, Homo sapiens
  CDR3 for alpha chain variable domain of TCR clone 40536 (TRAV26-1, TRAJ38)
CIADNAGNNRKLIW

SEQ ID NO: 81072 - protein, 17 aa, Homo sapiens
  CDR3 for beta chain variable domain of TCR clone 40536 (TRBV5-1, TRBJ2-7)
CASSKPEGREASYEQYF

SEQ ID NO: 81073 - protein, 18 aa, Homo sapiens
  CDR3 for alpha chain variable domain of TCR clone 40537 (TRAV3, TRAJ17)
CAVRARRGGRSCRQHANF

SEQ ID NO: 81074 - protein, 14 aa, Homo sapiens
  CDR3 for beta chain variable domain of TCR clone 40537 (TRBV4-1, TRBJ2-2)
CASSQAVNTGELFF

SEQ ID NO: 81075 - protein, 13 aa, Homo sapiens
  CDR3 for alpha chain variable domain of TCR clone 40538 (TRAV17, TRAJ48)
CATPHFGNEKLTF

SEQ ID NO: 81076 - protein, 16 aa, Homo sapiens
  CDR3 for beta chain variable domain of TCR clone 40538 (TRBV4-1, TRBJ2-7)
CASSQGQFLNSYEQYF

SEQ ID NO: 81077 - protein, 21 aa, Homo sapiens
  CDR3 for alpha chain variable domain of TCR clone 40539 (TRAV8-3, TRAJ6)
CVVGGEEATYLHLEEEPALLF

SEQ ID NO: 81078 - protein, 17 aa, Homo sapiens
  CDR3 for beta chain variable domain of TCR clone 40539 (TRBV7-2, TRBJ2-3)
CASSLAGGLAGTAGQYF

SEQ ID NO: 81079 - protein, 16 aa, Homo sapiens
  CDR3 for alpha chain variable domain of TCR clone 40540 (TRAV8-3, TRAJ52)
CAAQPAGGTSYGKLTF

SEQ ID NO: 81080 - protein, 15 aa, Homo sapiens
  CDR3 for beta chain variable domain of TCR clone 40540 (TRBV11-2, TRBJ2-7)
CASSLAGGVATEQYF

SEQ ID NO: 81081 - protein, 15 aa, Homo sapiens
  CDR3 for alpha chain variable domain of TCR clone 40541 (TRAV10, TRAJ6)
CVVRPRTGGSYIPTF

SEQ ID NO: 81082 - protein, 12 aa, Homo sapiens
  CDR3 for beta chain variable domain of TCR clone 40541 (TRBV3-1, TRBJ2-2)
CASSLFPGELFF

SEQ ID NO: 81083 - protein, 16 aa, Homo sapiens
  CDR3 for alpha chain variable domain of TCR clone 40542 (TRAV8-3, TRAJ10)
CAVGPILTGGGNKPTF

SEQ ID NO: 81084 - protein, 16 aa, Homo sapiens
  CDR3 for beta chain variable domain of TCR clone 40542 (TRBV7-2, TRBJ2-5)
CASSSKWLSGQETQYF

SEQ ID NO: 81085 - protein, 13 aa, Homo sapiens
  CDR3 for alpha chain variable domain of TCR clone 40543 (TRAV38-2/DV8, TRAJ53)
CASGGGSSYKLTF

SEQ ID NO: 81086 - protein, 16 aa, Homo sapiens
  CDR3 for beta chain variable domain of TCR clone 40543 (TRBV28, TRBJ1-5)
CASRFRGAVQNQPQHF

SEQ ID NO: 81087 - protein, 16 aa, Homo sapiens
  CDR3 for alpha chain variable domain of TCR clone 40544 (TRAV30, TRAJ24)
CGTEIVDADSWGKFQF

SEQ ID NO: 81088 - protein, 15 aa, Homo sapiens
  CDR3 for beta chain variable domain of TCR clone 40544 (TRBV6-3, TRBJ2-7)
CAGSSPGTVFYEQYF

SEQ ID NO: 81089 - protein, 13 aa, Homo sapiens
  CDR3 for alpha chain variable domain of TCR clone 40545 (TRAV13-1, TRAJ20)
CAARVSNDYKLSF

SEQ ID NO: 81090 - protein, 15 aa, Homo sapiens
  CDR3 for beta chain variable domain of TCR clone 40545 (TRBV7-2, TRBJ2-7)
CASSSVAGQTYEQYF

SEQ ID NO: 81091 - protein, 12 aa, Homo sapiens
  CDR3 for alpha chain variable domain of TCR clone 40546 (TRAV12-3, TRAJ17)
CAMTLTGNKLTF

SEQ ID NO: 81092 - protein, 15 aa, Homo sapiens
  CDR3 for beta chain variable domain of TCR clone 40546 (TRBV20-1, TRBJ2-7)
CTARDRVSGMDEQYF

SEQ ID NO: 81093 - protein, 12 aa, Homo sapiens
  CDR3 for alpha chain variable domain of TCR clone 40547 (TRAV2, TRAJ40)
CCGYLGTYKYIF

SEQ ID NO: 81094 - protein, 14 aa, Homo sapiens
  CDR3 for beta chain variable domain of TCR clone 40547 (TRBV19, TRBJ2-1)
CASPTFVLSGEQFF

SEQ ID NO: 81095 - protein, 14 aa, Homo sapiens
  CDR3 for alpha chain variable domain of TCR clone 40548 (TRAV29/DV5, TRAJ36)
CAARRKTGANNLFF

SEQ ID NO: 81096 - protein, 14 aa, Homo sapiens
  CDR3 for beta chain variable domain of TCR clone 40548 (TRBV4-2, TRBJ2-1)
CASGLDRAYNEQFF

SEQ ID NO: 81097 - protein, 14 aa, Homo sapiens
  CDR3 for alpha chain variable domain of TCR clone 40549 (TRAV1-2, TRAJ16)
CAVNRFSDGQKLLF

SEQ ID NO: 81098 - protein, 15 aa, Homo sapiens
  CDR3 for beta chain variable domain of TCR clone 40549 (TRBV7-9, TRBJ1-6)
CASISPGRGNSPLHF

SEQ ID NO: 81099 - protein, 17 aa, Homo sapiens
  CDR3 for alpha chain variable domain of TCR clone 40550 (TRAV8-6, TRAJ58)
CAVSSWVGETSCSRLTF

SEQ ID NO: 81100 - protein, 14 aa, Homo sapiens
  CDR3 for beta chain variable domain of TCR clone 40550 (TRBV4-2, TRBJ2-1)
CASGLDRAYNEQFF

SEQ ID NO: 81101 - protein, 14 aa, Homo sapiens
  CDR3 for alpha chain variable domain of TCR clone 40551 (TRAV12-3, TRAJ10)
SHLPLTGGGNKLTF

SEQ ID NO: 81102 - protein, 15 aa, Homo sapiens
  CDR3 for beta chain variable domain of TCR clone 40551 (TRBV28, TRBJ2-5)
CASSSGRTIQETQYF

SEQ ID NO: 81103 - protein, 15 aa, Homo sapiens
  CDR3 for alpha chain variable domain of TCR clone 40552 (TRAV21, TRAJ38)
CAVRQDAGNNRKLIW

SEQ ID NO: 81104 - protein, 11 aa, Homo sapiens
  CDR3 for beta chain variable domain of TCR clone 40552 (TRBV12-4, TRBJ2-3)
CASTATDTQYF

SEQ ID NO: 81105 - protein, 14 aa, Homo sapiens
  CDR3 for alpha chain variable domain of TCR clone 40553 (TRAV41, TRAJ40)
CAAGPASGTYKYIF

SEQ ID NO: 81106 - protein, 12 aa, Homo sapiens
  CDR3 for beta chain variable domain of TCR clone 40553 (TRBV3-1, TRBJ2-2)
CASSLFPGELFF

SEQ ID NO: 81107 - protein, 14 aa, Homo sapiens
  CDR3 for alpha chain variable domain of TCR clone 40554 (TRAV1-2, TRAJ8)
RAVREDTGFQKLVF

SEQ ID NO: 81108 - protein, 14 aa, Homo sapiens
  CDR3 for beta chain variable domain of TCR clone 40554 (TRBV12-5, TRBJ2-5)
CASGSRTHQETQYF

SEQ ID NO: 81109 - protein, 12 aa, Homo sapiens
  CDR3 for alpha chain variable domain of TCR clone 40555 (TRAV1-1, TRAJ39)
CAVPVVGNMLTF

SEQ ID NO: 81110 - protein, 14 aa, Homo sapiens
  CDR3 for beta chain variable domain of TCR clone 40555 (TRBV7-2, TRBJ2-7)
CASSPKTSFYEQYF

SEQ ID NO: 81111 - protein, 18 aa, Homo sapiens
  CDR3 for alpha chain variable domain of TCR clone 40556 (TRAV13-1, TRAJ52)
CAAKNPNASSTSYGKLTF

SEQ ID NO: 81112 - protein, 15 aa, Homo sapiens
  CDR3 for beta chain variable domain of TCR clone 40556 (TRBV6-1, TRBJ2-3)
CASSERGGITDTQYF

SEQ ID NO: 81113 - protein, 13 aa, Homo sapiens
  CDR3 for alpha chain variable domain of TCR clone 40557 (TRAV17, TRAJ9)
CATDYTGGVKTIF

SEQ ID NO: 81114 - protein, 14 aa, Homo sapiens
  CDR3 for beta chain variable domain of TCR clone 40557 (TRBV19, TRBJ2-5)
CASSMTGQQETQYF

SEQ ID NO: 81115 - protein, 16 aa, Homo sapiens
  CDR3 for alpha chain variable domain of TCR clone 40558 (TRAV30, TRAJ24)
CGTEIVDADSWGKFQF

SEQ ID NO: 81116 - protein, 16 aa, Homo sapiens
  CDR3 for beta chain variable domain of TCR clone 40558 (TRBV20-1, TRBJ1-1)
CSARAITQGMNTEAFF

SEQ ID NO: 81117 - protein, 11 aa, Homo sapiens
  CDR3 for alpha chain variable domain of TCR clone 40559 (TRAV13-2, TRAJ23)
CRASQGRKLIF

SEQ ID NO: 81118 - protein, 16 aa, Homo sapiens
  CDR3 for beta chain variable domain of TCR clone 40559 (TRBV20-1, TRBJ1-4)
CSAPGQGLLTNEKLFF

SEQ ID NO: 81119 - protein, 17 aa, Homo sapiens
  CDR3 for alpha chain variable domain of TCR clone 40560 (TRAV2, TRAJ22)
ILQVREADAAEQRQLNF

SEQ ID NO: 81120 - protein, 16 aa, Homo sapiens
  CDR3 for beta chain variable domain of TCR clone 40560 (TRBV2, TRBJ2-5)
CASSETQGVGEETQYF

SEQ ID NO: 81121 - protein, 21 aa, Homo sapiens
  CDR3 for alpha chain variable domain of TCR clone 40561 (TRAV1-1, TRAJ6)
CLLLLRCERLERTGGRYIPTF

SEQ ID NO: 81122 - protein, 13 aa, Homo sapiens
  CDR3 for beta chain variable domain of TCR clone 40561 (TRBV10-2, TRBJ2-7)
CASGASGGYEQYF

SEQ ID NO: 81123 - protein, 15 aa, Homo sapiens
  CDR3 for alpha chain variable domain of TCR clone 40562 (TRAV3, TRAJ22)
CAVRDRGGSARQLTF

SEQ ID NO: 81124 - protein, 16 aa, Homo sapiens
  CDR3 for beta chain variable domain of TCR clone 40562 (TRBV5-4, TRBJ2-3)
CASQQPGAGGADTQYV

SEQ ID NO: 81125 - protein, 12 aa, Homo sapiens
  CDR3 for alpha chain variable domain of TCR clone 40563 (TRAV13-2, TRAJ8)
CAPWLGFQKLVF

SEQ ID NO: 81126 - protein, 14 aa, Homo sapiens
  CDR3 for beta chain variable domain of TCR clone 40563 (TRBV5-1, TRBJ2-7)
CASSRGESLYEQYF

SEQ ID NO: 81127 - protein, 11 aa, Homo sapiens
  CDR3 for alpha chain variable domain of TCR clone 40564 (TRAV1-2, TRAJ40)
CAVPGTYKYIF

SEQ ID NO: 81128 - protein, 16 aa, Homo sapiens
  CDR3 for beta chain variable domain of TCR clone 40564 (TRBV29-1, TRBJ2-7)
CSVEVVGNSGSYEQYF

SEQ ID NO: 81129 - protein, 20 aa, Homo sapiens
  CDR3 for alpha chain variable domain of TCR clone 40565 (TRAV26-1, TRAJ42)
CCVLLHRQTYYGGSQGNLIF

SEQ ID NO: 81130 - protein, 16 aa, Homo sapiens
  CDR3 for beta chain variable domain of TCR clone 40565 (TRBV7-3, TRBJ2-2)
CASSLKRGSLSGELFF

SEQ ID NO: 81131 - protein, 14 aa, Homo sapiens
  CDR3 for alpha chain variable domain of TCR clone 40566 (TRAV1-2, TRAJ16)
CAVNRFSYGQKLLF

SEQ ID NO: 81132 - protein, 13 aa, Homo sapiens
  CDR3 for beta chain variable domain of TCR clone 40566 (TRBV7-9, TRBJ1-2)
CASSLKQNYGYTF

SEQ ID NO: 81133 - protein, 11 aa, Homo sapiens
  CDR3 for alpha chain variable domain of TCR clone 40567 (TRAV26-1, TRAJ37)
CIVRVGRKLIF

SEQ ID NO: 81134 - protein, 12 aa, Homo sapiens
  CDR3 for beta chain variable domain of TCR clone 40567 (TRBV11-2, TRBJ2-2)
CASSLGGGELFF

SEQ ID NO: 81135 - protein, 19 aa, Homo sapiens
  CDR3 for alpha chain variable domain of TCR clone 40568 (TRAV1-1, TRAJ8)
CAGGHRLSETCIWNWRPTS

SEQ ID NO: 81136 - protein, 15 aa, Homo sapiens
  CDR3 for beta chain variable domain of TCR clone 40568 (TRBV7-9, TRBJ1-4)
CACSRTGGFNEKLFF

SEQ ID NO: 81137 - protein, 14 aa, Homo sapiens
  CDR3 for alpha chain variable domain of TCR clone 40569 (TRAV13-2, TRAJ57)
CAENFQGGSEKLVF

SEQ ID NO: 81138 - protein, 15 aa, Homo sapiens
  CDR3 for beta chain variable domain of TCR clone 40569 (TRBV19, TRBJ1-1)
CASTSGQIQNTEAFF

SEQ ID NO: 81139 - protein, 13 aa, Homo sapiens
  CDR3 for alpha chain variable domain of TCR clone 40570 (TRAV23/DV6, TRAJ24)
CAASEDSWGKLQV

SEQ ID NO: 81140 - protein, 12 aa, Homo sapiens
  CDR3 for beta chain variable domain of TCR clone 40570 (TRBV5-1, TRBJ2-7)
CASSDSTYEQYF

SEQ ID NO: 81141 - protein, 16 aa, Homo sapiens
  CDR3 for alpha chain variable domain of TCR clone 40571 (TRAV30, TRAJ24)
CGTEIVDADSWGKFQF

SEQ ID NO: 81142 - protein, 18 aa, Homo sapiens
  CDR3 for beta chain variable domain of TCR clone 40571 (TRBV18, TRBJ1-3)
CASSPRGGAGPSGNTIYF

SEQ ID NO: 81143 - protein, 15 aa, Homo sapiens
  CDR3 for alpha chain variable domain of TCR clone 40572 (TRAV13-2, TRAJ45)
CAENNSGGGADGLTF

SEQ ID NO: 81144 - protein, 12 aa, Homo sapiens
  CDR3 for beta chain variable domain of TCR clone 40572 (TRBV11-2, TRBJ2-1)
CASSPGNNEQFF

SEQ ID NO: 81145 - protein, 14 aa, Homo sapiens
  CDR3 for alpha chain variable domain of TCR clone 40573 (TRAV16, TRAJ17)
CALRGRAAGNKLTF

SEQ ID NO: 81146 - protein, 15 aa, Homo sapiens
  CDR3 for beta chain variable domain of TCR clone 40573 (TRBV3-1, TRBJ1-2)
CASSPTRLPEGGYTF

SEQ ID NO: 81147 - protein, 14 aa, Homo sapiens
  CDR3 for alpha chain variable domain of TCR clone 40574 (TRAV12-2, TRAJ17)
CAVLFKAAGNKLTF

SEQ ID NO: 81148 - protein, 17 aa, Homo sapiens
  CDR3 for beta chain variable domain of TCR clone 40574 (TRBV20-1, TRBJ2-2)
CSGSGSGQGGLTGELFF

SEQ ID NO: 81149 - protein, 16 aa, Homo sapiens
  CDR3 for alpha chain variable domain of TCR clone 40575 (TRAV3, TRAJ5)
CALRNLMDTGRRALTF

SEQ ID NO: 81150 - protein, 16 aa, Homo sapiens
  CDR3 for beta chain variable domain of TCR clone 40575 (TRBV4-2, TRBJ2-7)
CASSQEGLANSYEQYF

SEQ ID NO: 81151 - protein, 17 aa, Homo sapiens
  CDR3 for alpha chain variable domain of TCR clone 40576 (TRAV26-1, TRAJ37)
CIVRVITVSSNTGKLIF

SEQ ID NO: 81152 - protein, 15 aa, Homo sapiens
  CDR3 for beta chain variable domain of TCR clone 40576 (TRBV28, TRBJ2-1)
CASSIIAGGRSEQFF

SEQ ID NO: 81153 - protein, 15 aa, Homo sapiens
  CDR3 for alpha chain variable domain of TCR clone 40577 (TRAV8-3, TRAJ45)
CASSYSGGGADGLTF

SEQ ID NO: 81154 - protein, 15 aa, Homo sapiens
  CDR3 for beta chain variable domain of TCR clone 40577 (TRBV19, TRBJ2-1)
CASSTGTSSYNEQFF

SEQ ID NO: 81155 - protein, 12 aa, Homo sapiens
  CDR3 for alpha chain variable domain of TCR clone 40578 (TRAV8-3, TRAJ20)
CGVDFNDHKLSF

SEQ ID NO: 81156 - protein, 13 aa, Homo sapiens
  CDR3 for beta chain variable domain of TCR clone 40578 (TRBV5-7, TRBJ2-3)
CASSLGRTDTQYF

SEQ ID NO: 81157 - protein, 15 aa, Homo sapiens
  CDR3 for alpha chain variable domain of TCR clone 40579 (TRAV23/DV6, TRAJ18)
CAARYRGSPLGRLYF

SEQ ID NO: 81158 - protein, 13 aa, Homo sapiens
  CDR3 for beta chain variable domain of TCR clone 40579 (TRBV7-2, TRBJ2-7)
CASSSPSGSEQYF

SEQ ID NO: 81159 - protein, 15 aa, Homo sapiens
  CDR3 for alpha chain variable domain of TCR clone 40580 (TRAV1-2, TRAJ30)
CAVRPHGNRDDKNIF

SEQ ID NO: 81160 - protein, 13 aa, Homo sapiens
  CDR3 for beta chain variable domain of TCR clone 40580 (TRBV4-1, TRBJ2-7)
CASSQGQAYEQYF

SEQ ID NO: 81161 - protein, 16 aa, Homo sapiens
  CDR3 for alpha chain variable domain of TCR clone 40581 (TRAV12-3, TRAJ53)
CVMSPGSGGSNYKLTF

SEQ ID NO: 81162 - protein, 13 aa, Homo sapiens
  CDR3 for beta chain variable domain of TCR clone 40581 (TRBV10-2, TRBJ2-7)
CASGASGGYEQYF

SEQ ID NO: 81163 - protein, 14 aa, Homo sapiens
  CDR3 for alpha chain variable domain of TCR clone 40582 (TRAV17, TRAJ16)
CATADFSDGQKLLF

SEQ ID NO: 81164 - protein, 15 aa, Homo sapiens
  CDR3 for beta chain variable domain of TCR clone 40582 (TRBV18, TRBJ2-1)
RASSPPSASYNEQFF

SEQ ID NO: 81165 - protein, 16 aa, Homo sapiens
  CDR3 for alpha chain variable domain of TCR clone 40583 (TRAV12-2, TRAJ10)
CAVNRVLTGGGNKLTF

SEQ ID NO: 81166 - protein, 12 aa, Homo sapiens
  CDR3 for beta chain variable domain of TCR clone 40583 (TRBV28, TRBJ2-7)
CASSFSSYEQCF

SEQ ID NO: 81167 - protein, 11 aa, Homo sapiens
  CDR3 for alpha chain variable domain of TCR clone 40584 (TRAV35, TRAJ30)
CAGPGDDKIIF

SEQ ID NO: 81168 - protein, 17 aa, Homo sapiens
  CDR3 for beta chain variable domain of TCR clone 40584 (TRBV7-9, TRBJ2-6)
CASSFGAGYSGANVLTF

SEQ ID NO: 81169 - protein, 15 aa, Homo sapiens
  CDR3 for alpha chain variable domain of TCR clone 40585 (TRAV26-1, TRAJ29)
CIVRVEGSGNTPLVI

SEQ ID NO: 81170 - protein, 14 aa, Homo sapiens
  CDR3 for beta chain variable domain of TCR clone 40585 (TRBV18, TRBJ2-5)
CASSPGVSQETQYF

SEQ ID NO: 81171 - protein, 13 aa, Homo sapiens
  CDR3 for alpha chain variable domain of TCR clone 40586 (TRAV35, TRAJ58)
CAGLETSGSRLTF

SEQ ID NO: 81172 - protein, 15 aa, Homo sapiens
  CDR3 for beta chain variable domain of TCR clone 40586 (TRBV20-1, TRBJ2-1)
CSARFSAGGSNEQFF

SEQ ID NO: 81173 - protein, 13 aa, Homo sapiens
  CDR3 for alpha chain variable domain of TCR clone 40587 (TRAV12-3, TRAJ33)
CAMSVHSNYQLIW

SEQ ID NO: 81174 - protein, 13 aa, Homo sapiens
  CDR3 for beta chain variable domain of TCR clone 40587 (TRBV7-2, TRBJ2-2)
CASSLAVTGELFF

SEQ ID NO: 81175 - protein, 14 aa, Homo sapiens
  CDR3 for alpha chain variable domain of TCR clone 40588 (TRAV12-3, TRAJ58)
CAMSTETSGSRLTF

SEQ ID NO: 81176 - protein, 13 aa, Homo sapiens
  CDR3 for beta chain variable domain of TCR clone 40588 (TRBV27, TRBJ2-3)
CASSWDRTDTQYF

SEQ ID NO: 81177 - protein, 15 aa, Homo sapiens
  CDR3 for alpha chain variable domain of TCR clone 40589 (TRAV12-3, TRAJ42)
CSMSGHGGSQGNLIF

SEQ ID NO: 81178 - protein, 13 aa, Homo sapiens
  CDR3 for beta chain variable domain of TCR clone 40589 (TRBV19, TRBJ2-5)
CASSGRAGETQYF

SEQ ID NO: 81179 - protein, 15 aa, Homo sapiens
  CDR3 for alpha chain variable domain of TCR clone 40590 (TRAV2, TRAJ9)
CAVAALNTGGFKTIF

SEQ ID NO: 81180 - protein, 15 aa, Homo sapiens
  CDR3 for beta chain variable domain of TCR clone 40590 (TRBV28, TRBJ2-1)
CASSIIAGGRSEQFF

SEQ ID NO: 81181 - protein, 11 aa, Homo sapiens
  CDR3 for alpha chain variable domain of TCR clone 40591 (TRAV22, TRAJ20)
CAPLHDYKLSF

SEQ ID NO: 81182 - protein, 15 aa, Homo sapiens
  CDR3 for beta chain variable domain of TCR clone 40591 (TRBV7-9, TRBJ1-5)
CASSQGHQPNQPQHF

SEQ ID NO: 81183 - protein, 17 aa, Homo sapiens
  CDR3 for alpha chain variable domain of TCR clone 40592 (TRAV3, TRAJ42)
CAVRDRAYGGSQGNLIF

SEQ ID NO: 81184 - protein, 14 aa, Homo sapiens
  CDR3 for beta chain variable domain of TCR clone 40592 (TRBV19, TRBJ2-5)
CASSMTGQQETQYF

SEQ ID NO: 81185 - protein, 14 aa, Homo sapiens
  CDR3 for alpha chain variable domain of TCR clone 40593 (TRAV12-1, TRAJ30)
CVVSIGGRDDKIIF

SEQ ID NO: 81186 - protein, 15 aa, Homo sapiens
  CDR3 for beta chain variable domain of TCR clone 40593 (TRBV18, TRBJ1-2)
CASSPSNTPNYGYTF

SEQ ID NO: 81187 - protein, 13 aa, Homo sapiens
  CDR3 for alpha chain variable domain of TCR clone 40594 (TRAV1-2, TRAJ26)
CAVRPNYGQNFVL

SEQ ID NO: 81188 - protein, 14 aa, Homo sapiens
  CDR3 for beta chain variable domain of TCR clone 40594 (TRBV4-1, TRBJ2-5)
CASSQDLALETQYF

SEQ ID NO: 81189 - protein, 18 aa, Homo sapiens
  CDR3 for alpha chain variable domain of TCR clone 40595 (TRAV26-2, TRAJ45)
CILGLWGYSGGGADGLTF

SEQ ID NO: 81190 - protein, 17 aa, Homo sapiens
  CDR3 for beta chain variable domain of TCR clone 40595 (TRBV28, TRBJ2-3)
CASSPTPAGGRVDTQYF

SEQ ID NO: 81191 - protein, 10 aa, Homo sapiens
  CDR3 for alpha chain variable domain of TCR clone 40596 (TRAV21, TRAJ31)
CAVDNARLMF

SEQ ID NO: 81192 - protein, 13 aa, Homo sapiens
  CDR3 for beta chain variable domain of TCR clone 40596 (TRBV4-1, TRBJ1-1)
CASSRKMNTEAFF

SEQ ID NO: 81193 - protein, 13 aa, Homo sapiens
  CDR3 for alpha chain variable domain of TCR clone 40597 (TRAV27, TRAJ8)
CAGGPTGFQKLVF

SEQ ID NO: 81194 - protein, 15 aa, Homo sapiens
  CDR3 for beta chain variable domain of TCR clone 40597 (TRBV6-1, TRBJ2-7)
CASSESMGDFYEQHF

SEQ ID NO: 81195 - protein, 13 aa, Homo sapiens
  CDR3 for alpha chain variable domain of TCR clone 40598 (TRAV26-1, TRAJ35)
CIVSRRVGEVLHC

SEQ ID NO: 81196 - protein, 17 aa, Homo sapiens
  CDR3 for beta chain variable domain of TCR clone 40598 (TRBV7-9, TRBJ2-7)
CASSFDGSRGGAYEQYF

SEQ ID NO: 81197 - protein, 12 aa, Homo sapiens
  CDR3 for alpha chain variable domain of TCR clone 40599 (TRAV21, TRAJ31)
CAVWGDNARLMF

SEQ ID NO: 81198 - protein, 16 aa, Homo sapiens
  CDR3 for beta chain variable domain of TCR clone 40599 (TRBV27, TRBJ2-5)
CASSYGPGGQKETQYF

SEQ ID NO: 81199 - protein, 12 aa, Homo sapiens
  CDR3 for alpha chain variable domain of TCR clone 40600 (TRAV2, TRAJ33)
CAVWGSNYRLIW

SEQ ID NO: 81200 - protein, 16 aa, Homo sapiens
  CDR3 for beta chain variable domain of TCR clone 40600 (TRBV20-1, TRBJ1-4)
CSAPGQGLLTNEKLFF

SEQ ID NO: 81201 - protein, 13 aa, Homo sapiens
  CDR3 for alpha chain variable domain of TCR clone 40601 (TRAV8-2, TRAJ4)
CCESFCGYNKLIF

SEQ ID NO: 81202 - protein, 15 aa, Homo sapiens
  CDR3 for beta chain variable domain of TCR clone 40601 (TRBV4-1, TRBJ1-4)
CASSDTGGTNEKLFF

SEQ ID NO: 81203 - protein, 12 aa, Homo sapiens
  CDR3 for alpha chain variable domain of TCR clone 40602 (TRAV8-4, TRAJ43)
CAVRVNNNDMRF

SEQ ID NO: 81204 - protein, 14 aa, Homo sapiens
  CDR3 for beta chain variable domain of TCR clone 40602 (TRBV11-2, TRBJ1-2)
CASSLGTANYGYTF

SEQ ID NO: 81205 - protein, 16 aa, Homo sapiens
  CDR3 for alpha chain variable domain of TCR clone 40603 (TRAV38-1, TRAJ45)
CAFMKGSGGGADGLTF

SEQ ID NO: 81206 - protein, 15 aa, Homo sapiens
  CDR3 for beta chain variable domain of TCR clone 40603 (TRBV7-2, TRBJ2-3)
CASSSTGLETDTQYL

SEQ ID NO: 81207 - protein, 14 aa, Homo sapiens
  CDR3 for alpha chain variable domain of TCR clone 40604 (TRAV26-1, TRAJ45)
CIEVTGGGADGLTF

SEQ ID NO: 81208 - protein, 13 aa, Homo sapiens
  CDR3 for beta chain variable domain of TCR clone 40604 (TRBV7-6, TRBJ1-2)
CASSLVADCGYTF

SEQ ID NO: 81209 - protein, 17 aa, Homo sapiens
  CDR3 for alpha chain variable domain of TCR clone 40605 (TRAV38-2/DV8, TRAJ38)
CAYRSARGAGNNRKLVW

SEQ ID NO: 81210 - protein, 13 aa, Homo sapiens
  CDR3 for beta chain variable domain of TCR clone 40605 (TRBV6-5, TRBJ2-1)
CASRGRVGNEQFF

SEQ ID NO: 81211 - protein, 14 aa, Homo sapiens
  CDR3 for alpha chain variable domain of TCR clone 40606 (TRAV26-1, TRAJ31)
CIALPPNNNARLMF

SEQ ID NO: 81212 - protein, 16 aa, Homo sapiens
  CDR3 for beta chain variable domain of TCR clone 40606 (TRBV10-2, TRBJ2-7)
CASSESPGSSGCEQYF

SEQ ID NO: 81213 - protein, 11 aa, Homo sapiens
  CDR3 for alpha chain variable domain of TCR clone 40607 (TRAV13-2, TRAJ39)
CAENAGNMLTF

SEQ ID NO: 81214 - protein, 14 aa, Homo sapiens
  CDR3 for beta chain variable domain of TCR clone 40607 (TRBV12-4, TRBJ1-1)
CASSLGTGGTEAFF

SEQ ID NO: 81215 - protein, 13 aa, Homo sapiens
  CDR3 for alpha chain variable domain of TCR clone 40608 (TRAV8-1, TRAJ30)
CAVIMNRDDKIIF

SEQ ID NO: 81216 - protein, 14 aa, Homo sapiens
  CDR3 for beta chain variable domain of TCR clone 40608 (TRBV7-2, TRBJ1-6)
YASSLQGANSPLHF

SEQ ID NO: 81217 - protein, 14 aa, Homo sapiens
  CDR3 for alpha chain variable domain of TCR clone 40609 (TRAV40, TRAJ33)
CLLVGMDSNYQLIW

SEQ ID NO: 81218 - protein, 15 aa, Homo sapiens
  CDR3 for beta chain variable domain of TCR clone 40609 (TRBV7-9, TRBJ2-3)
CASSHGDRVPDTQYF

SEQ ID NO: 81219 - protein, 11 aa, Homo sapiens
  CDR3 for alpha chain variable domain of TCR clone 40610 (TRAV39, TRAJ49)
CAVDISTQIYF

SEQ ID NO: 81220 - protein, 11 aa, Homo sapiens
  CDR3 for beta chain variable domain of TCR clone 40610 (TRBV7-8, TRBJ2-7)
CASSLSLEQYF

SEQ ID NO: 81221 - protein, 18 aa, Homo sapiens
  CDR3 for alpha chain variable domain of TCR clone 40611 (TRAV9-2, TRAJ52)
CALSRHNAGGTSYGKLKF

SEQ ID NO: 81222 - protein, 13 aa, Homo sapiens
  CDR3 for beta chain variable domain of TCR clone 40611 (TRBV7-9, TRBJ1-2)
CASSLKQNYGYTF

SEQ ID NO: 81223 - protein, 14 aa, Homo sapiens
  CDR3 for alpha chain variable domain of TCR clone 40612 (TRAV1-2, TRAJ16)
CAVNRFLDGQKLLF

SEQ ID NO: 81224 - protein, 13 aa, Homo sapiens
  CDR3 for beta chain variable domain of TCR clone 40612 (TRBV19, TRBJ2-7)
CASSTSGSYEQYF

SEQ ID NO: 81225 - protein, 12 aa, Homo sapiens
  CDR3 for alpha chain variable domain of TCR clone 40613 (TRAV21, TRAJ23)
CAVGPQGGKLIF

SEQ ID NO: 81226 - protein, 13 aa, Homo sapiens
  CDR3 for beta chain variable domain of TCR clone 40613 (TRBV20-1, TRBJ2-7)
CSARKGAGYEQYF

SEQ ID NO: 81227 - protein, 13 aa, Homo sapiens
  CDR3 for alpha chain variable domain of TCR clone 40614 (TRAV35, TRAJ42)
CAGFPGSQGNLIF

SEQ ID NO: 81228 - protein, 14 aa, Homo sapiens
  CDR3 for beta chain variable domain of TCR clone 40614 (TRBV19, TRBJ2-1)
CASPTSVLSGEQFF

SEQ ID NO: 81229 - protein, 14 aa, Homo sapiens
  CDR3 for alpha chain variable domain of TCR clone 40615 (TRAV2, TRAJ37)
CAVDFTSNTGKLIC

SEQ ID NO: 81230 - protein, 15 aa, Homo sapiens
  CDR3 for beta chain variable domain of TCR clone 40615 (TRBV20-1, TRBJ1-1)
CSASRGVTGNTEAFF

SEQ ID NO: 81231 - protein, 15 aa, Homo sapiens
  CDR3 for alpha chain variable domain of TCR clone 40616 (TRAV38-1, TRAJ37)
CAFIFGSDNTGKLIF

SEQ ID NO: 81232 - protein, 12 aa, Homo sapiens
  CDR3 for beta chain variable domain of TCR clone 40616 (TRBV7-9, TRBJ2-7)
CASSLEGYEQYF

SEQ ID NO: 81233 - protein, 16 aa, Homo sapiens
  CDR3 for alpha chain variable domain of TCR clone 40617 (TRAV8-3, TRAJ8)
CAVPRDGNTGFQKLVF

SEQ ID NO: 81234 - protein, 14 aa, Homo sapiens
  CDR3 for beta chain variable domain of TCR clone 40617 (TRBV28, TRBJ1-1)
CASSEPGRGTEAFF

SEQ ID NO: 81235 - protein, 12 aa, Homo sapiens
  CDR3 for alpha chain variable domain of TCR clone 40618 (TRAV13-1, TRAJ53)
AAGGGSNYKLTF

SEQ ID NO: 81236 - protein, 15 aa, Homo sapiens
  CDR3 for beta chain variable domain of TCR clone 40618 (TRBV5-1, TRBJ2-1)
CASSPPRAPYNEQFF

SEQ ID NO: 81237 - protein, 14 aa, Homo sapiens
  CDR3 for alpha chain variable domain of TCR clone 40619 (TRAV8-3, TRAJ15)
CAVGRHQAGTALIF

SEQ ID NO: 81238 - protein, 13 aa, Homo sapiens
  CDR3 for beta chain variable domain of TCR clone 40619 (TRBV7-3, TRBJ1-1)
CASSQDWGAEAFF

SEQ ID NO: 81239 - protein, 13 aa, Homo sapiens
  CDR3 for alpha chain variable domain of TCR clone 40620 (TRAV12-1, TRAJ40)
CVVPTSGTYRYIF

SEQ ID NO: 81240 - protein, 14 aa, Homo sapiens
  CDR3 for beta chain variable domain of TCR clone 40620 (TRBV6-1, TRBJ1-3)
CASVQGGGGNTIYF

SEQ ID NO: 81241 - protein, 12 aa, Homo sapiens
  CDR3 for alpha chain variable domain of TCR clone 40621 (TRAV13-1, TRAJ53)
CAAGGSNYKLTF

SEQ ID NO: 81242 - protein, 15 aa, Homo sapiens
  CDR3 for beta chain variable domain of TCR clone 40621 (TRBV7-2, TRBJ2-1)
CASSSELAGGNEQFF

SEQ ID NO: 81243 - protein, 12 aa, Homo sapiens
  CDR3 for alpha chain variable domain of TCR clone 40622 (TRAV13-2, TRAJ23)
CAERHRGGKLIF

SEQ ID NO: 81244 - protein, 16 aa, Homo sapiens
  CDR3 for beta chain variable domain of TCR clone 40622 (TRBV7-2, TRBJ2-6)
CAILSGVSSGANALTF

SEQ ID NO: 81245 - protein, 14 aa, Homo sapiens
  CDR3 for alpha chain variable domain of TCR clone 40623 (TRAV2, TRAJ37)
CDVDFTSNTGKLIF

SEQ ID NO: 81246 - protein, 15 aa, Homo sapiens
  CDR3 for beta chain variable domain of TCR clone 40623 (TRBV20-1, TRBJ1-1)
CSASRGVTGNTEAFF

SEQ ID NO: 81247 - protein, 13 aa, Homo sapiens
  CDR3 for alpha chain variable domain of TCR clone 40624 (TRAV29/DV5, TRAJ49)
CAASTNTGNQSYF

SEQ ID NO: 81248 - protein, 13 aa, Homo sapiens
  CDR3 for beta chain variable domain of TCR clone 40624 (TRBV7-2, TRBJ1-4)
CASSLAGLEKLFF

SEQ ID NO: 81249 - protein, 14 aa, Homo sapiens
  CDR3 for alpha chain variable domain of TCR clone 40625 (TRAV27, TRAJ22)
CAGLPSGSARQLTF

SEQ ID NO: 81250 - protein, 16 aa, Homo sapiens
  CDR3 for beta chain variable domain of TCR clone 40625 (TRBV7-3, TRBJ2-2)
CASSSKRGTLSGELFF

SEQ ID NO: 81251 - protein, 15 aa, Homo sapiens
  CDR3 for alpha chain variable domain of TCR clone 40626 (TRAV13-1, TRAJ17)
CAASIERDAGNKLTF

SEQ ID NO: 81252 - protein, 12 aa, Homo sapiens
  CDR3 for beta chain variable domain of TCR clone 40626 (TRBV5-7, TRBJ1-1)
CASSLGRGKAFF

SEQ ID NO: 81253 - protein, 15 aa, Homo sapiens
  CDR3 for alpha chain variable domain of TCR clone 40627 (TRAV1-2, TRAJ35)
CAVRDREGFGNVLHC

SEQ ID NO: 81254 - protein, 14 aa, Homo sapiens
  CDR3 for beta chain variable domain of TCR clone 40627 (TRBV25-1, TRBJ1-1)
CASTHLGGNTEAFF

SEQ ID NO: 81255 - protein, 22 aa, Homo sapiens
  CDR3 for alpha chain variable domain of TCR clone 40628 (TRAV3, TRAJ38)
CAVRDCLNAGNNHIQNPDPAVY

SEQ ID NO: 81256 - protein, 19 aa, Homo sapiens
  CDR3 for beta chain variable domain of TCR clone 40628 (TRBV7-2, TRBJ2-3)
CASSLLSRNWGGGTDTQYF

SEQ ID NO: 81257 - protein, 17 aa, Homo sapiens
  CDR3 for alpha chain variable domain of TCR clone 40629 (TRAV12-2, TRAJ52)
CAVNPYAGGTSYGKLTF

SEQ ID NO: 81258 - protein, 14 aa, Homo sapiens
  CDR3 for beta chain variable domain of TCR clone 40629 (TRBV19, TRBJ2-1)
CASPTFVLSGEQFF

SEQ ID NO: 81259 - protein, 15 aa, Homo sapiens
  CDR3 for alpha chain variable domain of TCR clone 40630 (TRAV5, TRAJ33)
CAEAPAMDSNYQLIW

SEQ ID NO: 81260 - protein, 14 aa, Homo sapiens
  CDR3 for beta chain variable domain of TCR clone 40630 (TRBV4-1, TRBJ2-2)
CASSQAVNTGELFF

SEQ ID NO: 81261 - protein, 16 aa, Homo sapiens
  CDR3 for alpha chain variable domain of TCR clone 40631 (TRAV3, TRAJ21)
CAVRDIERGNSNKFYF

SEQ ID NO: 81262 - protein, 13 aa, Homo sapiens
  CDR3 for beta chain variable domain of TCR clone 40631 (TRBV27, TRBJ2-7)
CASSLTTGYEQYF

SEQ ID NO: 81263 - protein, 15 aa, Homo sapiens
  CDR3 for alpha chain variable domain of TCR clone 40632 (TRAV8-4, TRAJ8)
CAVSDLNTGFQKLVF

SEQ ID NO: 81264 - protein, 14 aa, Homo sapiens
  CDR3 for beta chain variable domain of TCR clone 40632 (TRBV7-2, TRBJ2-3)
RASSQTGSSYTQYF

SEQ ID NO: 81265 - protein, 14 aa, Homo sapiens
  CDR3 for alpha chain variable domain of TCR clone 40633 (TRAV35, TRAJ50)
CAGHRKTSYDKVIF

SEQ ID NO: 81266 - protein, 13 aa, Homo sapiens
  CDR3 for beta chain variable domain of TCR clone 40633 (TRBV7-7, TRBJ2-3)
CASSVSRADTQYF

SEQ ID NO: 81267 - protein, 14 aa, Homo sapiens
  CDR3 for alpha chain variable domain of TCR clone 40634 (TRAV20, TRAJ42)
CAVQAGGSRGNLIF

SEQ ID NO: 81268 - protein, 14 aa, Homo sapiens
  CDR3 for beta chain variable domain of TCR clone 40634 (TRBV28, TRBJ1-2)
CASRIQGANYGYTF

SEQ ID NO: 81269 - protein, 16 aa, Homo sapiens
  CDR3 for alpha chain variable domain of TCR clone 40635 (TRAV3, TRAJ21)
CAVRDIERGNFNKFYF

SEQ ID NO: 81270 - protein, 16 aa, Homo sapiens
  CDR3 for beta chain variable domain of TCR clone 40635 (TRBV12-5, TRBJ2-5)
CASGPRTSGNQETQYF

SEQ ID NO: 81271 - protein, 11 aa, Homo sapiens
  CDR3 for alpha chain variable domain of TCR clone 40636 (TRAV12-2, TRAJ54)
CAVEGAQKLVF

SEQ ID NO: 81272 - protein, 17 aa, Homo sapiens
  CDR3 for beta chain variable domain of TCR clone 40636 (TRBV18, TRBJ1-3)
CASSPYPTGPSGNAIYF

SEQ ID NO: 81273 - protein, 13 aa, Homo sapiens
  CDR3 for alpha chain variable domain of TCR clone 40637 (TRAV1-1, TRAJ9)
CPAKNTGGFKTIF

SEQ ID NO: 81274 - protein, 14 aa, Homo sapiens
  CDR3 for beta chain variable domain of TCR clone 40637 (TRBV20-1, TRBJ2-1)
CSAQIGGSANEQFF

SEQ ID NO: 81275 - protein, 17 aa, Homo sapiens
  CDR3 for alpha chain variable domain of TCR clone 40638 (TRAV13-1, TRAJ28)
CAASPPYSGAGSYQLTF

SEQ ID NO: 81276 - protein, 12 aa, Homo sapiens
  CDR3 for beta chain variable domain of TCR clone 40638 (TRBV12-4, TRBJ2-7)
CASSLGGYEQYF

SEQ ID NO: 81277 - protein, 10 aa, Homo sapiens
  CDR3 for alpha chain variable domain of TCR clone 40639 (TRAV1-2, TRAJ31)
CVSEDARLMF

SEQ ID NO: 81278 - protein, 14 aa, Homo sapiens
  CDR3 for beta chain variable domain of TCR clone 40639 (TRBV20-1, TRBJ1-3)
CGASPTGAGNTIYF

SEQ ID NO: 81279 - protein, 11 aa, Homo sapiens
  CDR3 for alpha chain variable domain of TCR clone 40640 (TRAV26-1, TRAJ37)
CIVRVGRKLIF

SEQ ID NO: 81280 - protein, 16 aa, Homo sapiens
  CDR3 for beta chain variable domain of TCR clone 40640 (TRBV19, TRBJ2-1)
CASSKAGPSSYNEQFF

SEQ ID NO: 81281 - protein, 11 aa, Homo sapiens
  CDR3 for alpha chain variable domain of TCR clone 40641 (TRAV12-2, TRAJ31)
CAVTRWARFMF

SEQ ID NO: 81282 - protein, 15 aa, Homo sapiens
  CDR3 for beta chain variable domain of TCR clone 40641 (TRBV19, TRBJ2-7)
CASSIGGGLVNEQYF

SEQ ID NO: 81283 - protein, 14 aa, Homo sapiens
  CDR3 for alpha chain variable domain of TCR clone 40642 (TRAV38-1, TRAJ40)
SALRPTSGTYKYIF

SEQ ID NO: 81284 - protein, 14 aa, Homo sapiens
  CDR3 for beta chain variable domain of TCR clone 40642 (TRBV25-1, TRBJ1-1)
CASTHLGGNTEAFF

SEQ ID NO: 81285 - protein, 13 aa, Homo sapiens
  CDR3 for alpha chain variable domain of TCR clone 40643 (TRAV1-2, TRAJ9)
CAALNTGGFKTIF

SEQ ID NO: 81286 - protein, 16 aa, Homo sapiens
  CDR3 for beta chain variable domain of TCR clone 40643 (TRBV5-1, TRBJ2-2)
CASSSRTGGRTGELFF

SEQ ID NO: 81287 - protein, 18 aa, Homo sapiens
  CDR3 for alpha chain variable domain of TCR clone 40644 (TRAV21, TRAJ52)
CAVRPSPAGGTSYGELTF

SEQ ID NO: 81288 - protein, 13 aa, Homo sapiens
  CDR3 for beta chain variable domain of TCR clone 40644 (TRBV10-3, TRBJ2-7)
CASKLAVNYEQYF

SEQ ID NO: 81289 - protein, 14 aa, Homo sapiens
  CDR3 for alpha chain variable domain of TCR clone 40645 (TRAV13-2, TRAJ43)
CAEIPTYNNNDMRF

SEQ ID NO: 81290 - protein, 14 aa, Homo sapiens
  CDR3 for beta chain variable domain of TCR clone 40645 (TRBV7-2, TRBJ2-7)
CASRSQGAAYEQYF

SEQ ID NO: 81291 - protein, 14 aa, Homo sapiens
  CDR3 for alpha chain variable domain of TCR clone 40646 (TRAV13-1, TRAJ35)
CAASKGGFGNVLHC

SEQ ID NO: 81292 - protein, 15 aa, Homo sapiens
  CDR3 for beta chain variable domain of TCR clone 40646 (TRBV7-9, TRBJ1-6)
CASSPPGRGNSPLHF

SEQ ID NO: 81293 - protein, 12 aa, Homo sapiens
  CDR3 for alpha chain variable domain of TCR clone 40647 (TRAV12-1, TRAJ9)
CVVHTGCFKTIF

SEQ ID NO: 81294 - protein, 16 aa, Homo sapiens
  CDR3 for beta chain variable domain of TCR clone 40647 (TRBV6-1, TRBJ2-1)
CASSARLAGSYNEQFF

SEQ ID NO: 81295 - protein, 16 aa, Homo sapiens
  CDR3 for alpha chain variable domain of TCR clone 40648 (TRAV20, TRAJ22)
CAVQASSSGSARQLTF

SEQ ID NO: 81296 - protein, 11 aa, Homo sapiens
  CDR3 for beta chain variable domain of TCR clone 40648 (TRBV29-1, TRBJ2-5)
CSEDRTGTQYF

SEQ ID NO: 81297 - protein, 12 aa, Homo sapiens
  CDR3 for alpha chain variable domain of TCR clone 40649 (TRAV36/DV7, TRAJ54)
CAVVRGAQKLVF

SEQ ID NO: 81298 - protein, 14 aa, Homo sapiens
  CDR3 for beta chain variable domain of TCR clone 40649 (TRBV7-3, TRBJ1-1)
CASSLKGGNIEAFF

SEQ ID NO: 81299 - protein, 15 aa, Homo sapiens
  CDR3 for alpha chain variable domain of TCR clone 40650 (TRAV12-2, TRAJ53)
CAVNGGGGSNYKLTF

SEQ ID NO: 81300 - protein, 17 aa, Homo sapiens
  CDR3 for beta chain variable domain of TCR clone 40650 (TRBV19, TRBJ2-3)
CASSLMKRMRGADTQYF

SEQ ID NO: 81301 - protein, 13 aa, Homo sapiens
  CDR3 for alpha chain variable domain of TCR clone 40651 (TRAV2, TRAJ40)
CAVVTSGTYKYIF

SEQ ID NO: 81302 - protein, 13 aa, Homo sapiens
  CDR3 for beta chain variable domain of TCR clone 40651 (TRBV19, TRBJ2-1)
CQSDFRFSGEQFF

SEQ ID NO: 81303 - protein, 16 aa, Homo sapiens
  CDR3 for alpha chain variable domain of TCR clone 40652 (TRAV30, TRAJ24)
CGTAIVDADSWGKFQF

SEQ ID NO: 81304 - protein, 15 aa, Homo sapiens
  CDR3 for beta chain variable domain of TCR clone 40652 (TRBV27, TRBJ2-1)
CASSNGGGSSNEQFF

SEQ ID NO: 81305 - protein, 11 aa, Homo sapiens
  CDR3 for alpha chain variable domain of TCR clone 40653 (TRAV12-2, TRAJ33)
CAVTSNYQLIW

SEQ ID NO: 81306 - protein, 14 aa, Homo sapiens
  CDR3 for beta chain variable domain of TCR clone 40653 (TRBV28, TRBJ2-2)
CSSRIRSGTGELFF

SEQ ID NO: 81307 - protein, 14 aa, Homo sapiens
  CDR3 for alpha chain variable domain of TCR clone 40654 (TRAV13-1, TRAJ44)
CAAKATGTASKLTF

SEQ ID NO: 81308 - protein, 13 aa, Homo sapiens
  CDR3 for beta chain variable domain of TCR clone 40654 (TRBV5-5, TRBJ1-2)
CASSFWRSEDYTF

SEQ ID NO: 81309 - protein, 14 aa, Homo sapiens
  CDR3 for alpha chain variable domain of TCR clone 40655 (TRAV12-2, TRAJ45)
CAVYSGGGADGLTF

SEQ ID NO: 81310 - protein, 15 aa, Homo sapiens
  CDR3 for beta chain variable domain of TCR clone 40655 (TRBV7-9, TRBJ2-3)
CASSSSGGATDTQYF

SEQ ID NO: 81311 - protein, 15 aa, Homo sapiens
  CDR3 for alpha chain variable domain of TCR clone 40656 (TRAV13-1, TRAJ32)
CAASIFGGATNKLIF

SEQ ID NO: 81312 - protein, 14 aa, Homo sapiens
  CDR3 for beta chain variable domain of TCR clone 40656 (TRBV7-9, TRBJ2-1)
CASSLASGSNEQFF

SEQ ID NO: 81313 - protein, 13 aa, Homo sapiens
  CDR3 for alpha chain variable domain of TCR clone 40657 (TRAV27, TRAJ41)
CAGEGNSGYELNF

SEQ ID NO: 81314 - protein, 14 aa, Homo sapiens
  CDR3 for beta chain variable domain of TCR clone 40657 (TRBV7-2, TRBJ1-1)
CASSFLTGTTEAFF

SEQ ID NO: 81315 - protein, 11 aa, Homo sapiens
  CDR3 for alpha chain variable domain of TCR clone 40658 (TRAV9-2, TRAJ11)
CVPAGYSALTF

SEQ ID NO: 81316 - protein, 14 aa, Homo sapiens
  CDR3 for beta chain variable domain of TCR clone 40658 (TRBV2, TRBJ2-7)
CASSLTSGGYEQYF

SEQ ID NO: 81317 - protein, 13 aa, Homo sapiens
  CDR3 for alpha chain variable domain of TCR clone 40659 (TRAV38-2/DV8, TRAJ34)
CAYRTWNADKLIF

SEQ ID NO: 81318 - protein, 18 aa, Homo sapiens
  CDR3 for beta chain variable domain of TCR clone 40659 (TRBV6-6, TRBJ1-3)
CASSYSKWDSISGNTIYF

SEQ ID NO: 81319 - protein, 12 aa, Homo sapiens
  CDR3 for alpha chain variable domain of TCR clone 40660 (TRAV12-2, TRAJ7)
CAVMRGNNRLTF

SEQ ID NO: 81320 - protein, 17 aa, Homo sapiens
  CDR3 for beta chain variable domain of TCR clone 40660 (TRBV7-9, TRBJ2-3)
CASSPTVAGDLTDTQYF

SEQ ID NO: 81321 - protein, 14 aa, Homo sapiens
  CDR3 for alpha chain variable domain of TCR clone 40661 (TRAV38-1, TRAJ40)
CALRPTSGTYKYIF

SEQ ID NO: 81322 - protein, 12 aa, Homo sapiens
  CDR3 for beta chain variable domain of TCR clone 40661 (TRBV18, TRBJ2-1)
CASSSDEDEQFF

SEQ ID NO: 81323 - protein, 12 aa, Homo sapiens
  CDR3 for alpha chain variable domain of TCR clone 40662 (TRAV16, TRAJ10)
RSRTGGGNKLTF

SEQ ID NO: 81324 - protein, 15 aa, Homo sapiens
  CDR3 for beta chain variable domain of TCR clone 40662 (TRBV6-3, TRBJ2-7)
SASSSPGTVFYEQYF

SEQ ID NO: 81325 - protein, 12 aa, Homo sapiens
  CDR3 for alpha chain variable domain of TCR clone 40663 (TRAV12-3, TRAJ17)
CAMTLTGNKLTF

SEQ ID NO: 81326 - protein, 13 aa, Homo sapiens
  CDR3 for beta chain variable domain of TCR clone 40663 (TRBV19, TRBJ1-5)
CASSIGGSQPQHF

SEQ ID NO: 81327 - protein, 12 aa, Homo sapiens
  CDR3 for alpha chain variable domain of TCR clone 40664 (TRAV2, TRAJ31)
CAVEDNNARLMF

SEQ ID NO: 81328 - protein, 14 aa, Homo sapiens
  CDR3 for beta chain variable domain of TCR clone 40664 (TRBV19, TRBJ2-5)
CASSRTGQQETQYF

SEQ ID NO: 81329 - protein, 14 aa, Homo sapiens
  CDR3 for alpha chain variable domain of TCR clone 40665 (TRAV17, TRAJ53)
CATDAGGSNYKLTF

SEQ ID NO: 81330 - protein, 16 aa, Homo sapiens
  CDR3 for beta chain variable domain of TCR clone 40665 (TRBV4-1, TRBJ1-1)
CASSQDAGMGNTKAFF

SEQ ID NO: 81331 - protein, 13 aa, Homo sapiens
  CDR3 for alpha chain variable domain of TCR clone 40666 (TRAV2, TRAJ40)
CAVVTSGTYKYIF

SEQ ID NO: 81332 - protein, 15 aa, Homo sapiens
  CDR3 for beta chain variable domain of TCR clone 40666 (TRBV11-3, TRBJ2-3)
CTSLKDGREGDTQYF

SEQ ID NO: 81333 - protein, 14 aa, Homo sapiens
  CDR3 for alpha chain variable domain of TCR clone 40667 (TRAV1-2, TRAJ16)
CAVNRFSDGQKLLF

SEQ ID NO: 81334 - protein, 14 aa, Homo sapiens
  CDR3 for beta chain variable domain of TCR clone 40667 (TRBV7-9, TRBJ2-1)
CASRPTGLRNEQFF

SEQ ID NO: 81335 - protein, 18 aa, Homo sapiens
  CDR3 for alpha chain variable domain of TCR clone 40668 (TRAV21, TRAJ52)
CAVRPSPAGGTSYGKLTF

SEQ ID NO: 81336 - protein, 14 aa, Homo sapiens
  CDR3 for beta chain variable domain of TCR clone 40668 (TRBV4-2, TRBJ2-1)
CASGLGRAYNEQFF

SEQ ID NO: 81337 - protein, 14 aa, Homo sapiens
  CDR3 for alpha chain variable domain of TCR clone 40669 (TRAV10, TRAJ32)
CGEPRGGAINKLIF

SEQ ID NO: 81338 - protein, 14 aa, Homo sapiens
  CDR3 for beta chain variable domain of TCR clone 40669 (TRBV5-4, TRBJ2-2)
CASRLDGGTGELFF

SEQ ID NO: 81339 - protein, 14 aa, Homo sapiens
  CDR3 for alpha chain variable domain of TCR clone 40670 (TRAV26-1, TRAJ38)
CIADNAGNNRKLIW

SEQ ID NO: 81340 - protein, 13 aa, Homo sapiens
  CDR3 for beta chain variable domain of TCR clone 40670 (TRBV6-5, TRBJ1-1)
CASRPVTGSRTFL

SEQ ID NO: 81341 - protein, 12 aa, Homo sapiens
  CDR3 for alpha chain variable domain of TCR clone 40671 (TRAV16, TRAJ10)
CSRTGGGNKLTF

SEQ ID NO: 81342 - protein, 15 aa, Homo sapiens
  CDR3 for beta chain variable domain of TCR clone 40671 (TRBV6-3, TRBJ2-7)
CASSSPVTVFYEQYF

SEQ ID NO: 81343 - protein, 16 aa, Homo sapiens
  CDR3 for alpha chain variable domain of TCR clone 40672 (TRAV4, TRAJ22)
CLVGDLYSGSARQLTF

SEQ ID NO: 81344 - protein, 13 aa, Homo sapiens
  CDR3 for beta chain variable domain of TCR clone 40672 (TRBV12-4, TRBJ2-7)
CASSPTETYEQYF

SEQ ID NO: 81345 - protein, 11 aa, Homo sapiens
  CDR3 for alpha chain variable domain of TCR clone 40673 (TRAV3, TRAJ21)
CAVGNFNKFYF

SEQ ID NO: 81346 - protein, 14 aa, Homo sapiens
  CDR3 for beta chain variable domain of TCR clone 40673 (TRBV18, TRBJ2-7)
CASSPRGGAYEQYF

SEQ ID NO: 81347 - protein, 14 aa, Homo sapiens
  CDR3 for alpha chain variable domain of TCR clone 40674 (TRAV1-2, TRAJ8)
CAVREDTGFQKLVF

SEQ ID NO: 81348 - protein, 15 aa, Homo sapiens
  CDR3 for beta chain variable domain of TCR clone 40674 (TRBV2, TRBJ2-7)
CASSEGLARSYEQYF

SEQ ID NO: 81349 - protein, 18 aa, Homo sapiens
  CDR3 for alpha chain variable domain of TCR clone 40675 (TRAV13-1, TRAJ52)
CAAKNPNAGGTSYGKLTF

SEQ ID NO: 81350 - protein, 11 aa, Homo sapiens
  CDR3 for beta chain variable domain of TCR clone 40675 (TRBV12-4, TRBJ2-3)
CASTATDTQYF

SEQ ID NO: 81351 - protein, 15 aa, Homo sapiens
  CDR3 for alpha chain variable domain of TCR clone 40676 (TRAV12-2, TRAJ53)
RAVNGGGGSNYKLTF

SEQ ID NO: 81352 - protein, 13 aa, Homo sapiens
  CDR3 for beta chain variable domain of TCR clone 40676 (TRBV3-1, TRBJ1-1)
CASSPGVITEAFF

SEQ ID NO: 81353 - protein, 10 aa, Homo sapiens
  CDR3 for alpha chain variable domain of TCR clone 40677 (TRAV38-2/DV8, TRAJ40)
CASGTYKYIF

SEQ ID NO: 81354 - protein, 13 aa, Homo sapiens
  CDR3 for beta chain variable domain of TCR clone 40677 (TRBV7-9, TRBJ2-3)
CASSPGSTDTQYF

SEQ ID NO: 81355 - protein, 16 aa, Homo sapiens
  CDR3 for alpha chain variable domain of TCR clone 40678 (TRAV1-2, TRAJ10)
CAVRGVLTGGENKLTF

SEQ ID NO: 81356 - protein, 16 aa, Homo sapiens
  CDR3 for beta chain variable domain of TCR clone 40678 (TRBV9, TRBJ2-1)
CASSVGGGGNYNEQFF

SEQ ID NO: 81357 - protein, 15 aa, Homo sapiens
  CDR3 for alpha chain variable domain of TCR clone 40679 (TRAV21, TRAJ53)
CATLNSGGSNYKLTS

SEQ ID NO: 81358 - protein, 15 aa, Homo sapiens
  CDR3 for beta chain variable domain of TCR clone 40679 (TRBV20-1, TRBJ2-7)
CSARDRVSGMDEQYF

SEQ ID NO: 81359 - protein, 14 aa, Homo sapiens
  CDR3 for alpha chain variable domain of TCR clone 40680 (TRAV13-2, TRAJ17)
CAENSKAAGNRLTF

SEQ ID NO: 81360 - protein, 11 aa, Homo sapiens
  CDR3 for beta chain variable domain of TCR clone 40680 (TRBV6-3, TRBJ2-3)
CATGQADTQYF

SEQ ID NO: 81361 - protein, 13 aa, Homo sapiens
  CDR3 for alpha chain variable domain of TCR clone 40681 (TRAV8-6, TRAJ13)
CAVRDGGYQKVTF

SEQ ID NO: 81362 - protein, 15 aa, Homo sapiens
  CDR3 for beta chain variable domain of TCR clone 40681 (TRBV7-9, TRBJ2-2)
CASRPGGTSTGELSF

SEQ ID NO: 81363 - protein, 14 aa, Homo sapiens
  CDR3 for alpha chain variable domain of TCR clone 40682 (TRAV8-4, TRAJ13)
CAVTPSGGYQKVTF

SEQ ID NO: 81364 - protein, 14 aa, Homo sapiens
  CDR3 for beta chain variable domain of TCR clone 40682 (TRBV7-2, TRBJ1-2)
CASSQTGSTYGYTF

SEQ ID NO: 81365 - protein, 16 aa, Homo sapiens
  CDR3 for alpha chain variable domain of TCR clone 40683 (TRAV3, TRAJ37)
CAVRGKGSGNTGKLIF

SEQ ID NO: 81366 - protein, 12 aa, Homo sapiens
  CDR3 for beta chain variable domain of TCR clone 40683 (TRBV7-8, TRBJ2-7)
CASSLSDIGQYF

SEQ ID NO: 81367 - protein, 16 aa, Homo sapiens
  CDR3 for alpha chain variable domain of TCR clone 40684 (TRAV16, TRAJ4)
CALSRMVSGGYNKLIF

SEQ ID NO: 81368 - protein, 16 aa, Homo sapiens
  CDR3 for beta chain variable domain of TCR clone 40684 (TRBV24-1, TRBJ2-3)
CATSDPGTGATDTQYF

SEQ ID NO: 81369 - protein, 15 aa, Homo sapiens
  CDR3 for alpha chain variable domain of TCR clone 40685 (TRAV35, TRAJ28)
CWAKVLWAGSYQLTF

SEQ ID NO: 81370 - protein, 14 aa, Homo sapiens
  CDR3 for beta chain variable domain of TCR clone 40685 (TRBV18, TRBJ2-7)
CASSPRGGAYEQYF

SEQ ID NO: 81371 - protein, 17 aa, Homo sapiens
  CDR3 for alpha chain variable domain of TCR clone 40686 (TRAV27, TRAJ42)
CAKRVIYYGGSQGNLIF

SEQ ID NO: 81372 - protein, 14 aa, Homo sapiens
  CDR3 for beta chain variable domain of TCR clone 40686 (TRBV6-6, TRBJ2-3)
CASRLQREADTQYF

SEQ ID NO: 81373 - protein, 14 aa, Homo sapiens
  CDR3 for alpha chain variable domain of TCR clone 40687 (TRAV12-3, TRAJ5)
CAMSTYTGRRALTF

SEQ ID NO: 81374 - protein, 13 aa, Homo sapiens
  CDR3 for beta chain variable domain of TCR clone 40687 (TRBV28, TRBJ2-3)
CASSTGGGDTQYF

SEQ ID NO: 81375 - protein, 14 aa, Homo sapiens
  CDR3 for alpha chain variable domain of TCR clone 40688 (TRAV12-1, TRAJ12)
CVVTRMDSSYKLIF

SEQ ID NO: 81376 - protein, 14 aa, Homo sapiens
  CDR3 for beta chain variable domain of TCR clone 40688 (TRBV4-1, TRBJ2-7)
CASSPVAGGDEQHF

SEQ ID NO: 81377 - protein, 14 aa, Homo sapiens
  CDR3 for alpha chain variable domain of TCR clone 40689 (TRAV1-2, TRAJ16)
CAVNRFSDGQKLLF

SEQ ID NO: 81378 - protein, 14 aa, Homo sapiens
  CDR3 for beta chain variable domain of TCR clone 40689 (TRBV13, TRBJ2-5)
CASGLGRGQETQYF

SEQ ID NO: 81379 - protein, 13 aa, Homo sapiens
  CDR3 for alpha chain variable domain of TCR clone 40690 (TRAV8-3, TRAJ36)
CAVGATGANNLFF

SEQ ID NO: 81380 - protein, 15 aa, Homo sapiens
  CDR3 for beta chain variable domain of TCR clone 40690 (TRBV18, TRBJ2-1)
CASSPPSASYNEQFF

SEQ ID NO: 81381 - protein, 13 aa, Homo sapiens
  CDR3 for alpha chain variable domain of TCR clone 40691 (TRAV13-1, TRAJ21)
CAASIYNFNKFYF

SEQ ID NO: 81382 - protein, 20 aa, Homo sapiens
  CDR3 for beta chain variable domain of TCR clone 40691 (TRBV7-8, TRBJ2-2)
CASSHLFPGPTIHTTGELFF

SEQ ID NO: 81383 - protein, 11 aa, Homo sapiens
  CDR3 for alpha chain variable domain of TCR clone 40692 (TRAV3, TRAJ21)
CAVGNFNKFYF

SEQ ID NO: 81384 - protein, 16 aa, Homo sapiens
  CDR3 for beta chain variable domain of TCR clone 40692 (TRBV19, TRBJ2-1)
CASSKAGPSSYNEQFI

SEQ ID NO: 81385 - protein, 14 aa, Homo sapiens
  CDR3 for alpha chain variable domain of TCR clone 40693 (TRAV1-2, TRAJ8)
CAVREDTGFQKLVF

SEQ ID NO: 81386 - protein, 16 aa, Homo sapiens
  CDR3 for beta chain variable domain of TCR clone 40693 (TRBV7-2, TRBJ1-2)
CASSSNQDRRGHGYTF

SEQ ID NO: 81387 - protein, 13 aa, Homo sapiens
  CDR3 for alpha chain variable domain of TCR clone 40694 (TRAV17, TRAJ9)
CATAITGGLKTIF

SEQ ID NO: 81388 - protein, 16 aa, Homo sapiens
  CDR3 for beta chain variable domain of TCR clone 40694 (TRBV15, TRBJ2-1)
CATSRNLAGGYNEQFF

SEQ ID NO: 81389 - protein, 14 aa, Homo sapiens
  CDR3 for alpha chain variable domain of TCR clone 40695 (TRAV17, TRAJ56)
CATDRTGANSKLTF

SEQ ID NO: 81390 - protein, 19 aa, Homo sapiens
  CDR3 for beta chain variable domain of TCR clone 40695 (TRBV7-2, TRBJ2-3)
CASSFLSRNWGGGTDTQYF

SEQ ID NO: 81391 - protein, 17 aa, Homo sapiens
  CDR3 for alpha chain variable domain of TCR clone 40696 (TRAV3, TRAJ38)
CAVRDCPNAGNNRKLIW

SEQ ID NO: 81392 - protein, 13 aa, Homo sapiens
  CDR3 for beta chain variable domain of TCR clone 40696 (TRBV23-1, TRBJ1-4)
CASRGKFNEKLFF

SEQ ID NO: 81393 - protein, 14 aa, Homo sapiens
  CDR3 for alpha chain variable domain of TCR clone 40697 (TRAV1-2, TRAJ6)
CAVSLSGGSYIPTF

SEQ ID NO: 81394 - protein, 15 aa, Homo sapiens
  CDR3 for beta chain variable domain of TCR clone 40697 (TRBV28, TRBJ2-7)
CASSPGGRGFYKQYF

SEQ ID NO: 81395 - protein, 18 aa, Homo sapiens
  CDR3 for alpha chain variable domain of TCR clone 40698 (TRAV21, TRAJ52)
CAVKPSPAGGTSYGKLTF

SEQ ID NO: 81396 - protein, 13 aa, Homo sapiens
  CDR3 for beta chain variable domain of TCR clone 40698 (TRBV10-3, TRBJ2-7)
CASKLAVNYEQYF

SEQ ID NO: 81397 - protein, 18 aa, Homo sapiens
  CDR3 for alpha chain variable domain of TCR clone 40699 (TRAV9-2, TRAJ52)
CALSRHNAGGTSYGKLTF

SEQ ID NO: 81398 - protein, 13 aa, Homo sapiens
  CDR3 for beta chain variable domain of TCR clone 40699 (TRBV7-9, TRBJ1-2)
CASSLKQNYGYTI

SEQ ID NO: 81399 - protein, 15 aa, Homo sapiens
  CDR3 for alpha chain variable domain of TCR clone 40700 (TRAV3, TRAJ22)
CAVRDRGGSARQPTF

SEQ ID NO: 81400 - protein, 14 aa, Homo sapiens
  CDR3 for beta chain variable domain of TCR clone 40700 (TRBV19, TRBJ2-1)
CASPTFVLSGEQFF

SEQ ID NO: 81401 - protein, 11 aa, Homo sapiens
  CDR3 for alpha chain variable domain of TCR clone 40701 (TRAV12-3, TRAJ49)
CAMITGNQFYF

SEQ ID NO: 81402 - protein, 18 aa, Homo sapiens
  CDR3 for beta chain variable domain of TCR clone 40701 (TRBV28, TRBJ2-1)
CASSSPSGLAGAIYEQFF

SEQ ID NO: 81403 - protein, 15 aa, Homo sapiens
  CDR3 for alpha chain variable domain of TCR clone 40702 (TRAV20, TRAJ43)
CAVQAGKSSNNDMRF

SEQ ID NO: 81404 - protein, 14 aa, Homo sapiens
  CDR3 for beta chain variable domain of TCR clone 40702 (TRBV27, TRBJ2-1)
RASRHLGGGKEQFF

SEQ ID NO: 81405 - protein, 14 aa, Homo sapiens
  CDR3 for alpha chain variable domain of TCR clone 40703 (TRAV1-2, TRAJ16)
CAVNRFSDGQKLLF

SEQ ID NO: 81406 - protein, 16 aa, Homo sapiens
  CDR3 for beta chain variable domain of TCR clone 40703 (TRBV11-2, TRBJ2-3)
CASSSRTSGGAGTQYF

SEQ ID NO: 81407 - protein, 14 aa, Homo sapiens
  CDR3 for alpha chain variable domain of TCR clone 40704 (TRAV16, TRAJ33)
CALSAMDSNYQLIW

SEQ ID NO: 81408 - protein, 11 aa, Homo sapiens
  CDR3 for beta chain variable domain of TCR clone 40704 (TRBV19, TRBJ1-1)
CASSIGSEAFF

SEQ ID NO: 81409 - protein, 13 aa, Homo sapiens
  CDR3 for alpha chain variable domain of TCR clone 40705 (TRAV12-3, TRAJ43)
CAMIRHNNNDMRF

SEQ ID NO: 81410 - protein, 12 aa, Homo sapiens
  CDR3 for beta chain variable domain of TCR clone 40705 (TRBV11-2, TRBJ2-5)
CASSLGQETQYF

SEQ ID NO: 81411 - protein, 13 aa, Homo sapiens
  CDR3 for alpha chain variable domain of TCR clone 40706 (TRAV20, TRAJ45)
CAVKKRRCRRTHL

SEQ ID NO: 81412 - protein, 14 aa, Homo sapiens
  CDR3 for beta chain variable domain of TCR clone 40706 (TRBV15, TRBJ2-5)
CATSIGGLGETQCF

SEQ ID NO: 81413 - protein, 16 aa, Homo sapiens
  CDR3 for alpha chain variable domain of TCR clone 40707 (TRAV26-1, TRAJ36)
CIVRVPDQTGANNLFF

SEQ ID NO: 81414 - protein, 14 aa, Homo sapiens
  CDR3 for beta chain variable domain of TCR clone 40707 (TRBV20-1, TRBJ1-1)
CSAQTRIGGTEAFF

SEQ ID NO: 81415 - protein, 11 aa, Homo sapiens
  CDR3 for alpha chain variable domain of TCR clone 40708 (TRAV2, TRAJ33)
CAVESNYQLIW

SEQ ID NO: 81416 - protein, 15 aa, Homo sapiens
  CDR3 for beta chain variable domain of TCR clone 40708 (TRBV19, TRBJ1-1)
CASTSAQIQNTEAFF

SEQ ID NO: 81417 - protein, 15 aa, Homo sapiens
  CDR3 for alpha chain variable domain of TCR clone 40709 (TRAV17, TRAJ23)
CAKDAEDNQGGKLIF

SEQ ID NO: 81418 - protein, 12 aa, Homo sapiens
  CDR3 for beta chain variable domain of TCR clone 40709 (TRBV2, TRBJ2-1)
CAKREGYNEQFF

SEQ ID NO: 81419 - protein, 13 aa, Homo sapiens
  CDR3 for alpha chain variable domain of TCR clone 40710 (TRAV12-3, TRAJ33)
CAMSVNSNYKLIW

SEQ ID NO: 81420 - protein, 15 aa, Homo sapiens
  CDR3 for beta chain variable domain of TCR clone 40710 (TRBV20-1, TRBJ2-7)
CSARDRVSGMDEQYF

SEQ ID NO: 81421 - protein, 16 aa, Homo sapiens
  CDR3 for alpha chain variable domain of TCR clone 40711 (TRAV20, TRAJ22)
CAVQASSSGSARQLTF

SEQ ID NO: 81422 - protein, 13 aa, Homo sapiens
  CDR3 for beta chain variable domain of TCR clone 40711 (TRBV7-2, TRBJ2-5)
CASSQTSVETQYV

SEQ ID NO: 81423 - protein, 14 aa, Homo sapiens
  CDR3 for alpha chain variable domain of TCR clone 40712 (TRAV12-2, TRAJ13)
CAVKKTGGYQKVTF

SEQ ID NO: 81424 - protein, 14 aa, Homo sapiens
  CDR3 for beta chain variable domain of TCR clone 40712 (TRBV7-6, TRBJ2-3)
CASSVAGGTDTQYF

SEQ ID NO: 81425 - protein, 16 aa, Homo sapiens
  CDR3 for alpha chain variable domain of TCR clone 40713 (TRAV26-1, TRAJ53)
CIVRVAMGGSNYKLTF

SEQ ID NO: 81426 - protein, 11 aa, Homo sapiens
  CDR3 for beta chain variable domain of TCR clone 40713 (TRBV12-4, TRBJ2-3)
CASTATDTQYF

SEQ ID NO: 81427 - protein, 14 aa, Homo sapiens
  CDR3 for alpha chain variable domain of TCR clone 40714 (TRAV1-2, TRAJ16)
CAVNRFSDGQKLLF

SEQ ID NO: 81428 - protein, 15 aa, Homo sapiens
  CDR3 for beta chain variable domain of TCR clone 40714 (TRBV5-5, TRBJ2-2)
CASSRQASGAGELFF

SEQ ID NO: 81429 - protein, 13 aa, Homo sapiens
  CDR3 for alpha chain variable domain of TCR clone 40715 (TRAV16, TRAJ31)
CALSAHNNARLMF

SEQ ID NO: 81430 - protein, 13 aa, Homo sapiens
  CDR3 for beta chain variable domain of TCR clone 40715 (TRBV19, TRBJ1-2)
CASSVPGQDGYTF

SEQ ID NO: 81431 - protein, 15 aa, Homo sapiens
  CDR3 for alpha chain variable domain of TCR clone 40716 (TRAV3, TRAJ3)
CAVRDRDSSASKIIF

SEQ ID NO: 81432 - protein, 15 aa, Homo sapiens
  CDR3 for beta chain variable domain of TCR clone 40716 (TRBV9, TRBJ1-6)
CASSVAGTGDSPLHF

SEQ ID NO: 81433 - protein, 19 aa, Homo sapiens
  CDR3 for alpha chain variable domain of TCR clone 40717 (TRAV36/DV7, TRAJ13)
CAVEAGPFLGVTRKLPLEL

SEQ ID NO: 81434 - protein, 14 aa, Homo sapiens
  CDR3 for beta chain variable domain of TCR clone 40717 (TRBV12-4, TRBJ1-1)
CASSLGTGGTEAFF

SEQ ID NO: 81435 - protein, 13 aa, Homo sapiens
  CDR3 for alpha chain variable domain of TCR clone 40718 (TRAV12-1, TRAJ39)
CVVNYNAGNMLTF

SEQ ID NO: 81436 - protein, 13 aa, Homo sapiens
  CDR3 for beta chain variable domain of TCR clone 40718 (TRBV7-3, TRBJ1-1)
CASSQDWGAKAFF

SEQ ID NO: 81437 - protein, 12 aa, Homo sapiens
  CDR3 for alpha chain variable domain of TCR clone 40719 (TRAV13-2, TRAJ23)
CAERHRGGKLIF

SEQ ID NO: 81438 - protein, 12 aa, Homo sapiens
  CDR3 for beta chain variable domain of TCR clone 40719 (TRBV11-2, TRBJ2-2)
CASSLGGGELLF

SEQ ID NO: 81439 - protein, 10 aa, Homo sapiens
  CDR3 for alpha chain variable domain of TCR clone 40720 (TRAV23/DV6, TRAJ57)
CAASSTLSQG

SEQ ID NO: 81440 - protein, 14 aa, Homo sapiens
  CDR3 for beta chain variable domain of TCR clone 40720 (TRBV25-1, TRBJ1-1)
CACTHLGGNTEAFF

SEQ ID NO: 81441 - protein, 12 aa, Homo sapiens
  CDR3 for alpha chain variable domain of TCR clone 40721 (TRAV27, TRAJ35)
CAGADFGNVLHC

SEQ ID NO: 81442 - protein, 16 aa, Homo sapiens
  CDR3 for beta chain variable domain of TCR clone 40721 (TRBV6-1, TRBJ2-1)
RASILRQGSSYNEQFF

SEQ ID NO: 81443 - protein, 13 aa, Homo sapiens
  CDR3 for alpha chain variable domain of TCR clone 40722 (TRAV16, TRAJ10)
CALLAGGGNKLTF

SEQ ID NO: 81444 - protein, 12 aa, Homo sapiens
  CDR3 for beta chain variable domain of TCR clone 40722 (TRBV28, TRBJ2-7)
CASTGNHYEQYF

SEQ ID NO: 81445 - protein, 13 aa, Homo sapiens
  CDR3 for alpha chain variable domain of TCR clone 40723 (TRAV27, TRAJ41)
CAGEGNSGYALNF

SEQ ID NO: 81446 - protein, 14 aa, Homo sapiens
  CDR3 for beta chain variable domain of TCR clone 40723 (TRBV27, TRBJ2-1)
CAGSIAETYNEQFF

SEQ ID NO: 81447 - protein, 14 aa, Homo sapiens
  CDR3 for alpha chain variable domain of TCR clone 40724 (TRAV13-1, TRAJ44)
CAAKATGTASKLTF

SEQ ID NO: 81448 - protein, 16 aa, Homo sapiens
  CDR3 for beta chain variable domain of TCR clone 40724 (TRBV7-9, TRBJ1-2)
CASSLGFSSGEDGYTF

SEQ ID NO: 81449 - protein, 15 aa, Homo sapiens
  CDR3 for alpha chain variable domain of TCR clone 40725 (TRAV8-4, TRAJ3)
CAVTGENLVQQCFQD

SEQ ID NO: 81450 - protein, 16 aa, Homo sapiens
  CDR3 for beta chain variable domain of TCR clone 40725 (TRBV4-2, TRBJ1-1)
CASSQAGFGMNAEAFF

SEQ ID NO: 81451 - protein, 14 aa, Homo sapiens
  CDR3 for alpha chain variable domain of TCR clone 40726 (TRAV2, TRAJ9)
CAVEDRGGGFKTIF

SEQ ID NO: 81452 - protein, 14 aa, Homo sapiens
  CDR3 for beta chain variable domain of TCR clone 40726 (TRBV18, TRBJ1-5)
CASSRQQRNQPQHF

SEQ ID NO: 81453 - protein, 13 aa, Homo sapiens
  CDR3 for alpha chain variable domain of TCR clone 40727 (TRAV17, TRAJ5)
CAPMDTGRRALTF

SEQ ID NO: 81454 - protein, 13 aa, Homo sapiens
  CDR3 for beta chain variable domain of TCR clone 40727 (TRBV7-3, TRBJ1-1)
CASSQDWGAEAFF

SEQ ID NO: 81455 - protein, 15 aa, Homo sapiens
  CDR3 for alpha chain variable domain of TCR clone 40728 (TRAV21, TRAJ24)
CAARSSTDSWGKLQF

SEQ ID NO: 81456 - protein, 17 aa, Homo sapiens
  CDR3 for beta chain variable domain of TCR clone 40728 (TRBV11-2, TRBJ2-1)
CASSLYPPGVEYNEQFF

SEQ ID NO: 81457 - protein, 11 aa, Homo sapiens
  CDR3 for alpha chain variable domain of TCR clone 40729 (TRAV12-1, TRAJ21)
CVVNNFNKFYF

SEQ ID NO: 81458 - protein, 14 aa, Homo sapiens
  CDR3 for beta chain variable domain of TCR clone 40729 (TRBV4-2, TRBJ2-1)
CASGLDRAYNEQFF

SEQ ID NO: 81459 - protein, 17 aa, Homo sapiens
  CDR3 for alpha chain variable domain of TCR clone 40730 (TRAV38-2/DV8, TRAJ38)
CAYRSARGAGNNRKRIW

SEQ ID NO: 81460 - protein, 13 aa, Homo sapiens
  CDR3 for beta chain variable domain of TCR clone 40730 (TRBV6-5, TRBJ2-1)
CASRGRVGNEQFF

SEQ ID NO: 81461 - protein, 11 aa, Homo sapiens
  CDR3 for alpha chain variable domain of TCR clone 40731 (TRAV21, TRAJ34)
CAVTNTDKLIF

SEQ ID NO: 81462 - protein, 16 aa, Homo sapiens
  CDR3 for beta chain variable domain of TCR clone 40731 (TRBV18, TRBJ1-1)
CASSLGVGGRGGEAFF

SEQ ID NO: 81463 - protein, 15 aa, Homo sapiens
  CDR3 for alpha chain variable domain of TCR clone 40732 (TRAV21, TRAJ53)
CATLNSGGSNYKLTF

SEQ ID NO: 81464 - protein, 16 aa, Homo sapiens
  CDR3 for beta chain variable domain of TCR clone 40732 (TRBV12-4, TRBJ1-5)
CASSRPVEGSNQPQHF

SEQ ID NO: 81465 - protein, 14 aa, Homo sapiens
  CDR3 for alpha chain variable domain of TCR clone 40733 (TRAV35, TRAJ13)
CAGSPSGGYQKVTF

SEQ ID NO: 81466 - protein, 14 aa, Homo sapiens
  CDR3 for beta chain variable domain of TCR clone 40733 (TRBV19, TRBJ2-7)
CASSMGQGAIEQYF

SEQ ID NO: 81467 - protein, 18 aa, Homo sapiens
  CDR3 for alpha chain variable domain of TCR clone 40734 (TRAV26-2, TRAJ45)
CILRLWGYSGGGADGLTF

SEQ ID NO: 81468 - protein, 17 aa, Homo sapiens
  CDR3 for beta chain variable domain of TCR clone 40734 (TRBV28, TRBJ2-3)
CASSPTPARGRVDTQYF

SEQ ID NO: 81469 - protein, 13 aa, Homo sapiens
  CDR3 for alpha chain variable domain of TCR clone 40735 (TRAV8-3, TRAJ28)
CAVGAVGSSQLTF

SEQ ID NO: 81470 - protein, 15 aa, Homo sapiens
  CDR3 for beta chain variable domain of TCR clone 40735 (TRBV7-9, TRBJ1-5)
CASSQGHQPNQPQHF

SEQ ID NO: 81471 - protein, 18 aa, Homo sapiens
  CDR3 for alpha chain variable domain of TCR clone 40736 (TRAV26-2, TRAJ45)
CILRVDKYSGGGADGPTF

SEQ ID NO: 81472 - protein, 16 aa, Homo sapiens
  CDR3 for beta chain variable domain of TCR clone 40736 (TRBV2, TRBJ1-4)
CASNLLQGATNEKLFF

SEQ ID NO: 81473 - protein, 15 aa, Homo sapiens
  CDR3 for alpha chain variable domain of TCR clone 40737 (TRAV3, TRAJ22)
CAVRDRGGSARQLTF

SEQ ID NO: 81474 - protein, 12 aa, Homo sapiens
  CDR3 for beta chain variable domain of TCR clone 40737 (TRBV12-4, TRBJ1-2)
CASSFIWLHPRF

SEQ ID NO: 81475 - protein, 16 aa, Homo sapiens
  CDR3 for alpha chain variable domain of TCR clone 40738 (TRAV21, TRAJ37)
CAVRTAGSSNTGKLIF

SEQ ID NO: 81476 - protein, 13 aa, Homo sapiens
  CDR3 for beta chain variable domain of TCR clone 40738 (TRBV7-9, TRBJ2-5)
CASLPSGRETRYF

SEQ ID NO: 81477 - protein, 12 aa, Homo sapiens
  CDR3 for alpha chain variable domain of TCR clone 40739 (TRAV8-3, TRAJ41)
CAVALSGYSLNF

SEQ ID NO: 81478 - protein, 17 aa, Homo sapiens
  CDR3 for beta chain variable domain of TCR clone 40739 (TRBV7-3, TRBJ2-2)
CASSLSGTSGGTGELFF

SEQ ID NO: 81479 - protein, 13 aa, Homo sapiens
  CDR3 for alpha chain variable domain of TCR clone 40740 (TRAV2, TRAJ15)
CAVASQAGTALIF

SEQ ID NO: 81480 - protein, 19 aa, Homo sapiens
  CDR3 for beta chain variable domain of TCR clone 40740 (TRBV25-1, TRBJ2-2)
CAILVYRVDRGRKTGELFF

SEQ ID NO: 81481 - protein, 12 aa, Homo sapiens
  CDR3 for alpha chain variable domain of TCR clone 40741 (TRAV25, TRAJ33)
CAGPDSNYQLIW

SEQ ID NO: 81482 - protein, 12 aa, Homo sapiens
  CDR3 for beta chain variable domain of TCR clone 40741 (TRBV19, TRBJ1-5)
CASSIAQQPQHF

SEQ ID NO: 81483 - protein, 15 aa, Homo sapiens
  CDR3 for alpha chain variable domain of TCR clone 40742 (TRAV8-3, TRAJ23)
CAVGDRYNQGGKLIF

SEQ ID NO: 81484 - protein, 22 aa, Homo sapiens
  CDR3 for beta chain variable domain of TCR clone 40742 (TRBV29-1, TRBJ2-5)
TVSNMSPEDSSIYLCSAGIQYF

SEQ ID NO: 81485 - protein, 10 aa, Homo sapiens
  CDR3 for alpha chain variable domain of TCR clone 40743 (TRAV17, TRAJ52)
SATSYGKLTF

SEQ ID NO: 81486 - protein, 13 aa, Homo sapiens
  CDR3 for beta chain variable domain of TCR clone 40743 (TRBV29-1, TRBJ2-5)
CSVGGTSSETQYF

SEQ ID NO: 81487 - protein, 16 aa, Homo sapiens
  CDR3 for alpha chain variable domain of TCR clone 40744 (TRAV12-1, TRAJ53)
CVVTSVAGGSNYRLTF

SEQ ID NO: 81488 - protein, 16 aa, Homo sapiens
  CDR3 for beta chain variable domain of TCR clone 40744 (TRBV6-6, TRBJ2-3)
CASSYSHAGSTDTQYF

SEQ ID NO: 81489 - protein, 18 aa, Homo sapiens
  CDR3 for alpha chain variable domain of TCR clone 40745 (TRAV21, TRAJ52)
CAVRPSPAGGTSYGKLTF

SEQ ID NO: 81490 - protein, 15 aa, Homo sapiens
  CDR3 for beta chain variable domain of TCR clone 40745 (TRBV7-9, TRBJ2-7)
CASSSSGRAVYEQYF

SEQ ID NO: 81491 - protein, 13 aa, Homo sapiens
  CDR3 for alpha chain variable domain of TCR clone 40746 (TRAV12-1, TRAJ34)
CVVTGYNTDKLIF

SEQ ID NO: 81492 - protein, 13 aa, Homo sapiens
  CDR3 for beta chain variable domain of TCR clone 40746 (TRBV28, TRBJ2-7)
CAGKAGGVYEQYF

SEQ ID NO: 81493 - protein, 19 aa, Homo sapiens
  CDR3 for alpha chain variable domain of TCR clone 40747 (TRAV26-1, TRAJ52)
CIVRAHRNAGGTSYGTLTF

SEQ ID NO: 81494 - protein, 15 aa, Homo sapiens
  CDR3 for beta chain variable domain of TCR clone 40747 (TRBV29-1, TRBJ2-1)
CSGRDRKSSYNEQFF

SEQ ID NO: 81495 - protein, 11 aa, Homo sapiens
  CDR3 for alpha chain variable domain of TCR clone 40748 (TRAV21, TRAJ39)
LLVNAGNMLTF

SEQ ID NO: 81496 - protein, 12 aa, Homo sapiens
  CDR3 for beta chain variable domain of TCR clone 40748 (TRBV7-9, TRBJ1-4)
CASSTDREKLFF

SEQ ID NO: 81497 - protein, 12 aa, Homo sapiens
  CDR3 for alpha chain variable domain of TCR clone 40749 (TRAV1-1, TRAJ30)
CAVRGRDDKVIF

SEQ ID NO: 81498 - protein, 14 aa, Homo sapiens
  CDR3 for beta chain variable domain of TCR clone 40749 (TRBV6-1, TRBJ1-3)
CASVQGGGGNTIYF

SEQ ID NO: 81499 - protein, 15 aa, Homo sapiens
  CDR3 for alpha chain variable domain of TCR clone 40750 (TRAV4, TRAJ39)
CLVGPNNNAGNMLTF

SEQ ID NO: 81500 - protein, 14 aa, Homo sapiens
  CDR3 for beta chain variable domain of TCR clone 40750 (TRBV19, TRBJ2-7)
CASNFRDTFTGMYS

SEQ ID NO: 81501 - protein, 14 aa, Homo sapiens
  CDR3 for alpha chain variable domain of TCR clone 40751 (TRAV35, TRAJ40)
CAGSTTSGTYKYIF

SEQ ID NO: 81502 - protein, 13 aa, Homo sapiens
  CDR3 for beta chain variable domain of TCR clone 40751 (TRBV20-1, TRBJ1-6)
CSAPLGVGSTLHF

SEQ ID NO: 81503 - protein, 15 aa, Homo sapiens
  CDR3 for alpha chain variable domain of TCR clone 40752 (TRAV8-2, TRAJ40)
CVVLGTTSGTYKYNF

SEQ ID NO: 81504 - protein, 16 aa, Homo sapiens
  CDR3 for beta chain variable domain of TCR clone 40752 (TRBV7-3, TRBJ2-1)
CASSLEGYRSYNEQFF

SEQ ID NO: 81505 - protein, 12 aa, Homo sapiens
  CDR3 for alpha chain variable domain of TCR clone 40753 (TRAV12-1, TRAJ23)
CVVNWGGGKLIL

SEQ ID NO: 81506 - protein, 14 aa, Homo sapiens
  CDR3 for beta chain variable domain of TCR clone 40753 (TRBV27, TRBJ2-7)
CASSPQRGTYEQYF

SEQ ID NO: 81507 - protein, 14 aa, Homo sapiens
  CDR3 for alpha chain variable domain of TCR clone 40754 (TRAV1-2, TRAJ16)
CAVNRFSDVQKLLF

SEQ ID NO: 81508 - protein, 16 aa, Homo sapiens
  CDR3 for beta chain variable domain of TCR clone 40754 (TRBV20-1, TRBJ1-4)
CSAPGQGLLTNEKLFF

SEQ ID NO: 81509 - protein, 13 aa, Homo sapiens
  CDR3 for alpha chain variable domain of TCR clone 40755 (TRAV3, TRAJ21)
CAVREPDFNKFYF

SEQ ID NO: 81510 - protein, 18 aa, Homo sapiens
  CDR3 for beta chain variable domain of TCR clone 40755 (TRBV11-2, TRBJ2-3)
CASSLGGASRGAPDTQYF

SEQ ID NO: 81511 - protein, 15 aa, Homo sapiens
  CDR3 for alpha chain variable domain of TCR clone 40756 (TRAV29/DV5, TRAJ24)
CAASGATDSWGNFQF

SEQ ID NO: 81512 - protein, 12 aa, Homo sapiens
  CDR3 for beta chain variable domain of TCR clone 40756 (TRBV11-2, TRBJ2-2)
CASSLPTGELFF

SEQ ID NO: 81513 - protein, 16 aa, Homo sapiens
  CDR3 for alpha chain variable domain of TCR clone 40757 (TRAV1-2, TRAJ10)
CAVRGVLTGGGNKLTF

SEQ ID NO: 81514 - protein, 13 aa, Homo sapiens
  CDR3 for beta chain variable domain of TCR clone 40757 (TRBV24-1, TRBJ2-1)
CATSAGPYNEQFF

SEQ ID NO: 81515 - protein, 13 aa, Homo sapiens
  CDR3 for alpha chain variable domain of TCR clone 40758 (TRAV26-1, TRAJ29)
CIVRRSGNTPLVF

SEQ ID NO: 81516 - protein, 16 aa, Homo sapiens
  CDR3 for beta chain variable domain of TCR clone 40758 (TRBV11-3, TRBJ2-7)
CASSLAPTGVNYEQYF

SEQ ID NO: 81517 - protein, 13 aa, Homo sapiens
  CDR3 for alpha chain variable domain of TCR clone 40759 (TRAV21, TRAJ57)
CAVTQGGSEKLVF

SEQ ID NO: 81518 - protein, 16 aa, Homo sapiens
  CDR3 for beta chain variable domain of TCR clone 40759 (TRBV29-1, TRBJ2-7)
CSVEDADDGTAYEQYF

SEQ ID NO: 81519 - protein, 14 aa, Homo sapiens
  CDR3 for alpha chain variable domain of TCR clone 40760 (TRAV21, TRAJ15)
CAVSLNQAGTALIF

SEQ ID NO: 81520 - protein, 11 aa, Homo sapiens
  CDR3 for beta chain variable domain of TCR clone 40760 (TRBV20-1, TRBJ2-7)
CSVRTSYEQYF

SEQ ID NO: 81521 - protein, 14 aa, Homo sapiens
  CDR3 for alpha chain variable domain of TCR clone 40761 (TRAV1-2, TRAJ15)
CAVRDRQAGTALIF

SEQ ID NO: 81522 - protein, 14 aa, Homo sapiens
  CDR3 for beta chain variable domain of TCR clone 40761 (TRBV7-8, TRBJ2-7)
CAGSPRDRVYEQYF

SEQ ID NO: 81523 - protein, 13 aa, Homo sapiens
  CDR3 for alpha chain variable domain of TCR clone 40762 (TRAV13-1, TRAJ21)
CAASIYNFNKFYF

SEQ ID NO: 81524 - protein, 13 aa, Homo sapiens
  CDR3 for beta chain variable domain of TCR clone 40762 (TRBV2, TRBJ1-1)
CASSVSGYTEAFF

SEQ ID NO: 81525 - protein, 15 aa, Homo sapiens
  CDR3 for alpha chain variable domain of TCR clone 40763 (TRAV3, TRAJ47)
CAVRDIGEYGNNLVF

SEQ ID NO: 81526 - protein, 14 aa, Homo sapiens
  CDR3 for beta chain variable domain of TCR clone 40763 (TRBV13, TRBJ2-5)
CASSLERVGETQYF

SEQ ID NO: 81527 - protein, 13 aa, Homo sapiens
  CDR3 for alpha chain variable domain of TCR clone 40764 (TRAV27, TRAJ6)
CAGGTRGSYIPTF

SEQ ID NO: 81528 - protein, 14 aa, Homo sapiens
  CDR3 for beta chain variable domain of TCR clone 40764 (TRBV7-3, TRBJ2-2)
CASSSGGYTGELFF

SEQ ID NO: 81529 - protein, 15 aa, Homo sapiens
  CDR3 for alpha chain variable domain of TCR clone 40765 (TRAV3, TRAJ22)
CAVRDRGGSARPLTF

SEQ ID NO: 81530 - protein, 14 aa, Homo sapiens
  CDR3 for beta chain variable domain of TCR clone 40765 (TRBV25-1, TRBJ1-1)
CASTHLGGNTEAFF

SEQ ID NO: 81531 - protein, 12 aa, Homo sapiens
  CDR3 for alpha chain variable domain of TCR clone 40766 (TRAV27, TRAJ9)
CAGESGGFKTIF

SEQ ID NO: 81532 - protein, 18 aa, Homo sapiens
  CDR3 for beta chain variable domain of TCR clone 40766 (TRBV10-2, TRBJ2-2)
CISAPAVQRQADAGELFF

SEQ ID NO: 81533 - protein, 14 aa, Homo sapiens
  CDR3 for alpha chain variable domain of TCR clone 40767 (TRAV35, TRAJ22)
CAGLRPGSARQLTF

SEQ ID NO: 81534 - protein, 11 aa, Homo sapiens
  CDR3 for beta chain variable domain of TCR clone 40767 (TRBV10-3, TRBJ2-7)
CAISEGLEQYF

SEQ ID NO: 81535 - protein, 12 aa, Homo sapiens
  CDR3 for alpha chain variable domain of TCR clone 40768 (TRAV24, TRAJ37)
CASSSNTGKLIF

SEQ ID NO: 81536 - protein, 11 aa, Homo sapiens
  CDR3 for beta chain variable domain of TCR clone 40768 (TRBV29-1, TRBJ2-5)
CREDRTGTQYF

SEQ ID NO: 81537 - protein, 11 aa, Homo sapiens
  CDR3 for alpha chain variable domain of TCR clone 40769 (TRAV23/DV6, TRAJ48)
CAPRWGEKLTF

SEQ ID NO: 81538 - protein, 13 aa, Homo sapiens
  CDR3 for beta chain variable domain of TCR clone 40769 (TRBV12-4, TRBJ2-5)
CASSPGTEETQYL

SEQ ID NO: 81539 - protein, 13 aa, Homo sapiens
  CDR3 for alpha chain variable domain of TCR clone 40770 (TRAV12-2, TRAJ10)
CAVPTGGGNKLTF

SEQ ID NO: 81540 - protein, 11 aa, Homo sapiens
  CDR3 for beta chain variable domain of TCR clone 40770 (TRBV6-1, TRBJ2-1)
CASISSNEQFC

SEQ ID NO: 81541 - protein, 14 aa, Homo sapiens
  CDR3 for alpha chain variable domain of TCR clone 40771 (TRAV38-1, TRAJ40)
CALRPTSGTYKYIF

SEQ ID NO: 81542 - protein, 14 aa, Homo sapiens
  CDR3 for beta chain variable domain of TCR clone 40771 (TRBV25-1, TRBJ1-1)
CASTHLGVNTEAFF

SEQ ID NO: 81543 - protein, 12 aa, Homo sapiens
  CDR3 for alpha chain variable domain of TCR clone 40772 (TRAV12-2, TRAJ7)
CAVMRGNNRLAF

SEQ ID NO: 81544 - protein, 15 aa, Homo sapiens
  CDR3 for beta chain variable domain of TCR clone 40772 (TRBV6-3, TRBJ2-7)
CASSSPGTVFYEQYF

SEQ ID NO: 81545 - protein, 14 aa, Homo sapiens
  CDR3 for alpha chain variable domain of TCR clone 40773 (TRAV17, TRAJ39)
CATDPVRAGNMLTF

SEQ ID NO: 81546 - protein, 15 aa, Homo sapiens
  CDR3 for beta chain variable domain of TCR clone 40773 (TRBV13, TRBJ1-5)
CASRFGQGGVQPQHF

SEQ ID NO: 81547 - protein, 14 aa, Homo sapiens
  CDR3 for alpha chain variable domain of TCR clone 40774 (TRAV1-2, TRAJ16)
CAVRGFSDGQKLLF

SEQ ID NO: 81548 - protein, 16 aa, Homo sapiens
  CDR3 for beta chain variable domain of TCR clone 40774 (TRBV20-1, TRBJ2-1)
CSARDHLAGGGGEQFF

SEQ ID NO: 81549 - protein, 13 aa, Homo sapiens
  CDR3 for alpha chain variable domain of TCR clone 40775 (TRAV2, TRAJ40)
CAVVTSGTYKYIF

SEQ ID NO: 81550 - protein, 14 aa, Homo sapiens
  CDR3 for beta chain variable domain of TCR clone 40775 (TRBV19, TRBJ2-1)
CASPTFVLMGEQFF

SEQ ID NO: 81551 - protein, 12 aa, Homo sapiens
  CDR3 for alpha chain variable domain of TCR clone 40776 (TRAV13-2, TRAJ23)
CAERQRGGKLIF

SEQ ID NO: 81552 - protein, 13 aa, Homo sapiens
  CDR3 for beta chain variable domain of TCR clone 40776 (TRBV7-9, TRBJ1-2)
CASSLKQNYGYTF

SEQ ID NO: 81553 - protein, 13 aa, Homo sapiens
  CDR3 for alpha chain variable domain of TCR clone 40777 (TRAV27, TRAJ41)
CAGEGNSGYALNF

SEQ ID NO: 81554 - protein, 14 aa, Homo sapiens
  CDR3 for beta chain variable domain of TCR clone 40777 (TRBV20-1, TRBJ2-1)
CSAQIGGSANEQFF

SEQ ID NO: 81555 - protein, 11 aa, Homo sapiens
  CDR3 for alpha chain variable domain of TCR clone 40778 (TRAV8-2, TRAJ26)
CVVTLLLGSEF

SEQ ID NO: 81556 - protein, 15 aa, Homo sapiens
  CDR3 for beta chain variable domain of TCR clone 40778 (TRBV11-2, TRBJ2-2)
CASSSDRVNAGGLFF

SEQ ID NO: 81557 - protein, 13 aa, Homo sapiens
  CDR3 for alpha chain variable domain of TCR clone 40779 (TRAV21, TRAJ26)
CAVLDNYGQNFVF

SEQ ID NO: 81558 - protein, 16 aa, Homo sapiens
  CDR3 for beta chain variable domain of TCR clone 40779 (TRBV29-1, TRBJ2-2)
CSVETRASGSTGELFF

SEQ ID NO: 81559 - protein, 11 aa, Homo sapiens
  CDR3 for alpha chain variable domain of TCR clone 40780 (TRAV4, TRAJ20)
CLVGDKVTTTS

SEQ ID NO: 81560 - protein, 15 aa, Homo sapiens
  CDR3 for beta chain variable domain of TCR clone 40780 (TRBV18, TRBJ2-7)
CASTPSSTGNYEQYF

SEQ ID NO: 81561 - protein, 12 aa, Homo sapiens
  CDR3 for alpha chain variable domain of TCR clone 40781 (TRAV13-2, TRAJ23)
CAERHWGGKLIF

SEQ ID NO: 81562 - protein, 15 aa, Homo sapiens
  CDR3 for beta chain variable domain of TCR clone 40781 (TRBV19, TRBJ1-2)
CASSVGQVLNYGYTF

SEQ ID NO: 81563 - protein, 12 aa, Homo sapiens
  CDR3 for alpha chain variable domain of TCR clone 40782 (TRAV12-1, TRAJ40)
CVVYSGTYKYIF

SEQ ID NO: 81564 - protein, 12 aa, Homo sapiens
  CDR3 for beta chain variable domain of TCR clone 40782 (TRBV2, TRBJ2-1)
CAYGPPGNEQFF

SEQ ID NO: 81565 - protein, 14 aa, Homo sapiens
  CDR3 for alpha chain variable domain of TCR clone 40783 (TRAV1-2, TRAJ16)
CAVNRFSDGQKLLF

SEQ ID NO: 81566 - protein, 19 aa, Homo sapiens
  CDR3 for beta chain variable domain of TCR clone 40783 (TRBV7-3, TRBJ2-2)
CASSLRAGGSGPNTGELFF

SEQ ID NO: 81567 - protein, 11 aa, Homo sapiens
  CDR3 for alpha chain variable domain of TCR clone 40784 (TRAV12-3, TRAJ43)
CAMSVSNDMRF

SEQ ID NO: 81568 - protein, 14 aa, Homo sapiens
  CDR3 for beta chain variable domain of TCR clone 40784 (TRBV11-2, TRBJ2-7)
CASSLGAGAYEQYF

SEQ ID NO: 81569 - protein, 22 aa, Homo sapiens
  CDR3 for alpha chain variable domain of TCR clone 40785 (TRAV3, TRAJ38)
CAVRDCLNAGNNHIQNPDPAVY

SEQ ID NO: 81570 - protein, 14 aa, Homo sapiens
  CDR3 for beta chain variable domain of TCR clone 40785 (TRBV6-1, TRBJ1-3)
CASVQGGGGNTIYF

SEQ ID NO: 81571 - protein, 12 aa, Homo sapiens
  CDR3 for alpha chain variable domain of TCR clone 40786 (TRAV27, TRAJ36)
CAGMTGTNNLFF

SEQ ID NO: 81572 - protein, 14 aa, Homo sapiens
  CDR3 for beta chain variable domain of TCR clone 40786 (TRBV12-4, TRBJ2-3)
CASSLVPSTDTQYF

SEQ ID NO: 81573 - protein, 14 aa, Homo sapiens
  CDR3 for alpha chain variable domain of TCR clone 40787 (TRAV13-2, TRAJ43)
FAEIPTYNNNDMRF

SEQ ID NO: 81574 - protein, 15 aa, Homo sapiens
  CDR3 for beta chain variable domain of TCR clone 40787 (TRBV7-9, TRBJ2-2)
CASGPLDTFPGELFF

SEQ ID NO: 81575 - protein, 16 aa, Homo sapiens
  CDR3 for alpha chain variable domain of TCR clone 40788 (TRAV16, TRAJ4)
CALSRMFSGGYNKLIF

SEQ ID NO: 81576 - protein, 16 aa, Homo sapiens
  CDR3 for beta chain variable domain of TCR clone 40788 (TRBV24-1, TRBJ2-3)
CTTSDPGTGATDTQYF

SEQ ID NO: 81577 - protein, 13 aa, Homo sapiens
  CDR3 for alpha chain variable domain of TCR clone 40789 (TRAV27, TRAJ41)
CAGEGNSGYALNL

SEQ ID NO: 81578 - protein, 14 aa, Homo sapiens
  CDR3 for beta chain variable domain of TCR clone 40789 (TRBV7-2, TRBJ1-1)
CASSFLTGTTEASF

SEQ ID NO: 81579 - protein, 14 aa, Homo sapiens
  CDR3 for alpha chain variable domain of TCR clone 40790 (TRAV8-3, TRAJ9)
CAVVDNTGGFKTIF

SEQ ID NO: 81580 - protein, 14 aa, Homo sapiens
  CDR3 for beta chain variable domain of TCR clone 40790 (TRBV7-3, TRBJ2-2)
CASSSGGYTGELFF

SEQ ID NO: 81581 - protein, 13 aa, Homo sapiens
  CDR3 for alpha chain variable domain of TCR clone 40791 (TRAV2, TRAJ15)
CAVASQAGTALIF

SEQ ID NO: 81582 - protein, 19 aa, Homo sapiens
  CDR3 for beta chain variable domain of TCR clone 40791 (TRBV7-2, TRBJ2-3)
CASSFLSRNWGGGTDTQYF

SEQ ID NO: 81583 - protein, 15 aa, Homo sapiens
  CDR3 for alpha chain variable domain of TCR clone 40792 (TRAV12-2, TRAJ43)
CAFDMRFGAGTRLTV

SEQ ID NO: 81584 - protein, 11 aa, Homo sapiens
  CDR3 for beta chain variable domain of TCR clone 40792 (TRBV12-4, TRBJ2-3)
CASSSVRGRYF

SEQ ID NO: 81585 - protein, 12 aa, Homo sapiens
  CDR3 for alpha chain variable domain of TCR clone 40793 (TRAV27, TRAJ42)
CAGGGSQGNLIF

SEQ ID NO: 81586 - protein, 13 aa, Homo sapiens
  CDR3 for beta chain variable domain of TCR clone 40793 (TRBV19, TRBJ2-7)
CVSSIRSSYEQYF

SEQ ID NO: 81587 - protein, 14 aa, Homo sapiens
  CDR3 for alpha chain variable domain of TCR clone 40794 (TRAV21, TRAJ42)
CAVGYGGSQGNLIF

SEQ ID NO: 81588 - protein, 16 aa, Homo sapiens
  CDR3 for beta chain variable domain of TCR clone 40794 (TRBV7-9, TRBJ1-2)
CASSLGFSSGEDGYTF

SEQ ID NO: 81589 - protein, 12 aa, Homo sapiens
  CDR3 for alpha chain variable domain of TCR clone 40795 (TRAV3, TRAJ20)
CAVRDPDYTLSF

SEQ ID NO: 81590 - protein, 13 aa, Homo sapiens
  CDR3 for beta chain variable domain of TCR clone 40795 (TRBV9, TRBJ2-1)
CASSVGQGGEQFF

SEQ ID NO: 81591 - protein, 13 aa, Homo sapiens
  CDR3 for alpha chain variable domain of TCR clone 40796 (TRAV27, TRAJ45)
CRSSGGGADGLTL

SEQ ID NO: 81592 - protein, 15 aa, Homo sapiens
  CDR3 for beta chain variable domain of TCR clone 40796 (TRBV20-1, TRBJ2-7)
CSARDRVSGMDEQYF

SEQ ID NO: 81593 - protein, 16 aa, Homo sapiens
  CDR3 for alpha chain variable domain of TCR clone 40797 (TRAV12-2, TRAJ28)
CAVITDSGAGSYQLTF

SEQ ID NO: 81594 - protein, 12 aa, Homo sapiens
  CDR3 for beta chain variable domain of TCR clone 40797 (TRBV9, TRBJ2-2)
CTSSLVTGELFF

SEQ ID NO: 81595 - protein, 14 aa, Homo sapiens
  CDR3 for alpha chain variable domain of TCR clone 40798 (TRAV17, TRAJ34)
CATDSLEVTDKLIF

SEQ ID NO: 81596 - protein, 13 aa, Homo sapiens
  CDR3 for beta chain variable domain of TCR clone 40798 (TRBV11-2, TRBJ2-7)
CASSGTRPYEQYF

SEQ ID NO: 81597 - protein, 12 aa, Homo sapiens
  CDR3 for alpha chain variable domain of TCR clone 40799 (TRAV8-3, TRAJ26)
CAGDNYGQNFVF

SEQ ID NO: 81598 - protein, 15 aa, Homo sapiens
  CDR3 for beta chain variable domain of TCR clone 40799 (TRBV9, TRBJ2-1)
CASSLAGSSHNEQFF

SEQ ID NO: 81599 - protein, 16 aa, Homo sapiens
  CDR3 for alpha chain variable domain of TCR clone 40800 (TRAV30, TRAJ24)
CGTEIVDADSWGKFQF

SEQ ID NO: 81600 - protein, 15 aa, Homo sapiens
  CDR3 for beta chain variable domain of TCR clone 40800 (TRBV4-3, TRBJ2-7)
CASSQGGRGIYEQYF

SEQ ID NO: 81601 - protein, 14 aa, Homo sapiens
  CDR3 for alpha chain variable domain of TCR clone 40801 (TRAV26-1, TRAJ34)
CIVRVAYNTDKLIF

SEQ ID NO: 81602 - protein, 12 aa, Homo sapiens
  CDR3 for beta chain variable domain of TCR clone 40801 (TRBV7-8, TRBJ2-7)
CASSLGDREQYF

SEQ ID NO: 81603 - protein, 13 aa, Homo sapiens
  CDR3 for alpha chain variable domain of TCR clone 40802 (TRAV12-1, TRAJ26)
SATYLYYGQDFVF

SEQ ID NO: 81604 - protein, 15 aa, Homo sapiens
  CDR3 for beta chain variable domain of TCR clone 40802 (TRBV5-1, TRBJ2-6)
CASSLDPSGANVLTF

SEQ ID NO: 81605 - protein, 12 aa, Homo sapiens
  CDR3 for alpha chain variable domain of TCR clone 40803 (TRAV17, TRAJ39)
CATGAAGNLLTF

SEQ ID NO: 81606 - protein, 14 aa, Homo sapiens
  CDR3 for beta chain variable domain of TCR clone 40803 (TRBV7-9, TRBJ1-2)
CASSRQGANYGYTF

SEQ ID NO: 81607 - protein, 15 aa, Homo sapiens
  CDR3 for alpha chain variable domain of TCR clone 40804 (TRAV26-1, TRAJ23)
CIVRVAGYKGGKLIF

SEQ ID NO: 81608 - protein, 18 aa, Homo sapiens
  CDR3 for beta chain variable domain of TCR clone 40804 (TRBV28, TRBJ2-1)
CASSSTSGRANSYNEQFF

SEQ ID NO: 81609 - protein, 15 aa, Homo sapiens
  CDR3 for alpha chain variable domain of TCR clone 40805 (TRAV12-1, TRAJ44)
CVVDTPQGTASKLTF

SEQ ID NO: 81610 - protein, 14 aa, Homo sapiens
  CDR3 for beta chain variable domain of TCR clone 40805 (TRBV19, TRBJ2-1)
CASPTFVLSGEQFF

SEQ ID NO: 81611 - protein, 14 aa, Homo sapiens
  CDR3 for alpha chain variable domain of TCR clone 40806 (TRAV29/DV5, TRAJ36)
CAARRKTGANNPFF

SEQ ID NO: 81612 - protein, 12 aa, Homo sapiens
  CDR3 for beta chain variable domain of TCR clone 40806 (TRBV12-5, TRBJ2-5)
CASGQGVETQYF

SEQ ID NO: 81613 - protein, 12 aa, Homo sapiens
  CDR3 for alpha chain variable domain of TCR clone 40807 (TRAV2, TRAJ9)
CAVGAGGFKTIF

SEQ ID NO: 81614 - protein, 13 aa, Homo sapiens
  CDR3 for beta chain variable domain of TCR clone 40807 (TRBV10-3, TRBJ2-7)
CASKLAVNYEQYF

SEQ ID NO: 81615 - protein, 16 aa, Homo sapiens
  CDR3 for alpha chain variable domain of TCR clone 40808 (TRAV20, TRAJ22)
CAVQASSSVSARQLTF

SEQ ID NO: 81616 - protein, 13 aa, Homo sapiens
  CDR3 for beta chain variable domain of TCR clone 40808 (TRBV7-2, TRBJ2-5)
CASSQTSVETQYF

SEQ ID NO: 81617 - protein, 16 aa, Homo sapiens
  CDR3 for alpha chain variable domain of TCR clone 40809 (TRAV30, TRAJ24)
CGTEIVDADSWGKFQF

SEQ ID NO: 81618 - protein, 12 aa, Homo sapiens
  CDR3 for beta chain variable domain of TCR clone 40809 (TRBV6-3, TRBJ2-7)
CASSEPGFEQYF

SEQ ID NO: 81619 - protein, 15 aa, Homo sapiens
  CDR3 for alpha chain variable domain of TCR clone 40810 (TRAV21, TRAJ53)
CATLNSGGSNYKLTF

SEQ ID NO: 81620 - protein, 17 aa, Homo sapiens
  CDR3 for beta chain variable domain of TCR clone 40810 (TRBV7-8, TRBJ2-6)
CASSAGTGGAGANDLTF

SEQ ID NO: 81621 - protein, 14 aa, Homo sapiens
  CDR3 for alpha chain variable domain of TCR clone 40811 (TRAV12-2, TRAJ40)
CAVKIPSGTYKFIF

SEQ ID NO: 81622 - protein, 14 aa, Homo sapiens
  CDR3 for beta chain variable domain of TCR clone 40811 (TRBV20-1, TRBJ1-1)
CSAQTRIGGTEAFF

SEQ ID NO: 81623 - protein, 13 aa, Homo sapiens
  CDR3 for alpha chain variable domain of TCR clone 40812 (TRAV21, TRAJ27)
CAARPGNAGKSTF

SEQ ID NO: 81624 - protein, 16 aa, Homo sapiens
  CDR3 for beta chain variable domain of TCR clone 40812 (TRBV7-6, TRBJ2-1)
CIAVLAAWGGADEQFF

SEQ ID NO: 81625 - protein, 13 aa, Homo sapiens
  CDR3 for alpha chain variable domain of TCR clone 40813 (TRAV13-1, TRAJ39)
CAASIWVGNMLTF

SEQ ID NO: 81626 - protein, 15 aa, Homo sapiens
  CDR3 for beta chain variable domain of TCR clone 40813 (TRBV7-9, TRBJ1-1)
CASSLLEQGGTEAFF

SEQ ID NO: 81627 - protein, 12 aa, Homo sapiens
  CDR3 for alpha chain variable domain of TCR clone 40814 (TRAV13-1, TRAJ48)
CAANFGNEKLTF

SEQ ID NO: 81628 - protein, 12 aa, Homo sapiens
  CDR3 for beta chain variable domain of TCR clone 40814 (TRBV11-2, TRBJ2-2)
CASSLGGGELFF

SEQ ID NO: 81629 - protein, 11 aa, Homo sapiens
  CDR3 for alpha chain variable domain of TCR clone 40815 (TRAV3, TRAJ21)
CAVGNFNKFYF

SEQ ID NO: 81630 - protein, 12 aa, Homo sapiens
  CDR3 for beta chain variable domain of TCR clone 40815 (TRBV6-3, TRBJ2-7)
CASSLTPYEQYF

SEQ ID NO: 81631 - protein, 14 aa, Homo sapiens
  CDR3 for alpha chain variable domain of TCR clone 40816 (TRAV8-3, TRAJ4)
CAVGAAGGYNKLIF

SEQ ID NO: 81632 - protein, 15 aa, Homo sapiens
  CDR3 for beta chain variable domain of TCR clone 40816 (TRBV6-5, TRBJ2-1)
CASSYDEGAGNEQFF

SEQ ID NO: 81633 - protein, 16 aa, Homo sapiens
  CDR3 for alpha chain variable domain of TCR clone 40817 (TRAV4, TRAJ18)
CCVLLIGGSTLGRLYF

SEQ ID NO: 81634 - protein, 12 aa, Homo sapiens
  CDR3 for beta chain variable domain of TCR clone 40817 (TRBV6-3, TRBJ2-7)
CASSLTPYEQCF

SEQ ID NO: 81635 - protein, 13 aa, Homo sapiens
  CDR3 for alpha chain variable domain of TCR clone 40818 (TRAV27, TRAJ49)
CAPRPYTGNQFYF

SEQ ID NO: 81636 - protein, 16 aa, Homo sapiens
  CDR3 for beta chain variable domain of TCR clone 40818 (TRBV4-1, TRBJ1-2)
CASSKDAGQVLYGYTF

SEQ ID NO: 81637 - protein, 18 aa, Homo sapiens
  CDR3 for alpha chain variable domain of TCR clone 40819 (TRAV26-1, TRAJ23)
CIVRVGLEVWNQGGKLIF

SEQ ID NO: 81638 - protein, 16 aa, Homo sapiens
  CDR3 for beta chain variable domain of TCR clone 40819 (TRBV12-4, TRBJ2-5)
CASSFFVRGRQETQFF

SEQ ID NO: 81639 - protein, 14 aa, Homo sapiens
  CDR3 for alpha chain variable domain of TCR clone 40820 (TRAV12-3, TRAJ10)
SHLPLTGGGNKLTF

SEQ ID NO: 81640 - protein, 15 aa, Homo sapiens
  CDR3 for beta chain variable domain of TCR clone 40820 (TRBV7-2, TRBJ2-2)
CASRRPGQNTGELFF

SEQ ID NO: 81641 - protein, 15 aa, Homo sapiens
  CDR3 for alpha chain variable domain of TCR clone 40821 (TRAV12-2, TRAJ53)
CAVNGGGGSNYKLTF

SEQ ID NO: 81642 - protein, 13 aa, Homo sapiens
  CDR3 for beta chain variable domain of TCR clone 40821 (TRBV7-2, TRBJ2-7)
CASSSPSGSEQYF

SEQ ID NO: 81643 - protein, 13 aa, Homo sapiens
  CDR3 for alpha chain variable domain of TCR clone 40822 (TRAV2, TRAJ40)
CAVVTSGTYKYIF

SEQ ID NO: 81644 - protein, 16 aa, Homo sapiens
  CDR3 for beta chain variable domain of TCR clone 40822 (TRBV5-1, TRBJ2-3)
CASSLGLAVYTDTQYF

SEQ ID NO: 81645 - protein, 16 aa, Homo sapiens
  CDR3 for alpha chain variable domain of TCR clone 40823 (TRAV30, TRAJ24)
CGTEIVDADSWGKFQF

SEQ ID NO: 81646 - protein, 13 aa, Homo sapiens
  CDR3 for beta chain variable domain of TCR clone 40823 (TRBV2, TRBJ1-4)
CASSERAGEKLFF

SEQ ID NO: 81647 - protein, 14 aa, Homo sapiens
  CDR3 for alpha chain variable domain of TCR clone 40824 (TRAV8-3, TRAJ6)
CAVGASGGSYIPTF

SEQ ID NO: 81648 - protein, 17 aa, Homo sapiens
  CDR3 for beta chain variable domain of TCR clone 40824 (TRBV18, TRBJ2-2)
RASSPSDPWQNTGELFF

SEQ ID NO: 81649 - protein, 14 aa, Homo sapiens
  CDR3 for alpha chain variable domain of TCR clone 40825 (TRAV12-2, TRAJ45)
CAVNIGGGADGLTF

SEQ ID NO: 81650 - protein, 17 aa, Homo sapiens
  CDR3 for beta chain variable domain of TCR clone 40825 (TRBV7-8, TRBJ2-6)
CASSAGTGGAGANDLTF

SEQ ID NO: 81651 - protein, 12 aa, Homo sapiens
  CDR3 for alpha chain variable domain of TCR clone 40826 (TRAV12-2, TRAJ9)
CAVYNGGFKTIF

SEQ ID NO: 81652 - protein, 15 aa, Homo sapiens
  CDR3 for beta chain variable domain of TCR clone 40826 (TRBV9, TRBJ2-1)
CASSLAGSSHNEQFF

SEQ ID NO: 81653 - protein, 14 aa, Homo sapiens
  CDR3 for alpha chain variable domain of TCR clone 40827 (TRAV13-1, TRAJ44)
CAAKATGTASKLTF

SEQ ID NO: 81654 - protein, 15 aa, Homo sapiens
  CDR3 for beta chain variable domain of TCR clone 40827 (TRBV6-5, TRBJ2-1)
CASSYDAGAGNEQFF

SEQ ID NO: 81655 - protein, 13 aa, Homo sapiens
  CDR3 for alpha chain variable domain of TCR clone 40828 (TRAV35, TRAJ43)
CAGYPYNNNDMRF

SEQ ID NO: 81656 - protein, 15 aa, Homo sapiens
  CDR3 for beta chain variable domain of TCR clone 40828 (TRBV25-1, TRBJ1-4)
CASSKRIATNGKLFF

SEQ ID NO: 81657 - protein, 11 aa, Homo sapiens
  CDR3 for alpha chain variable domain of TCR clone 40829 (TRAV3, TRAJ21)
CAVVNFNKFYF

SEQ ID NO: 81658 - protein, 13 aa, Homo sapiens
  CDR3 for beta chain variable domain of TCR clone 40829 (TRBV7-9, TRBJ1-2)
CASSLKQNYGYTF

SEQ ID NO: 81659 - protein, 14 aa, Homo sapiens
  CDR3 for alpha chain variable domain of TCR clone 40830 (TRAV8-1, TRAJ5)
CAVRTDKGRRALTF

SEQ ID NO: 81660 - protein, 12 aa, Homo sapiens
  CDR3 for beta chain variable domain of TCR clone 40830 (TRBV11-2, TRBJ2-1)
CASSPGNNEQFF

SEQ ID NO: 81661 - protein, 14 aa, Homo sapiens
  CDR3 for alpha chain variable domain of TCR clone 40831 (TRAV30, TRAJ33)
CGTVAPRSNHQLIW

SEQ ID NO: 81662 - protein, 16 aa, Homo sapiens
  CDR3 for beta chain variable domain of TCR clone 40831 (TRBV3-1, TRBJ2-5)
CASSPGQFNGFGTQYF

SEQ ID NO: 81663 - protein, 10 aa, Homo sapiens
  CDR3 for alpha chain variable domain of TCR clone 40832 (TRAV30, TRAJ48)
CGIGNEKLTF

SEQ ID NO: 81664 - protein, 14 aa, Homo sapiens
  CDR3 for beta chain variable domain of TCR clone 40832 (TRBV19, TRBJ2-1)
CASPTFVLSGEQFF

SEQ ID NO: 81665 - protein, 12 aa, Homo sapiens
  CDR3 for alpha chain variable domain of TCR clone 40833 (TRAV8-6, TRAJ43)
CAVSHNNNGMRF

SEQ ID NO: 81666 - protein, 13 aa, Homo sapiens
  CDR3 for beta chain variable domain of TCR clone 40833 (TRBV7-3, TRBJ1-1)
CASSQDWGAEAFF

SEQ ID NO: 81667 - protein, 16 aa, Homo sapiens
  CDR3 for alpha chain variable domain of TCR clone 40834 (TRAV20, TRAJ10)
CAVLRGLTGGGSKLTF

SEQ ID NO: 81668 - protein, 14 aa, Homo sapiens
  CDR3 for beta chain variable domain of TCR clone 40834 (TRBV19, TRBJ1-5)
CASRAPDSFLSQHF

SEQ ID NO: 81669 - protein, 14 aa, Homo sapiens
  CDR3 for alpha chain variable domain of TCR clone 40835 (TRAV9-2, TRAJ9)
CALTLNTGGFKTIF

SEQ ID NO: 81670 - protein, 13 aa, Homo sapiens
  CDR3 for beta chain variable domain of TCR clone 40835 (TRBV10-3, TRBJ2-7)
CASKLAVNYEQYF

SEQ ID NO: 81671 - protein, 17 aa, Homo sapiens
  CDR3 for alpha chain variable domain of TCR clone 40836 (TRAV36/DV7, TRAJ52)
CAVAQRAGGTSYGKLTF

SEQ ID NO: 81672 - protein, 14 aa, Homo sapiens
  CDR3 for beta chain variable domain of TCR clone 40836 (TRBV19, TRBJ2-1)
CASPTFVLSGGQFF

SEQ ID NO: 81673 - protein, 11 aa, Homo sapiens
  CDR3 for alpha chain variable domain of TCR clone 40837 (TRAV13-2, TRAJ54)
RAVQGAQKLVF

SEQ ID NO: 81674 - protein, 15 aa, Homo sapiens
  CDR3 for beta chain variable domain of TCR clone 40837 (TRBV20-1, TRBJ2-7)
CSAESGASGAYEQYF

SEQ ID NO: 81675 - protein, 14 aa, Homo sapiens
  CDR3 for alpha chain variable domain of TCR clone 40838 (TRAV17, TRAJ39)
CATDPVRAGNMLTF

SEQ ID NO: 81676 - protein, 15 aa, Homo sapiens
  CDR3 for beta chain variable domain of TCR clone 40838 (TRBV13, TRBJ1-5)
CARSFRQGGVQPQHF

SEQ ID NO: 81677 - protein, 15 aa, Homo sapiens
  CDR3 for alpha chain variable domain of TCR clone 40839 (TRAV8-3, TRAJ11)
CAVGLLNSGYSTLTF

SEQ ID NO: 81678 - protein, 12 aa, Homo sapiens
  CDR3 for beta chain variable domain of TCR clone 40839 (TRBV5-5, TRBJ2-5)
CASSYFGETQYF

SEQ ID NO: 81679 - protein, 15 aa, Homo sapiens
  CDR3 for alpha chain variable domain of TCR clone 40840 (TRAV3, TRAJ4)
CAVRDGTGVYNKLIF

SEQ ID NO: 81680 - protein, 16 aa, Homo sapiens
  CDR3 for beta chain variable domain of TCR clone 40840 (TRBV27, TRBJ2-2)
CASSSSGVSNTGELFF

SEQ ID NO: 81681 - protein, 13 aa, Homo sapiens
  CDR3 for alpha chain variable domain of TCR clone 40841 (TRAV12-3, TRAJ7)
CAMTPYGNDRLAF

SEQ ID NO: 81682 - protein, 15 aa, Homo sapiens
  CDR3 for beta chain variable domain of TCR clone 40841 (TRBV2, TRBJ2-1)
CASSELAGSYNEQFF

SEQ ID NO: 81683 - protein, 13 aa, Homo sapiens
  CDR3 for alpha chain variable domain of TCR clone 40842 (TRAV2, TRAJ10)
CAVETGGGNKLTF

SEQ ID NO: 81684 - protein, 16 aa, Homo sapiens
  CDR3 for beta chain variable domain of TCR clone 40842 (TRBV27, TRBJ2-1)
CASSSTGQEMNNEQFF

SEQ ID NO: 81685 - protein, 14 aa, Homo sapiens
  CDR3 for alpha chain variable domain of TCR clone 40843 (TRAV12-2, TRAJ13)
CAVKKTGGYQKVTF

SEQ ID NO: 81686 - protein, 12 aa, Homo sapiens
  CDR3 for beta chain variable domain of TCR clone 40843 (TRBV12-4, TRBJ1-2)
CASSFMWLHLRF

SEQ ID NO: 81687 - protein, 14 aa, Homo sapiens
  CDR3 for alpha chain variable domain of TCR clone 40844 (TRAV12-3, TRAJ9)
CAMSPNTGGFKTIF

SEQ ID NO: 81688 - protein, 12 aa, Homo sapiens
  CDR3 for beta chain variable domain of TCR clone 40844 (TRBV19, TRBJ1-5)
CASSIAQQPKHF

SEQ ID NO: 81689 - protein, 14 aa, Homo sapiens
  CDR3 for alpha chain variable domain of TCR clone 40845 (TRAV2, TRAJ37)
CAVDFTSNTGKLIF

SEQ ID NO: 81690 - protein, 15 aa, Homo sapiens
  CDR3 for beta chain variable domain of TCR clone 40845 (TRBV3-1, TRBJ1-2)
CASSPTRLPEGGYTF

SEQ ID NO: 81691 - protein, 14 aa, Homo sapiens
  CDR3 for alpha chain variable domain of TCR clone 40846 (TRAV29/DV5, TRAJ36)
CAARRKTGANNLFF

SEQ ID NO: 81692 - protein, 13 aa, Homo sapiens
  CDR3 for beta chain variable domain of TCR clone 40846 (TRBV4-2, TRBJ1-1)
CASSQAGNTEAFF

SEQ ID NO: 81693 - protein, 13 aa, Homo sapiens
  CDR3 for alpha chain variable domain of TCR clone 40847 (TRAV2, TRAJ12)
CAVGADSSCKLIF

SEQ ID NO: 81694 - protein, 13 aa, Homo sapiens
  CDR3 for beta chain variable domain of TCR clone 40847 (TRBV20-1, TRBJ2-1)
CSARSSTRDEQFF

SEQ ID NO: 81695 - protein, 18 aa, Homo sapiens
  CDR3 for alpha chain variable domain of TCR clone 40848 (TRAV9-2, TRAJ52)
CALSRHNAGGTSYGKLTF

SEQ ID NO: 81696 - protein, 16 aa, Homo sapiens
  CDR3 for beta chain variable domain of TCR clone 40848 (TRBV13, TRBJ2-2)
CASSPRTGEHTGELFF

SEQ ID NO: 81697 - protein, 14 aa, Homo sapiens
  CDR3 for alpha chain variable domain of TCR clone 40849 (TRAV13-1, TRAJ23)
CAASRLGRGGKLIF

SEQ ID NO: 81698 - protein, 13 aa, Homo sapiens
  CDR3 for beta chain variable domain of TCR clone 40849 (TRBV20-1, TRBJ1-1)
CSAPLGGGTGAFF

SEQ ID NO: 81699 - protein, 15 aa, Homo sapiens
  CDR3 for alpha chain variable domain of TCR clone 40850 (TRAV14/DV4, TRAJ8)
CAMREGNTGFQKLAF

SEQ ID NO: 81700 - protein, 15 aa, Homo sapiens
  CDR3 for beta chain variable domain of TCR clone 40850 (TRBV28, TRBJ2-1)
CASSRSSGGVDEQFF

SEQ ID NO: 81701 - protein, 11 aa, Homo sapiens
  CDR3 for alpha chain variable domain of TCR clone 40851 (TRAV17, TRAJ43)
CATPRSNDMRF

SEQ ID NO: 81702 - protein, 15 aa, Homo sapiens
  CDR3 for beta chain variable domain of TCR clone 40851 (TRBV11-2, TRBJ2-1)
CASSLGTSVLNEQFF

SEQ ID NO: 81703 - protein, 13 aa, Homo sapiens
  CDR3 for alpha chain variable domain of TCR clone 40852 (TRAV8-1, TRAJ28)
CAVAGAGSYQLTF

SEQ ID NO: 81704 - protein, 14 aa, Homo sapiens
  CDR3 for beta chain variable domain of TCR clone 40852 (TRBV7-2, TRBJ2-2)
CASRGQGAAGELFF

SEQ ID NO: 81705 - protein, 14 aa, Homo sapiens
  CDR3 for alpha chain variable domain of TCR clone 40853 (TRAV1-2, TRAJ16)
CAVNRYSDGQKLLF

SEQ ID NO: 81706 - protein, 15 aa, Homo sapiens
  CDR3 for beta chain variable domain of TCR clone 40853 (TRBV9, TRBJ1-6)
CASSVAGTGDSPLHF

SEQ ID NO: 81707 - protein, 12 aa, Homo sapiens
  CDR3 for alpha chain variable domain of TCR clone 40854 (TRAV12-3, TRAJ17)
CAMTLTGNKLTF

SEQ ID NO: 81708 - protein, 16 aa, Homo sapiens
  CDR3 for beta chain variable domain of TCR clone 40854 (TRBV6-6, TRBJ2-4)
CASSNAGQGAKNIQYF

SEQ ID NO: 81709 - protein, 15 aa, Homo sapiens
  CDR3 for alpha chain variable domain of TCR clone 40855 (TRAV3, TRAJ5)
CAVRDRKTGRRALTF

SEQ ID NO: 81710 - protein, 15 aa, Homo sapiens
  CDR3 for beta chain variable domain of TCR clone 40855 (TRBV7-8, TRBJ2-1)
CASSLADSLYTEQFF

SEQ ID NO: 81711 - protein, 10 aa, Homo sapiens
  CDR3 for alpha chain variable domain of TCR clone 40856 (TRAV30, TRAJ48)
CGIGNEKLTF

SEQ ID NO: 81712 - protein, 11 aa, Homo sapiens
  CDR3 for beta chain variable domain of TCR clone 40856 (TRBV12-4, TRBJ2-3)
CASTATDTQYF

SEQ ID NO: 81713 - protein, 16 aa, Homo sapiens
  CDR3 for alpha chain variable domain of TCR clone 40857 (TRAV20, TRAJ52)
CAVLRAGGTSYGKLTF

SEQ ID NO: 81714 - protein, 12 aa, Homo sapiens
  CDR3 for beta chain variable domain of TCR clone 40857 (TRBV5-4, TRBJ2-5)
CASSSTRETQYF

SEQ ID NO: 81715 - protein, 13 aa, Homo sapiens
  CDR3 for alpha chain variable domain of TCR clone 40858 (TRAV27, TRAJ57)
CRSVQGGSEKLVF

SEQ ID NO: 81716 - protein, 11 aa, Homo sapiens
  CDR3 for beta chain variable domain of TCR clone 40858 (TRBV11-2, TRBJ1-1)
CASSINTEAFF

SEQ ID NO: 81717 - protein, 13 aa, Homo sapiens
  CDR3 for alpha chain variable domain of TCR clone 40859 (TRAV35, TRAJ42)
CAGFPGSQGNLIF

SEQ ID NO: 81718 - protein, 13 aa, Homo sapiens
  CDR3 for beta chain variable domain of TCR clone 40859 (TRBV7-3, TRBJ1-1)
CASSQDWGAEAFF

SEQ ID NO: 81719 - protein, 13 aa, Homo sapiens
  CDR3 for alpha chain variable domain of TCR clone 40860 (TRAV8-6, TRAJ49)
CAVITNTGNQFYF

SEQ ID NO: 81720 - protein, 13 aa, Homo sapiens
  CDR3 for beta chain variable domain of TCR clone 40860 (TRBV4-1, TRBJ2-2)
CASSQENTGELFF

SEQ ID NO: 81721 - protein, 11 aa, Homo sapiens
  CDR3 for alpha chain variable domain of TCR clone 40861 (TRAV1-2, TRAJ20)
CAVANDYKLSF

SEQ ID NO: 81722 - protein, 15 aa, Homo sapiens
  CDR3 for beta chain variable domain of TCR clone 40861 (TRBV7-9, TRBJ1-6)
CASSSPGRGNSPLHF

SEQ ID NO: 81723 - protein, 12 aa, Homo sapiens
  CDR3 for alpha chain variable domain of TCR clone 40862 (TRAV12-1, TRAJ6)
CVFPGGSYIPTF

SEQ ID NO: 81724 - protein, 14 aa, Homo sapiens
  CDR3 for beta chain variable domain of TCR clone 40862 (TRBV20-1, TRBJ1-3)
CSASPTGAGNTIYF

SEQ ID NO: 81725 - protein, 12 aa, Homo sapiens
  CDR3 for alpha chain variable domain of TCR clone 40863 (TRAV12-3, TRAJ17)
CAMTLTGNKLTF

SEQ ID NO: 81726 - protein, 15 aa, Homo sapiens
  CDR3 for beta chain variable domain of TCR clone 40863 (TRBV7-8, TRBJ1-2)
CASSLVRDGGLGYTF

SEQ ID NO: 81727 - protein, 15 aa, Homo sapiens
  CDR3 for alpha chain variable domain of TCR clone 40864 (TRAV8-3, TRAJ27)
CAVGPSKTNAGKSTI

SEQ ID NO: 81728 - protein, 15 aa, Homo sapiens
  CDR3 for beta chain variable domain of TCR clone 40864 (TRBV7-2, TRBJ2-1)
CASSSGLAGGNEQFF

SEQ ID NO: 81729 - protein, 12 aa, Homo sapiens
  CDR3 for alpha chain variable domain of TCR clone 40865 (TRAV12-3, TRAJ17)
CAMTLTGNKLTF

SEQ ID NO: 81730 - protein, 15 aa, Homo sapiens
  CDR3 for beta chain variable domain of TCR clone 40865 (TRBV20-1, TRBJ2-1)
CSASSAGSSYNEQFF

SEQ ID NO: 81731 - protein, 16 aa, Homo sapiens
  CDR3 for alpha chain variable domain of TCR clone 40866 (TRAV17, TRAJ52)
CATGIIGGTSYGKLTF

SEQ ID NO: 81732 - protein, 12 aa, Homo sapiens
  CDR3 for beta chain variable domain of TCR clone 40866 (TRBV7-3, TRBJ2-1)
CASSFINNKQFF

SEQ ID NO: 81733 - protein, 14 aa, Homo sapiens
  CDR3 for alpha chain variable domain of TCR clone 40867 (TRAV17, TRAJ54)
CATYANQGAQKLVF

SEQ ID NO: 81734 - protein, 12 aa, Homo sapiens
  CDR3 for beta chain variable domain of TCR clone 40867 (TRBV6-3, TRBJ2-1)
CASSGSYNEQFF

SEQ ID NO: 81735 - protein, 14 aa, Homo sapiens
  CDR3 for alpha chain variable domain of TCR clone 40868 (TRAV8-6, TRAJ29)
CAVSDQAGNTPLVF

SEQ ID NO: 81736 - protein, 16 aa, Homo sapiens
  CDR3 for beta chain variable domain of TCR clone 40868 (TRBV10-3, TRBJ1-1)
CAISTGFPAMNTEAFF

SEQ ID NO: 81737 - protein, 17 aa, Homo sapiens
  CDR3 for alpha chain variable domain of TCR clone 40869 (TRAV26-1, TRAJ37)
CIVRVITVPSNTGKLIF

SEQ ID NO: 81738 - protein, 14 aa, Homo sapiens
  CDR3 for beta chain variable domain of TCR clone 40869 (TRBV19, TRBJ2-1)
CASPTFVLSGEQFF

SEQ ID NO: 81739 - protein, 15 aa, Homo sapiens
  CDR3 for alpha chain variable domain of TCR clone 40870 (TRAV21, TRAJ37)
CAVRPTLSNTGKLIF

SEQ ID NO: 81740 - protein, 16 aa, Homo sapiens
  CDR3 for beta chain variable domain of TCR clone 40870 (TRBV24-1, TRBJ2-3)
CATSDRRQDLTDTQCF

SEQ ID NO: 81741 - protein, 11 aa, Homo sapiens
  CDR3 for alpha chain variable domain of TCR clone 40871 (TRAV21, TRAJ34)
CAHYNTDKLLF

SEQ ID NO: 81742 - protein, 13 aa, Homo sapiens
  CDR3 for beta chain variable domain of TCR clone 40871 (TRBV7-6, TRBJ1-2)
CASSLVADYGYTF

SEQ ID NO: 81743 - protein, 15 aa, Homo sapiens
  CDR3 for alpha chain variable domain of TCR clone 40872 (TRAV3, TRAJ5)
CAVRDLDTGRRALTF

SEQ ID NO: 81744 - protein, 16 aa, Homo sapiens
  CDR3 for beta chain variable domain of TCR clone 40872 (TRBV20-1, TRBJ1-4)
CSAPGQGLLTNEKLFF

SEQ ID NO: 81745 - protein, 15 aa, Homo sapiens
  CDR3 for alpha chain variable domain of TCR clone 40873 (TRAV25, TRAJ52)
CAGTSGGTSYGQLTF

SEQ ID NO: 81746 - protein, 16 aa, Homo sapiens
  CDR3 for beta chain variable domain of TCR clone 40873 (TRBV15, TRBJ1-2)
CATSRGPRTGGGGYTF

SEQ ID NO: 81747 - protein, 15 aa, Homo sapiens
  CDR3 for alpha chain variable domain of TCR clone 40874 (TRAV25, TRAJ52)
CAGRPGGTSYGKLTF

SEQ ID NO: 81748 - protein, 16 aa, Homo sapiens
  CDR3 for beta chain variable domain of TCR clone 40874 (TRBV12-5, TRBJ2-5)
CASGPRTSGNQETQYF

SEQ ID NO: 81749 - protein, 14 aa, Homo sapiens
  CDR3 for alpha chain variable domain of TCR clone 40875 (TRAV8-3, TRAJ31)
CAVGRGLNNARLMF

SEQ ID NO: 81750 - protein, 15 aa, Homo sapiens
  CDR3 for beta chain variable domain of TCR clone 40875 (TRBV7-2, TRBJ2-2)
CASSLAGGLTGELFL

SEQ ID NO: 81751 - protein, 16 aa, Homo sapiens
  CDR3 for alpha chain variable domain of TCR clone 40876 (TRAV8-3, TRAJ52)
CAVQPAGGTSYGKLTF

SEQ ID NO: 81752 - protein, 15 aa, Homo sapiens
  CDR3 for beta chain variable domain of TCR clone 40876 (TRBV11-2, TRBJ2-7)
CASSLAGGVAAEQYF

SEQ ID NO: 81753 - protein, 16 aa, Homo sapiens
  CDR3 for alpha chain variable domain of TCR clone 40877 (TRAV3, TRAJ10)
CAVRDMRAGGGNKLTF

SEQ ID NO: 81754 - protein, 18 aa, Homo sapiens
  CDR3 for beta chain variable domain of TCR clone 40877 (TRBV7-9, TRBJ2-7)
CASSLTTSGSRTWYEQYF

SEQ ID NO: 81755 - protein, 14 aa, Homo sapiens
  CDR3 for alpha chain variable domain of TCR clone 40878 (TRAV8-2, TRAJ45)
CVVSAGGGADGLTF

SEQ ID NO: 81756 - protein, 12 aa, Homo sapiens
  CDR3 for beta chain variable domain of TCR clone 40878 (TRBV12-4, TRBJ2-1)
CASSLVRGEQFF

SEQ ID NO: 81757 - protein, 13 aa, Homo sapiens
  CDR3 for alpha chain variable domain of TCR clone 40879 (TRAV2, TRAJ40)
CAVVTSGTYKYIF

SEQ ID NO: 81758 - protein, 12 aa, Homo sapiens
  CDR3 for beta chain variable domain of TCR clone 40879 (TRBV28, TRBJ2-3)
CASSLYRDTQYF

SEQ ID NO: 81759 - protein, 12 aa, Homo sapiens
  CDR3 for alpha chain variable domain of TCR clone 40880 (TRAV13-1, TRAJ21)
CAAKEGFNKFYF

SEQ ID NO: 81760 - protein, 19 aa, Homo sapiens
  CDR3 for beta chain variable domain of TCR clone 40880 (TRBV7-2, TRBJ2-3)
CASSFLSRNWGGGTDTQYF

SEQ ID NO: 81761 - protein, 15 aa, Homo sapiens
  CDR3 for alpha chain variable domain of TCR clone 40881 (TRAV38-2/DV8, TRAJ48)
CAYRSGGFGNGKLTF

SEQ ID NO: 81762 - protein, 16 aa, Homo sapiens
  CDR3 for beta chain variable domain of TCR clone 40881 (TRBV28, TRBJ2-7)
CASSPWVATGDLSQYF

SEQ ID NO: 81763 - protein, 11 aa, Homo sapiens
  CDR3 for alpha chain variable domain of TCR clone 40882 (TRAV17, TRAJ9)
CEFTGGFKTIF

SEQ ID NO: 81764 - protein, 14 aa, Homo sapiens
  CDR3 for beta chain variable domain of TCR clone 40882 (TRBV7-9, TRBJ2-2)
CASSLVQDTGELFF

SEQ ID NO: 81765 - protein, 20 aa, Homo sapiens
  CDR3 for alpha chain variable domain of TCR clone 40883 (TRAV12-3, TRAJ41)
SLFIRDSQPSDSATPEALNF

SEQ ID NO: 81766 - protein, 15 aa, Homo sapiens
  CDR3 for beta chain variable domain of TCR clone 40883 (TRBV4-1, TRBJ2-7)
CASSQNTGRLYEQYF

SEQ ID NO: 81767 - protein, 18 aa, Homo sapiens
  CDR3 for alpha chain variable domain of TCR clone 40884 (TRAV21, TRAJ52)
CAVRPSPAGGTSYGKLTF

SEQ ID NO: 81768 - protein, 13 aa, Homo sapiens
  CDR3 for beta chain variable domain of TCR clone 40884 (TRBV7-3, TRBJ1-1)
CASSQDWGVEAFF

SEQ ID NO: 81769 - protein, 12 aa, Homo sapiens
  CDR3 for alpha chain variable domain of TCR clone 40885 (TRAV17, TRAJ43)
CATDAFPADMRF

SEQ ID NO: 81770 - protein, 14 aa, Homo sapiens
  CDR3 for beta chain variable domain of TCR clone 40885 (TRBV20-1, TRBJ2-3)
CIARDGGSTDTQYF

SEQ ID NO: 81771 - protein, 10 aa, Homo sapiens
  CDR3 for alpha chain variable domain of TCR clone 40886 (TRAV23/DV6, TRAJ43)
CAAAVAALEQ

SEQ ID NO: 81772 - protein, 16 aa, Homo sapiens
  CDR3 for beta chain variable domain of TCR clone 40886 (TRBV18, TRBJ1-2)
FASSPPERVTIYGYTF

SEQ ID NO: 81773 - protein, 16 aa, Homo sapiens
  CDR3 for alpha chain variable domain of TCR clone 40887 (TRAV30, TRAJ24)
CGTEIVDADSWGKFQF

SEQ ID NO: 81774 - protein, 14 aa, Homo sapiens
  CDR3 for beta chain variable domain of TCR clone 40887 (TRBV19, TRBJ1-2)
CASSLQGQAYGYTF

SEQ ID NO: 81775 - protein, 13 aa, Homo sapiens
  CDR3 for alpha chain variable domain of TCR clone 40888 (TRAV8-4, TRAJ47)
YAVTALYGNKLVF

SEQ ID NO: 81776 - protein, 13 aa, Homo sapiens
  CDR3 for beta chain variable domain of TCR clone 40888 (TRBV7-9, TRBJ1-2)
CASSLKQNYGYTF

SEQ ID NO: 81777 - protein, 11 aa, Homo sapiens
  CDR3 for alpha chain variable domain of TCR clone 40889 (TRAV8-6, TRAJ13)
CALGTYQKVTF

SEQ ID NO: 81778 - protein, 15 aa, Homo sapiens
  CDR3 for beta chain variable domain of TCR clone 40889 (TRBV5-1, TRBJ2-7)
CASSLNGGPAREQYF

SEQ ID NO: 81779 - protein, 14 aa, Homo sapiens
  CDR3 for alpha chain variable domain of TCR clone 40890 (TRAV12-2, TRAJ40)
CAVKIPSGTYKYIF

SEQ ID NO: 81780 - protein, 20 aa, Homo sapiens
  CDR3 for beta chain variable domain of TCR clone 40890 (TRBV28, TRBJ2-1)
CASTPIGRSPGLTGGNEQFF

SEQ ID NO: 81781 - protein, 18 aa, Homo sapiens
  CDR3 for alpha chain variable domain of TCR clone 40891 (TRAV13-1, TRAJ52)
CAASKRSAGGTSYGKLTF

SEQ ID NO: 81782 - protein, 13 aa, Homo sapiens
  CDR3 for beta chain variable domain of TCR clone 40891 (TRBV12-4, TRBJ1-2)
CASSLLQGKGYTF

SEQ ID NO: 81783 - protein, 13 aa, Homo sapiens
  CDR3 for alpha chain variable domain of TCR clone 40892 (TRAV13-2, TRAJ13)
CAERPGGYQRVTL

SEQ ID NO: 81784 - protein, 15 aa, Homo sapiens
  CDR3 for beta chain variable domain of TCR clone 40892 (TRBV11-3, TRBJ2-7)
CASSPGPASSYEQYF

SEQ ID NO: 81785 - protein, 11 aa, Homo sapiens
  CDR3 for alpha chain variable domain of TCR clone 40893 (TRAV12-3, TRAJ27)
CAMANAGKSTF

SEQ ID NO: 81786 - protein, 13 aa, Homo sapiens
  CDR3 for beta chain variable domain of TCR clone 40893 (TRBV20-1, TRBJ1-1)
CSARVGGNTEAFC

SEQ ID NO: 81787 - protein, 16 aa, Homo sapiens
  CDR3 for alpha chain variable domain of TCR clone 40894 (TRAV3, TRAJ10)
CAVRDMRAGGGNKLTF

SEQ ID NO: 81788 - protein, 13 aa, Homo sapiens
  CDR3 for beta chain variable domain of TCR clone 40894 (TRBV7-3, TRBJ2-3)
CASSISAQGTQYF

SEQ ID NO: 81789 - protein, 15 aa, Homo sapiens
  CDR3 for alpha chain variable domain of TCR clone 40895 (TRAV8-2, TRAJ40)
CVVLGTTSGTYKYIF

SEQ ID NO: 81790 - protein, 16 aa, Homo sapiens
  CDR3 for beta chain variable domain of TCR clone 40895 (TRBV7-3, TRBJ2-1)
CASSLEGYRSYNDQFF

SEQ ID NO: 81791 - protein, 13 aa, Homo sapiens
  CDR3 for alpha chain variable domain of TCR clone 40896 (TRAV12-2, TRAJ20)
CAVYPSNDYKLSF

SEQ ID NO: 81792 - protein, 15 aa, Homo sapiens
  CDR3 for beta chain variable domain of TCR clone 40896 (TRBV27, TRBJ2-5)
YASSLYPRGGETQYF

SEQ ID NO: 81793 - protein, 11 aa, Homo sapiens
  CDR3 for alpha chain variable domain of TCR clone 40897 (TRAV1-1, TRAJ23)
FAVRQGGKLIF

SEQ ID NO: 81794 - protein, 13 aa, Homo sapiens
  CDR3 for beta chain variable domain of TCR clone 40897 (TRBV7-3, TRBJ1-1)
CASSQDWGAEAFF

SEQ ID NO: 81795 - protein, 12 aa, Homo sapiens
  CDR3 for alpha chain variable domain of TCR clone 40898 (TRAV8-3, TRAJ20)
CAVGANDYKLSF

SEQ ID NO: 81796 - protein, 13 aa, Homo sapiens
  CDR3 for beta chain variable domain of TCR clone 40898 (TRBV9, TRBJ2-1)
CASSPSGGNEQFF

SEQ ID NO: 81797 - protein, 14 aa, Homo sapiens
  CDR3 for alpha chain variable domain of TCR clone 40899 (TRAV10, TRAJ34)
CVVSGKHRQAHLRD

SEQ ID NO: 81798 - protein, 14 aa, Homo sapiens
  CDR3 for beta chain variable domain of TCR clone 40899 (TRBV19, TRBJ2-1)
CASPTFVLSGEQFF

SEQ ID NO: 81799 - protein, 11 aa, Homo sapiens
  CDR3 for alpha chain variable domain of TCR clone 40900 (TRAV21, TRAJ11)
CAVNGYSTLTF

SEQ ID NO: 81800 - protein, 11 aa, Homo sapiens
  CDR3 for beta chain variable domain of TCR clone 40900 (TRBV19, TRBJ1-1)
CASSNGSEAFF

SEQ ID NO: 81801 - protein, 13 aa, Homo sapiens
  CDR3 for alpha chain variable domain of TCR clone 40901 (TRAV17, TRAJ9)
CATDYTGGFKTIF

SEQ ID NO: 81802 - protein, 14 aa, Homo sapiens
  CDR3 for beta chain variable domain of TCR clone 40901 (TRBV19, TRBJ2-5)
RASSMTGQQETQYF

SEQ ID NO: 81803 - protein, 14 aa, Homo sapiens
  CDR3 for alpha chain variable domain of TCR clone 40902 (TRAV17, TRAJ31)
CATVLRNNYARLMF

SEQ ID NO: 81804 - protein, 14 aa, Homo sapiens
  CDR3 for beta chain variable domain of TCR clone 40902 (TRBV12-4, TRBJ2-5)
CASSLWQKQETQYF

SEQ ID NO: 81805 - protein, 13 aa, Homo sapiens
  CDR3 for alpha chain variable domain of TCR clone 40903 (TRAV8-6, TRAJ49)
CAVITNTGNQFYF

SEQ ID NO: 81806 - protein, 17 aa, Homo sapiens
  CDR3 for beta chain variable domain of TCR clone 40903 (TRBV13, TRBJ2-3)
CASSLSRVAGGRNTQYF

SEQ ID NO: 81807 - protein, 15 aa, Homo sapiens
  CDR3 for alpha chain variable domain of TCR clone 40904 (TRAV13-1, TRAJ32)
CAASDGWWCYKQAHL

SEQ ID NO: 81808 - protein, 15 aa, Homo sapiens
  CDR3 for beta chain variable domain of TCR clone 40904 (TRBV20-1, TRBJ2-7)
CSARDRVSGMDEQYF

SEQ ID NO: 81809 - protein, 15 aa, Homo sapiens
  CDR3 for alpha chain variable domain of TCR clone 40905 (TRAV2, TRAJ9)
CAVEDRGTGGFKTIF

SEQ ID NO: 81810 - protein, 16 aa, Homo sapiens
  CDR3 for beta chain variable domain of TCR clone 40905 (TRBV24-1, TRBJ2-3)
CATSYPGTGATDTQYF

SEQ ID NO: 81811 - protein, 13 aa, Homo sapiens
  CDR3 for alpha chain variable domain of TCR clone 40906 (TRAV20, TRAJ34)
CAVRSYNTDKLIF

SEQ ID NO: 81812 - protein, 14 aa, Homo sapiens
  CDR3 for beta chain variable domain of TCR clone 40906 (TRBV28, TRBJ1-1)
CASSLWWSLAEAFF

SEQ ID NO: 81813 - protein, 13 aa, Homo sapiens
  CDR3 for alpha chain variable domain of TCR clone 40907 (TRAV8-3, TRAJ36)
CAVGATGANNLFF

SEQ ID NO: 81814 - protein, 15 aa, Homo sapiens
  CDR3 for beta chain variable domain of TCR clone 40907 (TRBV7-2, TRBJ1-2)
YASSPRAGWNYGYTF

SEQ ID NO: 81815 - protein, 15 aa, Homo sapiens
  CDR3 for alpha chain variable domain of TCR clone 40908 (TRAV27, TRAJ38)
CAARRNAGNNRKLIW

SEQ ID NO: 81816 - protein, 13 aa, Homo sapiens
  CDR3 for beta chain variable domain of TCR clone 40908 (TRBV20-1, TRBJ1-1)
CSARAGGNTEAFF

SEQ ID NO: 81817 - protein, 18 aa, Homo sapiens
  CDR3 for alpha chain variable domain of TCR clone 40909 (TRAV26-1, TRAJ23)
CIVRVGLEVWNQGGELIF

SEQ ID NO: 81818 - protein, 16 aa, Homo sapiens
  CDR3 for beta chain variable domain of TCR clone 40909 (TRBV12-4, TRBJ2-5)
CASSFFVRGRQETQYF

SEQ ID NO: 81819 - protein, 16 aa, Homo sapiens
  CDR3 for alpha chain variable domain of TCR clone 40910 (TRAV23/DV6, TRAJ9)
CAASIGGNTGGFKTIF

SEQ ID NO: 81820 - protein, 14 aa, Homo sapiens
  CDR3 for beta chain variable domain of TCR clone 40910 (TRBV9, TRBJ2-7)
CASSVGVGPYEQYF

SEQ ID NO: 81821 - protein, 15 aa, Homo sapiens
  CDR3 for alpha chain variable domain of TCR clone 40911 (TRAV12-1, TRAJ42)
CVVTRDGGSQGNLIF

SEQ ID NO: 81822 - protein, 14 aa, Homo sapiens
  CDR3 for beta chain variable domain of TCR clone 40911 (TRBV19, TRBJ2-1)
CASPTFVLSGEQFF

SEQ ID NO: 81823 - protein, 12 aa, Homo sapiens
  CDR3 for alpha chain variable domain of TCR clone 40912 (TRAV3, TRAJ20)
CAVRDGDYKLSF

SEQ ID NO: 81824 - protein, 16 aa, Homo sapiens
  CDR3 for beta chain variable domain of TCR clone 40912 (TRBV7-9, TRBJ2-3)
CASSPWREVGTDTQYF

SEQ ID NO: 81825 - protein, 12 aa, Homo sapiens
  CDR3 for alpha chain variable domain of TCR clone 40913 (TRAV12-3, TRAJ17)
CAMTLTGNKLTF

SEQ ID NO: 81826 - protein, 14 aa, Homo sapiens
  CDR3 for beta chain variable domain of TCR clone 40913 (TRBV6-1, TRBJ1-3)
CASVQGGGGNTIYF

SEQ ID NO: 81827 - protein, 13 aa, Homo sapiens
  CDR3 for alpha chain variable domain of TCR clone 40914 (TRAV20, TRAJ37)
CAGCSSNTGKLIF

SEQ ID NO: 81828 - protein, 11 aa, Homo sapiens
  CDR3 for beta chain variable domain of TCR clone 40914 (TRBV7-8, TRBJ2-7)
CASSLSLEQYF

SEQ ID NO: 81829 - protein, 17 aa, Homo sapiens
  CDR3 for alpha chain variable domain of TCR clone 40915 (TRAV3, TRAJ38)
CAVRDCLNAGNNRKLIR

SEQ ID NO: 81830 - protein, 13 aa, Homo sapiens
  CDR3 for beta chain variable domain of TCR clone 40915 (TRBV23-1, TRBJ1-4)
CASRGKFNEKLFF

SEQ ID NO: 81831 - protein, 17 aa, Homo sapiens
  CDR3 for alpha chain variable domain of TCR clone 40916 (TRAV8-6, TRAJ58)
CAVSSWVGETSGSRLTF

SEQ ID NO: 81832 - protein, 14 aa, Homo sapiens
  CDR3 for beta chain variable domain of TCR clone 40916 (TRBV4-2, TRBJ2-1)
CASGLSRAYNEQFF

SEQ ID NO: 81833 - protein, 18 aa, Homo sapiens
  CDR3 for alpha chain variable domain of TCR clone 40917 (TRAV35, TRAJ28)
CAGHNYPLSGAGSYQLTF

SEQ ID NO: 81834 - protein, 12 aa, Homo sapiens
  CDR3 for beta chain variable domain of TCR clone 40917 (TRBV7-9, TRBJ1-1)
CASSLEGTEAFS

SEQ ID NO: 81835 - protein, 13 aa, Homo sapiens
  CDR3 for alpha chain variable domain of TCR clone 40918 (TRAV21, TRAJ20)
CAVGLRVDYKLSF

SEQ ID NO: 81836 - protein, 15 aa, Homo sapiens
  CDR3 for beta chain variable domain of TCR clone 40918 (TRBV19, TRBJ2-1)
CASSSPGVPLDEQFF

SEQ ID NO: 81837 - protein, 12 aa, Homo sapiens
  CDR3 for alpha chain variable domain of TCR clone 40919 (TRAV27, TRAJ58)
CAGARDTSRLTF

SEQ ID NO: 81838 - protein, 14 aa, Homo sapiens
  CDR3 for beta chain variable domain of TCR clone 40919 (TRBV7-3, TRBJ2-1)
CASSLGTSANGQFF

SEQ ID NO: 81839 - protein, 12 aa, Homo sapiens
  CDR3 for alpha chain variable domain of TCR clone 40920 (TRAV26-1, TRAJ13)
CIVSRGYQKVTF

SEQ ID NO: 81840 - protein, 17 aa, Homo sapiens
  CDR3 for beta chain variable domain of TCR clone 40920 (TRBV7-8, TRBJ2-6)
CASSAGTGGAGANVLTF

SEQ ID NO: 81841 - protein, 11 aa, Homo sapiens
  CDR3 for alpha chain variable domain of TCR clone 40921 (TRAV2, TRAJ21)
CSVFNFNKFYF

SEQ ID NO: 81842 - protein, 14 aa, Homo sapiens
  CDR3 for beta chain variable domain of TCR clone 40921 (TRBV15, TRBJ2-3)
CATRSGTSTDTQYF

SEQ ID NO: 81843 - protein, 11 aa, Homo sapiens
  CDR3 for alpha chain variable domain of TCR clone 40922 (TRAV12-3, TRAJ49)
CAANTGNQFYF

SEQ ID NO: 81844 - protein, 12 aa, Homo sapiens
  CDR3 for beta chain variable domain of TCR clone 40922 (TRBV6-3, TRBJ2-7)
CASGEPGFEQYF

SEQ ID NO: 81845 - protein, 23 aa, Homo sapiens
  CDR3 for alpha chain variable domain of TCR clone 40923 (TRAV26-1, TRAJ38)
CIADNAGNNHIQNPDPAVYQLRD

SEQ ID NO: 81846 - protein, 13 aa, Homo sapiens
  CDR3 for beta chain variable domain of TCR clone 40923 (TRBV20-1, TRBJ1-1)
CSARGGGNNEAFF

SEQ ID NO: 81847 - protein, 12 aa, Homo sapiens
  CDR3 for alpha chain variable domain of TCR clone 40924 (TRAV12-3, TRAJ17)
CATALTGNKLTF

SEQ ID NO: 81848 - protein, 15 aa, Homo sapiens
  CDR3 for beta chain variable domain of TCR clone 40924 (TRBV20-1, TRBJ2-7)
CSARDRVSGMDEQYF

SEQ ID NO: 81849 - protein, 21 aa, Homo sapiens
  CDR3 for alpha chain variable domain of TCR clone 40925 (TRAV8-3, TRAJ10)
CAVGHTHGRRKQTHLWGRHSA

SEQ ID NO: 81850 - protein, 10 aa, Homo sapiens
  CDR3 for beta chain variable domain of TCR clone 40925 (TRBV20-1, TRBJ2-5)
CSARFETQYF

SEQ ID NO: 81851 - protein, 12 aa, Homo sapiens
  CDR3 for alpha chain variable domain of TCR clone 40926 (TRAV27, TRAJ13)
CAGVRGYQKVTF

SEQ ID NO: 81852 - protein, 16 aa, Homo sapiens
  CDR3 for beta chain variable domain of TCR clone 40926 (TRBV28, TRBJ2-1)
CARSSSYSGSLNEQFF

SEQ ID NO: 81853 - protein, 13 aa, Homo sapiens
  CDR3 for alpha chain variable domain of TCR clone 40927 (TRAV3, TRAJ21)
CAVREPDFNKFYF

SEQ ID NO: 81854 - protein, 17 aa, Homo sapiens
  CDR3 for beta chain variable domain of TCR clone 40927 (TRBV20-1, TRBJ2-1)
CSASSSGLAGSYNEQFF

SEQ ID NO: 81855 - protein, 13 aa, Homo sapiens
  CDR3 for alpha chain variable domain of TCR clone 40928 (TRAV8-3, TRAJ28)
CAVGAVGIYQLTF

SEQ ID NO: 81856 - protein, 14 aa, Homo sapiens
  CDR3 for beta chain variable domain of TCR clone 40928 (TRBV7-2, TRBJ2-7)
CASRSQGAAYEQYF

SEQ ID NO: 81857 - protein, 17 aa, Homo sapiens
  CDR3 for alpha chain variable domain of TCR clone 40929 (TRAV26-2, TRAJ28)
CILRPLLIVAGSYQLTF

SEQ ID NO: 81858 - protein, 16 aa, Homo sapiens
  CDR3 for beta chain variable domain of TCR clone 40929 (TRBV6-4, TRBJ1-4)
CASSETGRDPNEKLFF

SEQ ID NO: 81859 - protein, 16 aa, Homo sapiens
  CDR3 for alpha chain variable domain of TCR clone 40930 (TRAV30, TRAJ24)
CGTEIVDADSWGKFQF

SEQ ID NO: 81860 - protein, 13 aa, Homo sapiens
  CDR3 for beta chain variable domain of TCR clone 40930 (TRBV2, TRBJ1-1)
CASSEGGNTEAFF

SEQ ID NO: 81861 - protein, 11 aa, Homo sapiens
  CDR3 for alpha chain variable domain of TCR clone 40931 (TRAV2, TRAJ33)
CAVDSNYQLIW

SEQ ID NO: 81862 - protein, 14 aa, Homo sapiens
  CDR3 for beta chain variable domain of TCR clone 40931 (TRBV5-5, TRBJ1-5)
CASSGQGVDQPQHF

SEQ ID NO: 81863 - protein, 11 aa, Homo sapiens
  CDR3 for alpha chain variable domain of TCR clone 40932 (TRAV12-2, TRAJ31)
FAVTRWARLMF

SEQ ID NO: 81864 - protein, 15 aa, Homo sapiens
  CDR3 for beta chain variable domain of TCR clone 40932 (TRBV19, TRBJ2-7)
CASSIGGGLVNEQYF

SEQ ID NO: 81865 - protein, 13 aa, Homo sapiens
  CDR3 for alpha chain variable domain of TCR clone 40933 (TRAV2, TRAJ3)
CAVDGSSASKIIF

SEQ ID NO: 81866 - protein, 16 aa, Homo sapiens
  CDR3 for beta chain variable domain of TCR clone 40933 (TRBV15, TRBJ2-3)
CATIPAGGIATDTQYF

SEQ ID NO: 81867 - protein, 15 aa, Homo sapiens
  CDR3 for alpha chain variable domain of TCR clone 40934 (TRAV14/DV4, TRAJ20)
CAMRPHVANDYKLSF

SEQ ID NO: 81868 - protein, 13 aa, Homo sapiens
  CDR3 for beta chain variable domain of TCR clone 40934 (TRBV28, TRBJ2-7)
CASSNSGNYEQYF

SEQ ID NO: 81869 - protein, 14 aa, Homo sapiens
  CDR3 for alpha chain variable domain of TCR clone 40935 (TRAV12-1, TRAJ17)
CVVNDKAAGNKLTF

SEQ ID NO: 81870 - protein, 17 aa, Homo sapiens
  CDR3 for beta chain variable domain of TCR clone 40935 (TRBV20-1, TRBJ2-1)
CSASSSGLAGSYNEQFF

SEQ ID NO: 81871 - protein, 16 aa, Homo sapiens
  CDR3 for alpha chain variable domain of TCR clone 40936 (TRAV4, TRAJ22)
CLVGDLYSGSARQLTF

SEQ ID NO: 81872 - protein, 15 aa, Homo sapiens
  CDR3 for beta chain variable domain of TCR clone 40936 (TRBV9, TRBJ2-1)
CASSLAGSSYNEQFS

SEQ ID NO: 81873 - protein, 17 aa, Homo sapiens
  CDR3 for alpha chain variable domain of TCR clone 40937 (TRAV3, TRAJ42)
CAVRDRDYGGSQGNPIF

SEQ ID NO: 81874 - protein, 18 aa, Homo sapiens
  CDR3 for beta chain variable domain of TCR clone 40937 (TRBV20-1, TRBJ2-3)
CSASGLAGGPGTTDTQYF

SEQ ID NO: 81875 - protein, 16 aa, Homo sapiens
  CDR3 for alpha chain variable domain of TCR clone 40938 (TRAV27, TRAJ13)
CAGAKSDSGGYQKVTF

SEQ ID NO: 81876 - protein, 15 aa, Homo sapiens
  CDR3 for beta chain variable domain of TCR clone 40938 (TRBV29-1, TRBJ2-1)
CSVGRHAVFYNEQFF

SEQ ID NO: 81877 - protein, 12 aa, Homo sapiens
  CDR3 for alpha chain variable domain of TCR clone 40939 (TRAV4, TRAJ26)
CLVGDYGQNFVF

SEQ ID NO: 81878 - protein, 16 aa, Homo sapiens
  CDR3 for beta chain variable domain of TCR clone 40939 (TRBV7-3, TRBJ2-2)
CASSLKRGTLSGELFF

SEQ ID NO: 81879 - protein, 17 aa, Homo sapiens
  CDR3 for alpha chain variable domain of TCR clone 40940 (TRAV12-3, TRAJ6)
CAMSARGGAGGSYIPTV

SEQ ID NO: 81880 - protein, 12 aa, Homo sapiens
  CDR3 for beta chain variable domain of TCR clone 40940 (TRBV12-4, TRBJ2-3)
CASSTLPDTQYF

SEQ ID NO: 81881 - protein, 15 aa, Homo sapiens
  CDR3 for alpha chain variable domain of TCR clone 40941 (TRAV8-3, TRAJ11)
CAVGLLNSGYSTLTL

SEQ ID NO: 81882 - protein, 16 aa, Homo sapiens
  CDR3 for beta chain variable domain of TCR clone 40941 (TRBV7-3, TRBJ2-2)
CASSLKRGTLSGELFF

SEQ ID NO: 81883 - protein, 11 aa, Homo sapiens
  CDR3 for alpha chain variable domain of TCR clone 40942 (TRAV3, TRAJ17)
PRGAAGNRLTF

SEQ ID NO: 81884 - protein, 16 aa, Homo sapiens
  CDR3 for beta chain variable domain of TCR clone 40942 (TRBV7-6, TRBJ2-1)
CASSAPGPSSYNEQFF

SEQ ID NO: 81885 - protein, 15 aa, Homo sapiens
  CDR3 for alpha chain variable domain of TCR clone 40943 (TRAV2, TRAJ37)
CAVEDGSSNTGKLIF

SEQ ID NO: 81886 - protein, 15 aa, Homo sapiens
  CDR3 for beta chain variable domain of TCR clone 40943 (TRBV7-9, TRBJ1-6)
CASSSPGRGNSPLHF

SEQ ID NO: 81887 - protein, 11 aa, Homo sapiens
  CDR3 for alpha chain variable domain of TCR clone 40944 (TRAV21, TRAJ34)
CAHYNTDKLIF

SEQ ID NO: 81888 - protein, 13 aa, Homo sapiens
  CDR3 for beta chain variable domain of TCR clone 40944 (TRBV7-6, TRBJ1-2)
CAGSLVADYGYTF

SEQ ID NO: 81889 - protein, 13 aa, Homo sapiens
  CDR3 for alpha chain variable domain of TCR clone 40945 (TRAV12-1, TRAJ42)
CVVNDPRQGNLIF

SEQ ID NO: 81890 - protein, 15 aa, Homo sapiens
  CDR3 for beta chain variable domain of TCR clone 40945 (TRBV20-1, TRBJ2-3)
CSASESRGQGYTQYF

SEQ ID NO: 81891 - protein, 13 aa, Homo sapiens
  CDR3 for alpha chain variable domain of TCR clone 40946 (TRAV17, TRAJ54)
CATVIQGAQKLVS

SEQ ID NO: 81892 - protein, 15 aa, Homo sapiens
  CDR3 for beta chain variable domain of TCR clone 40946 (TRBV13, TRBJ2-1)
CASSLLSGLNNEQFF

SEQ ID NO: 81893 - protein, 13 aa, Homo sapiens
  CDR3 for alpha chain variable domain of TCR clone 40947 (TRAV2, TRAJ24)
CAVTTDSWGKLQF

SEQ ID NO: 81894 - protein, 14 aa, Homo sapiens
  CDR3 for beta chain variable domain of TCR clone 40947 (TRBV13, TRBJ2-5)
CASSLGRGQGTQYF

SEQ ID NO: 81895 - protein, 14 aa, Homo sapiens
  CDR3 for alpha chain variable domain of TCR clone 40948 (TRAV26-1, TRAJ39)
CIAFTNNAGNMLTF

SEQ ID NO: 81896 - protein, 15 aa, Homo sapiens
  CDR3 for beta chain variable domain of TCR clone 40948 (TRBV19, TRBJ2-4)
CASSLTGLTKNIQYF

SEQ ID NO: 81897 - protein, 11 aa, Homo sapiens
  CDR3 for alpha chain variable domain of TCR clone 40949 (TRAV39, TRAJ49)
CAVDISTQFYF

SEQ ID NO: 81898 - protein, 11 aa, Homo sapiens
  CDR3 for beta chain variable domain of TCR clone 40949 (TRBV7-8, TRBJ2-7)
CASSLSLEQYV

SEQ ID NO: 81899 - protein, 13 aa, Homo sapiens
  CDR3 for alpha chain variable domain of TCR clone 40950 (TRAV17, TRAJ7)
CTTDNYGNNRLAF

SEQ ID NO: 81900 - protein, 13 aa, Homo sapiens
  CDR3 for beta chain variable domain of TCR clone 40950 (TRBV7-2, TRBJ1-1)
CASNLKGAKVAFF

SEQ ID NO: 81901 - protein, 14 aa, Homo sapiens
  CDR3 for alpha chain variable domain of TCR clone 40951 (TRAV1-2, TRAJ16)
CAVNRFSDGQKLLF

SEQ ID NO: 81902 - protein, 19 aa, Homo sapiens
  CDR3 for beta chain variable domain of TCR clone 40951 (TRBV19, TRBJ2-2)
CASTRPGLAGGRVTGELFF

SEQ ID NO: 81903 - protein, 13 aa, Homo sapiens
  CDR3 for alpha chain variable domain of TCR clone 40952 (TRAV19, TRAJ26)
CALTFDYGQNFVF

SEQ ID NO: 81904 - protein, 14 aa, Homo sapiens
  CDR3 for beta chain variable domain of TCR clone 40952 (TRBV25-1, TRBJ1-1)
CASTHLGGNTEAFF

SEQ ID NO: 81905 - protein, 15 aa, Homo sapiens
  CDR3 for alpha chain variable domain of TCR clone 40953 (TRAV26-1, TRAJ40)
CIVRVTTSGTYKYIF

SEQ ID NO: 81906 - protein, 12 aa, Homo sapiens
  CDR3 for beta chain variable domain of TCR clone 40953 (TRBV7-9, TRBJ1-4)
CASSTDREKLLF

SEQ ID NO: 81907 - protein, 15 aa, Homo sapiens
  CDR3 for alpha chain variable domain of TCR clone 40954 (TRAV8-3, TRAJ27)
CAVGPSKTNAGKSTF

SEQ ID NO: 81908 - protein, 14 aa, Homo sapiens
  CDR3 for beta chain variable domain of TCR clone 40954 (TRBV7-8, TRBJ2-3)
CASSFPDGQDTQYF

SEQ ID NO: 81909 - protein, 22 aa, Homo sapiens
  CDR3 for alpha chain variable domain of TCR clone 40955 (TRAV12-2, TRAJ32)
CPSETPSPVIQPPKSATNKLIF

SEQ ID NO: 81910 - protein, 14 aa, Homo sapiens
  CDR3 for beta chain variable domain of TCR clone 40955 (TRBV7-3, TRBJ2-1)
CASSLSGSYNEQFF

SEQ ID NO: 81911 - protein, 11 aa, Homo sapiens
  CDR3 for alpha chain variable domain of TCR clone 40956 (TRAV21, TRAJ34)
CAVTNTDKLIF

SEQ ID NO: 81912 - protein, 14 aa, Homo sapiens
  CDR3 for beta chain variable domain of TCR clone 40956 (TRBV4-1, TRBJ2-2)
CASSQAVNTGELFF

SEQ ID NO: 81913 - protein, 14 aa, Homo sapiens
  CDR3 for alpha chain variable domain of TCR clone 40957 (TRAV12-2, TRAJ17)
CAVLFNAAGNKLTF

SEQ ID NO: 81914 - protein, 13 aa, Homo sapiens
  CDR3 for beta chain variable domain of TCR clone 40957 (TRBV19, TRBJ1-2)
CASSQGQVYGYTF

SEQ ID NO: 81915 - protein, 13 aa, Homo sapiens
  CDR3 for alpha chain variable domain of TCR clone 40958 (TRAV2, TRAJ15)
CAVASQAGTALIF

SEQ ID NO: 81916 - protein, 17 aa, Homo sapiens
  CDR3 for beta chain variable domain of TCR clone 40958 (TRBV20-1, TRBJ2-2)
CSASGSGQGGLTGELCF

SEQ ID NO: 81917 - protein, 16 aa, Homo sapiens
  CDR3 for alpha chain variable domain of TCR clone 40959 (TRAV3, TRAJ37)
CAVRPHSSGNTGKLIF

SEQ ID NO: 81918 - protein, 14 aa, Homo sapiens
  CDR3 for beta chain variable domain of TCR clone 40959 (TRBV2, TRBJ2-1)
CASSDRAYYNEQFF

SEQ ID NO: 81919 - protein, 12 aa, Homo sapiens
  CDR3 for alpha chain variable domain of TCR clone 40960 (TRAV27, TRAJ33)
CAGDGSNYQLIW

SEQ ID NO: 81920 - protein, 15 aa, Homo sapiens
  CDR3 for beta chain variable domain of TCR clone 40960 (TRBV2, TRBJ2-3)
CASSDFEKATDTQYF

SEQ ID NO: 81921 - protein, 12 aa, Homo sapiens
  CDR3 for alpha chain variable domain of TCR clone 40961 (TRAV1-2, TRAJ9)
CAGYTGGFKTIF

SEQ ID NO: 81922 - protein, 15 aa, Homo sapiens
  CDR3 for beta chain variable domain of TCR clone 40961 (TRBV11-2, TRBJ2-1)
CASSPAEQSLNEQFF

SEQ ID NO: 81923 - protein, 15 aa, Homo sapiens
  CDR3 for alpha chain variable domain of TCR clone 40962 (TRAV8-3, TRAJ27)
CAVGPSKTNAGKSTF

SEQ ID NO: 81924 - protein, 15 aa, Homo sapiens
  CDR3 for beta chain variable domain of TCR clone 40962 (TRBV7-2, TRBJ2-1)
CDSSSGLAGGNEQFF

SEQ ID NO: 81925 - protein, 15 aa, Homo sapiens
  CDR3 for alpha chain variable domain of TCR clone 40963 (TRAV26-1, TRAJ44)
CIVRASTGTASKLTF

SEQ ID NO: 81926 - protein, 18 aa, Homo sapiens
  CDR3 for beta chain variable domain of TCR clone 40963 (TRBV28, TRBJ2-1)
CASSSTSGRANSYNEQFF

SEQ ID NO: 81927 - protein, 11 aa, Homo sapiens
  CDR3 for alpha chain variable domain of TCR clone 40964 (TRAV4, TRAJ31)
FLVGLNARLMF

SEQ ID NO: 81928 - protein, 16 aa, Homo sapiens
  CDR3 for beta chain variable domain of TCR clone 40964 (TRBV15, TRBJ2-6)
CATSVNGGFLANVLTF

SEQ ID NO: 81929 - protein, 12 aa, Homo sapiens
  CDR3 for alpha chain variable domain of TCR clone 40965 (TRAV13-2, TRAJ23)
CAGRHRGGKLIF

SEQ ID NO: 81930 - protein, 14 aa, Homo sapiens
  CDR3 for beta chain variable domain of TCR clone 40965 (TRBV2, TRBJ2-7)
CASSLTSGGYEQYF

SEQ ID NO: 81931 - protein, 13 aa, Homo sapiens
  CDR3 for alpha chain variable domain of TCR clone 40966 (TRAV16, TRAJ28)
CGLTGAGSYQLTF

SEQ ID NO: 81932 - protein, 16 aa, Homo sapiens
  CDR3 for beta chain variable domain of TCR clone 40966 (TRBV28, TRBJ1-5)
CASSLTGQGWNQPQHF

SEQ ID NO: 81933 - protein, 15 aa, Homo sapiens
  CDR3 for alpha chain variable domain of TCR clone 40967 (TRAV38-1, TRAJ57)
CSFMDSQGGSEKLVF

SEQ ID NO: 81934 - protein, 16 aa, Homo sapiens
  CDR3 for beta chain variable domain of TCR clone 40967 (TRBV10-3, TRBJ2-1)
CAIRGGGRGDYNEQFF

SEQ ID NO: 81935 - protein, 12 aa, Homo sapiens
  CDR3 for alpha chain variable domain of TCR clone 40968 (TRAV21, TRAJ11)
CATTSGYSTLTF

SEQ ID NO: 81936 - protein, 15 aa, Homo sapiens
  CDR3 for beta chain variable domain of TCR clone 40968 (TRBV6-1, TRBJ2-3)
CASSERGGITDTQYF

SEQ ID NO: 81937 - protein, 16 aa, Homo sapiens
  CDR3 for alpha chain variable domain of TCR clone 40969 (TRAV20, TRAJ22)
CAVQASSSGSARQLTF

SEQ ID NO: 81938 - protein, 13 aa, Homo sapiens
  CDR3 for beta chain variable domain of TCR clone 40969 (TRBV7-2, TRBJ2-5)
CASSQTSVEIQYF

SEQ ID NO: 81939 - protein, 13 aa, Homo sapiens
  CDR3 for alpha chain variable domain of TCR clone 40970 (TRAV12-3, TRAJ7)
CAMTPYGSNRLAF

SEQ ID NO: 81940 - protein, 16 aa, Homo sapiens
  CDR3 for beta chain variable domain of TCR clone 40970 (TRBV20-1, TRBJ1-4)
CSARPYGGELNEKLFF

SEQ ID NO: 81941 - protein, 14 aa, Homo sapiens
  CDR3 for alpha chain variable domain of TCR clone 40971 (TRAV20, TRAJ26)
CAVQAAIYGQNFVF

SEQ ID NO: 81942 - protein, 14 aa, Homo sapiens
  CDR3 for beta chain variable domain of TCR clone 40971 (TRBV27, TRBJ2-2)
CASSLGDTTGELLF

SEQ ID NO: 81943 - protein, 15 aa, Homo sapiens
  CDR3 for alpha chain variable domain of TCR clone 40972 (TRAV12-2, TRAJ43)
CAFDMRFGAGTRLTV

SEQ ID NO: 81944 - protein, 18 aa, Homo sapiens
  CDR3 for beta chain variable domain of TCR clone 40972 (TRBV20-1, TRBJ2-3)
CSASGLAGGPGTIDTQYF

SEQ ID NO: 81945 - protein, 13 aa, Homo sapiens
  CDR3 for alpha chain variable domain of TCR clone 40973 (TRAV2, TRAJ15)
CAVASQAGTAMIF

SEQ ID NO: 81946 - protein, 16 aa, Homo sapiens
  CDR3 for beta chain variable domain of TCR clone 40973 (TRBV20-1, TRBJ1-4)
CSAPGQGLLTNEKLFF

SEQ ID NO: 81947 - protein, 14 aa, Homo sapiens
  CDR3 for alpha chain variable domain of TCR clone 40974 (TRAV1-2, TRAJ16)
CAVNRFSDGQKLLF

SEQ ID NO: 81948 - protein, 15 aa, Homo sapiens
  CDR3 for beta chain variable domain of TCR clone 40974 (TRBV11-3, TRBJ2-3)
CAGLKDGREGDTQYF

SEQ ID NO: 81949 - protein, 19 aa, Homo sapiens
  CDR3 for alpha chain variable domain of TCR clone 40975 (TRAV26-1, TRAJ52)
CVVRAHRNAGGTSYGKLTF

SEQ ID NO: 81950 - protein, 14 aa, Homo sapiens
  CDR3 for beta chain variable domain of TCR clone 40975 (TRBV7-6, TRBJ2-3)
CASSLGTVTDTQYF

SEQ ID NO: 81951 - protein, 14 aa, Homo sapiens
  CDR3 for alpha chain variable domain of TCR clone 40976 (TRAV2, TRAJ9)
CAVEDRSGGFKTIF

SEQ ID NO: 81952 - protein, 15 aa, Homo sapiens
  CDR3 for beta chain variable domain of TCR clone 40976 (TRBV6-1, TRBJ2-1)
CASSELRGQYNEQFF

SEQ ID NO: 81953 - protein, 14 aa, Homo sapiens
  CDR3 for alpha chain variable domain of TCR clone 40977 (TRAV12-2, TRAJ17)
CAVLFKAAGNKLTF

SEQ ID NO: 81954 - protein, 14 aa, Homo sapiens
  CDR3 for beta chain variable domain of TCR clone 40977 (TRBV7-2, TRBJ1-1)
CASSFLTGTTEAFF

SEQ ID NO: 81955 - protein, 10 aa, Homo sapiens
  CDR3 for alpha chain variable domain of TCR clone 40978 (TRAV8-4, TRAJ43)
CAVSADDMRV

SEQ ID NO: 81956 - protein, 15 aa, Homo sapiens
  CDR3 for beta chain variable domain of TCR clone 40978 (TRBV5-1, TRBJ2-3)
CASSVTSGSTDTQYF

SEQ ID NO: 81957 - protein, 13 aa, Homo sapiens
  CDR3 for alpha chain variable domain of TCR clone 40979 (TRAV8-3, TRAJ28)
CAVGAVGSYQLTF

SEQ ID NO: 81958 - protein, 15 aa, Homo sapiens
  CDR3 for beta chain variable domain of TCR clone 40979 (TRBV7-9, TRBJ1-5)
CASSQGPQPNQPQHF

SEQ ID NO: 81959 - protein, 10 aa, Homo sapiens
  CDR3 for alpha chain variable domain of TCR clone 40980 (TRAV8-4, TRAJ43)
CAVSADDMRF

SEQ ID NO: 81960 - protein, 14 aa, Homo sapiens
  CDR3 for beta chain variable domain of TCR clone 40980 (TRBV12-4, TRBJ1-1)
CASSLGTGGTEAFF

SEQ ID NO: 81961 - protein, 16 aa, Homo sapiens
  CDR3 for alpha chain variable domain of TCR clone 40981 (TRAV23/DV6, TRAJ57)
CAASSTLSQGGSEKLF

SEQ ID NO: 81962 - protein, 14 aa, Homo sapiens
  CDR3 for beta chain variable domain of TCR clone 40981 (TRBV7-8, TRBJ2-5)
CASSATGGQETQYF

SEQ ID NO: 81963 - protein, 12 aa, Homo sapiens
  CDR3 for alpha chain variable domain of TCR clone 40982 (TRAV22, TRAJ43)
CAVELNNNDMRF

SEQ ID NO: 81964 - protein, 13 aa, Homo sapiens
  CDR3 for beta chain variable domain of TCR clone 40982 (TRBV3-1, TRBJ1-1)
CASSPGVITEAFF

SEQ ID NO: 81965 - protein, 12 aa, Homo sapiens
  CDR3 for alpha chain variable domain of TCR clone 40983 (TRAV8-3, TRAJ26)
CAGDNYGRNFVF

SEQ ID NO: 81966 - protein, 18 aa, Homo sapiens
  CDR3 for beta chain variable domain of TCR clone 40983 (TRBV12-4, TRBJ2-2)
CASSLVAGTRGRTGELFF

SEQ ID NO: 81967 - protein, 13 aa, Homo sapiens
  CDR3 for alpha chain variable domain of TCR clone 40984 (TRAV4, TRAJ33)
CLVGDMNNYQLIW

SEQ ID NO: 81968 - protein, 14 aa, Homo sapiens
  CDR3 for beta chain variable domain of TCR clone 40984 (TRBV7-9, TRBJ1-1)
CASNLGGANTEAFF

SEQ ID NO: 81969 - protein, 16 aa, Homo sapiens
  CDR3 for alpha chain variable domain of TCR clone 40985 (TRAV21, TRAJ37)
CAVRPRGSSNTGKLIF

SEQ ID NO: 81970 - protein, 13 aa, Homo sapiens
  CDR3 for beta chain variable domain of TCR clone 40985 (TRBV7-9, TRBJ2-5)
CASLLPGQETQYF

SEQ ID NO: 81971 - protein, 12 aa, Homo sapiens
  CDR3 for alpha chain variable domain of TCR clone 40986 (TRAV2, TRAJ36)
CAELTGANSLFF

SEQ ID NO: 81972 - protein, 14 aa, Homo sapiens
  CDR3 for beta chain variable domain of TCR clone 40986 (TRBV18, TRBJ2-7)
CASSPRGGAYEQYF

SEQ ID NO: 81973 - protein, 12 aa, Homo sapiens
  CDR3 for alpha chain variable domain of TCR clone 40987 (TRAV12-1, TRAJ40)
CVVYSGTYKYIF

SEQ ID NO: 81974 - protein, 18 aa, Homo sapiens
  CDR3 for beta chain variable domain of TCR clone 40987 (TRBV11-2, TRBJ2-3)
CVSSLGGASRGAPNTQYF

SEQ ID NO: 81975 - protein, 12 aa, Homo sapiens
  CDR3 for alpha chain variable domain of TCR clone 40988 (TRAV13-2, TRAJ8)
CAPWLGFQKLVF

SEQ ID NO: 81976 - protein, 14 aa, Homo sapiens
  CDR3 for beta chain variable domain of TCR clone 40988 (TRBV9, TRBJ2-1)
CASSVAGTFDEQFF

SEQ ID NO: 81977 - protein, 17 aa, Homo sapiens
  CDR3 for alpha chain variable domain of TCR clone 40989 (TRAV8-6, TRAJ58)
CAVSSWVGETSGSRLTF

SEQ ID NO: 81978 - protein, 14 aa, Homo sapiens
  CDR3 for beta chain variable domain of TCR clone 40989 (TRBV4-3, TRBJ2-1)
YASGLDRAYNEQFF

SEQ ID NO: 81979 - protein, 15 aa, Homo sapiens
  CDR3 for alpha chain variable domain of TCR clone 40990 (TRAV12-3, TRAJ10)
CASYILTGGGNKLTF

SEQ ID NO: 81980 - protein, 15 aa, Homo sapiens
  CDR3 for beta chain variable domain of TCR clone 40990 (TRBV7-2, TRBJ1-6)
CASSLGLDRGMPLHF

SEQ ID NO: 81981 - protein, 13 aa, Homo sapiens
  CDR3 for alpha chain variable domain of TCR clone 40991 (TRAV2, TRAJ40)
CAVVTLGTYKYIF

SEQ ID NO: 81982 - protein, 14 aa, Homo sapiens
  CDR3 for beta chain variable domain of TCR clone 40991 (TRBV19, TRBJ2-1)
CASPTFVLSGEQFL

SEQ ID NO: 81983 - protein, 23 aa, Homo sapiens
  CDR3 for alpha chain variable domain of TCR clone 40992 (TRAV12-2, TRAJ22)
CSSETPSPVIQPPGRSSARQLTF

SEQ ID NO: 81984 - protein, 16 aa, Homo sapiens
  CDR3 for beta chain variable domain of TCR clone 40992 (TRBV5-1, TRBJ2-7)
CASSWGTWGRAWEQYF

SEQ ID NO: 81985 - protein, 13 aa, Homo sapiens
  CDR3 for alpha chain variable domain of TCR clone 40993 (TRAV9-2, TRAJ53)
CALSGGSNYKRTF

SEQ ID NO: 81986 - protein, 17 aa, Homo sapiens
  CDR3 for beta chain variable domain of TCR clone 40993 (TRBV11-2, TRBJ2-1)
CASSLYPPGVEYNEQFF

SEQ ID NO: 81987 - protein, 18 aa, Homo sapiens
  CDR3 for alpha chain variable domain of TCR clone 40994 (TRAV35, TRAJ28)
CAGHNYPLSGAGSYQLTF

SEQ ID NO: 81988 - protein, 12 aa, Homo sapiens
  CDR3 for beta chain variable domain of TCR clone 40994 (TRBV7-9, TRBJ1-1)
CASSVEGTEAFF

SEQ ID NO: 81989 - protein, 16 aa, Homo sapiens
  CDR3 for alpha chain variable domain of TCR clone 40995 (TRAV26-1, TRAJ53)
CIVRVAMGGSNYKLTF

SEQ ID NO: 81990 - protein, 15 aa, Homo sapiens
  CDR3 for beta chain variable domain of TCR clone 40995 (TRBV5-1, TRBJ2-1)
CASSPPRAPYNEQFF

SEQ ID NO: 81991 - protein, 16 aa, Homo sapiens
  CDR3 for alpha chain variable domain of TCR clone 40996 (TRAV26-1, TRAJ37)
CIVRGDGSGNAGKLIF

SEQ ID NO: 81992 - protein, 17 aa, Homo sapiens
  CDR3 for beta chain variable domain of TCR clone 40996 (TRBV4-1, TRBJ2-7)
CASSRDPLGVRGGEQYF

SEQ ID NO: 81993 - protein, 14 aa, Homo sapiens
  CDR3 for alpha chain variable domain of TCR clone 40997 (TRAV1-2, TRAJ8)
CAVREDTGFQKLVF

SEQ ID NO: 81994 - protein, 15 aa, Homo sapiens
  CDR3 for beta chain variable domain of TCR clone 40997 (TRBV5-1, TRBJ2-7)
CASSLNGGPAREQYF

SEQ ID NO: 81995 - protein, 14 aa, Homo sapiens
  CDR3 for alpha chain variable domain of TCR clone 40998 (TRAV13-2, TRAJ11)
CAEIGNSGYSTLTF

SEQ ID NO: 81996 - protein, 11 aa, Homo sapiens
  CDR3 for beta chain variable domain of TCR clone 40998 (TRBV10-3, TRBJ2-7)
CAISEGLEQYF

SEQ ID NO: 81997 - protein, 14 aa, Homo sapiens
  CDR3 for alpha chain variable domain of TCR clone 40999 (TRAV16, TRAJ33)
CALSAMDSNYQLIW

SEQ ID NO: 81998 - protein, 12 aa, Homo sapiens
  CDR3 for beta chain variable domain of TCR clone 40999 (TRBV5-1, TRBJ1-2)
CTSSQDTYGYTF

SEQ ID NO: 81999 - protein, 14 aa, Homo sapiens
  CDR3 for alpha chain variable domain of TCR clone 41000 (TRAV26-1, TRAJ39)
CIVRGSRVGNMLTF

SEQ ID NO: 82000 - protein, 15 aa, Homo sapiens
  CDR3 for beta chain variable domain of TCR clone 41000 (TRBV7-9, TRBJ1-5)
CASSQGHQPNQPQHF

SEQ ID NO: 82001 - protein, 13 aa, Homo sapiens
  CDR3 for alpha chain variable domain of TCR clone 41001 (TRAV13-2, TRAJ8)
CAFMNTGFQKLVF

SEQ ID NO: 82002 - protein, 17 aa, Homo sapiens
  CDR3 for beta chain variable domain of TCR clone 41001 (TRBV28, TRBJ2-1)
CASSYARQALTYNEQFF

SEQ ID NO: 82003 - protein, 15 aa, Homo sapiens
  CDR3 for alpha chain variable domain of TCR clone 41002 (TRAV3, TRAJ32)
CAVSSYGGATNKLLF

SEQ ID NO: 82004 - protein, 13 aa, Homo sapiens
  CDR3 for beta chain variable domain of TCR clone 41002 (TRBV20-1, TRBJ2-7)
CSARPSTNYEQYF

SEQ ID NO: 82005 - protein, 17 aa, Homo sapiens
  CDR3 for alpha chain variable domain of TCR clone 41003 (TRAV17, TRAJ4)
CATGTWSGGYNKLILEQ

SEQ ID NO: 82006 - protein, 13 aa, Homo sapiens
  CDR3 for beta chain variable domain of TCR clone 41003 (TRBV6-6, TRBJ2-7)
CASSPKHLAEQYF

SEQ ID NO: 82007 - protein, 13 aa, Homo sapiens
  CDR3 for alpha chain variable domain of TCR clone 41004 (TRAV13-1, TRAJ21)
CAASIYNFNKFYF

SEQ ID NO: 82008 - protein, 13 aa, Homo sapiens
  CDR3 for beta chain variable domain of TCR clone 41004 (TRBV27, TRBJ1-4)
CASSLMGDEKPFF

SEQ ID NO: 82009 - protein, 13 aa, Homo sapiens
  CDR3 for alpha chain variable domain of TCR clone 41005 (TRAV26-2, TRAJ43)
CILRAVNNNDIRF

SEQ ID NO: 82010 - protein, 14 aa, Homo sapiens
  CDR3 for beta chain variable domain of TCR clone 41005 (TRBV20-1, TRBJ1-1)
CSAQTRIGGTEAFF

SEQ ID NO: 82011 - protein, 13 aa, Homo sapiens
  CDR3 for alpha chain variable domain of TCR clone 41006 (TRAV2, TRAJ21)
CAVEDLNFNKFYF

SEQ ID NO: 82012 - protein, 15 aa, Homo sapiens
  CDR3 for beta chain variable domain of TCR clone 41006 (TRBV28, TRBJ2-5)
CASSPGQGSIETRYF

SEQ ID NO: 82013 - protein, 14 aa, Homo sapiens
  CDR3 for alpha chain variable domain of TCR clone 41007 (TRAV25, TRAJ22)
CAVRSSGSARQLTL

SEQ ID NO: 82014 - protein, 16 aa, Homo sapiens
  CDR3 for beta chain variable domain of TCR clone 41007 (TRBV4-2, TRBJ1-1)
CASSPSPGRAAPEAFF

SEQ ID NO: 82015 - protein, 15 aa, Homo sapiens
  CDR3 for alpha chain variable domain of TCR clone 41008 (TRAV14/DV4, TRAJ12)
CAMREGWDSSYKLIF

SEQ ID NO: 82016 - protein, 16 aa, Homo sapiens
  CDR3 for beta chain variable domain of TCR clone 41008 (TRBV2, TRBJ2-5)
CASSKTQGVGEETQYF

SEQ ID NO: 82017 - protein, 14 aa, Homo sapiens
  CDR3 for alpha chain variable domain of TCR clone 41009 (TRAV1-2, TRAJ8)
CAVREDTGFQKLVF

SEQ ID NO: 82018 - protein, 16 aa, Homo sapiens
  CDR3 for beta chain variable domain of TCR clone 41009 (TRBV20-1, TRBJ1-4)
CSAPGQGLLTNGKLFF

SEQ ID NO: 82019 - protein, 14 aa, Homo sapiens
  CDR3 for alpha chain variable domain of TCR clone 41010 (TRAV16, TRAJ37)
CALDISGNTGKLIF

SEQ ID NO: 82020 - protein, 13 aa, Homo sapiens
  CDR3 for beta chain variable domain of TCR clone 41010 (TRBV7-9, TRBJ1-2)
CASSLKQNYGYTF

SEQ ID NO: 82021 - protein, 12 aa, Homo sapiens
  CDR3 for alpha chain variable domain of TCR clone 41011 (TRAV26-2, TRAJ21)
CILKGNFKKFYF

SEQ ID NO: 82022 - protein, 14 aa, Homo sapiens
  CDR3 for beta chain variable domain of TCR clone 41011 (TRBV7-9, TRBJ1-1)
CASTPLQSYTEAFF

SEQ ID NO: 82023 - protein, 15 aa, Homo sapiens
  CDR3 for alpha chain variable domain of TCR clone 41012 (TRAV20, TRAJ53)
CAVQASGGSNYKPTF

SEQ ID NO: 82024 - protein, 12 aa, Homo sapiens
  CDR3 for beta chain variable domain of TCR clone 41012 (TRBV7-6, TRBJ2-5)
CASSLSQETQYF

SEQ ID NO: 82025 - protein, 14 aa, Homo sapiens
  CDR3 for alpha chain variable domain of TCR clone 41013 (TRAV1-2, TRAJ16)
CAVNRFSNGQKLLF

SEQ ID NO: 82026 - protein, 14 aa, Homo sapiens
  CDR3 for beta chain variable domain of TCR clone 41013 (TRBV13, TRBJ2-5)
CASSLGRGQETQYF

SEQ ID NO: 82027 - protein, 12 aa, Homo sapiens
  CDR3 for alpha chain variable domain of TCR clone 41014 (TRAV17, TRAJ20)
CATQSNDYKLSF

SEQ ID NO: 82028 - protein, 16 aa, Homo sapiens
  CDR3 for beta chain variable domain of TCR clone 41014 (TRBV19, TRBJ2-2)
CASRSPGTGATGELFF

SEQ ID NO: 82029 - protein, 13 aa, Homo sapiens
  CDR3 for alpha chain variable domain of TCR clone 41015 (TRAV8-1, TRAJ23)
CAWRDNQGGKLIF

SEQ ID NO: 82030 - protein, 14 aa, Homo sapiens
  CDR3 for beta chain variable domain of TCR clone 41015 (TRBV7-6, TRBJ2-1)
CASSLGGGADEQFF

SEQ ID NO: 82031 - protein, 14 aa, Homo sapiens
  CDR3 for alpha chain variable domain of TCR clone 41016 (TRAV12-2, TRAJ13)
CAVKKTGGYQKVTS

SEQ ID NO: 82032 - protein, 12 aa, Homo sapiens
  CDR3 for beta chain variable domain of TCR clone 41016 (TRBV29-1, TRBJ1-1)
CSESDGNTEAFF

SEQ ID NO: 82033 - protein, 11 aa, Homo sapiens
  CDR3 for alpha chain variable domain of TCR clone 41017 (TRAV8-6, TRAJ42)
CAVRGRKPRKY

SEQ ID NO: 82034 - protein, 13 aa, Homo sapiens
  CDR3 for beta chain variable domain of TCR clone 41017 (TRBV7-3, TRBJ1-1)
CASSQDWGAEAFF

SEQ ID NO: 82035 - protein, 16 aa, Homo sapiens
  CDR3 for alpha chain variable domain of TCR clone 41018 (TRAV12-3, TRAJ53)
CAMSPGSGGSNYKLTF

SEQ ID NO: 82036 - protein, 11 aa, Homo sapiens
  CDR3 for beta chain variable domain of TCR clone 41018 (TRBV29-1, TRBJ2-5)
CSEDRTGPQYF

SEQ ID NO: 82037 - protein, 13 aa, Homo sapiens
  CDR3 for alpha chain variable domain of TCR clone 41019 (TRAV27, TRAJ49)
CAPRPSTGNQFYF

SEQ ID NO: 82038 - protein, 16 aa, Homo sapiens
  CDR3 for beta chain variable domain of TCR clone 41019 (TRBV4-1, TRBJ1-2)
CASSQDAGQVLYGYTF

SEQ ID NO: 82039 - protein, 11 aa, Homo sapiens
  CDR3 for alpha chain variable domain of TCR clone 41020 (TRAV39, TRAJ49)
CAVDISTQFYF

SEQ ID NO: 82040 - protein, 11 aa, Homo sapiens
  CDR3 for beta chain variable domain of TCR clone 41020 (TRBV7-8, TRBJ2-7)
CASSLSHEQYF

SEQ ID NO: 82041 - protein, 14 aa, Homo sapiens
  CDR3 for alpha chain variable domain of TCR clone 41021 (TRAV12-1, TRAJ23)
CVAIVYNQGGKLIF

SEQ ID NO: 82042 - protein, 15 aa, Homo sapiens
  CDR3 for beta chain variable domain of TCR clone 41021 (TRBV20-1, TRBJ1-5)
CSAKPPGQGPQPQHF

SEQ ID NO: 82043 - protein, 12 aa, Homo sapiens
  CDR3 for alpha chain variable domain of TCR clone 41022 (TRAV12-3, TRAJ20)
CAMVRGDYKLSF

SEQ ID NO: 82044 - protein, 16 aa, Homo sapiens
  CDR3 for beta chain variable domain of TCR clone 41022 (TRBV19, TRBJ2-1)
CASSKAGPSSYNEQFF

SEQ ID NO: 82045 - protein, 18 aa, Homo sapiens
  CDR3 for alpha chain variable domain of TCR clone 41023 (TRAV21, TRAJ52)
CAVRPSPAGGTSYGKLTF

SEQ ID NO: 82046 - protein, 13 aa, Homo sapiens
  CDR3 for beta chain variable domain of TCR clone 41023 (TRBV9, TRBJ2-1)
CASSVGQGGEQFF

SEQ ID NO: 82047 - protein, 12 aa, Homo sapiens
  CDR3 for alpha chain variable domain of TCR clone 41024 (TRAV13-1, TRAJ21)
CAAKEGFSKFYF

SEQ ID NO: 82048 - protein, 15 aa, Homo sapiens
  CDR3 for beta chain variable domain of TCR clone 41024 (TRBV28, TRBJ1-3)
CASSLAGSSGNTIYF

SEQ ID NO: 82049 - protein, 16 aa, Homo sapiens
  CDR3 for alpha chain variable domain of TCR clone 41025 (TRAV8-3, TRAJ13)
CAVGVYPSGGYQKVTF

SEQ ID NO: 82050 - protein, 15 aa, Homo sapiens
  CDR3 for beta chain variable domain of TCR clone 41025 (TRBV19, TRBJ1-5)
CASSIVWADNQPQHF

SEQ ID NO: 82051 - protein, 13 aa, Homo sapiens
  CDR3 for alpha chain variable domain of TCR clone 41026 (TRAV12-2, TRAJ20)
CAVYPSNDYKLSF

SEQ ID NO: 82052 - protein, 14 aa, Homo sapiens
  CDR3 for beta chain variable domain of TCR clone 41026 (TRBV28, TRBJ1-5)
CASSLFPGVQPQHF

SEQ ID NO: 82053 - protein, 12 aa, Homo sapiens
  CDR3 for alpha chain variable domain of TCR clone 41027 (TRAV13-1, TRAJ15)
CAASKAGTALIF

SEQ ID NO: 82054 - protein, 18 aa, Homo sapiens
  CDR3 for beta chain variable domain of TCR clone 41027 (TRBV7-9, TRBJ2-3)
CASSLPINGQISTDTQYF

SEQ ID NO: 82055 - protein, 14 aa, Homo sapiens
  CDR3 for alpha chain variable domain of TCR clone 41028 (TRAV1-2, TRAJ16)
CAVNRFSDGQKLLF

SEQ ID NO: 82056 - protein, 13 aa, Homo sapiens
  CDR3 for beta chain variable domain of TCR clone 41028 (TRBV15, TRBJ1-1)
CATSRGIQARAFF

SEQ ID NO: 82057 - protein, 15 aa, Homo sapiens
  CDR3 for alpha chain variable domain of TCR clone 41029 (TRAV26-1, TRAJ29)
CIVRVEGSGNTPLVF

SEQ ID NO: 82058 - protein, 15 aa, Homo sapiens
  CDR3 for beta chain variable domain of TCR clone 41029 (TRBV27, TRBJ2-1)
CASSNGGGSSNEQFF

SEQ ID NO: 82059 - protein, 14 aa, Homo sapiens
  CDR3 for alpha chain variable domain of TCR clone 41030 (TRAV13-2, TRAJ43)
CAEIPTYNNNDMRS

SEQ ID NO: 82060 - protein, 15 aa, Homo sapiens
  CDR3 for beta chain variable domain of TCR clone 41030 (TRBV7-9, TRBJ2-2)
CASGPLDTFPGELFF

SEQ ID NO: 82061 - protein, 16 aa, Homo sapiens
  CDR3 for alpha chain variable domain of TCR clone 41031 (TRAV30, TRAJ24)
CGTEIVDADSWGKFQF

SEQ ID NO: 82062 - protein, 14 aa, Homo sapiens
  CDR3 for beta chain variable domain of TCR clone 41031 (TRBV19, TRBJ2-2)
CASSTLHRSGELFF

SEQ ID NO: 82063 - protein, 13 aa, Homo sapiens
  CDR3 for alpha chain variable domain of TCR clone 41032 (TRAV3, TRAJ29)
CAVRDIIDTPLVF

SEQ ID NO: 82064 - protein, 14 aa, Homo sapiens
  CDR3 for beta chain variable domain of TCR clone 41032 (TRBV27, TRBJ2-1)
CASSATGGYNGQFF

SEQ ID NO: 82065 - protein, 13 aa, Homo sapiens
  CDR3 for alpha chain variable domain of TCR clone 41033 (TRAV27, TRAJ56)
CAGKPGANSKRTF

SEQ ID NO: 82066 - protein, 18 aa, Homo sapiens
  CDR3 for beta chain variable domain of TCR clone 41033 (TRBV11-2, TRBJ2-3)
CASSLGGASRGAPNTQYF

SEQ ID NO: 82067 - protein, 16 aa, Homo sapiens
  CDR3 for alpha chain variable domain of TCR clone 41034 (TRAV30, TRAJ24)
CGTEIVDADSWGKFQF

SEQ ID NO: 82068 - protein, 14 aa, Homo sapiens
  CDR3 for beta chain variable domain of TCR clone 41034 (TRBV7-2, TRBJ1-2)
CAGSQTGSTYGYTF

SEQ ID NO: 82069 - protein, 18 aa, Homo sapiens
  CDR3 for alpha chain variable domain of TCR clone 41035 (TRAV13-1, TRAJ52)
CAAKNPNAGGTSYGKLTF

SEQ ID NO: 82070 - protein, 15 aa, Homo sapiens
  CDR3 for beta chain variable domain of TCR clone 41035 (TRBV7-9, TRBJ1-6)
CASSSPGRGNSPLHF

SEQ ID NO: 82071 - protein, 11 aa, Homo sapiens
  CDR3 for alpha chain variable domain of TCR clone 41036 (TRAV12-3, TRAJ17)
CNDAYRHKLTF

SEQ ID NO: 82072 - protein, 15 aa, Homo sapiens
  CDR3 for beta chain variable domain of TCR clone 41036 (TRBV12-4, TRBJ2-5)
CASSPPTGLQETQYF

SEQ ID NO: 82073 - protein, 20 aa, Homo sapiens
  CDR3 for alpha chain variable domain of TCR clone 41037 (TRAV27, TRAJ41)
CAVRTQIPDIQNPDPAVYQL

SEQ ID NO: 82074 - protein, 13 aa, Homo sapiens
  CDR3 for beta chain variable domain of TCR clone 41037 (TRBV20-1, TRBJ1-1)
CSARGGGNTEAFF

SEQ ID NO: 82075 - protein, 12 aa, Homo sapiens
  CDR3 for alpha chain variable domain of TCR clone 41038 (TRAV13-1, TRAJ21)
CAAKEGFNKFYF

SEQ ID NO: 82076 - protein, 14 aa, Homo sapiens
  CDR3 for beta chain variable domain of TCR clone 41038 (TRBV18, TRBJ2-7)
CASSPRWGAYEQYF

SEQ ID NO: 82077 - protein, 15 aa, Homo sapiens
  CDR3 for alpha chain variable domain of TCR clone 41039 (TRAV21, TRAJ32)
CAVNSYGGATNKLIF

SEQ ID NO: 82078 - protein, 18 aa, Homo sapiens
  CDR3 for beta chain variable domain of TCR clone 41039 (TRBV7-9, TRBJ2-1)
CASSTGIAEGSSYNEQFF

SEQ ID NO: 82079 - protein, 15 aa, Homo sapiens
  CDR3 for alpha chain variable domain of TCR clone 41040 (TRAV2, TRAJ13)
CATPSYSGGYQKVTF

SEQ ID NO: 82080 - protein, 14 aa, Homo sapiens
  CDR3 for beta chain variable domain of TCR clone 41040 (TRBV19, TRBJ2-1)
CASPTFVLSGEQFF

SEQ ID NO: 82081 - protein, 13 aa, Homo sapiens
  CDR3 for alpha chain variable domain of TCR clone 41041 (TRAV12-3, TRAJ20)
CAMRRSNDYKLSF

SEQ ID NO: 82082 - protein, 14 aa, Homo sapiens
  CDR3 for beta chain variable domain of TCR clone 41041 (TRBV25-1, TRBJ1-1)
CASTHLGGNTEAFF

SEQ ID NO: 82083 - protein, 13 aa, Homo sapiens
  CDR3 for alpha chain variable domain of TCR clone 41042 (TRAV12-3, TRAJ40)
CAMSARGTYKYIF

SEQ ID NO: 82084 - protein, 13 aa, Homo sapiens
  CDR3 for beta chain variable domain of TCR clone 41042 (TRBV20-1, TRBJ2-3)
RSWTSGGQDTQYF

SEQ ID NO: 82085 - protein, 13 aa, Homo sapiens
  CDR3 for alpha chain variable domain of TCR clone 41043 (TRAV38-1, TRAJ42)
CARWGGSQGNLIF

SEQ ID NO: 82086 - protein, 11 aa, Homo sapiens
  CDR3 for beta chain variable domain of TCR clone 41043 (TRBV29-1, TRBJ2-5)
CSEDRTGTQYF

SEQ ID NO: 82087 - protein, 18 aa, Homo sapiens
  CDR3 for alpha chain variable domain of TCR clone 41044 (TRAV26-1, TRAJ23)
CIVRVGLEVWNQGGKLIF

SEQ ID NO: 82088 - protein, 16 aa, Homo sapiens
  CDR3 for beta chain variable domain of TCR clone 41044 (TRBV27, TRBJ2-2)
CASSFRGLVRTGELFF

SEQ ID NO: 82089 - protein, 12 aa, Homo sapiens
  CDR3 for alpha chain variable domain of TCR clone 41045 (TRAV27, TRAJ35)
CAGADFGNVLHC

SEQ ID NO: 82090 - protein, 16 aa, Homo sapiens
  CDR3 for beta chain variable domain of TCR clone 41045 (TRBV6-1, TRBJ2-1)
FASILRQGSSYNEQFF

SEQ ID NO: 82091 - protein, 17 aa, Homo sapiens
  CDR3 for alpha chain variable domain of TCR clone 41046 (TRAV3, TRAJ38)
CAVRDCLNAGNNRKLLW

SEQ ID NO: 82092 - protein, 15 aa, Homo sapiens
  CDR3 for beta chain variable domain of TCR clone 41046 (TRBV27, TRBJ2-1)
CASSNGGGSSNEQFF

SEQ ID NO: 82093 - protein, 17 aa, Homo sapiens
  CDR3 for alpha chain variable domain of TCR clone 41047 (TRAV4, TRAJ13)
CLVGVQGSSGGYQKVTF

SEQ ID NO: 82094 - protein, 18 aa, Homo sapiens
  CDR3 for beta chain variable domain of TCR clone 41047 (TRBV15, TRBJ2-3)
CATSRDGARSWDTDTQYV

SEQ ID NO: 82095 - protein, 13 aa, Homo sapiens
  CDR3 for alpha chain variable domain of TCR clone 41048 (TRAV2, TRAJ21)
CAVEDLNFNKFYF

SEQ ID NO: 82096 - protein, 14 aa, Homo sapiens
  CDR3 for beta chain variable domain of TCR clone 41048 (TRBV28, TRBJ2-5)
CSSPGQGSIETQYF

SEQ ID NO: 82097 - protein, 15 aa, Homo sapiens
  CDR3 for alpha chain variable domain of TCR clone 41049 (TRAV25, TRAJ52)
CAGRPGGTSYGKLTF

SEQ ID NO: 82098 - protein, 13 aa, Homo sapiens
  CDR3 for beta chain variable domain of TCR clone 41049 (TRBV11-2, TRBJ1-3)
CASSLEPVNTIYF

SEQ ID NO: 82099 - protein, 14 aa, Homo sapiens
  CDR3 for alpha chain variable domain of TCR clone 41050 (TRAV26-1, TRAJ38)
CIADNAGNNRKLIW

SEQ ID NO: 82100 - protein, 16 aa, Homo sapiens
  CDR3 for beta chain variable domain of TCR clone 41050 (TRBV5-1, TRBJ2-2)
CASSSRTGGRTGELFF

SEQ ID NO: 82101 - protein, 14 aa, Homo sapiens
  CDR3 for alpha chain variable domain of TCR clone 41051 (TRAV12-2, TRAJ33)
CAVKRARSNYQLIW

SEQ ID NO: 82102 - protein, 12 aa, Homo sapiens
  CDR3 for beta chain variable domain of TCR clone 41051 (TRBV24-1, TRBJ2-3)
CATSDSTDTQYS

SEQ ID NO: 82103 - protein, 15 aa, Homo sapiens
  CDR3 for alpha chain variable domain of TCR clone 41052 (TRAV12-1, TRAJ44)
CVADLPTGTASKLTF

SEQ ID NO: 82104 - protein, 15 aa, Homo sapiens
  CDR3 for beta chain variable domain of TCR clone 41052 (TRBV19, TRBJ1-1)
CASTSGQIQNTEAFF

SEQ ID NO: 82105 - protein, 12 aa, Homo sapiens
  CDR3 for alpha chain variable domain of TCR clone 41053 (TRAV16, TRAJ10)
CSRMGGGNKLTF

SEQ ID NO: 82106 - protein, 15 aa, Homo sapiens
  CDR3 for beta chain variable domain of TCR clone 41053 (TRBV6-3, TRBJ2-7)
CASSSPGTVFYEQYF

SEQ ID NO: 82107 - protein, 14 aa, Homo sapiens
  CDR3 for alpha chain variable domain of TCR clone 41054 (TRAV13-2, TRAJ43)
CAEIPTYNSNDMRF

SEQ ID NO: 82108 - protein, 15 aa, Homo sapiens
  CDR3 for beta chain variable domain of TCR clone 41054 (TRBV7-9, TRBJ2-2)
CASGPLDTFPGELFF

SEQ ID NO: 82109 - protein, 14 aa, Homo sapiens
  CDR3 for alpha chain variable domain of TCR clone 41055 (TRAV30, TRAJ33)
CGTAAPRSNYQLIW

SEQ ID NO: 82110 - protein, 16 aa, Homo sapiens
  CDR3 for beta chain variable domain of TCR clone 41055 (TRBV3-1, TRBJ2-5)
CASSPGQFNGFGTQYF

SEQ ID NO: 82111 - protein, 14 aa, Homo sapiens
  CDR3 for alpha chain variable domain of TCR clone 41056 (TRAV2, TRAJ9)
CAVEDRSGGFETIF

SEQ ID NO: 82112 - protein, 17 aa, Homo sapiens
  CDR3 for beta chain variable domain of TCR clone 41056 (TRBV20-1, TRBJ2-7)
CSATRAGGVAGVEEQYF

SEQ ID NO: 82113 - protein, 17 aa, Homo sapiens
  CDR3 for alpha chain variable domain of TCR clone 41057 (TRAV3, TRAJ6)
CAVRDGSRAGGSYIPTF

SEQ ID NO: 82114 - protein, 20 aa, Homo sapiens
  CDR3 for beta chain variable domain of TCR clone 41057 (TRBV28, TRBJ2-1)
CASTPIGRSPGLAGGNEQFF

SEQ ID NO: 82115 - protein, 16 aa, Homo sapiens
  CDR3 for alpha chain variable domain of TCR clone 41058 (TRAV30, TRAJ24)
CGPEIVDADSWGKFQF

SEQ ID NO: 82116 - protein, 15 aa, Homo sapiens
  CDR3 for beta chain variable domain of TCR clone 41058 (TRBV20-1, TRBJ2-7)
CSARDRVSGMDEQYF

SEQ ID NO: 82117 - protein, 13 aa, Homo sapiens
  CDR3 for alpha chain variable domain of TCR clone 41059 (TRAV2, TRAJ40)
CAVVTSGTYKHIF

SEQ ID NO: 82118 - protein, 15 aa, Homo sapiens
  CDR3 for beta chain variable domain of TCR clone 41059 (TRBV11-3, TRBJ2-3)
CASLKDGREGDTQYF

SEQ ID NO: 82119 - protein, 15 aa, Homo sapiens
  CDR3 for alpha chain variable domain of TCR clone 41060 (TRAV8-3, TRAJ45)
CASSYSGGGADGLTF

SEQ ID NO: 82120 - protein, 13 aa, Homo sapiens
  CDR3 for beta chain variable domain of TCR clone 41060 (TRBV10-3, TRBJ2-7)
CASKLAVNYELYF

SEQ ID NO: 82121 - protein, 15 aa, Homo sapiens
  CDR3 for alpha chain variable domain of TCR clone 41061 (TRAV8-2, TRAJ15)
CVVTMGNQAGTALIF

SEQ ID NO: 82122 - protein, 12 aa, Homo sapiens
  CDR3 for beta chain variable domain of TCR clone 41061 (TRBV6-1, TRBJ2-7)
CACSDYSYEQYF

SEQ ID NO: 82123 - protein, 14 aa, Homo sapiens
  CDR3 for alpha chain variable domain of TCR clone 41062 (TRAV12-2, TRAJ13)
CAVKKTGGYQKVTF

SEQ ID NO: 82124 - protein, 16 aa, Homo sapiens
  CDR3 for beta chain variable domain of TCR clone 41062 (TRBV2, TRBJ1-3)
CASSRTGGSTGNTIYF

SEQ ID NO: 82125 - protein, 14 aa, Homo sapiens
  CDR3 for alpha chain variable domain of TCR clone 41063 (TRAV12-1, TRAJ23)
CVVIVYNQGGKLIF

SEQ ID NO: 82126 - protein, 15 aa, Homo sapiens
  CDR3 for beta chain variable domain of TCR clone 41063 (TRBV20-1, TRBJ1-5)
CSAKPLGQGPQPQHF

SEQ ID NO: 82127 - protein, 14 aa, Homo sapiens
  CDR3 for alpha chain variable domain of TCR clone 41064 (TRAV2, TRAJ37)
CAVDFTSNTGKLIF

SEQ ID NO: 82128 - protein, 15 aa, Homo sapiens
  CDR3 for beta chain variable domain of TCR clone 41064 (TRBV20-1, TRBJ1-1)
CSASRGVTGNSEAFF

SEQ ID NO: 82129 - protein, 15 aa, Homo sapiens
  CDR3 for alpha chain variable domain of TCR clone 41065 (TRAV35, TRAJ50)
CAGQLRTTSYDKVIF

SEQ ID NO: 82130 - protein, 12 aa, Homo sapiens
  CDR3 for beta chain variable domain of TCR clone 41065 (TRBV5-1, TRBJ2-5)
CASSLGLETQYF

SEQ ID NO: 82131 - protein, 14 aa, Homo sapiens
  CDR3 for alpha chain variable domain of TCR clone 41066 (TRAV21, TRAJ35)
CAVMPIGFGNVLHC

SEQ ID NO: 82132 - protein, 14 aa, Homo sapiens
  CDR3 for beta chain variable domain of TCR clone 41066 (TRBV19, TRBJ2-1)
CASPTFVLSGEQFF

SEQ ID NO: 82133 - protein, 14 aa, Homo sapiens
  CDR3 for alpha chain variable domain of TCR clone 41067 (TRAV8-2, TRAJ13)
CAVTLSGGYQKVTF

SEQ ID NO: 82134 - protein, 14 aa, Homo sapiens
  CDR3 for beta chain variable domain of TCR clone 41067 (TRBV7-2, TRBJ1-2)
CASSQTGSTYGYTF

SEQ ID NO: 82135 - protein, 15 aa, Homo sapiens
  CDR3 for alpha chain variable domain of TCR clone 41068 (TRAV3, TRAJ22)
CAVRDRGGSARQLTF

SEQ ID NO: 82136 - protein, 15 aa, Homo sapiens
  CDR3 for beta chain variable domain of TCR clone 41068 (TRBV7-9, TRBJ1-5)
CASSQGHQPNQPQHF

SEQ ID NO: 82137 - protein, 16 aa, Homo sapiens
  CDR3 for alpha chain variable domain of TCR clone 41069 (TRAV26-2, TRAJ37)
CILRGFGSSNTGKLIF

SEQ ID NO: 82138 - protein, 15 aa, Homo sapiens
  CDR3 for beta chain variable domain of TCR clone 41069 (TRBV6-5, TRBJ2-7)
CASRSLAVSSYEQYF

SEQ ID NO: 82139 - protein, 14 aa, Homo sapiens
  CDR3 for alpha chain variable domain of TCR clone 41070 (TRAV1-2, TRAJ8)
CGVREDTGFQKLVF

SEQ ID NO: 82140 - protein, 15 aa, Homo sapiens
  CDR3 for beta chain variable domain of TCR clone 41070 (TRBV6-3, TRBJ2-7)
CASSSPGTVFYEQYF

SEQ ID NO: 82141 - protein, 16 aa, Homo sapiens
  CDR3 for alpha chain variable domain of TCR clone 41071 (TRAV30, TRAJ24)
CGTEIVDADSWGKFQF

SEQ ID NO: 82142 - protein, 14 aa, Homo sapiens
  CDR3 for beta chain variable domain of TCR clone 41071 (TRBV12-4, TRBJ1-1)
CASSPIRRTGEAFF

SEQ ID NO: 82143 - protein, 12 aa, Homo sapiens
  CDR3 for alpha chain variable domain of TCR clone 41072 (TRAV12-3, TRAJ40)
CAMSAGTYKYIF

SEQ ID NO: 82144 - protein, 15 aa, Homo sapiens
  CDR3 for beta chain variable domain of TCR clone 41072 (TRBV7-3, TRBJ2-2)
CASSETGQGTGELFF

SEQ ID NO: 82145 - protein, 13 aa, Homo sapiens
  CDR3 for alpha chain variable domain of TCR clone 41073 (TRAV27, TRAJ45)
CRSSGGGADGLTF

SEQ ID NO: 82146 - protein, 17 aa, Homo sapiens
  CDR3 for beta chain variable domain of TCR clone 41073 (TRBV11-2, TRBJ2-1)
CASSLYPPGGEYNEQFF

SEQ ID NO: 82147 - protein, 14 aa, Homo sapiens
  CDR3 for alpha chain variable domain of TCR clone 41074 (TRAV1-2, TRAJ8)
CAVREDTGFQKLVF

SEQ ID NO: 82148 - protein, 16 aa, Homo sapiens
  CDR3 for beta chain variable domain of TCR clone 41074 (TRBV7-3, TRBJ2-5)
CASIQPGGSVQETQYF

SEQ ID NO: 82149 - protein, 13 aa, Homo sapiens
  CDR3 for alpha chain variable domain of TCR clone 41075 (TRAV21, TRAJ27)
CAARPGNAGKSTF

SEQ ID NO: 82150 - protein, 15 aa, Homo sapiens
  CDR3 for beta chain variable domain of TCR clone 41075 (TRBV7-3, TRBJ2-1)
CASSPTGGGEVEQFF

SEQ ID NO: 82151 - protein, 12 aa, Homo sapiens
  CDR3 for alpha chain variable domain of TCR clone 41076 (TRAV21, TRAJ27)
CAPPGNAGKSTF

SEQ ID NO: 82152 - protein, 13 aa, Homo sapiens
  CDR3 for beta chain variable domain of TCR clone 41076 (TRBV2, TRBJ1-1)
CARNPTGEFHAFF

SEQ ID NO: 82153 - protein, 12 aa, Homo sapiens
  CDR3 for alpha chain variable domain of TCR clone 41077 (TRAV12-3, TRAJ20)
CAMVRGDYKLSF

SEQ ID NO: 82154 - protein, 14 aa, Homo sapiens
  CDR3 for beta chain variable domain of TCR clone 41077 (TRBV5-5, TRBJ1-5)
CASSGQGADQPQHF

SEQ ID NO: 82155 - protein, 14 aa, Homo sapiens
  CDR3 for alpha chain variable domain of TCR clone 41078 (TRAV12-3, TRAJ10)
SHLPLTGGGNKLTF

SEQ ID NO: 82156 - protein, 15 aa, Homo sapiens
  CDR3 for beta chain variable domain of TCR clone 41078 (TRBV13, TRBJ2-1)
CASSLLSGMNNEQFF

SEQ ID NO: 82157 - protein, 15 aa, Homo sapiens
  CDR3 for alpha chain variable domain of TCR clone 41079 (TRAV8-4, TRAJ13)
CAVSDWGGGYQKVTF

SEQ ID NO: 82158 - protein, 13 aa, Homo sapiens
  CDR3 for beta chain variable domain of TCR clone 41079 (TRBV10-3, TRBJ2-7)
CASKLAVNYEQYF

SEQ ID NO: 82159 - protein, 12 aa, Homo sapiens
  CDR3 for alpha chain variable domain of TCR clone 41080 (TRAV3, TRAJ20)
CAVREPDYKLSF

SEQ ID NO: 82160 - protein, 13 aa, Homo sapiens
  CDR3 for beta chain variable domain of TCR clone 41080 (TRBV9, TRBJ2-1)
CASSVGQGGEQFF

SEQ ID NO: 82161 - protein, 16 aa, Homo sapiens
  CDR3 for alpha chain variable domain of TCR clone 41081 (TRAV4, TRAJ22)
CLVGDLYSGSARQLTF

SEQ ID NO: 82162 - protein, 16 aa, Homo sapiens
  CDR3 for beta chain variable domain of TCR clone 41081 (TRBV7-9, TRBJ2-3)
CASSPWREVSTDTQYF

SEQ ID NO: 82163 - protein, 14 aa, Homo sapiens
  CDR3 for alpha chain variable domain of TCR clone 41082 (TRAV12-3, TRAJ10)
SHLPLPGGGNKLTF

SEQ ID NO: 82164 - protein, 12 aa, Homo sapiens
  CDR3 for beta chain variable domain of TCR clone 41082 (TRBV11-2, TRBJ2-2)
CASSLGGGELFF

SEQ ID NO: 82165 - protein, 15 aa, Homo sapiens
  CDR3 for alpha chain variable domain of TCR clone 41083 (TRAV8-6, TRAJ10)
CAVSDQAGGGNKLTF

SEQ ID NO: 82166 - protein, 13 aa, Homo sapiens
  CDR3 for beta chain variable domain of TCR clone 41083 (TRBV7-9, TRBJ1-2)
CASSLKQNYGYTF

SEQ ID NO: 82167 - protein, 17 aa, Homo sapiens
  CDR3 for alpha chain variable domain of TCR clone 41084 (TRAV3, TRAJ42)
CAVRDRNYGGSQGNLIF

SEQ ID NO: 82168 - protein, 15 aa, Homo sapiens
  CDR3 for beta chain variable domain of TCR clone 41084 (TRBV6-6, TRBJ2-7)
CASSYSYGGSYEQYF

SEQ ID NO: 82169 - protein, 14 aa, Homo sapiens
  CDR3 for alpha chain variable domain of TCR clone 41085 (TRAV26-1, TRAJ38)
CSADNAGNNRKLIW

SEQ ID NO: 82170 - protein, 13 aa, Homo sapiens
  CDR3 for beta chain variable domain of TCR clone 41085 (TRBV20-1, TRBJ1-1)
CSARGGGNTEAFF

SEQ ID NO: 82171 - protein, 15 aa, Homo sapiens
  CDR3 for alpha chain variable domain of TCR clone 41086 (TRAV26-1, TRAJ56)
CIVRVDNGANSKLTF

SEQ ID NO: 82172 - protein, 15 aa, Homo sapiens
  CDR3 for beta chain variable domain of TCR clone 41086 (TRBV20-1, TRBJ2-7)
CSSRDPTEVGHEQYF

SEQ ID NO: 82173 - protein, 10 aa, Homo sapiens
  CDR3 for alpha chain variable domain of TCR clone 41087 (TRAV24, TRAJ11)
CASLYSTLTF

SEQ ID NO: 82174 - protein, 16 aa, Homo sapiens
  CDR3 for beta chain variable domain of TCR clone 41087 (TRBV20-1, TRBJ1-4)
CSAPGQGLLTNEKLFF

SEQ ID NO: 82175 - protein, 14 aa, Homo sapiens
  CDR3 for alpha chain variable domain of TCR clone 41088 (TRAV12-3, TRAJ10)
SHLPLTGGGNKLTF

SEQ ID NO: 82176 - protein, 16 aa, Homo sapiens
  CDR3 for beta chain variable domain of TCR clone 41088 (TRBV5-5, TRBJ2-2)
CASSGRREGATGELFF

SEQ ID NO: 82177 - protein, 16 aa, Homo sapiens
  CDR3 for alpha chain variable domain of TCR clone 41089 (TRAV4, TRAJ9)
CLVGDPNRPGGVKTIF

SEQ ID NO: 82178 - protein, 16 aa, Homo sapiens
  CDR3 for beta chain variable domain of TCR clone 41089 (TRBV28, TRBJ1-4)
CASSPPYRGRSEKLFF

SEQ ID NO: 82179 - protein, 11 aa, Homo sapiens
  CDR3 for alpha chain variable domain of TCR clone 41090 (TRAV1-1, TRAJ23)
CAVRQGGKLIF

SEQ ID NO: 82180 - protein, 12 aa, Homo sapiens
  CDR3 for beta chain variable domain of TCR clone 41090 (TRBV29-1, TRBJ2-3)
CSVTGGADTQYF

SEQ ID NO: 82181 - protein, 12 aa, Homo sapiens
  CDR3 for alpha chain variable domain of TCR clone 41091 (TRAV25, TRAJ5)
CAGGGGRRALTF

SEQ ID NO: 82182 - protein, 15 aa, Homo sapiens
  CDR3 for beta chain variable domain of TCR clone 41091 (TRBV11-1, TRBJ2-7)
CASSLNYGASYEQYF

SEQ ID NO: 82183 - protein, 11 aa, Homo sapiens
  CDR3 for alpha chain variable domain of TCR clone 41092 (TRAV14/DV4, TRAJ26)
CAMRGPSEFCL

SEQ ID NO: 82184 - protein, 14 aa, Homo sapiens
  CDR3 for beta chain variable domain of TCR clone 41092 (TRBV12-4, TRBJ1-3)
CASTLTGAGNTMYF

SEQ ID NO: 82185 - protein, 14 aa, Homo sapiens
  CDR3 for alpha chain variable domain of TCR clone 41093 (TRAV12-2, TRAJ13)
CAVKKTGGYQKVTF

SEQ ID NO: 82186 - protein, 14 aa, Homo sapiens
  CDR3 for beta chain variable domain of TCR clone 41093 (TRBV4-3, TRBJ1-4)
CASSPLQRNEKLFF

SEQ ID NO: 82187 - protein, 16 aa, Homo sapiens
  CDR3 for alpha chain variable domain of TCR clone 41094 (TRAV38-1, TRAJ56)
CAFMKRQTGANSKLTF

SEQ ID NO: 82188 - protein, 16 aa, Homo sapiens
  CDR3 for beta chain variable domain of TCR clone 41094 (TRBV20-1, TRBJ1-4)
CSAPGQGLLTNEKLFF

SEQ ID NO: 82189 - protein, 14 aa, Homo sapiens
  CDR3 for alpha chain variable domain of TCR clone 41095 (TRAV26-1, TRAJ22)
CIVRVYGSARQLTF

SEQ ID NO: 82190 - protein, 17 aa, Homo sapiens
  CDR3 for beta chain variable domain of TCR clone 41095 (TRBV7-3, TRBJ2-3)
CASSPGGLAGFGDMQYF

SEQ ID NO: 82191 - protein, 11 aa, Homo sapiens
  CDR3 for alpha chain variable domain of TCR clone 41096 (TRAV12-3, TRAJ27)
CAMANAGKSTF

SEQ ID NO: 82192 - protein, 14 aa, Homo sapiens
  CDR3 for beta chain variable domain of TCR clone 41096 (TRBV4-1, TRBJ2-2)
CASSQAVNTGELLF

SEQ ID NO: 82193 - protein, 13 aa, Homo sapiens
  CDR3 for alpha chain variable domain of TCR clone 41097 (TRAV2, TRAJ47)
CAVDREYGNKLVF

SEQ ID NO: 82194 - protein, 17 aa, Homo sapiens
  CDR3 for beta chain variable domain of TCR clone 41097 (TRBV15, TRBJ1-5)
CATSRVKGIYSNQTQHF

SEQ ID NO: 82195 - protein, 15 aa, Homo sapiens
  CDR3 for alpha chain variable domain of TCR clone 41098 (TRAV26-1, TRAJ44)
CIVKANTGTASKLTF

SEQ ID NO: 82196 - protein, 16 aa, Homo sapiens
  CDR3 for beta chain variable domain of TCR clone 41098 (TRBV7-7, TRBJ2-1)
CASSLASGTSYNEQFF

SEQ ID NO: 82197 - protein, 15 aa, Homo sapiens
  CDR3 for alpha chain variable domain of TCR clone 41099 (TRAV3, TRAJ3)
CAVRDGHSRASKIIF

SEQ ID NO: 82198 - protein, 17 aa, Homo sapiens
  CDR3 for beta chain variable domain of TCR clone 41099 (TRBV25-1, TRBJ2-7)
CASSDARVVFSSYEQYF

SEQ ID NO: 82199 - protein, 13 aa, Homo sapiens
  CDR3 for alpha chain variable domain of TCR clone 41100 (TRAV8-3, TRAJ28)
CAVGAVGSYQLTV

SEQ ID NO: 82200 - protein, 15 aa, Homo sapiens
  CDR3 for beta chain variable domain of TCR clone 41100 (TRBV7-9, TRBJ1-5)
CASSQGHQPNQPQHF

SEQ ID NO: 82201 - protein, 12 aa, Homo sapiens
  CDR3 for alpha chain variable domain of TCR clone 41101 (TRAV16, TRAJ10)
CSRTGRGNKLTF

SEQ ID NO: 82202 - protein, 15 aa, Homo sapiens
  CDR3 for beta chain variable domain of TCR clone 41101 (TRBV6-3, TRBJ2-7)
CASSSPGTVFYEQYF

SEQ ID NO: 82203 - protein, 14 aa, Homo sapiens
  CDR3 for alpha chain variable domain of TCR clone 41102 (TRAV30, TRAJ26)
CGTEIVSYGQNFVL

SEQ ID NO: 82204 - protein, 13 aa, Homo sapiens
  CDR3 for beta chain variable domain of TCR clone 41102 (TRBV19, TRBJ1-3)
CASRLSLGNTIYF

SEQ ID NO: 82205 - protein, 15 aa, Homo sapiens
  CDR3 for alpha chain variable domain of TCR clone 41103 (TRAV35, TRAJ58)
CAGRRQETSGSRLTF

SEQ ID NO: 82206 - protein, 11 aa, Homo sapiens
  CDR3 for beta chain variable domain of TCR clone 41103 (TRBV11-2, TRBJ1-1)
CASSINTDAFF

SEQ ID NO: 82207 - protein, 20 aa, Homo sapiens
  CDR3 for alpha chain variable domain of TCR clone 41104 (TRAV12-1, TRAJ42)
SSVIQPPTSVKGGSQGDLIF

SEQ ID NO: 82208 - protein, 18 aa, Homo sapiens
  CDR3 for beta chain variable domain of TCR clone 41104 (TRBV11-2, TRBJ2-3)
CASSLGGASRGAPNTQYF

SEQ ID NO: 82209 - protein, 14 aa, Homo sapiens
  CDR3 for alpha chain variable domain of TCR clone 41105 (TRAV35, TRAJ13)
CAGRSPGGYQKVTF

SEQ ID NO: 82210 - protein, 15 aa, Homo sapiens
  CDR3 for beta chain variable domain of TCR clone 41105 (TRBV19, TRBJ2-2)
CASSPRTGWTGELFF

SEQ ID NO: 82211 - protein, 13 aa, Homo sapiens
  CDR3 for alpha chain variable domain of TCR clone 41106 (TRAV2, TRAJ21)
CAVKDLNFNKFYF

SEQ ID NO: 82212 - protein, 15 aa, Homo sapiens
  CDR3 for beta chain variable domain of TCR clone 41106 (TRBV28, TRBJ2-5)
CASSPGQGSIETQYF

SEQ ID NO: 82213 - protein, 15 aa, Homo sapiens
  CDR3 for alpha chain variable domain of TCR clone 41107 (TRAV35, TRAJ23)
CAGPLGNNQGGKLIF

SEQ ID NO: 82214 - protein, 15 aa, Homo sapiens
  CDR3 for beta chain variable domain of TCR clone 41107 (TRBV7-9, TRBJ1-1)
CASSLLEQGGTEAFF

SEQ ID NO: 82215 - protein, 12 aa, Homo sapiens
  CDR3 for alpha chain variable domain of TCR clone 41108 (TRAV16, TRAJ26)
CALRMYGQNFVF

SEQ ID NO: 82216 - protein, 14 aa, Homo sapiens
  CDR3 for beta chain variable domain of TCR clone 41108 (TRBV12-5, TRBJ2-5)
CASGSRTHQETQYF

SEQ ID NO: 82217 - protein, 12 aa, Homo sapiens
  CDR3 for alpha chain variable domain of TCR clone 41109 (TRAV12-3, TRAJ20)
CAMVRGDYKISF

SEQ ID NO: 82218 - protein, 14 aa, Homo sapiens
  CDR3 for beta chain variable domain of TCR clone 41109 (TRBV5-5, TRBJ1-5)
CASSGQGVDQPQHF

SEQ ID NO: 82219 - protein, 13 aa, Homo sapiens
  CDR3 for alpha chain variable domain of TCR clone 41110 (TRAV12-1, TRAJ39)
CVVPQRAGNMLTF

SEQ ID NO: 82220 - protein, 17 aa, Homo sapiens
  CDR3 for beta chain variable domain of TCR clone 41110 (TRBV4-1, TRBJ2-5)
CASSQDLTGGPIETHYF

SEQ ID NO: 82221 - protein, 13 aa, Homo sapiens
  CDR3 for alpha chain variable domain of TCR clone 41111 (TRAV2, TRAJ40)
CAVVTSGTYKYIF

SEQ ID NO: 82222 - protein, 16 aa, Homo sapiens
  CDR3 for beta chain variable domain of TCR clone 41111 (TRBV7-9, TRBJ1-3)
CASSLGAGSSGNTIYS

SEQ ID NO: 82223 - protein, 13 aa, Homo sapiens
  CDR3 for alpha chain variable domain of TCR clone 41112 (TRAV1-1, TRAJ9)
CAAKNTGGFKTIF

SEQ ID NO: 82224 - protein, 17 aa, Homo sapiens
  CDR3 for beta chain variable domain of TCR clone 41112 (TRBV20-1, TRBJ2-2)
CSASGSGQGGLTGELFF

SEQ ID NO: 82225 - protein, 12 aa, Homo sapiens
  CDR3 for alpha chain variable domain of TCR clone 41113 (TRAV8-3, TRAJ20)
CAVGANDYKLSF

SEQ ID NO: 82226 - protein, 15 aa, Homo sapiens
  CDR3 for beta chain variable domain of TCR clone 41113 (TRBV11-2, TRBJ2-1)
CASSLVTSGLNEQFF

SEQ ID NO: 82227 - protein, 23 aa, Homo sapiens
  CDR3 for alpha chain variable domain of TCR clone 41114 (TRAV12-2, TRAJ43)
SLLIRDSQPSDPATYLCAFDMRF

SEQ ID NO: 82228 - protein, 13 aa, Homo sapiens
  CDR3 for beta chain variable domain of TCR clone 41114 (TRBV4-2, TRBJ1-1)
CASSQAGNTEAFF

SEQ ID NO: 82229 - protein, 14 aa, Homo sapiens
  CDR3 for alpha chain variable domain of TCR clone 41115 (TRAV12-3, TRAJ12)
CAMSALDSSYKLIF

SEQ ID NO: 82230 - protein, 16 aa, Homo sapiens
  CDR3 for beta chain variable domain of TCR clone 41115 (TRBV7-9, TRBJ2-3)
CASSLQGNPGADTQYF

SEQ ID NO: 82231 - protein, 12 aa, Homo sapiens
  CDR3 for alpha chain variable domain of TCR clone 41116 (TRAV17, TRAJ20)
CATQSNDYKLSF

SEQ ID NO: 82232 - protein, 13 aa, Homo sapiens
  CDR3 for beta chain variable domain of TCR clone 41116 (TRBV10-3, TRBJ1-1)
CAIIPEGGIEAFF

SEQ ID NO: 82233 - protein, 14 aa, Homo sapiens
  CDR3 for alpha chain variable domain of TCR clone 41117 (TRAV12-1, TRAJ26)
CVVKGSNYGQNFVL

SEQ ID NO: 82234 - protein, 17 aa, Homo sapiens
  CDR3 for beta chain variable domain of TCR clone 41117 (TRBV11-2, TRBJ2-6)
CASSQRDIFSGANVLTF

SEQ ID NO: 82235 - protein, 12 aa, Homo sapiens
  CDR3 for alpha chain variable domain of TCR clone 41118 (TRAV8-4, TRAJ31)
CAVSDSNARLMF

SEQ ID NO: 82236 - protein, 15 aa, Homo sapiens
  CDR3 for beta chain variable domain of TCR clone 41118 (TRBV27, TRBJ2-7)
CASRFWGRGADEQYF

SEQ ID NO: 82237 - protein, 11 aa, Homo sapiens
  CDR3 for alpha chain variable domain of TCR clone 41119 (TRAV26-1, TRAJ27)
CIDPNAGKSTL

SEQ ID NO: 82238 - protein, 18 aa, Homo sapiens
  CDR3 for beta chain variable domain of TCR clone 41119 (TRBV7-9, TRBJ2-6)
CASSFPGAGISGANVLTF

SEQ ID NO: 82239 - protein, 13 aa, Homo sapiens
  CDR3 for alpha chain variable domain of TCR clone 41120 (TRAV27, TRAJ6)
CAGGTRGSYIPTV

SEQ ID NO: 82240 - protein, 13 aa, Homo sapiens
  CDR3 for beta chain variable domain of TCR clone 41120 (TRBV4-1, TRBJ2-2)
CASSQENTGELFF

SEQ ID NO: 82241 - protein, 11 aa, Homo sapiens
  CDR3 for alpha chain variable domain of TCR clone 41121 (TRAV1-2, TRAJ20)
RAVANDYKLSF

SEQ ID NO: 82242 - protein, 18 aa, Homo sapiens
  CDR3 for beta chain variable domain of TCR clone 41121 (TRBV20-1, TRBJ2-6)
CSAETTPTHGSGANVLTF

SEQ ID NO: 82243 - protein, 16 aa, Homo sapiens
  CDR3 for alpha chain variable domain of TCR clone 41122 (TRAV26-1, TRAJ53)
CIVRVAMGGSNYNLTF

SEQ ID NO: 82244 - protein, 12 aa, Homo sapiens
  CDR3 for beta chain variable domain of TCR clone 41122 (TRBV7-9, TRBJ1-5)
CASSPQGQPQHF

SEQ ID NO: 82245 - protein, 18 aa, Homo sapiens
  CDR3 for alpha chain variable domain of TCR clone 41123 (TRAV29/DV5, TRAJ52)
CAAGFRGAGGTSYGKLTF

SEQ ID NO: 82246 - protein, 16 aa, Homo sapiens
  CDR3 for beta chain variable domain of TCR clone 41123 (TRBV7-3, TRBJ2-2)
CAGSLKRGTLSGELFF

SEQ ID NO: 82247 - protein, 14 aa, Homo sapiens
  CDR3 for alpha chain variable domain of TCR clone 41124 (TRAV12-3, TRAJ10)
SHLPLTGGGNKLTF

SEQ ID NO: 82248 - protein, 16 aa, Homo sapiens
  CDR3 for beta chain variable domain of TCR clone 41124 (TRBV12-4, TRBJ1-5)
CASRQPVEGSNQPQHF

SEQ ID NO: 82249 - protein, 15 aa, Homo sapiens
  CDR3 for alpha chain variable domain of TCR clone 41125 (TRAV26-1, TRAJ29)
CIVRVEGSGNTPLVF

SEQ ID NO: 82250 - protein, 18 aa, Homo sapiens
  CDR3 for beta chain variable domain of TCR clone 41125 (TRBV7-9, TRBJ2-7)
CASSLTTSGSRTWYEQYF

SEQ ID NO: 82251 - protein, 14 aa, Homo sapiens
  CDR3 for alpha chain variable domain of TCR clone 41126 (TRAV12-2, TRAJ40)
CDVKIPSGTYKYIF

SEQ ID NO: 82252 - protein, 14 aa, Homo sapiens
  CDR3 for beta chain variable domain of TCR clone 41126 (TRBV20-1, TRBJ1-1)
CSAQTRIGGTEAFF

SEQ ID NO: 82253 - protein, 14 aa, Homo sapiens
  CDR3 for alpha chain variable domain of TCR clone 41127 (TRAV1-2, TRAJ16)
CAVNRFSDGQKLLF

SEQ ID NO: 82254 - protein, 16 aa, Homo sapiens
  CDR3 for beta chain variable domain of TCR clone 41127 (TRBV28, TRBJ2-1)
CASSSPEYPRDNEQFF

SEQ ID NO: 82255 - protein, 10 aa, Homo sapiens
  CDR3 for alpha chain variable domain of TCR clone 41128 (TRAV12-1, TRAJ37)
ARGSTGELIF

SEQ ID NO: 82256 - protein, 15 aa, Homo sapiens
  CDR3 for beta chain variable domain of TCR clone 41128 (TRBV7-2, TRBJ2-3)
CASSLEQGGTDTQYF

SEQ ID NO: 82257 - protein, 14 aa, Homo sapiens
  CDR3 for alpha chain variable domain of TCR clone 41129 (TRAV1-2, TRAJ8)
CAVREDTGFQKLVF

SEQ ID NO: 82258 - protein, 13 aa, Homo sapiens
  CDR3 for beta chain variable domain of TCR clone 41129 (TRBV4-2, TRBJ2-2)
CASEDRGTGELFL

SEQ ID NO: 82259 - protein, 13 aa, Homo sapiens
  CDR3 for alpha chain variable domain of TCR clone 41130 (TRAV30, TRAJ34)
RGTVGYNTDKLIF

SEQ ID NO: 82260 - protein, 16 aa, Homo sapiens
  CDR3 for beta chain variable domain of TCR clone 41130 (TRBV7-9, TRBJ1-2)
CASSLGFSSGEDGYTF

SEQ ID NO: 82261 - protein, 13 aa, Homo sapiens
  CDR3 for alpha chain variable domain of TCR clone 41131 (TRAV27, TRAJ49)
CAPRPYTGNQFYF

SEQ ID NO: 82262 - protein, 16 aa, Homo sapiens
  CDR3 for beta chain variable domain of TCR clone 41131 (TRBV4-1, TRBJ1-2)
CASSQDAGLVLYGYTF

SEQ ID NO: 82263 - protein, 14 aa, Homo sapiens
  CDR3 for alpha chain variable domain of TCR clone 41132 (TRAV2, TRAJ37)
CAVEGSSNTGKLIF

SEQ ID NO: 82264 - protein, 15 aa, Homo sapiens
  CDR3 for beta chain variable domain of TCR clone 41132 (TRBV19, TRBJ1-1)
CASTSGQIQNTEAFF

SEQ ID NO: 82265 - protein, 17 aa, Homo sapiens
  CDR3 for alpha chain variable domain of TCR clone 41133 (TRAV3, TRAJ6)
CAVRDGPRAGGSYIPTF

SEQ ID NO: 82266 - protein, 13 aa, Homo sapiens
  CDR3 for beta chain variable domain of TCR clone 41133 (TRBV20-1, TRBJ1-6)
CSAPVGVGSPLHF

SEQ ID NO: 82267 - protein, 12 aa, Homo sapiens
  CDR3 for alpha chain variable domain of TCR clone 41134 (TRAV3, TRAJ26)
CAVRDYGQNFVF

SEQ ID NO: 82268 - protein, 13 aa, Homo sapiens
  CDR3 for beta chain variable domain of TCR clone 41134 (TRBV7-2, TRBJ2-5)
CASSQTSVETQYF

SEQ ID NO: 82269 - protein, 12 aa, Homo sapiens
  CDR3 for alpha chain variable domain of TCR clone 41135 (TRAV2, TRAJ31)
CAGEDNNARLMF

SEQ ID NO: 82270 - protein, 16 aa, Homo sapiens
  CDR3 for beta chain variable domain of TCR clone 41135 (TRBV10-3, TRBJ2-1)
CAISGVGDGGGGEQFF

SEQ ID NO: 82271 - protein, 13 aa, Homo sapiens
  CDR3 for alpha chain variable domain of TCR clone 41136 (TRAV12-2, TRAJ20)
CAVYPSNDYKLSF

SEQ ID NO: 82272 - protein, 12 aa, Homo sapiens
  CDR3 for beta chain variable domain of TCR clone 41136 (TRBV27, TRBJ2-2)
CASSFLPGELFF

SEQ ID NO: 82273 - protein, 13 aa, Homo sapiens
  CDR3 for alpha chain variable domain of TCR clone 41137 (TRAV35, TRAJ42)
CAGFPGSQGNPIF

SEQ ID NO: 82274 - protein, 14 aa, Homo sapiens
  CDR3 for beta chain variable domain of TCR clone 41137 (TRBV19, TRBJ2-1)
CASPTFVLSGEQFL

SEQ ID NO: 82275 - protein, 13 aa, Homo sapiens
  CDR3 for alpha chain variable domain of TCR clone 41138 (TRAV1-1, TRAJ9)
CSAKNTGGFKTIF

SEQ ID NO: 82276 - protein, 15 aa, Homo sapiens
  CDR3 for beta chain variable domain of TCR clone 41138 (TRBV5-1, TRBJ2-1)
CASTGSGRTYNEQFF

SEQ ID NO: 82277 - protein, 12 aa, Homo sapiens
  CDR3 for alpha chain variable domain of TCR clone 41139 (TRAV12-3, TRAJ4)
CAMAGAGTRLAV

SEQ ID NO: 82278 - protein, 14 aa, Homo sapiens
  CDR3 for beta chain variable domain of TCR clone 41139 (TRBV10-3, TRBJ1-1)
CAISDTDRGVEAFF

SEQ ID NO: 82279 - protein, 13 aa, Homo sapiens
  CDR3 for alpha chain variable domain of TCR clone 41140 (TRAV13-1, TRAJ20)
CAARVSNDYKLSF

SEQ ID NO: 82280 - protein, 15 aa, Homo sapiens
  CDR3 for beta chain variable domain of TCR clone 41140 (TRBV7-2, TRBJ2-1)
CASSFRESSYNEQFF

SEQ ID NO: 82281 - protein, 14 aa, Homo sapiens
  CDR3 for alpha chain variable domain of TCR clone 41141 (TRAV12-2, TRAJ53)
CAVKGGGSNYKLTF

SEQ ID NO: 82282 - protein, 14 aa, Homo sapiens
  CDR3 for beta chain variable domain of TCR clone 41141 (TRBV7-7, TRBJ2-2)
CATRQDSDTGELFC

SEQ ID NO: 82283 - protein, 15 aa, Homo sapiens
  CDR3 for alpha chain variable domain of TCR clone 41142 (TRAV29/DV5, TRAJ24)
CAASGATDSWGKFQF

SEQ ID NO: 82284 - protein, 16 aa, Homo sapiens
  CDR3 for beta chain variable domain of TCR clone 41142 (TRBV20-1, TRBJ1-4)
CSAPGQGLLTNEKLFF

SEQ ID NO: 82285 - protein, 15 aa, Homo sapiens
  CDR3 for alpha chain variable domain of TCR clone 41143 (TRAV8-3, TRAJ7)
CAAGSISYGNNRLAF

SEQ ID NO: 82286 - protein, 15 aa, Homo sapiens
  CDR3 for beta chain variable domain of TCR clone 41143 (TRBV4-2, TRBJ1-1)
CASSQEDLPRTEAFF

SEQ ID NO: 82287 - protein, 14 aa, Homo sapiens
  CDR3 for alpha chain variable domain of TCR clone 41144 (TRAV1-2, TRAJ16)
CAVNRFSDVQKLLF

SEQ ID NO: 82288 - protein, 14 aa, Homo sapiens
  CDR3 for beta chain variable domain of TCR clone 41144 (TRBV13, TRBJ2-5)
CASSLGRGQETQYF

SEQ ID NO: 82289 - protein, 16 aa, Homo sapiens
  CDR3 for alpha chain variable domain of TCR clone 41145 (TRAV3, TRAJ5)
CAVRNLMDTVRRALTF

SEQ ID NO: 82290 - protein, 16 aa, Homo sapiens
  CDR3 for beta chain variable domain of TCR clone 41145 (TRBV4-2, TRBJ2-7)
CASSQEGLANSYEQYF

SEQ ID NO: 82291 - protein, 11 aa, Homo sapiens
  CDR3 for alpha chain variable domain of TCR clone 41146 (TRAV3, TRAJ21)
CAVGNFNKFYF

SEQ ID NO: 82292 - protein, 16 aa, Homo sapiens
  CDR3 for beta chain variable domain of TCR clone 41146 (TRBV19, TRBJ2-1)
CASSSAGPSSYNEQFF

SEQ ID NO: 82293 - protein, 16 aa, Homo sapiens
  CDR3 for alpha chain variable domain of TCR clone 41147 (TRAV26-1, TRAJ37)
CIVRGDGFGNTGKLIF

SEQ ID NO: 82294 - protein, 17 aa, Homo sapiens
  CDR3 for beta chain variable domain of TCR clone 41147 (TRBV4-1, TRBJ2-7)
CASSRDPLGVRGGEQYF

SEQ ID NO: 82295 - protein, 14 aa, Homo sapiens
  CDR3 for alpha chain variable domain of TCR clone 41148 (TRAV16, TRAJ17)
CTLSGRAAGNKLTF

SEQ ID NO: 82296 - protein, 15 aa, Homo sapiens
  CDR3 for beta chain variable domain of TCR clone 41148 (TRBV3-1, TRBJ1-2)
CASSPTRLPEGGYTF

SEQ ID NO: 82297 - protein, 16 aa, Homo sapiens
  CDR3 for alpha chain variable domain of TCR clone 41149 (TRAV3, TRAJ10)
CAARDMRAGGGNKLTF

SEQ ID NO: 82298 - protein, 13 aa, Homo sapiens
  CDR3 for beta chain variable domain of TCR clone 41149 (TRBV12-4, TRBJ2-7)
CASSPTETYEQYF

SEQ ID NO: 82299 - protein, 13 aa, Homo sapiens
  CDR3 for alpha chain variable domain of TCR clone 41150 (TRAV21, TRAJ27)
CAALNTNAGKSTF

SEQ ID NO: 82300 - protein, 14 aa, Homo sapiens
  CDR3 for beta chain variable domain of TCR clone 41150 (TRBV27, TRBJ1-1)
CASSLLSGLSEASF

SEQ ID NO: 82301 - protein, 18 aa, Homo sapiens
  CDR3 for alpha chain variable domain of TCR clone 41151 (TRAV21, TRAJ52)
CAVRPSPAGGTSYGKLTL

SEQ ID NO: 82302 - protein, 13 aa, Homo sapiens
  CDR3 for beta chain variable domain of TCR clone 41151 (TRBV19, TRBJ1-2)
CASSVPGQDGYTF

SEQ ID NO: 82303 - protein, 16 aa, Homo sapiens
  CDR3 for alpha chain variable domain of TCR clone 41152 (TRAV12-2, TRAJ28)
CAVITDSGAGSYQLTF

SEQ ID NO: 82304 - protein, 14 aa, Homo sapiens
  CDR3 for beta chain variable domain of TCR clone 41152 (TRBV25-1, TRBJ1-1)
CASTHLGGNNEAFF

SEQ ID NO: 82305 - protein, 11 aa, Homo sapiens
  CDR3 for alpha chain variable domain of TCR clone 41153 (TRAV2, TRAJ4)
CAAGGYNKLIF

SEQ ID NO: 82306 - protein, 13 aa, Homo sapiens
  CDR3 for beta chain variable domain of TCR clone 41153 (TRBV20-1, TRBJ1-1)
CSARVGGDTEAFF

SEQ ID NO: 82307 - protein, 15 aa, Homo sapiens
  CDR3 for alpha chain variable domain of TCR clone 41154 (TRAV8-3, TRAJ27)
CAVGPSKTNAGKSTF

SEQ ID NO: 82308 - protein, 12 aa, Homo sapiens
  CDR3 for beta chain variable domain of TCR clone 41154 (TRBV11-3, TRBJ2-2)
CASSLGGGELFF

SEQ ID NO: 82309 - protein, 11 aa, Homo sapiens
  CDR3 for alpha chain variable domain of TCR clone 41155 (TRAV3, TRAJ21)
CAVGNFNKFYF

SEQ ID NO: 82310 - protein, 14 aa, Homo sapiens
  CDR3 for beta chain variable domain of TCR clone 41155 (TRBV19, TRBJ2-2)
CASSGQGIAGELFF

SEQ ID NO: 82311 - protein, 23 aa, Homo sapiens
  CDR3 for alpha chain variable domain of TCR clone 41156 (TRAV26-1, TRAJ38)
CIADNAGNNHIQNPDPAVYQLRD

SEQ ID NO: 82312 - protein, 13 aa, Homo sapiens
  CDR3 for beta chain variable domain of TCR clone 41156 (TRBV20-1, TRBJ1-1)
CSARGGGYTEAFF

SEQ ID NO: 82313 - protein, 13 aa, Homo sapiens
  CDR3 for alpha chain variable domain of TCR clone 41157 (TRAV26-2, TRAJ43)
CILRAVNNNDMRF

SEQ ID NO: 82314 - protein, 15 aa, Homo sapiens
  CDR3 for beta chain variable domain of TCR clone 41157 (TRBV7-2, TRBJ2-1)
CASTHGTGIYNELFF

SEQ ID NO: 82315 - protein, 17 aa, Homo sapiens
  CDR3 for alpha chain variable domain of TCR clone 41158 (TRAV26-1, TRAJ11)
CIVRVGQSNPGYSTLTF

SEQ ID NO: 82316 - protein, 15 aa, Homo sapiens
  CDR3 for beta chain variable domain of TCR clone 41158 (TRBV27, TRBJ2-5)
CASSLIPSGGETQYF

SEQ ID NO: 82317 - protein, 16 aa, Homo sapiens
  CDR3 for alpha chain variable domain of TCR clone 41159 (TRAV16, TRAJ52)
CALSGVGGTSYGKLTF

SEQ ID NO: 82318 - protein, 14 aa, Homo sapiens
  CDR3 for beta chain variable domain of TCR clone 41159 (TRBV19, TRBJ1-2)
CASSLQGQAYGHTF

SEQ ID NO: 82319 - protein, 15 aa, Homo sapiens
  CDR3 for alpha chain variable domain of TCR clone 41160 (TRAV21, TRAJ45)
CAVSYSGGGADGLPF

SEQ ID NO: 82320 - protein, 13 aa, Homo sapiens
  CDR3 for beta chain variable domain of TCR clone 41160 (TRBV20-1, TRBJ2-5)
CSAATELQETQYF

SEQ ID NO: 82321 - protein, 12 aa, Homo sapiens
  CDR3 for alpha chain variable domain of TCR clone 41161 (TRAV4, TRAJ26)
CLVGDYGQNFVF

SEQ ID NO: 82322 - protein, 14 aa, Homo sapiens
  CDR3 for beta chain variable domain of TCR clone 41161 (TRBV19, TRBJ2-1)
CASPTFVLSGEQFF

SEQ ID NO: 82323 - protein, 12 aa, Homo sapiens
  CDR3 for alpha chain variable domain of TCR clone 41162 (TRAV21, TRAJ24)
CAVMDSWGKLQF

SEQ ID NO: 82324 - protein, 15 aa, Homo sapiens
  CDR3 for beta chain variable domain of TCR clone 41162 (TRBV13, TRBJ2-2)
CQQRSVRGEHRGAVF

SEQ ID NO: 82325 - protein, 11 aa, Homo sapiens
  CDR3 for alpha chain variable domain of TCR clone 41163 (TRAV1-2, TRAJ40)
CAVPGTYKYIF

SEQ ID NO: 82326 - protein, 12 aa, Homo sapiens
  CDR3 for beta chain variable domain of TCR clone 41163 (TRBV11-2, TRBJ2-2)
CASSLGGGELFF

SEQ ID NO: 82327 - protein, 12 aa, Homo sapiens
  CDR3 for alpha chain variable domain of TCR clone 41164 (TRAV26-1, TRAJ13)
CIVSRGYQKVTF

SEQ ID NO: 82328 - protein, 14 aa, Homo sapiens
  CDR3 for beta chain variable domain of TCR clone 41164 (TRBV7-2, TRBJ2-7)
CASSPKTNFYEQYF

SEQ ID NO: 82329 - protein, 13 aa, Homo sapiens
  CDR3 for alpha chain variable domain of TCR clone 41165 (TRAV12-1, TRAJ47)
CVVNMEYGNKLVF

SEQ ID NO: 82330 - protein, 16 aa, Homo sapiens
  CDR3 for beta chain variable domain of TCR clone 41165 (TRBV7-9, TRBJ1-2)
CASSLGFSSGEDGYTF

SEQ ID NO: 82331 - protein, 12 aa, Homo sapiens
  CDR3 for alpha chain variable domain of TCR clone 41166 (TRAV12-3, TRAJ5)
CAMDTGRRALTF

SEQ ID NO: 82332 - protein, 13 aa, Homo sapiens
  CDR3 for beta chain variable domain of TCR clone 41166 (TRBV7-7, TRBJ2-2)
CASSLTSAGELVF

SEQ ID NO: 82333 - protein, 15 aa, Homo sapiens
  CDR3 for alpha chain variable domain of TCR clone 41167 (TRAV17, TRAJ22)
CATVAPSGSARQLTF

SEQ ID NO: 82334 - protein, 16 aa, Homo sapiens
  CDR3 for beta chain variable domain of TCR clone 41167 (TRBV10-3, TRBJ2-7)
CAISTDFADRPYEQYF

SEQ ID NO: 82335 - protein, 13 aa, Homo sapiens
  CDR3 for alpha chain variable domain of TCR clone 41168 (TRAV21, TRAJ57)
CAVTQGGSEKLVF

SEQ ID NO: 82336 - protein, 15 aa, Homo sapiens
  CDR3 for beta chain variable domain of TCR clone 41168 (TRBV5-1, TRBJ1-1)
CASSSTTGTNTEALF

SEQ ID NO: 82337 - protein, 13 aa, Homo sapiens
  CDR3 for alpha chain variable domain of TCR clone 41169 (TRAV26-1, TRAJ31)
CIVRVDGNARLMS

SEQ ID NO: 82338 - protein, 17 aa, Homo sapiens
  CDR3 for beta chain variable domain of TCR clone 41169 (TRBV11-2, TRBJ2-1)
CASSLYPPGVEYNEQFF

SEQ ID NO: 82339 - protein, 14 aa, Homo sapiens
  CDR3 for alpha chain variable domain of TCR clone 41170 (TRAV38-1, TRAJ45)
CAYYSGGCADGLTF

SEQ ID NO: 82340 - protein, 20 aa, Homo sapiens
  CDR3 for beta chain variable domain of TCR clone 41170 (TRBV28, TRBJ2-1)
CASTPIGRSPGLAGGNEQFF

SEQ ID NO: 82341 - protein, 15 aa, Homo sapiens
  CDR3 for alpha chain variable domain of TCR clone 41171 (TRAV25, TRAJ52)
CAGRPGGTSYGTLTF

SEQ ID NO: 82342 - protein, 17 aa, Homo sapiens
  CDR3 for beta chain variable domain of TCR clone 41171 (TRBV7-8, TRBJ2-6)
CASSAGTGGAGANVLTF

SEQ ID NO: 82343 - protein, 13 aa, Homo sapiens
  CDR3 for alpha chain variable domain of TCR clone 41172 (TRAV12-1, TRAJ40)
CVVPTSGTYKYIF

SEQ ID NO: 82344 - protein, 18 aa, Homo sapiens
  CDR3 for beta chain variable domain of TCR clone 41172 (TRBV7-6, TRBJ2-1)
CASSPRTSGMSAYNEQFF

SEQ ID NO: 82345 - protein, 12 aa, Homo sapiens
  CDR3 for alpha chain variable domain of TCR clone 41173 (TRAV30, TRAJ39)
YGRGNAGNMLTF

SEQ ID NO: 82346 - protein, 15 aa, Homo sapiens
  CDR3 for beta chain variable domain of TCR clone 41173 (TRBV5-1, TRBJ1-1)
CASSWTGRGNTEAFF

SEQ ID NO: 82347 - protein, 13 aa, Homo sapiens
  CDR3 for alpha chain variable domain of TCR clone 41174 (TRAV13-2, TRAJ40)
CAELIPGTYKYIF

SEQ ID NO: 82348 - protein, 14 aa, Homo sapiens
  CDR3 for beta chain variable domain of TCR clone 41174 (TRBV19, TRBJ1-5)
CASGTEVYNQPQHF

SEQ ID NO: 82349 - protein, 15 aa, Homo sapiens
  CDR3 for alpha chain variable domain of TCR clone 41175 (TRAV2, TRAJ45)
CAVDGTGGGADGLTL

SEQ ID NO: 82350 - protein, 16 aa, Homo sapiens
  CDR3 for beta chain variable domain of TCR clone 41175 (TRBV6-5, TRBJ2-1)
CASSYSLSGGYNEQFF

SEQ ID NO: 82351 - protein, 16 aa, Homo sapiens
  CDR3 for alpha chain variable domain of TCR clone 41176 (TRAV12-2, TRAJ52)
CAVNNRGGTSYGKLTF

SEQ ID NO: 82352 - protein, 12 aa, Homo sapiens
  CDR3 for beta chain variable domain of TCR clone 41176 (TRBV7-3, TRBJ2-1)
CASSFQSGPQFF

SEQ ID NO: 82353 - protein, 14 aa, Homo sapiens
  CDR3 for alpha chain variable domain of TCR clone 41177 (TRAV38-1, TRAJ45)
CAYYSGGGADGLTF

SEQ ID NO: 82354 - protein, 20 aa, Homo sapiens
  CDR3 for beta chain variable domain of TCR clone 41177 (TRBV28, TRBJ2-1)
CASTPIGRSPGLAGGNEQFS

SEQ ID NO: 82355 - protein, 13 aa, Homo sapiens
  CDR3 for alpha chain variable domain of TCR clone 41178 (TRAV35, TRAJ36)
CAGPRIGANNLFF

SEQ ID NO: 82356 - protein, 15 aa, Homo sapiens
  CDR3 for beta chain variable domain of TCR clone 41178 (TRBV28, TRBJ2-5)
RASSPPWSYQETQYF

SEQ ID NO: 82357 - protein, 14 aa, Homo sapiens
  CDR3 for alpha chain variable domain of TCR clone 41179 (TRAV8-2, TRAJ15)
CVVSDQQAGTALIF

SEQ ID NO: 82358 - protein, 14 aa, Homo sapiens
  CDR3 for beta chain variable domain of TCR clone 41179 (TRBV4-2, TRBJ2-1)
CASGLDRAYNEQFF

SEQ ID NO: 82359 - protein, 11 aa, Homo sapiens
  CDR3 for alpha chain variable domain of TCR clone 41180 (TRAV26-1, TRAJ27)
CIDPNAGKSTF

SEQ ID NO: 82360 - protein, 18 aa, Homo sapiens
  CDR3 for beta chain variable domain of TCR clone 41180 (TRBV7-9, TRBJ2-6)
CASSFPGAGISRANVLTF

SEQ ID NO: 82361 - protein, 13 aa, Homo sapiens
  CDR3 for alpha chain variable domain of TCR clone 41181 (TRAV13-2, TRAJ48)
CAEMDFGNEKLTF

SEQ ID NO: 82362 - protein, 13 aa, Homo sapiens
  CDR3 for beta chain variable domain of TCR clone 41181 (TRBV12-4, TRBJ1-5)
CASSPDRAQPQHF

SEQ ID NO: 82363 - protein, 11 aa, Homo sapiens
  CDR3 for alpha chain variable domain of TCR clone 41182 (TRAV12-3, TRAJ41)
CAVRSGYALNF

SEQ ID NO: 82364 - protein, 13 aa, Homo sapiens
  CDR3 for beta chain variable domain of TCR clone 41182 (TRBV7-9, TRBJ1-2)
CASSLKQNYGYTF

SEQ ID NO: 82365 - protein, 13 aa, Homo sapiens
  CDR3 for alpha chain variable domain of TCR clone 41183 (TRAV27, TRAJ3)
ASLRGGSASKIIF

SEQ ID NO: 82366 - protein, 15 aa, Homo sapiens
  CDR3 for beta chain variable domain of TCR clone 41183 (TRBV28, TRBJ1-3)
CASSMGWASGNTIYF

SEQ ID NO: 82367 - protein, 13 aa, Homo sapiens
  CDR3 for alpha chain variable domain of TCR clone 41184 (TRAV13-1, TRAJ43)
CAASLSNNNEMRF

SEQ ID NO: 82368 - protein, 15 aa, Homo sapiens
  CDR3 for beta chain variable domain of TCR clone 41184 (TRBV5-1, TRBJ2-1)
CASSQAGYWWNEQFF

SEQ ID NO: 82369 - protein, 11 aa, Homo sapiens
  CDR3 for alpha chain variable domain of TCR clone 41185 (TRAV17, TRAJ9)
CATTGGFKTIF

SEQ ID NO: 82370 - protein, 15 aa, Homo sapiens
  CDR3 for beta chain variable domain of TCR clone 41185 (TRBV9, TRBJ1-6)
CASSVAGTGDPPLHF

SEQ ID NO: 82371 - protein, 14 aa, Homo sapiens
  CDR3 for alpha chain variable domain of TCR clone 41186 (TRAV2, TRAJ9)
CAVEDRSGGFKTIF

SEQ ID NO: 82372 - protein, 12 aa, Homo sapiens
  CDR3 for beta chain variable domain of TCR clone 41186 (TRBV7-9, TRBJ2-7)
CASSIKREEQYF

SEQ ID NO: 82373 - protein, 11 aa, Homo sapiens
  CDR3 for alpha chain variable domain of TCR clone 41187 (TRAV3, TRAJ21)
CAVGNFNKFYF

SEQ ID NO: 82374 - protein, 17 aa, Homo sapiens
  CDR3 for beta chain variable domain of TCR clone 41187 (TRBV24-1, TRBJ2-1)
CATSDVSTSGAYNEQFF

SEQ ID NO: 82375 - protein, 18 aa, Homo sapiens
  CDR3 for alpha chain variable domain of TCR clone 41188 (TRAV9-2, TRAJ52)
RALSRHNAGGTSYGKLTF

SEQ ID NO: 82376 - protein, 14 aa, Homo sapiens
  CDR3 for beta chain variable domain of TCR clone 41188 (TRBV11-2, TRBJ2-5)
CASRPLAGRETQYF

SEQ ID NO: 82377 - protein, 12 aa, Homo sapiens
  CDR3 for alpha chain variable domain of TCR clone 41189 (TRAV13-1, TRAJ21)
CAAKEGFNKFYF

SEQ ID NO: 82378 - protein, 17 aa, Homo sapiens
  CDR3 for beta chain variable domain of TCR clone 41189 (TRBV19, TRBJ2-7)
CASSISFYDSYPYEQYL

SEQ ID NO: 82379 - protein, 12 aa, Homo sapiens
  CDR3 for alpha chain variable domain of TCR clone 41190 (TRAV13-1, TRAJ49)
CAASPMGNQFYF

SEQ ID NO: 82380 - protein, 14 aa, Homo sapiens
  CDR3 for beta chain variable domain of TCR clone 41190 (TRBV12-4, TRBJ1-1)
CASSLGTGGTEAFF

SEQ ID NO: 82381 - protein, 14 aa, Homo sapiens
  CDR3 for alpha chain variable domain of TCR clone 41191 (TRAV12-2, TRAJ45)
CAVYSGGGADGLIF

SEQ ID NO: 82382 - protein, 14 aa, Homo sapiens
  CDR3 for beta chain variable domain of TCR clone 41191 (TRBV6-5, TRBJ1-2)
CASTRGGGSDGYTF

SEQ ID NO: 82383 - protein, 16 aa, Homo sapiens
  CDR3 for alpha chain variable domain of TCR clone 41192 (TRAV20, TRAJ53)
CAVQGNSGGSNYKLTF

SEQ ID NO: 82384 - protein, 14 aa, Homo sapiens
  CDR3 for beta chain variable domain of TCR clone 41192 (TRBV12-5, TRBJ2-5)
CASGSRTHQETQYF

SEQ ID NO: 82385 - protein, 12 aa, Homo sapiens
  CDR3 for alpha chain variable domain of TCR clone 41193 (TRAV26-2, TRAJ21)
CILKGNFNKFYF

SEQ ID NO: 82386 - protein, 14 aa, Homo sapiens
  CDR3 for beta chain variable domain of TCR clone 41193 (TRBV7-9, TRBJ1-1)
CASTPLQSYTEAFC

SEQ ID NO: 82387 - protein, 14 aa, Homo sapiens
  CDR3 for alpha chain variable domain of TCR clone 41194 (TRAV26-1, TRAJ38)
CIADNAGNNRKLIW

SEQ ID NO: 82388 - protein, 13 aa, Homo sapiens
  CDR3 for beta chain variable domain of TCR clone 41194 (TRBV20-1, TRBJ1-1)
CSARGGGNSEAFF

SEQ ID NO: 82389 - protein, 14 aa, Homo sapiens
  CDR3 for alpha chain variable domain of TCR clone 41195 (TRAV8-1, TRAJ5)
CAVRTDAGRRALTF

SEQ ID NO: 82390 - protein, 14 aa, Homo sapiens
  CDR3 for beta chain variable domain of TCR clone 41195 (TRBV19, TRBJ2-1)
CASPTFVLSGEQFF

SEQ ID NO: 82391 - protein, 12 aa, Homo sapiens
  CDR3 for alpha chain variable domain of TCR clone 41196 (TRAV36/DV7, TRAJ54)
CAVVRGAQKMVF

SEQ ID NO: 82392 - protein, 14 aa, Homo sapiens
  CDR3 for beta chain variable domain of TCR clone 41196 (TRBV7-3, TRBJ1-1)
CASSLKGGNTEAFF

SEQ ID NO: 82393 - protein, 14 aa, Homo sapiens
  CDR3 for alpha chain variable domain of TCR clone 41197 (TRAV9-2, TRAJ39)
CALYIYTAGNMLTF

SEQ ID NO: 82394 - protein, 14 aa, Homo sapiens
  CDR3 for beta chain variable domain of TCR clone 41197 (TRBV6-1, TRBJ1-3)
CASVQGGGGNTIYF

SEQ ID NO: 82395 - protein, 11 aa, Homo sapiens
  CDR3 for alpha chain variable domain of TCR clone 41198 (TRAV1-1, TRAJ23)
CAVRQGGKLIF

SEQ ID NO: 82396 - protein, 20 aa, Homo sapiens
  CDR3 for beta chain variable domain of TCR clone 41198 (TRBV7-8, TRBJ2-2)
CARSHLFPGPTVHITGELFF

SEQ ID NO: 82397 - protein, 13 aa, Homo sapiens
  CDR3 for alpha chain variable domain of TCR clone 41199 (TRAV12-3, TRAJ41)
CAIAPNSGYAPNF

SEQ ID NO: 82398 - protein, 14 aa, Homo sapiens
  CDR3 for beta chain variable domain of TCR clone 41199 (TRBV7-2, TRBJ1-3)
CASSLGTAGNTIYF

SEQ ID NO: 82399 - protein, 17 aa, Homo sapiens
  CDR3 for alpha chain variable domain of TCR clone 41200 (TRAV35, TRAJ28)
CAGLQVYSGAGSYQLTF

SEQ ID NO: 82400 - protein, 15 aa, Homo sapiens
  CDR3 for beta chain variable domain of TCR clone 41200 (TRBV2, TRBJ1-2)
CASGEIGGANYGYTF

SEQ ID NO: 82401 - protein, 16 aa, Homo sapiens
  CDR3 for alpha chain variable domain of TCR clone 41201 (TRAV3, TRAJ22)
CAVRDMGSGSARQLTF

SEQ ID NO: 82402 - protein, 15 aa, Homo sapiens
  CDR3 for beta chain variable domain of TCR clone 41201 (TRBV5-1, TRBJ2-1)
CASTGSGRTYNEQFF

SEQ ID NO: 82403 - protein, 18 aa, Homo sapiens
  CDR3 for alpha chain variable domain of TCR clone 41202 (TRAV12-3, TRAJ52)
CAMSVGGAGGTSYGKLTF

SEQ ID NO: 82404 - protein, 14 aa, Homo sapiens
  CDR3 for beta chain variable domain of TCR clone 41202 (TRBV7-2, TRBJ2-7)
CAGRSQGAAYEQYF

SEQ ID NO: 82405 - protein, 13 aa, Homo sapiens
  CDR3 for alpha chain variable domain of TCR clone 41203 (TRAV35, TRAJ42)
CAGFPGSQGNLIF

SEQ ID NO: 82406 - protein, 14 aa, Homo sapiens
  CDR3 for beta chain variable domain of TCR clone 41203 (TRBV19, TRBJ2-1)
CASPIFVLSGEQFF

SEQ ID NO: 82407 - protein, 12 aa, Homo sapiens
  CDR3 for alpha chain variable domain of TCR clone 41204 (TRAV16, TRAJ12)
CAHGDSSYKLIF

SEQ ID NO: 82408 - protein, 12 aa, Homo sapiens
  CDR3 for beta chain variable domain of TCR clone 41204 (TRBV28, TRBJ2-1)
CASRRLVGEQFF

SEQ ID NO: 82409 - protein, 14 aa, Homo sapiens
  CDR3 for alpha chain variable domain of TCR clone 41205 (TRAV8-3, TRAJ10)
CAVGNAGGGNKLTF

SEQ ID NO: 82410 - protein, 17 aa, Homo sapiens
  CDR3 for beta chain variable domain of TCR clone 41205 (TRBV27, TRBJ2-7)
CASSAKRPGTGPYEQYF

SEQ ID NO: 82411 - protein, 18 aa, Homo sapiens
  CDR3 for alpha chain variable domain of TCR clone 41206 (TRAV26-2, TRAJ45)
CTLRLWGYSGGGADGLTF

SEQ ID NO: 82412 - protein, 17 aa, Homo sapiens
  CDR3 for beta chain variable domain of TCR clone 41206 (TRBV28, TRBJ2-3)
CASSPTPAGGRVDTQYF

SEQ ID NO: 82413 - protein, 13 aa, Homo sapiens
  CDR3 for alpha chain variable domain of TCR clone 41207 (TRAV21, TRAJ27)
CAARPGNAGKSTF

SEQ ID NO: 82414 - protein, 15 aa, Homo sapiens
  CDR3 for beta chain variable domain of TCR clone 41207 (TRBV11-3, TRBJ2-7)
CASSPGPASSYEQHF

SEQ ID NO: 82415 - protein, 14 aa, Homo sapiens
  CDR3 for alpha chain variable domain of TCR clone 41208 (TRAV20, TRAJ44)
CAVQDTGTASKLAF

SEQ ID NO: 82416 - protein, 13 aa, Homo sapiens
  CDR3 for beta chain variable domain of TCR clone 41208 (TRBV29-1, TRBJ1-3)
CSAGTGRGNTIYF

SEQ ID NO: 82417 - protein, 14 aa, Homo sapiens
  CDR3 for alpha chain variable domain of TCR clone 41209 (TRAV1-2, TRAJ8)
CAVREDTGFQKLAF

SEQ ID NO: 82418 - protein, 16 aa, Homo sapiens
  CDR3 for beta chain variable domain of TCR clone 41209 (TRBV7-6, TRBJ2-6)
CASSLPGLSGANVLTF

SEQ ID NO: 82419 - protein, 11 aa, Homo sapiens
  CDR3 for alpha chain variable domain of TCR clone 41210 (TRAV12-3, TRAJ43)
CAMSVPNDMRF

SEQ ID NO: 82420 - protein, 14 aa, Homo sapiens
  CDR3 for beta chain variable domain of TCR clone 41210 (TRBV12-5, TRBJ2-5)
CASGSRTHQETQYF

SEQ ID NO: 82421 - protein, 11 aa, Homo sapiens
  CDR3 for alpha chain variable domain of TCR clone 41211 (TRAV17, TRAJ36)
CAPTGANNLFF

SEQ ID NO: 82422 - protein, 12 aa, Homo sapiens
  CDR3 for beta chain variable domain of TCR clone 41211 (TRBV29-1, TRBJ2-3)
CSVTGGAGTQYF

SEQ ID NO: 82423 - protein, 14 aa, Homo sapiens
  CDR3 for alpha chain variable domain of TCR clone 41212 (TRAV13-1, TRAJ44)
CAAKATRTASKLTF

SEQ ID NO: 82424 - protein, 15 aa, Homo sapiens
  CDR3 for beta chain variable domain of TCR clone 41212 (TRBV19, TRBJ2-1)
CASIKGRGPYNEQFF

SEQ ID NO: 82425 - protein, 15 aa, Homo sapiens
  CDR3 for alpha chain variable domain of TCR clone 41213 (TRAV12-3, TRAJ10)
CASYILTGGGNKLTF

SEQ ID NO: 82426 - protein, 15 aa, Homo sapiens
  CDR3 for beta chain variable domain of TCR clone 41213 (TRBV7-2, TRBJ1-6)
CASSLGPDRGMPFHF

SEQ ID NO: 82427 - protein, 14 aa, Homo sapiens
  CDR3 for alpha chain variable domain of TCR clone 41214 (TRAV30, TRAJ26)
CGTEIVSYGQSFVF

SEQ ID NO: 82428 - protein, 13 aa, Homo sapiens
  CDR3 for beta chain variable domain of TCR clone 41214 (TRBV19, TRBJ1-3)
CASRLSLGNTIYF

SEQ ID NO: 82429 - protein, 18 aa, Homo sapiens
  CDR3 for alpha chain variable domain of TCR clone 41215 (TRAV13-1, TRAJ52)
CAATNPNAGGTSYGKLTF

SEQ ID NO: 82430 - protein, 15 aa, Homo sapiens
  CDR3 for beta chain variable domain of TCR clone 41215 (TRBV6-1, TRBJ2-3)
CASSERGGITDTQYF

SEQ ID NO: 82431 - protein, 18 aa, Homo sapiens
  CDR3 for alpha chain variable domain of TCR clone 41216 (TRAV21, TRAJ52)
CAVRPSPAGGTSYGKLTF

SEQ ID NO: 82432 - protein, 17 aa, Homo sapiens
  CDR3 for beta chain variable domain of TCR clone 41216 (TRBV28, TRBJ2-5)
CASSRQGGLAGAETQYF

SEQ ID NO: 82433 - protein, 13 aa, Homo sapiens
  CDR3 for alpha chain variable domain of TCR clone 41217 (TRAV27, TRAJ45)
CRSSGGGADGLTF

SEQ ID NO: 82434 - protein, 17 aa, Homo sapiens
  CDR3 for beta chain variable domain of TCR clone 41217 (TRBV11-2, TRBJ2-1)
CASSLYPPGVEYNAQFF

SEQ ID NO: 82435 - protein, 15 aa, Homo sapiens
  CDR3 for alpha chain variable domain of TCR clone 41218 (TRAV13-1, TRAJ57)
QVPPLSQGGSEKLVF

SEQ ID NO: 82436 - protein, 17 aa, Homo sapiens
  CDR3 for beta chain variable domain of TCR clone 41218 (TRBV7-3, TRBJ2-3)
CASSLMERMRGADTQYF

SEQ ID NO: 82437 - protein, 11 aa, Homo sapiens
  CDR3 for alpha chain variable domain of TCR clone 41219 (TRAV8-3, TRAJ49)
CAVNTGNRFYF

SEQ ID NO: 82438 - protein, 12 aa, Homo sapiens
  CDR3 for beta chain variable domain of TCR clone 41219 (TRBV11-2, TRBJ2-7)
CASSPPADEQYF

SEQ ID NO: 82439 - protein, 14 aa, Homo sapiens
  CDR3 for alpha chain variable domain of TCR clone 41220 (TRAV12-2, TRAJ13)
CAVKKTGGYQKVTF

SEQ ID NO: 82440 - protein, 15 aa, Homo sapiens
  CDR3 for beta chain variable domain of TCR clone 41220 (TRBV27, TRBJ2-7)
CASSNGGGSSNEQYF

SEQ ID NO: 82441 - protein, 14 aa, Homo sapiens
  CDR3 for alpha chain variable domain of TCR clone 41221 (TRAV1-2, TRAJ16)
CAVNRFSDGQKLLF

SEQ ID NO: 82442 - protein, 14 aa, Homo sapiens
  CDR3 for beta chain variable domain of TCR clone 41221 (TRBV28, TRBJ2-7)
CASKPGPDLYEQYF

SEQ ID NO: 82443 - protein, 15 aa, Homo sapiens
  CDR3 for alpha chain variable domain of TCR clone 41222 (TRAV23/DV6, TRAJ18)
CAARYRGSTLGRLYF

SEQ ID NO: 82444 - protein, 14 aa, Homo sapiens
  CDR3 for beta chain variable domain of TCR clone 41222 (TRBV25-1, TRBJ1-1)
CASTHLGGNTEAFF

SEQ ID NO: 82445 - protein, 16 aa, Homo sapiens
  CDR3 for alpha chain variable domain of TCR clone 41223 (TRAV30, TRAJ24)
CGTEIVDADSWGKFQF

SEQ ID NO: 82446 - protein, 14 aa, Homo sapiens
  CDR3 for beta chain variable domain of TCR clone 41223 (TRBV7-9, TRBJ2-4)
CACSLAMGGNIQYF

SEQ ID NO: 82447 - protein, 13 aa, Homo sapiens
  CDR3 for alpha chain variable domain of TCR clone 41224 (TRAV12-1, TRAJ16)
CVVNGPDGQKLLF

SEQ ID NO: 82448 - protein, 13 aa, Homo sapiens
  CDR3 for beta chain variable domain of TCR clone 41224 (TRBV2, TRBJ1-1)
CARNPTGGFHTFF

SEQ ID NO: 82449 - protein, 13 aa, Homo sapiens
  CDR3 for alpha chain variable domain of TCR clone 41225 (TRAV12-2, TRAJ42)
CAVKRGSQGNPIF

SEQ ID NO: 82450 - protein, 12 aa, Homo sapiens
  CDR3 for beta chain variable domain of TCR clone 41225 (TRBV5-7, TRBJ1-2)
CASSLVQNGYTF

SEQ ID NO: 82451 - protein, 15 aa, Homo sapiens
  CDR3 for alpha chain variable domain of TCR clone 41226 (TRAV12-1, TRAJ44)
CVADLPTGTASKLIF

SEQ ID NO: 82452 - protein, 13 aa, Homo sapiens
  CDR3 for beta chain variable domain of TCR clone 41226 (TRBV6-5, TRBJ2-5)
CASSPQGGETQYF

SEQ ID NO: 82453 - protein, 16 aa, Homo sapiens
  CDR3 for alpha chain variable domain of TCR clone 41227 (TRAV27, TRAJ13)
CAGVKSDSGGYQKVTF

SEQ ID NO: 82454 - protein, 15 aa, Homo sapiens
  CDR3 for beta chain variable domain of TCR clone 41227 (TRBV29-1, TRBJ2-1)
CSVGRHALFYNEQFF

SEQ ID NO: 82455 - protein, 13 aa, Homo sapiens
  CDR3 for alpha chain variable domain of TCR clone 41228 (TRAV21, TRAJ27)
CAARPGNAGKSTF

SEQ ID NO: 82456 - protein, 14 aa, Homo sapiens
  CDR3 for beta chain variable domain of TCR clone 41228 (TRBV4-2, TRBJ2-7)
PAAKLAGGTYEQYF

SEQ ID NO: 82457 - protein, 13 aa, Homo sapiens
  CDR3 for alpha chain variable domain of TCR clone 41229 (TRAV3, TRAJ21)
CAVREPNFNKFYF

SEQ ID NO: 82458 - protein, 14 aa, Homo sapiens
  CDR3 for beta chain variable domain of TCR clone 41229 (TRBV4-2, TRBJ2-1)
CASGLDRAYNEQFF

SEQ ID NO: 82459 - protein, 18 aa, Homo sapiens
  CDR3 for alpha chain variable domain of TCR clone 41230 (TRAV3, TRAJ17)
CAVRARRGGRSCRQQANF

SEQ ID NO: 82460 - protein, 14 aa, Homo sapiens
  CDR3 for beta chain variable domain of TCR clone 41230 (TRBV4-1, TRBJ2-2)
CASSQAVNAGELFF

SEQ ID NO: 82461 - protein, 14 aa, Homo sapiens
  CDR3 for alpha chain variable domain of TCR clone 41231 (TRAV35, TRAJ22)
CAGLRPGSARQLTL

SEQ ID NO: 82462 - protein, 14 aa, Homo sapiens
  CDR3 for beta chain variable domain of TCR clone 41231 (TRBV5-1, TRBJ2-7)
CASSRGESLYEQYF

SEQ ID NO: 82463 - protein, 14 aa, Homo sapiens
  CDR3 for alpha chain variable domain of TCR clone 41232 (TRAV12-3, TRAJ6)
CAMSATGGGYIPTF

SEQ ID NO: 82464 - protein, 16 aa, Homo sapiens
  CDR3 for beta chain variable domain of TCR clone 41232 (TRBV4-2, TRBJ2-1)
CASSPRAGQGANEQFF

SEQ ID NO: 82465 - protein, 13 aa, Homo sapiens
  CDR3 for alpha chain variable domain of TCR clone 41233 (TRAV12-3, TRAJ13)
CAMSSGGYQKVTF

SEQ ID NO: 82466 - protein, 13 aa, Homo sapiens
  CDR3 for beta chain variable domain of TCR clone 41233 (TRBV20-1, TRBJ1-1)
CSTPPGGHTEAFF

SEQ ID NO: 82467 - protein, 14 aa, Homo sapiens
  CDR3 for alpha chain variable domain of TCR clone 41234 (TRAV1-2, TRAJ16)
CAVNRFSDCQKLLF

SEQ ID NO: 82468 - protein, 19 aa, Homo sapiens
  CDR3 for beta chain variable domain of TCR clone 41234 (TRBV19, TRBJ2-5)
CASSIGQVTDFFLGETQYF

SEQ ID NO: 82469 - protein, 15 aa, Homo sapiens
  CDR3 for alpha chain variable domain of TCR clone 41235 (TRAV34, TRAJ38)
CGADFTSGNNRKLIW

SEQ ID NO: 82470 - protein, 14 aa, Homo sapiens
  CDR3 for beta chain variable domain of TCR clone 41235 (TRBV25-1, TRBJ1-1)
CASTHLGGNTEAFF

SEQ ID NO: 82471 - protein, 12 aa, Homo sapiens
  CDR3 for alpha chain variable domain of TCR clone 41236 (TRAV2, TRAJ9)
CAVGAGGFKTIF

SEQ ID NO: 82472 - protein, 18 aa, Homo sapiens
  CDR3 for beta chain variable domain of TCR clone 41236 (TRBV11-2, TRBJ2-3)
CASSLGGASRGAPNTQYF

SEQ ID NO: 82473 - protein, 18 aa, Homo sapiens
  CDR3 for alpha chain variable domain of TCR clone 41237 (TRAV12-3, TRAJ52)
CAMSRTNAGGTSYGKLTF

SEQ ID NO: 82474 - protein, 17 aa, Homo sapiens
  CDR3 for beta chain variable domain of TCR clone 41237 (TRBV7-3, TRBJ2-3)
CASSVMKRMRGADTQYF

SEQ ID NO: 82475 - protein, 11 aa, Homo sapiens
  CDR3 for alpha chain variable domain of TCR clone 41238 (TRAV4, TRAJ23)
CLVAHGGKLIF

SEQ ID NO: 82476 - protein, 15 aa, Homo sapiens
  CDR3 for beta chain variable domain of TCR clone 41238 (TRBV7-2, TRBJ2-1)
CASSFQADEYNEQFF

SEQ ID NO: 82477 - protein, 15 aa, Homo sapiens
  CDR3 for alpha chain variable domain of TCR clone 41239 (TRAV1-2, TRAJ18)
CAWEGRGSTLGRLYF

SEQ ID NO: 82478 - protein, 13 aa, Homo sapiens
  CDR3 for beta chain variable domain of TCR clone 41239 (TRBV19, TRBJ1-2)
CASSQGQVYGYTF

SEQ ID NO: 82479 - protein, 14 aa, Homo sapiens
  CDR3 for alpha chain variable domain of TCR clone 41240 (TRAV16, TRAJ33)
YALSAMDSNYQLIW

SEQ ID NO: 82480 - protein, 12 aa, Homo sapiens
  CDR3 for beta chain variable domain of TCR clone 41240 (TRBV5-1, TRBJ1-2)
CASSQDTYGYTF

SEQ ID NO: 82481 - protein, 13 aa, Homo sapiens
  CDR3 for alpha chain variable domain of TCR clone 41241 (TRAV13-1, TRAJ5)
CATSDTGRRALTF

SEQ ID NO: 82482 - protein, 12 aa, Homo sapiens
  CDR3 for beta chain variable domain of TCR clone 41241 (TRBV28, TRBJ2-3)
CASSLYRDTQYF

SEQ ID NO: 82483 - protein, 14 aa, Homo sapiens
  CDR3 for alpha chain variable domain of TCR clone 41242 (TRAV12-3, TRAJ9)
CAMSPNTGGFKTIF

SEQ ID NO: 82484 - protein, 12 aa, Homo sapiens
  CDR3 for beta chain variable domain of TCR clone 41242 (TRBV19, TRBJ1-5)
YASSIAQQPQHF

SEQ ID NO: 82485 - protein, 12 aa, Homo sapiens
  CDR3 for alpha chain variable domain of TCR clone 41243 (TRAV14/DV4, TRAJ9)
CAMNPGGFKTIF

SEQ ID NO: 82486 - protein, 16 aa, Homo sapiens
  CDR3 for beta chain variable domain of TCR clone 41243 (TRBV28, TRBJ2-5)
CASIFSPAGGWETQYF

SEQ ID NO: 82487 - protein, 16 aa, Homo sapiens
  CDR3 for alpha chain variable domain of TCR clone 41244 (TRAV3, TRAJ10)
CAVRDMRAGGGNRLTF

SEQ ID NO: 82488 - protein, 14 aa, Homo sapiens
  CDR3 for beta chain variable domain of TCR clone 41244 (TRBV25-1, TRBJ1-1)
CASTHLGGNTEAFF

SEQ ID NO: 82489 - protein, 14 aa, Homo sapiens
  CDR3 for alpha chain variable domain of TCR clone 41245 (TRAV17, TRAJ16)
CATADFSDGQTLLF

SEQ ID NO: 82490 - protein, 15 aa, Homo sapiens
  CDR3 for beta chain variable domain of TCR clone 41245 (TRBV18, TRBJ2-1)
CASSPPSASYNEQFF

SEQ ID NO: 82491 - protein, 13 aa, Homo sapiens
  CDR3 for alpha chain variable domain of TCR clone 41246 (TRAV27, TRAJ6)
CAGGTRGSYIPTF

SEQ ID NO: 82492 - protein, 16 aa, Homo sapiens
  CDR3 for beta chain variable domain of TCR clone 41246 (TRBV6-1, TRBJ1-3)
CASVQGGVETPYILER

SEQ ID NO: 82493 - protein, 14 aa, Homo sapiens
  CDR3 for alpha chain variable domain of TCR clone 41247 (TRAV17, TRAJ16)
CATADFSDGQKLLF

SEQ ID NO: 82494 - protein, 15 aa, Homo sapiens
  CDR3 for beta chain variable domain of TCR clone 41247 (TRBV18, TRBJ2-1)
CASSPPSASFNEQFF

SEQ ID NO: 82495 - protein, 18 aa, Homo sapiens
  CDR3 for alpha chain variable domain of TCR clone 41248 (TRAV35, TRAJ28)
CAGHNYPLSGAGRYQLTF

SEQ ID NO: 82496 - protein, 12 aa, Homo sapiens
  CDR3 for beta chain variable domain of TCR clone 41248 (TRBV7-9, TRBJ1-1)
CASSLEGTEAFF

SEQ ID NO: 82497 - protein, 14 aa, Homo sapiens
  CDR3 for alpha chain variable domain of TCR clone 41249 (TRAV8-3, TRAJ18)
WAVDRGSTLGRLYF

SEQ ID NO: 82498 - protein, 12 aa, Homo sapiens
  CDR3 for beta chain variable domain of TCR clone 41249 (TRBV28, TRBJ2-6)
CAIQAGANVLTF

SEQ ID NO: 82499 - protein, 13 aa, Homo sapiens
  CDR3 for alpha chain variable domain of TCR clone 41250 (TRAV12-2, TRAJ10)
CAVPTGGGNKLTF

SEQ ID NO: 82500 - protein, 14 aa, Homo sapiens
  CDR3 for beta chain variable domain of TCR clone 41250 (TRBV19, TRBJ2-1)
CASPTFVLSGEQFF

SEQ ID NO: 82501 - protein, 15 aa, Homo sapiens
  CDR3 for alpha chain variable domain of TCR clone 41251 (TRAV26-1, TRAJ22)
CIVRVSFWFCKATDL

SEQ ID NO: 82502 - protein, 16 aa, Homo sapiens
  CDR3 for beta chain variable domain of TCR clone 41251 (TRBV7-9, TRBJ1-2)
CASSLGFSSGEDGYTF

SEQ ID NO: 82503 - protein, 14 aa, Homo sapiens
  CDR3 for alpha chain variable domain of TCR clone 41252 (TRAV29/DV5, TRAJ36)
CAARRKTGANNLFF

SEQ ID NO: 82504 - protein, 15 aa, Homo sapiens
  CDR3 for beta chain variable domain of TCR clone 41252 (TRBV18, TRBJ2-1)
CASSPPSASYNEQFF

SEQ ID NO: 82505 - protein, 18 aa, Homo sapiens
  CDR3 for alpha chain variable domain of TCR clone 41253 (TRAV21, TRAJ52)
CAVRPSPAGGTSYGELTF

SEQ ID NO: 82506 - protein, 13 aa, Homo sapiens
  CDR3 for beta chain variable domain of TCR clone 41253 (TRBV29-1, TRBJ2-2)
CSVYREDTGELFF

SEQ ID NO: 82507 - protein, 14 aa, Homo sapiens
  CDR3 for alpha chain variable domain of TCR clone 41254 (TRAV1-2, TRAJ16)
CAVNRFSDGQKLLF

SEQ ID NO: 82508 - protein, 14 aa, Homo sapiens
  CDR3 for beta chain variable domain of TCR clone 41254 (TRBV7-9, TRBJ2-3)
RASSLEDGTDTQYF

SEQ ID NO: 82509 - protein, 12 aa, Homo sapiens
  CDR3 for alpha chain variable domain of TCR clone 41255 (TRAV12-3, TRAJ17)
CAMALTGNKLTF

SEQ ID NO: 82510 - protein, 15 aa, Homo sapiens
  CDR3 for beta chain variable domain of TCR clone 41255 (TRBV11-2, TRBJ2-2)
CASSSDRVNAGELFF

SEQ ID NO: 82511 - protein, 22 aa, Homo sapiens
  CDR3 for alpha chain variable domain of TCR clone 41256 (TRAV26-2, TRAJ45)
CCVLLHPERQGRSGGGAGGLTF

SEQ ID NO: 82512 - protein, 15 aa, Homo sapiens
  CDR3 for beta chain variable domain of TCR clone 41256 (TRBV7-6, TRBJ2-5)
CASSKPTGPQETQYF

SEQ ID NO: 82513 - protein, 14 aa, Homo sapiens
  CDR3 for alpha chain variable domain of TCR clone 41257 (TRAV12-2, TRAJ13)
CAVKKTGGYQKATF

SEQ ID NO: 82514 - protein, 14 aa, Homo sapiens
  CDR3 for beta chain variable domain of TCR clone 41257 (TRBV7-2, TRBJ2-7)
CASSPKTSFYEQYF

SEQ ID NO: 82515 - protein, 15 aa, Homo sapiens
  CDR3 for alpha chain variable domain of TCR clone 41258 (TRAV3, TRAJ3)
CAVRDRDSSASKIIF

SEQ ID NO: 82516 - protein, 18 aa, Homo sapiens
  CDR3 for beta chain variable domain of TCR clone 41258 (TRBV20-1, TRBJ2-6)
CSAETTPTHGSGANVLTF

SEQ ID NO: 82517 - protein, 16 aa, Homo sapiens
  CDR3 for alpha chain variable domain of TCR clone 41259 (TRAV3, TRAJ37)
RAVRGKGSGNTGKLIF

SEQ ID NO: 82518 - protein, 16 aa, Homo sapiens
  CDR3 for beta chain variable domain of TCR clone 41259 (TRBV12-5, TRBJ2-5)
CASGPRTSGSQETQYF

SEQ ID NO: 82519 - protein, 14 aa, Homo sapiens
  CDR3 for alpha chain variable domain of TCR clone 41260 (TRAV9-2, TRAJ39)
CALYIYNAGNMLTF

SEQ ID NO: 82520 - protein, 13 aa, Homo sapiens
  CDR3 for beta chain variable domain of TCR clone 41260 (TRBV23-1, TRBJ1-4)
CASRGKFNEKLFF

SEQ ID NO: 82521 - protein, 12 aa, Homo sapiens
  CDR3 for alpha chain variable domain of TCR clone 41261 (TRAV35, TRAJ39)
LAPNNAVNMLTF

SEQ ID NO: 82522 - protein, 16 aa, Homo sapiens
  CDR3 for beta chain variable domain of TCR clone 41261 (TRBV2, TRBJ2-3)
CASSTSVEGVTDTQYF

SEQ ID NO: 82523 - protein, 14 aa, Homo sapiens
  CDR3 for alpha chain variable domain of TCR clone 41262 (TRAV26-1, TRAJ38)
CIVMGAGNNRKLIW

SEQ ID NO: 82524 - protein, 14 aa, Homo sapiens
  CDR3 for beta chain variable domain of TCR clone 41262 (TRBV6-1, TRBJ1-3)
CASVQGGGGNTIYF

SEQ ID NO: 82525 - protein, 18 aa, Homo sapiens
  CDR3 for alpha chain variable domain of TCR clone 41263 (TRAV21, TRAJ52)
CAVRPSPAGGTSYGKLTF

SEQ ID NO: 82526 - protein, 15 aa, Homo sapiens
  CDR3 for beta chain variable domain of TCR clone 41263 (TRBV7-2, TRBJ2-3)
CASSLAGAFIDTQYF

SEQ ID NO: 82527 - protein, 14 aa, Homo sapiens
  CDR3 for alpha chain variable domain of TCR clone 41264 (TRAV9-2, TRAJ39)
CALYIYNAGNMLTF

SEQ ID NO: 82528 - protein, 19 aa, Homo sapiens
  CDR3 for beta chain variable domain of TCR clone 41264 (TRBV19, TRBJ2-5)
CASSIGQVTDFFLGETQYF

SEQ ID NO: 82529 - protein, 16 aa, Homo sapiens
  CDR3 for alpha chain variable domain of TCR clone 41265 (TRAV3, TRAJ10)
CAVRDMRAGGGNKLTL

SEQ ID NO: 82530 - protein, 14 aa, Homo sapiens
  CDR3 for beta chain variable domain of TCR clone 41265 (TRBV25-1, TRBJ1-1)
CASTHLGGNTEAFF

SEQ ID NO: 82531 - protein, 12 aa, Homo sapiens
  CDR3 for alpha chain variable domain of TCR clone 41266 (TRAV24, TRAJ41)
CASRNSGYALNF

SEQ ID NO: 82532 - protein, 15 aa, Homo sapiens
  CDR3 for beta chain variable domain of TCR clone 41266 (TRBV6-3, TRBJ2-7)
CASSSPGTVFYEQYF

SEQ ID NO: 82533 - protein, 12 aa, Homo sapiens
  CDR3 for alpha chain variable domain of TCR clone 41267 (TRAV2, TRAJ31)
CAVEDNNARLVF

SEQ ID NO: 82534 - protein, 16 aa, Homo sapiens
  CDR3 for beta chain variable domain of TCR clone 41267 (TRBV10-3, TRBJ2-1)
CAISGVGDGGGGEQFF

SEQ ID NO: 82535 - protein, 12 aa, Homo sapiens
  CDR3 for alpha chain variable domain of TCR clone 41268 (TRAV38-1, TRAJ32)
CAPLGATNKLIF

SEQ ID NO: 82536 - protein, 14 aa, Homo sapiens
  CDR3 for beta chain variable domain of TCR clone 41268 (TRBV29-1, TRBJ2-5)
CSVETSGSGGTQYF

SEQ ID NO: 82537 - protein, 14 aa, Homo sapiens
  CDR3 for alpha chain variable domain of TCR clone 41269 (TRAV13-1, TRAJ49)
CAASPRWTGTSLTV

SEQ ID NO: 82538 - protein, 13 aa, Homo sapiens
  CDR3 for beta chain variable domain of TCR clone 41269 (TRBV7-3, TRBJ1-1)
CASSQDWGAEAFF

SEQ ID NO: 82539 - protein, 13 aa, Homo sapiens
  CDR3 for alpha chain variable domain of TCR clone 41270 (TRAV13-2, TRAJ48)
CAEMDFENEKLTF

SEQ ID NO: 82540 - protein, 15 aa, Homo sapiens
  CDR3 for beta chain variable domain of TCR clone 41270 (TRBV7-9, TRBJ1-6)
CASSSPGRGNSPLHF

SEQ ID NO: 82541 - protein, 13 aa, Homo sapiens
  CDR3 for alpha chain variable domain of TCR clone 41271 (TRAV13-1, TRAJ40)
CAASKGGTYKYIF

SEQ ID NO: 82542 - protein, 13 aa, Homo sapiens
  CDR3 for beta chain variable domain of TCR clone 41271 (TRBV7-6, TRBJ1-2)
CVSSLVADYGYTF

SEQ ID NO: 82543 - protein, 16 aa, Homo sapiens
  CDR3 for alpha chain variable domain of TCR clone 41272 (TRAV17, TRAJ52)
CTTSNAGGTSYGKLTF

SEQ ID NO: 82544 - protein, 15 aa, Homo sapiens
  CDR3 for beta chain variable domain of TCR clone 41272 (TRBV7-9, TRBJ1-5)
CASSQGHQPNQPQHF

SEQ ID NO: 82545 - protein, 14 aa, Homo sapiens
  CDR3 for alpha chain variable domain of TCR clone 41273 (TRAV8-6, TRAJ13)
CAGGSSGGYQKVTF

SEQ ID NO: 82546 - protein, 13 aa, Homo sapiens
  CDR3 for beta chain variable domain of TCR clone 41273 (TRBV27, TRBJ2-2)
CASSWRNTGELFF

SEQ ID NO: 82547 - protein, 17 aa, Homo sapiens
  CDR3 for alpha chain variable domain of TCR clone 41274 (TRAV8-6, TRAJ58)
CAVRSWVGETSGSRLTF

SEQ ID NO: 82548 - protein, 14 aa, Homo sapiens
  CDR3 for beta chain variable domain of TCR clone 41274 (TRBV4-2, TRBJ2-1)
CASGLDRAYNEQFF

SEQ ID NO: 82549 - protein, 13 aa, Homo sapiens
  CDR3 for alpha chain variable domain of TCR clone 41275 (TRAV13-2, TRAJ8)
CAFMNTGFQKLVF

SEQ ID NO: 82550 - protein, 15 aa, Homo sapiens
  CDR3 for beta chain variable domain of TCR clone 41275 (TRBV19, TRBJ2-3)
CAAGGTNAPNDTQYF

SEQ ID NO: 82551 - protein, 11 aa, Homo sapiens
  CDR3 for alpha chain variable domain of TCR clone 41276 (TRAV12-3, TRAJ27)
CAMANAGKSTV

SEQ ID NO: 82552 - protein, 13 aa, Homo sapiens
  CDR3 for beta chain variable domain of TCR clone 41276 (TRBV20-1, TRBJ1-1)
CSARVGGNTEAFF

SEQ ID NO: 82553 - protein, 13 aa, Homo sapiens
  CDR3 for alpha chain variable domain of TCR clone 41277 (TRAV5, TRAJ16)
CAVTFSDGQKLLF

SEQ ID NO: 82554 - protein, 15 aa, Homo sapiens
  CDR3 for beta chain variable domain of TCR clone 41277 (TRBV9, TRBJ2-7)
CASSPHEQGSYEQYF

SEQ ID NO: 82555 - protein, 20 aa, Homo sapiens
  CDR3 for alpha chain variable domain of TCR clone 41278 (TRAV26-1, TRAJ42)
CCVLLHRQTYYGGSQGNLTF

SEQ ID NO: 82556 - protein, 16 aa, Homo sapiens
  CDR3 for beta chain variable domain of TCR clone 41278 (TRBV4-1, TRBJ1-1)
CASSSMSERPNTEAFF

SEQ ID NO: 82557 - protein, 12 aa, Homo sapiens
  CDR3 for alpha chain variable domain of TCR clone 41279 (TRAV12-3, TRAJ17)
CAMTLTDNKLTF

SEQ ID NO: 82558 - protein, 16 aa, Homo sapiens
  CDR3 for beta chain variable domain of TCR clone 41279 (TRBV7-3, TRBJ2-1)
CASSLEGYRSYNEQFF

SEQ ID NO: 82559 - protein, 14 aa, Homo sapiens
  CDR3 for alpha chain variable domain of TCR clone 41280 (TRAV17, TRAJ57)
CATDPQGGSEKLVF

SEQ ID NO: 82560 - protein, 14 aa, Homo sapiens
  CDR3 for beta chain variable domain of TCR clone 41280 (TRBV7-3, TRBJ1-1)
CASSLKGGNTEAFF

SEQ ID NO: 82561 - protein, 10 aa, Homo sapiens
  CDR3 for alpha chain variable domain of TCR clone 41281 (TRAV1-2, TRAJ20)
CACNDYKLSF

SEQ ID NO: 82562 - protein, 16 aa, Homo sapiens
  CDR3 for beta chain variable domain of TCR clone 41281 (TRBV20-1, TRBJ2-1)
CSARGLKQGMNNEQFF

SEQ ID NO: 82563 - protein, 14 aa, Homo sapiens
  CDR3 for alpha chain variable domain of TCR clone 41282 (TRAV26-1, TRAJ45)
CIEVTGGGSDGLTF

SEQ ID NO: 82564 - protein, 13 aa, Homo sapiens
  CDR3 for beta chain variable domain of TCR clone 41282 (TRBV7-6, TRBJ1-2)
CASSLVADYGYTF

SEQ ID NO: 82565 - protein, 14 aa, Homo sapiens
  CDR3 for alpha chain variable domain of TCR clone 41283 (TRAV17, TRAJ22)
CDTSPSGSARQLTF

SEQ ID NO: 82566 - protein, 15 aa, Homo sapiens
  CDR3 for beta chain variable domain of TCR clone 41283 (TRBV4-1, TRBJ2-5)
CASSQWDLYQETQYF

SEQ ID NO: 82567 - protein, 13 aa, Homo sapiens
  CDR3 for alpha chain variable domain of TCR clone 41284 (TRAV20, TRAJ48)
CAVQGVGNEKLTF

SEQ ID NO: 82568 - protein, 14 aa, Homo sapiens
  CDR3 for beta chain variable domain of TCR clone 41284 (TRBV2, TRBJ2-2)
CASSQPGLAGGEHR

SEQ ID NO: 82569 - protein, 14 aa, Homo sapiens
  CDR3 for alpha chain variable domain of TCR clone 41285 (TRAV1-2, TRAJ16)
CAVNRFSDGQKLLF

SEQ ID NO: 82570 - protein, 14 aa, Homo sapiens
  CDR3 for beta chain variable domain of TCR clone 41285 (TRBV2, TRBJ2-3)
CASSEGQNTDTQYF

SEQ ID NO: 82571 - protein, 14 aa, Homo sapiens
  CDR3 for alpha chain variable domain of TCR clone 41286 (TRAV16, TRAJ15)
RALSGPQAGTALIF

SEQ ID NO: 82572 - protein, 12 aa, Homo sapiens
  CDR3 for beta chain variable domain of TCR clone 41286 (TRBV18, TRBJ2-5)
CASSPSKETQYF

SEQ ID NO: 82573 - protein, 13 aa, Homo sapiens
  CDR3 for alpha chain variable domain of TCR clone 41287 (TRAV35, TRAJ57)
CWSPQGGSEKLVF

SEQ ID NO: 82574 - protein, 18 aa, Homo sapiens
  CDR3 for beta chain variable domain of TCR clone 41287 (TRBV6-6, TRBJ1-3)
CASSYSKWDSISGNTMYF

SEQ ID NO: 82575 - protein, 15 aa, Homo sapiens
  CDR3 for alpha chain variable domain of TCR clone 41288 (TRAV25, TRAJ10)
CAGPLLTGGGNKLTF

SEQ ID NO: 82576 - protein, 15 aa, Homo sapiens
  CDR3 for beta chain variable domain of TCR clone 41288 (TRBV12-5, TRBJ2-2)
CASGRLGGSTGELFF

SEQ ID NO: 82577 - protein, 13 aa, Homo sapiens
  CDR3 for alpha chain variable domain of TCR clone 41289 (TRAV13-1, TRAJ39)
CAASIWAGNMLTF

SEQ ID NO: 82578 - protein, 15 aa, Homo sapiens
  CDR3 for beta chain variable domain of TCR clone 41289 (TRBV7-9, TRBJ1-1)
CASSLLKQGGTEAFF

SEQ ID NO: 82579 - protein, 14 aa, Homo sapiens
  CDR3 for alpha chain variable domain of TCR clone 41290 (TRAV8-1, TRAJ49)
CASSIANTGNQFYF

SEQ ID NO: 82580 - protein, 13 aa, Homo sapiens
  CDR3 for beta chain variable domain of TCR clone 41290 (TRBV11-2, TRBJ2-5)
CASSVSSQETQYF

SEQ ID NO: 82581 - protein, 14 aa, Homo sapiens
  CDR3 for alpha chain variable domain of TCR clone 41291 (TRAV1-2, TRAJ8)
CAVREDTGFQELVF

SEQ ID NO: 82582 - protein, 14 aa, Homo sapiens
  CDR3 for beta chain variable domain of TCR clone 41291 (TRBV11-2, TRBJ2-3)
CASSRLARTDTQYF

SEQ ID NO: 82583 - protein, 14 aa, Homo sapiens
  CDR3 for alpha chain variable domain of TCR clone 41292 (TRAV1-2, TRAJ8)
CAVREDTGSQKLVF

SEQ ID NO: 82584 - protein, 16 aa, Homo sapiens
  CDR3 for beta chain variable domain of TCR clone 41292 (TRBV29-1, TRBJ2-6)
CSVEDITYSGANVLTF

SEQ ID NO: 82585 - protein, 15 aa, Homo sapiens
  CDR3 for alpha chain variable domain of TCR clone 41293 (TRAV3, TRAJ20)
CAVRYIKLSDYKLSF

SEQ ID NO: 82586 - protein, 15 aa, Homo sapiens
  CDR3 for beta chain variable domain of TCR clone 41293 (TRBV7-9, TRBJ1-6)
CASSSPGRGNSPLHF

SEQ ID NO: 82587 - protein, 15 aa, Homo sapiens
  CDR3 for alpha chain variable domain of TCR clone 41294 (TRAV27, TRAJ38)
CAARRNAGNNRKLIW

SEQ ID NO: 82588 - protein, 10 aa, Homo sapiens
  CDR3 for beta chain variable domain of TCR clone 41294 (TRBV12-4, TRBJ2-2)
CQQLRRGAVF

SEQ ID NO: 82589 - protein, 15 aa, Homo sapiens
  CDR3 for alpha chain variable domain of TCR clone 41295 (TRAV12-3, TRAJ6)
CAMSATTGGSYIPTF

SEQ ID NO: 82590 - protein, 13 aa, Homo sapiens
  CDR3 for beta chain variable domain of TCR clone 41295 (TRBV7-9, TRBJ1-2)
CASSLKQNYGDTF

SEQ ID NO: 82591 - protein, 16 aa, Homo sapiens
  CDR3 for alpha chain variable domain of TCR clone 41296 (TRAV3, TRAJ32)
CAVRDIGGGATNKLIF

SEQ ID NO: 82592 - protein, 15 aa, Homo sapiens
  CDR3 for beta chain variable domain of TCR clone 41296 (TRBV11-3, TRBJ2-3)
CASLKDGREGDTQYF

SEQ ID NO: 82593 - protein, 17 aa, Homo sapiens
  CDR3 for alpha chain variable domain of TCR clone 41297 (TRAV13-1, TRAJ52)
CAAGRNAGGTSYGKPTF

SEQ ID NO: 82594 - protein, 15 aa, Homo sapiens
  CDR3 for beta chain variable domain of TCR clone 41297 (TRBV6-3, TRBJ2-7)
CASSSPGTVFYEQYF

SEQ ID NO: 82595 - protein, 18 aa, Homo sapiens
  CDR3 for alpha chain variable domain of TCR clone 41298 (TRAV12-3, TRAJ52)
CAMSVGGAGGTSYGKLTC

SEQ ID NO: 82596 - protein, 15 aa, Homo sapiens
  CDR3 for beta chain variable domain of TCR clone 41298 (TRBV27, TRBJ1-6)
CASSFDRGLGSPLHF

SEQ ID NO: 82597 - protein, 12 aa, Homo sapiens
  CDR3 for alpha chain variable domain of TCR clone 41299 (TRAV12-3, TRAJ29)
CAAREGNTPPVF

SEQ ID NO: 82598 - protein, 17 aa, Homo sapiens
  CDR3 for beta chain variable domain of TCR clone 41299 (TRBV18, TRBJ2-1)
CASSPLAAGAGDNEQFF

SEQ ID NO: 82599 - protein, 13 aa, Homo sapiens
  CDR3 for alpha chain variable domain of TCR clone 41300 (TRAV8-6, TRAJ41)
CAVSENSGYTLNF

SEQ ID NO: 82600 - protein, 17 aa, Homo sapiens
  CDR3 for beta chain variable domain of TCR clone 41300 (TRBV7-2, TRBJ2-3)
CASSLEARGTSTDTQYF

SEQ ID NO: 82601 - protein, 12 aa, Homo sapiens
  CDR3 for alpha chain variable domain of TCR clone 41301 (TRAV16, TRAJ10)
CSRTGGGNKLTF

SEQ ID NO: 82602 - protein, 15 aa, Homo sapiens
  CDR3 for beta chain variable domain of TCR clone 41301 (TRBV6-3, TRBJ2-7)
CANSSPGTVFYEQYF

SEQ ID NO: 82603 - protein, 14 aa, Homo sapiens
  CDR3 for alpha chain variable domain of TCR clone 41302 (TRAV12-3, TRAJ13)
CAMRNSGGYQKVTF

SEQ ID NO: 82604 - protein, 14 aa, Homo sapiens
  CDR3 for beta chain variable domain of TCR clone 41302 (TRBV4-1, TRBJ1-6)
CASSPGSDSSHLHF

SEQ ID NO: 82605 - protein, 13 aa, Homo sapiens
  CDR3 for alpha chain variable domain of TCR clone 41303 (TRAV8-1, TRAJ39)
CAGLNNAGNMLTF

SEQ ID NO: 82606 - protein, 17 aa, Homo sapiens
  CDR3 for beta chain variable domain of TCR clone 41303 (TRBV19, TRBJ2-3)
CASSIGPAGGGTDTQYF

SEQ ID NO: 82607 - protein, 14 aa, Homo sapiens
  CDR3 for alpha chain variable domain of TCR clone 41304 (TRAV12-1, TRAJ42)
CVVIYGGSQGNLIF

SEQ ID NO: 82608 - protein, 17 aa, Homo sapiens
  CDR3 for beta chain variable domain of TCR clone 41304 (TRBV3-1, TRBJ2-6)
CASSPSTGPAGANVLTF

SEQ ID NO: 82609 - protein, 13 aa, Homo sapiens
  CDR3 for alpha chain variable domain of TCR clone 41305 (TRAV29/DV5, TRAJ33)
CAASVESNYQLIW

SEQ ID NO: 82610 - protein, 16 aa, Homo sapiens
  CDR3 for beta chain variable domain of TCR clone 41305 (TRBV5-1, TRBJ1-1)
CASSSGGNSLNTEAFF

SEQ ID NO: 82611 - protein, 13 aa, Homo sapiens
  CDR3 for alpha chain variable domain of TCR clone 41306 (TRAV1-2, TRAJ9)
CAALNTGGFKTIF

SEQ ID NO: 82612 - protein, 15 aa, Homo sapiens
  CDR3 for beta chain variable domain of TCR clone 41306 (TRBV19, TRBJ2-1)
CASSSPGVPLDEQFF

SEQ ID NO: 82613 - protein, 12 aa, Homo sapiens
  CDR3 for alpha chain variable domain of TCR clone 41307 (TRAV12-3, TRAJ17)
CAMTLTGNKLTF

SEQ ID NO: 82614 - protein, 14 aa, Homo sapiens
  CDR3 for beta chain variable domain of TCR clone 41307 (TRBV6-1, TRBJ2-7)
CASTRTGDYYEQYF

SEQ ID NO: 82615 - protein, 14 aa, Homo sapiens
  CDR3 for alpha chain variable domain of TCR clone 41308 (TRAV23/DV6, TRAJ57)
CAASNQGGSEKLVF

SEQ ID NO: 82616 - protein, 13 aa, Homo sapiens
  CDR3 for beta chain variable domain of TCR clone 41308 (TRBV11-2, TRBJ2-7)
CASGSYPSYEQYF

SEQ ID NO: 82617 - protein, 14 aa, Homo sapiens
  CDR3 for alpha chain variable domain of TCR clone 41309 (TRAV1-2, TRAJ16)
CAVNRFSDGQKLLF

SEQ ID NO: 82618 - protein, 15 aa, Homo sapiens
  CDR3 for beta chain variable domain of TCR clone 41309 (TRBV11-3, TRBJ1-1)
CASSLGGPGGTEAFF

SEQ ID NO: 82619 - protein, 12 aa, Homo sapiens
  CDR3 for alpha chain variable domain of TCR clone 41310 (TRAV12-3, TRAJ4)
CAMTGAGTRLAV

SEQ ID NO: 82620 - protein, 14 aa, Homo sapiens
  CDR3 for beta chain variable domain of TCR clone 41310 (TRBV10-3, TRBJ1-1)
CAISDTDRGGEAFF

SEQ ID NO: 82621 - protein, 16 aa, Homo sapiens
  CDR3 for alpha chain variable domain of TCR clone 41311 (TRAV13-1, TRAJ48)
CAASIFGNFGNERLTF

SEQ ID NO: 82622 - protein, 16 aa, Homo sapiens
  CDR3 for beta chain variable domain of TCR clone 41311 (TRBV18, TRBJ1-5)
CASSPYRVEGNQPQHF

SEQ ID NO: 82623 - protein, 13 aa, Homo sapiens
  CDR3 for alpha chain variable domain of TCR clone 41312 (TRAV35, TRAJ57)
CAGSQGGSEKPVF

SEQ ID NO: 82624 - protein, 11 aa, Homo sapiens
  CDR3 for beta chain variable domain of TCR clone 41312 (TRBV7-8, TRBJ2-7)
CASSLSLEQYF

SEQ ID NO: 82625 - protein, 16 aa, Homo sapiens
  CDR3 for alpha chain variable domain of TCR clone 41313 (TRAV2, TRAJ13)
CAARILGVTRKSPLEL

SEQ ID NO: 82626 - protein, 14 aa, Homo sapiens
  CDR3 for beta chain variable domain of TCR clone 41313 (TRBV19, TRBJ2-1)
CASEVTGARNEQFF

SEQ ID NO: 82627 - protein, 15 aa, Homo sapiens
  CDR3 for alpha chain variable domain of TCR clone 41314 (TRAV12-1, TRAJ42)
CVVTRDGGSQGNLIF

SEQ ID NO: 82628 - protein, 13 aa, Homo sapiens
  CDR3 for beta chain variable domain of TCR clone 41314 (TRBV27, TRBJ2-7)
CASSLTTVYEQYF

SEQ ID NO: 82629 - protein, 17 aa, Homo sapiens
  CDR3 for alpha chain variable domain of TCR clone 41315 (TRAV3, TRAJ42)
CSVRDRDYGGSQGNLIF

SEQ ID NO: 82630 - protein, 14 aa, Homo sapiens
  CDR3 for beta chain variable domain of TCR clone 41315 (TRBV19, TRBJ2-5)
CASSMTGQQETQYF

SEQ ID NO: 82631 - protein, 11 aa, Homo sapiens
  CDR3 for alpha chain variable domain of TCR clone 41316 (TRAV17, TRAJ9)
CATTGGFKTIF

SEQ ID NO: 82632 - protein, 15 aa, Homo sapiens
  CDR3 for beta chain variable domain of TCR clone 41316 (TRBV4-1, TRBJ1-4)
CASSDTGGTNEKLFF

SEQ ID NO: 82633 - protein, 16 aa, Homo sapiens
  CDR3 for alpha chain variable domain of TCR clone 41317 (TRAV8-1, TRAJ42)
CAVTSRYGGSQGDLIF

SEQ ID NO: 82634 - protein, 12 aa, Homo sapiens
  CDR3 for beta chain variable domain of TCR clone 41317 (TRBV6-3, TRBJ2-7)
CASSLGRRGLYF

SEQ ID NO: 82635 - protein, 11 aa, Homo sapiens
  CDR3 for alpha chain variable domain of TCR clone 41318 (TRAV21, TRAJ11)
CAVNGYSTLAF

SEQ ID NO: 82636 - protein, 15 aa, Homo sapiens
  CDR3 for beta chain variable domain of TCR clone 41318 (TRBV6-3, TRBJ2-7)
CASSSPGTVFYEQYF

SEQ ID NO: 82637 - protein, 13 aa, Homo sapiens
  CDR3 for alpha chain variable domain of TCR clone 41319 (TRAV16, TRAJ28)
CAPTGAGSYQLTF

SEQ ID NO: 82638 - protein, 16 aa, Homo sapiens
  CDR3 for beta chain variable domain of TCR clone 41319 (TRBV28, TRBJ1-5)
CASSLTGQSWNQPQHF

SEQ ID NO: 82639 - protein, 17 aa, Homo sapiens
  CDR3 for alpha chain variable domain of TCR clone 41320 (TRAV3, TRAJ6)
CAVRDGPRAGGSYIPTF

SEQ ID NO: 82640 - protein, 20 aa, Homo sapiens
  CDR3 for beta chain variable domain of TCR clone 41320 (TRBV28, TRBJ2-1)
CASTPIGRSPGLVGGNEQFF

SEQ ID NO: 82641 - protein, 16 aa, Homo sapiens
  CDR3 for alpha chain variable domain of TCR clone 41321 (TRAV30, TRAJ24)
CGTEIVDADSWGNSSL

SEQ ID NO: 82642 - protein, 15 aa, Homo sapiens
  CDR3 for beta chain variable domain of TCR clone 41321 (TRBV28, TRBJ2-1)
CASSIIAGGRSEQFF

SEQ ID NO: 82643 - protein, 14 aa, Homo sapiens
  CDR3 for alpha chain variable domain of TCR clone 41322 (TRAV6, TRAJ10)
CALGLTGGGNKLTF

SEQ ID NO: 82644 - protein, 14 aa, Homo sapiens
  CDR3 for beta chain variable domain of TCR clone 41322 (TRBV18, TRBJ2-7)
CASSPAGGPGEQYF

SEQ ID NO: 82645 - protein, 12 aa, Homo sapiens
  CDR3 for alpha chain variable domain of TCR clone 41323 (TRAV13-1, TRAJ21)
CAAFFNFNKFYS

SEQ ID NO: 82646 - protein, 14 aa, Homo sapiens
  CDR3 for beta chain variable domain of TCR clone 41323 (TRBV4-1, TRBJ2-7)
CASRLTSGSYEQYF

SEQ ID NO: 82647 - protein, 14 aa, Homo sapiens
  CDR3 for alpha chain variable domain of TCR clone 41324 (TRAV21, TRAJ35)
CAVMPIGFGNVLHC

SEQ ID NO: 82648 - protein, 12 aa, Homo sapiens
  CDR3 for beta chain variable domain of TCR clone 41324 (TRBV7-9, TRBJ2-7)
CASIIKREEQYF

SEQ ID NO: 82649 - protein, 14 aa, Homo sapiens
  CDR3 for alpha chain variable domain of TCR clone 41325 (TRAV12-1, TRAJ3)
CVVNPGSSASKIIF

SEQ ID NO: 82650 - protein, 14 aa, Homo sapiens
  CDR3 for beta chain variable domain of TCR clone 41325 (TRBV20-1, TRBJ2-3)
CSARGGTSTDAQYF

SEQ ID NO: 82651 - protein, 11 aa, Homo sapiens
  CDR3 for alpha chain variable domain of TCR clone 41326 (TRAV13-1, TRAJ11)
CAARGYSTLTF

SEQ ID NO: 82652 - protein, 15 aa, Homo sapiens
  CDR3 for beta chain variable domain of TCR clone 41326 (TRBV9, TRBJ1-6)
CASSVAGTRDSPLHF

SEQ ID NO: 82653 - protein, 20 aa, Homo sapiens
  CDR3 for alpha chain variable domain of TCR clone 41327 (TRAV12-1, TRAJ42)
SPVIQPPTSVKGGSQGNLIF

SEQ ID NO: 82654 - protein, 18 aa, Homo sapiens
  CDR3 for beta chain variable domain of TCR clone 41327 (TRBV11-2, TRBJ2-3)
CASSLGGASRGAPNTQYF

SEQ ID NO: 82655 - protein, 14 aa, Homo sapiens
  CDR3 for alpha chain variable domain of TCR clone 41328 (TRAV12-2, TRAJ44)
CAVNPAGTASKLTF

SEQ ID NO: 82656 - protein, 13 aa, Homo sapiens
  CDR3 for beta chain variable domain of TCR clone 41328 (TRBV20-1, TRBJ1-6)
CSDPLGVGSPLHF

SEQ ID NO: 82657 - protein, 15 aa, Homo sapiens
  CDR3 for alpha chain variable domain of TCR clone 41329 (TRAV12-3, TRAJ6)
CAMGATTGGSYIPTF

SEQ ID NO: 82658 - protein, 16 aa, Homo sapiens
  CDR3 for beta chain variable domain of TCR clone 41329 (TRBV20-1, TRBJ1-2)
CSASMGQGVANYGYTF

SEQ ID NO: 82659 - protein, 14 aa, Homo sapiens
  CDR3 for alpha chain variable domain of TCR clone 41330 (TRAV1-2, TRAJ16)
CAVNRFSDGQKLLF

SEQ ID NO: 82660 - protein, 17 aa, Homo sapiens
  CDR3 for beta chain variable domain of TCR clone 41330 (TRBV7-8, TRBJ2-6)
CASSAGTGGAGANGLTF

SEQ ID NO: 82661 - protein, 13 aa, Homo sapiens
  CDR3 for alpha chain variable domain of TCR clone 41331 (TRAV21, TRAJ57)
CAVTQGGSEKLVF

SEQ ID NO: 82662 - protein, 15 aa, Homo sapiens
  CDR3 for beta chain variable domain of TCR clone 41331 (TRBV5-1, TRBJ1-1)
CASSSTTGTNAEAFF

SEQ ID NO: 82663 - protein, 13 aa, Homo sapiens
  CDR3 for alpha chain variable domain of TCR clone 41332 (TRAV17, TRAJ4)
CATKSGGYNKLIF

SEQ ID NO: 82664 - protein, 14 aa, Homo sapiens
  CDR3 for beta chain variable domain of TCR clone 41332 (TRBV20-1, TRBJ1-5)
CSARDDRGSQPQHF

SEQ ID NO: 82665 - protein, 15 aa, Homo sapiens
  CDR3 for alpha chain variable domain of TCR clone 41333 (TRAV21, TRAJ40)
CAVRPPTSGTYKYIF

SEQ ID NO: 82666 - protein, 13 aa, Homo sapiens
  CDR3 for beta chain variable domain of TCR clone 41333 (TRBV7-2, TRBJ2-2)
CASSSVRAGELFF

SEQ ID NO: 82667 - protein, 13 aa, Homo sapiens
  CDR3 for alpha chain variable domain of TCR clone 41334 (TRAV13-2, TRAJ48)
CAEMDFGNEKLTF

SEQ ID NO: 82668 - protein, 14 aa, Homo sapiens
  CDR3 for beta chain variable domain of TCR clone 41334 (TRBV19, TRBJ2-7)
CASSMGQGAIEQYL

SEQ ID NO: 82669 - protein, 18 aa, Homo sapiens
  CDR3 for alpha chain variable domain of TCR clone 41335 (TRAV21, TRAJ52)
CAVRPCPAGGTSYGKLTF

SEQ ID NO: 82670 - protein, 17 aa, Homo sapiens
  CDR3 for beta chain variable domain of TCR clone 41335 (TRBV13, TRBJ2-3)
CASSLSRVAGGRNTQYF

SEQ ID NO: 82671 - protein, 17 aa, Homo sapiens
  CDR3 for alpha chain variable domain of TCR clone 41336 (TRAV9-2, TRAJ45)
CALSGYYSGGGADGLTF

SEQ ID NO: 82672 - protein, 12 aa, Homo sapiens
  CDR3 for beta chain variable domain of TCR clone 41336 (TRBV7-8, TRBJ2-7)
CASSLGDREQYF

SEQ ID NO: 82673 - protein, 15 aa, Homo sapiens
  CDR3 for alpha chain variable domain of TCR clone 41337 (TRAV8-3, TRAJ27)
CAVGPSKTYAGKSTF

SEQ ID NO: 82674 - protein, 15 aa, Homo sapiens
  CDR3 for beta chain variable domain of TCR clone 41337 (TRBV7-2, TRBJ2-1)
CASSSGLAGGNEQFF

SEQ ID NO: 82675 - protein, 13 aa, Homo sapiens
  CDR3 for alpha chain variable domain of TCR clone 41338 (TRAV12-3, TRAJ33)
CAMSLNSNYQLIW

SEQ ID NO: 82676 - protein, 13 aa, Homo sapiens
  CDR3 for beta chain variable domain of TCR clone 41338 (TRBV7-2, TRBJ2-2)
CASSLAVTGELFL

SEQ ID NO: 82677 - protein, 13 aa, Homo sapiens
  CDR3 for alpha chain variable domain of TCR clone 41339 (TRAV2, TRAJ40)
CAVVTSGTYKYIF

SEQ ID NO: 82678 - protein, 14 aa, Homo sapiens
  CDR3 for beta chain variable domain of TCR clone 41339 (TRBV19, TRBJ2-1)
SASPTFVLSGEQFF

SEQ ID NO: 82679 - protein, 15 aa, Homo sapiens
  CDR3 for alpha chain variable domain of TCR clone 41340 (TRAV3, TRAJ7)
CAVRDKDNGNNRLAS

SEQ ID NO: 82680 - protein, 19 aa, Homo sapiens
  CDR3 for beta chain variable domain of TCR clone 41340 (TRBV5-8, TRBJ2-3)
CASSFLGTSGSHRTDTQYF

SEQ ID NO: 82681 - protein, 17 aa, Homo sapiens
  CDR3 for alpha chain variable domain of TCR clone 41341 (TRAV3, TRAJ6)
CAVRDGPRAGGSYIPTF

SEQ ID NO: 82682 - protein, 14 aa, Homo sapiens
  CDR3 for beta chain variable domain of TCR clone 41341 (TRBV7-2, TRBJ2-7)
CPSSPKTSFYEQYF

SEQ ID NO: 82683 - protein, 15 aa, Homo sapiens
  CDR3 for alpha chain variable domain of TCR clone 41342 (TRAV13-1, TRAJ5)
YAASPRGHGQESTYF

SEQ ID NO: 82684 - protein, 17 aa, Homo sapiens
  CDR3 for beta chain variable domain of TCR clone 41342 (TRBV3-1, TRBJ2-2)
CASSQFRDKVDTGELFF

SEQ ID NO: 82685 - protein, 13 aa, Homo sapiens
  CDR3 for alpha chain variable domain of TCR clone 41343 (TRAV21, TRAJ37)
CAVSSGNTGKLIF

SEQ ID NO: 82686 - protein, 13 aa, Homo sapiens
  CDR3 for beta chain variable domain of TCR clone 41343 (TRBV10-3, TRBJ2-7)
CASKLAVNYEQYF

SEQ ID NO: 82687 - protein, 10 aa, Homo sapiens
  CDR3 for alpha chain variable domain of TCR clone 41344 (TRAV1-2, TRAJ20)
CALNDYKLSF

SEQ ID NO: 82688 - protein, 16 aa, Homo sapiens
  CDR3 for beta chain variable domain of TCR clone 41344 (TRBV20-1, TRBJ1-1)
CSARALTQGMNTEAVF

SEQ ID NO: 82689 - protein, 14 aa, Homo sapiens
  CDR3 for alpha chain variable domain of TCR clone 41345 (TRAV12-3, TRAJ10)
SHLPLTGGGDKLTF

SEQ ID NO: 82690 - protein, 16 aa, Homo sapiens
  CDR3 for beta chain variable domain of TCR clone 41345 (TRBV10-3, TRBJ2-1)
CAISLTSGNSYNEQFF

SEQ ID NO: 82691 - protein, 16 aa, Homo sapiens
  CDR3 for alpha chain variable domain of TCR clone 41346 (TRAV16, TRAJ57)
CAPYLITQGGSEELVF

SEQ ID NO: 82692 - protein, 17 aa, Homo sapiens
  CDR3 for beta chain variable domain of TCR clone 41346 (TRBV24-1, TRBJ2-4)
CATSDAEARGVRNIQYF

SEQ ID NO: 82693 - protein, 14 aa, Homo sapiens
  CDR3 for alpha chain variable domain of TCR clone 41347 (TRAV1-2, TRAJ16)
CAVNRFSDGQKLLF

SEQ ID NO: 82694 - protein, 16 aa, Homo sapiens
  CDR3 for beta chain variable domain of TCR clone 41347 (TRBV28, TRBJ2-7)
CASSSSGTSGSYVQYF

SEQ ID NO: 82695 - protein, 12 aa, Homo sapiens
  CDR3 for alpha chain variable domain of TCR clone 41348 (TRAV13-1, TRAJ42)
SVLRGSQGNLIF

SEQ ID NO: 82696 - protein, 15 aa, Homo sapiens
  CDR3 for beta chain variable domain of TCR clone 41348 (TRBV11-2, TRBJ2-1)
CASSLGPDSYNEQFF

SEQ ID NO: 82697 - protein, 17 aa, Homo sapiens
  CDR3 for alpha chain variable domain of TCR clone 41349 (TRAV3, TRAJ12)
CAVRDGGRMDSSYKLIF

SEQ ID NO: 82698 - protein, 14 aa, Homo sapiens
  CDR3 for beta chain variable domain of TCR clone 41349 (TRBV2, TRBJ2-7)
CASSLTSGGYEQYF

SEQ ID NO: 82699 - protein, 12 aa, Homo sapiens
  CDR3 for alpha chain variable domain of TCR clone 41350 (TRAV13-1, TRAJ15)
RAASQAGTALIF

SEQ ID NO: 82700 - protein, 14 aa, Homo sapiens
  CDR3 for beta chain variable domain of TCR clone 41350 (TRBV19, TRBJ2-1)
CASPTFVLSGEQFF

SEQ ID NO: 82701 - protein, 14 aa, Homo sapiens
  CDR3 for alpha chain variable domain of TCR clone 41351 (TRAV23/DV6, TRAJ17)
CSARGRAAGNKLTF

SEQ ID NO: 82702 - protein, 12 aa, Homo sapiens
  CDR3 for beta chain variable domain of TCR clone 41351 (TRBV7-9, TRBJ2-3)
CASSFITDTQYF

SEQ ID NO: 82703 - protein, 13 aa, Homo sapiens
  CDR3 for alpha chain variable domain of TCR clone 41352 (TRAV13-1, TRAJ9)
CAARITGGFKTIF

SEQ ID NO: 82704 - protein, 19 aa, Homo sapiens
  CDR3 for beta chain variable domain of TCR clone 41352 (TRBV9, TRBJ1-3)
CASSSTLQGSGTLGNTIYF

SEQ ID NO: 82705 - protein, 14 aa, Homo sapiens
  CDR3 for alpha chain variable domain of TCR clone 41353 (TRAV29/DV5, TRAJ22)
CAASATGSARQLTF

SEQ ID NO: 82706 - protein, 15 aa, Homo sapiens
  CDR3 for beta chain variable domain of TCR clone 41353 (TRBV18, TRBJ2-1)
CASSPPSASYNEQFF

SEQ ID NO: 82707 - protein, 13 aa, Homo sapiens
  CDR3 for alpha chain variable domain of TCR clone 41354 (TRAV2, TRAJ21)
CAVEDLNFNKFYF

SEQ ID NO: 82708 - protein, 15 aa, Homo sapiens
  CDR3 for beta chain variable domain of TCR clone 41354 (TRBV28, TRBJ2-5)
CSSSPGQGGIETQYF

SEQ ID NO: 82709 - protein, 15 aa, Homo sapiens
  CDR3 for alpha chain variable domain of TCR clone 41355 (TRAV3, TRAJ47)
CAVRDIGEYGNKLVF

SEQ ID NO: 82710 - protein, 13 aa, Homo sapiens
  CDR3 for beta chain variable domain of TCR clone 41355 (TRBV19, TRBJ2-7)
CASSAGHGYEQYF

SEQ ID NO: 82711 - protein, 15 aa, Homo sapiens
  CDR3 for alpha chain variable domain of TCR clone 41356 (TRAV8-3, TRAJ11)
CAVGLLNSGYSTLTF

SEQ ID NO: 82712 - protein, 16 aa, Homo sapiens
  CDR3 for beta chain variable domain of TCR clone 41356 (TRBV13, TRBJ2-2)
CASSPRTGEHTGELFF

SEQ ID NO: 82713 - protein, 12 aa, Homo sapiens
  CDR3 for alpha chain variable domain of TCR clone 41357 (TRAV12-1, TRAJ32)
CVVKGATNKLIF

SEQ ID NO: 82714 - protein, 14 aa, Homo sapiens
  CDR3 for beta chain variable domain of TCR clone 41357 (TRBV4-2, TRBJ2-1)
CASGLDRAYNEQFF

SEQ ID NO: 82715 - protein, 15 aa, Homo sapiens
  CDR3 for alpha chain variable domain of TCR clone 41358 (TRAV3, TRAJ24)
CAVRDKMTAGGNCSL

SEQ ID NO: 82716 - protein, 14 aa, Homo sapiens
  CDR3 for beta chain variable domain of TCR clone 41358 (TRBV7-2, TRBJ2-3)
CASSQTGPSYTQYF

SEQ ID NO: 82717 - protein, 12 aa, Homo sapiens
  CDR3 for alpha chain variable domain of TCR clone 41359 (TRAV27, TRAJ35)
CAGANFGNVLHC

SEQ ID NO: 82718 - protein, 16 aa, Homo sapiens
  CDR3 for beta chain variable domain of TCR clone 41359 (TRBV6-1, TRBJ2-1)
CASISRQGSSYNEQFF

SEQ ID NO: 82719 - protein, 15 aa, Homo sapiens
  CDR3 for alpha chain variable domain of TCR clone 41360 (TRAV13-1, TRAJ37)
CAATPKEIKHRQTNL

SEQ ID NO: 82720 - protein, 13 aa, Homo sapiens
  CDR3 for beta chain variable domain of TCR clone 41360 (TRBV20-1, TRBJ2-7)
CSATSEDSYEQYF

SEQ ID NO: 82721 - protein, 18 aa, Homo sapiens
  CDR3 for alpha chain variable domain of TCR clone 41361 (TRAV9-2, TRAJ52)
CALSRHNAGGTSYGQLTF

SEQ ID NO: 82722 - protein, 13 aa, Homo sapiens
  CDR3 for beta chain variable domain of TCR clone 41361 (TRBV7-9, TRBJ1-2)
CASSLKQNYGYTF

SEQ ID NO: 82723 - protein, 18 aa, Homo sapiens
  CDR3 for alpha chain variable domain of TCR clone 41362 (TRAV17, TRAJ45)
CATSLDFYSGGGADGLTF

SEQ ID NO: 82724 - protein, 15 aa, Homo sapiens
  CDR3 for beta chain variable domain of TCR clone 41362 (TRBV11-2, TRBJ2-1)
CASSKNRGLIYEQFF

SEQ ID NO: 82725 - protein, 14 aa, Homo sapiens
  CDR3 for alpha chain variable domain of TCR clone 41363 (TRAV29/DV5, TRAJ44)
CAAFLVGTASKLTF

SEQ ID NO: 82726 - protein, 15 aa, Homo sapiens
  CDR3 for beta chain variable domain of TCR clone 41363 (TRBV7-3, TRBJ2-2)
CASSETVQGTGELFF

SEQ ID NO: 82727 - protein, 14 aa, Homo sapiens
  CDR3 for alpha chain variable domain of TCR clone 41364 (TRAV2, TRAJ37)
CAVDFTSNTGKLIF

SEQ ID NO: 82728 - protein, 13 aa, Homo sapiens
  CDR3 for beta chain variable domain of TCR clone 41364 (TRBV4-2, TRBJ1-1)
CASSQAGDTEAFF

SEQ ID NO: 82729 - protein, 12 aa, Homo sapiens
  CDR3 for alpha chain variable domain of TCR clone 41365 (TRAV38-2/DV8, TRAJ48)
CALLSGNEKLTF

SEQ ID NO: 82730 - protein, 15 aa, Homo sapiens
  CDR3 for beta chain variable domain of TCR clone 41365 (TRBV6-1, TRBJ2-1)
CASSELREQYNEQFF

SEQ ID NO: 82731 - protein, 13 aa, Homo sapiens
  CDR3 for alpha chain variable domain of TCR clone 41366 (TRAV2, TRAJ40)
CAVVTSGTYKYIF

SEQ ID NO: 82732 - protein, 15 aa, Homo sapiens
  CDR3 for beta chain variable domain of TCR clone 41366 (TRBV11-3, TRBJ2-3)
FASLKDGREGDTQYF

SEQ ID NO: 82733 - protein, 13 aa, Homo sapiens
  CDR3 for alpha chain variable domain of TCR clone 41367 (TRAV17, TRAJ54)
CATVIQGAQKLVF

SEQ ID NO: 82734 - protein, 15 aa, Homo sapiens
  CDR3 for beta chain variable domain of TCR clone 41367 (TRBV13, TRBJ2-1)
CASSLLAGLNNEQFF

SEQ ID NO: 82735 - protein, 12 aa, Homo sapiens
  CDR3 for alpha chain variable domain of TCR clone 41368 (TRAV20, TRAJ49)
CAVNKDGNQFYF

SEQ ID NO: 82736 - protein, 12 aa, Homo sapiens
  CDR3 for beta chain variable domain of TCR clone 41368 (TRBV11-2, TRBJ2-1)
CASSPGNNEQFF

SEQ ID NO: 82737 - protein, 15 aa, Homo sapiens
  CDR3 for alpha chain variable domain of TCR clone 41369 (TRAV12-2, TRAJ53)
CAVNGGGGSNYKLTF

SEQ ID NO: 82738 - protein, 12 aa, Homo sapiens
  CDR3 for beta chain variable domain of TCR clone 41369 (TRBV7-6, TRBJ2-5)
CASSSSQETQYF

SEQ ID NO: 82739 - protein, 14 aa, Homo sapiens
  CDR3 for alpha chain variable domain of TCR clone 41370 (TRAV2, TRAJ5)
CAVEDRAGRRALTF

SEQ ID NO: 82740 - protein, 16 aa, Homo sapiens
  CDR3 for beta chain variable domain of TCR clone 41370 (TRBV7-3, TRBJ2-2)
CASSLKRGTLSGELFF

SEQ ID NO: 82741 - protein, 18 aa, Homo sapiens
  CDR3 for alpha chain variable domain of TCR clone 41371 (TRAV26-2, TRAJ45)
CILRVDKYSGGGADGLTF

SEQ ID NO: 82742 - protein, 11 aa, Homo sapiens
  CDR3 for beta chain variable domain of TCR clone 41371 (TRBV29-1, TRBJ2-5)
CSEDRTGTQCF

SEQ ID NO: 82743 - protein, 14 aa, Homo sapiens
  CDR3 for alpha chain variable domain of TCR clone 41372 (TRAV13-1, TRAJ44)
CAARATGTASKLTF

SEQ ID NO: 82744 - protein, 15 aa, Homo sapiens
  CDR3 for beta chain variable domain of TCR clone 41372 (TRBV9, TRBJ2-1)
CASSLAGSSYNEQFF

SEQ ID NO: 82745 - protein, 14 aa, Homo sapiens
  CDR3 for alpha chain variable domain of TCR clone 41373 (TRAV3, TRAJ40)
CAVRDRRGTYKYIF

SEQ ID NO: 82746 - protein, 15 aa, Homo sapiens
  CDR3 for beta chain variable domain of TCR clone 41373 (TRBV28, TRBJ2-1)
CASSIMAGGRSEQFF

SEQ ID NO: 82747 - protein, 15 aa, Homo sapiens
  CDR3 for alpha chain variable domain of TCR clone 41374 (TRAV8-3, TRAJ8)
CAVDPMNTGFQKLVF

SEQ ID NO: 82748 - protein, 13 aa, Homo sapiens
  CDR3 for beta chain variable domain of TCR clone 41374 (TRBV10-2, TRBJ2-3)
CASSESGDHTQYF

SEQ ID NO: 82749 - protein, 13 aa, Homo sapiens
  CDR3 for alpha chain variable domain of TCR clone 41375 (TRAV30, TRAJ6)
CGFIEGGSYIPTF

SEQ ID NO: 82750 - protein, 13 aa, Homo sapiens
  CDR3 for beta chain variable domain of TCR clone 41375 (TRBV5-4, TRBJ2-5)
CASNPVSQETQYF

SEQ ID NO: 82751 - protein, 18 aa, Homo sapiens
  CDR3 for alpha chain variable domain of TCR clone 41376 (TRAV21, TRAJ52)
CAVRPSPEGGTSYGKLTF

SEQ ID NO: 82752 - protein, 17 aa, Homo sapiens
  CDR3 for beta chain variable domain of TCR clone 41376 (TRBV13, TRBJ2-3)
CAGSLSRVAGGKNTQYF

SEQ ID NO: 82753 - protein, 12 aa, Homo sapiens
  CDR3 for alpha chain variable domain of TCR clone 41377 (TRAV1-2, TRAJ9)
CAEYTGGFKTIF

SEQ ID NO: 82754 - protein, 15 aa, Homo sapiens
  CDR3 for beta chain variable domain of TCR clone 41377 (TRBV11-2, TRBJ2-1)
CASSPAGQSLNEQFF

SEQ ID NO: 82755 - protein, 17 aa, Homo sapiens
  CDR3 for alpha chain variable domain of TCR clone 41378 (TRAV3, TRAJ6)
CAVSRRTDTGGSYIPTF

SEQ ID NO: 82756 - protein, 18 aa, Homo sapiens
  CDR3 for beta chain variable domain of TCR clone 41378 (TRBV7-2, TRBJ2-3)
CASSVETSRGRKADTQYF

SEQ ID NO: 82757 - protein, 13 aa, Homo sapiens
  CDR3 for alpha chain variable domain of TCR clone 41379 (TRAV8-3, TRAJ48)
CAVVPFGNEKLTF

SEQ ID NO: 82758 - protein, 18 aa, Homo sapiens
  CDR3 for beta chain variable domain of TCR clone 41379 (TRBV25-1, TRBJ2-2)
CHPSLPGGQGAQNRGAVF

SEQ ID NO: 82759 - protein, 17 aa, Homo sapiens
  CDR3 for alpha chain variable domain of TCR clone 41380 (TRAV3, TRAJ6)
CAVRDGPRAGGSYRPTF

SEQ ID NO: 82760 - protein, 20 aa, Homo sapiens
  CDR3 for beta chain variable domain of TCR clone 41380 (TRBV28, TRBJ2-1)
CASTPIGRSPGLAGGNEQFF

SEQ ID NO: 82761 - protein, 18 aa, Homo sapiens
  CDR3 for alpha chain variable domain of TCR clone 41381 (TRAV17, TRAJ45)
CATSLDLYSGGGADGLTF

SEQ ID NO: 82762 - protein, 15 aa, Homo sapiens
  CDR3 for beta chain variable domain of TCR clone 41381 (TRBV11-2, TRBJ2-1)
CASSRNRGLIYEQFF

SEQ ID NO: 82763 - protein, 11 aa, Homo sapiens
  CDR3 for alpha chain variable domain of TCR clone 41382 (TRAV13-1, TRAJ6)
CATLGSYIHTF

SEQ ID NO: 82764 - protein, 12 aa, Homo sapiens
  CDR3 for beta chain variable domain of TCR clone 41382 (TRBV11-2, TRBJ2-1)
CASSPGNNEQFF

SEQ ID NO: 82765 - protein, 15 aa, Homo sapiens
  CDR3 for alpha chain variable domain of TCR clone 41383 (TRAV3, TRAJ20)
CAVRDIKMSDYKLSF

SEQ ID NO: 82766 - protein, 15 aa, Homo sapiens
  CDR3 for beta chain variable domain of TCR clone 41383 (TRBV7-9, TRBJ1-6)
CASSSPGRGNSPLHF

SEQ ID NO: 82767 - protein, 14 aa, Homo sapiens
  CDR3 for alpha chain variable domain of TCR clone 41384 (TRAV12-2, TRAJ13)
CAVKKTGGYQKVTF

SEQ ID NO: 82768 - protein, 14 aa, Homo sapiens
  CDR3 for beta chain variable domain of TCR clone 41384 (TRBV7-3, TRBJ2-1)
CASSLGTSANEQFF

SEQ ID NO: 82769 - protein, 19 aa, Homo sapiens
  CDR3 for alpha chain variable domain of TCR clone 41385 (TRAV2, TRAJ20)
ILQVREADAAVYRDCKLIF

SEQ ID NO: 82770 - protein, 16 aa, Homo sapiens
  CDR3 for beta chain variable domain of TCR clone 41385 (TRBV5-1, TRBJ2-5)
CASSLALLRAGETQYF

SEQ ID NO: 82771 - protein, 12 aa, Homo sapiens
  CDR3 for alpha chain variable domain of TCR clone 41386 (TRAV3, TRAJ43)
CAVRDPNNDMRF

SEQ ID NO: 82772 - protein, 16 aa, Homo sapiens
  CDR3 for beta chain variable domain of TCR clone 41386 (TRBV27, TRBJ2-2)
CASSFRGLVRTGELFF

SEQ ID NO: 82773 - protein, 14 aa, Homo sapiens
  CDR3 for alpha chain variable domain of TCR clone 41387 (TRAV1-2, TRAJ8)
CAVREDTGFQKLVF

SEQ ID NO: 82774 - protein, 15 aa, Homo sapiens
  CDR3 for beta chain variable domain of TCR clone 41387 (TRBV15, TRBJ1-5)
CATSRDPVSNQPQHF

SEQ ID NO: 82775 - protein, 14 aa, Homo sapiens
  CDR3 for alpha chain variable domain of TCR clone 41388 (TRAV23/DV6, TRAJ13)
RAAMYSGGYQKVTF

SEQ ID NO: 82776 - protein, 14 aa, Homo sapiens
  CDR3 for beta chain variable domain of TCR clone 41388 (TRBV7-9, TRBJ2-1)
CASSPRDSLYEQFF

SEQ ID NO: 82777 - protein, 15 aa, Homo sapiens
  CDR3 for alpha chain variable domain of TCR clone 41389 (TRAV1-2, TRAJ17)
CAVRGYGAAGSKLTF

SEQ ID NO: 82778 - protein, 13 aa, Homo sapiens
  CDR3 for beta chain variable domain of TCR clone 41389 (TRBV2, TRBJ2-7)
CASSVVEAYEQYF

SEQ ID NO: 82779 - protein, 14 aa, Homo sapiens
  CDR3 for alpha chain variable domain of TCR clone 41390 (TRAV17, TRAJ57)
CATGPQGGSEKLVF

SEQ ID NO: 82780 - protein, 18 aa, Homo sapiens
  CDR3 for beta chain variable domain of TCR clone 41390 (TRBV6-6, TRBJ1-3)
CASSYSKWDSISGNTIYF

SEQ ID NO: 82781 - protein, 17 aa, Homo sapiens
  CDR3 for alpha chain variable domain of TCR clone 41391 (TRAV3, TRAJ6)
CAVRDGPRAGGSYIPTF

SEQ ID NO: 82782 - protein, 20 aa, Homo sapiens
  CDR3 for beta chain variable domain of TCR clone 41391 (TRBV28, TRBJ2-1)
CASTPIGRSSGLAGGNEQFF

SEQ ID NO: 82783 - protein, 15 aa, Homo sapiens
  CDR3 for alpha chain variable domain of TCR clone 41392 (TRAV12-3, TRAJ6)
CAMSATTGGSYIPTF

SEQ ID NO: 82784 - protein, 16 aa, Homo sapiens
  CDR3 for beta chain variable domain of TCR clone 41392 (TRBV20-1, TRBJ1-2)
CSASMGQSVANYGYTF

SEQ ID NO: 82785 - protein, 14 aa, Homo sapiens
  CDR3 for alpha chain variable domain of TCR clone 41393 (TRAV12-3, TRAJ17)
CVVNYKAAGNKLTF

SEQ ID NO: 82786 - protein, 14 aa, Homo sapiens
  CDR3 for beta chain variable domain of TCR clone 41393 (TRBV28, TRBJ2-1)
CASSPSTGYNEQFF

SEQ ID NO: 82787 - protein, 16 aa, Homo sapiens
  CDR3 for alpha chain variable domain of TCR clone 41394 (TRAV12-3, TRAJ53)
CAMSPGSGGSNYKLTF

SEQ ID NO: 82788 - protein, 13 aa, Homo sapiens
  CDR3 for beta chain variable domain of TCR clone 41394 (TRBV5-5, TRBJ1-2)
CASSFWRGEDYTF

SEQ ID NO: 82789 - protein, 15 aa, Homo sapiens
  CDR3 for alpha chain variable domain of TCR clone 41395 (TRAV17, TRAJ35)
CATAFVIGFGNVLHC

SEQ ID NO: 82790 - protein, 14 aa, Homo sapiens
  CDR3 for beta chain variable domain of TCR clone 41395 (TRBV7-3, TRBJ2-1)
CASSLAGGTNEQFF

SEQ ID NO: 82791 - protein, 13 aa, Homo sapiens
  CDR3 for alpha chain variable domain of TCR clone 41396 (TRAV12-3, TRAJ33)
CAMSVNSNYQLIW

SEQ ID NO: 82792 - protein, 15 aa, Homo sapiens
  CDR3 for beta chain variable domain of TCR clone 41396 (TRBV12-4, TRBJ2-5)
CASSPPTGLQETQYF

SEQ ID NO: 82793 - protein, 15 aa, Homo sapiens
  CDR3 for alpha chain variable domain of TCR clone 41397 (TRAV21, TRAJ24)
CAARSSTDSWGKLQF

SEQ ID NO: 82794 - protein, 14 aa, Homo sapiens
  CDR3 for beta chain variable domain of TCR clone 41397 (TRBV7-2, TRBJ2-7)
CASSPKTSFYEQYF

SEQ ID NO: 82795 - protein, 16 aa, Homo sapiens
  CDR3 for alpha chain variable domain of TCR clone 41398 (TRAV8-3, TRAJ44)
CAVGASNTGTASKPTF

SEQ ID NO: 82796 - protein, 15 aa, Homo sapiens
  CDR3 for beta chain variable domain of TCR clone 41398 (TRBV27, TRBJ1-5)
CASTFNRGSNRPQHF

SEQ ID NO: 82797 - protein, 12 aa, Homo sapiens
  CDR3 for alpha chain variable domain of TCR clone 41399 (TRAV21, TRAJ30)
CAVMNRDDKIIF

SEQ ID NO: 82798 - protein, 17 aa, Homo sapiens
  CDR3 for beta chain variable domain of TCR clone 41399 (TRBV5-1, TRBJ1-1)
CASRPIRTGGVNTEASF

SEQ ID NO: 82799 - protein, 13 aa, Homo sapiens
  CDR3 for alpha chain variable domain of TCR clone 41400 (TRAV2, TRAJ40)
CAVVTSGTYKYIF

SEQ ID NO: 82800 - protein, 14 aa, Homo sapiens
  CDR3 for beta chain variable domain of TCR clone 41400 (TRBV7-3, TRBJ2-1)
CASSLAGGTNEQFF

SEQ ID NO: 82801 - protein, 13 aa, Homo sapiens
  CDR3 for alpha chain variable domain of TCR clone 41401 (TRAV21, TRAJ27)
CAARPGNAGKSTF

SEQ ID NO: 82802 - protein, 15 aa, Homo sapiens
  CDR3 for beta chain variable domain of TCR clone 41401 (TRBV11-3, TRBJ2-7)
CASGPGPASSYEQYF

SEQ ID NO: 82803 - protein, 16 aa, Homo sapiens
  CDR3 for alpha chain variable domain of TCR clone 41402 (TRAV3, TRAJ37)
CAVRGKGSGNTGKLIF

SEQ ID NO: 82804 - protein, 15 aa, Homo sapiens
  CDR3 for beta chain variable domain of TCR clone 41402 (TRBV7-9, TRBJ1-4)
CASSRTGGFNEKLFF

SEQ ID NO: 82805 - protein, 16 aa, Homo sapiens
  CDR3 for alpha chain variable domain of TCR clone 41403 (TRAV35, TRAJ28)
CAGQEYSGAGSYQLTF

SEQ ID NO: 82806 - protein, 13 aa, Homo sapiens
  CDR3 for beta chain variable domain of TCR clone 41403 (TRBV19, TRBJ1-2)
CASSQGQVYGYTF

SEQ ID NO: 82807 - protein, 16 aa, Homo sapiens
  CDR3 for alpha chain variable domain of TCR clone 41404 (TRAV30, TRAJ24)
CGTEIVDADGWGKFQF

SEQ ID NO: 82808 - protein, 19 aa, Homo sapiens
  CDR3 for beta chain variable domain of TCR clone 41404 (TRBV25-1, TRBJ2-2)
CAILVYRVDRGRKTGELFF

SEQ ID NO: 82809 - protein, 14 aa, Homo sapiens
  CDR3 for alpha chain variable domain of TCR clone 41405 (TRAV12-1, TRAJ13)
CVVIDPGGYQKVTF

SEQ ID NO: 82810 - protein, 12 aa, Homo sapiens
  CDR3 for beta chain variable domain of TCR clone 41405 (TRBV29-1, TRBJ2-3)
CSVTGGADTQYF

SEQ ID NO: 82811 - protein, 14 aa, Homo sapiens
  CDR3 for alpha chain variable domain of TCR clone 41406 (TRAV8-3, TRAJ4)
CAVGAAGGSNKLIF

SEQ ID NO: 82812 - protein, 15 aa, Homo sapiens
  CDR3 for beta chain variable domain of TCR clone 41406 (TRBV6-5, TRBJ2-1)
CASSYDAGAGNEQFF

SEQ ID NO: 82813 - protein, 13 aa, Homo sapiens
  CDR3 for alpha chain variable domain of TCR clone 41407 (TRAV17, TRAJ57)
CAIYQGGSEKLVF

SEQ ID NO: 82814 - protein, 15 aa, Homo sapiens
  CDR3 for beta chain variable domain of TCR clone 41407 (TRBV27, TRBJ2-1)
CASSNGGGSSNEQFF

SEQ ID NO: 82815 - protein, 14 aa, Homo sapiens
  CDR3 for alpha chain variable domain of TCR clone 41408 (TRAV8-6, TRAJ9)
CAVSSYTGGFKTIF

SEQ ID NO: 82816 - protein, 15 aa, Homo sapiens
  CDR3 for beta chain variable domain of TCR clone 41408 (TRBV2, TRBJ1-2)
CASSESRAVNYGYTF

SEQ ID NO: 82817 - protein, 16 aa, Homo sapiens
  CDR3 for alpha chain variable domain of TCR clone 41409 (TRAV30, TRAJ24)
CGTEIVDADSWGKFQL

SEQ ID NO: 82818 - protein, 13 aa, Homo sapiens
  CDR3 for beta chain variable domain of TCR clone 41409 (TRBV11-2, TRBJ2-5)
CASSSTGEETQYF

SEQ ID NO: 82819 - protein, 23 aa, Homo sapiens
  CDR3 for alpha chain variable domain of TCR clone 41410 (TRAV30, TRAJ43)
CTLRPPSSVTKEPTSAALSDMRF

SEQ ID NO: 82820 - protein, 13 aa, Homo sapiens
  CDR3 for beta chain variable domain of TCR clone 41410 (TRBV12-4, TRBJ2-2)
CASSITGSGELFF

SEQ ID NO: 82821 - protein, 14 aa, Homo sapiens
  CDR3 for alpha chain variable domain of TCR clone 41411 (TRAV13-1, TRAJ44)
CAAKATGTASKLTF

SEQ ID NO: 82822 - protein, 16 aa, Homo sapiens
  CDR3 for beta chain variable domain of TCR clone 41411 (TRBV7-9, TRBJ2-6)
CASSLKGPLRASVLTF

SEQ ID NO: 82823 - protein, 13 aa, Homo sapiens
  CDR3 for alpha chain variable domain of TCR clone 41412 (TRAV2, TRAJ40)
CAVVTSGTYKYIF

SEQ ID NO: 82824 - protein, 14 aa, Homo sapiens
  CDR3 for beta chain variable domain of TCR clone 41412 (TRBV19, TRBJ2-1)
CASPTFVLSGSSSS

SEQ ID NO: 82825 - protein, 13 aa, Homo sapiens
  CDR3 for alpha chain variable domain of TCR clone 41413 (TRAV27, TRAJ49)
CAPRPYTGNQFYF

SEQ ID NO: 82826 - protein, 16 aa, Homo sapiens
  CDR3 for beta chain variable domain of TCR clone 41413 (TRBV4-1, TRBJ1-2)
CDSSQDAGQVLYGYTF

SEQ ID NO: 82827 - protein, 14 aa, Homo sapiens
  CDR3 for alpha chain variable domain of TCR clone 41414 (TRAV12-1, TRAJ38)
CGELKAGNNRKLIW

SEQ ID NO: 82828 - protein, 12 aa, Homo sapiens
  CDR3 for beta chain variable domain of TCR clone 41414 (TRBV24-1, TRBJ1-1)
CATPYPDTEAFF

SEQ ID NO: 82829 - protein, 21 aa, Homo sapiens
  CDR3 for alpha chain variable domain of TCR clone 41415 (TRAV1-1, TRAJ6)
CLLPLRCERLERTGGSYIPTF

SEQ ID NO: 82830 - protein, 13 aa, Homo sapiens
  CDR3 for beta chain variable domain of TCR clone 41415 (TRBV10-2, TRBJ2-7)
CASGASGGYEQYF

SEQ ID NO: 82831 - protein, 11 aa, Homo sapiens
  CDR3 for alpha chain variable domain of TCR clone 41416 (TRAV21, TRAJ9)
CAVPGGFKTIF

SEQ ID NO: 82832 - protein, 12 aa, Homo sapiens
  CDR3 for beta chain variable domain of TCR clone 41416 (TRBV20-1, TRBJ2-3)
CSTRVGTDTQYF

SEQ ID NO: 82833 - protein, 11 aa, Homo sapiens
  CDR3 for alpha chain variable domain of TCR clone 41417 (TRAV12-1, TRAJ21)
CVVNNFNKFYF

SEQ ID NO: 82834 - protein, 17 aa, Homo sapiens
  CDR3 for beta chain variable domain of TCR clone 41417 (TRBV7-8, TRBJ2-1)
CASSPLTGTLAYNEQFF

SEQ ID NO: 82835 - protein, 13 aa, Homo sapiens
  CDR3 for alpha chain variable domain of TCR clone 41418 (TRAV1-2, TRAJ12)
CAVPMDSSYKLIF

SEQ ID NO: 82836 - protein, 15 aa, Homo sapiens
  CDR3 for beta chain variable domain of TCR clone 41418 (TRBV27, TRBJ2-5)
CASSLIPSGGETQYF

SEQ ID NO: 82837 - protein, 13 aa, Homo sapiens
  CDR3 for alpha chain variable domain of TCR clone 41419 (TRAV21, TRAJ20)
CAVGLRVDYKLSF

SEQ ID NO: 82838 - protein, 13 aa, Homo sapiens
  CDR3 for beta chain variable domain of TCR clone 41419 (TRBV6-1, TRBJ1-1)
CASSRQGNTEAFC

SEQ ID NO: 82839 - protein, 14 aa, Homo sapiens
  CDR3 for alpha chain variable domain of TCR clone 41420 (TRAV1-2, TRAJ16)
CAVNRFSDGQKLPF

SEQ ID NO: 82840 - protein, 14 aa, Homo sapiens
  CDR3 for beta chain variable domain of TCR clone 41420 (TRBV19, TRBJ2-2)
CASSTLHRSGELFF

SEQ ID NO: 82841 - protein, 20 aa, Homo sapiens
  CDR3 for alpha chain variable domain of TCR clone 41421 (TRAV1-2, TRAJ8)
CAVREDTGFQKLVLELAPDF

SEQ ID NO: 82842 - protein, 15 aa, Homo sapiens
  CDR3 for beta chain variable domain of TCR clone 41421 (TRBV6-3, TRBJ2-7)
CASSSPGTVFYEQYF

SEQ ID NO: 82843 - protein, 14 aa, Homo sapiens
  CDR3 for alpha chain variable domain of TCR clone 41422 (TRAV12-1, TRAJ9)
CVVDKGTGGFKTIF

SEQ ID NO: 82844 - protein, 16 aa, Homo sapiens
  CDR3 for beta chain variable domain of TCR clone 41422 (TRBV4-3, TRBJ2-2)
CASSQDRGSDTGELFF

SEQ ID NO: 82845 - protein, 12 aa, Homo sapiens
  CDR3 for alpha chain variable domain of TCR clone 41423 (TRAV12-3, TRAJ17)
CAMTLTGNKITF

SEQ ID NO: 82846 - protein, 15 aa, Homo sapiens
  CDR3 for beta chain variable domain of TCR clone 41423 (TRBV20-1, TRBJ2-7)
CSARDWVSGMDEQYF

SEQ ID NO: 82847 - protein, 12 aa, Homo sapiens
  CDR3 for alpha chain variable domain of TCR clone 41424 (TRAV12-2, TRAJ47)
CAVAEYGNELVF

SEQ ID NO: 82848 - protein, 14 aa, Homo sapiens
  CDR3 for beta chain variable domain of TCR clone 41424 (TRBV20-1, TRBJ1-1)
CSAMGGTANTEAFF

SEQ ID NO: 82849 - protein, 15 aa, Homo sapiens
  CDR3 for alpha chain variable domain of TCR clone 41425 (TRAV13-1, TRAJ5)
CAAHLMDTGRRALTF

SEQ ID NO: 82850 - protein, 12 aa, Homo sapiens
  CDR3 for beta chain variable domain of TCR clone 41425 (TRBV5-7, TRBJ2-1)
CASSLDWGEQFF

SEQ ID NO: 82851 - protein, 11 aa, Homo sapiens
  CDR3 for alpha chain variable domain of TCR clone 41426 (TRAV21, TRAJ11)
CAVNGYSTLTF

SEQ ID NO: 82852 - protein, 13 aa, Homo sapiens
  CDR3 for beta chain variable domain of TCR clone 41426 (TRBV14, TRBJ2-1)
CASSREGGTEQFF

SEQ ID NO: 82853 - protein, 13 aa, Homo sapiens
  CDR3 for alpha chain variable domain of TCR clone 41427 (TRAV38-1, TRAJ52)
FAFRGTSYGKLTF

SEQ ID NO: 82854 - protein, 15 aa, Homo sapiens
  CDR3 for beta chain variable domain of TCR clone 41427 (TRBV7-8, TRBJ2-5)
CASSDAAGSQETQYF

SEQ ID NO: 82855 - protein, 20 aa, Homo sapiens
  CDR3 for alpha chain variable domain of TCR clone 41428 (TRAV12-1, TRAJ42)
SSVIQPPTSVKGGSQGNLIF

SEQ ID NO: 82856 - protein, 18 aa, Homo sapiens
  CDR3 for beta chain variable domain of TCR clone 41428 (TRBV11-2, TRBJ2-3)
CASSLGGASQGAPNTQYF

SEQ ID NO: 82857 - protein, 13 aa, Homo sapiens
  CDR3 for alpha chain variable domain of TCR clone 41429 (TRAV8-3, TRAJ28)
CAVGAVGSYQLTF

SEQ ID NO: 82858 - protein, 14 aa, Homo sapiens
  CDR3 for beta chain variable domain of TCR clone 41429 (TRBV7-9, TRBJ1-5)
CQQPRSQPNQPQHF

SEQ ID NO: 82859 - protein, 15 aa, Homo sapiens
  CDR3 for alpha chain variable domain of TCR clone 41430 (TRAV27, TRAJ38)
CAARRNAGNNRKLIW

SEQ ID NO: 82860 - protein, 17 aa, Homo sapiens
  CDR3 for beta chain variable domain of TCR clone 41430 (TRBV20-1, TRBJ2-2)
CSAGGSGQGGLTGELFF

SEQ ID NO: 82861 - protein, 14 aa, Homo sapiens
  CDR3 for alpha chain variable domain of TCR clone 41431 (TRAV12-2, TRAJ21)
CAVNKANNFNKFYF

SEQ ID NO: 82862 - protein, 14 aa, Homo sapiens
  CDR3 for beta chain variable domain of TCR clone 41431 (TRBV20-1, TRBJ2-7)
CSASFAGGAYEQYF

SEQ ID NO: 82863 - protein, 14 aa, Homo sapiens
  CDR3 for alpha chain variable domain of TCR clone 41432 (TRAV12-3, TRAJ22)
CAMSLFGSARQLTF

SEQ ID NO: 82864 - protein, 16 aa, Homo sapiens
  CDR3 for beta chain variable domain of TCR clone 41432 (TRBV12-5, TRBJ2-5)
CASGPRTSGNQETQYF

SEQ ID NO: 82865 - protein, 13 aa, Homo sapiens
  CDR3 for alpha chain variable domain of TCR clone 41433 (TRAV17, TRAJ54)
CAAGIQGAQKLVF

SEQ ID NO: 82866 - protein, 14 aa, Homo sapiens
  CDR3 for beta chain variable domain of TCR clone 41433 (TRBV11-2, TRBJ1-2)
CASSLGTANCGYTF

SEQ ID NO: 82867 - protein, 13 aa, Homo sapiens
  CDR3 for alpha chain variable domain of TCR clone 41434 (TRAV30, TRAJ49)
CGTEPNTGNQFYF

SEQ ID NO: 82868 - protein, 14 aa, Homo sapiens
  CDR3 for beta chain variable domain of TCR clone 41434 (TRBV29-1, TRBJ2-1)
CSVEFRGMPFEQFF

SEQ ID NO: 82869 - protein, 12 aa, Homo sapiens
  CDR3 for alpha chain variable domain of TCR clone 41435 (TRAV12-1, TRAJ40)
CVVYSGTYKYIF

SEQ ID NO: 82870 - protein, 14 aa, Homo sapiens
  CDR3 for beta chain variable domain of TCR clone 41435 (TRBV13, TRBJ2-5)
CASSLGTAQETQYF

SEQ ID NO: 82871 - protein, 14 aa, Homo sapiens
  CDR3 for alpha chain variable domain of TCR clone 41436 (TRAV17, TRAJ39)
CATDPIRAGNMLTF

SEQ ID NO: 82872 - protein, 15 aa, Homo sapiens
  CDR3 for beta chain variable domain of TCR clone 41436 (TRBV13, TRBJ1-5)
CASSFGQGGVQPQHF

SEQ ID NO: 82873 - protein, 13 aa, Homo sapiens
  CDR3 for alpha chain variable domain of TCR clone 41437 (TRAV21, TRAJ57)
CAVTQGGSEKLVF

SEQ ID NO: 82874 - protein, 14 aa, Homo sapiens
  CDR3 for beta chain variable domain of TCR clone 41437 (TRBV25-1, TRBJ1-1)
CASTHLGGNTEAFF

SEQ ID NO: 82875 - protein, 12 aa, Homo sapiens
  CDR3 for alpha chain variable domain of TCR clone 41438 (TRAV8-3, TRAJ40)
CAVASGTYKYIF

SEQ ID NO: 82876 - protein, 14 aa, Homo sapiens
  CDR3 for beta chain variable domain of TCR clone 41438 (TRBV12-4, TRBJ2-3)
CASSGQGSTDKQYF

SEQ ID NO: 82877 - protein, 15 aa, Homo sapiens
  CDR3 for alpha chain variable domain of TCR clone 41439 (TRAV38-1, TRAJ37)
CAFIHGSGNTGKLIF

SEQ ID NO: 82878 - protein, 12 aa, Homo sapiens
  CDR3 for beta chain variable domain of TCR clone 41439 (TRBV7-9, TRBJ2-7)
CASSFGSCEQYF

SEQ ID NO: 82879 - protein, 14 aa, Homo sapiens
  CDR3 for alpha chain variable domain of TCR clone 41440 (TRAV1-2, TRAJ16)
CAVNRFPDGQKLLF

SEQ ID NO: 82880 - protein, 13 aa, Homo sapiens
  CDR3 for beta chain variable domain of TCR clone 41440 (TRBV15, TRBJ1-6)
CATSGGLNSPLHF

SEQ ID NO: 82881 - protein, 14 aa, Homo sapiens
  CDR3 for alpha chain variable domain of TCR clone 41441 (TRAV14/DV4, TRAJ23)
CAMRLYNQGGKLIF

SEQ ID NO: 82882 - protein, 14 aa, Homo sapiens
  CDR3 for beta chain variable domain of TCR clone 41441 (TRBV7-8, TRBJ2-3)
CASSLEAGTDTQYF

SEQ ID NO: 82883 - protein, 15 aa, Homo sapiens
  CDR3 for alpha chain variable domain of TCR clone 41442 (TRAV8-2, TRAJ16)
CVVSDGFSDGQKLLF

SEQ ID NO: 82884 - protein, 16 aa, Homo sapiens
  CDR3 for beta chain variable domain of TCR clone 41442 (TRBV19, TRBJ2-1)
CASSKAGPSSYNEQLF

SEQ ID NO: 82885 - protein, 15 aa, Homo sapiens
  CDR3 for alpha chain variable domain of TCR clone 41443 (TRAV26-1, TRAJ29)
CIVRVEGSGNTPLVF

SEQ ID NO: 82886 - protein, 11 aa, Homo sapiens
  CDR3 for beta chain variable domain of TCR clone 41443 (TRBV25-1, TRBJ1-1)
PTWGGNTEAFF

SEQ ID NO: 82887 - protein, 12 aa, Homo sapiens
  CDR3 for alpha chain variable domain of TCR clone 41444 (TRAV2, TRAJ10)
CASTGGGNKLTF

SEQ ID NO: 82888 - protein, 14 aa, Homo sapiens
  CDR3 for beta chain variable domain of TCR clone 41444 (TRBV7-2, TRBJ2-2)
CASRGQGAAGEPFF

SEQ ID NO: 82889 - protein, 14 aa, Homo sapiens
  CDR3 for alpha chain variable domain of TCR clone 41445 (TRAV1-2, TRAJ8)
CAVRGDTGFQKLVF

SEQ ID NO: 82890 - protein, 14 aa, Homo sapiens
  CDR3 for beta chain variable domain of TCR clone 41445 (TRBV15, TRBJ2-3)
CATRSGTSTDTQYF

SEQ ID NO: 82891 - protein, 16 aa, Homo sapiens
  CDR3 for alpha chain variable domain of TCR clone 41446 (TRAV30, TRAJ24)
CGTEIVDADGWGKFQF

SEQ ID NO: 82892 - protein, 15 aa, Homo sapiens
  CDR3 for beta chain variable domain of TCR clone 41446 (TRBV7-2, TRBJ2-1)
CASSSGLAGGNEQFF

SEQ ID NO: 82893 - protein, 16 aa, Homo sapiens
  CDR3 for alpha chain variable domain of TCR clone 41447 (TRAV38-1, TRAJ32)
RAFMKGGGGATNKLIF

SEQ ID NO: 82894 - protein, 13 aa, Homo sapiens
  CDR3 for beta chain variable domain of TCR clone 41447 (TRBV20-1, TRBJ2-5)
CSAREAFQETQYF

SEQ ID NO: 82895 - protein, 12 aa, Homo sapiens
  CDR3 for alpha chain variable domain of TCR clone 41448 (TRAV4, TRAJ26)
CLVGDYGQNFVF

SEQ ID NO: 82896 - protein, 11 aa, Homo sapiens
  CDR3 for beta chain variable domain of TCR clone 41448 (TRBV19, TRBJ1-1)
CASSIGSEAYF

SEQ ID NO: 82897 - protein, 14 aa, Homo sapiens
  CDR3 for alpha chain variable domain of TCR clone 41449 (TRAV12-2, TRAJ53)
CAVKGGGSNYKMTF

SEQ ID NO: 82898 - protein, 15 aa, Homo sapiens
  CDR3 for beta chain variable domain of TCR clone 41449 (TRBV11-2, TRBJ2-2)
CASSLDTGNTGELFF

SEQ ID NO: 82899 - protein, 17 aa, Homo sapiens
  CDR3 for alpha chain variable domain of TCR clone 41450 (TRAV12-3, TRAJ6)
CAMSARGGAGGSCIPTF

SEQ ID NO: 82900 - protein, 12 aa, Homo sapiens
  CDR3 for beta chain variable domain of TCR clone 41450 (TRBV12-4, TRBJ2-3)
CASSTLPDTQYF

SEQ ID NO: 82901 - protein, 19 aa, Homo sapiens
  CDR3 for alpha chain variable domain of TCR clone 41451 (TRAV2, TRAJ20)
ILQVREADAAVYRDCKLSF

SEQ ID NO: 82902 - protein, 12 aa, Homo sapiens
  CDR3 for beta chain variable domain of TCR clone 41451 (TRBV11-2, TRBJ2-2)
RASSLGGGELFF

SEQ ID NO: 82903 - protein, 15 aa, Homo sapiens
  CDR3 for alpha chain variable domain of TCR clone 41452 (TRAV26-1, TRAJ29)
CIVRVEGSGNTPLVF

SEQ ID NO: 82904 - protein, 14 aa, Homo sapiens
  CDR3 for beta chain variable domain of TCR clone 41452 (TRBV18, TRBJ2-5)
CASSTGVSQETQYF

SEQ ID NO: 82905 - protein, 14 aa, Homo sapiens
  CDR3 for alpha chain variable domain of TCR clone 41453 (TRAV12-1, TRAJ17)
CVVNYKAAGNKLTF

SEQ ID NO: 82906 - protein, 13 aa, Homo sapiens
  CDR3 for beta chain variable domain of TCR clone 41453 (TRBV12-4, TRBJ1-1)
CASSLAGRAQAFF

SEQ ID NO: 82907 - protein, 14 aa, Homo sapiens
  CDR3 for alpha chain variable domain of TCR clone 41454 (TRAV29/DV5, TRAJ20)
CAATIRSNDYKLSF

SEQ ID NO: 82908 - protein, 15 aa, Homo sapiens
  CDR3 for beta chain variable domain of TCR clone 41454 (TRBV10-2, TRBJ2-6)
CASSEQGTGANVLTF

SEQ ID NO: 82909 - protein, 14 aa, Homo sapiens
  CDR3 for alpha chain variable domain of TCR clone 41455 (TRAV1-2, TRAJ8)
CAVREDTGFQKLVF

SEQ ID NO: 82910 - protein, 13 aa, Homo sapiens
  CDR3 for beta chain variable domain of TCR clone 41455 (TRBV18, TRBJ1-1)
CASSGGRNTEAFF

SEQ ID NO: 82911 - protein, 13 aa, Homo sapiens
  CDR3 for alpha chain variable domain of TCR clone 41456 (TRAV3, TRAJ43)
CAVRDTRGGDMRF

SEQ ID NO: 82912 - protein, 15 aa, Homo sapiens
  CDR3 for beta chain variable domain of TCR clone 41456 (TRBV6-5, TRBJ1-5)
CASSYWRRSNQPQHF

SEQ ID NO: 82913 - protein, 14 aa, Homo sapiens
  CDR3 for alpha chain variable domain of TCR clone 41457 (TRAV13-1, TRAJ44)
CAAKATGTASKLTF

SEQ ID NO: 82914 - protein, 13 aa, Homo sapiens
  CDR3 for beta chain variable domain of TCR clone 41457 (TRBV5-5, TRBJ1-2)
CASSFWRGEDYTS

SEQ ID NO: 82915 - protein, 12 aa, Homo sapiens
  CDR3 for alpha chain variable domain of TCR clone 41458 (TRAV13-2, TRAJ23)
CAERHRGGKLIF

SEQ ID NO: 82916 - protein, 19 aa, Homo sapiens
  CDR3 for beta chain variable domain of TCR clone 41458 (TRBV19, TRBJ2-5)
CAGSIGQVTDFFLGETQYF

SEQ ID NO: 82917 - protein, 13 aa, Homo sapiens
  CDR3 for alpha chain variable domain of TCR clone 41459 (TRAV12-3, TRAJ56)
CALATGANSKQTF

SEQ ID NO: 82918 - protein, 12 aa, Homo sapiens
  CDR3 for beta chain variable domain of TCR clone 41459 (TRBV10-2, TRBJ2-3)
CASSPESDTQYF

SEQ ID NO: 82919 - protein, 13 aa, Homo sapiens
  CDR3 for alpha chain variable domain of TCR clone 41460 (TRAV12-2, TRAJ20)
CAVYPSNDYKLSF

SEQ ID NO: 82920 - protein, 15 aa, Homo sapiens
  CDR3 for beta chain variable domain of TCR clone 41460 (TRBV27, TRBJ2-5)
CASSLYPRGGETQYV

SEQ ID NO: 82921 - protein, 12 aa, Homo sapiens
  CDR3 for alpha chain variable domain of TCR clone 41461 (TRAV13-2, TRAJ8)
CAPWLGFQKLVF

SEQ ID NO: 82922 - protein, 14 aa, Homo sapiens
  CDR3 for beta chain variable domain of TCR clone 41461 (TRBV19, TRBJ2-2)
CASSGQGIAGELFF

SEQ ID NO: 82923 - protein, 11 aa, Homo sapiens
  CDR3 for alpha chain variable domain of TCR clone 41462 (TRAV12-2, TRAJ39)
CAVNNMLTFGG

SEQ ID NO: 82924 - protein, 13 aa, Homo sapiens
  CDR3 for beta chain variable domain of TCR clone 41462 (TRBV11-2, TRBJ2-5)
CASSSTGEETQYF

SEQ ID NO: 82925 - protein, 16 aa, Homo sapiens
  CDR3 for alpha chain variable domain of TCR clone 41463 (TRAV16, TRAJ52)
CALSAAVGTSYGKLTF

SEQ ID NO: 82926 - protein, 12 aa, Homo sapiens
  CDR3 for beta chain variable domain of TCR clone 41463 (TRBV12-4, TRBJ1-3)
CASSFSGNTIYF

SEQ ID NO: 82927 - protein, 15 aa, Homo sapiens
  CDR3 for alpha chain variable domain of TCR clone 41464 (TRAV17, TRAJ57)
CATGPSQGGSEKLVF

SEQ ID NO: 82928 - protein, 14 aa, Homo sapiens
  CDR3 for beta chain variable domain of TCR clone 41464 (TRBV19, TRBJ2-7)
CASSMGQGAIEQYF

SEQ ID NO: 82929 - protein, 16 aa, Homo sapiens
  CDR3 for alpha chain variable domain of TCR clone 41465 (TRAV19, TRAJ37)
CALLLGGSSNTGKLIF

SEQ ID NO: 82930 - protein, 15 aa, Homo sapiens
  CDR3 for beta chain variable domain of TCR clone 41465 (TRBV19, TRBJ1-1)
CASSGNSHPNTEAFS

SEQ ID NO: 82931 - protein, 14 aa, Homo sapiens
  CDR3 for alpha chain variable domain of TCR clone 41466 (TRAV12-2, TRAJ45)
CAVNTGGGADGLTF

SEQ ID NO: 82932 - protein, 17 aa, Homo sapiens
  CDR3 for beta chain variable domain of TCR clone 41466 (TRBV20-1, TRBJ2-2)
CSASGSGQGGLTGELFF

SEQ ID NO: 82933 - protein, 11 aa, Homo sapiens
  CDR3 for alpha chain variable domain of TCR clone 41467 (TRAV3, TRAJ21)
CAVGNFNKFYF

SEQ ID NO: 82934 - protein, 17 aa, Homo sapiens
  CDR3 for beta chain variable domain of TCR clone 41467 (TRBV4-1, TRBJ1-4)
CASSQEGPRGVEEKLFF

SEQ ID NO: 82935 - protein, 14 aa, Homo sapiens
  CDR3 for alpha chain variable domain of TCR clone 41468 (TRAV38-1, TRAJ45)
CASPSGGGADGLTF

SEQ ID NO: 82936 - protein, 13 aa, Homo sapiens
  CDR3 for beta chain variable domain of TCR clone 41468 (TRBV10-3, TRBJ1-2)
CAISERDSYGYTF

SEQ ID NO: 82937 - protein, 14 aa, Homo sapiens
  CDR3 for alpha chain variable domain of TCR clone 41469 (TRAV12-2, TRAJ17)
CAVPFKAAGNKLTF

SEQ ID NO: 82938 - protein, 15 aa, Homo sapiens
  CDR3 for beta chain variable domain of TCR clone 41469 (TRBV20-1, TRBJ2-7)
CSARDRVSGMDEQYF

SEQ ID NO: 82939 - protein, 12 aa, Homo sapiens
  CDR3 for alpha chain variable domain of TCR clone 41470 (TRAV21, TRAJ31)
CAVWGNNARLMF

SEQ ID NO: 82940 - protein, 16 aa, Homo sapiens
  CDR3 for beta chain variable domain of TCR clone 41470 (TRBV27, TRBJ2-5)
CASSYGPGGQRETQYF

SEQ ID NO: 82941 - protein, 15 aa, Homo sapiens
  CDR3 for alpha chain variable domain of TCR clone 41471 (TRAV3, TRAJ22)
CAVRDRGGSARQLTF

SEQ ID NO: 82942 - protein, 16 aa, Homo sapiens
  CDR3 for beta chain variable domain of TCR clone 41471 (TRBV24-1, TRBJ2-3)
CATSDPGTGATDTQYF

SEQ ID NO: 82943 - protein, 12 aa, Homo sapiens
  CDR3 for alpha chain variable domain of TCR clone 41472 (TRAV16, TRAJ10)
CSRTGGGNKLTF

SEQ ID NO: 82944 - protein, 13 aa, Homo sapiens
  CDR3 for beta chain variable domain of TCR clone 41472 (TRBV4-2, TRBJ1-1)
CASSQAGNTEAFF

SEQ ID NO: 82945 - protein, 17 aa, Homo sapiens
  CDR3 for alpha chain variable domain of TCR clone 41473 (TRAV2, TRAJ32)
CCLLLWGGGGATNKLIF

SEQ ID NO: 82946 - protein, 13 aa, Homo sapiens
  CDR3 for beta chain variable domain of TCR clone 41473 (TRBV20-1, TRBJ1-1)
CSARGGGTTEAFF

SEQ ID NO: 82947 - protein, 12 aa, Homo sapiens
  CDR3 for alpha chain variable domain of TCR clone 41474 (TRAV21, TRAJ33)
CARMDSNYQLIW

SEQ ID NO: 82948 - protein, 14 aa, Homo sapiens
  CDR3 for beta chain variable domain of TCR clone 41474 (TRBV2, TRBJ2-7)
CASSLTSGGYEQYF

SEQ ID NO: 82949 - protein, 16 aa, Homo sapiens
  CDR3 for alpha chain variable domain of TCR clone 41475 (TRAV8-1, TRAJ42)
CAVTSRYGGSQGNLIF

SEQ ID NO: 82950 - protein, 12 aa, Homo sapiens
  CDR3 for beta chain variable domain of TCR clone 41475 (TRBV6-3, TRBJ2-7)
RASSLGRRGLYF

SEQ ID NO: 82951 - protein, 16 aa, Homo sapiens
  CDR3 for alpha chain variable domain of TCR clone 41476 (TRAV3, TRAJ37)
CAVRGEGSGNTGKLIF

SEQ ID NO: 82952 - protein, 13 aa, Homo sapiens
  CDR3 for beta chain variable domain of TCR clone 41476 (TRBV10-3, TRBJ1-2)
CAISERDSYGYTF

SEQ ID NO: 82953 - protein, 13 aa, Homo sapiens
  CDR3 for alpha chain variable domain of TCR clone 41477 (TRAV22, TRAJ29)
CAVGGSGNTPLVF

SEQ ID NO: 82954 - protein, 14 aa, Homo sapiens
  CDR3 for beta chain variable domain of TCR clone 41477 (TRBV12-4, TRBJ1-1)
CASSLGTGGTEAFF

SEQ ID NO: 82955 - protein, 15 aa, Homo sapiens
  CDR3 for alpha chain variable domain of TCR clone 41478 (TRAV12-2, TRAJ43)
CAFGMRFGAGTRLTV

SEQ ID NO: 82956 - protein, 13 aa, Homo sapiens
  CDR3 for beta chain variable domain of TCR clone 41478 (TRBV4-2, TRBJ1-1)
CASSQAGNTEAFF

SEQ ID NO: 82957 - protein, 13 aa, Homo sapiens
  CDR3 for alpha chain variable domain of TCR clone 41479 (TRAV35, TRAJ48)
CAGREFGNEKLTF

SEQ ID NO: 82958 - protein, 14 aa, Homo sapiens
  CDR3 for beta chain variable domain of TCR clone 41479 (TRBV19, TRBJ2-1)
CASPTFVLSGEQFF

SEQ ID NO: 82959 - protein, 14 aa, Homo sapiens
  CDR3 for alpha chain variable domain of TCR clone 41480 (TRAV35, TRAJ33)
CWPRGRDSNYQLIW

SEQ ID NO: 82960 - protein, 11 aa, Homo sapiens
  CDR3 for beta chain variable domain of TCR clone 41480 (TRBV10-3, TRBJ2-7)
CAISEGREQYF

SEQ ID NO: 82961 - protein, 14 aa, Homo sapiens
  CDR3 for alpha chain variable domain of TCR clone 41481 (TRAV1-2, TRAJ15)
CAVRDRQAGTALIF

SEQ ID NO: 82962 - protein, 15 aa, Homo sapiens
  CDR3 for beta chain variable domain of TCR clone 41481 (TRBV7-2, TRBJ2-1)
CASSLASGRVDEQFF

SEQ ID NO: 82963 - protein, 16 aa, Homo sapiens
  CDR3 for alpha chain variable domain of TCR clone 41482 (TRAV3, TRAJ6)
CAVRDGMGRRKLHTYI

SEQ ID NO: 82964 - protein, 16 aa, Homo sapiens
  CDR3 for beta chain variable domain of TCR clone 41482 (TRBV9, TRBJ2-1)
CASSVGGGGNYNEQFF

SEQ ID NO: 82965 - protein, 15 aa, Homo sapiens
  CDR3 for alpha chain variable domain of TCR clone 41483 (TRAV21, TRAJ40)
CAVRPQTSGTYKYIF

SEQ ID NO: 82966 - protein, 15 aa, Homo sapiens
  CDR3 for beta chain variable domain of TCR clone 41483 (TRBV28, TRBJ2-5)
CASSPPWSYQETQYF

SEQ ID NO: 82967 - protein, 12 aa, Homo sapiens
  CDR3 for alpha chain variable domain of TCR clone 41484 (TRAV12-1, TRAJ40)
CVVYSGTYKYIF

SEQ ID NO: 82968 - protein, 22 aa, Homo sapiens
  CDR3 for beta chain variable domain of TCR clone 41484 (TRBV7-6, TRBJ2-1)
SRTRPCIAVPAAWGGGADEQFF

SEQ ID NO: 82969 - protein, 13 aa, Homo sapiens
  CDR3 for alpha chain variable domain of TCR clone 41485 (TRAV35, TRAJ43)
CAGYPYNNNDMRF

SEQ ID NO: 82970 - protein, 15 aa, Homo sapiens
  CDR3 for beta chain variable domain of TCR clone 41485 (TRBV25-1, TRBJ1-4)
CASIKRIATNEKLFF

SEQ ID NO: 82971 - protein, 14 aa, Homo sapiens
  CDR3 for alpha chain variable domain of TCR clone 41486 (TRAV17, TRAJ6)
CATDASGGSYIPTF

SEQ ID NO: 82972 - protein, 15 aa, Homo sapiens
  CDR3 for beta chain variable domain of TCR clone 41486 (TRBV4-1, TRBJ1-4)
CASSDTGGTNEKLFF

SEQ ID NO: 82973 - protein, 11 aa, Homo sapiens
  CDR3 for alpha chain variable domain of TCR clone 41487 (TRAV1-2, TRAJ40)
CAVPGTYKYIF

SEQ ID NO: 82974 - protein, 16 aa, Homo sapiens
  CDR3 for beta chain variable domain of TCR clone 41487 (TRBV29-1, TRBJ2-7)
CSVEVVGTNGSYEQYF

SEQ ID NO: 82975 - protein, 12 aa, Homo sapiens
  CDR3 for alpha chain variable domain of TCR clone 41488 (TRAV12-3, TRAJ17)
CAMTLAGNKLTF

SEQ ID NO: 82976 - protein, 16 aa, Homo sapiens
  CDR3 for beta chain variable domain of TCR clone 41488 (TRBV7-3, TRBJ2-1)
CASSLEGYRSYNEQFF

SEQ ID NO: 82977 - protein, 11 aa, Homo sapiens
  CDR3 for alpha chain variable domain of TCR clone 41489 (TRAV1-2, TRAJ31)
CAVNNNARLMF

SEQ ID NO: 82978 - protein, 15 aa, Homo sapiens
  CDR3 for beta chain variable domain of TCR clone 41489 (TRBV28, TRBJ2-1)
CANSIIAGGRSEQFF

SEQ ID NO: 82979 - protein, 13 aa, Homo sapiens
  CDR3 for alpha chain variable domain of TCR clone 41490 (TRAV27, TRAJ54)
CAGAGQGAQKLVF

SEQ ID NO: 82980 - protein, 15 aa, Homo sapiens
  CDR3 for beta chain variable domain of TCR clone 41490 (TRBV18, TRBJ2-6)
CASSTSYAGANVLTF

SEQ ID NO: 82981 - protein, 13 aa, Homo sapiens
  CDR3 for alpha chain variable domain of TCR clone 41491 (TRAV3, TRAJ33)
CAVRDRSNYQLIW

SEQ ID NO: 82982 - protein, 16 aa, Homo sapiens
  CDR3 for beta chain variable domain of TCR clone 41491 (TRBV4-2, TRBJ2-7)
RASSQDRGTSSYEQYF

SEQ ID NO: 82983 - protein, 13 aa, Homo sapiens
  CDR3 for alpha chain variable domain of TCR clone 41492 (TRAV12-2, TRAJ39)
CAVNNNAGNMLPF

SEQ ID NO: 82984 - protein, 13 aa, Homo sapiens
  CDR3 for beta chain variable domain of TCR clone 41492 (TRBV2, TRBJ1-5)
CATAGPGNQPQHF

SEQ ID NO: 82985 - protein, 15 aa, Homo sapiens
  CDR3 for alpha chain variable domain of TCR clone 41493 (TRAV21, TRAJ40)
CAVMPQTSGTYKYIF

SEQ ID NO: 82986 - protein, 13 aa, Homo sapiens
  CDR3 for beta chain variable domain of TCR clone 41493 (TRBV7-2, TRBJ2-2)
CASSSVRAGELFF

SEQ ID NO: 82987 - protein, 12 aa, Homo sapiens
  CDR3 for alpha chain variable domain of TCR clone 41494 (TRAV8-6, TRAJ57)
CDVQGGSEKLVF

SEQ ID NO: 82988 - protein, 11 aa, Homo sapiens
  CDR3 for beta chain variable domain of TCR clone 41494 (TRBV19, TRBJ1-1)
CASSIGSEAFF

SEQ ID NO: 82989 - protein, 13 aa, Homo sapiens
  CDR3 for alpha chain variable domain of TCR clone 41495 (TRAV36/DV7, TRAJ54)
CAVLIQGAQKLVF

SEQ ID NO: 82990 - protein, 16 aa, Homo sapiens
  CDR3 for beta chain variable domain of TCR clone 41495 (TRBV23-1, TRBJ2-1)
CASSHAQRGGAMSSSS

SEQ ID NO: 82991 - protein, 19 aa, Homo sapiens
  CDR3 for alpha chain variable domain of TCR clone 41496 (TRAV38-1, TRAJ53)
CAFMKHGLESGGSKYKLTF

SEQ ID NO: 82992 - protein, 13 aa, Homo sapiens
  CDR3 for beta chain variable domain of TCR clone 41496 (TRBV19, TRBJ2-7)
CASSPRQSYEQYF

SEQ ID NO: 82993 - protein, 17 aa, Homo sapiens
  CDR3 for alpha chain variable domain of TCR clone 41497 (TRAV23/DV6, TRAJ57)
CAASSTLSQGGSEKLVF

SEQ ID NO: 82994 - protein, 14 aa, Homo sapiens
  CDR3 for beta chain variable domain of TCR clone 41497 (TRBV25-1, TRBJ1-1)
CASTHLGGTTEAFF

SEQ ID NO: 82995 - protein, 14 aa, Homo sapiens
  CDR3 for alpha chain variable domain of TCR clone 41498 (TRAV26-1, TRAJ44)
CIVRPTGTASKLTF

SEQ ID NO: 82996 - protein, 13 aa, Homo sapiens
  CDR3 for beta chain variable domain of TCR clone 41498 (TRBV7-9, TRBJ1-2)
CASSLKQNYGYTF

SEQ ID NO: 82997 - protein, 19 aa, Homo sapiens
  CDR3 for alpha chain variable domain of TCR clone 41499 (TRAV29/DV5, TRAJ49)
CSVPLCSKLTVDTGNQFYF

SEQ ID NO: 82998 - protein, 15 aa, Homo sapiens
  CDR3 for beta chain variable domain of TCR clone 41499 (TRBV4-3, TRBJ2-2)
CASSQGGTPTGELFF

SEQ ID NO: 82999 - protein, 15 aa, Homo sapiens
  CDR3 for alpha chain variable domain of TCR clone 41500 (TRAV4, TRAJ39)
CLVGPNNNAGNMPTF

SEQ ID NO: 83000 - protein, 14 aa, Homo sapiens
  CDR3 for beta chain variable domain of TCR clone 41500 (TRBV11-2, TRBJ2-5)
CASSRTGGIETQYF

SEQ ID NO: 83001 - protein, 11 aa, Homo sapiens
  CDR3 for alpha chain variable domain of TCR clone 41501 (TRAV22, TRAJ20)
CAPLHDYKLSF

SEQ ID NO: 83002 - protein, 12 aa, Homo sapiens
  CDR3 for beta chain variable domain of TCR clone 41501 (TRBV6-3, TRBJ2-7)
CASSLTPYERYF

SEQ ID NO: 83003 - protein, 17 aa, Homo sapiens
  CDR3 for alpha chain variable domain of TCR clone 41502 (TRAV3, TRAJ6)
CAVREGPRAGGSYIPTF

SEQ ID NO: 83004 - protein, 13 aa, Homo sapiens
  CDR3 for beta chain variable domain of TCR clone 41502 (TRBV19, TRBJ2-7)
CASSIDRTYEQYF

SEQ ID NO: 83005 - protein, 15 aa, Homo sapiens
  CDR3 for alpha chain variable domain of TCR clone 41503 (TRAV26-1, TRAJ29)
CIVRVEGSGNTPLVF

SEQ ID NO: 83006 - protein, 14 aa, Homo sapiens
  CDR3 for beta chain variable domain of TCR clone 41503 (TRBV20-1, TRBJ2-7)
CSAKRGRSSYEQYF

SEQ ID NO: 83007 - protein, 11 aa, Homo sapiens
  CDR3 for alpha chain variable domain of TCR clone 41504 (TRAV21, TRAJ11)
CAVNGYSTLTF

SEQ ID NO: 83008 - protein, 11 aa, Homo sapiens
  CDR3 for beta chain variable domain of TCR clone 41504 (TRBV19, TRBJ1-1)
CASSIGSEDFF

SEQ ID NO: 83009 - protein, 12 aa, Homo sapiens
  CDR3 for alpha chain variable domain of TCR clone 41505 (TRAV13-1, TRAJ15)
CAASQAGTALIF

SEQ ID NO: 83010 - protein, 14 aa, Homo sapiens
  CDR3 for beta chain variable domain of TCR clone 41505 (TRBV19, TRBJ2-2)
CASSTLRRSGELFF

SEQ ID NO: 83011 - protein, 12 aa, Homo sapiens
  CDR3 for alpha chain variable domain of TCR clone 41506 (TRAV21, TRAJ3)
CCFYSSASKIIF

SEQ ID NO: 83012 - protein, 20 aa, Homo sapiens
  CDR3 for beta chain variable domain of TCR clone 41506 (TRBV28, TRBJ2-1)
CASTPIGRSPGLAGGNEQFF

SEQ ID NO: 83013 - protein, 15 aa, Homo sapiens
  CDR3 for alpha chain variable domain of TCR clone 41507 (TRAV21, TRAJ45)
CAVSYSGGGAEGLTF

SEQ ID NO: 83014 - protein, 13 aa, Homo sapiens
  CDR3 for beta chain variable domain of TCR clone 41507 (TRBV20-1, TRBJ2-5)
CSAATELQETQYF

SEQ ID NO: 83015 - protein, 18 aa, Homo sapiens
  CDR3 for alpha chain variable domain of TCR clone 41508 (TRAV29/DV5, TRAJ52)
CAAGFRGAGGTSYGKLTF

SEQ ID NO: 83016 - protein, 16 aa, Homo sapiens
  CDR3 for beta chain variable domain of TCR clone 41508 (TRBV7-3, TRBJ2-2)
CASGLKRGTLSGELFF

SEQ ID NO: 83017 - protein, 14 aa, Homo sapiens
  CDR3 for alpha chain variable domain of TCR clone 41509 (TRAV12-1, TRAJ12)
CVVTRMDSRYKLIF

SEQ ID NO: 83018 - protein, 13 aa, Homo sapiens
  CDR3 for beta chain variable domain of TCR clone 41509 (TRBV20-1, TRBJ1-1)
CSARGGGNTEAFF

SEQ ID NO: 83019 - protein, 13 aa, Homo sapiens
  CDR3 for alpha chain variable domain of TCR clone 41510 (TRAV1-2, TRAJ11)
CAVRREGYSTLAF

SEQ ID NO: 83020 - protein, 14 aa, Homo sapiens
  CDR3 for beta chain variable domain of TCR clone 41510 (TRBV14, TRBJ2-7)
CASRHRDKPYEQYF

SEQ ID NO: 83021 - protein, 13 aa, Homo sapiens
  CDR3 for alpha chain variable domain of TCR clone 41511 (TRAV13-1, TRAJ20)
CSARVSNDYKLSF

SEQ ID NO: 83022 - protein, 12 aa, Homo sapiens
  CDR3 for beta chain variable domain of TCR clone 41511 (TRBV20-1, TRBJ2-1)
CSARLGTDEQFF

SEQ ID NO: 83023 - protein, 19 aa, Homo sapiens
  CDR3 for alpha chain variable domain of TCR clone 41512 (TRAV2, TRAJ20)
ILQVREADAAVYRDCKLSF

SEQ ID NO: 83024 - protein, 16 aa, Homo sapiens
  CDR3 for beta chain variable domain of TCR clone 41512 (TRBV12-5, TRBJ2-5)
CASGPRTSGNQETQYF

SEQ ID NO: 83025 - protein, 15 aa, Homo sapiens
  CDR3 for alpha chain variable domain of TCR clone 41513 (TRAV27, TRAJ45)
CAPVDSGGGADGLTF

SEQ ID NO: 83026 - protein, 13 aa, Homo sapiens
  CDR3 for beta chain variable domain of TCR clone 41513 (TRBV6-5, TRBJ2-6)
CASSTSGPLRLDF

SEQ ID NO: 83027 - protein, 15 aa, Homo sapiens
  CDR3 for alpha chain variable domain of TCR clone 41514 (TRAV12-3, TRAJ6)
CAMSATTGGSYIPTF

SEQ ID NO: 83028 - protein, 16 aa, Homo sapiens
  CDR3 for beta chain variable domain of TCR clone 41514 (TRBV20-1, TRBJ1-2)
CSASMGQGVANHGYTF

SEQ ID NO: 83029 - protein, 17 aa, Homo sapiens
  CDR3 for alpha chain variable domain of TCR clone 41515 (TRAV3, TRAJ6)
CAVRDGARAGGSYIPTF

SEQ ID NO: 83030 - protein, 20 aa, Homo sapiens
  CDR3 for beta chain variable domain of TCR clone 41515 (TRBV28, TRBJ2-1)
CASTPIGRSPGLAGGNEQFF

SEQ ID NO: 83031 - protein, 13 aa, Homo sapiens
  CDR3 for alpha chain variable domain of TCR clone 41516 (TRAV8-4, TRAJ34)
RAVTLYNTDKLIF

SEQ ID NO: 83032 - protein, 17 aa, Homo sapiens
  CDR3 for beta chain variable domain of TCR clone 41516 (TRBV7-2, TRBJ2-2)
CASSPSWRGGGTGELFF

SEQ ID NO: 83033 - protein, 15 aa, Homo sapiens
  CDR3 for alpha chain variable domain of TCR clone 41517 (TRAV3, TRAJ5)
CAVRDRKMGRRALTF

SEQ ID NO: 83034 - protein, 15 aa, Homo sapiens
  CDR3 for beta chain variable domain of TCR clone 41517 (TRBV7-8, TRBJ2-1)
CASSLADSLYNEQFF

SEQ ID NO: 83035 - protein, 14 aa, Homo sapiens
  CDR3 for alpha chain variable domain of TCR clone 41518 (TRAV12-3, TRAJ58)
CAMSTETSGSSLTF

SEQ ID NO: 83036 - protein, 12 aa, Homo sapiens
  CDR3 for beta chain variable domain of TCR clone 41518 (TRBV7-8, TRBJ2-7)
CASSLGDREQYF

SEQ ID NO: 83037 - protein, 14 aa, Homo sapiens
  CDR3 for alpha chain variable domain of TCR clone 41519 (TRAV35, TRAJ50)
CAGHRKTSYDKVIF

SEQ ID NO: 83038 - protein, 13 aa, Homo sapiens
  CDR3 for beta chain variable domain of TCR clone 41519 (TRBV7-7, TRBJ2-3)
CASSLSRADTQYL

SEQ ID NO: 83039 - protein, 15 aa, Homo sapiens
  CDR3 for alpha chain variable domain of TCR clone 41520 (TRAV12-1, TRAJ44)
CVVDTPQGTASKLTF

SEQ ID NO: 83040 - protein, 13 aa, Homo sapiens
  CDR3 for beta chain variable domain of TCR clone 41520 (TRBV27, TRBJ2-1)
CASSFGSYNEQFF

SEQ ID NO: 83041 - protein, 12 aa, Homo sapiens
  CDR3 for alpha chain variable domain of TCR clone 41521 (TRAV12-3, TRAJ17)
CAMTVTGNKLTF

SEQ ID NO: 83042 - protein, 15 aa, Homo sapiens
  CDR3 for beta chain variable domain of TCR clone 41521 (TRBV20-1, TRBJ2-7)
CSARDRVSGMDEQYF

SEQ ID NO: 83043 - protein, 14 aa, Homo sapiens
  CDR3 for alpha chain variable domain of TCR clone 41522 (TRAV12-2, TRAJ13)
CAVEKTGGYQEVTF

SEQ ID NO: 83044 - protein, 17 aa, Homo sapiens
  CDR3 for beta chain variable domain of TCR clone 41522 (TRBV20-1, TRBJ2-2)
CSASGSGQGGLTGELFF

SEQ ID NO: 83045 - protein, 15 aa, Homo sapiens
  CDR3 for alpha chain variable domain of TCR clone 41523 (TRAV3, TRAJ22)
CAVRDRGGSAGQLTF

SEQ ID NO: 83046 - protein, 15 aa, Homo sapiens
  CDR3 for beta chain variable domain of TCR clone 41523 (TRBV27, TRBJ2-1)
CASSNGGGSSNEQFF

SEQ ID NO: 83047 - protein, 16 aa, Homo sapiens
  CDR3 for alpha chain variable domain of TCR clone 41524 (TRAV21, TRAJ52)
CAVTNAGGTSYGKLTF

SEQ ID NO: 83048 - protein, 16 aa, Homo sapiens
  CDR3 for beta chain variable domain of TCR clone 41524 (TRBV7-3, TRBJ2-2)
CASSLKRGTLSGELFF

SEQ ID NO: 83049 - protein, 13 aa, Homo sapiens
  CDR3 for alpha chain variable domain of TCR clone 41525 (TRAV12-1, TRAJ34)
CAVTGYNTDKLIF

SEQ ID NO: 83050 - protein, 14 aa, Homo sapiens
  CDR3 for beta chain variable domain of TCR clone 41525 (TRBV19, TRBJ2-1)
CASPTFVLSGEQFF

SEQ ID NO: 83051 - protein, 11 aa, Homo sapiens
  CDR3 for alpha chain variable domain of TCR clone 41526 (TRAV39, TRAJ49)
CAVDISTQFYF

SEQ ID NO: 83052 - protein, 11 aa, Homo sapiens
  CDR3 for beta chain variable domain of TCR clone 41526 (TRBV7-8, TRBJ2-7)
CASSLSIEQYF

SEQ ID NO: 83053 - protein, 11 aa, Homo sapiens
  CDR3 for alpha chain variable domain of TCR clone 41527 (TRAV12-1, TRAJ30)
CVVNGQDEIIF

SEQ ID NO: 83054 - protein, 15 aa, Homo sapiens
  CDR3 for beta chain variable domain of TCR clone 41527 (TRBV28, TRBJ2-5)
CASSSGRTIQETQYF

SEQ ID NO: 83055 - protein, 11 aa, Homo sapiens
  CDR3 for alpha chain variable domain of TCR clone 41528 (TRAV21, TRAJ39)
LLVNAGNMLTF

SEQ ID NO: 83056 - protein, 15 aa, Homo sapiens
  CDR3 for beta chain variable domain of TCR clone 41528 (TRBV11-1, TRBJ2-3)
CASSLLLASTDTQYF

SEQ ID NO: 83057 - protein, 13 aa, Homo sapiens
  CDR3 for alpha chain variable domain of TCR clone 41529 (TRAV25, TRAJ30)
CAGRVDRDDKIIS

SEQ ID NO: 83058 - protein, 17 aa, Homo sapiens
  CDR3 for beta chain variable domain of TCR clone 41529 (TRBV7-9, TRBJ2-6)
CASSFGAGYSGANVLTF

SEQ ID NO: 83059 - protein, 14 aa, Homo sapiens
  CDR3 for alpha chain variable domain of TCR clone 41530 (TRAV17, TRAJ34)
CATDSLEGTDTLIF

SEQ ID NO: 83060 - protein, 13 aa, Homo sapiens
  CDR3 for beta chain variable domain of TCR clone 41530 (TRBV11-2, TRBJ2-7)
CASSGTRPYEQYF

SEQ ID NO: 83061 - protein, 14 aa, Homo sapiens
  CDR3 for alpha chain variable domain of TCR clone 41531 (TRAV12-2, TRAJ5)
CAVNRSTGRRALTF

SEQ ID NO: 83062 - protein, 14 aa, Homo sapiens
  CDR3 for beta chain variable domain of TCR clone 41531 (TRBV19, TRBJ2-1)
CASPTFVLSGEQFF

SEQ ID NO: 83063 - protein, 13 aa, Homo sapiens
  CDR3 for alpha chain variable domain of TCR clone 41532 (TRAV13-1, TRAJ39)
CAASIWAGNMLTF

SEQ ID NO: 83064 - protein, 16 aa, Homo sapiens
  CDR3 for beta chain variable domain of TCR clone 41532 (TRBV24-1, TRBJ2-3)
CATSDPGTGATDTQYF

SEQ ID NO: 83065 - protein, 14 aa, Homo sapiens
  CDR3 for alpha chain variable domain of TCR clone 41533 (TRAV12-3, TRAJ10)
SHLPLTGGGNKLTF

SEQ ID NO: 83066 - protein, 17 aa, Homo sapiens
  CDR3 for beta chain variable domain of TCR clone 41533 (TRBV20-1, TRBJ2-1)
CSARDPLAGVWDNEQFF

SEQ ID NO: 83067 - protein, 14 aa, Homo sapiens
  CDR3 for alpha chain variable domain of TCR clone 41534 (TRAV1-2, TRAJ16)
CAVNRFSDGQKLLF

SEQ ID NO: 83068 - protein, 15 aa, Homo sapiens
  CDR3 for beta chain variable domain of TCR clone 41534 (TRBV20-1, TRBJ2-7)
CSAGDRVSGMDEQYF

SEQ ID NO: 83069 - protein, 15 aa, Homo sapiens
  CDR3 for alpha chain variable domain of TCR clone 41535 (TRAV26-1, TRAJ44)
CIVRVNTGTASKLTF

SEQ ID NO: 83070 - protein, 16 aa, Homo sapiens
  CDR3 for beta chain variable domain of TCR clone 41535 (TRBV7-7, TRBJ2-1)
CASSLASGTSYNEQFF

SEQ ID NO: 83071 - protein, 21 aa, Homo sapiens
  CDR3 for alpha chain variable domain of TCR clone 41536 (TRAV1-1, TRAJ6)
CLLLLRCERLERTGGSYIPTF

SEQ ID NO: 83072 - protein, 13 aa, Homo sapiens
  CDR3 for beta chain variable domain of TCR clone 41536 (TRBV10-2, TRBJ2-7)
RASGASGGYEQYF

SEQ ID NO: 83073 - protein, 13 aa, Homo sapiens
  CDR3 for alpha chain variable domain of TCR clone 41537 (TRAV26-1, TRAJ34)
CIVRPWITDKLIF

SEQ ID NO: 83074 - protein, 14 aa, Homo sapiens
  CDR3 for beta chain variable domain of TCR clone 41537 (TRBV7-2, TRBJ2-7)
CASRSQGAAYEQYL

SEQ ID NO: 83075 - protein, 15 aa, Homo sapiens
  CDR3 for alpha chain variable domain of TCR clone 41538 (TRAV27, TRAJ38)
CAARRNAGNNRKLIW

SEQ ID NO: 83076 - protein, 15 aa, Homo sapiens
  CDR3 for beta chain variable domain of TCR clone 41538 (TRBV28, TRBJ2-1)
CASSIIAGGRSEQFF

SEQ ID NO: 83077 - protein, 15 aa, Homo sapiens
  CDR3 for alpha chain variable domain of TCR clone 41539 (TRAV35, TRAJ41)
YAGQLFSNSGYALNF

SEQ ID NO: 83078 - protein, 14 aa, Homo sapiens
  CDR3 for beta chain variable domain of TCR clone 41539 (TRBV7-2, TRBJ1-2)
CASSRGGTNYGYTF

SEQ ID NO: 83079 - protein, 18 aa, Homo sapiens
  CDR3 for alpha chain variable domain of TCR clone 41540 (TRAV12-3, TRAJ52)
CAMSRTNARGTSYGKLTF

SEQ ID NO: 83080 - protein, 17 aa, Homo sapiens
  CDR3 for beta chain variable domain of TCR clone 41540 (TRBV7-3, TRBJ2-3)
CASSLMKRMRGADTQYF

SEQ ID NO: 83081 - protein, 17 aa, Homo sapiens
  CDR3 for alpha chain variable domain of TCR clone 41541 (TRAV35, TRAJ28)
CAGLQVYSGAESYQLTF

SEQ ID NO: 83082 - protein, 15 aa, Homo sapiens
  CDR3 for beta chain variable domain of TCR clone 41541 (TRBV2, TRBJ1-2)
CASSEIGGANYGYTF

SEQ ID NO: 83083 - protein, 15 aa, Homo sapiens
  CDR3 for alpha chain variable domain of TCR clone 41542 (TRAV8-3, TRAJ32)
CAVGPYGGATNKLTF

SEQ ID NO: 83084 - protein, 14 aa, Homo sapiens
  CDR3 for beta chain variable domain of TCR clone 41542 (TRBV29-1, TRBJ2-2)
CSVLAETNTGELFF

SEQ ID NO: 83085 - protein, 15 aa, Homo sapiens
  CDR3 for alpha chain variable domain of TCR clone 41543 (TRAV8-3, TRAJ45)
CASSYSGGGAAGLTF

SEQ ID NO: 83086 - protein, 17 aa, Homo sapiens
  CDR3 for beta chain variable domain of TCR clone 41543 (TRBV7-8, TRBJ1-2)
CASSLRPLQGHLYGYTF

SEQ ID NO: 83087 - protein, 14 aa, Homo sapiens
  CDR3 for alpha chain variable domain of TCR clone 41544 (TRAV2, TRAJ9)
CAVEDRSGGFKTIF

SEQ ID NO: 83088 - protein, 16 aa, Homo sapiens
  CDR3 for beta chain variable domain of TCR clone 41544 (TRBV11-2, TRBJ1-1)
CASSLRQGGEHSKAFF

SEQ ID NO: 83089 - protein, 14 aa, Homo sapiens
  CDR3 for alpha chain variable domain of TCR clone 41545 (TRAV12-2, TRAJ3)
CAVSLYSSTSKIIF

SEQ ID NO: 83090 - protein, 14 aa, Homo sapiens
  CDR3 for beta chain variable domain of TCR clone 41545 (TRBV27, TRBJ2-1)
CAGSIAETYNEQFF

SEQ ID NO: 83091 - protein, 14 aa, Homo sapiens
  CDR3 for alpha chain variable domain of TCR clone 41546 (TRAV8-3, TRAJ15)
CAVGRHQAETALIL

SEQ ID NO: 83092 - protein, 13 aa, Homo sapiens
  CDR3 for beta chain variable domain of TCR clone 41546 (TRBV9, TRBJ2-7)
CASSASDSYEQYF

SEQ ID NO: 83093 - protein, 12 aa, Homo sapiens
  CDR3 for alpha chain variable domain of TCR clone 41547 (TRAV12-3, TRAJ17)
CAMTLTGNKLTF

SEQ ID NO: 83094 - protein, 14 aa, Homo sapiens
  CDR3 for beta chain variable domain of TCR clone 41547 (TRBV20-1, TRBJ2-1)
CSAQIGGSANGQFF

SEQ ID NO: 83095 - protein, 15 aa, Homo sapiens
  CDR3 for alpha chain variable domain of TCR clone 41548 (TRAV12-3, TRAJ49)
CAMTAPGNTGNQFYF

SEQ ID NO: 83096 - protein, 14 aa, Homo sapiens
  CDR3 for beta chain variable domain of TCR clone 41548 (TRBV20-1, TRBJ2-3)
CSARGGTSTDTQYF

SEQ ID NO: 83097 - protein, 11 aa, Homo sapiens
  CDR3 for alpha chain variable domain of TCR clone 41549 (TRAV12-3, TRAJ43)
CAMSVSNDMRF

SEQ ID NO: 83098 - protein, 13 aa, Homo sapiens
  CDR3 for beta chain variable domain of TCR clone 41549 (TRBV20-1, TRBJ1-1)
CSAPLGGGTEAFF

SEQ ID NO: 83099 - protein, 11 aa, Homo sapiens
  CDR3 for alpha chain variable domain of TCR clone 41550 (TRAV16, TRAJ29)
WAPSGNTPLVF

SEQ ID NO: 83100 - protein, 15 aa, Homo sapiens
  CDR3 for beta chain variable domain of TCR clone 41550 (TRBV5-6, TRBJ2-7)
CASSPYFEGSYEQYF

SEQ ID NO: 83101 - protein, 17 aa, Homo sapiens
  CDR3 for alpha chain variable domain of TCR clone 41551 (TRAV26-1, TRAJ37)
CIVRVITVSSNTGKLIF

SEQ ID NO: 83102 - protein, 15 aa, Homo sapiens
  CDR3 for beta chain variable domain of TCR clone 41551 (TRBV27, TRBJ2-1)
CASSNGGGSSNEQFF

SEQ ID NO: 83103 - protein, 15 aa, Homo sapiens
  CDR3 for alpha chain variable domain of TCR clone 41552 (TRAV30, TRAJ57)
RGTAIPQGGSEKLVF

SEQ ID NO: 83104 - protein, 13 aa, Homo sapiens
  CDR3 for beta chain variable domain of TCR clone 41552 (TRBV7-9, TRBJ1-2)
CASSPSNFWGYTF

SEQ ID NO: 83105 - protein, 13 aa, Homo sapiens
  CDR3 for alpha chain variable domain of TCR clone 41553 (TRAV21, TRAJ49)
CAVRQSTGNQFYF

SEQ ID NO: 83106 - protein, 13 aa, Homo sapiens
  CDR3 for beta chain variable domain of TCR clone 41553 (TRBV6-6, TRBJ1-5)
CSSRAYQDQPQHF

SEQ ID NO: 83107 - protein, 16 aa, Homo sapiens
  CDR3 for alpha chain variable domain of TCR clone 41554 (TRAV38-1, TRAJ37)
CAFKGDGASNTGKLIF

SEQ ID NO: 83108 - protein, 13 aa, Homo sapiens
  CDR3 for beta chain variable domain of TCR clone 41554 (TRBV12-4, TRBJ2-5)
CASSLFRRETQYF

SEQ ID NO: 83109 - protein, 12 aa, Homo sapiens
  CDR3 for alpha chain variable domain of TCR clone 41555 (TRAV2, TRAJ33)
CAVWGSDYQLIW

SEQ ID NO: 83110 - protein, 16 aa, Homo sapiens
  CDR3 for beta chain variable domain of TCR clone 41555 (TRBV20-1, TRBJ1-4)
CSAPGQGLLTNEKLFF

SEQ ID NO: 83111 - protein, 15 aa, Homo sapiens
  CDR3 for alpha chain variable domain of TCR clone 41556 (TRAV12-3, TRAJ6)
CAMSATTGGSYIPTF

SEQ ID NO: 83112 - protein, 15 aa, Homo sapiens
  CDR3 for beta chain variable domain of TCR clone 41556 (TRBV6-6, TRBJ2-1)
CATRQGVSSYNEQFF

SEQ ID NO: 83113 - protein, 16 aa, Homo sapiens
  CDR3 for alpha chain variable domain of TCR clone 41557 (TRAV12-2, TRAJ50)
CAVGTATKTSCDKVIF

SEQ ID NO: 83114 - protein, 12 aa, Homo sapiens
  CDR3 for beta chain variable domain of TCR clone 41557 (TRBV12-4, TRBJ1-5)
CASSLGRQPQHF

SEQ ID NO: 83115 - protein, 14 aa, Homo sapiens
  CDR3 for alpha chain variable domain of TCR clone 41558 (TRAV13-1, TRAJ40)
CAASMTSGTYKYIF

SEQ ID NO: 83116 - protein, 13 aa, Homo sapiens
  CDR3 for beta chain variable domain of TCR clone 41558 (TRBV12-4, TRBJ1-2)
CASSLRQGKGYTF

SEQ ID NO: 83117 - protein, 17 aa, Homo sapiens
  CDR3 for alpha chain variable domain of TCR clone 41559 (TRAV16, TRAJ58)
CITVLSNGETSGSRLTF

SEQ ID NO: 83118 - protein, 11 aa, Homo sapiens
  CDR3 for beta chain variable domain of TCR clone 41559 (TRBV18, TRBJ2-1)
LAGGADNEQFF

SEQ ID NO: 83119 - protein, 13 aa, Homo sapiens
  CDR3 for alpha chain variable domain of TCR clone 41560 (TRAV2, TRAJ32)
PPSQGGATNKLIF

SEQ ID NO: 83120 - protein, 12 aa, Homo sapiens
  CDR3 for beta chain variable domain of TCR clone 41560 (TRBV20-1, TRBJ2-7)
CSAITPTKEQYF

SEQ ID NO: 83121 - protein, 16 aa, Homo sapiens
  CDR3 for alpha chain variable domain of TCR clone 41561 (TRAV30, TRAJ24)
CGTEMVDADSWGKFQF

SEQ ID NO: 83122 - protein, 15 aa, Homo sapiens
  CDR3 for beta chain variable domain of TCR clone 41561 (TRBV20-1, TRBJ2-7)
CSARDRVSGMDEQYF

SEQ ID NO: 83123 - protein, 19 aa, Homo sapiens
  CDR3 for alpha chain variable domain of TCR clone 41562 (TRAV2, TRAJ20)
ILQVREADAAVYRDCKLSF

SEQ ID NO: 83124 - protein, 18 aa, Homo sapiens
  CDR3 for beta chain variable domain of TCR clone 41562 (TRBV20-1, TRBJ2-3)
CSASGLAGGPGTTDTRYF

SEQ ID NO: 83125 - protein, 16 aa, Homo sapiens
  CDR3 for alpha chain variable domain of TCR clone 41563 (TRAV4, TRAJ22)
CLVGDLYSGSAMQLTF

SEQ ID NO: 83126 - protein, 16 aa, Homo sapiens
  CDR3 for beta chain variable domain of TCR clone 41563 (TRBV7-9, TRBJ2-1)
CASSDVAGGSYNEQFF

SEQ ID NO: 83127 - protein, 18 aa, Homo sapiens
  CDR3 for alpha chain variable domain of TCR clone 41564 (TRAV9-2, TRAJ54)
CQTQRCTSVLTTAQKLVF

SEQ ID NO: 83128 - protein, 15 aa, Homo sapiens
  CDR3 for beta chain variable domain of TCR clone 41564 (TRBV29-1, TRBJ2-6)
CSVGDRGSGANVLTF

SEQ ID NO: 83129 - protein, 17 aa, Homo sapiens
  CDR3 for alpha chain variable domain of TCR clone 41565 (TRAV13-1, TRAJ52)
CAAGRNAGGTSYGKLTF

SEQ ID NO: 83130 - protein, 11 aa, Homo sapiens
  CDR3 for beta chain variable domain of TCR clone 41565 (TRBV20-1, TRBJ1-2)
CSVQGAGGYTF

SEQ ID NO: 83131 - protein, 14 aa, Homo sapiens
  CDR3 for alpha chain variable domain of TCR clone 41566 (TRAV13-1, TRAJ9)
CAVEDRSGGFKTIF

SEQ ID NO: 83132 - protein, 14 aa, Homo sapiens
  CDR3 for beta chain variable domain of TCR clone 41566 (TRBV18, TRBJ1-5)
CASSRQQRNQPQHF

SEQ ID NO: 83133 - protein, 15 aa, Homo sapiens
  CDR3 for alpha chain variable domain of TCR clone 41567 (TRAV26-1, TRAJ15)
CIVRAANQAGTALIF

SEQ ID NO: 83134 - protein, 15 aa, Homo sapiens
  CDR3 for beta chain variable domain of TCR clone 41567 (TRBV20-1, TRBJ1-1)
CSARSAAASNTEAFF

SEQ ID NO: 83135 - protein, 13 aa, Homo sapiens
  CDR3 for alpha chain variable domain of TCR clone 41568 (TRAV3, TRAJ41)
CAVSSNSGYALNF

SEQ ID NO: 83136 - protein, 13 aa, Homo sapiens
  CDR3 for beta chain variable domain of TCR clone 41568 (TRBV7-9, TRBJ1-2)
CASSLKQNYGYTF

SEQ ID NO: 83137 - protein, 14 aa, Homo sapiens
  CDR3 for alpha chain variable domain of TCR clone 41569 (TRAV1-2, TRAJ16)
CAVNRFSDGQKLLF

SEQ ID NO: 83138 - protein, 15 aa, Homo sapiens
  CDR3 for beta chain variable domain of TCR clone 41569 (TRBV18, TRBJ2-6)
CASSPSYAGANVLTF

SEQ ID NO: 83139 - protein, 11 aa, Homo sapiens
  CDR3 for alpha chain variable domain of TCR clone 41570 (TRAV2, TRAJ33)
CAVESNYQLIW

SEQ ID NO: 83140 - protein, 15 aa, Homo sapiens
  CDR3 for beta chain variable domain of TCR clone 41570 (TRBV19, TRBJ1-1)
CASTPGKIQNTEAFF

SEQ ID NO: 83141 - protein, 14 aa, Homo sapiens
  CDR3 for alpha chain variable domain of TCR clone 41571 (TRAV13-1, TRAJ40)
CAARSTSETYKYIF

SEQ ID NO: 83142 - protein, 15 aa, Homo sapiens
  CDR3 for beta chain variable domain of TCR clone 41571 (TRBV18, TRBJ1-5)
CASSETGGNNQPQHF

SEQ ID NO: 83143 - protein, 14 aa, Homo sapiens
  CDR3 for alpha chain variable domain of TCR clone 41572 (TRAV1-2, TRAJ16)
CAVNRFSDGQKLLF

SEQ ID NO: 83144 - protein, 15 aa, Homo sapiens
  CDR3 for beta chain variable domain of TCR clone 41572 (TRBV20-1, TRBJ1-5)
CSARVGRVVSQPQHF

SEQ ID NO: 83145 - protein, 15 aa, Homo sapiens
  CDR3 for alpha chain variable domain of TCR clone 41573 (TRAV12-3, TRAJ52)
CAMSGGGTSYGKLTF

SEQ ID NO: 83146 - protein, 14 aa, Homo sapiens
  CDR3 for beta chain variable domain of TCR clone 41573 (TRBV7-9, TRBJ2-2)
CASSGLADTGELFF

SEQ ID NO: 83147 - protein, 18 aa, Homo sapiens
  CDR3 for alpha chain variable domain of TCR clone 41574 (TRAV26-1, TRAJ5)
CIVRVVPPRGTGRRALTF

SEQ ID NO: 83148 - protein, 15 aa, Homo sapiens
  CDR3 for beta chain variable domain of TCR clone 41574 (TRBV7-9, TRBJ2-7)
CASSLPMGQANEQYF

SEQ ID NO: 83149 - protein, 13 aa, Homo sapiens
  CDR3 for alpha chain variable domain of TCR clone 41575 (TRAV26-2, TRAJ54)
CILRGQGAQKLVF

SEQ ID NO: 83150 - protein, 15 aa, Homo sapiens
  CDR3 for beta chain variable domain of TCR clone 41575 (TRBV28, TRBJ1-5)
CASSFSGYSNQPQHF

SEQ ID NO: 83151 - protein, 16 aa, Homo sapiens
  CDR3 for alpha chain variable domain of TCR clone 41576 (TRAV12-3, TRAJ53)
CAMSPGSGGSNYKLTF

SEQ ID NO: 83152 - protein, 16 aa, Homo sapiens
  CDR3 for beta chain variable domain of TCR clone 41576 (TRBV7-9, TRBJ1-2)
CASSLGFPSGEDGYTF

SEQ ID NO: 83153 - protein, 14 aa, Homo sapiens
  CDR3 for alpha chain variable domain of TCR clone 41577 (TRAV26-1, TRAJ21)
CIVRVGHNFNKFYF

SEQ ID NO: 83154 - protein, 15 aa, Homo sapiens
  CDR3 for beta chain variable domain of TCR clone 41577 (TRBV2, TRBJ2-7)
CASSEGLARSYEQYF

SEQ ID NO: 83155 - protein, 14 aa, Homo sapiens
  CDR3 for alpha chain variable domain of TCR clone 41578 (TRAV17, TRAJ39)
CATDPVRAGNMLTF

SEQ ID NO: 83156 - protein, 14 aa, Homo sapiens
  CDR3 for beta chain variable domain of TCR clone 41578 (TRBV13, TRBJ1-5)
CSSFGQGGVQPQHF

SEQ ID NO: 83157 - protein, 11 aa, Homo sapiens
  CDR3 for alpha chain variable domain of TCR clone 41579 (TRAV2, TRAJ13)
CASGGYQKVTF

SEQ ID NO: 83158 - protein, 13 aa, Homo sapiens
  CDR3 for beta chain variable domain of TCR clone 41579 (TRBV11-2, TRBJ2-2)
CASSLQNTGELFF

SEQ ID NO: 83159 - protein, 13 aa, Homo sapiens
  CDR3 for alpha chain variable domain of TCR clone 41580 (TRAV1-2, TRAJ9)
CAVLNTGGFETIF

SEQ ID NO: 83160 - protein, 14 aa, Homo sapiens
  CDR3 for beta chain variable domain of TCR clone 41580 (TRBV20-1, TRBJ2-3)
CSARGGTSTDTQYF

SEQ ID NO: 83161 - protein, 14 aa, Homo sapiens
  CDR3 for alpha chain variable domain of TCR clone 41581 (TRAV8-3, TRAJ35)
CAVVPQGFGNVLHC

SEQ ID NO: 83162 - protein, 12 aa, Homo sapiens
  CDR3 for beta chain variable domain of TCR clone 41581 (TRBV11-2, TRBJ2-2)
CASSLGGGELFF

SEQ ID NO: 83163 - protein, 13 aa, Homo sapiens
  CDR3 for alpha chain variable domain of TCR clone 41582 (TRAV21, TRAJ27)
CSARPGNAGKSTF

SEQ ID NO: 83164 - protein, 14 aa, Homo sapiens
  CDR3 for beta chain variable domain of TCR clone 41582 (TRBV11-2, TRBJ2-7)
CASSLGAGAYEQYF

SEQ ID NO: 83165 - protein, 14 aa, Homo sapiens
  CDR3 for alpha chain variable domain of TCR clone 41583 (TRAV2, TRAJ9)
CAVEDRSGGFKTIF

SEQ ID NO: 83166 - protein, 13 aa, Homo sapiens
  CDR3 for beta chain variable domain of TCR clone 41583 (TRBV7-9, TRBJ2-3)
CASSPGSTDTQYF

SEQ ID NO: 83167 - protein, 13 aa, Homo sapiens
  CDR3 for alpha chain variable domain of TCR clone 41584 (TRAV1-1, TRAJ9)
CAAKNTGGFKTIF

SEQ ID NO: 83168 - protein, 14 aa, Homo sapiens
  CDR3 for beta chain variable domain of TCR clone 41584 (TRBV20-1, TRBJ2-1)
CSAQIGGSANEQFV

SEQ ID NO: 83169 - protein, 17 aa, Homo sapiens
  CDR3 for alpha chain variable domain of TCR clone 41585 (TRAV3, TRAJ6)
CAVRDGPRAGGSYIPTF

SEQ ID NO: 83170 - protein, 16 aa, Homo sapiens
  CDR3 for beta chain variable domain of TCR clone 41585 (TRBV24-1, TRBJ2-3)
CATSDPGTGATDTQYF

SEQ ID NO: 83171 - protein, 11 aa, Homo sapiens
  CDR3 for alpha chain variable domain of TCR clone 41586 (TRAV1-1, TRAJ23)
CPVRQGGKLIF

SEQ ID NO: 83172 - protein, 20 aa, Homo sapiens
  CDR3 for beta chain variable domain of TCR clone 41586 (TRBV7-8, TRBJ2-2)
CASSHLFPGPTIHITGELFF

SEQ ID NO: 83173 - protein, 16 aa, Homo sapiens
  CDR3 for alpha chain variable domain of TCR clone 41587 (TRAV27, TRAJ13)
CAGAKSDSGGYQKVTF

SEQ ID NO: 83174 - protein, 14 aa, Homo sapiens
  CDR3 for beta chain variable domain of TCR clone 41587 (TRBV28, TRBJ2-5)
CASTGAGGVETQYF

SEQ ID NO: 83175 - protein, 15 aa, Homo sapiens
  CDR3 for alpha chain variable domain of TCR clone 41588 (TRAV25, TRAJ10)
CAGPLLTGGGNKLTF

SEQ ID NO: 83176 - protein, 15 aa, Homo sapiens
  CDR3 for beta chain variable domain of TCR clone 41588 (TRBV12-5, TRBJ2-2)
CASGRLGGNTGELFS

SEQ ID NO: 83177 - protein, 11 aa, Homo sapiens
  CDR3 for alpha chain variable domain of TCR clone 41589 (TRAV1-2, TRAJ40)
CTVPGTYKYIF

SEQ ID NO: 83178 - protein, 16 aa, Homo sapiens
  CDR3 for beta chain variable domain of TCR clone 41589 (TRBV29-1, TRBJ2-7)
CSVEVVGTSGSYEQYF

SEQ ID NO: 83179 - protein, 15 aa, Homo sapiens
  CDR3 for alpha chain variable domain of TCR clone 41590 (TRAV38-2/DV8, TRAJ48)
CAYRSPESGNEKLTF

SEQ ID NO: 83180 - protein, 15 aa, Homo sapiens
  CDR3 for beta chain variable domain of TCR clone 41590 (TRBV11-2, TRBJ1-3)
CASSLSPLVRDTIYF

SEQ ID NO: 83181 - protein, 14 aa, Homo sapiens
  CDR3 for alpha chain variable domain of TCR clone 41591 (TRAV12-3, TRAJ29)
CAMILLSGNTPLVF

SEQ ID NO: 83182 - protein, 16 aa, Homo sapiens
  CDR3 for beta chain variable domain of TCR clone 41591 (TRBV28, TRBJ2-7)
CAGSSGTSGRGYEQYF

SEQ ID NO: 83183 - protein, 11 aa, Homo sapiens
  CDR3 for alpha chain variable domain of TCR clone 41592 (TRAV12-1, TRAJ21)
CVVYNLNKFYF

SEQ ID NO: 83184 - protein, 14 aa, Homo sapiens
  CDR3 for beta chain variable domain of TCR clone 41592 (TRBV19, TRBJ2-7)
CASSMGQGAIEQYF

SEQ ID NO: 83185 - protein, 18 aa, Homo sapiens
  CDR3 for alpha chain variable domain of TCR clone 41593 (TRAV26-1, TRAJ23)
CIIRVGLEVWNQGGKLIF

SEQ ID NO: 83186 - protein, 16 aa, Homo sapiens
  CDR3 for beta chain variable domain of TCR clone 41593 (TRBV12-4, TRBJ2-5)
CASSFFVRGRQETQYF

SEQ ID NO: 83187 - protein, 14 aa, Homo sapiens
  CDR3 for alpha chain variable domain of TCR clone 41594 (TRAV13-1, TRAJ44)
CAAKATGTASKLTF

SEQ ID NO: 83188 - protein, 17 aa, Homo sapiens
  CDR3 for beta chain variable domain of TCR clone 41594 (TRBV7-3, TRBJ2-3)
CASSLIKRMRGADTQYF

SEQ ID NO: 83189 - protein, 13 aa, Homo sapiens
  CDR3 for alpha chain variable domain of TCR clone 41595 (TRAV1-1, TRAJ9)
CAAKNTGGFKTIF

SEQ ID NO: 83190 - protein, 14 aa, Homo sapiens
  CDR3 for beta chain variable domain of TCR clone 41595 (TRBV12-5, TRBJ2-5)
CASGSRTRQETQYF

SEQ ID NO: 83191 - protein, 18 aa, Homo sapiens
  CDR3 for alpha chain variable domain of TCR clone 41596 (TRAV21, TRAJ53)
CAVKGGESSGGSNYKLTF

SEQ ID NO: 83192 - protein, 14 aa, Homo sapiens
  CDR3 for beta chain variable domain of TCR clone 41596 (TRBV6-1, TRBJ1-5)
CASSAGAGSQPQHF

SEQ ID NO: 83193 - protein, 18 aa, Homo sapiens
  CDR3 for alpha chain variable domain of TCR clone 41597 (TRAV12-3, TRAJ52)
CAMSVGGAGGTSYGKLTF

SEQ ID NO: 83194 - protein, 14 aa, Homo sapiens
  CDR3 for beta chain variable domain of TCR clone 41597 (TRBV27, TRBJ1-6)
CQQFRQGLGSPLHF

SEQ ID NO: 83195 - protein, 15 aa, Homo sapiens
  CDR3 for alpha chain variable domain of TCR clone 41598 (TRAV8-3, TRAJ45)
CASSYSGGGADGLTF

SEQ ID NO: 83196 - protein, 13 aa, Homo sapiens
  CDR3 for beta chain variable domain of TCR clone 41598 (TRBV12-5, TRBJ2-3)
CASGDRQSDTQYF

SEQ ID NO: 83197 - protein, 15 aa, Homo sapiens
  CDR3 for alpha chain variable domain of TCR clone 41599 (TRAV12-2, TRAJ53)
CAVNGGGGSNYKLTF

SEQ ID NO: 83198 - protein, 12 aa, Homo sapiens
  CDR3 for beta chain variable domain of TCR clone 41599 (TRBV19, TRBJ1-5)
CASSIAQQPQHF

SEQ ID NO: 83199 - protein, 15 aa, Homo sapiens
  CDR3 for alpha chain variable domain of TCR clone 41600 (TRAV23/DV6, TRAJ37)
CAAGEGSSNTGKLLF

SEQ ID NO: 83200 - protein, 17 aa, Homo sapiens
  CDR3 for beta chain variable domain of TCR clone 41600 (TRBV20-1, TRBJ2-7)
CSATRAGGVAGVEEQYF

SEQ ID NO: 83201 - protein, 17 aa, Homo sapiens
  CDR3 for alpha chain variable domain of TCR clone 41601 (TRAV3, TRAJ42)
CAVRDRDYGGSQGNLIF

SEQ ID NO: 83202 - protein, 14 aa, Homo sapiens
  CDR3 for beta chain variable domain of TCR clone 41601 (TRBV7-8, TRBJ2-3)
CASSLEAGTDTQYF

SEQ ID NO: 83203 - protein, 11 aa, Homo sapiens
  CDR3 for alpha chain variable domain of TCR clone 41602 (TRAV21, TRAJ9)
CAVTGGFKTIF

SEQ ID NO: 83204 - protein, 17 aa, Homo sapiens
  CDR3 for beta chain variable domain of TCR clone 41602 (TRBV7-9, TRBJ2-5)
CATSGGARDPVLRARHA

SEQ ID NO: 83205 - protein, 14 aa, Homo sapiens
  CDR3 for alpha chain variable domain of TCR clone 41603 (TRAV8-3, TRAJ39)
CAVGAWGAGNMLTF

SEQ ID NO: 83206 - protein, 16 aa, Homo sapiens
  CDR3 for beta chain variable domain of TCR clone 41603 (TRBV7-2, TRBJ1-3)
CASSSGRVLSGNTIYS

SEQ ID NO: 83207 - protein, 14 aa, Homo sapiens
  CDR3 for alpha chain variable domain of TCR clone 41604 (TRAV12-3, TRAJ10)
SHLPLAGGGNKLTF

SEQ ID NO: 83208 - protein, 15 aa, Homo sapiens
  CDR3 for beta chain variable domain of TCR clone 41604 (TRBV7-9, TRBJ1-4)
CASSRTGGFNEKLFF

SEQ ID NO: 83209 - protein, 14 aa, Homo sapiens
  CDR3 for alpha chain variable domain of TCR clone 41605 (TRAV1-2, TRAJ16)
CAVNRFSDGQKLLF

SEQ ID NO: 83210 - protein, 17 aa, Homo sapiens
  CDR3 for beta chain variable domain of TCR clone 41605 (TRBV24-1, TRBJ2-4)
CATSDAEARGVRNIQYF

SEQ ID NO: 83211 - protein, 12 aa, Homo sapiens
  CDR3 for alpha chain variable domain of TCR clone 41606 (TRAV29/DV5, TRAJ34)
CAARHNTDKLIF

SEQ ID NO: 83212 - protein, 15 aa, Homo sapiens
  CDR3 for beta chain variable domain of TCR clone 41606 (TRBV19, TRBJ2-7)
CASSPAGSGEAIRYF

SEQ ID NO: 83213 - protein, 15 aa, Homo sapiens
  CDR3 for alpha chain variable domain of TCR clone 41607 (TRAV26-1, TRAJ15)
CIVRAANQAGTALIF

SEQ ID NO: 83214 - protein, 15 aa, Homo sapiens
  CDR3 for beta chain variable domain of TCR clone 41607 (TRBV20-1, TRBJ1-1)
CSARSTATSNTEAFF

SEQ ID NO: 83215 - protein, 15 aa, Homo sapiens
  CDR3 for alpha chain variable domain of TCR clone 41608 (TRAV17, TRAJ13)
CATDAGSGGYQKATF

SEQ ID NO: 83216 - protein, 17 aa, Homo sapiens
  CDR3 for beta chain variable domain of TCR clone 41608 (TRBV11-2, TRBJ2-1)
CASSLYPPGVEYNEQFF

SEQ ID NO: 83217 - protein, 15 aa, Homo sapiens
  CDR3 for alpha chain variable domain of TCR clone 41609 (TRAV25, TRAJ53)
CAATGGGGSNHKLTF

SEQ ID NO: 83218 - protein, 19 aa, Homo sapiens
  CDR3 for beta chain variable domain of TCR clone 41609 (TRBV7-2, TRBJ2-3)
CASSFLSRNWGGGTDTQYF

SEQ ID NO: 83219 - protein, 13 aa, Homo sapiens
  CDR3 for alpha chain variable domain of TCR clone 41610 (TRAV3, TRAJ21)
CAVREPVFNKFYF

SEQ ID NO: 83220 - protein, 13 aa, Homo sapiens
  CDR3 for beta chain variable domain of TCR clone 41610 (TRBV9, TRBJ2-1)
CASSPSGGNEQFF

SEQ ID NO: 83221 - protein, 16 aa, Homo sapiens
  CDR3 for alpha chain variable domain of TCR clone 41611 (TRAV17, TRAJ22)
CATGPIASGSARQLTF

SEQ ID NO: 83222 - protein, 13 aa, Homo sapiens
  CDR3 for beta chain variable domain of TCR clone 41611 (TRBV11-2, TRBJ2-1)
CASSLGLAGGRFF

SEQ ID NO: 83223 - protein, 18 aa, Homo sapiens
  CDR3 for alpha chain variable domain of TCR clone 41612 (TRAV21, TRAJ52)
CAERPSPAGGTSYGKLTF

SEQ ID NO: 83224 - protein, 17 aa, Homo sapiens
  CDR3 for beta chain variable domain of TCR clone 41612 (TRBV13, TRBJ2-3)
CASSLSRVAGGRNTQYF

SEQ ID NO: 83225 - protein, 11 aa, Homo sapiens
  CDR3 for alpha chain variable domain of TCR clone 41613 (TRAV12-2, TRAJ43)
CASPIGNDMRF

SEQ ID NO: 83226 - protein, 13 aa, Homo sapiens
  CDR3 for beta chain variable domain of TCR clone 41613 (TRBV7-3, TRBJ1-2)
CASSLRRGYGYTF

SEQ ID NO: 83227 - protein, 11 aa, Homo sapiens
  CDR3 for alpha chain variable domain of TCR clone 41614 (TRAV21, TRAJ20)
CAARDDYKLGF

SEQ ID NO: 83228 - protein, 14 aa, Homo sapiens
  CDR3 for beta chain variable domain of TCR clone 41614 (TRBV12-4, TRBJ1-1)
CASSFSQMNTEAFF

SEQ ID NO: 83229 - protein, 15 aa, Homo sapiens
  CDR3 for alpha chain variable domain of TCR clone 41615 (TRAV40, TRAJ53)
CLLANSGGSNYELTF

SEQ ID NO: 83230 - protein, 15 aa, Homo sapiens
  CDR3 for beta chain variable domain of TCR clone 41615 (TRBV7-6, TRBJ2-2)
CASRRTSGNTGELFF

SEQ ID NO: 83231 - protein, 12 aa, Homo sapiens
  CDR3 for alpha chain variable domain of TCR clone 41616 (TRAV8-3, TRAJ6)
CAVAGGSYIPTF

SEQ ID NO: 83232 - protein, 15 aa, Homo sapiens
  CDR3 for beta chain variable domain of TCR clone 41616 (TRBV9, TRBJ1-6)
CASSVAGTGDSPLHF

SEQ ID NO: 83233 - protein, 16 aa, Homo sapiens
  CDR3 for alpha chain variable domain of TCR clone 41617 (TRAV30, TRAJ24)
CGTEIVDADSWGKFQL

SEQ ID NO: 83234 - protein, 13 aa, Homo sapiens
  CDR3 for beta chain variable domain of TCR clone 41617 (TRBV10-3, TRBJ2-7)
CASKLAVNYEQYF

SEQ ID NO: 83235 - protein, 14 aa, Homo sapiens
  CDR3 for alpha chain variable domain of TCR clone 41618 (TRAV12-2, TRAJ9)
CAVNMEGGGFKTIF

SEQ ID NO: 83236 - protein, 14 aa, Homo sapiens
  CDR3 for beta chain variable domain of TCR clone 41618 (TRBV2, TRBJ2-5)
CVSSEVLAQETQYF

SEQ ID NO: 83237 - protein, 14 aa, Homo sapiens
  CDR3 for alpha chain variable domain of TCR clone 41619 (TRAV20, TRAJ56)
CAVQFGGSNSKLTF

SEQ ID NO: 83238 - protein, 14 aa, Homo sapiens
  CDR3 for beta chain variable domain of TCR clone 41619 (TRBV20-1, TRBJ2-7)
CSAKRGRSSYEQYF

SEQ ID NO: 83239 - protein, 19 aa, Homo sapiens
  CDR3 for alpha chain variable domain of TCR clone 41620 (TRAV26-1, TRAJ52)
CIVRAHRNAGGTSYGKLTF

SEQ ID NO: 83240 - protein, 12 aa, Homo sapiens
  CDR3 for beta chain variable domain of TCR clone 41620 (TRBV11-2, TRBJ2-2)
CASSLGGGELFF

SEQ ID NO: 83241 - protein, 15 aa, Homo sapiens
  CDR3 for alpha chain variable domain of TCR clone 41621 (TRAV8-4, TRAJ3)
CAVTGENLVQQCFQD

SEQ ID NO: 83242 - protein, 16 aa, Homo sapiens
  CDR3 for beta chain variable domain of TCR clone 41621 (TRBV4-2, TRBJ1-1)
CASSQAWFGMNTEAFF

SEQ ID NO: 83243 - protein, 15 aa, Homo sapiens
  CDR3 for alpha chain variable domain of TCR clone 41622 (TRAV3, TRAJ3)
CAVRDRDSSASNIIF

SEQ ID NO: 83244 - protein, 18 aa, Homo sapiens
  CDR3 for beta chain variable domain of TCR clone 41622 (TRBV25-1, TRBJ1-2)
CASSGLQNGQGLIFGYTF

SEQ ID NO: 83245 - protein, 13 aa, Homo sapiens
  CDR3 for alpha chain variable domain of TCR clone 41623 (TRAV12-1, TRAJ6)
CVLFPGGSYIPTF

SEQ ID NO: 83246 - protein, 14 aa, Homo sapiens
  CDR3 for beta chain variable domain of TCR clone 41623 (TRBV20-1, TRBJ1-3)
CSASPTGAGNTIYF

SEQ ID NO: 83247 - protein, 17 aa, Homo sapiens
  CDR3 for alpha chain variable domain of TCR clone 41624 (TRAV3, TRAJ6)
CAVRDGPRAGGSYIPTF

SEQ ID NO: 83248 - protein, 14 aa, Homo sapiens
  CDR3 for beta chain variable domain of TCR clone 41624 (TRBV7-2, TRBJ2-7)
CASSPKTSFYQQYF

SEQ ID NO: 83249 - protein, 15 aa, Homo sapiens
  CDR3 for alpha chain variable domain of TCR clone 41625 (TRAV23/DV6, TRAJ18)
CAARYRGSTRGRLYF

SEQ ID NO: 83250 - protein, 13 aa, Homo sapiens
  CDR3 for beta chain variable domain of TCR clone 41625 (TRBV7-2, TRBJ2-7)
CASSSPSGSEQYF

SEQ ID NO: 83251 - protein, 13 aa, Homo sapiens
  CDR3 for alpha chain variable domain of TCR clone 41626 (TRAV19, TRAJ49)
CSECVNTGNQFYF

SEQ ID NO: 83252 - protein, 15 aa, Homo sapiens
  CDR3 for beta chain variable domain of TCR clone 41626 (TRBV20-1, TRBJ2-7)
CSARDRVSGMDEQYF

SEQ ID NO: 83253 - protein, 15 aa, Homo sapiens
  CDR3 for alpha chain variable domain of TCR clone 41627 (TRAV6, TRAJ21)
CAGLDTTSTNFTLDL

SEQ ID NO: 83254 - protein, 15 aa, Homo sapiens
  CDR3 for beta chain variable domain of TCR clone 41627 (TRBV23-1, TRBJ2-3)
RQQSRLAGVPDTQYF

SEQ ID NO: 83255 - protein, 13 aa, Homo sapiens
  CDR3 for alpha chain variable domain of TCR clone 41628 (TRAV13-1, TRAJ5)
CAARVTGRRALTF

SEQ ID NO: 83256 - protein, 15 aa, Homo sapiens
  CDR3 for beta chain variable domain of TCR clone 41628 (TRBV7-2, TRBJ1-2)
CASSPRAGWNCGYTF

SEQ ID NO: 83257 - protein, 15 aa, Homo sapiens
  CDR3 for alpha chain variable domain of TCR clone 41629 (TRAV3, TRAJ20)
CAVRDIKLSDYKLSF

SEQ ID NO: 83258 - protein, 15 aa, Homo sapiens
  CDR3 for beta chain variable domain of TCR clone 41629 (TRBV7-9, TRBJ1-6)
CASSSPGRGNSPLDF

SEQ ID NO: 83259 - protein, 15 aa, Homo sapiens
  CDR3 for alpha chain variable domain of TCR clone 41630 (TRAV16, TRAJ12)
CSKWPLRGSSYKLIF

SEQ ID NO: 83260 - protein, 13 aa, Homo sapiens
  CDR3 for beta chain variable domain of TCR clone 41630 (TRBV4-2, TRBJ1-1)
CASSQAGNTEAFF

SEQ ID NO: 83261 - protein, 20 aa, Homo sapiens
  CDR3 for alpha chain variable domain of TCR clone 41631 (TRAV26-1, TRAJ42)
CCVLLHRQTYYGGSQGNLIF

SEQ ID NO: 83262 - protein, 16 aa, Homo sapiens
  CDR3 for beta chain variable domain of TCR clone 41631 (TRBV7-3, TRBJ2-2)
CASSLQRGTLSGELFF

SEQ ID NO: 83263 - protein, 14 aa, Homo sapiens
  CDR3 for alpha chain variable domain of TCR clone 41632 (TRAV12-3, TRAJ10)
SHLPPTGGGNKLTF

SEQ ID NO: 83264 - protein, 16 aa, Homo sapiens
  CDR3 for beta chain variable domain of TCR clone 41632 (TRBV29-1, TRBJ2-7)
CSVEVVGTSGSYEQYF

SEQ ID NO: 83265 - protein, 15 aa, Homo sapiens
  CDR3 for alpha chain variable domain of TCR clone 41633 (TRAV17, TRAJ56)
CATEPFTGANSKLTF

SEQ ID NO: 83266 - protein, 15 aa, Homo sapiens
  CDR3 for beta chain variable domain of TCR clone 41633 (TRBV28, TRBJ1-5)
CASSRTGGYVQHQHF

SEQ ID NO: 83267 - protein, 16 aa, Homo sapiens
  CDR3 for alpha chain variable domain of TCR clone 41634 (TRAV30, TRAJ24)
CGTEIADADSWGKFQF

SEQ ID NO: 83268 - protein, 12 aa, Homo sapiens
  CDR3 for beta chain variable domain of TCR clone 41634 (TRBV11-2, TRBJ2-2)
CASSLGGGELFF

SEQ ID NO: 83269 - protein, 13 aa, Homo sapiens
  CDR3 for alpha chain variable domain of TCR clone 41635 (TRAV20, TRAJ37)
CAGCSSNTGKLIF

SEQ ID NO: 83270 - protein, 15 aa, Homo sapiens
  CDR3 for beta chain variable domain of TCR clone 41635 (TRBV6-3, TRBJ2-7)
CASSSPGTVFYEQYF

SEQ ID NO: 83271 - protein, 14 aa, Homo sapiens
  CDR3 for alpha chain variable domain of TCR clone 41636 (TRAV38-1, TRAJ40)
CALRHTSGTYKYIF

SEQ ID NO: 83272 - protein, 14 aa, Homo sapiens
  CDR3 for beta chain variable domain of TCR clone 41636 (TRBV25-1, TRBJ1-1)
CASTHLGGNTEAFF

SEQ ID NO: 83273 - protein, 15 aa, Homo sapiens
  CDR3 for alpha chain variable domain of TCR clone 41637 (TRAV12-2, TRAJ43)
CAFDMRFGAGTRLTV

SEQ ID NO: 83274 - protein, 18 aa, Homo sapiens
  CDR3 for beta chain variable domain of TCR clone 41637 (TRBV20-1, TRBJ2-3)
CSASGLEGGPGTTDTQYF

SEQ ID NO: 83275 - protein, 13 aa, Homo sapiens
  CDR3 for alpha chain variable domain of TCR clone 41638 (TRAV2, TRAJ15)
CAVASQAGTALIF

SEQ ID NO: 83276 - protein, 18 aa, Homo sapiens
  CDR3 for beta chain variable domain of TCR clone 41638 (TRBV28, TRBJ2-1)
CASSSTSGRANSYNEQFF

SEQ ID NO: 83277 - protein, 14 aa, Homo sapiens
  CDR3 for alpha chain variable domain of TCR clone 41639 (TRAV1-2, TRAJ16)
CAVNRFSDGQKLLF

SEQ ID NO: 83278 - protein, 16 aa, Homo sapiens
  CDR3 for beta chain variable domain of TCR clone 41639 (TRBV12-5, TRBJ2-5)
CASGPRTSGDQETQYF

SEQ ID NO: 83279 - protein, 14 aa, Homo sapiens
  CDR3 for alpha chain variable domain of TCR clone 41640 (TRAV1-2, TRAJ8)
CAVREDKGFQKLVF

SEQ ID NO: 83280 - protein, 15 aa, Homo sapiens
  CDR3 for beta chain variable domain of TCR clone 41640 (TRBV7-3, TRBJ2-2)
CASSETGQGTGELFF

SEQ ID NO: 83281 - protein, 12 aa, Homo sapiens
  CDR3 for alpha chain variable domain of TCR clone 41641 (TRAV12-3, TRAJ17)
CAMTLTGNKLTF

SEQ ID NO: 83282 - protein, 15 aa, Homo sapiens
  CDR3 for beta chain variable domain of TCR clone 41641 (TRBV20-1, TRBJ2-7)
CSAGDQVSGMDEQYF

SEQ ID NO: 83283 - protein, 14 aa, Homo sapiens
  CDR3 for alpha chain variable domain of TCR clone 41642 (TRAV4, TRAJ9)
CLVGSGTGGFKTIF

SEQ ID NO: 83284 - protein, 20 aa, Homo sapiens
  CDR3 for beta chain variable domain of TCR clone 41642 (TRBV28, TRBJ2-1)
CASTPIGRSPGLAGGNEQFF

SEQ ID NO: 83285 - protein, 15 aa, Homo sapiens
  CDR3 for alpha chain variable domain of TCR clone 41643 (TRAV12-1, TRAJ10)
CVVNKFTGGGNKLTF

SEQ ID NO: 83286 - protein, 13 aa, Homo sapiens
  CDR3 for beta chain variable domain of TCR clone 41643 (TRBV7-3, TRBJ1-1)
CASSQDWGAEAFF

SEQ ID NO: 83287 - protein, 14 aa, Homo sapiens
  CDR3 for alpha chain variable domain of TCR clone 41644 (TRAV27, TRAJ36)
CAGPPKRGANNIFF

SEQ ID NO: 83288 - protein, 15 aa, Homo sapiens
  CDR3 for beta chain variable domain of TCR clone 41644 (TRBV18, TRBJ2-7)
CASSPASTPNYEQYF

SEQ ID NO: 83289 - protein, 14 aa, Homo sapiens
  CDR3 for alpha chain variable domain of TCR clone 41645 (TRAV13-2, TRAJ15)
CAENPNQAGTALIF

SEQ ID NO: 83290 - protein, 16 aa, Homo sapiens
  CDR3 for beta chain variable domain of TCR clone 41645 (TRBV12-4, TRBJ1-2)
CAGSPTATGKTRGYTF

SEQ ID NO: 83291 - protein, 15 aa, Homo sapiens
  CDR3 for alpha chain variable domain of TCR clone 41646 (TRAV9-2, TRAJ57)
CALRPNQGGSEKLVF

SEQ ID NO: 83292 - protein, 13 aa, Homo sapiens
  CDR3 for beta chain variable domain of TCR clone 41646 (TRBV7-2, TRBJ2-7)
CASSSPSGSEQYF

SEQ ID NO: 83293 - protein, 13 aa, Homo sapiens
  CDR3 for alpha chain variable domain of TCR clone 41647 (TRAV25, TRAJ26)
CAGMDNYGQNFVF

SEQ ID NO: 83294 - protein, 15 aa, Homo sapiens
  CDR3 for beta chain variable domain of TCR clone 41647 (TRBV10-3, TRBJ2-1)
CAIRNGTSGHNEQLF

SEQ ID NO: 83295 - protein, 13 aa, Homo sapiens
  CDR3 for alpha chain variable domain of TCR clone 41648 (TRAV12-3, TRAJ33)
CAMSLNSDYQLIW

SEQ ID NO: 83296 - protein, 13 aa, Homo sapiens
  CDR3 for beta chain variable domain of TCR clone 41648 (TRBV7-2, TRBJ2-2)
CASSLTVTGELFF

SEQ ID NO: 83297 - protein, 13 aa, Homo sapiens
  CDR3 for alpha chain variable domain of TCR clone 41649 (TRAV12-2, TRAJ4)
CAVFSGGYNKLIF

SEQ ID NO: 83298 - protein, 13 aa, Homo sapiens
  CDR3 for beta chain variable domain of TCR clone 41649 (TRBV19, TRBJ1-5)
CASSIGRDQPQHF

SEQ ID NO: 83299 - protein, 14 aa, Homo sapiens
  CDR3 for alpha chain variable domain of TCR clone 41650 (TRAV2, TRAJ37)
CAVDFTSNTGKLIF

SEQ ID NO: 83300 - protein, 15 aa, Homo sapiens
  CDR3 for beta chain variable domain of TCR clone 41650 (TRBV20-1, TRBJ1-1)
CSASRGVTGNTAAFF

SEQ ID NO: 83301 - protein, 12 aa, Homo sapiens
  CDR3 for alpha chain variable domain of TCR clone 41651 (TRAV1-1, TRAJ39)
CAMPVVGNMLTF

SEQ ID NO: 83302 - protein, 15 aa, Homo sapiens
  CDR3 for beta chain variable domain of TCR clone 41651 (TRBV19, TRBJ1-6)
CASSTQGAVGSPLHF

SEQ ID NO: 83303 - protein, 15 aa, Homo sapiens
  CDR3 for alpha chain variable domain of TCR clone 41652 (TRAV17, TRAJ57)
CATGASQGGSEKLVF

SEQ ID NO: 83304 - protein, 16 aa, Homo sapiens
  CDR3 for beta chain variable domain of TCR clone 41652 (TRBV12-4, TRBJ1-5)
CASSRPVGGSNQPQHF

SEQ ID NO: 83305 - protein, 13 aa, Homo sapiens
  CDR3 for alpha chain variable domain of TCR clone 41653 (TRAV12-1, TRAJ40)
CVVPTSGTSKYIF

SEQ ID NO: 83306 - protein, 18 aa, Homo sapiens
  CDR3 for beta chain variable domain of TCR clone 41653 (TRBV7-6, TRBJ2-1)
CASSPRTSGMSSYNEQFF

SEQ ID NO: 83307 - protein, 18 aa, Homo sapiens
  CDR3 for alpha chain variable domain of TCR clone 41654 (TRAV21, TRAJ52)
CAVRPSPAGGTSYGKLTF

SEQ ID NO: 83308 - protein, 14 aa, Homo sapiens
  CDR3 for beta chain variable domain of TCR clone 41654 (TRBV4-1, TRBJ2-2)
CASSQAVSTGELFF

SEQ ID NO: 83309 - protein, 12 aa, Homo sapiens
  CDR3 for alpha chain variable domain of TCR clone 41655 (TRAV12-3, TRAJ17)
CAMTLTGNKLTF

SEQ ID NO: 83310 - protein, 13 aa, Homo sapiens
  CDR3 for beta chain variable domain of TCR clone 41655 (TRBV12-4, TRBJ1-1)
CASSPGPGFEAFF

SEQ ID NO: 83311 - protein, 16 aa, Homo sapiens
  CDR3 for alpha chain variable domain of TCR clone 41656 (TRAV14/DV4, TRAJ12)
CAMREVLMDSSYKLIF

SEQ ID NO: 83312 - protein, 15 aa, Homo sapiens
  CDR3 for beta chain variable domain of TCR clone 41656 (TRBV28, TRBJ2-1)
CASSIIAGGRSEQFF

SEQ ID NO: 83313 - protein, 12 aa, Homo sapiens
  CDR3 for alpha chain variable domain of TCR clone 41657 (TRAV27, TRAJ35)
RAGADFGNVLHC

SEQ ID NO: 83314 - protein, 16 aa, Homo sapiens
  CDR3 for beta chain variable domain of TCR clone 41657 (TRBV6-1, TRBJ2-1)
CASILRQGSSYNEQFF

SEQ ID NO: 83315 - protein, 14 aa, Homo sapiens
  CDR3 for alpha chain variable domain of TCR clone 41658 (TRAV12-1, TRAJ17)
CVVNYKAAGNKLTF

SEQ ID NO: 83316 - protein, 14 aa, Homo sapiens
  CDR3 for beta chain variable domain of TCR clone 41658 (TRBV19, TRBJ2-5)
CASSMTGQQETQYF

SEQ ID NO: 83317 - protein, 14 aa, Homo sapiens
  CDR3 for alpha chain variable domain of TCR clone 41659 (TRAV1-2, TRAJ16)
CAVNRFSDGQKLLF

SEQ ID NO: 83318 - protein, 19 aa, Homo sapiens
  CDR3 for beta chain variable domain of TCR clone 41659 (TRBV25-1, TRBJ2-2)
CAILVYRVDRGRKTGGLFF

SEQ ID NO: 83319 - protein, 14 aa, Homo sapiens
  CDR3 for alpha chain variable domain of TCR clone 41660 (TRAV12-3, TRAJ10)
SHLPLTGGGNKLTF

SEQ ID NO: 83320 - protein, 13 aa, Homo sapiens
  CDR3 for beta chain variable domain of TCR clone 41660 (TRBV4-1, TRBJ2-1)
CASSQEVQYEQFF

SEQ ID NO: 83321 - protein, 13 aa, Homo sapiens
  CDR3 for alpha chain variable domain of TCR clone 41661 (TRAV17, TRAJ9)
CATDYNGGFKTIF

SEQ ID NO: 83322 - protein, 16 aa, Homo sapiens
  CDR3 for beta chain variable domain of TCR clone 41661 (TRBV7-7, TRBJ2-1)
CASSLASGTSYNEQFF

SEQ ID NO: 83323 - protein, 14 aa, Homo sapiens
  CDR3 for alpha chain variable domain of TCR clone 41662 (TRAV23/DV6, TRAJ8)
CAASKATGFQKPAF

SEQ ID NO: 83324 - protein, 15 aa, Homo sapiens
  CDR3 for beta chain variable domain of TCR clone 41662 (TRBV28, TRBJ2-3)
CASSPDRQGANTQYF

SEQ ID NO: 83325 - protein, 13 aa, Homo sapiens
  CDR3 for alpha chain variable domain of TCR clone 41663 (TRAV22, TRAJ29)
CAVGGSGNTPLVF

SEQ ID NO: 83326 - protein, 13 aa, Homo sapiens
  CDR3 for beta chain variable domain of TCR clone 41663 (TRBV4-2, TRBJ1-1)
CASSQAGNTEASF

SEQ ID NO: 83327 - protein, 12 aa, Homo sapiens
  CDR3 for alpha chain variable domain of TCR clone 41664 (TRAV13-1, TRAJ48)
CAASFGNEKLTF

SEQ ID NO: 83328 - protein, 13 aa, Homo sapiens
  CDR3 for beta chain variable domain of TCR clone 41664 (TRBV7-3, TRBJ1-1)
CASSQDWGAEAFF

SEQ ID NO: 83329 - protein, 12 aa, Homo sapiens
  CDR3 for alpha chain variable domain of TCR clone 41665 (TRAV12-2, TRAJ16)
CAVNLDGQKLLF

SEQ ID NO: 83330 - protein, 12 aa, Homo sapiens
  CDR3 for beta chain variable domain of TCR clone 41665 (TRBV5-7, TRBJ2-7)
CASSVQGGEQCF

SEQ ID NO: 83331 - protein, 13 aa, Homo sapiens
  CDR3 for alpha chain variable domain of TCR clone 41666 (TRAV8-3, TRAJ36)
CAVGATGANNLFF

SEQ ID NO: 83332 - protein, 15 aa, Homo sapiens
  CDR3 for beta chain variable domain of TCR clone 41666 (TRBV7-2, TRBJ1-2)
CASSPRAGWDYGYTF

SEQ ID NO: 83333 - protein, 13 aa, Homo sapiens
  CDR3 for alpha chain variable domain of TCR clone 41667 (TRAV20, TRAJ40)
CAVPFSGTYKYIF

SEQ ID NO: 83334 - protein, 13 aa, Homo sapiens
  CDR3 for beta chain variable domain of TCR clone 41667 (TRBV15, TRBJ2-5)
CATGQIGEETQYF

SEQ ID NO: 83335 - protein, 13 aa, Homo sapiens
  CDR3 for alpha chain variable domain of TCR clone 41668 (TRAV2, TRAJ21)
CAVEDLNFNKFYF

SEQ ID NO: 83336 - protein, 15 aa, Homo sapiens
  CDR3 for beta chain variable domain of TCR clone 41668 (TRBV28, TRBJ2-5)
CASSPGQGSIETKYF

SEQ ID NO: 83337 - protein, 11 aa, Homo sapiens
  CDR3 for alpha chain variable domain of TCR clone 41669 (TRAV2, TRAJ13)
CASGGYQKVTF

SEQ ID NO: 83338 - protein, 13 aa, Homo sapiens
  CDR3 for beta chain variable domain of TCR clone 41669 (TRBV6-5, TRBJ2-5)
CASSPQGGETQYF

SEQ ID NO: 83339 - protein, 11 aa, Homo sapiens
  CDR3 for alpha chain variable domain of TCR clone 41670 (TRAV12-1, TRAJ30)
CVVNDQDKIIF

SEQ ID NO: 83340 - protein, 15 aa, Homo sapiens
  CDR3 for beta chain variable domain of TCR clone 41670 (TRBV27, TRBJ2-2)
CTSVPANSSPGSCFF

SEQ ID NO: 83341 - protein, 23 aa, Homo sapiens
  CDR3 for alpha chain variable domain of TCR clone 41671 (TRAV26-1, TRAJ38)
CIADNAGNNHIQNPDPAVYQLRY

SEQ ID NO: 83342 - protein, 12 aa, Homo sapiens
  CDR3 for beta chain variable domain of TCR clone 41671 (TRBV11-2, TRBJ2-2)
CASSLGGGELFF

SEQ ID NO: 83343 - protein, 13 aa, Homo sapiens
  CDR3 for alpha chain variable domain of TCR clone 41672 (TRAV17, TRAJ9)
CATDYTGGFKAIF

SEQ ID NO: 83344 - protein, 16 aa, Homo sapiens
  CDR3 for beta chain variable domain of TCR clone 41672 (TRBV7-7, TRBJ2-1)
CASSLASGTSYNEQFF

SEQ ID NO: 83345 - protein, 14 aa, Homo sapiens
  CDR3 for alpha chain variable domain of TCR clone 41673 (TRAV8-1, TRAJ15)
CAVNGQQAGTALIF

SEQ ID NO: 83346 - protein, 16 aa, Homo sapiens
  CDR3 for beta chain variable domain of TCR clone 41673 (TRBV6-1, TRBJ2-5)
CASSETLDRGAETQYF

SEQ ID NO: 83347 - protein, 18 aa, Homo sapiens
  CDR3 for alpha chain variable domain of TCR clone 41674 (TRAV1-2, TRAJ18)
CAVRDMGDRGSTPGRLYF

SEQ ID NO: 83348 - protein, 16 aa, Homo sapiens
  CDR3 for beta chain variable domain of TCR clone 41674 (TRBV29-1, TRBJ1-2)
CSVEANRDIANYGYTF

SEQ ID NO: 83349 - protein, 13 aa, Homo sapiens
  CDR3 for alpha chain variable domain of TCR clone 41675 (TRAV16, TRAJ27)
CALRRTNAGKSTF

SEQ ID NO: 83350 - protein, 17 aa, Homo sapiens
  CDR3 for beta chain variable domain of TCR clone 41675 (TRBV18, TRBJ2-1)
CASSPRVAGGSYNEQFF

SEQ ID NO: 83351 - protein, 14 aa, Homo sapiens
  CDR3 for alpha chain variable domain of TCR clone 41676 (TRAV26-1, TRAJ38)
CIADNAGNNHILNP

SEQ ID NO: 83352 - protein, 13 aa, Homo sapiens
  CDR3 for beta chain variable domain of TCR clone 41676 (TRBV20-1, TRBJ1-1)
CSARGGGNTEAFF

SEQ ID NO: 83353 - protein, 16 aa, Homo sapiens
  CDR3 for alpha chain variable domain of TCR clone 41677 (TRAV8-3, TRAJ8)
CAVPRDGNTGFQKLVF

SEQ ID NO: 83354 - protein, 15 aa, Homo sapiens
  CDR3 for beta chain variable domain of TCR clone 41677 (TRBV6-1, TRBJ2-6)
CASSSRPAGANVLTF

SEQ ID NO: 83355 - protein, 11 aa, Homo sapiens
  CDR3 for alpha chain variable domain of TCR clone 41678 (TRAV12-1, TRAJ34)
CVVNKGRELIF

SEQ ID NO: 83356 - protein, 12 aa, Homo sapiens
  CDR3 for beta chain variable domain of TCR clone 41678 (TRBV2, TRBJ2-1)
CASGPPGNEQFF

SEQ ID NO: 83357 - protein, 12 aa, Homo sapiens
  CDR3 for alpha chain variable domain of TCR clone 41679 (TRAV12-3, TRAJ17)
CAMTLTGNKLTF

SEQ ID NO: 83358 - protein, 18 aa, Homo sapiens
  CDR3 for beta chain variable domain of TCR clone 41679 (TRBV18, TRBJ1-3)
CASSPRGGAGPSGNTIYF

SEQ ID NO: 83359 - protein, 15 aa, Homo sapiens
  CDR3 for alpha chain variable domain of TCR clone 41680 (TRAV21, TRAJ52)
CAVRGGGTSYGKLTF

SEQ ID NO: 83360 - protein, 13 aa, Homo sapiens
  CDR3 for beta chain variable domain of TCR clone 41680 (TRBV12-5, TRBJ2-3)
CASQNRGTDTQYF

SEQ ID NO: 83361 - protein, 15 aa, Homo sapiens
  CDR3 for alpha chain variable domain of TCR clone 41681 (TRAV3, TRAJ3)
CAVRDRESSASKIIF

SEQ ID NO: 83362 - protein, 18 aa, Homo sapiens
  CDR3 for beta chain variable domain of TCR clone 41681 (TRBV25-1, TRBJ1-2)
CASSGLQNGQGLIFGYTF

SEQ ID NO: 83363 - protein, 17 aa, Homo sapiens
  CDR3 for alpha chain variable domain of TCR clone 41682 (TRAV4, TRAJ13)
CIVGVQGSSGGYQEVTF

SEQ ID NO: 83364 - protein, 18 aa, Homo sapiens
  CDR3 for beta chain variable domain of TCR clone 41682 (TRBV15, TRBJ2-3)
CATSRDGARSWDTDTQYF

SEQ ID NO: 83365 - protein, 15 aa, Homo sapiens
  CDR3 for alpha chain variable domain of TCR clone 41683 (TRAV3, TRAJ30)
CAVRDRVERGDKIIF

SEQ ID NO: 83366 - protein, 13 aa, Homo sapiens
  CDR3 for beta chain variable domain of TCR clone 41683 (TRBV29-1, TRBJ2-5)
CSACSSRRETQYL

SEQ ID NO: 83367 - protein, 11 aa, Homo sapiens
  CDR3 for alpha chain variable domain of TCR clone 41684 (TRAV1-2, TRAJ40)
CAVPGTYRYIF

SEQ ID NO: 83368 - protein, 15 aa, Homo sapiens
  CDR3 for beta chain variable domain of TCR clone 41684 (TRBV25-1, TRBJ1-4)
CTSSPGDSTNEKLFF

SEQ ID NO: 83369 - protein, 13 aa, Homo sapiens
  CDR3 for alpha chain variable domain of TCR clone 41685 (TRAV20, TRAJ37)
CAGCSSNTGKLIF

SEQ ID NO: 83370 - protein, 14 aa, Homo sapiens
  CDR3 for beta chain variable domain of TCR clone 41685 (TRBV7-3, TRBJ1-1)
CASSLGTGYTEAFF

SEQ ID NO: 83371 - protein, 10 aa, Homo sapiens
  CDR3 for alpha chain variable domain of TCR clone 41686 (TRAV12-1, TRAJ37)
ARGNTGKLIF

SEQ ID NO: 83372 - protein, 15 aa, Homo sapiens
  CDR3 for beta chain variable domain of TCR clone 41686 (TRBV7-2, TRBJ2-3)
CASSLEQGGTDTQYF

SEQ ID NO: 83373 - protein, 15 aa, Homo sapiens
  CDR3 for alpha chain variable domain of TCR clone 41687 (TRAV3, TRAJ20)
CAVRDIKLSDYKLSF

SEQ ID NO: 83374 - protein, 15 aa, Homo sapiens
  CDR3 for beta chain variable domain of TCR clone 41687 (TRBV7-9, TRBJ1-6)
CASSSPGPGNSPLHF

SEQ ID NO: 83375 - protein, 15 aa, Homo sapiens
  CDR3 for alpha chain variable domain of TCR clone 41688 (TRAV21, TRAJ53)
CATLNSGGSNYKLTF

SEQ ID NO: 83376 - protein, 16 aa, Homo sapiens
  CDR3 for beta chain variable domain of TCR clone 41688 (TRBV29-1, TRBJ2-7)
CSVEVVGTSGSYEQYF

SEQ ID NO: 83377 - protein, 18 aa, Homo sapiens
  CDR3 for alpha chain variable domain of TCR clone 41689 (TRAV12-3, TRAJ52)
CAMSVGGAGGTSYGKLTF

SEQ ID NO: 83378 - protein, 13 aa, Homo sapiens
  CDR3 for beta chain variable domain of TCR clone 41689 (TRBV19, TRBJ1-2)
CASSVPGQDGYTF

SEQ ID NO: 83379 - protein, 15 aa, Homo sapiens
  CDR3 for alpha chain variable domain of TCR clone 41690 (TRAV17, TRAJ57)
CATGPSQGGSEKLVF

SEQ ID NO: 83380 - protein, 16 aa, Homo sapiens
  CDR3 for beta chain variable domain of TCR clone 41690 (TRBV12-4, TRBJ1-5)
CASSRPVEGSNQPQHF

SEQ ID NO: 83381 - protein, 11 aa, Homo sapiens
  CDR3 for alpha chain variable domain of TCR clone 41691 (TRAV4, TRAJ31)
CLVGYNARLMF

SEQ ID NO: 83382 - protein, 16 aa, Homo sapiens
  CDR3 for beta chain variable domain of TCR clone 41691 (TRBV7-2, TRBJ2-5)
CASSSKWLSGQETQYF

SEQ ID NO: 83383 - protein, 13 aa, Homo sapiens
  CDR3 for alpha chain variable domain of TCR clone 41692 (TRAV38-2/DV8, TRAJ34)
CAYRTWNTDKLIF

SEQ ID NO: 83384 - protein, 13 aa, Homo sapiens
  CDR3 for beta chain variable domain of TCR clone 41692 (TRBV7-9, TRBJ1-2)
CASSLKQNYGYTF

SEQ ID NO: 83385 - protein, 14 aa, Homo sapiens
  CDR3 for alpha chain variable domain of TCR clone 41693 (TRAV12-2, TRAJ40)
CAVKIPSGTYKYIF

SEQ ID NO: 83386 - protein, 11 aa, Homo sapiens
  CDR3 for beta chain variable domain of TCR clone 41693 (TRBV12-4, TRBJ2-3)
CASTATDTQYF

SEQ ID NO: 83387 - protein, 17 aa, Homo sapiens
  CDR3 for alpha chain variable domain of TCR clone 41694 (TRAV2, TRAJ22)
ILQVREADAAEQRQLTF

SEQ ID NO: 83388 - protein, 14 aa, Homo sapiens
  CDR3 for beta chain variable domain of TCR clone 41694 (TRBV19, TRBJ1-4)
CASRPGQKNEKLFF

SEQ ID NO: 83389 - protein, 16 aa, Homo sapiens
  CDR3 for alpha chain variable domain of TCR clone 41695 (TRAV3, TRAJ18)
CAVRDGRGSTQGRLYF

SEQ ID NO: 83390 - protein, 17 aa, Homo sapiens
  CDR3 for beta chain variable domain of TCR clone 41695 (TRBV5-1, TRBJ2-3)
CASSKIGLVDRTDTQYF

SEQ ID NO: 83391 - protein, 16 aa, Homo sapiens
  CDR3 for alpha chain variable domain of TCR clone 41696 (TRAV30, TRAJ24)
CGTEIVDADSWGKSQF

SEQ ID NO: 83392 - protein, 13 aa, Homo sapiens
  CDR3 for beta chain variable domain of TCR clone 41696 (TRBV11-2, TRBJ2-5)
CASSSTGEETQYF

SEQ ID NO: 83393 - protein, 18 aa, Homo sapiens
  CDR3 for alpha chain variable domain of TCR clone 41697 (TRAV29/DV5, TRAJ52)
CAAGFRCAGGTSYGKLTF

SEQ ID NO: 83394 - protein, 16 aa, Homo sapiens
  CDR3 for beta chain variable domain of TCR clone 41697 (TRBV7-3, TRBJ2-2)
CASSLKRGTLSGELFF

SEQ ID NO: 83395 - protein, 15 aa, Homo sapiens
  CDR3 for alpha chain variable domain of TCR clone 41698 (TRAV13-2, TRAJ8)
CAPGGRNTGFQKLVF

SEQ ID NO: 83396 - protein, 15 aa, Homo sapiens
  CDR3 for beta chain variable domain of TCR clone 41698 (TRBV18, TRBJ2-5)
CASSPRASEAETQYF

SEQ ID NO: 83397 - protein, 13 aa, Homo sapiens
  CDR3 for alpha chain variable domain of TCR clone 41699 (TRAV1-1, TRAJ5)
CAVRQAGRRALTF

SEQ ID NO: 83398 - protein, 15 aa, Homo sapiens
  CDR3 for beta chain variable domain of TCR clone 41699 (TRBV20-1, TRBJ2-7)
CSARDRVSGMDEQYF

SEQ ID NO: 83399 - protein, 13 aa, Homo sapiens
  CDR3 for alpha chain variable domain of TCR clone 41700 (TRAV12-1, TRAJ40)
CVVPTSGTYKYIF

SEQ ID NO: 83400 - protein, 18 aa, Homo sapiens
  CDR3 for beta chain variable domain of TCR clone 41700 (TRBV7-6, TRBJ2-1)
CASSPRTSGMSSYNEKFF

SEQ ID NO: 83401 - protein, 14 aa, Homo sapiens
  CDR3 for alpha chain variable domain of TCR clone 41701 (TRAV13-1, TRAJ44)
CAAKATGTASKLTF

SEQ ID NO: 83402 - protein, 14 aa, Homo sapiens
  CDR3 for beta chain variable domain of TCR clone 41701 (TRBV19, TRBJ2-2)
CASSTLHRSGELFS

SEQ ID NO: 83403 - protein, 15 aa, Homo sapiens
  CDR3 for alpha chain variable domain of TCR clone 41702 (TRAV26-1, TRAJ44)
CIVRANTGTTSKLTF

SEQ ID NO: 83404 - protein, 16 aa, Homo sapiens
  CDR3 for beta chain variable domain of TCR clone 41702 (TRBV7-7, TRBJ2-1)
CASSLASGTSYNEQFF

SEQ ID NO: 83405 - protein, 14 aa, Homo sapiens
  CDR3 for alpha chain variable domain of TCR clone 41703 (TRAV12-2, TRAJ13)
CAAKKTGGYQKVTF

SEQ ID NO: 83406 - protein, 14 aa, Homo sapiens
  CDR3 for beta chain variable domain of TCR clone 41703 (TRBV7-2, TRBJ2-2)
CASRGQGAAGELFF

SEQ ID NO: 83407 - protein, 13 aa, Homo sapiens
  CDR3 for alpha chain variable domain of TCR clone 41704 (TRAV8-6, TRAJ49)
CAVITNTGNQFYF

SEQ ID NO: 83408 - protein, 15 aa, Homo sapiens
  CDR3 for beta chain variable domain of TCR clone 41704 (TRBV5-1, TRBJ2-3)
CASSVTSGSTDTQYF

SEQ ID NO: 83409 - protein, 11 aa, Homo sapiens
  CDR3 for alpha chain variable domain of TCR clone 41705 (TRAV12-3, TRAJ7)
CAMRGNNRLAF

SEQ ID NO: 83410 - protein, 16 aa, Homo sapiens
  CDR3 for beta chain variable domain of TCR clone 41705 (TRBV4-1, TRBJ1-1)
CASSSMSERPNTEAFF

SEQ ID NO: 83411 - protein, 17 aa, Homo sapiens
  CDR3 for alpha chain variable domain of TCR clone 41706 (TRAV3, TRAJ6)
CAVRDGPRAGGSYIPTF

SEQ ID NO: 83412 - protein, 19 aa, Homo sapiens
  CDR3 for beta chain variable domain of TCR clone 41706 (TRBV25-1, TRBJ2-2)
CAILVYRVDRGRKAGELFF

SEQ ID NO: 83413 - protein, 12 aa, Homo sapiens
  CDR3 for alpha chain variable domain of TCR clone 41707 (TRAV29/DV5, TRAJ49)
CAATGTGNQFYF

SEQ ID NO: 83414 - protein, 15 aa, Homo sapiens
  CDR3 for beta chain variable domain of TCR clone 41707 (TRBV19, TRBJ2-2)
CASRQTGADTGELFF

SEQ ID NO: 83415 - protein, 14 aa, Homo sapiens
  CDR3 for alpha chain variable domain of TCR clone 41708 (TRAV1-2, TRAJ29)
CAVRELTSATPLVF

SEQ ID NO: 83416 - protein, 14 aa, Homo sapiens
  CDR3 for beta chain variable domain of TCR clone 41708 (TRBV3-1, TRBJ2-5)
CASSQGPDQEAQYF

SEQ ID NO: 83417 - protein, 14 aa, Homo sapiens
  CDR3 for alpha chain variable domain of TCR clone 41709 (TRAV26-1, TRAJ34)
CIVRVAYNTDKLIF

SEQ ID NO: 83418 - protein, 15 aa, Homo sapiens
  CDR3 for beta chain variable domain of TCR clone 41709 (TRBV20-1, TRBJ2-7)
CSTRVPAAYFYEQYF

SEQ ID NO: 83419 - protein, 14 aa, Homo sapiens
  CDR3 for alpha chain variable domain of TCR clone 41710 (TRAV3, TRAJ6)
CAVRDWGGGYIPTF

SEQ ID NO: 83420 - protein, 15 aa, Homo sapiens
  CDR3 for beta chain variable domain of TCR clone 41710 (TRBV5-1, TRBJ2-1)
CASSPPRAPYNEQFF

SEQ ID NO: 83421 - protein, 15 aa, Homo sapiens
  CDR3 for alpha chain variable domain of TCR clone 41711 (TRAV21, TRAJ24)
CAARSSTDSWGKLQF

SEQ ID NO: 83422 - protein, 13 aa, Homo sapiens
  CDR3 for beta chain variable domain of TCR clone 41711 (TRBV11-2, TRBJ2-5)
CTSSSTGEETQYF

SEQ ID NO: 83423 - protein, 13 aa, Homo sapiens
  CDR3 for alpha chain variable domain of TCR clone 41712 (TRAV8-3, TRAJ48)
CAVVPFGNEQLTF

SEQ ID NO: 83424 - protein, 15 aa, Homo sapiens
  CDR3 for beta chain variable domain of TCR clone 41712 (TRBV11-2, TRBJ2-1)
CASSSPSTRYNEQFF

SEQ ID NO: 83425 - protein, 14 aa, Homo sapiens
  CDR3 for alpha chain variable domain of TCR clone 41713 (TRAV12-2, TRAJ40)
CAVQIPSGTYKYIF

SEQ ID NO: 83426 - protein, 14 aa, Homo sapiens
  CDR3 for beta chain variable domain of TCR clone 41713 (TRBV20-1, TRBJ1-1)
CSAQTRIGGTEAFF

SEQ ID NO: 83427 - protein, 12 aa, Homo sapiens
  CDR3 for alpha chain variable domain of TCR clone 41714 (TRAV2, TRAJ32)
CAVGGATNKLIL

SEQ ID NO: 83428 - protein, 15 aa, Homo sapiens
  CDR3 for beta chain variable domain of TCR clone 41714 (TRBV7-2, TRBJ2-1)
CASSSRTSREDEQFF

SEQ ID NO: 83429 - protein, 11 aa, Homo sapiens
  CDR3 for alpha chain variable domain of TCR clone 41715 (TRAV12-1, TRAJ30)
CVVNGQDKIIL

SEQ ID NO: 83430 - protein, 15 aa, Homo sapiens
  CDR3 for beta chain variable domain of TCR clone 41715 (TRBV28, TRBJ2-5)
CASSSGRTIQETQYF

SEQ ID NO: 83431 - protein, 13 aa, Homo sapiens
  CDR3 for alpha chain variable domain of TCR clone 41716 (TRAV16, TRAJ9)
CALSNTGGFKTTF

SEQ ID NO: 83432 - protein, 14 aa, Homo sapiens
  CDR3 for beta chain variable domain of TCR clone 41716 (TRBV5-1, TRBJ2-1)
CASSLEGPVYEQFF

SEQ ID NO: 83433 - protein, 14 aa, Homo sapiens
  CDR3 for alpha chain variable domain of TCR clone 41717 (TRAV17, TRAJ6)
CATNPAGGSYMPTF

SEQ ID NO: 83434 - protein, 15 aa, Homo sapiens
  CDR3 for beta chain variable domain of TCR clone 41717 (TRBV2, TRBJ2-5)
CASSGTVAAGETQYF

SEQ ID NO: 83435 - protein, 14 aa, Homo sapiens
  CDR3 for alpha chain variable domain of TCR clone 41718 (TRAV12-2, TRAJ13)
CAMKKTGGYQKVTF

SEQ ID NO: 83436 - protein, 13 aa, Homo sapiens
  CDR3 for beta chain variable domain of TCR clone 41718 (TRBV19, TRBJ2-2)
CASSPLGIGELFF

SEQ ID NO: 83437 - protein, 13 aa, Homo sapiens
  CDR3 for alpha chain variable domain of TCR clone 41719 (TRAV13-1, TRAJ21)
CAASIYNFNKFYF

SEQ ID NO: 83438 - protein, 13 aa, Homo sapiens
  CDR3 for beta chain variable domain of TCR clone 41719 (TRBV27, TRBJ1-4)
CASSLMGDDKLFF

SEQ ID NO: 83439 - protein, 11 aa, Homo sapiens
  CDR3 for alpha chain variable domain of TCR clone 41720 (TRAV21, TRAJ34)
CAVTNTDKLIF

SEQ ID NO: 83440 - protein, 12 aa, Homo sapiens
  CDR3 for beta chain variable domain of TCR clone 41720 (TRBV18, TRBJ1-1)
RAWGGRGGEAFF

SEQ ID NO: 83441 - protein, 14 aa, Homo sapiens
  CDR3 for alpha chain variable domain of TCR clone 41721 (TRAV1-2, TRAJ16)
RAVNRFSDGQKLLF

SEQ ID NO: 83442 - protein, 13 aa, Homo sapiens
  CDR3 for beta chain variable domain of TCR clone 41721 (TRBV19, TRBJ1-5)
CASSEGSNQPQHF

SEQ ID NO: 83443 - protein, 14 aa, Homo sapiens
  CDR3 for alpha chain variable domain of TCR clone 41722 (TRAV17, TRAJ48)
CATEGNFGNEKLTF

SEQ ID NO: 83444 - protein, 13 aa, Homo sapiens
  CDR3 for beta chain variable domain of TCR clone 41722 (TRBV7-2, TRBJ2-7)
CASSSPSGSEQYF

SEQ ID NO: 83445 - protein, 14 aa, Homo sapiens
  CDR3 for alpha chain variable domain of TCR clone 41723 (TRAV12-3, TRAJ10)
SHLPLAGGGNKLTF

SEQ ID NO: 83446 - protein, 13 aa, Homo sapiens
  CDR3 for beta chain variable domain of TCR clone 41723 (TRBV7-6, TRBJ2-3)
CASSLAVGDTQYF

SEQ ID NO: 83447 - protein, 18 aa, Homo sapiens
  CDR3 for alpha chain variable domain of TCR clone 41724 (TRAV12-3, TRAJ52)
CAMSRTNAGGTSYGKLTF

SEQ ID NO: 83448 - protein, 17 aa, Homo sapiens
  CDR3 for beta chain variable domain of TCR clone 41724 (TRBV7-3, TRBJ2-3)
CASSSMKRMRGADTQYF

SEQ ID NO: 83449 - protein, 15 aa, Homo sapiens
  CDR3 for alpha chain variable domain of TCR clone 41725 (TRAV21, TRAJ53)
CATLNSGGSNYKLTF

SEQ ID NO: 83450 - protein, 15 aa, Homo sapiens
  CDR3 for beta chain variable domain of TCR clone 41725 (TRBV2, TRBJ1-1)
CASSERSGRNTEAFF

SEQ ID NO: 83451 - protein, 14 aa, Homo sapiens
  CDR3 for alpha chain variable domain of TCR clone 41726 (TRAV23/DV6, TRAJ6)
CAASRSGGSHIPTF

SEQ ID NO: 83452 - protein, 17 aa, Homo sapiens
  CDR3 for beta chain variable domain of TCR clone 41726 (TRBV20-1, TRBJ2-1)
CSASASGLAGSYNEQFF

SEQ ID NO: 83453 - protein, 13 aa, Homo sapiens
  CDR3 for alpha chain variable domain of TCR clone 41727 (TRAV21, TRAJ49)
CAVRQSTGNQSYF

SEQ ID NO: 83454 - protein, 13 aa, Homo sapiens
  CDR3 for beta chain variable domain of TCR clone 41727 (TRBV6-6, TRBJ1-5)
CASRAYQDQPQHF

SEQ ID NO: 83455 - protein, 11 aa, Homo sapiens
  CDR3 for alpha chain variable domain of TCR clone 41728 (TRAV16, TRAJ31)
CALFNNARLMF

SEQ ID NO: 83456 - protein, 16 aa, Homo sapiens
  CDR3 for beta chain variable domain of TCR clone 41728 (TRBV7-2, TRBJ1-4)
CASSLAPGRRDEKLFF

SEQ ID NO: 83457 - protein, 14 aa, Homo sapiens
  CDR3 for alpha chain variable domain of TCR clone 41729 (TRAV8-4, TRAJ45)
VRMYSGGGADGLTF

SEQ ID NO: 83458 - protein, 14 aa, Homo sapiens
  CDR3 for beta chain variable domain of TCR clone 41729 (TRBV27, TRBJ2-2)
CASSLGAATGELFF

SEQ ID NO: 83459 - protein, 14 aa, Homo sapiens
  CDR3 for alpha chain variable domain of TCR clone 41730 (TRAV2, TRAJ9)
CAVEDRSGGFKTIF

SEQ ID NO: 83460 - protein, 11 aa, Homo sapiens
  CDR3 for beta chain variable domain of TCR clone 41730 (TRBV7-9, TRBJ2-5)
CASSLGETQYL

SEQ ID NO: 83461 - protein, 16 aa, Homo sapiens
  CDR3 for alpha chain variable domain of TCR clone 41731 (TRAV3, TRAJ5)
CAVRNLMDTGRRELTF

SEQ ID NO: 83462 - protein, 16 aa, Homo sapiens
  CDR3 for beta chain variable domain of TCR clone 41731 (TRBV4-2, TRBJ2-7)
CASSQEGLANSYEQYF

SEQ ID NO: 83463 - protein, 13 aa, Homo sapiens
  CDR3 for alpha chain variable domain of TCR clone 41732 (TRAV2, TRAJ29)
CAAGNSGNTPLVF

SEQ ID NO: 83464 - protein, 16 aa, Homo sapiens
  CDR3 for beta chain variable domain of TCR clone 41732 (TRBV7-9, TRBJ1-2)
CASSSGGGAINYGYTF

SEQ ID NO: 83465 - protein, 10 aa, Homo sapiens
  CDR3 for alpha chain variable domain of TCR clone 41733 (TRAV8-4, TRAJ43)
CAVSADDMRC

SEQ ID NO: 83466 - protein, 15 aa, Homo sapiens
  CDR3 for beta chain variable domain of TCR clone 41733 (TRBV5-1, TRBJ2-3)
CASSVTSGSTDTQYF

SEQ ID NO: 83467 - protein, 15 aa, Homo sapiens
  CDR3 for alpha chain variable domain of TCR clone 41734 (TRAV3, TRAJ22)
CAVRDRGGSARQLTF

SEQ ID NO: 83468 - protein, 14 aa, Homo sapiens
  CDR3 for beta chain variable domain of TCR clone 41734 (TRBV4-2, TRBJ2-1)
CASGLDRAYNEQFF

SEQ ID NO: 83469 - protein, 14 aa, Homo sapiens
  CDR3 for alpha chain variable domain of TCR clone 41735 (TRAV1-2, TRAJ16)
CAVNRFSDGQKLLF

SEQ ID NO: 83470 - protein, 16 aa, Homo sapiens
  CDR3 for beta chain variable domain of TCR clone 41735 (TRBV12-5, TRBJ2-5)
CASGLRTSGNQETQYF

SEQ ID NO: 83471 - protein, 13 aa, Homo sapiens
  CDR3 for alpha chain variable domain of TCR clone 41736 (TRAV8-3, TRAJ36)
CAVGATGANNLFF

SEQ ID NO: 83472 - protein, 15 aa, Homo sapiens
  CDR3 for beta chain variable domain of TCR clone 41736 (TRBV5-4, TRBJ1-1)
CASSSLGWANTEAFF

SEQ ID NO: 83473 - protein, 15 aa, Homo sapiens
  CDR3 for alpha chain variable domain of TCR clone 41737 (TRAV26-1, TRAJ29)
CIVRVEGSGNTPLVF

SEQ ID NO: 83474 - protein, 14 aa, Homo sapiens
  CDR3 for beta chain variable domain of TCR clone 41737 (TRBV18, TRBJ2-5)
CASSPGVSQETKYF

SEQ ID NO: 83475 - protein, 14 aa, Homo sapiens
  CDR3 for alpha chain variable domain of TCR clone 41738 (TRAV12-3, TRAJ15)
CAMIPPQAGTALIF

SEQ ID NO: 83476 - protein, 16 aa, Homo sapiens
  CDR3 for beta chain variable domain of TCR clone 41738 (TRBV13, TRBJ2-2)
CASSPRTGEHTGELFF

SEQ ID NO: 83477 - protein, 15 aa, Homo sapiens
  CDR3 for alpha chain variable domain of TCR clone 41739 (TRAV3, TRAJ22)
CAVRDRGGSARQLTF

SEQ ID NO: 83478 - protein, 12 aa, Homo sapiens
  CDR3 for beta chain variable domain of TCR clone 41739 (TRBV7-6, TRBJ2-7)
CASSLAGSEQYF

SEQ ID NO: 83479 - protein, 13 aa, Homo sapiens
  CDR3 for alpha chain variable domain of TCR clone 41740 (TRAV3, TRAJ21)
CAVREPDFNKFYF

SEQ ID NO: 83480 - protein, 12 aa, Homo sapiens
  CDR3 for beta chain variable domain of TCR clone 41740 (TRBV7-8, TRBJ2-7)
CASSLGDREQYF

SEQ ID NO: 83481 - protein, 12 aa, Homo sapiens
  CDR3 for alpha chain variable domain of TCR clone 41741 (TRAV2, TRAJ33)
CAVWGGNYQLIW

SEQ ID NO: 83482 - protein, 16 aa, Homo sapiens
  CDR3 for beta chain variable domain of TCR clone 41741 (TRBV20-1, TRBJ1-4)
CSAPGQGLLTNEKLFF

SEQ ID NO: 83483 - protein, 14 aa, Homo sapiens
  CDR3 for alpha chain variable domain of TCR clone 41742 (TRAV12-1, TRAJ26)
CVVKGSNYGQNFVF

SEQ ID NO: 83484 - protein, 12 aa, Homo sapiens
  CDR3 for beta chain variable domain of TCR clone 41742 (TRBV11-2, TRBJ2-2)
CASSLGGGELFF

SEQ ID NO: 83485 - protein, 14 aa, Homo sapiens
  CDR3 for alpha chain variable domain of TCR clone 41743 (TRAV17, TRAJ57)
CATDPQGGSEELVF

SEQ ID NO: 83486 - protein, 14 aa, Homo sapiens
  CDR3 for beta chain variable domain of TCR clone 41743 (TRBV19, TRBJ2-1)
CASPTFVLSGEQFF

SEQ ID NO: 83487 - protein, 20 aa, Homo sapiens
  CDR3 for alpha chain variable domain of TCR clone 41744 (TRAV26-1, TRAJ42)
CCVLLHRQTYYGGSQGNLIF

SEQ ID NO: 83488 - protein, 14 aa, Homo sapiens
  CDR3 for beta chain variable domain of TCR clone 41744 (TRBV7-9, TRBJ2-1)
CASSPRDSLYEQFF

SEQ ID NO: 83489 - protein, 10 aa, Homo sapiens
  CDR3 for alpha chain variable domain of TCR clone 41745 (TRAV36/DV7, TRAJ48)
CAVGNEKLTF

SEQ ID NO: 83490 - protein, 16 aa, Homo sapiens
  CDR3 for beta chain variable domain of TCR clone 41745 (TRBV15, TRBJ2-3)
CATRLSGGRAPDMQYF

SEQ ID NO: 83491 - protein, 16 aa, Homo sapiens
  CDR3 for alpha chain variable domain of TCR clone 41746 (TRAV1-1, TRAJ28)
CAVRDDSGAGSYQLTF

SEQ ID NO: 83492 - protein, 12 aa, Homo sapiens
  CDR3 for beta chain variable domain of TCR clone 41746 (TRBV11-2, TRBJ2-5)
CASSLDAQTQYF

SEQ ID NO: 83493 - protein, 20 aa, Homo sapiens
  CDR3 for alpha chain variable domain of TCR clone 41747 (TRAV12-1, TRAJ42)
SSVIQPPTSVQGGSQGNLIF

SEQ ID NO: 83494 - protein, 18 aa, Homo sapiens
  CDR3 for beta chain variable domain of TCR clone 41747 (TRBV11-2, TRBJ2-3)
CASSLGGASRGAPNTQYF

SEQ ID NO: 83495 - protein, 14 aa, Homo sapiens
  CDR3 for alpha chain variable domain of TCR clone 41748 (TRAV23/DV6, TRAJ13)
CAASETGGYQKVTF

SEQ ID NO: 83496 - protein, 16 aa, Homo sapiens
  CDR3 for beta chain variable domain of TCR clone 41748 (TRBV5-1, TRBJ1-3)
CASSPWAPSSGNTMYF

SEQ ID NO: 83497 - protein, 10 aa, Homo sapiens
  CDR3 for alpha chain variable domain of TCR clone 41749 (TRAV23/DV6, TRAJ57)
CAASSTLSQG

SEQ ID NO: 83498 - protein, 16 aa, Homo sapiens
  CDR3 for beta chain variable domain of TCR clone 41749 (TRBV12-5, TRBJ2-5)
CASGPRTSGNQETQYF

SEQ ID NO: 83499 - protein, 15 aa, Homo sapiens
  CDR3 for alpha chain variable domain of TCR clone 41750 (TRAV14/DV4, TRAJ46)
CAMREKKSSGDKLAF

SEQ ID NO: 83500 - protein, 13 aa, Homo sapiens
  CDR3 for beta chain variable domain of TCR clone 41750 (TRBV20-1, TRBJ2-5)
CSAREAFQETQYF

SEQ ID NO: 83501 - protein, 17 aa, Homo sapiens
  CDR3 for alpha chain variable domain of TCR clone 41751 (TRAV3, TRAJ42)
CAVRDRDYGGSQVNLIF

SEQ ID NO: 83502 - protein, 15 aa, Homo sapiens
  CDR3 for beta chain variable domain of TCR clone 41751 (TRBV6-6, TRBJ2-7)
CASSYSYGGSYEQYF

SEQ ID NO: 83503 - protein, 14 aa, Homo sapiens
  CDR3 for alpha chain variable domain of TCR clone 41752 (TRAV26-1, TRAJ48)
CIARVGFGNEKLTF

SEQ ID NO: 83504 - protein, 13 aa, Homo sapiens
  CDR3 for beta chain variable domain of TCR clone 41752 (TRBV11-3, TRBJ2-3)
CASSHDTKDTQYF

SEQ ID NO: 83505 - protein, 12 aa, Homo sapiens
  CDR3 for alpha chain variable domain of TCR clone 41753 (TRAV12-2, TRAJ3)
CAMWSSASKIIF

SEQ ID NO: 83506 - protein, 12 aa, Homo sapiens
  CDR3 for beta chain variable domain of TCR clone 41753 (TRBV11-2, TRBJ2-1)
CASSPGNNEQFF

SEQ ID NO: 83507 - protein, 13 aa, Homo sapiens
  CDR3 for alpha chain variable domain of TCR clone 41754 (TRAV13-1, TRAJ5)
CAAIDTGRRALTF

SEQ ID NO: 83508 - protein, 12 aa, Homo sapiens
  CDR3 for beta chain variable domain of TCR clone 41754 (TRBV28, TRBJ2-3)
CASSLYRDTQYF

SEQ ID NO: 83509 - protein, 13 aa, Homo sapiens
  CDR3 for alpha chain variable domain of TCR clone 41755 (TRAV38-1, TRAJ42)
CARWGGSQGNLIF

SEQ ID NO: 83510 - protein, 15 aa, Homo sapiens
  CDR3 for beta chain variable domain of TCR clone 41755 (TRBV5-1, TRBJ2-3)
CASSYNVGRTDTQYF

SEQ ID NO: 83511 - protein, 14 aa, Homo sapiens
  CDR3 for alpha chain variable domain of TCR clone 41756 (TRAV13-1, TRAJ39)
CAASEGNAGNMLTF

SEQ ID NO: 83512 - protein, 13 aa, Homo sapiens
  CDR3 for beta chain variable domain of TCR clone 41756 (TRBV7-9, TRBJ2-2)
CASSLDPTGELFF

SEQ ID NO: 83513 - protein, 14 aa, Homo sapiens
  CDR3 for alpha chain variable domain of TCR clone 41757 (TRAV3, TRAJ9)
CAVRLNTGGFKTIF

SEQ ID NO: 83514 - protein, 15 aa, Homo sapiens
  CDR3 for beta chain variable domain of TCR clone 41757 (TRBV7-2, TRBJ2-1)
CASSSASGRVNEQFF

SEQ ID NO: 83515 - protein, 13 aa, Homo sapiens
  CDR3 for alpha chain variable domain of TCR clone 41758 (TRAV21, TRAJ27)
RAARRGNAGKSTL

SEQ ID NO: 83516 - protein, 14 aa, Homo sapiens
  CDR3 for beta chain variable domain of TCR clone 41758 (TRBV7-6, TRBJ2-3)
CASSLGTVTDTQYF

SEQ ID NO: 83517 - protein, 15 aa, Homo sapiens
  CDR3 for alpha chain variable domain of TCR clone 41759 (TRAV17, TRAJ34)
CATDPRMVDTDKLIF

SEQ ID NO: 83518 - protein, 12 aa, Homo sapiens
  CDR3 for beta chain variable domain of TCR clone 41759 (TRBV10-2, TRBJ2-3)
CASSEGPGPRYF

SEQ ID NO: 83519 - protein, 14 aa, Homo sapiens
  CDR3 for alpha chain variable domain of TCR clone 41760 (TRAV2, TRAJ9)
CAVEDRSGGFKTIF

SEQ ID NO: 83520 - protein, 15 aa, Homo sapiens
  CDR3 for beta chain variable domain of TCR clone 41760 (TRBV2, TRBJ2-7)
CASSEGLARSYEQYF

SEQ ID NO: 83521 - protein, 15 aa, Homo sapiens
  CDR3 for alpha chain variable domain of TCR clone 41761 (TRAV21, TRAJ45)
CAVSYSGGGADGLTF

SEQ ID NO: 83522 - protein, 13 aa, Homo sapiens
  CDR3 for beta chain variable domain of TCR clone 41761 (TRBV20-1, TRBJ2-5)
CSAAAELQETQYF

SEQ ID NO: 83523 - protein, 16 aa, Homo sapiens
  CDR3 for alpha chain variable domain of TCR clone 41762 (TRAV12-3, TRAJ53)
CVMSVGSGGSNYKLTF

SEQ ID NO: 83524 - protein, 11 aa, Homo sapiens
  CDR3 for beta chain variable domain of TCR clone 41762 (TRBV29-1, TRBJ2-5)
CSVASGETQYF

SEQ ID NO: 83525 - protein, 14 aa, Homo sapiens
  CDR3 for alpha chain variable domain of TCR clone 41763 (TRAV1-2, TRAJ16)
CAVNRFSDGQKLLF

SEQ ID NO: 83526 - protein, 10 aa, Homo sapiens
  CDR3 for beta chain variable domain of TCR clone 41763 (TRBV20-1, TRBJ2-2)
TPRTPGSCFF

SEQ ID NO: 83527 - protein, 10 aa, Homo sapiens
  CDR3 for alpha chain variable domain of TCR clone 41764 (TRAV26-2, TRAJ20)
CILGGYKLSF

SEQ ID NO: 83528 - protein, 14 aa, Homo sapiens
  CDR3 for beta chain variable domain of TCR clone 41764 (TRBV5-1, TRBJ2-1)
CASSQRDIYNEQFF

SEQ ID NO: 83529 - protein, 16 aa, Homo sapiens
  CDR3 for alpha chain variable domain of TCR clone 41765 (TRAV3, TRAJ37)
CAVRPHGSGNTGKLIF

SEQ ID NO: 83530 - protein, 16 aa, Homo sapiens
  CDR3 for beta chain variable domain of TCR clone 41765 (TRBV9, TRBJ1-2)
RASSVEEKVSPYGYTF

SEQ ID NO: 83531 - protein, 14 aa, Homo sapiens
  CDR3 for alpha chain variable domain of TCR clone 41766 (TRAV12-3, TRAJ58)
CAMNTETSGSRLTF

SEQ ID NO: 83532 - protein, 11 aa, Homo sapiens
  CDR3 for beta chain variable domain of TCR clone 41766 (TRBV29-1, TRBJ2-5)
CSEDRTGTQYF

SEQ ID NO: 83533 - protein, 15 aa, Homo sapiens
  CDR3 for alpha chain variable domain of TCR clone 41767 (TRAV20, TRAJ53)
CAVQASGGSNYKLTF

SEQ ID NO: 83534 - protein, 12 aa, Homo sapiens
  CDR3 for beta chain variable domain of TCR clone 41767 (TRBV7-6, TRBJ2-5)
CASSLSQDTQYF

SEQ ID NO: 83535 - protein, 13 aa, Homo sapiens
  CDR3 for alpha chain variable domain of TCR clone 41768 (TRAV12-1, TRAJ21)
CVVTLYNFNKFYF

SEQ ID NO: 83536 - protein, 15 aa, Homo sapiens
  CDR3 for beta chain variable domain of TCR clone 41768 (TRBV7-9, TRBJ1-2)
CASSLDREPNYGYTF

SEQ ID NO: 83537 - protein, 13 aa, Homo sapiens
  CDR3 for alpha chain variable domain of TCR clone 41769 (TRAV2, TRAJ40)
CAVVTSGTYKYIF

SEQ ID NO: 83538 - protein, 17 aa, Homo sapiens
  CDR3 for beta chain variable domain of TCR clone 41769 (TRBV13, TRBJ2-3)
CASSLPRVAGGRNTQYF

SEQ ID NO: 83539 - protein, 13 aa, Homo sapiens
  CDR3 for alpha chain variable domain of TCR clone 41770 (TRAV8-3, TRAJ28)
CAVGAVGSYQLTF

SEQ ID NO: 83540 - protein, 15 aa, Homo sapiens
  CDR3 for beta chain variable domain of TCR clone 41770 (TRBV7-9, TRBJ1-5)
CARGQGHQPNQPQHF

SEQ ID NO: 83541 - protein, 14 aa, Homo sapiens
  CDR3 for alpha chain variable domain of TCR clone 41771 (TRAV3, TRAJ37)
CAVKESGNTGKLIF

SEQ ID NO: 83542 - protein, 14 aa, Homo sapiens
  CDR3 for beta chain variable domain of TCR clone 41771 (TRBV2, TRBJ1-5)
CASSENRGGQTQHF

SEQ ID NO: 83543 - protein, 10 aa, Homo sapiens
  CDR3 for alpha chain variable domain of TCR clone 41772 (TRAV38-2/DV8, TRAJ40)
CASGTYKYIF

SEQ ID NO: 83544 - protein, 17 aa, Homo sapiens
  CDR3 for beta chain variable domain of TCR clone 41772 (TRBV20-1, TRBJ2-2)
CSASGSGQGGLTGELFF

SEQ ID NO: 83545 - protein, 17 aa, Homo sapiens
  CDR3 for alpha chain variable domain of TCR clone 41773 (TRAV13-1, TRAJ52)
CAAGRNAGGTSSGKLTF

SEQ ID NO: 83546 - protein, 13 aa, Homo sapiens
  CDR3 for beta chain variable domain of TCR clone 41773 (TRBV7-2, TRBJ1-1)
CASNLKGAKVAFF

SEQ ID NO: 83547 - protein, 12 aa, Homo sapiens
  CDR3 for alpha chain variable domain of TCR clone 41774 (TRAV26-1, TRAJ35)
CIGLSFGNVLHC

SEQ ID NO: 83548 - protein, 13 aa, Homo sapiens
  CDR3 for beta chain variable domain of TCR clone 41774 (TRBV12-4, TRBJ2-5)
CASRLAVQETQYF

SEQ ID NO: 83549 - protein, 16 aa, Homo sapiens
  CDR3 for alpha chain variable domain of TCR clone 41775 (TRAV17, TRAJ28)
CASYAYSGAGSYQLTF

SEQ ID NO: 83550 - protein, 15 aa, Homo sapiens
  CDR3 for beta chain variable domain of TCR clone 41775 (TRBV4-2, TRBJ2-1)
CASSPSGGLYDEQFF

SEQ ID NO: 83551 - protein, 15 aa, Homo sapiens
  CDR3 for alpha chain variable domain of TCR clone 41776 (TRAV12-3, TRAJ42)
CAMSGHGGSQGNLIF

SEQ ID NO: 83552 - protein, 15 aa, Homo sapiens
  CDR3 for beta chain variable domain of TCR clone 41776 (TRBV7-9, TRBJ1-4)
CASSATGGNNEKLFF

SEQ ID NO: 83553 - protein, 16 aa, Homo sapiens
  CDR3 for alpha chain variable domain of TCR clone 41777 (TRAV21, TRAJ37)
CAVRTAGSSNAGKLIF

SEQ ID NO: 83554 - protein, 13 aa, Homo sapiens
  CDR3 for beta chain variable domain of TCR clone 41777 (TRBV7-9, TRBJ2-5)
CASLPSGRETQYF

SEQ ID NO: 83555 - protein, 16 aa, Homo sapiens
  CDR3 for alpha chain variable domain of TCR clone 41778 (TRAV21, TRAJ21)
CAVKGFGNFNKFTLDL

SEQ ID NO: 83556 - protein, 16 aa, Homo sapiens
  CDR3 for beta chain variable domain of TCR clone 41778 (TRBV12-4, TRBJ1-5)
CASRQGSGLGNQPQHF

SEQ ID NO: 83557 - protein, 15 aa, Homo sapiens
  CDR3 for alpha chain variable domain of TCR clone 41779 (TRAV21, TRAJ10)
CAVPRLTGGGNKLTF

SEQ ID NO: 83558 - protein, 14 aa, Homo sapiens
  CDR3 for beta chain variable domain of TCR clone 41779 (TRBV12-4, TRBJ1-1)
CASSLGTGGTEAFF

SEQ ID NO: 83559 - protein, 13 aa, Homo sapiens
  CDR3 for alpha chain variable domain of TCR clone 41780 (TRAV16, TRAJ22)
SAMLAGSARQLTF

SEQ ID NO: 83560 - protein, 15 aa, Homo sapiens
  CDR3 for beta chain variable domain of TCR clone 41780 (TRBV27, TRBJ1-5)
CASTFNRGSNQPQHF

SEQ ID NO: 83561 - protein, 16 aa, Homo sapiens
  CDR3 for alpha chain variable domain of TCR clone 41781 (TRAV16, TRAJ4)
CARSRMFSGGYNKLIF

SEQ ID NO: 83562 - protein, 16 aa, Homo sapiens
  CDR3 for beta chain variable domain of TCR clone 41781 (TRBV24-1, TRBJ2-3)
CATSDPGTGATDTQYF

SEQ ID NO: 83563 - protein, 23 aa, Homo sapiens
  CDR3 for alpha chain variable domain of TCR clone 41782 (TRAV26-1, TRAJ38)
CIADNAGNNRIQNPDPAVYQLRD

SEQ ID NO: 83564 - protein, 17 aa, Homo sapiens
  CDR3 for beta chain variable domain of TCR clone 41782 (TRBV11-2, TRBJ2-6)
CASSQRDIFSGANVLTF

SEQ ID NO: 83565 - protein, 12 aa, Homo sapiens
  CDR3 for alpha chain variable domain of TCR clone 41783 (TRAV12-2, TRAJ10)
WGVTGGGNKLTF

SEQ ID NO: 83566 - protein, 14 aa, Homo sapiens
  CDR3 for beta chain variable domain of TCR clone 41783 (TRBV7-9, TRBJ2-3)
CASSLEDGTDTQYF

SEQ ID NO: 83567 - protein, 14 aa, Homo sapiens
  CDR3 for alpha chain variable domain of TCR clone 41784 (TRAV17, TRAJ35)
CATDRSGFGNVLHC

SEQ ID NO: 83568 - protein, 19 aa, Homo sapiens
  CDR3 for beta chain variable domain of TCR clone 41784 (TRBV11-3, TRBJ2-2)
CASSTRPGAKTTNTGELFF

SEQ ID NO: 83569 - protein, 13 aa, Homo sapiens
  CDR3 for alpha chain variable domain of TCR clone 41785 (TRAV14/DV4, TRAJ54)
CNERGPGAQKLVF

SEQ ID NO: 83570 - protein, 15 aa, Homo sapiens
  CDR3 for beta chain variable domain of TCR clone 41785 (TRBV3-1, TRBJ2-1)
CASRPRGGAYNEQFF

SEQ ID NO: 83571 - protein, 13 aa, Homo sapiens
  CDR3 for alpha chain variable domain of TCR clone 41786 (TRAV12-1, TRAJ16)
CVVKGPDGQKLLF

SEQ ID NO: 83572 - protein, 15 aa, Homo sapiens
  CDR3 for beta chain variable domain of TCR clone 41786 (TRBV6-3, TRBJ2-7)
CASSSPGTVFYEQYF

SEQ ID NO: 83573 - protein, 16 aa, Homo sapiens
  CDR3 for alpha chain variable domain of TCR clone 41787 (TRAV4, TRAJ22)
CLVGDLYSGSARQLIF

SEQ ID NO: 83574 - protein, 16 aa, Homo sapiens
  CDR3 for beta chain variable domain of TCR clone 41787 (TRBV7-9, TRBJ2-1)
CASSDVAGGSYNEQFF

SEQ ID NO: 83575 - protein, 10 aa, Homo sapiens
  CDR3 for alpha chain variable domain of TCR clone 41788 (TRAV23/DV6, TRAJ57)
CAASSTLSQG

SEQ ID NO: 83576 - protein, 13 aa, Homo sapiens
  CDR3 for beta chain variable domain of TCR clone 41788 (TRBV2, TRBJ1-2)
CASSVRGNYGYTF

SEQ ID NO: 83577 - protein, 15 aa, Homo sapiens
  CDR3 for alpha chain variable domain of TCR clone 41789 (TRAV26-1, TRAJ40)
CIVRVTTSGTYKYIF

SEQ ID NO: 83578 - protein, 12 aa, Homo sapiens
  CDR3 for beta chain variable domain of TCR clone 41789 (TRBV7-9, TRBJ1-4)
CASSTDREKLFV

SEQ ID NO: 83579 - protein, 14 aa, Homo sapiens
  CDR3 for alpha chain variable domain of TCR clone 41790 (TRAV13-1, TRAJ44)
CAAKATGTASKLTF

SEQ ID NO: 83580 - protein, 17 aa, Homo sapiens
  CDR3 for beta chain variable domain of TCR clone 41790 (TRBV7-3, TRBJ2-3)
RASSLMKRMRGADMQYF

SEQ ID NO: 83581 - protein, 16 aa, Homo sapiens
  CDR3 for alpha chain variable domain of TCR clone 41791 (TRAV16, TRAJ4)
CALSRMFSGGYNKLIF

SEQ ID NO: 83582 - protein, 16 aa, Homo sapiens
  CDR3 for beta chain variable domain of TCR clone 41791 (TRBV24-1, TRBJ2-3)
CATSDPVTGATDTQYF

SEQ ID NO: 83583 - protein, 14 aa, Homo sapiens
  CDR3 for alpha chain variable domain of TCR clone 41792 (TRAV1-2, TRAJ16)
CAVNRFSDGQKLLF

SEQ ID NO: 83584 - protein, 14 aa, Homo sapiens
  CDR3 for beta chain variable domain of TCR clone 41792 (TRBV10-2, TRBJ1-5)
CASSSTGRNPPQHF

SEQ ID NO: 83585 - protein, 15 aa, Homo sapiens
  CDR3 for alpha chain variable domain of TCR clone 41793 (TRAV25, TRAJ53)
CPTSNSGGSNYKLTF

SEQ ID NO: 83586 - protein, 14 aa, Homo sapiens
  CDR3 for beta chain variable domain of TCR clone 41793 (TRBV11-2, TRBJ2-3)
CASSRLARTETQYF

SEQ ID NO: 83587 - protein, 11 aa, Homo sapiens
  CDR3 for alpha chain variable domain of TCR clone 41794 (TRAV12-1, TRAJ21)
CVVYNFNKFYF

SEQ ID NO: 83588 - protein, 16 aa, Homo sapiens
  CDR3 for beta chain variable domain of TCR clone 41794 (TRBV7-3, TRBJ2-2)
CASSLKRGTLSGELFF

SEQ ID NO: 83589 - protein, 12 aa, Homo sapiens
  CDR3 for alpha chain variable domain of TCR clone 41795 (TRAV4, TRAJ26)
CLVVDYGQNFVF

SEQ ID NO: 83590 - protein, 16 aa, Homo sapiens
  CDR3 for beta chain variable domain of TCR clone 41795 (TRBV7-2, TRBJ1-2)
CASSSNQDRRGHGYTF

SEQ ID NO: 83591 - protein, 11 aa, Homo sapiens
  CDR3 for alpha chain variable domain of TCR clone 41796 (TRAV3, TRAJ21)
CAVGNFNKFYF

SEQ ID NO: 83592 - protein, 16 aa, Homo sapiens
  CDR3 for beta chain variable domain of TCR clone 41796 (TRBV19, TRBJ2-1)
CASSKAGPSSYYEQFF

SEQ ID NO: 83593 - protein, 14 aa, Homo sapiens
  CDR3 for alpha chain variable domain of TCR clone 41797 (TRAV12-3, TRAJ53)
CGATSGGSNYKLTF

SEQ ID NO: 83594 - protein, 13 aa, Homo sapiens
  CDR3 for beta chain variable domain of TCR clone 41797 (TRBV19, TRBJ1-5)
CASSTRDGQPQHF

SEQ ID NO: 83595 - protein, 14 aa, Homo sapiens
  CDR3 for alpha chain variable domain of TCR clone 41798 (TRAV13-1, TRAJ9)
CAASALTGGFKTIF

SEQ ID NO: 83596 - protein, 12 aa, Homo sapiens
  CDR3 for beta chain variable domain of TCR clone 41798 (TRBV20-1, TRBJ1-1)
QCWTVGNAEAFF

SEQ ID NO: 83597 - protein, 16 aa, Homo sapiens
  CDR3 for alpha chain variable domain of TCR clone 41799 (TRAV13-1, TRAJ45)
CAARGSRKGGADGLTF

SEQ ID NO: 83598 - protein, 13 aa, Homo sapiens
  CDR3 for beta chain variable domain of TCR clone 41799 (TRBV12-4, TRBJ2-5)
CASRRRGKETQYF

SEQ ID NO: 83599 - protein, 23 aa, Homo sapiens
  CDR3 for alpha chain variable domain of TCR clone 41800 (TRAV12-1, TRAJ26)
CVVNSWVTMVRILSLVPEPDFPC

SEQ ID NO: 83600 - protein, 13 aa, Homo sapiens
  CDR3 for beta chain variable domain of TCR clone 41800 (TRBV10-3, TRBJ2-7)
CASKLAVNYEQYF

SEQ ID NO: 83601 - protein, 12 aa, Homo sapiens
  CDR3 for alpha chain variable domain of TCR clone 41801 (TRAV29/DV5, TRAJ49)
CAATDTGNQFYF

SEQ ID NO: 83602 - protein, 13 aa, Homo sapiens
  CDR3 for beta chain variable domain of TCR clone 41801 (TRBV12-4, TRBJ1-1)
CASSPGTGFEAFF

SEQ ID NO: 83603 - protein, 15 aa, Homo sapiens
  CDR3 for alpha chain variable domain of TCR clone 41802 (TRAV20, TRAJ40)
CTVQRGTSGTYKYIF

SEQ ID NO: 83604 - protein, 15 aa, Homo sapiens
  CDR3 for beta chain variable domain of TCR clone 41802 (TRBV25-1, TRBJ1-4)
CASSPGDSTNEKLFF

SEQ ID NO: 83605 - protein, 14 aa, Homo sapiens
  CDR3 for alpha chain variable domain of TCR clone 41803 (TRAV27, TRAJ15)
CAGFDNQAGTALIF

SEQ ID NO: 83606 - protein, 11 aa, Homo sapiens
  CDR3 for beta chain variable domain of TCR clone 41803 (TRBV29-1, TRBJ1-1)
CSVEVGTRTVF

SEQ ID NO: 83607 - protein, 13 aa, Homo sapiens
  CDR3 for alpha chain variable domain of TCR clone 41804 (TRAV1-1, TRAJ6)
CAVRAGGSYIPTF

SEQ ID NO: 83608 - protein, 14 aa, Homo sapiens
  CDR3 for beta chain variable domain of TCR clone 41804 (TRBV7-8, TRBJ2-3)
CASSLEAGTDTQYF

SEQ ID NO: 83609 - protein, 15 aa, Homo sapiens
  CDR3 for alpha chain variable domain of TCR clone 41805 (TRAV26-1, TRAJ40)
CIVGVTTSGTYKYIF

SEQ ID NO: 83610 - protein, 12 aa, Homo sapiens
  CDR3 for beta chain variable domain of TCR clone 41805 (TRBV7-9, TRBJ1-4)
CASSTDREKLFF

SEQ ID NO: 83611 - protein, 13 aa, Homo sapiens
  CDR3 for alpha chain variable domain of TCR clone 41806 (TRAV16, TRAJ29)
CAPSRRGNTPLVF

SEQ ID NO: 83612 - protein, 15 aa, Homo sapiens
  CDR3 for beta chain variable domain of TCR clone 41806 (TRBV4-1, TRBJ2-3)
CASSRGQGIPDTQYF

SEQ ID NO: 83613 - protein, 18 aa, Homo sapiens
  CDR3 for alpha chain variable domain of TCR clone 41807 (TRAV21, TRAJ52)
CAVRPSPAGGTSYGKLTF

SEQ ID NO: 83614 - protein, 13 aa, Homo sapiens
  CDR3 for beta chain variable domain of TCR clone 41807 (TRBV13, TRBJ2-5)
CASSPEVGETQYF

SEQ ID NO: 83615 - protein, 17 aa, Homo sapiens
  CDR3 for alpha chain variable domain of TCR clone 41808 (TRAV26-2, TRAJ42)
CILGDVGYGGSQGNLIF

SEQ ID NO: 83616 - protein, 16 aa, Homo sapiens
  CDR3 for beta chain variable domain of TCR clone 41808 (TRBV12-4, TRBJ2-7)
CASSLIGGTGTYEQYF

SEQ ID NO: 83617 - protein, 12 aa, Homo sapiens
  CDR3 for alpha chain variable domain of TCR clone 41809 (TRAV12-1, TRAJ40)
CGFYSGTYKYIF

SEQ ID NO: 83618 - protein, 18 aa, Homo sapiens
  CDR3 for beta chain variable domain of TCR clone 41809 (TRBV12-4, TRBJ2-2)
CASSLVAGTRGRTGELFF

SEQ ID NO: 83619 - protein, 12 aa, Homo sapiens
  CDR3 for alpha chain variable domain of TCR clone 41810 (TRAV13-1, TRAJ49)
CAASPMGNQFYF

SEQ ID NO: 83620 - protein, 17 aa, Homo sapiens
  CDR3 for beta chain variable domain of TCR clone 41810 (TRBV11-2, TRBJ2-1)
CASSLYPPGVKYNEQFF

SEQ ID NO: 83621 - protein, 14 aa, Homo sapiens
  CDR3 for alpha chain variable domain of TCR clone 41811 (TRAV1-2, TRAJ8)
CAVREDTGLQKLVF

SEQ ID NO: 83622 - protein, 16 aa, Homo sapiens
  CDR3 for beta chain variable domain of TCR clone 41811 (TRBV7-3, TRBJ2-2)
CASSLKRGTLSGELFF

SEQ ID NO: 83623 - protein, 14 aa, Homo sapiens
  CDR3 for alpha chain variable domain of TCR clone 41812 (TRAV30, TRAJ33)
CGTVAPRSNYQLIW

SEQ ID NO: 83624 - protein, 11 aa, Homo sapiens
  CDR3 for beta chain variable domain of TCR clone 41812 (TRBV11-2, TRBJ1-1)
CASSINTEAFF

SEQ ID NO: 83625 - protein, 15 aa, Homo sapiens
  CDR3 for alpha chain variable domain of TCR clone 41813 (TRAV26-1, TRAJ23)
CIVRVLNDQGGKLIF

SEQ ID NO: 83626 - protein, 15 aa, Homo sapiens
  CDR3 for beta chain variable domain of TCR clone 41813 (TRBV7-3, TRBJ2-1)
CASSFGQSNYNEQFF

SEQ ID NO: 83627 - protein, 17 aa, Homo sapiens
  CDR3 for alpha chain variable domain of TCR clone 41814 (TRAV3, TRAJ6)
CAVRDGPRAGGSYIPTF

SEQ ID NO: 83628 - protein, 20 aa, Homo sapiens
  CDR3 for beta chain variable domain of TCR clone 41814 (TRBV28, TRBJ2-1)
CASTPIGRSPELAGGNEQFF

SEQ ID NO: 83629 - protein, 18 aa, Homo sapiens
  CDR3 for alpha chain variable domain of TCR clone 41815 (TRAV9-2, TRAJ52)
CALSRHNAGVTSYGKLTF

SEQ ID NO: 83630 - protein, 13 aa, Homo sapiens
  CDR3 for beta chain variable domain of TCR clone 41815 (TRBV7-9, TRBJ1-2)
CASSLKQNYGYTF

SEQ ID NO: 83631 - protein, 12 aa, Homo sapiens
  CDR3 for alpha chain variable domain of TCR clone 41816 (TRAV16, TRAJ10)
CSRTGGGNKLTF

SEQ ID NO: 83632 - protein, 15 aa, Homo sapiens
  CDR3 for beta chain variable domain of TCR clone 41816 (TRBV6-3, TRBJ2-7)
CASSSLGTVFYEQYF

SEQ ID NO: 83633 - protein, 15 aa, Homo sapiens
  CDR3 for alpha chain variable domain of TCR clone 41817 (TRAV38-2/DV8, TRAJ37)
CAYRPGSSNTGKLIF

SEQ ID NO: 83634 - protein, 13 aa, Homo sapiens
  CDR3 for beta chain variable domain of TCR clone 41817 (TRBV7-2, TRBJ2-7)
CASSSPSGSEQYF

SEQ ID NO: 83635 - protein, 12 aa, Homo sapiens
  CDR3 for alpha chain variable domain of TCR clone 41818 (TRAV21, TRAJ11)
CAATSGYSTLTF

SEQ ID NO: 83636 - protein, 14 aa, Homo sapiens
  CDR3 for beta chain variable domain of TCR clone 41818 (TRBV20-1, TRBJ2-7)
CSAAELAGVGEQYF

SEQ ID NO: 83637 - protein, 14 aa, Homo sapiens
  CDR3 for alpha chain variable domain of TCR clone 41819 (TRAV41, TRAJ32)
CCPNYGGATNKLIF

SEQ ID NO: 83638 - protein, 15 aa, Homo sapiens
  CDR3 for beta chain variable domain of TCR clone 41819 (TRBV11-2, TRBJ2-1)
CASSKNRGLIHEQFF

SEQ ID NO: 83639 - protein, 16 aa, Homo sapiens
  CDR3 for alpha chain variable domain of TCR clone 41820 (TRAV30, TRAJ24)
CGTEIVDADSWGKFQF

SEQ ID NO: 83640 - protein, 12 aa, Homo sapiens
  CDR3 for beta chain variable domain of TCR clone 41820 (TRBV5-7, TRBJ2-1)
CASSLDWGEQFF

SEQ ID NO: 83641 - protein, 12 aa, Homo sapiens
  CDR3 for alpha chain variable domain of TCR clone 41821 (TRAV21, TRAJ42)
CAVGGSQGNLIF

SEQ ID NO: 83642 - protein, 13 aa, Homo sapiens
  CDR3 for beta chain variable domain of TCR clone 41821 (TRBV12-4, TRBJ1-1)
CQQSRDRGTEAFF

SEQ ID NO: 83643 - protein, 12 aa, Homo sapiens
  CDR3 for alpha chain variable domain of TCR clone 41822 (TRAV3, TRAJ20)
CAVRDGDYKLSF

SEQ ID NO: 83644 - protein, 15 aa, Homo sapiens
  CDR3 for beta chain variable domain of TCR clone 41822 (TRBV7-9, TRBJ1-4)
CASSARTGGNEKLFF

SEQ ID NO: 83645 - protein, 11 aa, Homo sapiens
  CDR3 for alpha chain variable domain of TCR clone 41823 (TRAV12-1, TRAJ30)
CVVNGQDKIIF

SEQ ID NO: 83646 - protein, 15 aa, Homo sapiens
  CDR3 for beta chain variable domain of TCR clone 41823 (TRBV28, TRBJ2-5)
CASSSGRTIQGTQYF

SEQ ID NO: 83647 - protein, 14 aa, Homo sapiens
  CDR3 for alpha chain variable domain of TCR clone 41824 (TRAV26-1, TRAJ49)
CIVRVPNTGNQFYF

SEQ ID NO: 83648 - protein, 12 aa, Homo sapiens
  CDR3 for beta chain variable domain of TCR clone 41824 (TRBV7-8, TRBJ2-7)
CASSLGDREQYF

SEQ ID NO: 83649 - protein, 10 aa, Homo sapiens
  CDR3 for alpha chain variable domain of TCR clone 41825 (TRAV12-3, TRAJ18)
CAMSAEAQPW

SEQ ID NO: 83650 - protein, 13 aa, Homo sapiens
  CDR3 for beta chain variable domain of TCR clone 41825 (TRBV15, TRBJ1-6)
CATAGGLNSPLHF

SEQ ID NO: 83651 - protein, 13 aa, Homo sapiens
  CDR3 for alpha chain variable domain of TCR clone 41826 (TRAV17, TRAJ34)
CATDLYNTDKLIF

SEQ ID NO: 83652 - protein, 12 aa, Homo sapiens
  CDR3 for beta chain variable domain of TCR clone 41826 (TRBV11-2, TRBJ2-2)
CASSLGGGELFL

SEQ ID NO: 83653 - protein, 12 aa, Homo sapiens
  CDR3 for alpha chain variable domain of TCR clone 41827 (TRAV12-3, TRAJ17)
CAMTLTGNKLTF

SEQ ID NO: 83654 - protein, 14 aa, Homo sapiens
  CDR3 for beta chain variable domain of TCR clone 41827 (TRBV6-3, TRBJ2-7)
CASSYSVRVYEQYF

SEQ ID NO: 83655 - protein, 15 aa, Homo sapiens
  CDR3 for alpha chain variable domain of TCR clone 41828 (TRAV3, TRAJ22)
YAVRDRGGSARQLTF

SEQ ID NO: 83656 - protein, 16 aa, Homo sapiens
  CDR3 for beta chain variable domain of TCR clone 41828 (TRBV5-4, TRBJ2-3)
CASQQPGAGGADTQYF

SEQ ID NO: 83657 - protein, 13 aa, Homo sapiens
  CDR3 for alpha chain variable domain of TCR clone 41829 (TRAV8-3, TRAJ36)
CAAGATGANNLFF

SEQ ID NO: 83658 - protein, 13 aa, Homo sapiens
  CDR3 for beta chain variable domain of TCR clone 41829 (TRBV12-4, TRBJ1-2)
CASSLRQGKGYTF

SEQ ID NO: 83659 - protein, 14 aa, Homo sapiens
  CDR3 for alpha chain variable domain of TCR clone 41830 (TRAV12-2, TRAJ5)
CAVNRSTGRRALTF

SEQ ID NO: 83660 - protein, 12 aa, Homo sapiens
  CDR3 for beta chain variable domain of TCR clone 41830 (TRBV19, TRBJ1-5)
CASSIAQQPKHF

SEQ ID NO: 83661 - protein, 16 aa, Homo sapiens
  CDR3 for alpha chain variable domain of TCR clone 41831 (TRAV16, TRAJ52)
CALSAAGGTSYGKLTF

SEQ ID NO: 83662 - protein, 14 aa, Homo sapiens
  CDR3 for beta chain variable domain of TCR clone 41831 (TRBV7-2, TRBJ2-7)
CASSPKTSFYEQYF

SEQ ID NO: 83663 - protein, 12 aa, Homo sapiens
  CDR3 for alpha chain variable domain of TCR clone 41832 (TRAV20, TRAJ33)
CAVRGSNYQLIW

SEQ ID NO: 83664 - protein, 13 aa, Homo sapiens
  CDR3 for beta chain variable domain of TCR clone 41832 (TRBV4-3, TRBJ1-1)
CASGPTGNTEAFF

SEQ ID NO: 83665 - protein, 18 aa, Homo sapiens
  CDR3 for alpha chain variable domain of TCR clone 41833 (TRAV13-1, TRAJ52)
CAAKNPNPGGTSYGKLTF

SEQ ID NO: 83666 - protein, 15 aa, Homo sapiens
  CDR3 for beta chain variable domain of TCR clone 41833 (TRBV6-1, TRBJ2-3)
CASSERGGITDTQYF

SEQ ID NO: 83667 - protein, 14 aa, Homo sapiens
  CDR3 for alpha chain variable domain of TCR clone 41834 (TRAV38-1, TRAJ40)
CALRPTSGTYKYIF

SEQ ID NO: 83668 - protein, 15 aa, Homo sapiens
  CDR3 for beta chain variable domain of TCR clone 41834 (TRBV19, TRBJ2-7)
CASSPAGSGEALRYF

SEQ ID NO: 83669 - protein, 12 aa, Homo sapiens
  CDR3 for alpha chain variable domain of TCR clone 41835 (TRAV12-3, TRAJ17)
CAMTLTGNKLTF

SEQ ID NO: 83670 - protein, 15 aa, Homo sapiens
  CDR3 for beta chain variable domain of TCR clone 41835 (TRBV20-1, TRBJ2-7)
CSARDRVSGMDERYL

SEQ ID NO: 83671 - protein, 15 aa, Homo sapiens
  CDR3 for alpha chain variable domain of TCR clone 41836 (TRAV8-6, TRAJ9)
CAVSDRDTGGFKAIF

SEQ ID NO: 83672 - protein, 16 aa, Homo sapiens
  CDR3 for beta chain variable domain of TCR clone 41836 (TRBV19, TRBJ2-3)
CASSPEWDRGTDTQYF

SEQ ID NO: 83673 - protein, 12 aa, Homo sapiens
  CDR3 for alpha chain variable domain of TCR clone 41837 (TRAV25, TRAJ11)
CAGYSGYSTLTF

SEQ ID NO: 83674 - protein, 13 aa, Homo sapiens
  CDR3 for beta chain variable domain of TCR clone 41837 (TRBV7-9, TRBJ1-2)
CASSLKQNYGDTF

SEQ ID NO: 83675 - protein, 14 aa, Homo sapiens
  CDR3 for alpha chain variable domain of TCR clone 41838 (TRAV1-2, TRAJ8)
CAVREDTGFQKLVF

SEQ ID NO: 83676 - protein, 12 aa, Homo sapiens
  CDR3 for beta chain variable domain of TCR clone 41838 (TRBV18, TRBJ2-1)
CASSSDEDEQFF

SEQ ID NO: 83677 - protein, 15 aa, Homo sapiens
  CDR3 for alpha chain variable domain of TCR clone 41839 (TRAV25, TRAJ53)
CPTSNSGGSNYKLTF

SEQ ID NO: 83678 - protein, 14 aa, Homo sapiens
  CDR3 for beta chain variable domain of TCR clone 41839 (TRBV11-2, TRBJ2-3)
CSSSRLARTDTQYF

SEQ ID NO: 83679 - protein, 14 aa, Homo sapiens
  CDR3 for alpha chain variable domain of TCR clone 41840 (TRAV23/DV6, TRAJ22)
CAASVSGSARQLTF

SEQ ID NO: 83680 - protein, 13 aa, Homo sapiens
  CDR3 for beta chain variable domain of TCR clone 41840 (TRBV11-2, TRBJ2-5)
CASSRRPSETQYF

SEQ ID NO: 83681 - protein, 14 aa, Homo sapiens
  CDR3 for alpha chain variable domain of TCR clone 41841 (TRAV26-1, TRAJ40)
CIVRLPSGTYKYTF

SEQ ID NO: 83682 - protein, 10 aa, Homo sapiens
  CDR3 for beta chain variable domain of TCR clone 41841 (TRBV15, TRBJ2-7)
AETGGYEQYF

SEQ ID NO: 83683 - protein, 14 aa, Homo sapiens
  CDR3 for alpha chain variable domain of TCR clone 41842 (TRAV20, TRAJ56)
CAMQFGGANSKLTF

SEQ ID NO: 83684 - protein, 14 aa, Homo sapiens
  CDR3 for beta chain variable domain of TCR clone 41842 (TRBV20-1, TRBJ2-7)
CSAKRGRSSYEQYF

SEQ ID NO: 83685 - protein, 14 aa, Homo sapiens
  CDR3 for alpha chain variable domain of TCR clone 41843 (TRAV9-2, TRAJ39)
CALYIYNAGNMLTF

SEQ ID NO: 83686 - protein, 14 aa, Homo sapiens
  CDR3 for beta chain variable domain of TCR clone 41843 (TRBV6-1, TRBJ1-3)
CASVQGGGGYTIYF

SEQ ID NO: 83687 - protein, 14 aa, Homo sapiens
  CDR3 for alpha chain variable domain of TCR clone 41844 (TRAV12-1, TRAJ17)
CVVNYKAAGNKLTF

SEQ ID NO: 83688 - protein, 17 aa, Homo sapiens
  CDR3 for beta chain variable domain of TCR clone 41844 (TRBV7-3, TRBJ2-3)
CASSLMKRMRGADTQYF

SEQ ID NO: 83689 - protein, 12 aa, Homo sapiens
  CDR3 for alpha chain variable domain of TCR clone 41845 (TRAV30, TRAJ43)
CGTEERGNDMRF

SEQ ID NO: 83690 - protein, 13 aa, Homo sapiens
  CDR3 for beta chain variable domain of TCR clone 41845 (TRBV27, TRBJ2-7)
CASSFLQGYEQYF

SEQ ID NO: 83691 - protein, 13 aa, Homo sapiens
  CDR3 for alpha chain variable domain of TCR clone 41846 (TRAV1-2, TRAJ9)
CAALNTGGFKTIF

SEQ ID NO: 83692 - protein, 15 aa, Homo sapiens
  CDR3 for beta chain variable domain of TCR clone 41846 (TRBV7-3, TRBJ2-2)
CASSETGQGTGELFF

SEQ ID NO: 83693 - protein, 13 aa, Homo sapiens
  CDR3 for alpha chain variable domain of TCR clone 41847 (TRAV2, TRAJ40)
CAVVTSGTYKYIF

SEQ ID NO: 83694 - protein, 12 aa, Homo sapiens
  CDR3 for beta chain variable domain of TCR clone 41847 (TRBV11-1, TRBJ1-2)
CASSLWVDTPMA

SEQ ID NO: 83695 - protein, 21 aa, Homo sapiens
  CDR3 for alpha chain variable domain of TCR clone 41848 (TRAV1-2, TRAJ37)
CLLPLCCERFHGSGNTGKLIF

SEQ ID NO: 83696 - protein, 14 aa, Homo sapiens
  CDR3 for beta chain variable domain of TCR clone 41848 (TRBV2, TRBJ2-5)
CASSEVLEQETQYF

SEQ ID NO: 83697 - protein, 14 aa, Homo sapiens
  CDR3 for alpha chain variable domain of TCR clone 41849 (TRAV8-3, TRAJ35)
CAVVPQGFGNVLHR

SEQ ID NO: 83698 - protein, 15 aa, Homo sapiens
  CDR3 for beta chain variable domain of TCR clone 41849 (TRBV6-1, TRBJ2-2)
CASSAGQGYTGELFF

SEQ ID NO: 83699 - protein, 14 aa, Homo sapiens
  CDR3 for alpha chain variable domain of TCR clone 41850 (TRAV27, TRAJ37)
CAGERSSNTGKLIF

SEQ ID NO: 83700 - protein, 15 aa, Homo sapiens
  CDR3 for beta chain variable domain of TCR clone 41850 (TRBV11-3, TRBJ1-6)
CASSLDWGANSPLHS

SEQ ID NO: 83701 - protein, 15 aa, Homo sapiens
  CDR3 for alpha chain variable domain of TCR clone 41851 (TRAV4, )
CLVDIQNPDPAVYQL

SEQ ID NO: 83702 - protein, 15 aa, Homo sapiens
  CDR3 for beta chain variable domain of TCR clone 41851 (TRBV20-1, TRBJ1-5)
CSARVGRVVSQPQHF

SEQ ID NO: 83703 - protein, 17 aa, Homo sapiens
  CDR3 for alpha chain variable domain of TCR clone 41852 (TRAV26-1, TRAJ53)
CIVRVDDSGGSKYKLTF

SEQ ID NO: 83704 - protein, 15 aa, Homo sapiens
  CDR3 for beta chain variable domain of TCR clone 41852 (TRBV7-9, TRBJ1-4)
CASSRTGGFNEKLFF

SEQ ID NO: 83705 - protein, 16 aa, Homo sapiens
  CDR3 for alpha chain variable domain of TCR clone 41853 (TRAV1-2, TRAJ16)
CAPPGFQMARSCSLQG

SEQ ID NO: 83706 - protein, 14 aa, Homo sapiens
  CDR3 for beta chain variable domain of TCR clone 41853 (TRBV7-3, TRBJ1-1)
CASSLKGGNTEAFF

SEQ ID NO: 83707 - protein, 14 aa, Homo sapiens
  CDR3 for alpha chain variable domain of TCR clone 41854 (TRAV29/DV5, TRAJ36)
CAARRKTGANNLFF

SEQ ID NO: 83708 - protein, 12 aa, Homo sapiens
  CDR3 for beta chain variable domain of TCR clone 41854 (TRBV14, TRBJ2-7)
CASSLNQRGQYF

SEQ ID NO: 83709 - protein, 12 aa, Homo sapiens
  CDR3 for alpha chain variable domain of TCR clone 41855 (TRAV26-2, TRAJ21)
CILKGNFNKYYF

SEQ ID NO: 83710 - protein, 14 aa, Homo sapiens
  CDR3 for beta chain variable domain of TCR clone 41855 (TRBV7-9, TRBJ1-1)
CASTPLQSYTEAFF

SEQ ID NO: 83711 - protein, 12 aa, Homo sapiens
  CDR3 for alpha chain variable domain of TCR clone 41856 (TRAV21, TRAJ11)
CAATSGYCTLTF

SEQ ID NO: 83712 - protein, 14 aa, Homo sapiens
  CDR3 for beta chain variable domain of TCR clone 41856 (TRBV20-1, TRBJ2-7)
CSAPELAGVGEQYF

SEQ ID NO: 83713 - protein, 12 aa, Homo sapiens
  CDR3 for alpha chain variable domain of TCR clone 41857 (TRAV17, TRAJ12)
CATLRSSSKLIF

SEQ ID NO: 83714 - protein, 16 aa, Homo sapiens
  CDR3 for beta chain variable domain of TCR clone 41857 (TRBV28, TRBJ2-7)
CASSLFFETGGPEQYF

SEQ ID NO: 83715 - protein, 17 aa, Homo sapiens
  CDR3 for alpha chain variable domain of TCR clone 41858 (TRAV3, TRAJ6)
CAVRDGPRAGGSYIPTF

SEQ ID NO: 83716 - protein, 14 aa, Homo sapiens
  CDR3 for beta chain variable domain of TCR clone 41858 (TRBV11-2, TRBJ2-5)
CASSRTGGIETQYF

SEQ ID NO: 83717 - protein, 15 aa, Homo sapiens
  CDR3 for alpha chain variable domain of TCR clone 41859 (TRAV12-2, TRAJ43)
CAFGMRFGAGTRLTV

SEQ ID NO: 83718 - protein, 17 aa, Homo sapiens
  CDR3 for beta chain variable domain of TCR clone 41859 (TRBV13, TRBJ2-3)
CASSLSRVAGGRNTQYF

SEQ ID NO: 83719 - protein, 14 aa, Homo sapiens
  CDR3 for alpha chain variable domain of TCR clone 41860 (TRAV12-2, TRAJ13)
CAVKKTGGYQKVTF

SEQ ID NO: 83720 - protein, 14 aa, Homo sapiens
  CDR3 for beta chain variable domain of TCR clone 41860 (TRBV28, TRBJ1-1)
CASSESGRGTEAFF

SEQ ID NO: 83721 - protein, 18 aa, Homo sapiens
  CDR3 for alpha chain variable domain of TCR clone 41861 (TRAV13-1, TRAJ52)
CAASKRSAGGTSYGKLTF

SEQ ID NO: 83722 - protein, 13 aa, Homo sapiens
  CDR3 for beta chain variable domain of TCR clone 41861 (TRBV7-3, TRBJ1-1)
CASSQDWGAEAFF

SEQ ID NO: 83723 - protein, 10 aa, Homo sapiens
  CDR3 for alpha chain variable domain of TCR clone 41862 (TRAV12-3, TRAJ49)
CAMNDDQFYF

SEQ ID NO: 83724 - protein, 13 aa, Homo sapiens
  CDR3 for beta chain variable domain of TCR clone 41862 (TRBV12-4, TRBJ1-1)
CASNPGTGLEAFF

SEQ ID NO: 83725 - protein, 10 aa, Homo sapiens
  CDR3 for alpha chain variable domain of TCR clone 41863 (TRAV21, TRAJ31)
CAVDNARLVF

SEQ ID NO: 83726 - protein, 13 aa, Homo sapiens
  CDR3 for beta chain variable domain of TCR clone 41863 (TRBV4-1, TRBJ1-1)
CASSRKMNTEAFF

SEQ ID NO: 83727 - protein, 14 aa, Homo sapiens
  CDR3 for alpha chain variable domain of TCR clone 41864 (TRAV6, TRAJ10)
CALDLTGGGNKLTF

SEQ ID NO: 83728 - protein, 14 aa, Homo sapiens
  CDR3 for beta chain variable domain of TCR clone 41864 (TRBV18, TRBJ2-7)
CASSLAGGPGEQYF

SEQ ID NO: 83729 - protein, 14 aa, Homo sapiens
  CDR3 for alpha chain variable domain of TCR clone 41865 (TRAV1-2, TRAJ6)
CTVSLSGGSYIPTF

SEQ ID NO: 83730 - protein, 15 aa, Homo sapiens
  CDR3 for beta chain variable domain of TCR clone 41865 (TRBV28, TRBJ2-7)
CASSPGGRGFYEQYF

SEQ ID NO: 83731 - protein, 13 aa, Homo sapiens
  CDR3 for alpha chain variable domain of TCR clone 41866 (TRAV21, TRAJ20)
CAVGLRVDYKLSF

SEQ ID NO: 83732 - protein, 12 aa, Homo sapiens
  CDR3 for beta chain variable domain of TCR clone 41866 (TRBV12-4, TRBJ2-5)
CASSSAQETQYF

SEQ ID NO: 83733 - protein, 12 aa, Homo sapiens
  CDR3 for alpha chain variable domain of TCR clone 41867 (TRAV12-1, TRAJ23)
CVVNIPGGKLIF

SEQ ID NO: 83734 - protein, 15 aa, Homo sapiens
  CDR3 for beta chain variable domain of TCR clone 41867 (TRBV7-2, TRBJ2-7)
CASSLVPSGSYEQYF

SEQ ID NO: 83735 - protein, 13 aa, Homo sapiens
  CDR3 for alpha chain variable domain of TCR clone 41868 (TRAV21, TRAJ27)
CAARPGNAGKSTF

SEQ ID NO: 83736 - protein, 15 aa, Homo sapiens
  CDR3 for beta chain variable domain of TCR clone 41868 (TRBV7-2, TRBJ1-2)
CASSPRAGWNYGYTF

SEQ ID NO: 83737 - protein, 13 aa, Homo sapiens
  CDR3 for alpha chain variable domain of TCR clone 41869 (TRAV1-2, TRAJ12)
CAVSIDSSYKLIF

SEQ ID NO: 83738 - protein, 15 aa, Homo sapiens
  CDR3 for beta chain variable domain of TCR clone 41869 (TRBV27, TRBJ2-5)
CASSLIPSGGETQYF

SEQ ID NO: 83739 - protein, 14 aa, Homo sapiens
  CDR3 for alpha chain variable domain of TCR clone 41870 (TRAV12-2, TRAJ53)
CAVKGGGSNYKLTF

SEQ ID NO: 83740 - protein, 15 aa, Homo sapiens
  CDR3 for beta chain variable domain of TCR clone 41870 (TRBV20-1, TRBJ2-7)
CSARDRVSGMDEQYF

SEQ ID NO: 83741 - protein, 14 aa, Homo sapiens
  CDR3 for alpha chain variable domain of TCR clone 41871 (TRAV29/DV5, TRAJ44)
CAAFLVGTASKLTF

SEQ ID NO: 83742 - protein, 15 aa, Homo sapiens
  CDR3 for beta chain variable domain of TCR clone 41871 (TRBV7-3, TRBJ2-2)
CASSETGQGAGELFF

SEQ ID NO: 83743 - protein, 12 aa, Homo sapiens
  CDR3 for alpha chain variable domain of TCR clone 41872 (TRAV8-3, TRAJ41)
CAVALSGYALNL

SEQ ID NO: 83744 - protein, 18 aa, Homo sapiens
  CDR3 for beta chain variable domain of TCR clone 41872 (TRBV20-1, TRBJ2-6)
CSAETTPTHGSGANVLTF

SEQ ID NO: 83745 - protein, 13 aa, Homo sapiens
  CDR3 for alpha chain variable domain of TCR clone 41873 (TRAV27, TRAJ8)
CAGGPTGFQKLVF

SEQ ID NO: 83746 - protein, 15 aa, Homo sapiens
  CDR3 for beta chain variable domain of TCR clone 41873 (TRBV6-1, TRBJ2-7)
CASSESMGDFYEQYY

SEQ ID NO: 83747 - protein, 14 aa, Homo sapiens
  CDR3 for alpha chain variable domain of TCR clone 41874 (TRAV1-2, TRAJ16)
CAVNRFSDGQKLLF

SEQ ID NO: 83748 - protein, 12 aa, Homo sapiens
  CDR3 for beta chain variable domain of TCR clone 41874 (TRBV24-1, TRBJ1-4)
CATSDPNEKLFF

SEQ ID NO: 83749 - protein, 12 aa, Homo sapiens
  CDR3 for alpha chain variable domain of TCR clone 41875 (TRAV30, TRAJ43)
CGTEERGNDMRF

SEQ ID NO: 83750 - protein, 13 aa, Homo sapiens
  CDR3 for beta chain variable domain of TCR clone 41875 (TRBV7-9, TRBJ1-2)
CASSLKQNYGYTF

SEQ ID NO: 83751 - protein, 17 aa, Homo sapiens
  CDR3 for alpha chain variable domain of TCR clone 41876 (TRAV3, TRAJ42)
CAVRDRDYGGSQGNLSF

SEQ ID NO: 83752 - protein, 15 aa, Homo sapiens
  CDR3 for beta chain variable domain of TCR clone 41876 (TRBV6-6, TRBJ2-7)
CASSYSYGGSYEQYF

SEQ ID NO: 83753 - protein, 11 aa, Homo sapiens
  CDR3 for alpha chain variable domain of TCR clone 41877 (TRAV12-3, TRAJ16)
LTGGDGQKLPF

SEQ ID NO: 83754 - protein, 13 aa, Homo sapiens
  CDR3 for beta chain variable domain of TCR clone 41877 (TRBV12-4, TRBJ1-4)
CASAMGHNEKLFF

SEQ ID NO: 83755 - protein, 13 aa, Homo sapiens
  CDR3 for alpha chain variable domain of TCR clone 41878 (TRAV27, TRAJ41)
CAGEGNSGYALNF

SEQ ID NO: 83756 - protein, 16 aa, Homo sapiens
  CDR3 for beta chain variable domain of TCR clone 41878 (TRBV29-1, TRBJ2-7)
CSVEVVGTSGSYERYF

SEQ ID NO: 83757 - protein, 12 aa, Homo sapiens
  CDR3 for alpha chain variable domain of TCR clone 41879 (TRAV16, TRAJ10)
CSRTGGGNKLTF

SEQ ID NO: 83758 - protein, 15 aa, Homo sapiens
  CDR3 for beta chain variable domain of TCR clone 41879 (TRBV9, TRBJ2-1)
CASSLAGSSYNEQFF

SEQ ID NO: 83759 - protein, 16 aa, Homo sapiens
  CDR3 for alpha chain variable domain of TCR clone 41880 (TRAV3, TRAJ6)
YAVRDGMGRRKLHTYI

SEQ ID NO: 83760 - protein, 15 aa, Homo sapiens
  CDR3 for beta chain variable domain of TCR clone 41880 (TRBV5-1, TRBJ2-7)
CASSLGDFTTYEQYF

SEQ ID NO: 83761 - protein, 10 aa, Homo sapiens
  CDR3 for alpha chain variable domain of TCR clone 41881 (TRAV5, TRAJ34)
CAEDTDKLIF

SEQ ID NO: 83762 - protein, 11 aa, Homo sapiens
  CDR3 for beta chain variable domain of TCR clone 41881 (TRBV29-1, TRBJ2-5)
CSEDRTGTQYF

SEQ ID NO: 83763 - protein, 15 aa, Homo sapiens
  CDR3 for alpha chain variable domain of TCR clone 41882 (TRAV8-3, TRAJ27)
CAVGPSKTNAGKSTF

SEQ ID NO: 83764 - protein, 15 aa, Homo sapiens
  CDR3 for beta chain variable domain of TCR clone 41882 (TRBV7-2, TRBJ2-1)
CVSSSGLAGGNEQFF

SEQ ID NO: 83765 - protein, 16 aa, Homo sapiens
  CDR3 for alpha chain variable domain of TCR clone 41883 (TRAV30, TRAJ24)
CGTEIVDADSWGKFQF

SEQ ID NO: 83766 - protein, 12 aa, Homo sapiens
  CDR3 for beta chain variable domain of TCR clone 41883 (TRBV11-2, TRBJ2-1)
CASSPGDNEQFF

SEQ ID NO: 83767 - protein, 18 aa, Homo sapiens
  CDR3 for alpha chain variable domain of TCR clone 41884 (TRAV13-1, TRAJ52)
CAAKNPNDGGTSYGKLTF

SEQ ID NO: 83768 - protein, 15 aa, Homo sapiens
  CDR3 for beta chain variable domain of TCR clone 41884 (TRBV6-1, TRBJ2-3)
CASSERGGITDTQYF

SEQ ID NO: 83769 - protein, 13 aa, Homo sapiens
  CDR3 for alpha chain variable domain of TCR clone 41885 (TRAV3, TRAJ30)
CAVRDRGDDKFIF

SEQ ID NO: 83770 - protein, 16 aa, Homo sapiens
  CDR3 for beta chain variable domain of TCR clone 41885 (TRBV7-3, TRBJ2-2)
CASSLKRGTLSGELFF

SEQ ID NO: 83771 - protein, 10 aa, Homo sapiens
  CDR3 for alpha chain variable domain of TCR clone 41886 (TRAV23/DV6, TRAJ57)
CAASSTLSQG

SEQ ID NO: 83772 - protein, 12 aa, Homo sapiens
  CDR3 for beta chain variable domain of TCR clone 41886 (TRBV7-8, TRBJ2-7)
CASSLGDREQYF

SEQ ID NO: 83773 - protein, 16 aa, Homo sapiens
  CDR3 for alpha chain variable domain of TCR clone 41887 (TRAV4, TRAJ18)
CCVLLIGGSTLGSLYF

SEQ ID NO: 83774 - protein, 12 aa, Homo sapiens
  CDR3 for beta chain variable domain of TCR clone 41887 (TRBV6-3, TRBJ2-7)
CASSLTPYEQYF

SEQ ID NO: 83775 - protein, 16 aa, Homo sapiens
  CDR3 for alpha chain variable domain of TCR clone 41888 (TRAV1-2, TRAJ10)
CAVRGVLTGGGNKLTF

SEQ ID NO: 83776 - protein, 13 aa, Homo sapiens
  CDR3 for beta chain variable domain of TCR clone 41888 (TRBV19, TRBJ1-2)
CASSVPGQDGYTF

SEQ ID NO: 83777 - protein, 14 aa, Homo sapiens
  CDR3 for alpha chain variable domain of TCR clone 41889 (TRAV12-3, TRAJ10)
SHLPLTGGGNKLTF

SEQ ID NO: 83778 - protein, 14 aa, Homo sapiens
  CDR3 for beta chain variable domain of TCR clone 41889 (TRBV6-1, TRBJ1-3)
RASVQGGGGNTIYF

SEQ ID NO: 83779 - protein, 13 aa, Homo sapiens
  CDR3 for alpha chain variable domain of TCR clone 41890 (TRAV22, TRAJ29)
CALGGSGNTPLVF

SEQ ID NO: 83780 - protein, 13 aa, Homo sapiens
  CDR3 for beta chain variable domain of TCR clone 41890 (TRBV19, TRBJ2-7)
CASRKAGGSEQYF

SEQ ID NO: 83781 - protein, 14 aa, Homo sapiens
  CDR3 for alpha chain variable domain of TCR clone 41891 (TRAV1-2, TRAJ16)
CAVNRFTDGQKLLF

SEQ ID NO: 83782 - protein, 15 aa, Homo sapiens
  CDR3 for beta chain variable domain of TCR clone 41891 (TRBV9, TRBJ1-6)
CASSVAGTGDSPLHF

SEQ ID NO: 83783 - protein, 14 aa, Homo sapiens
  CDR3 for alpha chain variable domain of TCR clone 41892 (TRAV12-1, TRAJ8)
CVVNSNTGFQKLAF

SEQ ID NO: 83784 - protein, 17 aa, Homo sapiens
  CDR3 for beta chain variable domain of TCR clone 41892 (TRBV7-8, TRBJ2-6)
CASSAGTGGAGANVLTF

SEQ ID NO: 83785 - protein, 14 aa, Homo sapiens
  CDR3 for alpha chain variable domain of TCR clone 41893 (TRAV1-2, TRAJ16)
CAVNRFSDGQKLLF

SEQ ID NO: 83786 - protein, 16 aa, Homo sapiens
  CDR3 for beta chain variable domain of TCR clone 41893 (TRBV7-6, TRBJ2-1)
CASSAPGPSSYNEQFF

SEQ ID NO: 83787 - protein, 20 aa, Homo sapiens
  CDR3 for alpha chain variable domain of TCR clone 41894 (TRAV1-2, TRAJ34)
LLKELQMKDSASPNTDKLIF

SEQ ID NO: 83788 - protein, 18 aa, Homo sapiens
  CDR3 for beta chain variable domain of TCR clone 41894 (TRBV11-2, TRBJ2-3)
CASSLGGASRGAPNTQYF

SEQ ID NO: 83789 - protein, 15 aa, Homo sapiens
  CDR3 for alpha chain variable domain of TCR clone 41895 (TRAV26-1, TRAJ22)
CIVRVSFWFCKATDL

SEQ ID NO: 83790 - protein, 13 aa, Homo sapiens
  CDR3 for beta chain variable domain of TCR clone 41895 (TRBV4-2, TRBJ1-1)
CASSQAGNTEAFF

SEQ ID NO: 83791 - protein, 15 aa, Homo sapiens
  CDR3 for alpha chain variable domain of TCR clone 41896 (TRAV25, TRAJ53)
CPTSNSGGSNYKQTF

SEQ ID NO: 83792 - protein, 14 aa, Homo sapiens
  CDR3 for beta chain variable domain of TCR clone 41896 (TRBV11-2, TRBJ2-3)
CASSRLARTDTQYF

SEQ ID NO: 83793 - protein, 15 aa, Homo sapiens
  CDR3 for alpha chain variable domain of TCR clone 41897 (TRAV23/DV6, TRAJ18)
CAASFRGSTLGRLYF

SEQ ID NO: 83794 - protein, 13 aa, Homo sapiens
  CDR3 for beta chain variable domain of TCR clone 41897 (TRBV28, TRBJ2-7)
CAILVRAGGEQYF

SEQ ID NO: 83795 - protein, 17 aa, Homo sapiens
  CDR3 for alpha chain variable domain of TCR clone 41898 (TRAV3, TRAJ6)
CAVGGGPRAGGSYIPTF

SEQ ID NO: 83796 - protein, 14 aa, Homo sapiens
  CDR3 for beta chain variable domain of TCR clone 41898 (TRBV7-2, TRBJ2-7)
CASSPKTSFYEQYF

SEQ ID NO: 83797 - protein, 17 aa, Homo sapiens
  CDR3 for alpha chain variable domain of TCR clone 41899 (TRAV13-1, TRAJ28)
CAASPPYSGAGSYQLTF

SEQ ID NO: 83798 - protein, 15 aa, Homo sapiens
  CDR3 for beta chain variable domain of TCR clone 41899 (TRBV6-3, TRBJ2-2)
CACSFLATLTGELFF

SEQ ID NO: 83799 - protein, 14 aa, Homo sapiens
  CDR3 for alpha chain variable domain of TCR clone 41900 (TRAV26-1, TRAJ38)
CIADNAGNNRKLIL

SEQ ID NO: 83800 - protein, 15 aa, Homo sapiens
  CDR3 for beta chain variable domain of TCR clone 41900 (TRBV7-6, TRBJ1-4)
CASSLGAGAGEKLFF

SEQ ID NO: 83801 - protein, 19 aa, Homo sapiens
  CDR3 for alpha chain variable domain of TCR clone 41901 (TRAV2, TRAJ20)
ILQVREADAAVYRDCKLSF

SEQ ID NO: 83802 - protein, 16 aa, Homo sapiens
  CDR3 for beta chain variable domain of TCR clone 41901 (TRBV27, TRBJ2-2)
CASSFRGLVRTGELFF

SEQ ID NO: 83803 - protein, 12 aa, Homo sapiens
  CDR3 for alpha chain variable domain of TCR clone 41902 (TRAV13-1, TRAJ31)
CAVRDGNARLMF

SEQ ID NO: 83804 - protein, 18 aa, Homo sapiens
  CDR3 for beta chain variable domain of TCR clone 41902 (TRBV7-2, TRBJ2-3)
CASSLKREGSGITDTQYF

SEQ ID NO: 83805 - protein, 13 aa, Homo sapiens
  CDR3 for alpha chain variable domain of TCR clone 41903 (TRAV8-4, TRAJ10)
CAASTGGGNKLTF

SEQ ID NO: 83806 - protein, 12 aa, Homo sapiens
  CDR3 for beta chain variable domain of TCR clone 41903 (TRBV3-1, TRBJ2-1)
CASSQGSSGQFF

SEQ ID NO: 83807 - protein, 18 aa, Homo sapiens
  CDR3 for alpha chain variable domain of TCR clone 41904 (TRAV13-1, TRAJ52)
CAASKRSAGGTSYGKLTF

SEQ ID NO: 83808 - protein, 13 aa, Homo sapiens
  CDR3 for beta chain variable domain of TCR clone 41904 (TRBV12-4, TRBJ1-2)
CASSLRQGKGYIF

SEQ ID NO: 83809 - protein, 16 aa, Homo sapiens
  CDR3 for alpha chain variable domain of TCR clone 41905 (TRAV21, TRAJ37)
CAVRPRGSSNTSKLIF

SEQ ID NO: 83810 - protein, 16 aa, Homo sapiens
  CDR3 for beta chain variable domain of TCR clone 41905 (TRBV2, TRBJ2-1)
CASSVEGSLSYNEQFF

SEQ ID NO: 83811 - protein, 11 aa, Homo sapiens
  CDR3 for alpha chain variable domain of TCR clone 41906 (TRAV1-2, TRAJ31)
CAVNNNARLMF

SEQ ID NO: 83812 - protein, 15 aa, Homo sapiens
  CDR3 for beta chain variable domain of TCR clone 41906 (TRBV7-9, TRBJ1-6)
CASSSPGRGNSPLHF

SEQ ID NO: 83813 - protein, 14 aa, Homo sapiens
  CDR3 for alpha chain variable domain of TCR clone 41907 (TRAV12-2, TRAJ13)
CAVKKTGGYQKVAF

SEQ ID NO: 83814 - protein, 15 aa, Homo sapiens
  CDR3 for beta chain variable domain of TCR clone 41907 (TRBV9, TRBJ1-6)
CASSVAGTGDSPLHF

SEQ ID NO: 83815 - protein, 11 aa, Homo sapiens
  CDR3 for alpha chain variable domain of TCR clone 41908 (TRAV4, TRAJ31)
CLVGDSARLMF

SEQ ID NO: 83816 - protein, 16 aa, Homo sapiens
  CDR3 for beta chain variable domain of TCR clone 41908 (TRBV7-2, TRBJ2-5)
CASSSKWLSGQETQYF

SEQ ID NO: 83817 - protein, 16 aa, Homo sapiens
  CDR3 for alpha chain variable domain of TCR clone 41909 (TRAV30, TRAJ24)
CGTETVDADSWGKFQF

SEQ ID NO: 83818 - protein, 15 aa, Homo sapiens
  CDR3 for beta chain variable domain of TCR clone 41909 (TRBV20-1, TRBJ2-6)
CSARDRGPGANVLTF

SEQ ID NO: 83819 - protein, 14 aa, Homo sapiens
  CDR3 for alpha chain variable domain of TCR clone 41910 (TRAV1-2, TRAJ8)
GAVREDTGFQKLVF

SEQ ID NO: 83820 - protein, 15 aa, Homo sapiens
  CDR3 for beta chain variable domain of TCR clone 41910 (TRBV6-3, TRBJ2-7)
CASSSPGTVFYEQYF

SEQ ID NO: 83821 - protein, 13 aa, Homo sapiens
  CDR3 for alpha chain variable domain of TCR clone 41911 (TRAV8-6, TRAJ9)
CAVWDTGGFKTIF

SEQ ID NO: 83822 - protein, 14 aa, Homo sapiens
  CDR3 for beta chain variable domain of TCR clone 41911 (TRBV2, TRBJ2-1)
CARSEALIYNEQFF

SEQ ID NO: 83823 - protein, 16 aa, Homo sapiens
  CDR3 for alpha chain variable domain of TCR clone 41912 (TRAV41, TRAJ45)
CAVLMYSGGGADGLTF

SEQ ID NO: 83824 - protein, 14 aa, Homo sapiens
  CDR3 for beta chain variable domain of TCR clone 41912 (TRBV12-4, TRBJ2-7)
CASTFGLSTYEQYF

SEQ ID NO: 83825 - protein, 13 aa, Homo sapiens
  CDR3 for alpha chain variable domain of TCR clone 41913 (TRAV20, TRAJ49)
CAVQASTGNQFYF

SEQ ID NO: 83826 - protein, 14 aa, Homo sapiens
  CDR3 for beta chain variable domain of TCR clone 41913 (TRBV5-1, TRBJ1-1)
CASSLQGASTEAFF

SEQ ID NO: 83827 - protein, 17 aa, Homo sapiens
  CDR3 for alpha chain variable domain of TCR clone 41914 (TRAV3, TRAJ42)
CAVRDRDYGGGQGNLIF

SEQ ID NO: 83828 - protein, 15 aa, Homo sapiens
  CDR3 for beta chain variable domain of TCR clone 41914 (TRBV6-6, TRBJ2-7)
CASSYSYGGSYKQYF

SEQ ID NO: 83829 - protein, 18 aa, Homo sapiens
  CDR3 for alpha chain variable domain of TCR clone 41915 (TRAV13-1, TRAJ52)
CAASKRSAGGTSYGKLTF

SEQ ID NO: 83830 - protein, 15 aa, Homo sapiens
  CDR3 for beta chain variable domain of TCR clone 41915 (TRBV29-1, TRBJ1-2)
CSVVLEAGSNYGYTF

SEQ ID NO: 83831 - protein, 14 aa, Homo sapiens
  CDR3 for alpha chain variable domain of TCR clone 41916 (TRAV8-3, TRAJ9)
CAVGERTGGFKTIF

SEQ ID NO: 83832 - protein, 14 aa, Homo sapiens
  CDR3 for beta chain variable domain of TCR clone 41916 (TRBV19, TRBJ2-7)
CASSMGQGAIEQYF

SEQ ID NO: 83833 - protein, 16 aa, Homo sapiens
  CDR3 for alpha chain variable domain of TCR clone 41917 (TRAV13-1, TRAJ37)
CAASSLGSSNTGKLIF

SEQ ID NO: 83834 - protein, 13 aa, Homo sapiens
  CDR3 for beta chain variable domain of TCR clone 41917 (TRBV12-4, TRBJ1-2)
CASSLRQGKGYTF

SEQ ID NO: 83835 - protein, 12 aa, Homo sapiens
  CDR3 for alpha chain variable domain of TCR clone 41918 (TRAV8-3, TRAJ45)
CASSYSGEVLTD

SEQ ID NO: 83836 - protein, 13 aa, Homo sapiens
  CDR3 for beta chain variable domain of TCR clone 41918 (TRBV10-3, TRBJ2-7)
CASKLAVNYEQYF

SEQ ID NO: 83837 - protein, 14 aa, Homo sapiens
  CDR3 for alpha chain variable domain of TCR clone 41919 (TRAV30, TRAJ33)
CGTVAPRSNYQLIW

SEQ ID NO: 83838 - protein, 14 aa, Homo sapiens
  CDR3 for beta chain variable domain of TCR clone 41919 (TRBV19, TRBJ2-1)
CASKDPSSYNEQFF

SEQ ID NO: 83839 - protein, 15 aa, Homo sapiens
  CDR3 for alpha chain variable domain of TCR clone 41920 (TRAV25, TRAJ52)
CAGRPGSTSYGKLTF

SEQ ID NO: 83840 - protein, 17 aa, Homo sapiens
  CDR3 for beta chain variable domain of TCR clone 41920 (TRBV7-8, TRBJ2-6)
CASSAGTGGAGANVLTF

SEQ ID NO: 83841 - protein, 12 aa, Homo sapiens
  CDR3 for alpha chain variable domain of TCR clone 41921 (TRAV21, TRAJ29)
CAVTSGNTPLVF

SEQ ID NO: 83842 - protein, 15 aa, Homo sapiens
  CDR3 for beta chain variable domain of TCR clone 41921 (TRBV12-4, TRBJ1-2)
CASRLGVAGNYGYAF

SEQ ID NO: 83843 - protein, 11 aa, Homo sapiens
  CDR3 for alpha chain variable domain of TCR clone 41922 (TRAV3, TRAJ21)
CAVGNFNKFYF

SEQ ID NO: 83844 - protein, 17 aa, Homo sapiens
  CDR3 for beta chain variable domain of TCR clone 41922 (TRBV24-1, TRBJ2-1)
CATSGVSTSGTYNEQFF

SEQ ID NO: 83845 - protein, 14 aa, Homo sapiens
  CDR3 for alpha chain variable domain of TCR clone 41923 (TRAV3, TRAJ17)
CAVRDAAAGNKLTF

SEQ ID NO: 83846 - protein, 15 aa, Homo sapiens
  CDR3 for beta chain variable domain of TCR clone 41923 (TRBV9, TRBJ1-6)
CGSSVAGTGDSPLHF

SEQ ID NO: 83847 - protein, 11 aa, Homo sapiens
  CDR3 for alpha chain variable domain of TCR clone 41924 (TRAV12-1, TRAJ40)
CGYSGTYKYIF

SEQ ID NO: 83848 - protein, 18 aa, Homo sapiens
  CDR3 for beta chain variable domain of TCR clone 41924 (TRBV11-2, TRBJ2-3)
CASSLGGASRGAPNTQYF

SEQ ID NO: 83849 - protein, 11 aa, Homo sapiens
  CDR3 for alpha chain variable domain of TCR clone 41925 (TRAV8-6, TRAJ20)
CAVSYDYKLSF

SEQ ID NO: 83850 - protein, 12 aa, Homo sapiens
  CDR3 for beta chain variable domain of TCR clone 41925 (TRBV19, TRBJ1-5)
CASSIAQQPQHF

SEQ ID NO: 83851 - protein, 15 aa, Homo sapiens
  CDR3 for alpha chain variable domain of TCR clone 41926 (TRAV12-3, TRAJ11)
CAMSEENSGYSTLTF

SEQ ID NO: 83852 - protein, 16 aa, Homo sapiens
  CDR3 for beta chain variable domain of TCR clone 41926 (TRBV5-1, TRBJ2-7)
CASNLEGLAGLYEQYF

SEQ ID NO: 83853 - protein, 11 aa, Homo sapiens
  CDR3 for alpha chain variable domain of TCR clone 41927 (TRAV1-1, TRAJ23)
CAVRQGGKLIF

SEQ ID NO: 83854 - protein, 20 aa, Homo sapiens
  CDR3 for beta chain variable domain of TCR clone 41927 (TRBV7-8, TRBJ2-2)
CASSHLFPGPTIHITGERFF

SEQ ID NO: 83855 - protein, 16 aa, Homo sapiens
  CDR3 for alpha chain variable domain of TCR clone 41928 (TRAV8-3, TRAJ42)
CAVGEGNGGSQGNLIF

SEQ ID NO: 83856 - protein, 14 aa, Homo sapiens
  CDR3 for beta chain variable domain of TCR clone 41928 (TRBV7-2, TRBJ2-7)
CASRSQGAAYEQYF

SEQ ID NO: 83857 - protein, 12 aa, Homo sapiens
  CDR3 for alpha chain variable domain of TCR clone 41929 (TRAV36/DV7, TRAJ54)
YAVVRGAQKLVF

SEQ ID NO: 83858 - protein, 14 aa, Homo sapiens
  CDR3 for beta chain variable domain of TCR clone 41929 (TRBV7-3, TRBJ1-1)
CASSLKGGNTEAFF

SEQ ID NO: 83859 - protein, 16 aa, Homo sapiens
  CDR3 for alpha chain variable domain of TCR clone 41930 (TRAV30, TRAJ24)
CGTEIVDADSWGKFQF

SEQ ID NO: 83860 - protein, 11 aa, Homo sapiens
  CDR3 for beta chain variable domain of TCR clone 41930 (TRBV19, TRBJ2-5)
CASSIKETQYF

SEQ ID NO: 83861 - protein, 14 aa, Homo sapiens
  CDR3 for alpha chain variable domain of TCR clone 41931 (TRAV12-2, TRAJ17)
CAALFKAAGNKLTL

SEQ ID NO: 83862 - protein, 16 aa, Homo sapiens
  CDR3 for beta chain variable domain of TCR clone 41931 (TRBV20-1, TRBJ2-2)
CSASASGIPGAGELFF

SEQ ID NO: 83863 - protein, 15 aa, Homo sapiens
  CDR3 for alpha chain variable domain of TCR clone 41932 (TRAV12-3, TRAJ49)
CAMAVTPNTGNQFYF

SEQ ID NO: 83864 - protein, 18 aa, Homo sapiens
  CDR3 for beta chain variable domain of TCR clone 41932 (TRBV4-1, TRBJ1-5)
CASSQDPRGQGLKQPQHF

SEQ ID NO: 83865 - protein, 13 aa, Homo sapiens
  CDR3 for alpha chain variable domain of TCR clone 41933 (TRAV17, TRAJ26)
CATVDNYGQNFVF

SEQ ID NO: 83866 - protein, 16 aa, Homo sapiens
  CDR3 for beta chain variable domain of TCR clone 41933 (TRBV2, TRBJ2-1)
CANSVGGSPSYNEQFF

SEQ ID NO: 83867 - protein, 12 aa, Homo sapiens
  CDR3 for alpha chain variable domain of TCR clone 41934 (TRAV17, TRAJ4)
CAADGGYNKLIF

SEQ ID NO: 83868 - protein, 13 aa, Homo sapiens
  CDR3 for beta chain variable domain of TCR clone 41934 (TRBV29-1, TRBJ2-2)
CSTTGVNTGELFF

SEQ ID NO: 83869 - protein, 12 aa, Homo sapiens
  CDR3 for alpha chain variable domain of TCR clone 41935 (TRAV12-3, TRAJ17)
CAMTLTGNKLTF

SEQ ID NO: 83870 - protein, 13 aa, Homo sapiens
  CDR3 for beta chain variable domain of TCR clone 41935 (TRBV2, TRBJ2-7)
CASSVGGSGEQYF

SEQ ID NO: 83871 - protein, 11 aa, Homo sapiens
  CDR3 for alpha chain variable domain of TCR clone 41936 (TRAV21, TRAJ34)
CAVTNTDKLIF

SEQ ID NO: 83872 - protein, 15 aa, Homo sapiens
  CDR3 for beta chain variable domain of TCR clone 41936 (TRBV27, TRBJ1-1)
CASSPYADPYTEAFF

SEQ ID NO: 83873 - protein, 14 aa, Homo sapiens
  CDR3 for alpha chain variable domain of TCR clone 41937 (TRAV20, TRAJ56)
CAVQFGGANSKLTC

SEQ ID NO: 83874 - protein, 14 aa, Homo sapiens
  CDR3 for beta chain variable domain of TCR clone 41937 (TRBV20-1, TRBJ2-7)
CSAKRGRSSYEQYF

SEQ ID NO: 83875 - protein, 12 aa, Homo sapiens
  CDR3 for alpha chain variable domain of TCR clone 41938 (TRAV13-2, TRAJ8)
CAPWLGFQKLVF

SEQ ID NO: 83876 - protein, 12 aa, Homo sapiens
  CDR3 for beta chain variable domain of TCR clone 41938 (TRBV27, TRBJ2-2)
CASKLFTGELFF

SEQ ID NO: 83877 - protein, 14 aa, Homo sapiens
  CDR3 for alpha chain variable domain of TCR clone 41939 (TRAV1-2, TRAJ8)
CAVREDTGFQKLVF

SEQ ID NO: 83878 - protein, 15 aa, Homo sapiens
  CDR3 for beta chain variable domain of TCR clone 41939 (TRBV19, TRBJ1-6)
CASGTQGAVGSPLHF

SEQ ID NO: 83879 - protein, 17 aa, Homo sapiens
  CDR3 for alpha chain variable domain of TCR clone 41940 (TRAV3, TRAJ6)
CAVRDGPRAGGSYIPTF

SEQ ID NO: 83880 - protein, 20 aa, Homo sapiens
  CDR3 for beta chain variable domain of TCR clone 41940 (TRBV28, TRBJ2-1)
CASTPIGRSPGLARGNEQFF

SEQ ID NO: 83881 - protein, 15 aa, Homo sapiens
  CDR3 for alpha chain variable domain of TCR clone 41941 (TRAV21, TRAJ53)
CATLNSRGSNYKLTF

SEQ ID NO: 83882 - protein, 17 aa, Homo sapiens
  CDR3 for beta chain variable domain of TCR clone 41941 (TRBV20-1, TRBJ2-2)
CSASGSGQGGLTGELFF

SEQ ID NO: 83883 - protein, 12 aa, Homo sapiens
  CDR3 for alpha chain variable domain of TCR clone 41942 (TRAV8-3, TRAJ26)
CAGDNYGQNFVF

SEQ ID NO: 83884 - protein, 15 aa, Homo sapiens
  CDR3 for beta chain variable domain of TCR clone 41942 (TRBV9, TRBJ2-1)
CASRLAGSSYNEQFF

SEQ ID NO: 83885 - protein, 15 aa, Homo sapiens
  CDR3 for alpha chain variable domain of TCR clone 41943 (TRAV26-1, TRAJ40)
FIVRVTTSGTYKYIF

SEQ ID NO: 83886 - protein, 12 aa, Homo sapiens
  CDR3 for beta chain variable domain of TCR clone 41943 (TRBV7-9, TRBJ1-4)
CASSTDREKLFF

SEQ ID NO: 83887 - protein, 13 aa, Homo sapiens
  CDR3 for alpha chain variable domain of TCR clone 41944 (TRAV21, TRAJ27)
CAARPGNAGKSTS

SEQ ID NO: 83888 - protein, 14 aa, Homo sapiens
  CDR3 for beta chain variable domain of TCR clone 41944 (TRBV11-2, TRBJ2-7)
CASSLGAGAYEQYF

SEQ ID NO: 83889 - protein, 13 aa, Homo sapiens
  CDR3 for alpha chain variable domain of TCR clone 41945 (TRAV21, TRAJ20)
CALGLRVDYKLSF

SEQ ID NO: 83890 - protein, 13 aa, Homo sapiens
  CDR3 for beta chain variable domain of TCR clone 41945 (TRBV6-1, TRBJ1-1)
CASSRQGNTEAFF

SEQ ID NO: 83891 - protein, 13 aa, Homo sapiens
  CDR3 for alpha chain variable domain of TCR clone 41946 (TRAV26-1, TRAJ33)
CIVRVEGNYKLIW

SEQ ID NO: 83892 - protein, 16 aa, Homo sapiens
  CDR3 for beta chain variable domain of TCR clone 41946 (TRBV15, TRBJ2-7)
CATSRDRGRRRGEQYF

SEQ ID NO: 83893 - protein, 15 aa, Homo sapiens
  CDR3 for alpha chain variable domain of TCR clone 41947 (TRAV34, TRAJ38)
CGADFTPGNNRKLIW

SEQ ID NO: 83894 - protein, 15 aa, Homo sapiens
  CDR3 for beta chain variable domain of TCR clone 41947 (TRBV9, TRBJ1-6)
CASSVAGTGDSPLHF

SEQ ID NO: 83895 - protein, 12 aa, Homo sapiens
  CDR3 for alpha chain variable domain of TCR clone 41948 (TRAV13-2, TRAJ8)
CAPWLGFQKLVF

SEQ ID NO: 83896 - protein, 15 aa, Homo sapiens
  CDR3 for beta chain variable domain of TCR clone 41948 (TRBV9, TRBJ1-6)
CASSVAGTGDSPLHF

SEQ ID NO: 83897 - protein, 13 aa, Homo sapiens
  CDR3 for alpha chain variable domain of TCR clone 41949 (TRAV25, TRAJ40)
CAGSASGTYKYVF

SEQ ID NO: 83898 - protein, 14 aa, Homo sapiens
  CDR3 for beta chain variable domain of TCR clone 41949 (TRBV7-2, TRBJ2-7)
CASRSQGAAYEQYF

SEQ ID NO: 83899 - protein, 14 aa, Homo sapiens
  CDR3 for alpha chain variable domain of TCR clone 41950 (TRAV12-3, TRAJ9)
CAMSPSTGGFKTIF

SEQ ID NO: 83900 - protein, 12 aa, Homo sapiens
  CDR3 for beta chain variable domain of TCR clone 41950 (TRBV19, TRBJ1-5)
CASSIAQQPQHF

SEQ ID NO: 83901 - protein, 12 aa, Homo sapiens
  CDR3 for alpha chain variable domain of TCR clone 41951 (TRAV17, TRAJ4)
CATDGGYNKLMF

SEQ ID NO: 83902 - protein, 13 aa, Homo sapiens
  CDR3 for beta chain variable domain of TCR clone 41951 (TRBV29-1, TRBJ2-2)
CSTTGVNTGELFF

SEQ ID NO: 83903 - protein, 15 aa, Homo sapiens
  CDR3 for alpha chain variable domain of TCR clone 41952 (TRAV3, TRAJ22)
FAVRDRGGSARQLTF

SEQ ID NO: 83904 - protein, 16 aa, Homo sapiens
  CDR3 for beta chain variable domain of TCR clone 41952 (TRBV5-4, TRBJ2-3)
CASQQPGAGGADTQYF

SEQ ID NO: 83905 - protein, 16 aa, Homo sapiens
  CDR3 for alpha chain variable domain of TCR clone 41953 (TRAV1-2, TRAJ10)
CAVGGVLTGGGDKLTF

SEQ ID NO: 83906 - protein, 12 aa, Homo sapiens
  CDR3 for beta chain variable domain of TCR clone 41953 (TRBV7-8, TRBJ2-7)
CASSLGDREQYF

SEQ ID NO: 83907 - protein, 14 aa, Homo sapiens
  CDR3 for alpha chain variable domain of TCR clone 41954 (TRAV8-2, TRAJ4)
CVVSPSGGYNKLIF

SEQ ID NO: 83908 - protein, 14 aa, Homo sapiens
  CDR3 for beta chain variable domain of TCR clone 41954 (TRBV12-5, TRBJ2-5)
CASGSRTHQETQYF

SEQ ID NO: 83909 - protein, 12 aa, Homo sapiens
  CDR3 for alpha chain variable domain of TCR clone 41955 (TRAV16, TRAJ57)
CVLEGGSEKLVF

SEQ ID NO: 83910 - protein, 12 aa, Homo sapiens
  CDR3 for beta chain variable domain of TCR clone 41955 (TRBV28, TRBJ2-7)
CASSGRPYEQYF

SEQ ID NO: 83911 - protein, 15 aa, Homo sapiens
  CDR3 for alpha chain variable domain of TCR clone 41956 (TRAV26-1, TRAJ40)
CIVRVTTSGTYKYVF

SEQ ID NO: 83912 - protein, 12 aa, Homo sapiens
  CDR3 for beta chain variable domain of TCR clone 41956 (TRBV7-9, TRBJ1-4)
CASSTDREKLFF

SEQ ID NO: 83913 - protein, 16 aa, Homo sapiens
  CDR3 for alpha chain variable domain of TCR clone 41957 (TRAV17, TRAJ28)
CATASVSGAESYQLTF

SEQ ID NO: 83914 - protein, 11 aa, Homo sapiens
  CDR3 for beta chain variable domain of TCR clone 41957 (TRBV7-9, TRBJ2-5)
CASSLGETQYF

SEQ ID NO: 83915 - protein, 15 aa, Homo sapiens
  CDR3 for alpha chain variable domain of TCR clone 41958 (TRAV23/DV6, TRAJ37)
CAAGEGSSNTGQLIF

SEQ ID NO: 83916 - protein, 17 aa, Homo sapiens
  CDR3 for beta chain variable domain of TCR clone 41958 (TRBV20-1, TRBJ2-7)
CSATRAGGVAGVEEQYF

SEQ ID NO: 83917 - protein, 12 aa, Homo sapiens
  CDR3 for alpha chain variable domain of TCR clone 41959 (TRAV12-3, TRAJ17)
CAMTLTGNKLTF

SEQ ID NO: 83918 - protein, 13 aa, Homo sapiens
  CDR3 for beta chain variable domain of TCR clone 41959 (TRBV11-3, TRBJ2-5)
CASSSGLQETQYF

SEQ ID NO: 83919 - protein, 14 aa, Homo sapiens
  CDR3 for alpha chain variable domain of TCR clone 41960 (TRAV4, TRAJ9)
CLVGSGTGGFKTIF

SEQ ID NO: 83920 - protein, 14 aa, Homo sapiens
  CDR3 for beta chain variable domain of TCR clone 41960 (TRBV19, TRBJ2-1)
CASPTFVLSGEQFF

SEQ ID NO: 83921 - protein, 19 aa, Homo sapiens
  CDR3 for alpha chain variable domain of TCR clone 41961 (TRAV26-1, TRAJ52)
CIVRAHRNAGGTSYGKLTF

SEQ ID NO: 83922 - protein, 15 aa, Homo sapiens
  CDR3 for beta chain variable domain of TCR clone 41961 (TRBV12-4, TRBJ2-5)
CACSPPTGLQETQYF

SEQ ID NO: 83923 - protein, 17 aa, Homo sapiens
  CDR3 for alpha chain variable domain of TCR clone 41962 (TRAV13-1, TRAJ52)
CAASSGAGGNSYGKLTF

SEQ ID NO: 83924 - protein, 15 aa, Homo sapiens
  CDR3 for beta chain variable domain of TCR clone 41962 (TRBV2, TRBJ2-1)
CASSELAGSYNEQFF

SEQ ID NO: 83925 - protein, 12 aa, Homo sapiens
  CDR3 for alpha chain variable domain of TCR clone 41963 (TRAV17, TRAJ30)
CATDARDDKIIF

SEQ ID NO: 83926 - protein, 15 aa, Homo sapiens
  CDR3 for beta chain variable domain of TCR clone 41963 (TRBV6-6, TRBJ2-7)
CASSYSYGGSYEQYF

SEQ ID NO: 83927 - protein, 12 aa, Homo sapiens
  CDR3 for alpha chain variable domain of TCR clone 41964 (TRAV17, TRAJ12)
CATLRSSYKLIF

SEQ ID NO: 83928 - protein, 16 aa, Homo sapiens
  CDR3 for beta chain variable domain of TCR clone 41964 (TRBV28, TRBJ2-7)
CASSLFFETGGPEKYF

SEQ ID NO: 83929 - protein, 14 aa, Homo sapiens
  CDR3 for alpha chain variable domain of TCR clone 41965 (TRAV13-2, TRAJ43)
CAEIPTYNNNDMRF

SEQ ID NO: 83930 - protein, 15 aa, Homo sapiens
  CDR3 for beta chain variable domain of TCR clone 41965 (TRBV7-9, TRBJ2-2)
CASGPLYTFPGELFF

SEQ ID NO: 83931 - protein, 13 aa, Homo sapiens
  CDR3 for alpha chain variable domain of TCR clone 41966 (TRAV12-1, TRAJ6)
CVVFPGGSYIPTF

SEQ ID NO: 83932 - protein, 14 aa, Homo sapiens
  CDR3 for beta chain variable domain of TCR clone 41966 (TRBV20-1, TRBJ1-3)
CSASPTGAGNTIYF

SEQ ID NO: 83933 - protein, 13 aa, Homo sapiens
  CDR3 for alpha chain variable domain of TCR clone 41967 (TRAV8-6, TRAJ21)
CAVSPSSLNKFYF

SEQ ID NO: 83934 - protein, 15 aa, Homo sapiens
  CDR3 for beta chain variable domain of TCR clone 41967 (TRBV7-9, TRBJ2-7)
CASSLALAEAYEQYF

SEQ ID NO: 83935 - protein, 11 aa, Homo sapiens
  CDR3 for alpha chain variable domain of TCR clone 41968 (TRAV2, TRAJ13)
CASGGYQKVTF

SEQ ID NO: 83936 - protein, 16 aa, Homo sapiens
  CDR3 for beta chain variable domain of TCR clone 41968 (TRBV6-1, TRBJ2-5)
WASSETLDRGAETQYF

SEQ ID NO: 83937 - protein, 12 aa, Homo sapiens
  CDR3 for alpha chain variable domain of TCR clone 41969 (TRAV12-1, TRAJ40)
CVVYSGTYKYIF

SEQ ID NO: 83938 - protein, 18 aa, Homo sapiens
  CDR3 for beta chain variable domain of TCR clone 41969 (TRBV11-2, TRBJ2-3)
CASSLGGASRGAPNTQYF

SEQ ID NO: 83939 - protein, 14 aa, Homo sapiens
  CDR3 for alpha chain variable domain of TCR clone 41970 (TRAV12-1, TRAJ30)
CVVNIGGRDDKIIF

SEQ ID NO: 83940 - protein, 13 aa, Homo sapiens
  CDR3 for beta chain variable domain of TCR clone 41970 (TRBV12-5, TRBJ2-1)
CASGLGRGHEQFF

SEQ ID NO: 83941 - protein, 13 aa, Homo sapiens
  CDR3 for alpha chain variable domain of TCR clone 41971 (TRAV27, TRAJ6)
CAGGTRGSYIPTF

SEQ ID NO: 83942 - protein, 20 aa, Homo sapiens
  CDR3 for beta chain variable domain of TCR clone 41971 (TRBV7-8, TRBJ2-2)
CASSHLFPGPTIHITGELFF

SEQ ID NO: 83943 - protein, 12 aa, Homo sapiens
  CDR3 for alpha chain variable domain of TCR clone 41972 (TRAV16, TRAJ12)
CALEDSSYKLIF

SEQ ID NO: 83944 - protein, 14 aa, Homo sapiens
  CDR3 for beta chain variable domain of TCR clone 41972 (TRBV12-4, TRBJ1-5)
CAGSPTGPRGGTYF

SEQ ID NO: 83945 - protein, 13 aa, Homo sapiens
  CDR3 for alpha chain variable domain of TCR clone 41973 (TRAV12-3, TRAJ53)
RAMRGGSNYKLTF

SEQ ID NO: 83946 - protein, 15 aa, Homo sapiens
  CDR3 for beta chain variable domain of TCR clone 41973 (TRBV2, TRBJ2-1)
CATQARLVMIGEQFF

SEQ ID NO: 83947 - protein, 14 aa, Homo sapiens
  CDR3 for alpha chain variable domain of TCR clone 41974 (TRAV2, TRAJ8)
CAGRGNTGFQKLVF

SEQ ID NO: 83948 - protein, 13 aa, Homo sapiens
  CDR3 for beta chain variable domain of TCR clone 41974 (TRBV6-5, TRBJ2-7)
CAGRTSGIHEQYF

SEQ ID NO: 83949 - protein, 11 aa, Homo sapiens
  CDR3 for alpha chain variable domain of TCR clone 41975 (TRAV1-1, TRAJ23)
CAVRQGGKLIF

SEQ ID NO: 83950 - protein, 14 aa, Homo sapiens
  CDR3 for beta chain variable domain of TCR clone 41975 (TRBV19, TRBJ2-1)
RASPTFVLSGEQFF

SEQ ID NO: 83951 - protein, 15 aa, Homo sapiens
  CDR3 for alpha chain variable domain of TCR clone 41976 (TRAV3, TRAJ4)
CAVRDGTGGYNKLIF

SEQ ID NO: 83952 - protein, 11 aa, Homo sapiens
  CDR3 for beta chain variable domain of TCR clone 41976 (TRBV11-2, TRBJ2-2)
CASSLPGELFF

SEQ ID NO: 83953 - protein, 14 aa, Homo sapiens
  CDR3 for alpha chain variable domain of TCR clone 41977 (TRAV8-3, TRAJ9)
CAVVYNIGGFKTIF

SEQ ID NO: 83954 - protein, 14 aa, Homo sapiens
  CDR3 for beta chain variable domain of TCR clone 41977 (TRBV7-3, TRBJ2-2)
CASSSGGYTGELFF

SEQ ID NO: 83955 - protein, 14 aa, Homo sapiens
  CDR3 for alpha chain variable domain of TCR clone 41978 (TRAV35, TRAJ33)
CAGSSQDSNYQLIW

SEQ ID NO: 83956 - protein, 15 aa, Homo sapiens
  CDR3 for beta chain variable domain of TCR clone 41978 (TRBV5-1, TRBJ1-4)
FAPAVWKDGNEKLFF

SEQ ID NO: 83957 - protein, 15 aa, Homo sapiens
  CDR3 for alpha chain variable domain of TCR clone 41979 (TRAV26-1, TRAJ29)
CIVRVEGSGNTPLVF

SEQ ID NO: 83958 - protein, 15 aa, Homo sapiens
  CDR3 for beta chain variable domain of TCR clone 41979 (TRBV7-9, TRBJ1-5)
CASTQGHQPNQPQHF

SEQ ID NO: 83959 - protein, 14 aa, Homo sapiens
  CDR3 for alpha chain variable domain of TCR clone 41980 (TRAV1-2, TRAJ16)
CAVNRFSDGQKLLF

SEQ ID NO: 83960 - protein, 17 aa, Homo sapiens
  CDR3 for beta chain variable domain of TCR clone 41980 (TRBV13, TRBJ2-3)
CASSLSGVAGGRNTQYF

SEQ ID NO: 83961 - protein, 12 aa, Homo sapiens
  CDR3 for alpha chain variable domain of TCR clone 41981 (TRAV13-1, TRAJ27)
CAAHTNAGKSTF

SEQ ID NO: 83962 - protein, 14 aa, Homo sapiens
  CDR3 for beta chain variable domain of TCR clone 41981 (TRBV19, TRBJ2-2)
CAGSGQGIAGELFF

SEQ ID NO: 83963 - protein, 14 aa, Homo sapiens
  CDR3 for alpha chain variable domain of TCR clone 41982 (TRAV12-3, TRAJ35)
CAMSLIGFGNVLHC

SEQ ID NO: 83964 - protein, 12 aa, Homo sapiens
  CDR3 for beta chain variable domain of TCR clone 41982 (TRBV12-4, TRBJ1-1)
CASSLAGLEAFL

SEQ ID NO: 83965 - protein, 14 aa, Homo sapiens
  CDR3 for alpha chain variable domain of TCR clone 41983 (TRAV4, TRAJ9)
CLVGSGTGGFKAIF

SEQ ID NO: 83966 - protein, 15 aa, Homo sapiens
  CDR3 for beta chain variable domain of TCR clone 41983 (TRBV7-2, TRBJ2-1)
CASSLASGRVNEQFF

SEQ ID NO: 83967 - protein, 12 aa, Homo sapiens
  CDR3 for alpha chain variable domain of TCR clone 41984 (TRAV36/DV7, TRAJ54)
CAVVRGAQQLVF

SEQ ID NO: 83968 - protein, 14 aa, Homo sapiens
  CDR3 for beta chain variable domain of TCR clone 41984 (TRBV7-3, TRBJ1-1)
CASSLKGGNTEAFF

SEQ ID NO: 83969 - protein, 12 aa, Homo sapiens
  CDR3 for alpha chain variable domain of TCR clone 41985 (TRAV13-2, TRAJ23)
CAERHRGGKLIF

SEQ ID NO: 83970 - protein, 15 aa, Homo sapiens
  CDR3 for beta chain variable domain of TCR clone 41985 (TRBV7-2, TRBJ2-1)
CASSSGLAGGNEQFF

SEQ ID NO: 83971 - protein, 14 aa, Homo sapiens
  CDR3 for alpha chain variable domain of TCR clone 41986 (TRAV2, TRAJ29)
CAVESYSGNTPLVF

SEQ ID NO: 83972 - protein, 13 aa, Homo sapiens
  CDR3 for beta chain variable domain of TCR clone 41986 (TRBV24-1, TRBJ2-2)
CATSDWSTGELFF

SEQ ID NO: 83973 - protein, 13 aa, Homo sapiens
  CDR3 for alpha chain variable domain of TCR clone 41987 (TRAV8-3, TRAJ48)
CAVVPFGNEKLTF

SEQ ID NO: 83974 - protein, 15 aa, Homo sapiens
  CDR3 for beta chain variable domain of TCR clone 41987 (TRBV11-2, TRBJ2-1)
CAISSPSTRYNEQFF

SEQ ID NO: 83975 - protein, 12 aa, Homo sapiens
  CDR3 for alpha chain variable domain of TCR clone 41988 (TRAV21, TRAJ29)
CAVTSGNTPLVF

SEQ ID NO: 83976 - protein, 14 aa, Homo sapiens
  CDR3 for beta chain variable domain of TCR clone 41988 (TRBV28, TRBJ1-3)
CASSLRGKGDTIYF

SEQ ID NO: 83977 - protein, 14 aa, Homo sapiens
  CDR3 for alpha chain variable domain of TCR clone 41989 (TRAV1-2, TRAJ8)
CAVREDTGIQKLVF

SEQ ID NO: 83978 - protein, 15 aa, Homo sapiens
  CDR3 for beta chain variable domain of TCR clone 41989 (TRBV6-3, TRBJ2-7)
CASSSPGTVFYEQYF

SEQ ID NO: 83979 - protein, 12 aa, Homo sapiens
  CDR3 for alpha chain variable domain of TCR clone 41990 (TRAV27, TRAJ35)
CAGADFGNVLHC

SEQ ID NO: 83980 - protein, 12 aa, Homo sapiens
  CDR3 for beta chain variable domain of TCR clone 41990 (TRBV11-2, TRBJ2-2)
CASSLGGGELFF

SEQ ID NO: 83981 - protein, 12 aa, Homo sapiens
  CDR3 for alpha chain variable domain of TCR clone 41991 (TRAV1-1, TRAJ39)
CAVPVGGNMLTF

SEQ ID NO: 83982 - protein, 15 aa, Homo sapiens
  CDR3 for beta chain variable domain of TCR clone 41991 (TRBV19, TRBJ1-6)
CASSTQGAVGSPLHF

SEQ ID NO: 83983 - protein, 12 aa, Homo sapiens
  CDR3 for alpha chain variable domain of TCR clone 41992 (TRAV8-3, TRAJ26)
CAGDNYSQNFVF

SEQ ID NO: 83984 - protein, 15 aa, Homo sapiens
  CDR3 for beta chain variable domain of TCR clone 41992 (TRBV9, TRBJ2-1)
CASSLAGSSYNEQFF

SEQ ID NO: 83985 - protein, 15 aa, Homo sapiens
  CDR3 for alpha chain variable domain of TCR clone 41993 (TRAV17, TRAJ28)
CATVNSGAGSYQLTF

SEQ ID NO: 83986 - protein, 13 aa, Homo sapiens
  CDR3 for beta chain variable domain of TCR clone 41993 (TRBV5-4, TRBJ2-5)
CASSRQEGETQYF

SEQ ID NO: 83987 - protein, 20 aa, Homo sapiens
  CDR3 for alpha chain variable domain of TCR clone 41994 (TRAV12-1, TRAJ42)
SSVIQPPTSVKGGSQGNLIF

SEQ ID NO: 83988 - protein, 18 aa, Homo sapiens
  CDR3 for beta chain variable domain of TCR clone 41994 (TRBV11-2, TRBJ2-3)
CASSLGGASRGAPNTPYF

SEQ ID NO: 83989 - protein, 16 aa, Homo sapiens
  CDR3 for alpha chain variable domain of TCR clone 41995 (TRAV30, TRAJ24)
CGTEIVDADSWGKLQF

SEQ ID NO: 83990 - protein, 15 aa, Homo sapiens
  CDR3 for beta chain variable domain of TCR clone 41995 (TRBV20-1, TRBJ2-7)
CSARDRVSGMDEQYF

SEQ ID NO: 83991 - protein, 15 aa, Homo sapiens
  CDR3 for alpha chain variable domain of TCR clone 41996 (TRAV13-1, TRAJ17)
CAASIERAAGNKLTF

SEQ ID NO: 83992 - protein, 12 aa, Homo sapiens
  CDR3 for beta chain variable domain of TCR clone 41996 (TRBV5-7, TRBJ1-1)
CASGLGRGKAFF

SEQ ID NO: 83993 - protein, 16 aa, Homo sapiens
  CDR3 for alpha chain variable domain of TCR clone 41997 (TRAV12-2, TRAJ18)
CAVTTDRGSTLGRLYF

SEQ ID NO: 83994 - protein, 14 aa, Homo sapiens
  CDR3 for beta chain variable domain of TCR clone 41997 (TRBV19, TRBJ2-1)
CASPTFVLSGEQFF

SEQ ID NO: 83995 - protein, 14 aa, Homo sapiens
  CDR3 for alpha chain variable domain of TCR clone 41998 (TRAV12-2, TRAJ13)
CAVKKTGGYQKVTF

SEQ ID NO: 83996 - protein, 15 aa, Homo sapiens
  CDR3 for beta chain variable domain of TCR clone 41998 (TRBV27, TRBJ2-1)
CASSNGGGSSHEQFF

SEQ ID NO: 83997 - protein, 15 aa, Homo sapiens
  CDR3 for alpha chain variable domain of TCR clone 41999 (TRAV16, TRAJ16)
CALQGGGSDGQKRLF

SEQ ID NO: 83998 - protein, 15 aa, Homo sapiens
  CDR3 for beta chain variable domain of TCR clone 41999 (TRBV20-1, TRBJ2-7)
CSARDRVSGMDEQYF

SEQ ID NO: 83999 - protein, 14 aa, Homo sapiens
  CDR3 for alpha chain variable domain of TCR clone 42000 (TRAV12-3, TRAJ53)
CGATRGGSNYKLTF

SEQ ID NO: 84000 - protein, 13 aa, Homo sapiens
  CDR3 for beta chain variable domain of TCR clone 42000 (TRBV19, TRBJ1-5)
CASSTQDGQPQHF

SEQ ID NO: 84001 - protein, 13 aa, Homo sapiens
  CDR3 for alpha chain variable domain of TCR clone 42001 (TRAV21, TRAJ27)
CAARPGTAGKSTF

SEQ ID NO: 84002 - protein, 13 aa, Homo sapiens
  CDR3 for beta chain variable domain of TCR clone 42001 (TRBV18, TRBJ2-7)
CASQSGGGYEQYF

SEQ ID NO: 84003 - protein, 17 aa, Homo sapiens
  CDR3 for alpha chain variable domain of TCR clone 42002 (TRAV26-1, TRAJ37)
CIVRVITVSSNTGKLIF

SEQ ID NO: 84004 - protein, 15 aa, Homo sapiens
  CDR3 for beta chain variable domain of TCR clone 42002 (TRBV6-3, TRBJ2-7)
CASSSPGTVFYEQYF

SEQ ID NO: 84005 - protein, 13 aa, Homo sapiens
  CDR3 for alpha chain variable domain of TCR clone 42003 (TRAV2, TRAJ40)
CAVVTSGTYKYMF

SEQ ID NO: 84006 - protein, 14 aa, Homo sapiens
  CDR3 for beta chain variable domain of TCR clone 42003 (TRBV19, TRBJ2-1)
CASPTFVLSGEQFF

SEQ ID NO: 84007 - protein, 13 aa, Homo sapiens
  CDR3 for alpha chain variable domain of TCR clone 42004 (TRAV29/DV5, TRAJ43)
CAASRNNNARLMF

SEQ ID NO: 84008 - protein, 15 aa, Homo sapiens
  CDR3 for beta chain variable domain of TCR clone 42004 (TRBV27, TRBJ1-5)
CASSLGTGFDQPQHF

SEQ ID NO: 84009 - protein, 12 aa, Homo sapiens
  CDR3 for alpha chain variable domain of TCR clone 42005 (TRAV13-2, TRAJ23)
CAECHRGGKLIF

SEQ ID NO: 84010 - protein, 13 aa, Homo sapiens
  CDR3 for beta chain variable domain of TCR clone 42005 (TRBV19, TRBJ1-2)
CASSVPGQDGYTF

SEQ ID NO: 84011 - protein, 12 aa, Homo sapiens
  CDR3 for alpha chain variable domain of TCR clone 42006 (TRAV27, TRAJ9)
SAGESGGFKTIF

SEQ ID NO: 84012 - protein, 18 aa, Homo sapiens
  CDR3 for beta chain variable domain of TCR clone 42006 (TRBV10-2, TRBJ2-2)
CISAPAVHRQADAGELFF

SEQ ID NO: 84013 - protein, 18 aa, Homo sapiens
  CDR3 for alpha chain variable domain of TCR clone 42007 (TRAV13-1, TRAJ52)
CAASKRSADGTSYGKLTF

SEQ ID NO: 84014 - protein, 13 aa, Homo sapiens
  CDR3 for beta chain variable domain of TCR clone 42007 (TRBV12-4, TRBJ1-2)
CASSLRQGKGYTF

SEQ ID NO: 84015 - protein, 18 aa, Homo sapiens
  CDR3 for alpha chain variable domain of TCR clone 42008 (TRAV21, TRAJ52)
CAVRPSPAGGTSYGKLTF

SEQ ID NO: 84016 - protein, 16 aa, Homo sapiens
  CDR3 for beta chain variable domain of TCR clone 42008 (TRBV13, TRBJ2-3)
CQRPLQGSGGRNTQYF

SEQ ID NO: 84017 - protein, 13 aa, Homo sapiens
  CDR3 for alpha chain variable domain of TCR clone 42009 (TRAV4, TRAJ42)
CLVGGGSQGNLIF

SEQ ID NO: 84018 - protein, 16 aa, Homo sapiens
  CDR3 for beta chain variable domain of TCR clone 42009 (TRBV5-1, TRBJ2-3)
CASSVQGRVGADTQYF

SEQ ID NO: 84019 - protein, 15 aa, Homo sapiens
  CDR3 for alpha chain variable domain of TCR clone 42010 (TRAV17, TRAJ13)
CATDAGSGGYQKVTF

SEQ ID NO: 84020 - protein, 16 aa, Homo sapiens
  CDR3 for beta chain variable domain of TCR clone 42010 (TRBV11-2, TRBJ2-1)
CQQLIPPGVEYNEQFF

SEQ ID NO: 84021 - protein, 14 aa, Homo sapiens
  CDR3 for alpha chain variable domain of TCR clone 42011 (TRAV35, TRAJ42)
CAGRYGGSQGNLIF

SEQ ID NO: 84022 - protein, 15 aa, Homo sapiens
  CDR3 for beta chain variable domain of TCR clone 42011 (TRBV7-9, TRBJ2-1)
CASSLGWGRSNEQFF

SEQ ID NO: 84023 - protein, 14 aa, Homo sapiens
  CDR3 for alpha chain variable domain of TCR clone 42012 (TRAV1-2, TRAJ37)
CAVRSKSNTGKLIF

SEQ ID NO: 84024 - protein, 14 aa, Homo sapiens
  CDR3 for beta chain variable domain of TCR clone 42012 (TRBV6-3, TRBJ1-2)
CANSEGGGSYGYTF

SEQ ID NO: 84025 - protein, 13 aa, Homo sapiens
  CDR3 for alpha chain variable domain of TCR clone 42013 (TRAV35, TRAJ22)
CAGLSGSARQLTF

SEQ ID NO: 84026 - protein, 16 aa, Homo sapiens
  CDR3 for beta chain variable domain of TCR clone 42013 (TRBV7-9, TRBJ2-1)
CASSLVLTGQGNEQLF

SEQ ID NO: 84027 - protein, 14 aa, Homo sapiens
  CDR3 for alpha chain variable domain of TCR clone 42014 (TRAV26-1, TRAJ34)
CIVRESYNTDKLIF

SEQ ID NO: 84028 - protein, 13 aa, Homo sapiens
  CDR3 for beta chain variable domain of TCR clone 42014 (TRBV19, TRBJ2-1)
CATSRGVYNKQFF

SEQ ID NO: 84029 - protein, 13 aa, Homo sapiens
  CDR3 for alpha chain variable domain of TCR clone 42015 (TRAV20, TRAJ31)
CAVQAIGGAGLMF

SEQ ID NO: 84030 - protein, 14 aa, Homo sapiens
  CDR3 for beta chain variable domain of TCR clone 42015 (TRBV2, TRBJ1-5)
CASSGTVSNQPQHF

SEQ ID NO: 84031 - protein, 11 aa, Homo sapiens
  CDR3 for alpha chain variable domain of TCR clone 42016 (TRAV1-2, TRAJ31)
CVVNNNARLMF

SEQ ID NO: 84032 - protein, 15 aa, Homo sapiens
  CDR3 for beta chain variable domain of TCR clone 42016 (TRBV28, TRBJ2-1)
CASSIIAGGRSEQFF

SEQ ID NO: 84033 - protein, 16 aa, Homo sapiens
  CDR3 for alpha chain variable domain of TCR clone 42017 (TRAV17, TRAJ22)
CATGPISSGSARQLTF

SEQ ID NO: 84034 - protein, 13 aa, Homo sapiens
  CDR3 for beta chain variable domain of TCR clone 42017 (TRBV11-2, TRBJ2-1)
CASSLGLAGGRSF

SEQ ID NO: 84035 - protein, 14 aa, Homo sapiens
  CDR3 for alpha chain variable domain of TCR clone 42018 (TRAV35, TRAJ34)
CAGRGTPTSPSLGL

SEQ ID NO: 84036 - protein, 13 aa, Homo sapiens
  CDR3 for beta chain variable domain of TCR clone 42018 (TRBV19, TRBJ2-7)
CASSIDRTYEQYF

SEQ ID NO: 84037 - protein, 15 aa, Homo sapiens
  CDR3 for alpha chain variable domain of TCR clone 42019 (TRAV12-3, TRAJ6)
CAMSATTGGSYIPTF

SEQ ID NO: 84038 - protein, 16 aa, Homo sapiens
  CDR3 for beta chain variable domain of TCR clone 42019 (TRBV12-4, TRBJ2-1)
CASSAVGQGNGDEQFF

SEQ ID NO: 84039 - protein, 14 aa, Homo sapiens
  CDR3 for alpha chain variable domain of TCR clone 42020 (TRAV3, TRAJ9)
CAVRLNTGGFKTIF

SEQ ID NO: 84040 - protein, 15 aa, Homo sapiens
  CDR3 for beta chain variable domain of TCR clone 42020 (TRBV7-2, TRBJ2-1)
CASSLASGRVDEQFF

SEQ ID NO: 84041 - protein, 15 aa, Homo sapiens
  CDR3 for alpha chain variable domain of TCR clone 42021 (TRAV8-3, TRAJ23)
CAVGDRYNQGGKLIF

SEQ ID NO: 84042 - protein, 22 aa, Homo sapiens
  CDR3 for beta chain variable domain of TCR clone 42021 (TRBV29-1, TRBJ2-5)
TVSDMSPEDSSIYLCSAGTQYF

SEQ ID NO: 84043 - protein, 14 aa, Homo sapiens
  CDR3 for alpha chain variable domain of TCR clone 42022 (TRAV12-3, TRAJ10)
SHLPLTGGGNKLTF

SEQ ID NO: 84044 - protein, 13 aa, Homo sapiens
  CDR3 for beta chain variable domain of TCR clone 42022 (TRBV6-3, TRBJ2-1)
CASSYDNYNEQFF

SEQ ID NO: 84045 - protein, 14 aa, Homo sapiens
  CDR3 for alpha chain variable domain of TCR clone 42023 (TRAV1-2, TRAJ29)
CAVRGLTSATPLVF

SEQ ID NO: 84046 - protein, 14 aa, Homo sapiens
  CDR3 for beta chain variable domain of TCR clone 42023 (TRBV3-1, TRBJ2-5)
CASSQGPDQETQYF

SEQ ID NO: 84047 - protein, 12 aa, Homo sapiens
  CDR3 for alpha chain variable domain of TCR clone 42024 (TRAV13-1, TRAJ21)
CAAKEGFNKFYF

SEQ ID NO: 84048 - protein, 15 aa, Homo sapiens
  CDR3 for beta chain variable domain of TCR clone 42024 (TRBV7-3, TRBJ2-1)
CASSLSSGSFDEQFF

SEQ ID NO: 84049 - protein, 14 aa, Homo sapiens
  CDR3 for alpha chain variable domain of TCR clone 42025 (TRAV1-2, TRAJ16)
CAVNRFSDGQKLLF

SEQ ID NO: 84050 - protein, 13 aa, Homo sapiens
  CDR3 for beta chain variable domain of TCR clone 42025 (TRBV4-1, TRBJ2-1)
CASGQAGGDEQFF

SEQ ID NO: 84051 - protein, 15 aa, Homo sapiens
  CDR3 for alpha chain variable domain of TCR clone 42026 (TRAV26-1, TRAJ29)
CIVRLEGSGNTPLVF

SEQ ID NO: 84052 - protein, 15 aa, Homo sapiens
  CDR3 for beta chain variable domain of TCR clone 42026 (TRBV7-9, TRBJ1-5)
CASSQGHQPNQPQHF

SEQ ID NO: 84053 - protein, 10 aa, Homo sapiens
  CDR3 for alpha chain variable domain of TCR clone 42027 (TRAV12-3, TRAJ34)
CAMSADKLIL

SEQ ID NO: 84054 - protein, 15 aa, Homo sapiens
  CDR3 for beta chain variable domain of TCR clone 42027 (TRBV27, TRBJ2-1)
CASSNGGGSSNEQFF

SEQ ID NO: 84055 - protein, 11 aa, Homo sapiens
  CDR3 for alpha chain variable domain of TCR clone 42028 (TRAV12-3, TRAJ43)
CAMSVSNDMRF

SEQ ID NO: 84056 - protein, 15 aa, Homo sapiens
  CDR3 for beta chain variable domain of TCR clone 42028 (TRBV4-3, TRBJ2-2)
CASSQGQGGTGELFF

SEQ ID NO: 84057 - protein, 11 aa, Homo sapiens
  CDR3 for alpha chain variable domain of TCR clone 42029 (TRAV26-2, TRAJ8)
CILTGFRKLVF

SEQ ID NO: 84058 - protein, 19 aa, Homo sapiens
  CDR3 for beta chain variable domain of TCR clone 42029 (TRBV20-1, TRBJ2-1)
CSARGETSGNSPQIDEQFF

SEQ ID NO: 84059 - protein, 14 aa, Homo sapiens
  CDR3 for alpha chain variable domain of TCR clone 42030 (TRAV4, TRAJ17)
CLVGDMAAGNKLTF

SEQ ID NO: 84060 - protein, 14 aa, Homo sapiens
  CDR3 for beta chain variable domain of TCR clone 42030 (TRBV7-6, TRBJ2-3)
CASSLGTVTDTQYL

SEQ ID NO: 84061 - protein, 12 aa, Homo sapiens
  CDR3 for alpha chain variable domain of TCR clone 42031 (TRAV29/DV5, TRAJ49)
CAATDTGNQFYF

SEQ ID NO: 84062 - protein, 12 aa, Homo sapiens
  CDR3 for beta chain variable domain of TCR clone 42031 (TRBV12-4, TRBJ2-7)
CASSLGGYEQYL

SEQ ID NO: 84063 - protein, 11 aa, Homo sapiens
  CDR3 for alpha chain variable domain of TCR clone 42032 (TRAV12-1, TRAJ21)
CVVNNFNKFYF

SEQ ID NO: 84064 - protein, 17 aa, Homo sapiens
  CDR3 for beta chain variable domain of TCR clone 42032 (TRBV7-8, TRBJ2-1)
CAGSPPTGTLAYNEQFF

SEQ ID NO: 84065 - protein, 13 aa, Homo sapiens
  CDR3 for alpha chain variable domain of TCR clone 42033 (TRAV36/DV7, TRAJ54)
CAVDIQGAQKLVF

SEQ ID NO: 84066 - protein, 14 aa, Homo sapiens
  CDR3 for beta chain variable domain of TCR clone 42033 (TRBV19, TRBJ2-7)
CASNFRDTFTEMYF

SEQ ID NO: 84067 - protein, 14 aa, Homo sapiens
  CDR3 for alpha chain variable domain of TCR clone 42034 (TRAV38-1, TRAJ40)
CDLRPTSGTYKYIF

SEQ ID NO: 84068 - protein, 14 aa, Homo sapiens
  CDR3 for beta chain variable domain of TCR clone 42034 (TRBV25-1, TRBJ1-1)
CASTHLGGNTEAFF

SEQ ID NO: 84069 - protein, 12 aa, Homo sapiens
  CDR3 for alpha chain variable domain of TCR clone 42035 (TRAV3, TRAJ39)
CAVIEWSNMLTF

SEQ ID NO: 84070 - protein, 14 aa, Homo sapiens
  CDR3 for beta chain variable domain of TCR clone 42035 (TRBV7-8, TRBJ2-3)
CASSFPYGQDTQYF

SEQ ID NO: 84071 - protein, 12 aa, Homo sapiens
  CDR3 for alpha chain variable domain of TCR clone 42036 (TRAV29/DV5, TRAJ49)
CAATDTGNQFYF

SEQ ID NO: 84072 - protein, 13 aa, Homo sapiens
  CDR3 for beta chain variable domain of TCR clone 42036 (TRBV20-1, TRBJ1-1)
CSARVGGNTEAFF

SEQ ID NO: 84073 - protein, 11 aa, Homo sapiens
  CDR3 for alpha chain variable domain of TCR clone 42037 (TRAV12-2, TRAJ33)
CAVTSNYQLIW

SEQ ID NO: 84074 - protein, 14 aa, Homo sapiens
  CDR3 for beta chain variable domain of TCR clone 42037 (TRBV12-4, TRBJ2-2)
CASDQGANTGELFF

SEQ ID NO: 84075 - protein, 14 aa, Homo sapiens
  CDR3 for alpha chain variable domain of TCR clone 42038 (TRAV21, TRAJ35)
CAVMPIGFGNVLHC

SEQ ID NO: 84076 - protein, 12 aa, Homo sapiens
  CDR3 for beta chain variable domain of TCR clone 42038 (TRBV7-9, TRBJ2-7)
YASSIKREGQYF

SEQ ID NO: 84077 - protein, 10 aa, Homo sapiens
  CDR3 for alpha chain variable domain of TCR clone 42039 (TRAV36/DV7, TRAJ56)
CAGPAVELTF

SEQ ID NO: 84078 - protein, 13 aa, Homo sapiens
  CDR3 for beta chain variable domain of TCR clone 42039 (TRBV7-9, TRBJ2-7)
CASSFWGSYEQYF

SEQ ID NO: 84079 - protein, 17 aa, Homo sapiens
  CDR3 for alpha chain variable domain of TCR clone 42040 (TRAV1-2, TRAJ22)
CLLPLCCEPGSARQLTF

SEQ ID NO: 84080 - protein, 13 aa, Homo sapiens
  CDR3 for beta chain variable domain of TCR clone 42040 (TRBV4-2, TRBJ1-1)
CASSQAGNTEAFF

SEQ ID NO: 84081 - protein, 15 aa, Homo sapiens
  CDR3 for alpha chain variable domain of TCR clone 42041 (TRAV13-1, TRAJ10)
CAATILTGGGNKLTF

SEQ ID NO: 84082 - protein, 15 aa, Homo sapiens
  CDR3 for beta chain variable domain of TCR clone 42041 (TRBV2, TRBJ2-7)
CASTLLGSGATERYF

SEQ ID NO: 84083 - protein, 16 aa, Homo sapiens
  CDR3 for alpha chain variable domain of TCR clone 42042 (TRAV30, TRAJ24)
CGTEIVDADSWGKFQF

SEQ ID NO: 84084 - protein, 15 aa, Homo sapiens
  CDR3 for beta chain variable domain of TCR clone 42042 (TRBV4-1, TRBJ1-3)
CASSQDLRVGNTIYF

SEQ ID NO: 84085 - protein, 11 aa, Homo sapiens
  CDR3 for alpha chain variable domain of TCR clone 42043 (TRAV2, TRAJ13)
CASGGYQKATF

SEQ ID NO: 84086 - protein, 13 aa, Homo sapiens
  CDR3 for beta chain variable domain of TCR clone 42043 (TRBV24-1, TRBJ2-3)
CATSTGGTDTQYF

SEQ ID NO: 84087 - protein, 11 aa, Homo sapiens
  CDR3 for alpha chain variable domain of TCR clone 42044 (TRAV13-1, TRAJ15)
CAATPGTALIF

SEQ ID NO: 84088 - protein, 13 aa, Homo sapiens
  CDR3 for beta chain variable domain of TCR clone 42044 (TRBV7-2, TRBJ2-1)
CASSLGVYNGQFF

SEQ ID NO: 84089 - protein, 13 aa, Homo sapiens
  CDR3 for alpha chain variable domain of TCR clone 42045 (TRAV12-1, TRAJ16)
CVVNGPDGQKLPF

SEQ ID NO: 84090 - protein, 15 aa, Homo sapiens
  CDR3 for beta chain variable domain of TCR clone 42045 (TRBV6-3, TRBJ2-7)
CASSSPGTVFYEQYF

SEQ ID NO: 84091 - protein, 13 aa, Homo sapiens
  CDR3 for alpha chain variable domain of TCR clone 42046 (TRAV3, TRAJ33)
CAVRDRSNYQLIC

SEQ ID NO: 84092 - protein, 16 aa, Homo sapiens
  CDR3 for beta chain variable domain of TCR clone 42046 (TRBV4-2, TRBJ2-7)
CASSQDRGTSSYEQYF

SEQ ID NO: 84093 - protein, 12 aa, Homo sapiens
  CDR3 for alpha chain variable domain of TCR clone 42047 (TRAV13-1, TRAJ43)
CAAGRFNNDMRF

SEQ ID NO: 84094 - protein, 16 aa, Homo sapiens
  CDR3 for beta chain variable domain of TCR clone 42047 (TRBV4-1, TRBJ2-5)
CASSQTFYGDQETQYF

SEQ ID NO: 84095 - protein, 14 aa, Homo sapiens
  CDR3 for alpha chain variable domain of TCR clone 42048 (TRAV8-2, TRAJ37)
CVVSISGNTGKLIF

SEQ ID NO: 84096 - protein, 13 aa, Homo sapiens
  CDR3 for beta chain variable domain of TCR clone 42048 (TRBV7-2, TRBJ2-2)
CASSLAVTGELFF

SEQ ID NO: 84097 - protein, 18 aa, Homo sapiens
  CDR3 for alpha chain variable domain of TCR clone 42049 (TRAV26-2, TRAJ45)
CILRVNKYSGGGADGLTF

SEQ ID NO: 84098 - protein, 16 aa, Homo sapiens
  CDR3 for beta chain variable domain of TCR clone 42049 (TRBV2, TRBJ1-4)
CASNLLQGATNEKLFF

SEQ ID NO: 84099 - protein, 12 aa, Homo sapiens
  CDR3 for alpha chain variable domain of TCR clone 42050 (TRAV8-3, TRAJ20)
CAVGANDYKLSF

SEQ ID NO: 84100 - protein, 15 aa, Homo sapiens
  CDR3 for beta chain variable domain of TCR clone 42050 (TRBV27, TRBJ2-1)
CASSNGGGSSNEQFF

SEQ ID NO: 84101 - protein, 14 aa, Homo sapiens
  CDR3 for alpha chain variable domain of TCR clone 42051 (TRAV17, TRAJ16)
CATADFSDGQKLLF

SEQ ID NO: 84102 - protein, 12 aa, Homo sapiens
  CDR3 for beta chain variable domain of TCR clone 42051 (TRBV24-1, TRBJ1-1)
CATLYPDTEAFS

SEQ ID NO: 84103 - protein, 15 aa, Homo sapiens
  CDR3 for alpha chain variable domain of TCR clone 42052 (TRAV12-1, TRAJ44)
CVVDTPQGTASKLTF

SEQ ID NO: 84104 - protein, 14 aa, Homo sapiens
  CDR3 for beta chain variable domain of TCR clone 42052 (TRBV7-9, TRBJ2-1)
CASSPRDPLYEQFF

SEQ ID NO: 84105 - protein, 12 aa, Homo sapiens
  CDR3 for alpha chain variable domain of TCR clone 42053 (TRAV12-2, TRAJ10)
WGVTGGGNKLTF

SEQ ID NO: 84106 - protein, 16 aa, Homo sapiens
  CDR3 for beta chain variable domain of TCR clone 42053 (TRBV7-9, TRBJ1-3)
CASSQTSGLRMGTIYF

SEQ ID NO: 84107 - protein, 12 aa, Homo sapiens
  CDR3 for alpha chain variable domain of TCR clone 42054 (TRAV27, TRAJ42)
CAGGGSQGNIIF

SEQ ID NO: 84108 - protein, 13 aa, Homo sapiens
  CDR3 for beta chain variable domain of TCR clone 42054 (TRBV19, TRBJ2-7)
CASSIRSSYEQYF

SEQ ID NO: 84109 - protein, 14 aa, Homo sapiens
  CDR3 for alpha chain variable domain of TCR clone 42055 (TRAV23/DV6, TRAJ40)
CAASLTSGTYNYIF

SEQ ID NO: 84110 - protein, 14 aa, Homo sapiens
  CDR3 for beta chain variable domain of TCR clone 42055 (TRBV5-1, TRBJ2-3)
CASSRGQGGGTQYF

SEQ ID NO: 84111 - protein, 16 aa, Homo sapiens
  CDR3 for alpha chain variable domain of TCR clone 42056 (TRAV27, TRAJ52)
CAGAGAGGTSYGKLTF

SEQ ID NO: 84112 - protein, 17 aa, Homo sapiens
  CDR3 for beta chain variable domain of TCR clone 42056 (TRBV24-1, TRBJ2-3)
CATSDLSSGEDTDTQYF

SEQ ID NO: 84113 - protein, 13 aa, Homo sapiens
  CDR3 for alpha chain variable domain of TCR clone 42057 (TRAV27, TRAJ41)
CAGEGNSGYALNF

SEQ ID NO: 84114 - protein, 13 aa, Homo sapiens
  CDR3 for beta chain variable domain of TCR clone 42057 (TRBV24-1, TRBJ2-7)
CHQPWDSSYEQYF

SEQ ID NO: 84115 - protein, 17 aa, Homo sapiens
  CDR3 for alpha chain variable domain of TCR clone 42058 (TRAV17, TRAJ7)
CATLGRLAFGKGNQVVV

SEQ ID NO: 84116 - protein, 13 aa, Homo sapiens
  CDR3 for beta chain variable domain of TCR clone 42058 (TRBV12-4, TRBJ2-7)
CASSLERVGEQYF

SEQ ID NO: 84117 - protein, 14 aa, Homo sapiens
  CDR3 for alpha chain variable domain of TCR clone 42059 (TRAV30, TRAJ33)
CGTVAPRSNYQLIW

SEQ ID NO: 84118 - protein, 12 aa, Homo sapiens
  CDR3 for beta chain variable domain of TCR clone 42059 (TRBV11-2, TRBJ2-2)
CASSLGGGELFF

SEQ ID NO: 84119 - protein, 10 aa, Homo sapiens
  CDR3 for alpha chain variable domain of TCR clone 42060 (TRAV23/DV6, TRAJ3)
CAATTFTLGG

SEQ ID NO: 84120 - protein, 15 aa, Homo sapiens
  CDR3 for beta chain variable domain of TCR clone 42060 (TRBV19, TRBJ1-6)
CASSTQGAVGSPLHF

SEQ ID NO: 84121 - protein, 13 aa, Homo sapiens
  CDR3 for alpha chain variable domain of TCR clone 42061 (TRAV21, TRAJ27)
CAARPSNAGKSTF

SEQ ID NO: 84122 - protein, 14 aa, Homo sapiens
  CDR3 for beta chain variable domain of TCR clone 42061 (TRBV11-2, TRBJ2-7)
CASSLGAGAYEQYF

SEQ ID NO: 84123 - protein, 13 aa, Homo sapiens
  CDR3 for alpha chain variable domain of TCR clone 42062 (TRAV12-1, TRAJ21)
CVVTLYNFNKFYF

SEQ ID NO: 84124 - protein, 20 aa, Homo sapiens
  CDR3 for beta chain variable domain of TCR clone 42062 (TRBV7-8, TRBJ2-1)
CASSLAYRLAGVRSYNEQFF

SEQ ID NO: 84125 - protein, 14 aa, Homo sapiens
  CDR3 for alpha chain variable domain of TCR clone 42063 (TRAV1-2, TRAJ8)
CAVREDTGFQKLVF

SEQ ID NO: 84126 - protein, 18 aa, Homo sapiens
  CDR3 for beta chain variable domain of TCR clone 42063 (TRBV28, TRBJ2-5)
CASSFPNFGTGGGETQYF

SEQ ID NO: 84127 - protein, 11 aa, Homo sapiens
  CDR3 for alpha chain variable domain of TCR clone 42064 (TRAV27, TRAJ47)
SIVEYGNKLGF

SEQ ID NO: 84128 - protein, 18 aa, Homo sapiens
  CDR3 for beta chain variable domain of TCR clone 42064 (TRBV2, TRBJ2-1)
CASRGLAGGPRTYNEQFF

SEQ ID NO: 84129 - protein, 12 aa, Homo sapiens
  CDR3 for alpha chain variable domain of TCR clone 42065 (TRAV27, TRAJ30)
CAETIGDDKIIF

SEQ ID NO: 84130 - protein, 13 aa, Homo sapiens
  CDR3 for beta chain variable domain of TCR clone 42065 (TRBV11-2, TRBJ1-1)
CASSLGRNTEAFF

SEQ ID NO: 84131 - protein, 14 aa, Homo sapiens
  CDR3 for alpha chain variable domain of TCR clone 42066 (TRAV8-3, TRAJ36)
SAVGPITGANNLFF

SEQ ID NO: 84132 - protein, 15 aa, Homo sapiens
  CDR3 for beta chain variable domain of TCR clone 42066 (TRBV4-1, TRBJ2-1)
CASSQDPGNYNEQFF

SEQ ID NO: 84133 - protein, 13 aa, Homo sapiens
  CDR3 for alpha chain variable domain of TCR clone 42067 (TRAV12-2, TRAJ50)
CAVIVTSYDKVIF

SEQ ID NO: 84134 - protein, 17 aa, Homo sapiens
  CDR3 for beta chain variable domain of TCR clone 42067 (TRBV13, TRBJ2-3)
CASSLSRVAGGRNTQYF

SEQ ID NO: 84135 - protein, 11 aa, Homo sapiens
  CDR3 for alpha chain variable domain of TCR clone 42068 (TRAV17, TRAJ9)
CGFTGGFKTIF

SEQ ID NO: 84136 - protein, 14 aa, Homo sapiens
  CDR3 for beta chain variable domain of TCR clone 42068 (TRBV12-5, TRBJ2-5)
CASGSRTHQETQYF

SEQ ID NO: 84137 - protein, 11 aa, Homo sapiens
  CDR3 for alpha chain variable domain of TCR clone 42069 (TRAV12-3, TRAJ43)
CAMSVSNDMRF

SEQ ID NO: 84138 - protein, 13 aa, Homo sapiens
  CDR3 for beta chain variable domain of TCR clone 42069 (TRBV20-1, TRBJ1-1)
CSAALGGGTEAFF

SEQ ID NO: 84139 - protein, 23 aa, Homo sapiens
  CDR3 for alpha chain variable domain of TCR clone 42070 (TRAV12-2, TRAJ43)
SLLIRDSQPSDSDTYLCAFDMRF

SEQ ID NO: 84140 - protein, 18 aa, Homo sapiens
  CDR3 for beta chain variable domain of TCR clone 42070 (TRBV20-1, TRBJ2-3)
CSASGLAGGPGTTDTQYF

SEQ ID NO: 84141 - protein, 14 aa, Homo sapiens
  CDR3 for alpha chain variable domain of TCR clone 42071 (TRAV1-1, TRAJ35)
CAVRSIGFGNVLHC

SEQ ID NO: 84142 - protein, 14 aa, Homo sapiens
  CDR3 for beta chain variable domain of TCR clone 42071 (TRBV5-6, TRBJ2-7)
CASSGGLSSYEQYF

SEQ ID NO: 84143 - protein, 15 aa, Homo sapiens
  CDR3 for alpha chain variable domain of TCR clone 42072 (TRAV13-2, TRAJ58)
CVTAQKETSGSRLTF

SEQ ID NO: 84144 - protein, 13 aa, Homo sapiens
  CDR3 for beta chain variable domain of TCR clone 42072 (TRBV7-2, TRBJ2-3)
CQQRGLAADTQYF

SEQ ID NO: 84145 - protein, 14 aa, Homo sapiens
  CDR3 for alpha chain variable domain of TCR clone 42073 (TRAV1-1, TRAJ27)
CAVIYSTNAGKSTF

SEQ ID NO: 84146 - protein, 12 aa, Homo sapiens
  CDR3 for beta chain variable domain of TCR clone 42073 (TRBV11-2, TRBJ2-1)
CASSPGNNEQFF

SEQ ID NO: 84147 - protein, 12 aa, Homo sapiens
  CDR3 for alpha chain variable domain of TCR clone 42074 (TRAV17, TRAJ4)
CATDGGYNKLIF

SEQ ID NO: 84148 - protein, 13 aa, Homo sapiens
  CDR3 for beta chain variable domain of TCR clone 42074 (TRBV29-1, TRBJ2-2)
CSTTGVNIGELFF

SEQ ID NO: 84149 - protein, 13 aa, Homo sapiens
  CDR3 for alpha chain variable domain of TCR clone 42075 (TRAV20, TRAJ21)
CAVEGYNFNKFYF

SEQ ID NO: 84150 - protein, 13 aa, Homo sapiens
  CDR3 for beta chain variable domain of TCR clone 42075 (TRBV7-9, TRBJ1-2)
CASSLKQNYGYTF

SEQ ID NO: 84151 - protein, 15 aa, Homo sapiens
  CDR3 for alpha chain variable domain of TCR clone 42076 (TRAV3, TRAJ9)
CAVRARNTGGFKTIF

SEQ ID NO: 84152 - protein, 17 aa, Homo sapiens
  CDR3 for beta chain variable domain of TCR clone 42076 (TRBV7-3, TRBJ2-3)
CASSLMKRMRGADTQYF

SEQ ID NO: 84153 - protein, 12 aa, Homo sapiens
  CDR3 for alpha chain variable domain of TCR clone 42077 (TRAV13-1, TRAJ21)
CAAKEGFNKFYF

SEQ ID NO: 84154 - protein, 14 aa, Homo sapiens
  CDR3 for beta chain variable domain of TCR clone 42077 (TRBV4-3, TRBJ2-2)
CASSQGHVTGEMFF

SEQ ID NO: 84155 - protein, 10 aa, Homo sapiens
  CDR3 for alpha chain variable domain of TCR clone 42078 (TRAV8-2, TRAJ29)
CTGGNTPLVF

SEQ ID NO: 84156 - protein, 17 aa, Homo sapiens
  CDR3 for beta chain variable domain of TCR clone 42078 (TRBV2, TRBJ2-7)
SASSQALTGRDSYEQYF

SEQ ID NO: 84157 - protein, 10 aa, Homo sapiens
  CDR3 for alpha chain variable domain of TCR clone 42079 (TRAV13-1, TRAJ15)
INQAGTALIF

SEQ ID NO: 84158 - protein, 14 aa, Homo sapiens
  CDR3 for beta chain variable domain of TCR clone 42079 (TRBV7-9, TRBJ2-1)
CASSDNSGYSEQFF

SEQ ID NO: 84159 - protein, 14 aa, Homo sapiens
  CDR3 for alpha chain variable domain of TCR clone 42080 (TRAV21, TRAJ37)
CAGKGSSNTGKLIF

SEQ ID NO: 84160 - protein, 14 aa, Homo sapiens
  CDR3 for beta chain variable domain of TCR clone 42080 (TRBV7-2, TRBJ2-1)
CASSRGGARNEQFF

SEQ ID NO: 84161 - protein, 16 aa, Homo sapiens
  CDR3 for alpha chain variable domain of TCR clone 42081 (TRAV26-1, TRAJ37)
CIVRGDGSGNTGELIF

SEQ ID NO: 84162 - protein, 17 aa, Homo sapiens
  CDR3 for beta chain variable domain of TCR clone 42081 (TRBV4-1, TRBJ2-7)
CASSRDPLGVRGGEQYF

SEQ ID NO: 84163 - protein, 14 aa, Homo sapiens
  CDR3 for alpha chain variable domain of TCR clone 42082 (TRAV1-2, TRAJ16)
CAVNRFSDGQKLLF

SEQ ID NO: 84164 - protein, 15 aa, Homo sapiens
  CDR3 for beta chain variable domain of TCR clone 42082 (TRBV4-1, TRBJ2-3)
CASSQVLAGGDTQYF

SEQ ID NO: 84165 - protein, 13 aa, Homo sapiens
  CDR3 for alpha chain variable domain of TCR clone 42083 (TRAV21, TRAJ37)
CAVSSGNTGKLIF

SEQ ID NO: 84166 - protein, 15 aa, Homo sapiens
  CDR3 for beta chain variable domain of TCR clone 42083 (TRBV12-4, TRBJ1-2)
CASSFVNRGNYGYTF

SEQ ID NO: 84167 - protein, 14 aa, Homo sapiens
  CDR3 for alpha chain variable domain of TCR clone 42084 (TRAV13-1, TRAJ35)
CAASKGGFGNVLHC

SEQ ID NO: 84168 - protein, 14 aa, Homo sapiens
  CDR3 for beta chain variable domain of TCR clone 42084 (TRBV7-3, TRBJ2-2)
CASSSGGYTGELFF

SEQ ID NO: 84169 - protein, 13 aa, Homo sapiens
  CDR3 for alpha chain variable domain of TCR clone 42085 (TRAV2, TRAJ40)
CAVVTSGTYKYIC

SEQ ID NO: 84170 - protein, 15 aa, Homo sapiens
  CDR3 for beta chain variable domain of TCR clone 42085 (TRBV11-3, TRBJ2-3)
CASLKDGREGDTQYF

SEQ ID NO: 84171 - protein, 15 aa, Homo sapiens
  CDR3 for alpha chain variable domain of TCR clone 42086 (TRAV27, TRAJ38)
CAARRNAGNNRKLIW

SEQ ID NO: 84172 - protein, 15 aa, Homo sapiens
  CDR3 for beta chain variable domain of TCR clone 42086 (TRBV10-3, TRBJ2-3)
CAISLTSGGTDTQYF

SEQ ID NO: 84173 - protein, 14 aa, Homo sapiens
  CDR3 for alpha chain variable domain of TCR clone 42087 (TRAV1-2, TRAJ16)
CAVNRFSDGQKLLF

SEQ ID NO: 84174 - protein, 15 aa, Homo sapiens
  CDR3 for beta chain variable domain of TCR clone 42087 (TRBV7-9, TRBJ1-6)
CASSSPGRGNSSLHF

SEQ ID NO: 84175 - protein, 16 aa, Homo sapiens
  CDR3 for alpha chain variable domain of TCR clone 42088 (TRAV19, TRAJ53)
CAMIADSGGSNYKLTF

SEQ ID NO: 84176 - protein, 16 aa, Homo sapiens
  CDR3 for beta chain variable domain of TCR clone 42088 (TRBV20-1, TRBJ2-7)
CSARGSVVADIYEQYF

SEQ ID NO: 84177 - protein, 13 aa, Homo sapiens
  CDR3 for alpha chain variable domain of TCR clone 42089 (TRAV13-1, TRAJ5)
CAASDTGRRALTF

SEQ ID NO: 84178 - protein, 14 aa, Homo sapiens
  CDR3 for beta chain variable domain of TCR clone 42089 (TRBV7-8, TRBJ1-2)
CASSPDSLSYGYTF

SEQ ID NO: 84179 - protein, 12 aa, Homo sapiens
  CDR3 for alpha chain variable domain of TCR clone 42090 (TRAV17, TRAJ49)
CATVTTGNQSYF

SEQ ID NO: 84180 - protein, 18 aa, Homo sapiens
  CDR3 for beta chain variable domain of TCR clone 42090 (TRBV11-2, TRBJ2-6)
CASSLNPFLGTGANVLTF

SEQ ID NO: 84181 - protein, 14 aa, Homo sapiens
  CDR3 for alpha chain variable domain of TCR clone 42091 (TRAV17, TRAJ16)
CATADFSDGQKLLF

SEQ ID NO: 84182 - protein, 14 aa, Homo sapiens
  CDR3 for beta chain variable domain of TCR clone 42091 (TRBV19, TRBJ2-1)
CASPTFVLSGEQFF

SEQ ID NO: 84183 - protein, 11 aa, Homo sapiens
  CDR3 for alpha chain variable domain of TCR clone 42092 (TRAV12-3, TRAJ20)
CAMSYDYKLSF

SEQ ID NO: 84184 - protein, 14 aa, Homo sapiens
  CDR3 for beta chain variable domain of TCR clone 42092 (TRBV7-2, TRBJ2-7)
RASSPKTSFYEQYF

SEQ ID NO: 84185 - protein, 14 aa, Homo sapiens
  CDR3 for alpha chain variable domain of TCR clone 42093 (TRAV12-2, TRAJ32)
CAHPESGATNKLIF

SEQ ID NO: 84186 - protein, 14 aa, Homo sapiens
  CDR3 for beta chain variable domain of TCR clone 42093 (TRBV4-2, TRBJ2-3)
CASRETRAPGRQYF

SEQ ID NO: 84187 - protein, 14 aa, Homo sapiens
  CDR3 for alpha chain variable domain of TCR clone 42094 (TRAV1-2, TRAJ8)
CAVREDTGSQKLVF

SEQ ID NO: 84188 - protein, 16 aa, Homo sapiens
  CDR3 for beta chain variable domain of TCR clone 42094 (TRBV28, TRBJ1-4)
CASSPPYRGRSEKLFF

SEQ ID NO: 84189 - protein, 18 aa, Homo sapiens
  CDR3 for alpha chain variable domain of TCR clone 42095 (TRAV9-2, TRAJ52)
CALSRHNAGGTSYGNLTF

SEQ ID NO: 84190 - protein, 13 aa, Homo sapiens
  CDR3 for beta chain variable domain of TCR clone 42095 (TRBV7-9, TRBJ1-2)
CASSLKQNYGYTF

SEQ ID NO: 84191 - protein, 13 aa, Homo sapiens
  CDR3 for alpha chain variable domain of TCR clone 42096 (TRAV27, TRAJ41)
CAGEGNSGYALNF

SEQ ID NO: 84192 - protein, 16 aa, Homo sapiens
  CDR3 for beta chain variable domain of TCR clone 42096 (TRBV7-3, TRBJ2-2)
CASSLKRGTLSGELFF

SEQ ID NO: 84193 - protein, 12 aa, Homo sapiens
  CDR3 for alpha chain variable domain of TCR clone 42097 (TRAV10, TRAJ34)
CVVSGKHRQAHL

SEQ ID NO: 84194 - protein, 14 aa, Homo sapiens
  CDR3 for beta chain variable domain of TCR clone 42097 (TRBV19, TRBJ2-1)
CAIPTFVLSGEQFF

SEQ ID NO: 84195 - protein, 17 aa, Homo sapiens
  CDR3 for alpha chain variable domain of TCR clone 42098 (TRAV12-2, TRAJ52)
CAVNPYAGGTSYGKLTF

SEQ ID NO: 84196 - protein, 16 aa, Homo sapiens
  CDR3 for beta chain variable domain of TCR clone 42098 (TRBV5-5, TRBJ2-2)
RASSGRREGATGELFF

SEQ ID NO: 84197 - protein, 17 aa, Homo sapiens
  CDR3 for alpha chain variable domain of TCR clone 42099 (TRAV3, TRAJ6)
CAVRDGPRAGGSYIPTF

SEQ ID NO: 84198 - protein, 14 aa, Homo sapiens
  CDR3 for beta chain variable domain of TCR clone 42099 (TRBV7-2, TRBJ2-7)
CASTPKTSFYEQYF

SEQ ID NO: 84199 - protein, 15 aa, Homo sapiens
  CDR3 for alpha chain variable domain of TCR clone 42100 (TRAV36/DV7, TRAJ54)
CAAEKPVQGAQKLVF

SEQ ID NO: 84200 - protein, 14 aa, Homo sapiens
  CDR3 for beta chain variable domain of TCR clone 42100 (TRBV4-3, TRBJ2-2)
CASSQGHVTGELFF

SEQ ID NO: 84201 - protein, 14 aa, Homo sapiens
  CDR3 for alpha chain variable domain of TCR clone 42101 (TRAV13-1, TRAJ3)
CAAEGYSSASKIIL

SEQ ID NO: 84202 - protein, 14 aa, Homo sapiens
  CDR3 for beta chain variable domain of TCR clone 42101 (TRBV19, TRBJ2-5)
CASSSSGIQETQYF

SEQ ID NO: 84203 - protein, 16 aa, Homo sapiens
  CDR3 for alpha chain variable domain of TCR clone 42102 (TRAV12-2, TRAJ10)
CAVNRVLTGGGNKLTF

SEQ ID NO: 84204 - protein, 15 aa, Homo sapiens
  CDR3 for beta chain variable domain of TCR clone 42102 (TRBV28, TRBJ2-3)
CASAFQGVSADTQYF

SEQ ID NO: 84205 - protein, 11 aa, Homo sapiens
  CDR3 for alpha chain variable domain of TCR clone 42103 (TRAV12-2, TRAJ33)
CAAGSNYQLIW

SEQ ID NO: 84206 - protein, 14 aa, Homo sapiens
  CDR3 for beta chain variable domain of TCR clone 42103 (TRBV6-1, TRBJ2-2)
CASVEHIESGELFF

SEQ ID NO: 84207 - protein, 15 aa, Homo sapiens
  CDR3 for alpha chain variable domain of TCR clone 42104 (TRAV26-1, TRAJ22)
CIVRVSFWFCKATDL

SEQ ID NO: 84208 - protein, 13 aa, Homo sapiens
  CDR3 for beta chain variable domain of TCR clone 42104 (TRBV7-9, TRBJ1-2)
CARSLKQNYGYTF

SEQ ID NO: 84209 - protein, 14 aa, Homo sapiens
  CDR3 for alpha chain variable domain of TCR clone 42105 (TRAV1-2, TRAJ16)
CAVNRFSDGQKLLF

SEQ ID NO: 84210 - protein, 16 aa, Homo sapiens
  CDR3 for beta chain variable domain of TCR clone 42105 (TRBV15, TRBJ1-2)
CATSRGPRTGGGGYTF

SEQ ID NO: 84211 - protein, 17 aa, Homo sapiens
  CDR3 for alpha chain variable domain of TCR clone 42106 (TRAV3, TRAJ42)
CAVRDRDYGGSQGNLIF

SEQ ID NO: 84212 - protein, 16 aa, Homo sapiens
  CDR3 for beta chain variable domain of TCR clone 42106 (TRBV9, TRBJ2-1)
CASSVGGGGNYNEQLF

SEQ ID NO: 84213 - protein, 15 aa, Homo sapiens
  CDR3 for alpha chain variable domain of TCR clone 42107 (TRAV13-1, TRAJ17)
CAASIERAAGSKLTF

SEQ ID NO: 84214 - protein, 12 aa, Homo sapiens
  CDR3 for beta chain variable domain of TCR clone 42107 (TRBV5-7, TRBJ1-1)
CASSLGRGKAFF

SEQ ID NO: 84215 - protein, 18 aa, Homo sapiens
  CDR3 for alpha chain variable domain of TCR clone 42108 (TRAV12-3, TRAJ52)
CAMNRTNAGGTSYGKLTF

SEQ ID NO: 84216 - protein, 17 aa, Homo sapiens
  CDR3 for beta chain variable domain of TCR clone 42108 (TRBV13, TRBJ2-3)
CASSLSGVAGGRNTQYF

SEQ ID NO: 84217 - protein, 12 aa, Homo sapiens
  CDR3 for alpha chain variable domain of TCR clone 42109 (TRAV2, TRAJ15)
CAVAQAGTALIF

SEQ ID NO: 84218 - protein, 16 aa, Homo sapiens
  CDR3 for beta chain variable domain of TCR clone 42109 (TRBV19, TRBJ2-1)
CASSKAGPSSYNEQFF

SEQ ID NO: 84219 - protein, 11 aa, Homo sapiens
  CDR3 for alpha chain variable domain of TCR clone 42110 (TRAV2, TRAJ21)
CAVFNFNKFYF

SEQ ID NO: 84220 - protein, 14 aa, Homo sapiens
  CDR3 for beta chain variable domain of TCR clone 42110 (TRBV15, TRBJ2-3)
CATRSGTSTDKQYF

SEQ ID NO: 84221 - protein, 13 aa, Homo sapiens
  CDR3 for alpha chain variable domain of TCR clone 42111 (TRAV27, TRAJ6)
CAGGTRGSYIPTF

SEQ ID NO: 84222 - protein, 15 aa, Homo sapiens
  CDR3 for beta chain variable domain of TCR clone 42111 (TRBV11-3, TRBJ1-3)
CASSLSPLVRDTIYF

SEQ ID NO: 84223 - protein, 16 aa, Homo sapiens
  CDR3 for alpha chain variable domain of TCR clone 42112 (TRAV30, TRAJ24)
CGTEIVDADSWGKFQF

SEQ ID NO: 84224 - protein, 14 aa, Homo sapiens
  CDR3 for beta chain variable domain of TCR clone 42112 (TRBV7-6, TRBJ2-1)
CASSLGGGADEQFF

SEQ ID NO: 84225 - protein, 13 aa, Homo sapiens
  CDR3 for alpha chain variable domain of TCR clone 42113 (TRAV23/DV6, TRAJ58)
CAASEIGGSRLTL

SEQ ID NO: 84226 - protein, 15 aa, Homo sapiens
  CDR3 for beta chain variable domain of TCR clone 42113 (TRBV19, TRBJ1-1)
CASTSGQIQNTEAFF

SEQ ID NO: 84227 - protein, 13 aa, Homo sapiens
  CDR3 for alpha chain variable domain of TCR clone 42114 (TRAV8-3, TRAJ36)
CAVGATGANNLFF

SEQ ID NO: 84228 - protein, 15 aa, Homo sapiens
  CDR3 for beta chain variable domain of TCR clone 42114 (TRBV9, TRBJ1-6)
CASSVAGTGDSPLHF

SEQ ID NO: 84229 - protein, 16 aa, Homo sapiens
  CDR3 for alpha chain variable domain of TCR clone 42115 (TRAV3, TRAJ37)
CAVRPHGSGNTGKLIS

SEQ ID NO: 84230 - protein, 16 aa, Homo sapiens
  CDR3 for beta chain variable domain of TCR clone 42115 (TRBV9, TRBJ1-2)
CASSVEEKVSPYGYTF

SEQ ID NO: 84231 - protein, 13 aa, Homo sapiens
  CDR3 for alpha chain variable domain of TCR clone 42116 (TRAV29/DV5, TRAJ31)
CAASRNNNARLMF

SEQ ID NO: 84232 - protein, 13 aa, Homo sapiens
  CDR3 for beta chain variable domain of TCR clone 42116 (TRBV7-2, TRBJ2-4)
CASSREHANSQYF

SEQ ID NO: 84233 - protein, 14 aa, Homo sapiens
  CDR3 for alpha chain variable domain of TCR clone 42117 (TRAV1-2, TRAJ8)
CAVREDTGLQKLVF

SEQ ID NO: 84234 - protein, 13 aa, Homo sapiens
  CDR3 for beta chain variable domain of TCR clone 42117 (TRBV12-4, TRBJ2-5)
CASRKRGKETQYF

SEQ ID NO: 84235 - protein, 11 aa, Homo sapiens
  CDR3 for alpha chain variable domain of TCR clone 42118 (TRAV1-1, TRAJ23)
CAVRQGGKLIF

SEQ ID NO: 84236 - protein, 20 aa, Homo sapiens
  CDR3 for beta chain variable domain of TCR clone 42118 (TRBV7-8, TRBJ2-2)
CPSSHLFPGPTIHITGELFF

SEQ ID NO: 84237 - protein, 16 aa, Homo sapiens
  CDR3 for alpha chain variable domain of TCR clone 42119 (TRAV12-2, TRAJ32)
CAVNLGQGGAANKLIF

SEQ ID NO: 84238 - protein, 15 aa, Homo sapiens
  CDR3 for beta chain variable domain of TCR clone 42119 (TRBV20-1, TRBJ2-7)
CSARGPLAGGREQYF

SEQ ID NO: 84239 - protein, 13 aa, Homo sapiens
  CDR3 for alpha chain variable domain of TCR clone 42120 (TRAV27, TRAJ49)
CAPRTYTGNQFYF

SEQ ID NO: 84240 - protein, 16 aa, Homo sapiens
  CDR3 for beta chain variable domain of TCR clone 42120 (TRBV4-1, TRBJ1-2)
CASSQDAGQVLYGYTF

SEQ ID NO: 84241 - protein, 13 aa, Homo sapiens
  CDR3 for alpha chain variable domain of TCR clone 42121 (TRAV35, TRAJ43)
CAGYQYNNNDMRF

SEQ ID NO: 84242 - protein, 15 aa, Homo sapiens
  CDR3 for beta chain variable domain of TCR clone 42121 (TRBV25-1, TRBJ1-4)
CASSKRIATNEKLFF

SEQ ID NO: 84243 - protein, 13 aa, Homo sapiens
  CDR3 for alpha chain variable domain of TCR clone 42122 (TRAV12-3, TRAJ33)
RAMSVNSNYQLIW

SEQ ID NO: 84244 - protein, 13 aa, Homo sapiens
  CDR3 for beta chain variable domain of TCR clone 42122 (TRBV7-2, TRBJ2-2)
CASSLAVTGELFF

SEQ ID NO: 84245 - protein, 12 aa, Homo sapiens
  CDR3 for alpha chain variable domain of TCR clone 42123 (TRAV17, TRAJ4)
CATDGGYNTLIF

SEQ ID NO: 84246 - protein, 13 aa, Homo sapiens
  CDR3 for beta chain variable domain of TCR clone 42123 (TRBV29-1, TRBJ2-2)
CSTTGVNTGELFF

SEQ ID NO: 84247 - protein, 17 aa, Homo sapiens
  CDR3 for alpha chain variable domain of TCR clone 42124 (TRAV19, TRAJ23)
CALSEAGIYNQGGKLIF

SEQ ID NO: 84248 - protein, 17 aa, Homo sapiens
  CDR3 for beta chain variable domain of TCR clone 42124 (TRBV23-1, TRBJ1-5)
CASSQSRTGGPNQPQHF

SEQ ID NO: 84249 - protein, 13 aa, Homo sapiens
  CDR3 for alpha chain variable domain of TCR clone 42125 (TRAV12-2, TRAJ5)
CREQVTGRRALTF

SEQ ID NO: 84250 - protein, 12 aa, Homo sapiens
  CDR3 for beta chain variable domain of TCR clone 42125 (TRBV19, TRBJ1-5)
CASSIAQQPQHF

SEQ ID NO: 84251 - protein, 14 aa, Homo sapiens
  CDR3 for alpha chain variable domain of TCR clone 42126 (TRAV21, TRAJ37)
CAVKGSSNTGRLIF

SEQ ID NO: 84252 - protein, 14 aa, Homo sapiens
  CDR3 for beta chain variable domain of TCR clone 42126 (TRBV7-2, TRBJ2-1)
CASSRGGTRNEQFF

SEQ ID NO: 84253 - protein, 15 aa, Homo sapiens
  CDR3 for alpha chain variable domain of TCR clone 42127 (TRAV38-2/DV8, TRAJ47)
CAYRSVKGYGNKLVF

SEQ ID NO: 84254 - protein, 15 aa, Homo sapiens
  CDR3 for beta chain variable domain of TCR clone 42127 (TRBV6-6, TRBJ2-7)
CASSYSYGGSYEQYF

SEQ ID NO: 84255 - protein, 12 aa, Homo sapiens
  CDR3 for alpha chain variable domain of TCR clone 42128 (TRAV8-3, TRAJ20)
CAVGANVYKLSF

SEQ ID NO: 84256 - protein, 16 aa, Homo sapiens
  CDR3 for beta chain variable domain of TCR clone 42128 (TRBV19, TRBJ2-2)
CASRSPGTGATGELFF

SEQ ID NO: 84257 - protein, 19 aa, Homo sapiens
  CDR3 for alpha chain variable domain of TCR clone 42129 (TRAV2, TRAJ20)
ILQVRKADAAVYRDCKLSF

SEQ ID NO: 84258 - protein, 13 aa, Homo sapiens
  CDR3 for beta chain variable domain of TCR clone 42129 (TRBV15, TRBJ1-6)
CATSGGLNSPLHF

SEQ ID NO: 84259 - protein, 15 aa, Homo sapiens
  CDR3 for alpha chain variable domain of TCR clone 42130 (TRAV21, TRAJ22)
CAVRLFFWFCKATDL

SEQ ID NO: 84260 - protein, 14 aa, Homo sapiens
  CDR3 for beta chain variable domain of TCR clone 42130 (TRBV19, TRBJ1-5)
CASRAPDSFLSQHL

SEQ ID NO: 84261 - protein, 12 aa, Homo sapiens
  CDR3 for alpha chain variable domain of TCR clone 42131 (TRAV21, TRAJ23)
CAVGPQGGKLIS

SEQ ID NO: 84262 - protein, 13 aa, Homo sapiens
  CDR3 for beta chain variable domain of TCR clone 42131 (TRBV20-1, TRBJ2-7)
CSARTGAGYEQYF

SEQ ID NO: 84263 - protein, 12 aa, Homo sapiens
  CDR3 for alpha chain variable domain of TCR clone 42132 (TRAV16, TRAJ10)
CSRTGGGNKLTF

SEQ ID NO: 84264 - protein, 18 aa, Homo sapiens
  CDR3 for beta chain variable domain of TCR clone 42132 (TRBV25-1, TRBJ2-2)
CHPSLPGDRGRKTGELFF

SEQ ID NO: 84265 - protein, 16 aa, Homo sapiens
  CDR3 for alpha chain variable domain of TCR clone 42133 (TRAV21, TRAJ37)
CAVRTAGSSNTGKLIF

SEQ ID NO: 84266 - protein, 13 aa, Homo sapiens
  CDR3 for beta chain variable domain of TCR clone 42133 (TRBV7-9, TRBJ2-5)
CASLPSGLETQYF

SEQ ID NO: 84267 - protein, 14 aa, Homo sapiens
  CDR3 for alpha chain variable domain of TCR clone 42134 (TRAV12-2, TRAJ13)
CAVKKTGGYQKVTF

SEQ ID NO: 84268 - protein, 12 aa, Homo sapiens
  CDR3 for beta chain variable domain of TCR clone 42134 (TRBV12-4, TRBJ1-2)
CASSFIWMHLRF

SEQ ID NO: 84269 - protein, 12 aa, Homo sapiens
  CDR3 for alpha chain variable domain of TCR clone 42135 (TRAV12-3, TRAJ17)
CAMTLTGNKLTF

SEQ ID NO: 84270 - protein, 14 aa, Homo sapiens
  CDR3 for beta chain variable domain of TCR clone 42135 (TRBV19, TRBJ2-7)
CASTVQGRPYEQYF

SEQ ID NO: 84271 - protein, 13 aa, Homo sapiens
  CDR3 for alpha chain variable domain of TCR clone 42136 (TRAV19, TRAJ41)
CALRANSGYALNF

SEQ ID NO: 84272 - protein, 16 aa, Homo sapiens
  CDR3 for beta chain variable domain of TCR clone 42136 (TRBV5-1, TRBJ2-2)
CASSFGDRPNTGELFF

SEQ ID NO: 84273 - protein, 14 aa, Homo sapiens
  CDR3 for alpha chain variable domain of TCR clone 42137 (TRAV13-1, TRAJ44)
CAAKATGTASKLTF

SEQ ID NO: 84274 - protein, 17 aa, Homo sapiens
  CDR3 for beta chain variable domain of TCR clone 42137 (TRBV7-3, TRBJ2-3)
RASSLRKRMRGADTQYF

SEQ ID NO: 84275 - protein, 14 aa, Homo sapiens
  CDR3 for alpha chain variable domain of TCR clone 42138 (TRAV12-3, TRAJ10)
SHLPLTGGGNKLTF

SEQ ID NO: 84276 - protein, 15 aa, Homo sapiens
  CDR3 for beta chain variable domain of TCR clone 42138 (TRBV24-1, TRBJ2-1)
CATRASGGQYNEQFF

SEQ ID NO: 84277 - protein, 13 aa, Homo sapiens
  CDR3 for alpha chain variable domain of TCR clone 42139 (TRAV21, TRAJ36)
CAVIKTGANNIFF

SEQ ID NO: 84278 - protein, 13 aa, Homo sapiens
  CDR3 for beta chain variable domain of TCR clone 42139 (TRBV29-1, TRBJ2-3)
CSATRGGRDTQYF

SEQ ID NO: 84279 - protein, 13 aa, Homo sapiens
  CDR3 for alpha chain variable domain of TCR clone 42140 (TRAV27, TRAJ53)
CAGQGGSNYKLTF

SEQ ID NO: 84280 - protein, 13 aa, Homo sapiens
  CDR3 for beta chain variable domain of TCR clone 42140 (TRBV29-1, TRBJ1-1)
CSVEAGFGTEAFF

SEQ ID NO: 84281 - protein, 17 aa, Homo sapiens
  CDR3 for alpha chain variable domain of TCR clone 42141 (TRAV8-3, TRAJ34)
CAIPGKLIFGTGTSLQV

SEQ ID NO: 84282 - protein, 15 aa, Homo sapiens
  CDR3 for beta chain variable domain of TCR clone 42141 (TRBV5-7, TRBJ2-1)
CASSRRLAGDNEQFF

SEQ ID NO: 84283 - protein, 11 aa, Homo sapiens
  CDR3 for alpha chain variable domain of TCR clone 42142 (TRAV1-2, TRAJ20)
CAVSNDYKLSF

SEQ ID NO: 84284 - protein, 12 aa, Homo sapiens
  CDR3 for beta chain variable domain of TCR clone 42142 (TRBV7-9, TRBJ2-7)
CASSIKREEQYF

SEQ ID NO: 84285 - protein, 14 aa, Homo sapiens
  CDR3 for alpha chain variable domain of TCR clone 42143 (TRAV17, TRAJ54)
CATDANQGAQKLVF

SEQ ID NO: 84286 - protein, 14 aa, Homo sapiens
  CDR3 for beta chain variable domain of TCR clone 42143 (TRBV25-1, TRBJ1-1)
CASTHPGGNTEAFF

SEQ ID NO: 84287 - protein, 14 aa, Homo sapiens
  CDR3 for alpha chain variable domain of TCR clone 42144 (TRAV12-3, TRAJ10)
SHLPLTGGGNKLTF

SEQ ID NO: 84288 - protein, 15 aa, Homo sapiens
  CDR3 for beta chain variable domain of TCR clone 42144 (TRBV4-1, TRBJ2-7)
CASSQNTGRLYEQYF

SEQ ID NO: 84289 - protein, 18 aa, Homo sapiens
  CDR3 for alpha chain variable domain of TCR clone 42145 (TRAV21, TRAJ52)
CAVRPSPAGGTSYGKPTF

SEQ ID NO: 84290 - protein, 13 aa, Homo sapiens
  CDR3 for beta chain variable domain of TCR clone 42145 (TRBV7-3, TRBJ1-1)
CASSQDWGAEAFF

SEQ ID NO: 84291 - protein, 14 aa, Homo sapiens
  CDR3 for alpha chain variable domain of TCR clone 42146 (TRAV9-2, TRAJ39)
CALYIYNAGNMLTF

SEQ ID NO: 84292 - protein, 13 aa, Homo sapiens
  CDR3 for beta chain variable domain of TCR clone 42146 (TRBV28, TRBJ1-6)
CASSLYRNSPLHF

SEQ ID NO: 84293 - protein, 11 aa, Homo sapiens
  CDR3 for alpha chain variable domain of TCR clone 42147 (TRAV35, TRAJ34)
CWARSTDKLIF

SEQ ID NO: 84294 - protein, 13 aa, Homo sapiens
  CDR3 for beta chain variable domain of TCR clone 42147 (TRBV19, TRBJ2-7)
CASSIDRTYEQYF

SEQ ID NO: 84295 - protein, 13 aa, Homo sapiens
  CDR3 for alpha chain variable domain of TCR clone 42148 (TRAV38-1, TRAJ7)
CAFMMDGNNRLAF

SEQ ID NO: 84296 - protein, 15 aa, Homo sapiens
  CDR3 for beta chain variable domain of TCR clone 42148 (TRBV29-1, TRBJ2-7)
CSVEFFDRGSYEQYF

SEQ ID NO: 84297 - protein, 12 aa, Homo sapiens
  CDR3 for alpha chain variable domain of TCR clone 42149 (TRAV1-1, TRAJ8)
CAGGTGFQKLVF

SEQ ID NO: 84298 - protein, 15 aa, Homo sapiens
  CDR3 for beta chain variable domain of TCR clone 42149 (TRBV11-3, TRBJ2-3)
CASLKDGREGDTQYF

SEQ ID NO: 84299 - protein, 16 aa, Homo sapiens
  CDR3 for alpha chain variable domain of TCR clone 42150 (TRAV20, TRAJ10)
CAVLRGLTGGGDKLTF

SEQ ID NO: 84300 - protein, 14 aa, Homo sapiens
  CDR3 for beta chain variable domain of TCR clone 42150 (TRBV19, TRBJ1-5)
CASRAPDSFLSQHF

SEQ ID NO: 84301 - protein, 12 aa, Homo sapiens
  CDR3 for alpha chain variable domain of TCR clone 42151 (TRAV8-3, TRAJ41)
CAVALSGYALNF

SEQ ID NO: 84302 - protein, 15 aa, Homo sapiens
  CDR3 for beta chain variable domain of TCR clone 42151 (TRBV27, TRBJ2-1)
CASSNGGGSSNEQFF

SEQ ID NO: 84303 - protein, 11 aa, Homo sapiens
  CDR3 for alpha chain variable domain of TCR clone 42152 (TRAV2, TRAJ33)
CAVDSNYQLIG

SEQ ID NO: 84304 - protein, 15 aa, Homo sapiens
  CDR3 for beta chain variable domain of TCR clone 42152 (TRBV19, TRBJ1-2)
CASSVGQVLNYGYTF

SEQ ID NO: 84305 - protein, 16 aa, Homo sapiens
  CDR3 for alpha chain variable domain of TCR clone 42153 (TRAV8-3, TRAJ13)
CAVGAYPSGGYQRVTF

SEQ ID NO: 84306 - protein, 13 aa, Homo sapiens
  CDR3 for beta chain variable domain of TCR clone 42153 (TRBV7-9, TRBJ1-2)
CASSLKQNYGYTF

SEQ ID NO: 84307 - protein, 14 aa, Homo sapiens
  CDR3 for alpha chain variable domain of TCR clone 42154 (TRAV12-3, TRAJ10)
SHLPLTGGGNKLTF

SEQ ID NO: 84308 - protein, 15 aa, Homo sapiens
  CDR3 for beta chain variable domain of TCR clone 42154 (TRBV20-1, TRBJ2-7)
CSARDRVSGMDEQYS

SEQ ID NO: 84309 - protein, 11 aa, Homo sapiens
  CDR3 for alpha chain variable domain of TCR clone 42155 (TRAV1-1, TRAJ23)
CAVRQGGKLIF

SEQ ID NO: 84310 - protein, 15 aa, Homo sapiens
  CDR3 for beta chain variable domain of TCR clone 42155 (TRBV6-1, TRBJ2-4)
CASSEAVWTINIQYF

SEQ ID NO: 84311 - protein, 23 aa, Homo sapiens
  CDR3 for alpha chain variable domain of TCR clone 42156 (TRAV26-1, TRAJ38)
CIADNAGNNHIQNPDPAVYQLRD

SEQ ID NO: 84312 - protein, 13 aa, Homo sapiens
  CDR3 for beta chain variable domain of TCR clone 42156 (TRBV20-1, TRBJ1-1)
CSAWGGGNTEAFF

SEQ ID NO: 84313 - protein, 11 aa, Homo sapiens
  CDR3 for alpha chain variable domain of TCR clone 42157 (TRAV4, TRAJ31)
CLVGLNARLMF

SEQ ID NO: 84314 - protein, 16 aa, Homo sapiens
  CDR3 for beta chain variable domain of TCR clone 42157 (TRBV15, TRBJ2-6)
CAISVNGGFLANVLTF

SEQ ID NO: 84315 - protein, 13 aa, Homo sapiens
  CDR3 for alpha chain variable domain of TCR clone 42158 (TRAV8-6, TRAJ49)
CAVITSTGNQFYF

SEQ ID NO: 84316 - protein, 14 aa, Homo sapiens
  CDR3 for beta chain variable domain of TCR clone 42158 (TRBV5-1, TRBJ2-7)
CASSRGESLYEQYF

SEQ ID NO: 84317 - protein, 15 aa, Homo sapiens
  CDR3 for alpha chain variable domain of TCR clone 42159 (TRAV26-1, TRAJ56)
CIVRVATGANSKLTF

SEQ ID NO: 84318 - protein, 13 aa, Homo sapiens
  CDR3 for beta chain variable domain of TCR clone 42159 (TRBV7-9, TRBJ1-2)
CASSLKQNYGYTF

SEQ ID NO: 84319 - protein, 14 aa, Homo sapiens
  CDR3 for alpha chain variable domain of TCR clone 42160 (TRAV12-3, TRAJ10)
SHLPLTGGGNKLTF

SEQ ID NO: 84320 - protein, 12 aa, Homo sapiens
  CDR3 for beta chain variable domain of TCR clone 42160 (TRBV11-2, TRBJ2-2)
CASSLGGEELFF

SEQ ID NO: 84321 - protein, 15 aa, Homo sapiens
  CDR3 for alpha chain variable domain of TCR clone 42161 (TRAV8-6, TRAJ37)
CAVIFSSGNTGKLIF

SEQ ID NO: 84322 - protein, 15 aa, Homo sapiens
  CDR3 for beta chain variable domain of TCR clone 42161 (TRBV25-1, TRBJ2-4)
CASSETESAKNMQYF

SEQ ID NO: 84323 - protein, 12 aa, Homo sapiens
  CDR3 for alpha chain variable domain of TCR clone 42162 (TRAV12-2, TRAJ31)
RAVNTPDARLMF

SEQ ID NO: 84324 - protein, 15 aa, Homo sapiens
  CDR3 for beta chain variable domain of TCR clone 42162 (TRBV20-1, TRBJ2-7)
CSAESGTSGAYEQYF

SEQ ID NO: 84325 - protein, 12 aa, Homo sapiens
  CDR3 for alpha chain variable domain of TCR clone 42163 (TRAV13-2, TRAJ23)
CAERHRGGKLIF

SEQ ID NO: 84326 - protein, 16 aa, Homo sapiens
  CDR3 for beta chain variable domain of TCR clone 42163 (TRBV20-1, TRBJ1-4)
CSAPGQGLLNNEKLFF

SEQ ID NO: 84327 - protein, 16 aa, Homo sapiens
  CDR3 for alpha chain variable domain of TCR clone 42164 (TRAV12-2, TRAJ58)
CAVRGDRETSGSRLTF

SEQ ID NO: 84328 - protein, 12 aa, Homo sapiens
  CDR3 for beta chain variable domain of TCR clone 42164 (TRBV19, TRBJ2-3)
CASAGGADTQYF

SEQ ID NO: 84329 - protein, 14 aa, Homo sapiens
  CDR3 for alpha chain variable domain of TCR clone 42165 (TRAV30, TRAJ26)
CGTEIVSYGQNFVF

SEQ ID NO: 84330 - protein, 14 aa, Homo sapiens
  CDR3 for beta chain variable domain of TCR clone 42165 (TRBV7-7, TRBJ2-2)
CATRQDSDTGELFF

SEQ ID NO: 84331 - protein, 14 aa, Homo sapiens
  CDR3 for alpha chain variable domain of TCR clone 42166 (TRAV26-1, TRAJ45)
CIEVTGGGADGLNF

SEQ ID NO: 84332 - protein, 13 aa, Homo sapiens
  CDR3 for beta chain variable domain of TCR clone 42166 (TRBV7-6, TRBJ1-2)
CASSLVADYGYTF

SEQ ID NO: 84333 - protein, 14 aa, Homo sapiens
  CDR3 for alpha chain variable domain of TCR clone 42167 (TRAV8-4, TRAJ13)
CAVTLSGGYQKVTF

SEQ ID NO: 84334 - protein, 15 aa, Homo sapiens
  CDR3 for beta chain variable domain of TCR clone 42167 (TRBV9, TRBJ1-6)
CASSVAGTGDSPLHF

SEQ ID NO: 84335 - protein, 10 aa, Homo sapiens
  CDR3 for alpha chain variable domain of TCR clone 42168 (TRAV12-2, TRAJ52)
RSTSYGKLTF

SEQ ID NO: 84336 - protein, 14 aa, Homo sapiens
  CDR3 for beta chain variable domain of TCR clone 42168 (TRBV19, TRBJ2-2)
CASSTLHRSGELFF

SEQ ID NO: 84337 - protein, 14 aa, Homo sapiens
  CDR3 for alpha chain variable domain of TCR clone 42169 (TRAV12-2, TRAJ17)
CVVLFKAAGNKLTF

SEQ ID NO: 84338 - protein, 17 aa, Homo sapiens
  CDR3 for beta chain variable domain of TCR clone 42169 (TRBV20-1, TRBJ2-2)
CSASGSGQGGLTGELFF

SEQ ID NO: 84339 - protein, 12 aa, Homo sapiens
  CDR3 for alpha chain variable domain of TCR clone 42170 (TRAV4, TRAJ26)
CLVGDYGQNFVF

SEQ ID NO: 84340 - protein, 13 aa, Homo sapiens
  CDR3 for beta chain variable domain of TCR clone 42170 (TRBV10-3, TRBJ2-7)
CASKLAVNYEQYF

SEQ ID NO: 84341 - protein, 10 aa, Homo sapiens
  CDR3 for alpha chain variable domain of TCR clone 42171 (TRAV23/DV6, TRAJ31)
CARGGARLMF

SEQ ID NO: 84342 - protein, 14 aa, Homo sapiens
  CDR3 for beta chain variable domain of TCR clone 42171 (TRBV7-8, TRBJ1-2)
CASSPDSLSYGYTF

SEQ ID NO: 84343 - protein, 14 aa, Homo sapiens
  CDR3 for alpha chain variable domain of TCR clone 42172 (TRAV12-3, TRAJ10)
SHLPLTGGGNKLTF

SEQ ID NO: 84344 - protein, 12 aa, Homo sapiens
  CDR3 for beta chain variable domain of TCR clone 42172 (TRBV5-7, TRBJ1-1)
CASSLGRGKAFF

SEQ ID NO: 84345 - protein, 13 aa, Homo sapiens
  CDR3 for alpha chain variable domain of TCR clone 42173 (TRAV12-3, TRAJ33)
YAMSVNSNYQLIW

SEQ ID NO: 84346 - protein, 13 aa, Homo sapiens
  CDR3 for beta chain variable domain of TCR clone 42173 (TRBV7-2, TRBJ2-2)
CASSLAVTGELFF

SEQ ID NO: 84347 - protein, 12 aa, Homo sapiens
  CDR3 for alpha chain variable domain of TCR clone 42174 (TRAV12-3, TRAJ17)
CAMTLTGNKLTF

SEQ ID NO: 84348 - protein, 16 aa, Homo sapiens
  CDR3 for beta chain variable domain of TCR clone 42174 (TRBV2, TRBJ1-4)
CASNLLQGATNEKLFF

SEQ ID NO: 84349 - protein, 14 aa, Homo sapiens
  CDR3 for alpha chain variable domain of TCR clone 42175 (TRAV35, TRAJ22)
CAGLRPGSARQLTI

SEQ ID NO: 84350 - protein, 15 aa, Homo sapiens
  CDR3 for beta chain variable domain of TCR clone 42175 (TRBV12-4, TRBJ2-5)
CASSPPTGLQETQYF

SEQ ID NO: 84351 - protein, 15 aa, Homo sapiens
  CDR3 for alpha chain variable domain of TCR clone 42176 (TRAV38-1, TRAJ57)
CAFMDSQGGAEKLVF

SEQ ID NO: 84352 - protein, 16 aa, Homo sapiens
  CDR3 for beta chain variable domain of TCR clone 42176 (TRBV10-3, TRBJ2-1)
CAIRGGGRGDYNEQFF

SEQ ID NO: 84353 - protein, 18 aa, Homo sapiens
  CDR3 for alpha chain variable domain of TCR clone 42177 (TRAV21, TRAJ13)
CAVPRSFWGLPESYLLNW

SEQ ID NO: 84354 - protein, 15 aa, Homo sapiens
  CDR3 for beta chain variable domain of TCR clone 42177 (TRBV7-9, TRBJ1-6)
CASSSPGRGNSPLHF

SEQ ID NO: 84355 - protein, 15 aa, Homo sapiens
  CDR3 for alpha chain variable domain of TCR clone 42178 (TRAV3, TRAJ5)
CAVRDLDTGRRALTF

SEQ ID NO: 84356 - protein, 11 aa, Homo sapiens
  CDR3 for beta chain variable domain of TCR clone 42178 (TRBV29-1, TRBJ2-5)
CSEDRTGTQYF

SEQ ID NO: 84357 - protein, 11 aa, Homo sapiens
  CDR3 for alpha chain variable domain of TCR clone 42179 (TRAV21, TRAJ33)
CAVLGNYQLIW

SEQ ID NO: 84358 - protein, 15 aa, Homo sapiens
  CDR3 for beta chain variable domain of TCR clone 42179 (TRBV11-2, TRBJ2-7)
CASSLMVGGSYEQYF

SEQ ID NO: 84359 - protein, 15 aa, Homo sapiens
  CDR3 for alpha chain variable domain of TCR clone 42180 (TRAV26-1, TRAJ40)
CIVRVTTSGTYKYTF

SEQ ID NO: 84360 - protein, 12 aa, Homo sapiens
  CDR3 for beta chain variable domain of TCR clone 42180 (TRBV7-9, TRBJ1-4)
CASSTDREKLFF

SEQ ID NO: 84361 - protein, 14 aa, Homo sapiens
  CDR3 for alpha chain variable domain of TCR clone 42181 (TRAV17, TRAJ45)
CATASGGGADGLTF

SEQ ID NO: 84362 - protein, 15 aa, Homo sapiens
  CDR3 for beta chain variable domain of TCR clone 42181 (TRBV11-2, TRBJ2-1)
CASSRNRGLMYEQFS

SEQ ID NO: 84363 - protein, 13 aa, Homo sapiens
  CDR3 for alpha chain variable domain of TCR clone 42182 (TRAV8-3, TRAJ36)
CAVGATGANNLFF

SEQ ID NO: 84364 - protein, 15 aa, Homo sapiens
  CDR3 for beta chain variable domain of TCR clone 42182 (TRBV7-2, TRBJ1-2)
CANSPRAGWNYGYTF

SEQ ID NO: 84365 - protein, 11 aa, Homo sapiens
  CDR3 for alpha chain variable domain of TCR clone 42183 (TRAV2, TRAJ33)
CAVESNYQLIW

SEQ ID NO: 84366 - protein, 15 aa, Homo sapiens
  CDR3 for beta chain variable domain of TCR clone 42183 (TRBV19, TRBJ1-1)
CASTSGQIQNIEAFF

SEQ ID NO: 84367 - protein, 15 aa, Homo sapiens
  CDR3 for alpha chain variable domain of TCR clone 42184 (TRAV12-2, TRAJ53)
CAVNGGGGSNYKLTF

SEQ ID NO: 84368 - protein, 13 aa, Homo sapiens
  CDR3 for beta chain variable domain of TCR clone 42184 (TRBV14, TRBJ1-1)
CASSQEAGTEAFF

SEQ ID NO: 84369 - protein, 18 aa, Homo sapiens
  CDR3 for alpha chain variable domain of TCR clone 42185 (TRAV21, TRAJ52)
CAVRPSPAGGTSYGKLTF

SEQ ID NO: 84370 - protein, 15 aa, Homo sapiens
  CDR3 for beta chain variable domain of TCR clone 42185 (TRBV10-3, TRBJ2-1)
CAIRNGTSGHNEQFF

SEQ ID NO: 84371 - protein, 12 aa, Homo sapiens
  CDR3 for alpha chain variable domain of TCR clone 42186 (TRAV12-3, TRAJ17)
CAMTLTGNKLTF

SEQ ID NO: 84372 - protein, 16 aa, Homo sapiens
  CDR3 for beta chain variable domain of TCR clone 42186 (TRBV11-2, TRBJ2-7)
CASSPTTGGVSYEQYF

SEQ ID NO: 84373 - protein, 18 aa, Homo sapiens
  CDR3 for alpha chain variable domain of TCR clone 42187 (TRAV21, TRAJ13)
CAVPRSFWGLPESYLLNW

SEQ ID NO: 84374 - protein, 14 aa, Homo sapiens
  CDR3 for beta chain variable domain of TCR clone 42187 (TRBV20-1, TRBJ2-7)
CSAKDRKGAYEQYF

SEQ ID NO: 84375 - protein, 13 aa, Homo sapiens
  CDR3 for alpha chain variable domain of TCR clone 42188 (TRAV16, TRAJ11)
CALTQSGYSALTF

SEQ ID NO: 84376 - protein, 14 aa, Homo sapiens
  CDR3 for beta chain variable domain of TCR clone 42188 (TRBV19, TRBJ2-7)
CASSTTRSSYEQYF

SEQ ID NO: 84377 - protein, 15 aa, Homo sapiens
  CDR3 for alpha chain variable domain of TCR clone 42189 (TRAV12-3, TRAJ11)
CAMSEENSGYSTLTF

SEQ ID NO: 84378 - protein, 15 aa, Homo sapiens
  CDR3 for beta chain variable domain of TCR clone 42189 (TRBV19, TRBJ1-5)
CASSIVWADNQPQHF

SEQ ID NO: 84379 - protein, 22 aa, Homo sapiens
  CDR3 for alpha chain variable domain of TCR clone 42190 (TRAV12-2, TRAJ53)
SPVIQPPTSVPPILSSNYKLTF

SEQ ID NO: 84380 - protein, 13 aa, Homo sapiens
  CDR3 for beta chain variable domain of TCR clone 42190 (TRBV7-7, TRBJ2-3)
CAGSLSRADTQYF

SEQ ID NO: 84381 - protein, 14 aa, Homo sapiens
  CDR3 for alpha chain variable domain of TCR clone 42191 (TRAV27, TRAJ22)
CAGLPSGSARQLTF

SEQ ID NO: 84382 - protein, 16 aa, Homo sapiens
  CDR3 for beta chain variable domain of TCR clone 42191 (TRBV7-3, TRBJ2-2)
CASSLKRGTLSGELFF

SEQ ID NO: 84383 - protein, 11 aa, Homo sapiens
  CDR3 for alpha chain variable domain of TCR clone 42192 (TRAV16, TRAJ33)
CALHSNYQLIW

SEQ ID NO: 84384 - protein, 15 aa, Homo sapiens
  CDR3 for beta chain variable domain of TCR clone 42192 (TRBV4-1, TRBJ2-7)
CASSQQGQGLDEQYF

SEQ ID NO: 84385 - protein, 14 aa, Homo sapiens
  CDR3 for alpha chain variable domain of TCR clone 42193 (TRAV35, TRAJ42)
CAGRYGGSQGNLMF

SEQ ID NO: 84386 - protein, 15 aa, Homo sapiens
  CDR3 for beta chain variable domain of TCR clone 42193 (TRBV7-9, TRBJ2-1)
CASSLGWGRANEQFF

SEQ ID NO: 84387 - protein, 12 aa, Homo sapiens
  CDR3 for alpha chain variable domain of TCR clone 42194 (TRAV13-1, TRAJ48)
CSANFGNEKLTF

SEQ ID NO: 84388 - protein, 13 aa, Homo sapiens
  CDR3 for beta chain variable domain of TCR clone 42194 (TRBV7-3, TRBJ1-1)
CASSQDWGAEAFF

SEQ ID NO: 84389 - protein, 13 aa, Homo sapiens
  CDR3 for alpha chain variable domain of TCR clone 42195 (TRAV3, TRAJ21)
CAVREPDFNKFYF

SEQ ID NO: 84390 - protein, 11 aa, Homo sapiens
  CDR3 for beta chain variable domain of TCR clone 42195 (TRBV29-1, TRBJ2-5)
CSEDRTGTQYF

SEQ ID NO: 84391 - protein, 15 aa, Homo sapiens
  CDR3 for alpha chain variable domain of TCR clone 42196 (TRAV23/DV6, TRAJ33)
CAASNSGGGNYQLIW

SEQ ID NO: 84392 - protein, 15 aa, Homo sapiens
  CDR3 for beta chain variable domain of TCR clone 42196 (TRBV7-8, TRBJ2-3)
CASSPRTGSTDTQYF

SEQ ID NO: 84393 - protein, 14 aa, Homo sapiens
  CDR3 for alpha chain variable domain of TCR clone 42197 (TRAV26-1, TRAJ39)
CIVRGSRAGNMLTF

SEQ ID NO: 84394 - protein, 15 aa, Homo sapiens
  CDR3 for beta chain variable domain of TCR clone 42197 (TRBV28, TRBJ2-5)
CASSPGQGSIEAQYF

SEQ ID NO: 84395 - protein, 17 aa, Homo sapiens
  CDR3 for alpha chain variable domain of TCR clone 42198 (TRAV12-1, TRAJ42)
CVVMRRNYGGSQGNLIF

SEQ ID NO: 84396 - protein, 13 aa, Homo sapiens
  CDR3 for beta chain variable domain of TCR clone 42198 (TRBV7-2, TRBJ1-1)
CASSLARPAEAFF

SEQ ID NO: 84397 - protein, 15 aa, Homo sapiens
  CDR3 for alpha chain variable domain of TCR clone 42199 (TRAV8-3, TRAJ27)
CVVGPSKTNAGKSTF

SEQ ID NO: 84398 - protein, 12 aa, Homo sapiens
  CDR3 for beta chain variable domain of TCR clone 42199 (TRBV11-2, TRBJ2-2)
CASSLGGGELFF

SEQ ID NO: 84399 - protein, 12 aa, Homo sapiens
  CDR3 for alpha chain variable domain of TCR clone 42200 (TRAV4, TRAJ26)
CLVGEYGQNFVF

SEQ ID NO: 84400 - protein, 16 aa, Homo sapiens
  CDR3 for beta chain variable domain of TCR clone 42200 (TRBV7-2, TRBJ1-2)
CASSSNQDRRGHGYTF

SEQ ID NO: 84401 - protein, 18 aa, Homo sapiens
  CDR3 for alpha chain variable domain of TCR clone 42201 (TRAV26-1, TRAJ23)
CIVRVGLEVWNQGGNLIF

SEQ ID NO: 84402 - protein, 16 aa, Homo sapiens
  CDR3 for beta chain variable domain of TCR clone 42201 (TRBV12-4, TRBJ2-5)
CASSFFVRGRQETQYF

SEQ ID NO: 84403 - protein, 15 aa, Homo sapiens
  CDR3 for alpha chain variable domain of TCR clone 42202 (TRAV3, TRAJ4)
CAVGDGTGGYNKLIF

SEQ ID NO: 84404 - protein, 13 aa, Homo sapiens
  CDR3 for beta chain variable domain of TCR clone 42202 (TRBV12-5, TRBJ1-2)
CASGVRTGNGYTF

SEQ ID NO: 84405 - protein, 14 aa, Homo sapiens
  CDR3 for alpha chain variable domain of TCR clone 42203 (TRAV8-4, TRAJ30)
CAVSGMNRDDKIIF

SEQ ID NO: 84406 - protein, 19 aa, Homo sapiens
  CDR3 for beta chain variable domain of TCR clone 42203 (TRBV3-1, TRBJ2-2)
CASTSEGTVTFANTGELFF

SEQ ID NO: 84407 - protein, 14 aa, Homo sapiens
  CDR3 for alpha chain variable domain of TCR clone 42204 (TRAV20, TRAJ29)
CAVQAWVGNTPLVF

SEQ ID NO: 84408 - protein, 15 aa, Homo sapiens
  CDR3 for beta chain variable domain of TCR clone 42204 (TRBV29-1, TRBJ2-7)
CSVEFFDRGSYEQYF

SEQ ID NO: 84409 - protein, 12 aa, Homo sapiens
  CDR3 for alpha chain variable domain of TCR clone 42205 (TRAV8-4, TRAJ43)
CAVRVNNNDMRF

SEQ ID NO: 84410 - protein, 13 aa, Homo sapiens
  CDR3 for beta chain variable domain of TCR clone 42205 (TRBV7-9, TRBJ1-2)
CASSLKQNYGYTF

SEQ ID NO: 84411 - protein, 16 aa, Homo sapiens
  CDR3 for alpha chain variable domain of TCR clone 42206 (TRAV30, TRAJ24)
CGTEIVDADSGGKFQF

SEQ ID NO: 84412 - protein, 15 aa, Homo sapiens
  CDR3 for beta chain variable domain of TCR clone 42206 (TRBV20-1, TRBJ2-7)
CSARDRVSGMDEQYF

SEQ ID NO: 84413 - protein, 11 aa, Homo sapiens
  CDR3 for alpha chain variable domain of TCR clone 42207 (TRAV12-1, TRAJ21)
CVVYNFNKFYF

SEQ ID NO: 84414 - protein, 16 aa, Homo sapiens
  CDR3 for beta chain variable domain of TCR clone 42207 (TRBV6-5, TRBJ2-7)
CASSYFRVGIGDEQYF

SEQ ID NO: 84415 - protein, 11 aa, Homo sapiens
  CDR3 for alpha chain variable domain of TCR clone 42208 (TRAV2, TRAJ13)
CASGGYQKVTF

SEQ ID NO: 84416 - protein, 15 aa, Homo sapiens
  CDR3 for beta chain variable domain of TCR clone 42208 (TRBV7-2, TRBJ1-2)
CASSPRAGWNYGYTF

SEQ ID NO: 84417 - protein, 12 aa, Homo sapiens
  CDR3 for alpha chain variable domain of TCR clone 42209 (TRAV12-1, TRAJ40)
CVFYSGTYKYIF

SEQ ID NO: 84418 - protein, 13 aa, Homo sapiens
  CDR3 for beta chain variable domain of TCR clone 42209 (TRBV12-4, TRBJ2-2)
CASSPLPPGELFF

SEQ ID NO: 84419 - protein, 12 aa, Homo sapiens
  CDR3 for alpha chain variable domain of TCR clone 42210 (TRAV21, TRAJ8)
CAVNTGFQRLVF

SEQ ID NO: 84420 - protein, 13 aa, Homo sapiens
  CDR3 for beta chain variable domain of TCR clone 42210 (TRBV6-3, TRBJ2-1)
CASSYDNYNEQFF

SEQ ID NO: 84421 - protein, 13 aa, Homo sapiens
  CDR3 for alpha chain variable domain of TCR clone 42211 (TRAV9-2, TRAJ16)
CALSGQDGQKLLF

SEQ ID NO: 84422 - protein, 14 aa, Homo sapiens
  CDR3 for beta chain variable domain of TCR clone 42211 (TRBV7-2, TRBJ2-1)
CASSPGTFYNEQFF

SEQ ID NO: 84423 - protein, 11 aa, Homo sapiens
  CDR3 for alpha chain variable domain of TCR clone 42212 (TRAV35, TRAJ30)
CAGERDDKIIF

SEQ ID NO: 84424 - protein, 14 aa, Homo sapiens
  CDR3 for beta chain variable domain of TCR clone 42212 (TRBV15, TRBJ2-5)
CAASGDRGQETQYF

SEQ ID NO: 84425 - protein, 14 aa, Homo sapiens
  CDR3 for alpha chain variable domain of TCR clone 42213 (TRAV23/DV6, TRAJ37)
CAASTSSNTGKLIF

SEQ ID NO: 84426 - protein, 13 aa, Homo sapiens
  CDR3 for beta chain variable domain of TCR clone 42213 (TRBV7-7, TRBJ1-1)
CASSLGANTEAVF

SEQ ID NO: 84427 - protein, 13 aa, Homo sapiens
  CDR3 for alpha chain variable domain of TCR clone 42214 (TRAV8-4, TRAJ10)
CAAFTGGGDKLTF

SEQ ID NO: 84428 - protein, 15 aa, Homo sapiens
  CDR3 for beta chain variable domain of TCR clone 42214 (TRBV2, TRBJ2-3)
CASSDFEKATDTQYF

SEQ ID NO: 84429 - protein, 14 aa, Homo sapiens
  CDR3 for alpha chain variable domain of TCR clone 42215 (TRAV30, TRAJ33)
CGTVAPRSNYQLTW

SEQ ID NO: 84430 - protein, 16 aa, Homo sapiens
  CDR3 for beta chain variable domain of TCR clone 42215 (TRBV3-1, TRBJ2-5)
CASSPGQFNGFGTQYF

SEQ ID NO: 84431 - protein, 10 aa, Homo sapiens
  CDR3 for alpha chain variable domain of TCR clone 42216 (TRAV23/DV6, TRAJ57)
CAASSTLSQG

SEQ ID NO: 84432 - protein, 13 aa, Homo sapiens
  CDR3 for beta chain variable domain of TCR clone 42216 (TRBV4-2, TRBJ1-1)
CASSQAGNTEAFF

SEQ ID NO: 84433 - protein, 14 aa, Homo sapiens
  CDR3 for alpha chain variable domain of TCR clone 42217 (TRAV4, TRAJ17)
CLVGDMAAGNKLTF

SEQ ID NO: 84434 - protein, 13 aa, Homo sapiens
  CDR3 for beta chain variable domain of TCR clone 42217 (TRBV18, TRBJ2-7)
CASQSGVGYEQYF

SEQ ID NO: 84435 - protein, 13 aa, Homo sapiens
  CDR3 for alpha chain variable domain of TCR clone 42218 (TRAV27, TRAJ41)
CAGEGNSGYALNF

SEQ ID NO: 84436 - protein, 14 aa, Homo sapiens
  CDR3 for beta chain variable domain of TCR clone 42218 (TRBV7-2, TRBJ1-1)
CASSFLTGTNEAFF

SEQ ID NO: 84437 - protein, 14 aa, Homo sapiens
  CDR3 for alpha chain variable domain of TCR clone 42219 (TRAV12-1, TRAJ45)
CVVNSGGGADGLTF

SEQ ID NO: 84438 - protein, 15 aa, Homo sapiens
  CDR3 for beta chain variable domain of TCR clone 42219 (TRBV20-1, TRBJ2-7)
CSARDRVSGMDEQYF

SEQ ID NO: 84439 - protein, 14 aa, Homo sapiens
  CDR3 for alpha chain variable domain of TCR clone 42220 (TRAV12-3, TRAJ15)
CVMIPPQAGTALIF

SEQ ID NO: 84440 - protein, 12 aa, Homo sapiens
  CDR3 for beta chain variable domain of TCR clone 42220 (TRBV11-2, TRBJ2-2)
CASSFGGGELFF

SEQ ID NO: 84441 - protein, 14 aa, Homo sapiens
  CDR3 for alpha chain variable domain of TCR clone 42221 (TRAV26-1, TRAJ48)
CIVRVGFGNERLTF

SEQ ID NO: 84442 - protein, 13 aa, Homo sapiens
  CDR3 for beta chain variable domain of TCR clone 42221 (TRBV11-3, TRBJ2-3)
CASSHDTKDTQYF

SEQ ID NO: 84443 - protein, 13 aa, Homo sapiens
  CDR3 for alpha chain variable domain of TCR clone 42222 (TRAV17, TRAJ5)
CSPMDTGRRALTF

SEQ ID NO: 84444 - protein, 15 aa, Homo sapiens
  CDR3 for beta chain variable domain of TCR clone 42222 (TRBV6-6, TRBJ2-5)
CASSPGGGLEETQYF

SEQ ID NO: 84445 - protein, 19 aa, Homo sapiens
  CDR3 for alpha chain variable domain of TCR clone 42223 (TRAV26-1, TRAJ52)
CIVRAHRNAGGTSYGKLTF

SEQ ID NO: 84446 - protein, 14 aa, Homo sapiens
  CDR3 for beta chain variable domain of TCR clone 42223 (TRBV2, TRBJ2-3)
CASSEGQNTDTQYF

SEQ ID NO: 84447 - protein, 15 aa, Homo sapiens
  CDR3 for alpha chain variable domain of TCR clone 42224 (TRAV8-3, TRAJ11)
CAVGLLNSGYSTLTF

SEQ ID NO: 84448 - protein, 16 aa, Homo sapiens
  CDR3 for beta chain variable domain of TCR clone 42224 (TRBV7-9, TRBJ1-2)
CASSLGFSSGEDCYTF

SEQ ID NO: 84449 - protein, 12 aa, Homo sapiens
  CDR3 for alpha chain variable domain of TCR clone 42225 (TRAV12-3, TRAJ17)
CAMTLTGNKLTF

SEQ ID NO: 84450 - protein, 15 aa, Homo sapiens
  CDR3 for beta chain variable domain of TCR clone 42225 (TRBV13, TRBJ1-3)
CASSPNRGSGNTIYF

SEQ ID NO: 84451 - protein, 13 aa, Homo sapiens
  CDR3 for alpha chain variable domain of TCR clone 42226 (TRAV29/DV5, TRAJ9)
CAASETGGFKTIF

SEQ ID NO: 84452 - protein, 14 aa, Homo sapiens
  CDR3 for beta chain variable domain of TCR clone 42226 (TRBV19, TRBJ1-5)
CASRAPDSFLSQHF

SEQ ID NO: 84453 - protein, 14 aa, Homo sapiens
  CDR3 for alpha chain variable domain of TCR clone 42227 (TRAV3, TRAJ6)
CAVRDGMGRRKLRT

SEQ ID NO: 84454 - protein, 15 aa, Homo sapiens
  CDR3 for beta chain variable domain of TCR clone 42227 (TRBV9, TRBJ2-1)
CASSLAGSSYNEQFF

SEQ ID NO: 84455 - protein, 21 aa, Homo sapiens
  CDR3 for alpha chain variable domain of TCR clone 42228 (TRAV1-1, TRAJ6)
CLLLLRCERLERTGGSYIPTF

SEQ ID NO: 84456 - protein, 13 aa, Homo sapiens
  CDR3 for beta chain variable domain of TCR clone 42228 (TRBV10-2, TRBJ2-7)
CASGASGGYEQCF

SEQ ID NO: 84457 - protein, 16 aa, Homo sapiens
  CDR3 for alpha chain variable domain of TCR clone 42229 (TRAV1-2, TRAJ10)
CAVRGVLTGGGNKLTF

SEQ ID NO: 84458 - protein, 15 aa, Homo sapiens
  CDR3 for beta chain variable domain of TCR clone 42229 (TRBV29-1, TRBJ2-1)
CSVGRHALFYNGQFF

SEQ ID NO: 84459 - protein, 14 aa, Homo sapiens
  CDR3 for alpha chain variable domain of TCR clone 42230 (TRAV17, TRAJ16)
CATADFSDGQKLLF

SEQ ID NO: 84460 - protein, 16 aa, Homo sapiens
  CDR3 for beta chain variable domain of TCR clone 42230 (TRBV19, TRBJ2-1)
CASSKAGPSSYNEQFF

SEQ ID NO: 84461 - protein, 13 aa, Homo sapiens
  CDR3 for alpha chain variable domain of TCR clone 42231 (TRAV13-2, TRAJ49)
CAENTNTGNQSYF

SEQ ID NO: 84462 - protein, 12 aa, Homo sapiens
  CDR3 for beta chain variable domain of TCR clone 42231 (TRBV6-6, TRBJ2-3)
CASSSRGDTQHF

SEQ ID NO: 84463 - protein, 18 aa, Homo sapiens
  CDR3 for alpha chain variable domain of TCR clone 42232 (TRAV17, TRAJ45)
CATSLDLYSGGGADGLTF

SEQ ID NO: 84464 - protein, 15 aa, Homo sapiens
  CDR3 for beta chain variable domain of TCR clone 42232 (TRBV2, TRBJ2-7)
CASSEGLARSYEQYF

SEQ ID NO: 84465 - protein, 14 aa, Homo sapiens
  CDR3 for alpha chain variable domain of TCR clone 42233 (TRAV12-2, TRAJ17)
CAVNIKAAGNKLTF

SEQ ID NO: 84466 - protein, 16 aa, Homo sapiens
  CDR3 for beta chain variable domain of TCR clone 42233 (TRBV20-1, TRBJ2-6)
CSASAQGYDGANVLTF

SEQ ID NO: 84467 - protein, 14 aa, Homo sapiens
  CDR3 for alpha chain variable domain of TCR clone 42234 (TRAV35, TRAJ22)
CAGLRPGSARQLTF

SEQ ID NO: 84468 - protein, 16 aa, Homo sapiens
  CDR3 for beta chain variable domain of TCR clone 42234 (TRBV19, TRBJ2-2)
CASRSPGTGATGELFF

SEQ ID NO: 84469 - protein, 14 aa, Homo sapiens
  CDR3 for alpha chain variable domain of TCR clone 42235 (TRAV16, TRAJ15)
CALRPDQAGTALIF

SEQ ID NO: 84470 - protein, 16 aa, Homo sapiens
  CDR3 for beta chain variable domain of TCR clone 42235 (TRBV6-5, TRBJ2-2)
CASSYGRVPDTGELFF

SEQ ID NO: 84471 - protein, 14 aa, Homo sapiens
  CDR3 for alpha chain variable domain of TCR clone 42236 (TRAV1-2, TRAJ16)
CAVNRFSDGQKLLF

SEQ ID NO: 84472 - protein, 17 aa, Homo sapiens
  CDR3 for beta chain variable domain of TCR clone 42236 (TRBV5-1, TRBJ2-5)
CASSLLGLAANQETQYF

SEQ ID NO: 84473 - protein, 13 aa, Homo sapiens
  CDR3 for alpha chain variable domain of TCR clone 42237 (TRAV27, TRAJ6)
CAGGTRGSYIPTF

SEQ ID NO: 84474 - protein, 12 aa, Homo sapiens
  CDR3 for beta chain variable domain of TCR clone 42237 (TRBV19, TRBJ1-4)
CASKDWPGGLFF

SEQ ID NO: 84475 - protein, 13 aa, Homo sapiens
  CDR3 for alpha chain variable domain of TCR clone 42238 (TRAV12-1, TRAJ6)
CVVFPGGSYKPTF

SEQ ID NO: 84476 - protein, 14 aa, Homo sapiens
  CDR3 for beta chain variable domain of TCR clone 42238 (TRBV20-1, TRBJ1-3)
CSASPTGAGNTIYF

SEQ ID NO: 84477 - protein, 15 aa, Homo sapiens
  CDR3 for alpha chain variable domain of TCR clone 42239 (TRAV8-3, TRAJ40)
CAAPSLGSGTHKYIF

SEQ ID NO: 84478 - protein, 16 aa, Homo sapiens
  CDR3 for beta chain variable domain of TCR clone 42239 (TRBV7-3, TRBJ2-3)
CASSLSGYRPEDTQYF

SEQ ID NO: 84479 - protein, 15 aa, Homo sapiens
  CDR3 for alpha chain variable domain of TCR clone 42240 (TRAV34, TRAJ38)
CGADFTPGNNRNLIW

SEQ ID NO: 84480 - protein, 13 aa, Homo sapiens
  CDR3 for beta chain variable domain of TCR clone 42240 (TRBV7-8, TRBJ2-7)
CASSLGTTYEQYF

SEQ ID NO: 84481 - protein, 15 aa, Homo sapiens
  CDR3 for alpha chain variable domain of TCR clone 42241 (TRAV8-3, TRAJ45)
CASSYSGGGSDGLTF

SEQ ID NO: 84482 - protein, 17 aa, Homo sapiens
  CDR3 for beta chain variable domain of TCR clone 42241 (TRBV7-8, TRBJ1-2)
CASSLRPLQGHLYGYTF

SEQ ID NO: 84483 - protein, 15 aa, Homo sapiens
  CDR3 for alpha chain variable domain of TCR clone 42242 (TRAV3, TRAJ13)
CAVRDIAGGYQKVTL

SEQ ID NO: 84484 - protein, 13 aa, Homo sapiens
  CDR3 for beta chain variable domain of TCR clone 42242 (TRBV2, TRBJ2-2)
CASSKKNTGELFF

SEQ ID NO: 84485 - protein, 16 aa, Homo sapiens
  CDR3 for alpha chain variable domain of TCR clone 42243 (TRAV17, TRAJ52)
CAMDGAGGTSYGKLTF

SEQ ID NO: 84486 - protein, 14 aa, Homo sapiens
  CDR3 for beta chain variable domain of TCR clone 42243 (TRBV6-1, TRBJ2-1)
CASSLGLAGLWEFF

SEQ ID NO: 84487 - protein, 16 aa, Homo sapiens
  CDR3 for alpha chain variable domain of TCR clone 42244 (TRAV12-3, TRAJ53)
CAMSPGSGGSNYKLTF

SEQ ID NO: 84488 - protein, 13 aa, Homo sapiens
  CDR3 for beta chain variable domain of TCR clone 42244 (TRBV20-1, TRBJ1-1)
CSARGGGNTEAFF

SEQ ID NO: 84489 - protein, 13 aa, Homo sapiens
  CDR3 for alpha chain variable domain of TCR clone 42245 (TRAV17, TRAJ26)
CATVDNYGQNFAF

SEQ ID NO: 84490 - protein, 13 aa, Homo sapiens
  CDR3 for beta chain variable domain of TCR clone 42245 (TRBV14, TRBJ1-1)
CASSREFGTEAFF

SEQ ID NO: 84491 - protein, 17 aa, Homo sapiens
  CDR3 for alpha chain variable domain of TCR clone 42246 (TRAV13-1, TRAJ31)
CAPRARLMFGDGTQLVV

SEQ ID NO: 84492 - protein, 12 aa, Homo sapiens
  CDR3 for beta chain variable domain of TCR clone 42246 (TRBV7-9, TRBJ2-7)
CASSLEGYEQYF

SEQ ID NO: 84493 - protein, 15 aa, Homo sapiens
  CDR3 for alpha chain variable domain of TCR clone 42247 (TRAV8-3, TRAJ27)
CAVGRSKTNAGKSTF

SEQ ID NO: 84494 - protein, 15 aa, Homo sapiens
  CDR3 for beta chain variable domain of TCR clone 42247 (TRBV7-2, TRBJ2-1)
CASSSGLAGGNEQFF

SEQ ID NO: 84495 - protein, 14 aa, Homo sapiens
  CDR3 for alpha chain variable domain of TCR clone 42248 (TRAV16, TRAJ44)
CALSTTGTASKLTF

SEQ ID NO: 84496 - protein, 20 aa, Homo sapiens
  CDR3 for beta chain variable domain of TCR clone 42248 (TRBV7-8, TRBJ2-2)
CASSHLFPGPTIHITGELFF

SEQ ID NO: 84497 - protein, 14 aa, Homo sapiens
  CDR3 for alpha chain variable domain of TCR clone 42249 (TRAV12-2, TRAJ17)
SAVLFKAAGNKLTF

SEQ ID NO: 84498 - protein, 17 aa, Homo sapiens
  CDR3 for beta chain variable domain of TCR clone 42249 (TRBV20-1, TRBJ2-2)
CSASGSGQGGLTGELFF

SEQ ID NO: 84499 - protein, 14 aa, Homo sapiens
  CDR3 for alpha chain variable domain of TCR clone 42250 (TRAV3, TRAJ8)
CAVSLNTGFQKLIF

SEQ ID NO: 84500 - protein, 14 aa, Homo sapiens
  CDR3 for beta chain variable domain of TCR clone 42250 (TRBV6-6, TRBJ1-5)
CASVDSGFNQPQHF

SEQ ID NO: 84501 - protein, 16 aa, Homo sapiens
  CDR3 for alpha chain variable domain of TCR clone 42251 (TRAV2, TRAJ4)
CAVEDRFSGGYNKLIF

SEQ ID NO: 84502 - protein, 13 aa, Homo sapiens
  CDR3 for beta chain variable domain of TCR clone 42251 (TRBV11-2, TRBJ2-5)
CASSRGPSETQYF

SEQ ID NO: 84503 - protein, 15 aa, Homo sapiens
  CDR3 for alpha chain variable domain of TCR clone 42252 (TRAV3, TRAJ22)
CAVRDRGGSARQLTF

SEQ ID NO: 84504 - protein, 15 aa, Homo sapiens
  CDR3 for beta chain variable domain of TCR clone 42252 (TRBV7-9, TRBJ1-4)
CASSRTGGFNEKLFF

SEQ ID NO: 84505 - protein, 13 aa, Homo sapiens
  CDR3 for alpha chain variable domain of TCR clone 42253 (TRAV12-3, TRAJ40)
CAMSARGTYRYIF

SEQ ID NO: 84506 - protein, 16 aa, Homo sapiens
  CDR3 for beta chain variable domain of TCR clone 42253 (TRBV20-1, TRBJ2-3)
CSGEAGLAGGQDTQYF

SEQ ID NO: 84507 - protein, 13 aa, Homo sapiens
  CDR3 for alpha chain variable domain of TCR clone 42254 (TRAV23/DV6, TRAJ15)
CSALPAGRNCSDL

SEQ ID NO: 84508 - protein, 14 aa, Homo sapiens
  CDR3 for beta chain variable domain of TCR clone 42254 (TRBV7-9, TRBJ1-2)
CASSRQGANYGYTF

SEQ ID NO: 84509 - protein, 15 aa, Homo sapiens
  CDR3 for alpha chain variable domain of TCR clone 42255 (TRAV21, TRAJ53)
CATLNSGGSNYKLTF

SEQ ID NO: 84510 - protein, 13 aa, Homo sapiens
  CDR3 for beta chain variable domain of TCR clone 42255 (TRBV12-4, TRBJ2-7)
CASSPTETYEQYF

SEQ ID NO: 84511 - protein, 12 aa, Homo sapiens
  CDR3 for alpha chain variable domain of TCR clone 42256 (TRAV12-3, TRAJ20)
CAMVRGDYKLSF

SEQ ID NO: 84512 - protein, 14 aa, Homo sapiens
  CDR3 for beta chain variable domain of TCR clone 42256 (TRBV5-5, TRBJ1-5)
CASSGQGVDQAQHF

SEQ ID NO: 84513 - protein, 17 aa, Homo sapiens
  CDR3 for alpha chain variable domain of TCR clone 42257 (TRAV3, TRAJ6)
CAVRDGPRAGGSDIPTF

SEQ ID NO: 84514 - protein, 13 aa, Homo sapiens
  CDR3 for beta chain variable domain of TCR clone 42257 (TRBV27, TRBJ2-1)
CASRTLGVGEQFF

SEQ ID NO: 84515 - protein, 17 aa, Homo sapiens
  CDR3 for alpha chain variable domain of TCR clone 42258 (TRAV4, TRAJ42)
CLVGVLNYGGSPGNLIF

SEQ ID NO: 84516 - protein, 12 aa, Homo sapiens
  CDR3 for beta chain variable domain of TCR clone 42258 (TRBV20-1, TRBJ2-1)
CSAQYTYNEQFF

SEQ ID NO: 84517 - protein, 11 aa, Homo sapiens
  CDR3 for alpha chain variable domain of TCR clone 42259 (TRAV13-2, TRAJ31)
CAENMDARLMF

SEQ ID NO: 84518 - protein, 15 aa, Homo sapiens
  CDR3 for beta chain variable domain of TCR clone 42259 (TRBV7-8, TRBJ1-2)
CASSLVRDGGLGDTF

SEQ ID NO: 84519 - protein, 14 aa, Homo sapiens
  CDR3 for alpha chain variable domain of TCR clone 42260 (TRAV13-1, TRAJ40)
CAASMTSGTYKYIF

SEQ ID NO: 84520 - protein, 15 aa, Homo sapiens
  CDR3 for beta chain variable domain of TCR clone 42260 (TRBV20-1, TRBJ2-7)
CSARDRVSGMDEQYF

SEQ ID NO: 84521 - protein, 11 aa, Homo sapiens
  CDR3 for alpha chain variable domain of TCR clone 42261 (TRAV3, TRAJ21)
CAVGNFNKFYY

SEQ ID NO: 84522 - protein, 16 aa, Homo sapiens
  CDR3 for beta chain variable domain of TCR clone 42261 (TRBV19, TRBJ2-1)
CASSKAGPSSYNEQFF

SEQ ID NO: 84523 - protein, 16 aa, Homo sapiens
  CDR3 for alpha chain variable domain of TCR clone 42262 (TRAV23/DV6, TRAJ9)
CAASIGGNTGGFKTIF

SEQ ID NO: 84524 - protein, 13 aa, Homo sapiens
  CDR3 for beta chain variable domain of TCR clone 42262 (TRBV7-9, TRBJ2-3)
CASSPGSTDTQYF

SEQ ID NO: 84525 - protein, 12 aa, Homo sapiens
  CDR3 for alpha chain variable domain of TCR clone 42263 (TRAV27, TRAJ35)
CAGADFGNVLHG

SEQ ID NO: 84526 - protein, 16 aa, Homo sapiens
  CDR3 for beta chain variable domain of TCR clone 42263 (TRBV6-1, TRBJ2-1)
CASILRQGSSYNEQFF

SEQ ID NO: 84527 - protein, 14 aa, Homo sapiens
  CDR3 for alpha chain variable domain of TCR clone 42264 (TRAV12-3, TRAJ22)
CEMSLFGSARQLTF

SEQ ID NO: 84528 - protein, 11 aa, Homo sapiens
  CDR3 for beta chain variable domain of TCR clone 42264 (TRBV12-4, TRBJ2-2)
CASSSAGELFF

SEQ ID NO: 84529 - protein, 10 aa, Homo sapiens
  CDR3 for alpha chain variable domain of TCR clone 42265 (TRAV8-4, TRAJ43)
CAVSADDMRS

SEQ ID NO: 84530 - protein, 15 aa, Homo sapiens
  CDR3 for beta chain variable domain of TCR clone 42265 (TRBV5-1, TRBJ2-3)
CASSVTSGSTDTQYF

SEQ ID NO: 84531 - protein, 15 aa, Homo sapiens
  CDR3 for alpha chain variable domain of TCR clone 42266 (TRAV21, TRAJ24)
CAARSSTDSWGKLQF

SEQ ID NO: 84532 - protein, 14 aa, Homo sapiens
  CDR3 for beta chain variable domain of TCR clone 42266 (TRBV2, TRBJ2-7)
CASSLTSGGYEQYF

SEQ ID NO: 84533 - protein, 12 aa, Homo sapiens
  CDR3 for alpha chain variable domain of TCR clone 42267 (TRAV17, TRAJ39)
CATGAAGNMLTF

SEQ ID NO: 84534 - protein, 14 aa, Homo sapiens
  CDR3 for beta chain variable domain of TCR clone 42267 (TRBV7-9, TRBJ1-2)
RASSRQGANYGYTF

SEQ ID NO: 84535 - protein, 14 aa, Homo sapiens
  CDR3 for alpha chain variable domain of TCR clone 42268 (TRAV12-1, TRAJ40)
CVVYSGTYKYILEQ

SEQ ID NO: 84536 - protein, 18 aa, Homo sapiens
  CDR3 for beta chain variable domain of TCR clone 42268 (TRBV11-2, TRBJ2-3)
CASSLGGASRGAPNTQYF

SEQ ID NO: 84537 - protein, 14 aa, Homo sapiens
  CDR3 for alpha chain variable domain of TCR clone 42269 (TRAV8-3, TRAJ36)
CAVGPITGANNLFF

SEQ ID NO: 84538 - protein, 15 aa, Homo sapiens
  CDR3 for beta chain variable domain of TCR clone 42269 (TRBV4-1, TRBJ2-1)
CASNQDPGNYNEQFF

SEQ ID NO: 84539 - protein, 15 aa, Homo sapiens
  CDR3 for alpha chain variable domain of TCR clone 42270 (TRAV17, TRAJ13)
CATDAGSGGYPKVTF

SEQ ID NO: 84540 - protein, 17 aa, Homo sapiens
  CDR3 for beta chain variable domain of TCR clone 42270 (TRBV11-2, TRBJ2-1)
CASSLYPPGVEYNEQFF

SEQ ID NO: 84541 - protein, 11 aa, Homo sapiens
  CDR3 for alpha chain variable domain of TCR clone 42271 (TRAV27, TRAJ20)
CAGADDYKLSF

SEQ ID NO: 84542 - protein, 15 aa, Homo sapiens
  CDR3 for beta chain variable domain of TCR clone 42271 (TRBV12-4, TRBJ2-5)
CASSPPTGLQETQYF

SEQ ID NO: 84543 - protein, 14 aa, Homo sapiens
  CDR3 for alpha chain variable domain of TCR clone 42272 (TRAV35, TRAJ24)
CAGPRRDSWGKLQF

SEQ ID NO: 84544 - protein, 12 aa, Homo sapiens
  CDR3 for beta chain variable domain of TCR clone 42272 (TRBV12-4, TRBJ2-3)
CASSVGQDTQYF

SEQ ID NO: 84545 - protein, 18 aa, Homo sapiens
  CDR3 for alpha chain variable domain of TCR clone 42273 (TRAV26-2, TRAJ45)
CILRLWGYSGGGADGLIF

SEQ ID NO: 84546 - protein, 17 aa, Homo sapiens
  CDR3 for beta chain variable domain of TCR clone 42273 (TRBV28, TRBJ2-3)
CASSPTPAGGRVDTQYF

SEQ ID NO: 84547 - protein, 23 aa, Homo sapiens
  CDR3 for alpha chain variable domain of TCR clone 42274 (TRAV26-1, TRAJ38)
CIADNAGNNHIQNPDPAVCQLRD

SEQ ID NO: 84548 - protein, 12 aa, Homo sapiens
  CDR3 for beta chain variable domain of TCR clone 42274 (TRBV11-2, TRBJ2-2)
CASSLGGGELFF

SEQ ID NO: 84549 - protein, 18 aa, Homo sapiens
  CDR3 for alpha chain variable domain of TCR clone 42275 (TRAV21, TRAJ52)
CAVRPSPAGGTSYGKLTF

SEQ ID NO: 84550 - protein, 17 aa, Homo sapiens
  CDR3 for beta chain variable domain of TCR clone 42275 (TRBV7-8, TRBJ2-1)
CASSPPTGTLAYNEQFF

SEQ ID NO: 84551 - protein, 13 aa, Homo sapiens
  CDR3 for alpha chain variable domain of TCR clone 42276 (TRAV13-1, TRAJ39)
CSKYSNAGSMLTF

SEQ ID NO: 84552 - protein, 16 aa, Homo sapiens
  CDR3 for beta chain variable domain of TCR clone 42276 (TRBV20-1, TRBJ1-4)
CSAPGQGLLTNEKLFF

SEQ ID NO: 84553 - protein, 20 aa, Homo sapiens
  CDR3 for alpha chain variable domain of TCR clone 42277 (TRAV12-1, TRAJ42)
SSVIQPPTSVKGGSQGNLIF

SEQ ID NO: 84554 - protein, 18 aa, Homo sapiens
  CDR3 for beta chain variable domain of TCR clone 42277 (TRBV11-2, TRBJ2-3)
CACSLGGASRGAPNTQYF

SEQ ID NO: 84555 - protein, 14 aa, Homo sapiens
  CDR3 for alpha chain variable domain of TCR clone 42278 (TRAV1-2, TRAJ8)
CAVREDTGFQKLVF

SEQ ID NO: 84556 - protein, 15 aa, Homo sapiens
  CDR3 for beta chain variable domain of TCR clone 42278 (TRBV6-3, TRBJ2-7)
CASSSAGTVFYEQYF

SEQ ID NO: 84557 - protein, 14 aa, Homo sapiens
  CDR3 for alpha chain variable domain of TCR clone 42279 (TRAV2, TRAJ37)
CAVDFTSNTGKLIF

SEQ ID NO: 84558 - protein, 13 aa, Homo sapiens
  CDR3 for beta chain variable domain of TCR clone 42279 (TRBV12-4, TRBJ1-1)
CASSPGTGFEAFF

SEQ ID NO: 84559 - protein, 18 aa, Homo sapiens
  CDR3 for alpha chain variable domain of TCR clone 42280 (TRAV21, TRAJ52)
CAVRPSPAGGTSYGKLTF

SEQ ID NO: 84560 - protein, 13 aa, Homo sapiens
  CDR3 for beta chain variable domain of TCR clone 42280 (TRBV6-1, TRBJ1-1)
CASSRQGNTEAFF

SEQ ID NO: 84561 - protein, 12 aa, Homo sapiens
  CDR3 for alpha chain variable domain of TCR clone 42281 (TRAV17, TRAJ4)
CATDGGYNKLIF

SEQ ID NO: 84562 - protein, 13 aa, Homo sapiens
  CDR3 for beta chain variable domain of TCR clone 42281 (TRBV29-1, TRBJ2-2)
CSTTGVSTGELFF

SEQ ID NO: 84563 - protein, 12 aa, Homo sapiens
  CDR3 for alpha chain variable domain of TCR clone 42282 (TRAV12-3, TRAJ40)
CAMSSGTYKYIF

SEQ ID NO: 84564 - protein, 13 aa, Homo sapiens
  CDR3 for beta chain variable domain of TCR clone 42282 (TRBV19, TRBJ1-5)
CASSIGGEQPQHF

SEQ ID NO: 84565 - protein, 15 aa, Homo sapiens
  CDR3 for alpha chain variable domain of TCR clone 42283 (TRAV2, TRAJ15)
CAVEDRGQAGTALIF

SEQ ID NO: 84566 - protein, 13 aa, Homo sapiens
  CDR3 for beta chain variable domain of TCR clone 42283 (TRBV10-2, TRBJ2-7)
YASGASGGYEQYF

SEQ ID NO: 84567 - protein, 14 aa, Homo sapiens
  CDR3 for alpha chain variable domain of TCR clone 42284 (TRAV12-1, TRAJ10)
CVVNSAGGGNKLTF

SEQ ID NO: 84568 - protein, 14 aa, Homo sapiens
  CDR3 for beta chain variable domain of TCR clone 42284 (TRBV12-4, TRBJ1-1)
CASSLGTGGTGAFF

SEQ ID NO: 84569 - protein, 14 aa, Homo sapiens
  CDR3 for alpha chain variable domain of TCR clone 42285 (TRAV13-1, TRAJ9)
CAASALTGGFKTIF

SEQ ID NO: 84570 - protein, 13 aa, Homo sapiens
  CDR3 for beta chain variable domain of TCR clone 42285 (TRBV20-1, TRBJ1-1)
CSAGTVGNTEALF

SEQ ID NO: 84571 - protein, 13 aa, Homo sapiens
  CDR3 for alpha chain variable domain of TCR clone 42286 (TRAV12-3, TRAJ33)
CAMSVTSNYQLIW

SEQ ID NO: 84572 - protein, 13 aa, Homo sapiens
  CDR3 for beta chain variable domain of TCR clone 42286 (TRBV7-2, TRBJ2-2)
CASSLAVTGELFF

SEQ ID NO: 84573 - protein, 13 aa, Homo sapiens
  CDR3 for alpha chain variable domain of TCR clone 42287 (TRAV2, TRAJ40)
CAVVTSGTYKYIF

SEQ ID NO: 84574 - protein, 15 aa, Homo sapiens
  CDR3 for beta chain variable domain of TCR clone 42287 (TRBV29-1, TRBJ2-1)
CSGRDRKSSYNEQFF

SEQ ID NO: 84575 - protein, 14 aa, Homo sapiens
  CDR3 for alpha chain variable domain of TCR clone 42288 (TRAV2, TRAJ37)
CAVDFTSNTGKLIF

SEQ ID NO: 84576 - protein, 15 aa, Homo sapiens
  CDR3 for beta chain variable domain of TCR clone 42288 (TRBV20-1, TRBJ1-1)
FSASRGVTGNTEAFF

SEQ ID NO: 84577 - protein, 13 aa, Homo sapiens
  CDR3 for alpha chain variable domain of TCR clone 42289 (TRAV27, TRAJ6)
CAGGTRGSDIPTF

SEQ ID NO: 84578 - protein, 13 aa, Homo sapiens
  CDR3 for beta chain variable domain of TCR clone 42289 (TRBV4-1, TRBJ2-2)
CASSQENTGELFF

SEQ ID NO: 84579 - protein, 13 aa, Homo sapiens
  CDR3 for alpha chain variable domain of TCR clone 42290 (TRAV1-2, TRAJ9)
FAVLNTGGFKTIF

SEQ ID NO: 84580 - protein, 14 aa, Homo sapiens
  CDR3 for beta chain variable domain of TCR clone 42290 (TRBV20-1, TRBJ2-3)
CSARGGTSTDTQYF

SEQ ID NO: 84581 - protein, 13 aa, Homo sapiens
  CDR3 for alpha chain variable domain of TCR clone 42291 (TRAV1-2, TRAJ9)
CAALNTGSSKTIF

SEQ ID NO: 84582 - protein, 13 aa, Homo sapiens
  CDR3 for beta chain variable domain of TCR clone 42291 (TRBV19, TRBJ1-2)
CASSVPGQDGYTF

SEQ ID NO: 84583 - protein, 11 aa, Homo sapiens
  CDR3 for alpha chain variable domain of TCR clone 42292 (TRAV21, TRAJ33)
CAVLSNYQLIW

SEQ ID NO: 84584 - protein, 15 aa, Homo sapiens
  CDR3 for beta chain variable domain of TCR clone 42292 (TRBV11-2, TRBJ2-7)
CASSLMVGGSYEQYS

SEQ ID NO: 84585 - protein, 21 aa, Homo sapiens
  CDR3 for alpha chain variable domain of TCR clone 42293 (TRAV30, TRAJ43)
GLPAQLLRNLLPIIELNDMRF

SEQ ID NO: 84586 - protein, 14 aa, Homo sapiens
  CDR3 for beta chain variable domain of TCR clone 42293 (TRBV27, TRBJ2-1)
CASRHLEGGKEQFF

SEQ ID NO: 84587 - protein, 12 aa, Homo sapiens
  CDR3 for alpha chain variable domain of TCR clone 42294 (TRAV17, TRAJ57)
CATDGGSEELVF

SEQ ID NO: 84588 - protein, 12 aa, Homo sapiens
  CDR3 for beta chain variable domain of TCR clone 42294 (TRBV29-1, TRBJ2-2)
CSVDKYTGELFF

SEQ ID NO: 84589 - protein, 15 aa, Homo sapiens
  CDR3 for alpha chain variable domain of TCR clone 42295 (TRAV17, TRAJ57)
CAAGPSQGGSEKLVF

SEQ ID NO: 84590 - protein, 14 aa, Homo sapiens
  CDR3 for beta chain variable domain of TCR clone 42295 (TRBV12-5, TRBJ2-5)
CASGSRTHQETQYF

SEQ ID NO: 84591 - protein, 14 aa, Homo sapiens
  CDR3 for alpha chain variable domain of TCR clone 42296 (TRAV20, TRAJ56)
CAVQFGGAKSKLTF

SEQ ID NO: 84592 - protein, 14 aa, Homo sapiens
  CDR3 for beta chain variable domain of TCR clone 42296 (TRBV20-1, TRBJ2-7)
CSAKRGRSSYEQYF

SEQ ID NO: 84593 - protein, 13 aa, Homo sapiens
  CDR3 for alpha chain variable domain of TCR clone 42297 (TRAV16, TRAJ54)
CALMVQGAQKLVF

SEQ ID NO: 84594 - protein, 12 aa, Homo sapiens
  CDR3 for beta chain variable domain of TCR clone 42297 (TRBV18, TRBJ2-7)
CASSTAMGEQCF

SEQ ID NO: 84595 - protein, 14 aa, Homo sapiens
  CDR3 for alpha chain variable domain of TCR clone 42298 (TRAV23/DV6, TRAJ8)
CAASKATGFQKLVF

SEQ ID NO: 84596 - protein, 15 aa, Homo sapiens
  CDR3 for beta chain variable domain of TCR clone 42298 (TRBV28, TRBJ2-3)
CASNPDRQGANTQYF

SEQ ID NO: 84597 - protein, 13 aa, Homo sapiens
  CDR3 for alpha chain variable domain of TCR clone 42299 (TRAV17, TRAJ9)
CATDYTGGFKTIF

SEQ ID NO: 84598 - protein, 13 aa, Homo sapiens
  CDR3 for beta chain variable domain of TCR clone 42299 (TRBV7-9, TRBJ1-2)
CASSLKQNYGCTF

SEQ ID NO: 84599 - protein, 14 aa, Homo sapiens
  CDR3 for alpha chain variable domain of TCR clone 42300 (TRAV12-3, TRAJ22)
CAMSLFSSARQLTF

SEQ ID NO: 84600 - protein, 11 aa, Homo sapiens
  CDR3 for beta chain variable domain of TCR clone 42300 (TRBV12-4, TRBJ2-2)
CASSSAGELFF

SEQ ID NO: 84601 - protein, 14 aa, Homo sapiens
  CDR3 for alpha chain variable domain of TCR clone 42301 (TRAV8-3, TRAJ39)
CAVGANNAGNMLTF

SEQ ID NO: 84602 - protein, 12 aa, Homo sapiens
  CDR3 for beta chain variable domain of TCR clone 42301 (TRBV11-3, TRBJ1-1)
CASSHRRGEAFF

SEQ ID NO: 84603 - protein, 13 aa, Homo sapiens
  CDR3 for alpha chain variable domain of TCR clone 42302 (TRAV30, TRAJ24)
CGTVTDSWGKLQF

SEQ ID NO: 84604 - protein, 15 aa, Homo sapiens
  CDR3 for beta chain variable domain of TCR clone 42302 (TRBV27, TRBJ2-1)
CASSNGGGSSNEQFF

SEQ ID NO: 84605 - protein, 16 aa, Homo sapiens
  CDR3 for alpha chain variable domain of TCR clone 42303 (TRAV26-2, TRAJ52)
CIRGPAGGTSYGRLTF

SEQ ID NO: 84606 - protein, 15 aa, Homo sapiens
  CDR3 for beta chain variable domain of TCR clone 42303 (TRBV20-1, TRBJ1-1)
CSASRGVTGNTEAFF

SEQ ID NO: 84607 - protein, 14 aa, Homo sapiens
  CDR3 for alpha chain variable domain of TCR clone 42304 (TRAV3, TRAJ34)
CAVRDINNTDKPIF

SEQ ID NO: 84608 - protein, 15 aa, Homo sapiens
  CDR3 for beta chain variable domain of TCR clone 42304 (TRBV20-1, TRBJ2-7)
CSARDRVSGMDEQYF

SEQ ID NO: 84609 - protein, 14 aa, Homo sapiens
  CDR3 for alpha chain variable domain of TCR clone 42305 (TRAV12-3, TRAJ9)
CAMSPNTGGFKTIF

SEQ ID NO: 84610 - protein, 14 aa, Homo sapiens
  CDR3 for beta chain variable domain of TCR clone 42305 (TRBV20-1, TRBJ2-1)
CSALDRGTYNEQFF

SEQ ID NO: 84611 - protein, 14 aa, Homo sapiens
  CDR3 for alpha chain variable domain of TCR clone 42306 (TRAV8-3, TRAJ6)
CAVGASGGGYIPTF

SEQ ID NO: 84612 - protein, 17 aa, Homo sapiens
  CDR3 for beta chain variable domain of TCR clone 42306 (TRBV18, TRBJ2-2)
CASSPSDPWQNTGELFF

SEQ ID NO: 84613 - protein, 14 aa, Homo sapiens
  CDR3 for alpha chain variable domain of TCR clone 42307 (TRAV1-2, TRAJ8)
CAVREDTGFQKLVF

SEQ ID NO: 84614 - protein, 13 aa, Homo sapiens
  CDR3 for beta chain variable domain of TCR clone 42307 (TRBV19, TRBJ2-7)
CASSAGHGYEQYF

SEQ ID NO: 84615 - protein, 14 aa, Homo sapiens
  CDR3 for alpha chain variable domain of TCR clone 42308 (TRAV12-3, TRAJ56)
CAMSVTGANSKLTF

SEQ ID NO: 84616 - protein, 15 aa, Homo sapiens
  CDR3 for beta chain variable domain of TCR clone 42308 (TRBV20-1, TRBJ2-7)
CSARDRVSGMDEQYF

SEQ ID NO: 84617 - protein, 10 aa, Homo sapiens
  CDR3 for alpha chain variable domain of TCR clone 42309 (TRAV12-1, TRAJ43)
CVVHNNDMRF

SEQ ID NO: 84618 - protein, 18 aa, Homo sapiens
  CDR3 for beta chain variable domain of TCR clone 42309 (TRBV11-2, TRBJ2-3)
CASSLGGASRGAPNTQYF

SEQ ID NO: 84619 - protein, 14 aa, Homo sapiens
  CDR3 for alpha chain variable domain of TCR clone 42310 (TRAV8-4, TRAJ39)
CAMSLNNAGNMLTF

SEQ ID NO: 84620 - protein, 16 aa, Homo sapiens
  CDR3 for beta chain variable domain of TCR clone 42310 (TRBV13, TRBJ2-7)
CASSSRESGRTYEQCF

SEQ ID NO: 84621 - protein, 13 aa, Homo sapiens
  CDR3 for alpha chain variable domain of TCR clone 42311 (TRAV13-1, TRAJ39)
CSKYSNAGNMLTF

SEQ ID NO: 84622 - protein, 15 aa, Homo sapiens
  CDR3 for beta chain variable domain of TCR clone 42311 (TRBV20-1, TRBJ2-7)
CSARGPLAGGREQYF

SEQ ID NO: 84623 - protein, 17 aa, Homo sapiens
  CDR3 for alpha chain variable domain of TCR clone 42312 (TRAV8-1, TRAJ43)
CAVTNDMRFGAGTSLTV

SEQ ID NO: 84624 - protein, 17 aa, Homo sapiens
  CDR3 for beta chain variable domain of TCR clone 42312 (TRBV5-4, TRBJ2-1)
CASSSAGGRGPYNEQFF

SEQ ID NO: 84625 - protein, 14 aa, Homo sapiens
  CDR3 for alpha chain variable domain of TCR clone 42313 (TRAV12-1, TRAJ17)
SVVNYKAAGNKLTF

SEQ ID NO: 84626 - protein, 17 aa, Homo sapiens
  CDR3 for beta chain variable domain of TCR clone 42313 (TRBV20-1, TRBJ2-1)
CSASSSGLAGSYNEQFF

SEQ ID NO: 84627 - protein, 15 aa, Homo sapiens
  CDR3 for alpha chain variable domain of TCR clone 42314 (TRAV21, TRAJ24)
CAARSSTDSWGKLQF

SEQ ID NO: 84628 - protein, 13 aa, Homo sapiens
  CDR3 for beta chain variable domain of TCR clone 42314 (TRBV11-2, TRBJ2-5)
CASRSTGEETQYF

SEQ ID NO: 84629 - protein, 16 aa, Homo sapiens
  CDR3 for alpha chain variable domain of TCR clone 42315 (TRAV3, TRAJ37)
CAVRPHGSGSTGKLIF

SEQ ID NO: 84630 - protein, 14 aa, Homo sapiens
  CDR3 for beta chain variable domain of TCR clone 42315 (TRBV25-1, TRBJ1-1)
CASTHLGGNTEAFF

SEQ ID NO: 84631 - protein, 15 aa, Homo sapiens
  CDR3 for alpha chain variable domain of TCR clone 42316 (TRAV12-1, TRAJ44)
CVADLPTGIASKLTF

SEQ ID NO: 84632 - protein, 13 aa, Homo sapiens
  CDR3 for beta chain variable domain of TCR clone 42316 (TRBV6-5, TRBJ2-5)
CASSPQGGETQYF

SEQ ID NO: 84633 - protein, 12 aa, Homo sapiens
  CDR3 for alpha chain variable domain of TCR clone 42317 (TRAV21, TRAJ13)
PGPSGGYQKVTF

SEQ ID NO: 84634 - protein, 15 aa, Homo sapiens
  CDR3 for beta chain variable domain of TCR clone 42317 (TRBV27, TRBJ2-5)
CASSLYPRGGETQYL

SEQ ID NO: 84635 - protein, 16 aa, Homo sapiens
  CDR3 for alpha chain variable domain of TCR clone 42318 (TRAV4, TRAJ22)
CLVGDLYSGFARQLTF

SEQ ID NO: 84636 - protein, 16 aa, Homo sapiens
  CDR3 for beta chain variable domain of TCR clone 42318 (TRBV7-9, TRBJ2-1)
CASSDVAGGSYNEQFF

SEQ ID NO: 84637 - protein, 12 aa, Homo sapiens
  CDR3 for alpha chain variable domain of TCR clone 42319 (TRAV1-1, TRAJ8)
CAGGTGFQKLVF

SEQ ID NO: 84638 - protein, 14 aa, Homo sapiens
  CDR3 for beta chain variable domain of TCR clone 42319 (TRBV7-2, TRBJ2-7)
CASSPKTSFYEQYF

SEQ ID NO: 84639 - protein, 12 aa, Homo sapiens
  CDR3 for alpha chain variable domain of TCR clone 42320 (TRAV1-1, TRAJ8)
CAGGTGFQKLVF

SEQ ID NO: 84640 - protein, 13 aa, Homo sapiens
  CDR3 for beta chain variable domain of TCR clone 42320 (TRBV12-4, TRBJ1-2)
CASSLRQGKGYTF

SEQ ID NO: 84641 - protein, 13 aa, Homo sapiens
  CDR3 for alpha chain variable domain of TCR clone 42321 (TRAV17, TRAJ9)
CATDYTGGFKTIF

SEQ ID NO: 84642 - protein, 16 aa, Homo sapiens
  CDR3 for beta chain variable domain of TCR clone 42321 (TRBV7-7, TRBJ2-1)
CASSLASGTSHNEQFF

SEQ ID NO: 84643 - protein, 16 aa, Homo sapiens
  CDR3 for alpha chain variable domain of TCR clone 42322 (TRAV4, TRAJ22)
CLVGDLYSGSARQPTF

SEQ ID NO: 84644 - protein, 16 aa, Homo sapiens
  CDR3 for beta chain variable domain of TCR clone 42322 (TRBV7-9, TRBJ2-3)
CASSPWREVGTDTQYF

SEQ ID NO: 84645 - protein, 12 aa, Homo sapiens
  CDR3 for alpha chain variable domain of TCR clone 42323 (TRAV12-3, TRAJ17)
CAMTLTGNKLTF

SEQ ID NO: 84646 - protein, 13 aa, Homo sapiens
  CDR3 for beta chain variable domain of TCR clone 42323 (TRBV2, TRBJ1-1)
CASSVLMNTEAFF

SEQ ID NO: 84647 - protein, 15 aa, Homo sapiens
  CDR3 for alpha chain variable domain of TCR clone 42324 (TRAV12-3, TRAJ49)
CAMAVTPSTGNQFYF

SEQ ID NO: 84648 - protein, 18 aa, Homo sapiens
  CDR3 for beta chain variable domain of TCR clone 42324 (TRBV4-1, TRBJ1-5)
CASSQDPRGQGLNQPQHF

SEQ ID NO: 84649 - protein, 18 aa, Homo sapiens
  CDR3 for alpha chain variable domain of TCR clone 42325 (TRAV26-1, TRAJ52)
CIVRVEGAGGTSYGKLTF

SEQ ID NO: 84650 - protein, 11 aa, Homo sapiens
  CDR3 for beta chain variable domain of TCR clone 42325 (TRBV7-9, TRBJ2-3)
CASSGPDTQYF

SEQ ID NO: 84651 - protein, 14 aa, Homo sapiens
  CDR3 for alpha chain variable domain of TCR clone 42326 (TRAV38-2/DV8, TRAJ31)
CAYRSDNNNARLTF

SEQ ID NO: 84652 - protein, 13 aa, Homo sapiens
  CDR3 for beta chain variable domain of TCR clone 42326 (TRBV28, TRBJ1-1)
CASSKQGWTEAFF

SEQ ID NO: 84653 - protein, 14 aa, Homo sapiens
  CDR3 for alpha chain variable domain of TCR clone 42327 (TRAV17, TRAJ32)
CATDPGGATNKLIF

SEQ ID NO: 84654 - protein, 14 aa, Homo sapiens
  CDR3 for beta chain variable domain of TCR clone 42327 (TRBV2, TRBJ1-5)
CASSENRGGHPQHF

SEQ ID NO: 84655 - protein, 14 aa, Homo sapiens
  CDR3 for alpha chain variable domain of TCR clone 42328 (TRAV13-2, TRAJ43)
CAEIPTYNKNDMRF

SEQ ID NO: 84656 - protein, 15 aa, Homo sapiens
  CDR3 for beta chain variable domain of TCR clone 42328 (TRBV7-9, TRBJ2-2)
CASGPLDTFPGELFF

SEQ ID NO: 84657 - protein, 14 aa, Homo sapiens
  CDR3 for alpha chain variable domain of TCR clone 42329 (TRAV12-3, TRAJ10)
SHLPLTGGGNKLTF

SEQ ID NO: 84658 - protein, 12 aa, Homo sapiens
  CDR3 for beta chain variable domain of TCR clone 42329 (TRBV5-1, TRBJ1-2)
CASSQDTYGYTF

SEQ ID NO: 84659 - protein, 14 aa, Homo sapiens
  CDR3 for alpha chain variable domain of TCR clone 42330 (TRAV12-2, TRAJ13)
CAVKKTGGYQKVTF

SEQ ID NO: 84660 - protein, 12 aa, Homo sapiens
  CDR3 for beta chain variable domain of TCR clone 42330 (TRBV7-9, TRBJ1-4)
CASSTDREKLFF

SEQ ID NO: 84661 - protein, 14 aa, Homo sapiens
  CDR3 for alpha chain variable domain of TCR clone 42331 (TRAV26-1, TRAJ38)
CIADNAGNNRKLIW

SEQ ID NO: 84662 - protein, 13 aa, Homo sapiens
  CDR3 for beta chain variable domain of TCR clone 42331 (TRBV20-1, TRBJ1-1)
CSAPLGGGTEAFF

SEQ ID NO: 84663 - protein, 16 aa, Homo sapiens
  CDR3 for alpha chain variable domain of TCR clone 42332 (TRAV3, TRAJ42)
CAVRDIKGGSQGNLIF

SEQ ID NO: 84664 - protein, 15 aa, Homo sapiens
  CDR3 for beta chain variable domain of TCR clone 42332 (TRBV9, TRBJ2-2)
CASSDFAGASGELFF

SEQ ID NO: 84665 - protein, 13 aa, Homo sapiens
  CDR3 for alpha chain variable domain of TCR clone 42333 (TRAV29/DV5, TRAJ31)
CAASRNNNARLMF

SEQ ID NO: 84666 - protein, 11 aa, Homo sapiens
  CDR3 for beta chain variable domain of TCR clone 42333 (TRBV29-1, TRBJ2-5)
CSEDRTGTQYF

SEQ ID NO: 84667 - protein, 12 aa, Homo sapiens
  CDR3 for alpha chain variable domain of TCR clone 42334 (TRAV1-1, TRAJ39)
CAVPVVGNMLTF

SEQ ID NO: 84668 - protein, 15 aa, Homo sapiens
  CDR3 for beta chain variable domain of TCR clone 42334 (TRBV27, TRBJ2-7)
CASSPDQGRLYEQYF

SEQ ID NO: 84669 - protein, 11 aa, Homo sapiens
  CDR3 for alpha chain variable domain of TCR clone 42335 (TRAV3, TRAJ32)
CAVRGGIMVVL

SEQ ID NO: 84670 - protein, 13 aa, Homo sapiens
  CDR3 for beta chain variable domain of TCR clone 42335 (TRBV2, TRBJ1-1)
CASSEGGNTEAFF

SEQ ID NO: 84671 - protein, 14 aa, Homo sapiens
  CDR3 for alpha chain variable domain of TCR clone 42336 (TRAV17, TRAJ16)
CATADFSDGQKLIF

SEQ ID NO: 84672 - protein, 15 aa, Homo sapiens
  CDR3 for beta chain variable domain of TCR clone 42336 (TRBV18, TRBJ2-1)
CASSPPSASYNEQFF

SEQ ID NO: 84673 - protein, 12 aa, Homo sapiens
  CDR3 for alpha chain variable domain of TCR clone 42337 (TRAV8-3, TRAJ26)
CAGDNYGQNFVF

SEQ ID NO: 84674 - protein, 14 aa, Homo sapiens
  CDR3 for beta chain variable domain of TCR clone 42337 (TRBV5-5, TRBJ1-5)
CASSRQGVDQPQHF

SEQ ID NO: 84675 - protein, 14 aa, Homo sapiens
  CDR3 for alpha chain variable domain of TCR clone 42338 (TRAV2, TRAJ37)
CAVDFTSNTGKPVF

SEQ ID NO: 84676 - protein, 15 aa, Homo sapiens
  CDR3 for beta chain variable domain of TCR clone 42338 (TRBV20-1, TRBJ1-1)
CSASRGVTGNTEAFF

SEQ ID NO: 84677 - protein, 15 aa, Homo sapiens
  CDR3 for alpha chain variable domain of TCR clone 42339 (TRAV26-1, TRAJ29)
CNVRVEGSGNTPLVF

SEQ ID NO: 84678 - protein, 14 aa, Homo sapiens
  CDR3 for beta chain variable domain of TCR clone 42339 (TRBV25-1, TRBJ1-1)
CASTHLGGNTEAFF

SEQ ID NO: 84679 - protein, 15 aa, Homo sapiens
  CDR3 for alpha chain variable domain of TCR clone 42340 (TRAV3, TRAJ22)
CAVRDRGGSARQLTF

SEQ ID NO: 84680 - protein, 16 aa, Homo sapiens
  CDR3 for beta chain variable domain of TCR clone 42340 (TRBV5-4, TRBJ2-3)
CAGQQPGAGGADTQYF

SEQ ID NO: 84681 - protein, 13 aa, Homo sapiens
  CDR3 for alpha chain variable domain of TCR clone 42341 (TRAV26-1, TRAJ30)
CIVRVESNDKIIF

SEQ ID NO: 84682 - protein, 15 aa, Homo sapiens
  CDR3 for beta chain variable domain of TCR clone 42341 (TRBV6-1, TRBJ2-3)
CASSERGGITDKQYF

SEQ ID NO: 84683 - protein, 12 aa, Homo sapiens
  CDR3 for alpha chain variable domain of TCR clone 42342 (TRAV12-3, TRAJ17)
CAMTLTGNKLTF

SEQ ID NO: 84684 - protein, 16 aa, Homo sapiens
  CDR3 for beta chain variable domain of TCR clone 42342 (TRBV12-4, TRBJ2-5)
CASSFFVRGRRETQYF

SEQ ID NO: 84685 - protein, 16 aa, Homo sapiens
  CDR3 for alpha chain variable domain of TCR clone 42343 (TRAV30, TRAJ24)
CGTEIVDAGSWGKFQF

SEQ ID NO: 84686 - protein, 13 aa, Homo sapiens
  CDR3 for beta chain variable domain of TCR clone 42343 (TRBV18, TRBJ1-1)
CASSGGRNTEAFF

SEQ ID NO: 84687 - protein, 12 aa, Homo sapiens
  CDR3 for alpha chain variable domain of TCR clone 42344 (TRAV12-3, TRAJ17)
CAMTLTGNKLTL

SEQ ID NO: 84688 - protein, 15 aa, Homo sapiens
  CDR3 for beta chain variable domain of TCR clone 42344 (TRBV20-1, TRBJ2-7)
CSAKDRVSGMDEQYF

SEQ ID NO: 84689 - protein, 16 aa, Homo sapiens
  CDR3 for alpha chain variable domain of TCR clone 42345 (TRAV1-1, TRAJ29)
CAVRSTRNSGNTPLVF

SEQ ID NO: 84690 - protein, 15 aa, Homo sapiens
  CDR3 for beta chain variable domain of TCR clone 42345 (TRBV19, TRBJ2-5)
CASSIARGRQETQYF

SEQ ID NO: 84691 - protein, 14 aa, Homo sapiens
  CDR3 for alpha chain variable domain of TCR clone 42346 (TRAV17, TRAJ35)
CATDRPGFGNVLHC

SEQ ID NO: 84692 - protein, 19 aa, Homo sapiens
  CDR3 for beta chain variable domain of TCR clone 42346 (TRBV11-3, TRBJ2-2)
CASSARPGAKTTNTGELFF

SEQ ID NO: 84693 - protein, 18 aa, Homo sapiens
  CDR3 for alpha chain variable domain of TCR clone 42347 (TRAV13-1, TRAJ52)
CAAKNPNAGGTSYGKLTF

SEQ ID NO: 84694 - protein, 12 aa, Homo sapiens
  CDR3 for beta chain variable domain of TCR clone 42347 (TRBV11-2, TRBJ2-2)
CASSLGGGELFF

SEQ ID NO: 84695 - protein, 14 aa, Homo sapiens
  CDR3 for alpha chain variable domain of TCR clone 42348 (TRAV1-2, TRAJ8)
CAVREDTGFQKLVY

SEQ ID NO: 84696 - protein, 15 aa, Homo sapiens
  CDR3 for beta chain variable domain of TCR clone 42348 (TRBV6-3, TRBJ2-7)
CASSSPGTVFYEQYF

SEQ ID NO: 84697 - protein, 13 aa, Homo sapiens
  CDR3 for alpha chain variable domain of TCR clone 42349 (TRAV12-1, TRAJ17)
CVVNKAAGNKLTF

SEQ ID NO: 84698 - protein, 16 aa, Homo sapiens
  CDR3 for beta chain variable domain of TCR clone 42349 (TRBV11-2, TRBJ2-2)
CASSRRTGNLIGELFF

SEQ ID NO: 84699 - protein, 14 aa, Homo sapiens
  CDR3 for alpha chain variable domain of TCR clone 42350 (TRAV9-2, TRAJ39)
CALYIYNAGNMLTF

SEQ ID NO: 84700 - protein, 20 aa, Homo sapiens
  CDR3 for beta chain variable domain of TCR clone 42350 (TRBV28, TRBJ2-1)
CASTPIGRSPGLAGGNEQFF

SEQ ID NO: 84701 - protein, 11 aa, Homo sapiens
  CDR3 for alpha chain variable domain of TCR clone 42351 (TRAV21, TRAJ34)
CAHYNTAKLIF

SEQ ID NO: 84702 - protein, 13 aa, Homo sapiens
  CDR3 for beta chain variable domain of TCR clone 42351 (TRBV7-6, TRBJ1-2)
CASSLVADYGYTF

SEQ ID NO: 84703 - protein, 14 aa, Homo sapiens
  CDR3 for alpha chain variable domain of TCR clone 42352 (TRAV16, TRAJ8)
CALLLSTGFQKLVF

SEQ ID NO: 84704 - protein, 15 aa, Homo sapiens
  CDR3 for beta chain variable domain of TCR clone 42352 (TRBV7-7, TRBJ2-2)
CATSKLAKNTGELFF

SEQ ID NO: 84705 - protein, 15 aa, Homo sapiens
  CDR3 for alpha chain variable domain of TCR clone 42353 (TRAV8-3, TRAJ11)
CAVGLLNSGYSTLTF

SEQ ID NO: 84706 - protein, 18 aa, Homo sapiens
  CDR3 for beta chain variable domain of TCR clone 42353 (TRBV11-2, TRBJ2-3)
CASSLGGASRGAPNTQYF

SEQ ID NO: 84707 - protein, 13 aa, Homo sapiens
  CDR3 for alpha chain variable domain of TCR clone 42354 (TRAV8-6, TRAJ50)
CAVIKTSYDKVIL

SEQ ID NO: 84708 - protein, 15 aa, Homo sapiens
  CDR3 for beta chain variable domain of TCR clone 42354 (TRBV7-2, TRBJ2-2)
CASRRPGQNTGELFF

SEQ ID NO: 84709 - protein, 15 aa, Homo sapiens
  CDR3 for alpha chain variable domain of TCR clone 42355 (TRAV3, TRAJ3)
CAVRDRDSSASKIIF

SEQ ID NO: 84710 - protein, 14 aa, Homo sapiens
  CDR3 for beta chain variable domain of TCR clone 42355 (TRBV25-1, TRBJ1-1)
CASTHLGGNTEAFF

SEQ ID NO: 84711 - protein, 13 aa, Homo sapiens
  CDR3 for alpha chain variable domain of TCR clone 42356 (TRAV12-1, TRAJ9)
CVVVNTGGFKTIF

SEQ ID NO: 84712 - protein, 13 aa, Homo sapiens
  CDR3 for beta chain variable domain of TCR clone 42356 (TRBV20-1, TRBJ1-1)
CSARGGGNTEAFF

SEQ ID NO: 84713 - protein, 12 aa, Homo sapiens
  CDR3 for alpha chain variable domain of TCR clone 42357 (TRAV1-2, TRAJ33)
CAALDSNYRLIW

SEQ ID NO: 84714 - protein, 17 aa, Homo sapiens
  CDR3 for beta chain variable domain of TCR clone 42357 (TRBV25-1, TRBJ1-2)
CASGEFGSATTNYGYTF

SEQ ID NO: 84715 - protein, 16 aa, Homo sapiens
  CDR3 for alpha chain variable domain of TCR clone 42358 (TRAV27, TRAJ48)
NAAQPGDTGLYLPLTF

SEQ ID NO: 84716 - protein, 13 aa, Homo sapiens
  CDR3 for beta chain variable domain of TCR clone 42358 (TRBV7-2, TRBJ2-5)
CASSQTSVETQYF

SEQ ID NO: 84717 - protein, 14 aa, Homo sapiens
  CDR3 for alpha chain variable domain of TCR clone 42359 (TRAV12-2, TRAJ40)
CAVKIPSGTYKYIS

SEQ ID NO: 84718 - protein, 20 aa, Homo sapiens
  CDR3 for beta chain variable domain of TCR clone 42359 (TRBV28, TRBJ2-1)
CASTPIGRSPGLAGGNEQFF

SEQ ID NO: 84719 - protein, 18 aa, Homo sapiens
  CDR3 for alpha chain variable domain of TCR clone 42360 (TRAV21, TRAJ52)
CAVRPSPAGGTSYGKLTF

SEQ ID NO: 84720 - protein, 17 aa, Homo sapiens
  CDR3 for beta chain variable domain of TCR clone 42360 (TRBV13, TRBJ2-3)
CASSLSRVAGGRNTQYY

SEQ ID NO: 84721 - protein, 20 aa, Homo sapiens
  CDR3 for alpha chain variable domain of TCR clone 42361 (TRAV26-1, TRAJ42)
CCVLLHRQTYYGGSQGNLIF

SEQ ID NO: 84722 - protein, 16 aa, Homo sapiens
  CDR3 for beta chain variable domain of TCR clone 42361 (TRBV7-3, TRBJ2-2)
CANSLKRGTLSGELFF

SEQ ID NO: 84723 - protein, 13 aa, Homo sapiens
  CDR3 for alpha chain variable domain of TCR clone 42362 (TRAV2, TRAJ40)
CAVVTSGTYKYIF

SEQ ID NO: 84724 - protein, 13 aa, Homo sapiens
  CDR3 for beta chain variable domain of TCR clone 42362 (TRBV15, TRBJ1-6)
CATSGGLNSPLHF

SEQ ID NO: 84725 - protein, 15 aa, Homo sapiens
  CDR3 for alpha chain variable domain of TCR clone 42363 (TRAV26-1, TRAJ58)
CIVRIQETSGSRLTF

SEQ ID NO: 84726 - protein, 13 aa, Homo sapiens
  CDR3 for beta chain variable domain of TCR clone 42363 (TRBV6-5, TRBJ2-1)
CASIGETSKRELF

SEQ ID NO: 84727 - protein, 14 aa, Homo sapiens
  CDR3 for alpha chain variable domain of TCR clone 42364 (TRAV3, TRAJ37)
CAVKESGNTGKLIF

SEQ ID NO: 84728 - protein, 14 aa, Homo sapiens
  CDR3 for beta chain variable domain of TCR clone 42364 (TRBV7-2, TRBJ1-1)
CASSFLTGTTEAFF

SEQ ID NO: 84729 - protein, 15 aa, Homo sapiens
  CDR3 for alpha chain variable domain of TCR clone 42365 (TRAV4, TRAJ39)
CLVGPNNNAGNMLTF

SEQ ID NO: 84730 - protein, 22 aa, Homo sapiens
  CDR3 for beta chain variable domain of TCR clone 42365 (TRBV11-2, TRBJ1-4)
CASSLDITRRGIPRKDNEKLFF

SEQ ID NO: 84731 - protein, 14 aa, Homo sapiens
  CDR3 for alpha chain variable domain of TCR clone 42366 (TRAV5, TRAJ36)
CAEISGTGANNLFF

SEQ ID NO: 84732 - protein, 14 aa, Homo sapiens
  CDR3 for beta chain variable domain of TCR clone 42366 (TRBV25-1, TRBJ2-4)
CASSRNSAKNIQYF

SEQ ID NO: 84733 - protein, 17 aa, Homo sapiens
  CDR3 for alpha chain variable domain of TCR clone 42367 (TRAV21, TRAJ24)
CAGIRLRSTDSWGKLQI

SEQ ID NO: 84734 - protein, 15 aa, Homo sapiens
  CDR3 for beta chain variable domain of TCR clone 42367 (TRBV7-2, TRBJ2-3)
CASSPRGLSTDTQYF

SEQ ID NO: 84735 - protein, 13 aa, Homo sapiens
  CDR3 for alpha chain variable domain of TCR clone 42368 (TRAV20, TRAJ37)
CAGCSSNTGKLIF

SEQ ID NO: 84736 - protein, 15 aa, Homo sapiens
  CDR3 for beta chain variable domain of TCR clone 42368 (TRBV7-9, TRBJ1-6)
CASSSPGRGNSPLHF

SEQ ID NO: 84737 - protein, 19 aa, Homo sapiens
  CDR3 for alpha chain variable domain of TCR clone 42369 (TRAV38-1, TRAJ53)
RAFMKHGLESGGSNYKLTF

SEQ ID NO: 84738 - protein, 13 aa, Homo sapiens
  CDR3 for beta chain variable domain of TCR clone 42369 (TRBV19, TRBJ2-7)
CASSPRQSYEQYF

SEQ ID NO: 84739 - protein, 15 aa, Homo sapiens
  CDR3 for alpha chain variable domain of TCR clone 42370 (TRAV17, TRAJ56)
CATDANTGANSKLTF

SEQ ID NO: 84740 - protein, 14 aa, Homo sapiens
  CDR3 for beta chain variable domain of TCR clone 42370 (TRBV19, TRBJ1-5)
CASSLGTGGQLQHF

SEQ ID NO: 84741 - protein, 12 aa, Homo sapiens
  CDR3 for alpha chain variable domain of TCR clone 42371 (TRAV13-2, TRAJ8)
CAPWLGFQKLVF

SEQ ID NO: 84742 - protein, 14 aa, Homo sapiens
  CDR3 for beta chain variable domain of TCR clone 42371 (TRBV18, TRBJ1-5)
CASSRQQRNRPQHF

SEQ ID NO: 84743 - protein, 14 aa, Homo sapiens
  CDR3 for alpha chain variable domain of TCR clone 42372 (TRAV13-1, TRAJ40)
CAASMTSGTYKYIF

SEQ ID NO: 84744 - protein, 15 aa, Homo sapiens
  CDR3 for beta chain variable domain of TCR clone 42372 (TRBV7-3, TRBJ2-1)
CAGSPTGGGEVEQFF

SEQ ID NO: 84745 - protein, 18 aa, Homo sapiens
  CDR3 for alpha chain variable domain of TCR clone 42373 (TRAV1-2, TRAJ18)
CAVRDMGDRGSTLGRLYF

SEQ ID NO: 84746 - protein, 14 aa, Homo sapiens
  CDR3 for beta chain variable domain of TCR clone 42373 (TRBV6-1, TRBJ1-3)
CASVQGGGGNTIYF

SEQ ID NO: 84747 - protein, 18 aa, Homo sapiens
  CDR3 for alpha chain variable domain of TCR clone 42374 (TRAV21, TRAJ52)
CAVRPSPAGGTSYGKLTF

SEQ ID NO: 84748 - protein, 15 aa, Homo sapiens
  CDR3 for beta chain variable domain of TCR clone 42374 (TRBV18, TRBJ1-1)
CASSPRQGENTEAFF

SEQ ID NO: 84749 - protein, 13 aa, Homo sapiens
  CDR3 for alpha chain variable domain of TCR clone 42375 (TRAV3, TRAJ20)
CCEAFCNDYKLSF

SEQ ID NO: 84750 - protein, 13 aa, Homo sapiens
  CDR3 for beta chain variable domain of TCR clone 42375 (TRBV7-3, TRBJ1-1)
CASSQDWGAEAFF

SEQ ID NO: 84751 - protein, 15 aa, Homo sapiens
  CDR3 for alpha chain variable domain of TCR clone 42376 (TRAV27, TRAJ50)
CAGVGRGTSYGKVIF

SEQ ID NO: 84752 - protein, 14 aa, Homo sapiens
  CDR3 for beta chain variable domain of TCR clone 42376 (TRBV7-2, TRBJ1-1)
CASSFYDLNTEAFF

SEQ ID NO: 84753 - protein, 11 aa, Homo sapiens
  CDR3 for alpha chain variable domain of TCR clone 42377 (TRAV35, TRAJ30)
CAGLRDDKIIF

SEQ ID NO: 84754 - protein, 15 aa, Homo sapiens
  CDR3 for beta chain variable domain of TCR clone 42377 (TRBV2, TRBJ1-3)
CASSISPRSGNTIYL

SEQ ID NO: 84755 - protein, 13 aa, Homo sapiens
  CDR3 for alpha chain variable domain of TCR clone 42378 (TRAV3, TRAJ20)
CAVRSLNDYKLIF

SEQ ID NO: 84756 - protein, 13 aa, Homo sapiens
  CDR3 for beta chain variable domain of TCR clone 42378 (TRBV6-1, TRBJ2-1)
CAGMDPTNNEQFF

SEQ ID NO: 84757 - protein, 17 aa, Homo sapiens
  CDR3 for alpha chain variable domain of TCR clone 42379 (TRAV3, TRAJ42)
CAVRDRDYGGSQGNLIF

SEQ ID NO: 84758 - protein, 14 aa, Homo sapiens
  CDR3 for beta chain variable domain of TCR clone 42379 (TRBV12-5, TRBJ2-5)
CASGSRTRQETQYF

SEQ ID NO: 84759 - protein, 14 aa, Homo sapiens
  CDR3 for alpha chain variable domain of TCR clone 42380 (TRAV12-2, TRAJ13)
CAVKKTGGYQKVTF

SEQ ID NO: 84760 - protein, 16 aa, Homo sapiens
  CDR3 for beta chain variable domain of TCR clone 42380 (TRBV7-9, TRBJ2-1)
CASSDVAGGSYNEQFF

SEQ ID NO: 84761 - protein, 17 aa, Homo sapiens
  CDR3 for alpha chain variable domain of TCR clone 42381 (TRAV13-1, TRAJ5)
CSNPSLSRDTGRRALTF

SEQ ID NO: 84762 - protein, 16 aa, Homo sapiens
  CDR3 for beta chain variable domain of TCR clone 42381 (TRBV6-1, TRBJ2-5)
CASSETLDRGAETQYF

SEQ ID NO: 84763 - protein, 13 aa, Homo sapiens
  CDR3 for alpha chain variable domain of TCR clone 42382 (TRAV17, TRAJ9)
CATGSTGGFKTIF

SEQ ID NO: 84764 - protein, 22 aa, Homo sapiens
  CDR3 for beta chain variable domain of TCR clone 42382 (TRBV7-8, TRBJ2-7)
RRTPPCISVPAPLGGGPNEQYF

SEQ ID NO: 84765 - protein, 15 aa, Homo sapiens
  CDR3 for alpha chain variable domain of TCR clone 42383 (TRAV8-3, TRAJ11)
CAVGLLNSGYSTLTF

SEQ ID NO: 84766 - protein, 16 aa, Homo sapiens
  CDR3 for beta chain variable domain of TCR clone 42383 (TRBV7-9, TRBJ1-2)
CASRLGFSSGEDGYTF

SEQ ID NO: 84767 - protein, 13 aa, Homo sapiens
  CDR3 for alpha chain variable domain of TCR clone 42384 (TRAV13-1, TRAJ40)
CAARTSGTYKYIF

SEQ ID NO: 84768 - protein, 17 aa, Homo sapiens
  CDR3 for beta chain variable domain of TCR clone 42384 (TRBV20-1, TRBJ2-1)
CSARDPLAGVWDNEQSF

SEQ ID NO: 84769 - protein, 16 aa, Homo sapiens
  CDR3 for alpha chain variable domain of TCR clone 42385 (TRAV8-3, TRAJ22)
CAVDLLGPGSARQLTF

SEQ ID NO: 84770 - protein, 13 aa, Homo sapiens
  CDR3 for beta chain variable domain of TCR clone 42385 (TRBV19, TRBJ1-3)
CASRLSLGNTIYF

SEQ ID NO: 84771 - protein, 14 aa, Homo sapiens
  CDR3 for alpha chain variable domain of TCR clone 42386 (TRAV12-2, TRAJ13)
CAVKKTGGYQKVTF

SEQ ID NO: 84772 - protein, 12 aa, Homo sapiens
  CDR3 for beta chain variable domain of TCR clone 42386 (TRBV6-3, TRBJ2-7)
CASSEPGFEQYF

SEQ ID NO: 84773 - protein, 12 aa, Homo sapiens
  CDR3 for alpha chain variable domain of TCR clone 42387 (TRAV16, TRAJ10)
CSRTGGGNKLTF

SEQ ID NO: 84774 - protein, 12 aa, Homo sapiens
  CDR3 for beta chain variable domain of TCR clone 42387 (TRBV11-2, TRBJ2-2)
CASSLPTGELFF

SEQ ID NO: 84775 - protein, 14 aa, Homo sapiens
  CDR3 for alpha chain variable domain of TCR clone 42388 (TRAV9-2, TRAJ39)
CALYIYNAGNMLTF

SEQ ID NO: 84776 - protein, 16 aa, Homo sapiens
  CDR3 for beta chain variable domain of TCR clone 42388 (TRBV7-9, TRBJ1-2)
CASSLGFSSGEDGYTF

SEQ ID NO: 84777 - protein, 14 aa, Homo sapiens
  CDR3 for alpha chain variable domain of TCR clone 42389 (TRAV21, TRAJ58)
CAVRRGRSGSRLTF

SEQ ID NO: 84778 - protein, 13 aa, Homo sapiens
  CDR3 for beta chain variable domain of TCR clone 42389 (TRBV7-2, TRBJ1-6)
CACSLKFDSPLHF

SEQ ID NO: 84779 - protein, 13 aa, Homo sapiens
  CDR3 for alpha chain variable domain of TCR clone 42390 (TRAV25, TRAJ29)
CAGRFVGNAPLVF

SEQ ID NO: 84780 - protein, 15 aa, Homo sapiens
  CDR3 for beta chain variable domain of TCR clone 42390 (TRBV29-1, TRBJ2-1)
CSVRTSLSSYNEQFF

SEQ ID NO: 84781 - protein, 12 aa, Homo sapiens
  CDR3 for alpha chain variable domain of TCR clone 42391 (TRAV26-1, TRAJ48)
CIVSGGNKKLTF

SEQ ID NO: 84782 - protein, 13 aa, Homo sapiens
  CDR3 for beta chain variable domain of TCR clone 42391 (TRBV18, TRBJ2-7)
CASFRDSAYEQYF

SEQ ID NO: 84783 - protein, 13 aa, Homo sapiens
  CDR3 for alpha chain variable domain of TCR clone 42392 (TRAV13-1, TRAJ21)
CAASIYNFNKFYF

SEQ ID NO: 84784 - protein, 16 aa, Homo sapiens
  CDR3 for beta chain variable domain of TCR clone 42392 (TRBV6-1, TRBJ2-5)
CASSETLDRGAETQYF

SEQ ID NO: 84785 - protein, 15 aa, Homo sapiens
  CDR3 for alpha chain variable domain of TCR clone 42393 (TRAV8-6, TRAJ10)
CAVSDQAGGGNKLTF

SEQ ID NO: 84786 - protein, 14 aa, Homo sapiens
  CDR3 for beta chain variable domain of TCR clone 42393 (TRBV19, TRBJ2-1)
CASPTFVLSGEQFF

SEQ ID NO: 84787 - protein, 13 aa, Homo sapiens
  CDR3 for alpha chain variable domain of TCR clone 42394 (TRAV35, TRAJ48)
CAGHKFGNEKLTF

SEQ ID NO: 84788 - protein, 16 aa, Homo sapiens
  CDR3 for beta chain variable domain of TCR clone 42394 (TRBV12-5, TRBJ2-5)
CASGPRTSGNQETQYF

SEQ ID NO: 84789 - protein, 13 aa, Homo sapiens
  CDR3 for alpha chain variable domain of TCR clone 42395 (TRAV12-1, TRAJ9)
CVVLNTGGFKAIF

SEQ ID NO: 84790 - protein, 13 aa, Homo sapiens
  CDR3 for beta chain variable domain of TCR clone 42395 (TRBV20-1, TRBJ1-1)
CSARGGGNTEAFF

SEQ ID NO: 84791 - protein, 16 aa, Homo sapiens
  CDR3 for alpha chain variable domain of TCR clone 42396 (TRAV16, TRAJ57)
CAPYLITQGGSEKLVF

SEQ ID NO: 84792 - protein, 17 aa, Homo sapiens
  CDR3 for beta chain variable domain of TCR clone 42396 (TRBV24-1, TRBJ2-4)
CATSDAEARGVKNIQYF

SEQ ID NO: 84793 - protein, 11 aa, Homo sapiens
  CDR3 for alpha chain variable domain of TCR clone 42397 (TRAV17, TRAJ9)
CATTGGFKTIF

SEQ ID NO: 84794 - protein, 16 aa, Homo sapiens
  CDR3 for beta chain variable domain of TCR clone 42397 (TRBV19, TRBJ2-1)
CASSKAGPSSYNEQFF

SEQ ID NO: 84795 - protein, 11 aa, Homo sapiens
  CDR3 for alpha chain variable domain of TCR clone 42398 (TRAV2, TRAJ33)
CAVESNYQLIW

SEQ ID NO: 84796 - protein, 15 aa, Homo sapiens
  CDR3 for beta chain variable domain of TCR clone 42398 (TRBV19, TRBJ1-1)
CARTSGQIQNTEAFF

SEQ ID NO: 84797 - protein, 18 aa, Homo sapiens
  CDR3 for alpha chain variable domain of TCR clone 42399 (TRAV13-1, TRAJ52)
CAASTRSAGGTSYGKLTF

SEQ ID NO: 84798 - protein, 13 aa, Homo sapiens
  CDR3 for beta chain variable domain of TCR clone 42399 (TRBV12-4, TRBJ1-2)
CASSLRQGKGYTF

SEQ ID NO: 84799 - protein, 16 aa, Homo sapiens
  CDR3 for alpha chain variable domain of TCR clone 42400 (TRAV3, TRAJ10)
CAVRDMRAGGGNKLTL

SEQ ID NO: 84800 - protein, 16 aa, Homo sapiens
  CDR3 for beta chain variable domain of TCR clone 42400 (TRBV12-5, TRBJ2-5)
CASGPRTSGNQETQYF

SEQ ID NO: 84801 - protein, 13 aa, Homo sapiens
  CDR3 for alpha chain variable domain of TCR clone 42401 (TRAV12-2, TRAJ9)
CAVLETGGFKTIF

SEQ ID NO: 84802 - protein, 13 aa, Homo sapiens
  CDR3 for beta chain variable domain of TCR clone 42401 (TRBV19, TRBJ1-2)
CASSQGQVYGYTF

SEQ ID NO: 84803 - protein, 16 aa, Homo sapiens
  CDR3 for alpha chain variable domain of TCR clone 42402 (TRAV8-3, TRAJ10)
CAVGPILTGGGKKLTF

SEQ ID NO: 84804 - protein, 16 aa, Homo sapiens
  CDR3 for beta chain variable domain of TCR clone 42402 (TRBV7-2, TRBJ2-5)
CASSSKWLSGQETQYF

SEQ ID NO: 84805 - protein, 14 aa, Homo sapiens
  CDR3 for alpha chain variable domain of TCR clone 42403 (TRAV26-1, TRAJ34)
CIVRVAYNTDTLIF

SEQ ID NO: 84806 - protein, 15 aa, Homo sapiens
  CDR3 for beta chain variable domain of TCR clone 42403 (TRBV20-1, TRBJ2-7)
CSARVPAAYFYEQYF

SEQ ID NO: 84807 - protein, 14 aa, Homo sapiens
  CDR3 for alpha chain variable domain of TCR clone 42404 (TRAV4, TRAJ9)
CLVGSGTGGFKTSF

SEQ ID NO: 84808 - protein, 15 aa, Homo sapiens
  CDR3 for beta chain variable domain of TCR clone 42404 (TRBV7-2, TRBJ2-1)
CASSLASGRVNEQFF

SEQ ID NO: 84809 - protein, 14 aa, Homo sapiens
  CDR3 for alpha chain variable domain of TCR clone 42405 (TRAV8-3, TRAJ9)
CAVVYNTGGFKTIF

SEQ ID NO: 84810 - protein, 14 aa, Homo sapiens
  CDR3 for beta chain variable domain of TCR clone 42405 (TRBV7-3, TRBJ2-2)
CASSSGGYTGEPFF

SEQ ID NO: 84811 - protein, 15 aa, Homo sapiens
  CDR3 for alpha chain variable domain of TCR clone 42406 (TRAV26-1, TRAJ28)
CIVRVAGAGSYQLTF

SEQ ID NO: 84812 - protein, 16 aa, Homo sapiens
  CDR3 for beta chain variable domain of TCR clone 42406 (TRBV7-9, TRBJ2-6)
CASSLKGPLRANVLTF

SEQ ID NO: 84813 - protein, 12 aa, Homo sapiens
  CDR3 for alpha chain variable domain of TCR clone 42407 (TRAV21, TRAJ33)
CAVQDSNYQLIC

SEQ ID NO: 84814 - protein, 14 aa, Homo sapiens
  CDR3 for beta chain variable domain of TCR clone 42407 (TRBV28, TRBJ2-1)
CASSPGEGGNEQFF

SEQ ID NO: 84815 - protein, 13 aa, Homo sapiens
  CDR3 for alpha chain variable domain of TCR clone 42408 (TRAV2, TRAJ40)
CAVVTSGTYKYIF

SEQ ID NO: 84816 - protein, 13 aa, Homo sapiens
  CDR3 for beta chain variable domain of TCR clone 42408 (TRBV10-2, TRBJ2-3)
CASSESGDHTQYF

SEQ ID NO: 84817 - protein, 17 aa, Homo sapiens
  CDR3 for alpha chain variable domain of TCR clone 42409 (TRAV8-6, TRAJ58)
CAVSSWVGETSGSRLTF

SEQ ID NO: 84818 - protein, 14 aa, Homo sapiens
  CDR3 for beta chain variable domain of TCR clone 42409 (TRBV5-5, TRBJ1-5)
CASSGQGVDQPQHF

SEQ ID NO: 84819 - protein, 12 aa, Homo sapiens
  CDR3 for alpha chain variable domain of TCR clone 42410 (TRAV12-1, TRAJ40)
CAFYSGTYKYTF

SEQ ID NO: 84820 - protein, 18 aa, Homo sapiens
  CDR3 for beta chain variable domain of TCR clone 42410 (TRBV12-4, TRBJ2-2)
CASSSVAGTRGRTGELFF

SEQ ID NO: 84821 - protein, 12 aa, Homo sapiens
  CDR3 for alpha chain variable domain of TCR clone 42411 (TRAV13-1, TRAJ44)
VGGGGTASKLTF

SEQ ID NO: 84822 - protein, 12 aa, Homo sapiens
  CDR3 for beta chain variable domain of TCR clone 42411 (TRBV11-2, TRBJ2-2)
CASSLGGGELFF

SEQ ID NO: 84823 - protein, 17 aa, Homo sapiens
  CDR3 for alpha chain variable domain of TCR clone 42412 (TRAV26-1, TRAJ53)
CIVRVDDSGGSNYKLTF

SEQ ID NO: 84824 - protein, 15 aa, Homo sapiens
  CDR3 for beta chain variable domain of TCR clone 42412 (TRBV20-1, TRBJ2-7)
CRARVPAAYFYEQYF

SEQ ID NO: 84825 - protein, 12 aa, Homo sapiens
  CDR3 for alpha chain variable domain of TCR clone 42413 (TRAV12-3, TRAJ17)
CAMTLTGNKLTF

SEQ ID NO: 84826 - protein, 15 aa, Homo sapiens
  CDR3 for beta chain variable domain of TCR clone 42413 (TRBV20-1, TRBJ2-5)
CSAPPRTGFGETQYF

SEQ ID NO: 84827 - protein, 12 aa, Homo sapiens
  CDR3 for alpha chain variable domain of TCR clone 42414 (TRAV8-3, TRAJ20)
CAVGANDYKLSF

SEQ ID NO: 84828 - protein, 16 aa, Homo sapiens
  CDR3 for beta chain variable domain of TCR clone 42414 (TRBV5-1, TRBJ1-1)
CASSSGGNSLNTEAFF

SEQ ID NO: 84829 - protein, 14 aa, Homo sapiens
  CDR3 for alpha chain variable domain of TCR clone 42415 (TRAV12-2, TRAJ40)
CAVKIPSGTYKYIF

SEQ ID NO: 84830 - protein, 17 aa, Homo sapiens
  CDR3 for beta chain variable domain of TCR clone 42415 (TRBV20-1, TRBJ2-1)
CSAFSGTSGSLYSEQFF

SEQ ID NO: 84831 - protein, 15 aa, Homo sapiens
  CDR3 for alpha chain variable domain of TCR clone 42416 (TRAV17, TRAJ57)
CATGPSQSGSEKLVF

SEQ ID NO: 84832 - protein, 14 aa, Homo sapiens
  CDR3 for beta chain variable domain of TCR clone 42416 (TRBV11-2, TRBJ1-2)
CASSLYRGNYGYTF

SEQ ID NO: 84833 - protein, 13 aa, Homo sapiens
  CDR3 for alpha chain variable domain of TCR clone 42417 (TRAV12-3, TRAJ9)
CVMRNTGGFKTIS

SEQ ID NO: 84834 - protein, 13 aa, Homo sapiens
  CDR3 for beta chain variable domain of TCR clone 42417 (TRBV27, TRBJ2-1)
CASRTLGVGEQFF

SEQ ID NO: 84835 - protein, 13 aa, Homo sapiens
  CDR3 for alpha chain variable domain of TCR clone 42418 (TRAV35, TRAJ42)
FAGFPGSQGNLIF

SEQ ID NO: 84836 - protein, 13 aa, Homo sapiens
  CDR3 for beta chain variable domain of TCR clone 42418 (TRBV29-1, TRBJ2-1)
CSVEGGRVNEQFF

SEQ ID NO: 84837 - protein, 11 aa, Homo sapiens
  CDR3 for alpha chain variable domain of TCR clone 42419 (TRAV2, TRAJ13)
CASGGYQKVTF

SEQ ID NO: 84838 - protein, 17 aa, Homo sapiens
  CDR3 for beta chain variable domain of TCR clone 42419 (TRBV7-3, TRBJ2-3)
RASSLMKRMRGADTQYF

SEQ ID NO: 84839 - protein, 14 aa, Homo sapiens
  CDR3 for alpha chain variable domain of TCR clone 42420 (TRAV8-6, TRAJ4)
CAASGSGGYNKLIF

SEQ ID NO: 84840 - protein, 13 aa, Homo sapiens
  CDR3 for beta chain variable domain of TCR clone 42420 (TRBV3-1, TRBJ2-5)
CASSPGLQETQYF

SEQ ID NO: 84841 - protein, 13 aa, Homo sapiens
  CDR3 for alpha chain variable domain of TCR clone 42421 (TRAV9-2, TRAJ53)
CALSGGSNYKLTF

SEQ ID NO: 84842 - protein, 16 aa, Homo sapiens
  CDR3 for beta chain variable domain of TCR clone 42421 (TRBV18, TRBJ1-4)
CASSPLVGDRAEKLFF

SEQ ID NO: 84843 - protein, 17 aa, Homo sapiens
  CDR3 for alpha chain variable domain of TCR clone 42422 (TRAV3, TRAJ12)
CAVRDGGRMDSSYKLIF

SEQ ID NO: 84844 - protein, 14 aa, Homo sapiens
  CDR3 for beta chain variable domain of TCR clone 42422 (TRBV7-2, TRBJ2-7)
CASSPKTSFYEQYF

SEQ ID NO: 84845 - protein, 15 aa, Homo sapiens
  CDR3 for alpha chain variable domain of TCR clone 42423 (TRAV3, TRAJ5)
CAVRDLDTGRRALTF

SEQ ID NO: 84846 - protein, 13 aa, Homo sapiens
  CDR3 for beta chain variable domain of TCR clone 42423 (TRBV12-5, TRBJ2-3)
CASGDRQSDTQYF

SEQ ID NO: 84847 - protein, 14 aa, Homo sapiens
  CDR3 for alpha chain variable domain of TCR clone 42424 (TRAV35, TRAJ33)
CAGSSQDGNYQLIW

SEQ ID NO: 84848 - protein, 15 aa, Homo sapiens
  CDR3 for beta chain variable domain of TCR clone 42424 (TRBV20-1, TRBJ2-7)
CSAESGTSGAYEQYF

SEQ ID NO: 84849 - protein, 14 aa, Homo sapiens
  CDR3 for alpha chain variable domain of TCR clone 42425 (TRAV1-2, TRAJ16)
CAVNRFSDGQKLLF

SEQ ID NO: 84850 - protein, 14 aa, Homo sapiens
  CDR3 for beta chain variable domain of TCR clone 42425 (TRBV7-8, TRBJ1-3)
CASSSDRVRNTIYF

SEQ ID NO: 84851 - protein, 17 aa, Homo sapiens
  CDR3 for alpha chain variable domain of TCR clone 42426 (TRAV4, TRAJ42)
CLVGVLNYGGSQGNLIS

SEQ ID NO: 84852 - protein, 12 aa, Homo sapiens
  CDR3 for beta chain variable domain of TCR clone 42426 (TRBV20-1, TRBJ2-1)
CSAQYTYNEQFF

SEQ ID NO: 84853 - protein, 12 aa, Homo sapiens
  CDR3 for alpha chain variable domain of TCR clone 42427 (TRAV8-3, TRAJ26)
CAGDNYGQNFVF

SEQ ID NO: 84854 - protein, 18 aa, Homo sapiens
  CDR3 for beta chain variable domain of TCR clone 42427 (TRBV25-1, TRBJ1-2)
CASSGLQNGQGLIFGYTF

SEQ ID NO: 84855 - protein, 14 aa, Homo sapiens
  CDR3 for alpha chain variable domain of TCR clone 42428 (TRAV12-2, TRAJ53)
CRERGGGSNYKLTF

SEQ ID NO: 84856 - protein, 15 aa, Homo sapiens
  CDR3 for beta chain variable domain of TCR clone 42428 (TRBV20-1, TRBJ2-7)
CSARDRVSGMDEQYF

SEQ ID NO: 84857 - protein, 17 aa, Homo sapiens
  CDR3 for alpha chain variable domain of TCR clone 42429 (TRAV13-1, TRAJ28)
CAASPPYSGAGSYHLTF

SEQ ID NO: 84858 - protein, 12 aa, Homo sapiens
  CDR3 for beta chain variable domain of TCR clone 42429 (TRBV11-2, TRBJ2-2)
CASSLPTGELFF

SEQ ID NO: 84859 - protein, 14 aa, Homo sapiens
  CDR3 for alpha chain variable domain of TCR clone 42430 (TRAV17, TRAJ56)
CTTVPAGANSKLTF

SEQ ID NO: 84860 - protein, 13 aa, Homo sapiens
  CDR3 for beta chain variable domain of TCR clone 42430 (TRBV12-4, TRBJ2-2)
CASSITGSGELFF

SEQ ID NO: 84861 - protein, 15 aa, Homo sapiens
  CDR3 for alpha chain variable domain of TCR clone 42431 (TRAV8-3, TRAJ23)
CAVGDRYNQGGKLIF

SEQ ID NO: 84862 - protein, 11 aa, Homo sapiens
  CDR3 for beta chain variable domain of TCR clone 42431 (TRBV7-8, TRBJ2-7)
CASSLSLEQYF

SEQ ID NO: 84863 - protein, 11 aa, Homo sapiens
  CDR3 for alpha chain variable domain of TCR clone 42432 (TRAV1-2, TRAJ31)
FAVNNNARLMF

SEQ ID NO: 84864 - protein, 15 aa, Homo sapiens
  CDR3 for beta chain variable domain of TCR clone 42432 (TRBV28, TRBJ2-1)
CASSIIAGGRSEQFF

SEQ ID NO: 84865 - protein, 12 aa, Homo sapiens
  CDR3 for alpha chain variable domain of TCR clone 42433 (TRAV1-2, TRAJ33)
CAALDSNYQLIW

SEQ ID NO: 84866 - protein, 15 aa, Homo sapiens
  CDR3 for beta chain variable domain of TCR clone 42433 (TRBV27, TRBJ2-1)
CASGNGGGSSNEQFF

SEQ ID NO: 84867 - protein, 12 aa, Homo sapiens
  CDR3 for alpha chain variable domain of TCR clone 42434 (TRAV8-3, TRAJ41)
CAVALSGYALNF

SEQ ID NO: 84868 - protein, 17 aa, Homo sapiens
  CDR3 for beta chain variable domain of TCR clone 42434 (TRBV7-3, TRBJ2-2)
CASSLSGTSGGTGGLFF

SEQ ID NO: 84869 - protein, 14 aa, Homo sapiens
  CDR3 for alpha chain variable domain of TCR clone 42435 (TRAV12-1, TRAJ27)
CGEHIRTNAGKSTF

SEQ ID NO: 84870 - protein, 15 aa, Homo sapiens
  CDR3 for beta chain variable domain of TCR clone 42435 (TRBV19, TRBJ1-1)
CASTSGQIQNTEALF

SEQ ID NO: 84871 - protein, 17 aa, Homo sapiens
  CDR3 for alpha chain variable domain of TCR clone 42436 (TRAV4, TRAJ13)
CLVGVQGSSWGYQKVTF

SEQ ID NO: 84872 - protein, 18 aa, Homo sapiens
  CDR3 for beta chain variable domain of TCR clone 42436 (TRBV15, TRBJ2-3)
CATSRDGARSWDTDTQYF

SEQ ID NO: 84873 - protein, 13 aa, Homo sapiens
  CDR3 for alpha chain variable domain of TCR clone 42437 (TRAV1-2, TRAJ9)
CAALNTGGFKTIF

SEQ ID NO: 84874 - protein, 13 aa, Homo sapiens
  CDR3 for beta chain variable domain of TCR clone 42437 (TRBV14, TRBJ2-7)
CASSPRRPHEQYF

SEQ ID NO: 84875 - protein, 14 aa, Homo sapiens
  CDR3 for alpha chain variable domain of TCR clone 42438 (TRAV35, TRAJ38)
CAGSNAGNNRKLIW

SEQ ID NO: 84876 - protein, 14 aa, Homo sapiens
  CDR3 for beta chain variable domain of TCR clone 42438 (TRBV18, TRBJ2-7)
CASSPRGGAYEQYF

SEQ ID NO: 84877 - protein, 14 aa, Homo sapiens
  CDR3 for alpha chain variable domain of TCR clone 42439 (TRAV26-1, TRAJ48)
YIVRTNFGNEKLTF

SEQ ID NO: 84878 - protein, 12 aa, Homo sapiens
  CDR3 for beta chain variable domain of TCR clone 42439 (TRBV20-1, TRBJ2-7)
CSASSGANEQYF

SEQ ID NO: 84879 - protein, 14 aa, Homo sapiens
  CDR3 for alpha chain variable domain of TCR clone 42440 (TRAV2, TRAJ9)
CAVEDRSGGFKTIF

SEQ ID NO: 84880 - protein, 17 aa, Homo sapiens
  CDR3 for beta chain variable domain of TCR clone 42440 (TRBV4-1, TRBJ2-7)
YASSRDPLGVRGGEQYF

SEQ ID NO: 84881 - protein, 21 aa, Homo sapiens
  CDR3 for alpha chain variable domain of TCR clone 42441 (TRAV25, TRAJ7)
TATQTTDVGTYFCPGSNRLAF

SEQ ID NO: 84882 - protein, 14 aa, Homo sapiens
  CDR3 for beta chain variable domain of TCR clone 42441 (TRBV11-2, TRBJ2-2)
CASSLGLRVRELFF

SEQ ID NO: 84883 - protein, 14 aa, Homo sapiens
  CDR3 for alpha chain variable domain of TCR clone 42442 (TRAV1-2, TRAJ16)
CAVNRFSDGQKLLF

SEQ ID NO: 84884 - protein, 16 aa, Homo sapiens
  CDR3 for beta chain variable domain of TCR clone 42442 (TRBV20-1, TRBJ1-4)
CSARPYGGELNGKLFF

SEQ ID NO: 84885 - protein, 14 aa, Homo sapiens
  CDR3 for alpha chain variable domain of TCR clone 42443 (TRAV26-1, TRAJ45)
CIEVTGGCADGLTF

SEQ ID NO: 84886 - protein, 13 aa, Homo sapiens
  CDR3 for beta chain variable domain of TCR clone 42443 (TRBV7-6, TRBJ1-2)
CASSLVADYGYTF

SEQ ID NO: 84887 - protein, 10 aa, Homo sapiens
  CDR3 for alpha chain variable domain of TCR clone 42444 (TRAV8-4, TRAJ43)
CAVGADDMRF

SEQ ID NO: 84888 - protein, 13 aa, Homo sapiens
  CDR3 for beta chain variable domain of TCR clone 42444 (TRBV12-4, TRBJ2-5)
CASSPGTEETQYF

SEQ ID NO: 84889 - protein, 17 aa, Homo sapiens
  CDR3 for alpha chain variable domain of TCR clone 42445 (TRAV12-2, TRAJ48)
CASNEKLTFGTGTRLTI

SEQ ID NO: 84890 - protein, 16 aa, Homo sapiens
  CDR3 for beta chain variable domain of TCR clone 42445 (TRBV7-3, TRBJ2-2)
CASSLKRGTLSGELLF

SEQ ID NO: 84891 - protein, 10 aa, Homo sapiens
  CDR3 for alpha chain variable domain of TCR clone 42446 (TRAV2, TRAJ34)
CAVVNDKLIL

SEQ ID NO: 84892 - protein, 15 aa, Homo sapiens
  CDR3 for beta chain variable domain of TCR clone 42446 (TRBV3-1, TRBJ2-2)
CASSQDWTRAGELFF

SEQ ID NO: 84893 - protein, 14 aa, Homo sapiens
  CDR3 for alpha chain variable domain of TCR clone 42447 (TRAV2, TRAJ22)
CAVEDSGSARQLTF

SEQ ID NO: 84894 - protein, 15 aa, Homo sapiens
  CDR3 for beta chain variable domain of TCR clone 42447 (TRBV28, TRBJ1-2)
CASSLPVGHGDDYTF

SEQ ID NO: 84895 - protein, 13 aa, Homo sapiens
  CDR3 for alpha chain variable domain of TCR clone 42448 (TRAV1-1, TRAJ31)
CASYLNNNARLML

SEQ ID NO: 84896 - protein, 13 aa, Homo sapiens
  CDR3 for beta chain variable domain of TCR clone 42448 (TRBV15, TRBJ1-6)
CATSGGLNSPLHF

SEQ ID NO: 84897 - protein, 17 aa, Homo sapiens
  CDR3 for alpha chain variable domain of TCR clone 42449 (TRAV4, TRAJ18)
CLVGERSVGSTRGRLYF

SEQ ID NO: 84898 - protein, 14 aa, Homo sapiens
  CDR3 for beta chain variable domain of TCR clone 42449 (TRBV6-5, TRBJ1-2)
CASSYDGTGGGYTF

SEQ ID NO: 84899 - protein, 19 aa, Homo sapiens
  CDR3 for alpha chain variable domain of TCR clone 42450 (TRAV1-2, TRAJ26)
CLLPLCCERPDNYGQNFVF

SEQ ID NO: 84900 - protein, 15 aa, Homo sapiens
  CDR3 for beta chain variable domain of TCR clone 42450 (TRBV10-2, TRBJ2-6)
CASSEQGTGANVLTF

SEQ ID NO: 84901 - protein, 14 aa, Homo sapiens
  CDR3 for alpha chain variable domain of TCR clone 42451 (TRAV12-1, TRAJ17)
CVVNYKAAGNKLTF

SEQ ID NO: 84902 - protein, 16 aa, Homo sapiens
  CDR3 for beta chain variable domain of TCR clone 42451 (TRBV2, TRBJ2-3)
CQHRGAPRRWTDTQYF

SEQ ID NO: 84903 - protein, 18 aa, Homo sapiens
  CDR3 for alpha chain variable domain of TCR clone 42452 (TRAV21, TRAJ52)
CAVRPSPAGGTSYGKLTL

SEQ ID NO: 84904 - protein, 14 aa, Homo sapiens
  CDR3 for beta chain variable domain of TCR clone 42452 (TRBV4-2, TRBJ2-1)
CASGLDRAYNEQFF

SEQ ID NO: 84905 - protein, 14 aa, Homo sapiens
  CDR3 for alpha chain variable domain of TCR clone 42453 (TRAV9-2, TRAJ39)
CALYIYNAGNMLTF

SEQ ID NO: 84906 - protein, 14 aa, Homo sapiens
  CDR3 for beta chain variable domain of TCR clone 42453 (TRBV5-7, TRBJ2-6)
CASSLAAGANVLTF

SEQ ID NO: 84907 - protein, 13 aa, Homo sapiens
  CDR3 for alpha chain variable domain of TCR clone 42454 (TRAV2, TRAJ23)
CAVMGNQGGKLIF

SEQ ID NO: 84908 - protein, 14 aa, Homo sapiens
  CDR3 for beta chain variable domain of TCR clone 42454 (TRBV11-2, TRBJ2-1)
CASSRATFYNEQFF

SEQ ID NO: 84909 - protein, 13 aa, Homo sapiens
  CDR3 for alpha chain variable domain of TCR clone 42455 (TRAV21, TRAJ27)
CAARPGNAGKSTF

SEQ ID NO: 84910 - protein, 14 aa, Homo sapiens
  CDR3 for beta chain variable domain of TCR clone 42455 (TRBV7-2, TRBJ1-1)
CASSFLTGTTEAFF

SEQ ID NO: 84911 - protein, 15 aa, Homo sapiens
  CDR3 for alpha chain variable domain of TCR clone 42456 (TRAV27, TRAJ38)
CAARRNAGNNRKLIW

SEQ ID NO: 84912 - protein, 15 aa, Homo sapiens
  CDR3 for beta chain variable domain of TCR clone 42456 (TRBV4-1, TRBJ2-1)
CASSQAQREIYEQFF

SEQ ID NO: 84913 - protein, 12 aa, Homo sapiens
  CDR3 for alpha chain variable domain of TCR clone 42457 (TRAV12-3, TRAJ40)
CAMSSGTYKYNF

SEQ ID NO: 84914 - protein, 15 aa, Homo sapiens
  CDR3 for beta chain variable domain of TCR clone 42457 (TRBV7-3, TRBJ2-2)
CASSETGQGTGELFF

SEQ ID NO: 84915 - protein, 14 aa, Homo sapiens
  CDR3 for alpha chain variable domain of TCR clone 42458 (TRAV12-2, TRAJ17)
CAVLFKPAGNKLTF

SEQ ID NO: 84916 - protein, 17 aa, Homo sapiens
  CDR3 for beta chain variable domain of TCR clone 42458 (TRBV20-1, TRBJ2-2)
CSASGSGQGGLTGELFF

SEQ ID NO: 84917 - protein, 13 aa, Homo sapiens
  CDR3 for alpha chain variable domain of TCR clone 42459 (TRAV3, TRAJ27)
CAVRPLGAGKSTF

SEQ ID NO: 84918 - protein, 17 aa, Homo sapiens
  CDR3 for beta chain variable domain of TCR clone 42459 (TRBV13, TRBJ2-3)
CASSLSRVAGGRNTQYF

SEQ ID NO: 84919 - protein, 13 aa, Homo sapiens
  CDR3 for alpha chain variable domain of TCR clone 42460 (TRAV35, TRAJ57)
CAGSQGGSEKLVF

SEQ ID NO: 84920 - protein, 15 aa, Homo sapiens
  CDR3 for beta chain variable domain of TCR clone 42460 (TRBV20-1, TRBJ2-7)
CSARDQVSGMDEQYF

SEQ ID NO: 84921 - protein, 15 aa, Homo sapiens
  CDR3 for alpha chain variable domain of TCR clone 42461 (TRAV25, TRAJ53)
CAATGGGGSNYKLTF

SEQ ID NO: 84922 - protein, 15 aa, Homo sapiens
  CDR3 for beta chain variable domain of TCR clone 42461 (TRBV5-1, TRBJ2-1)
CASSPPRAPYNEQFF

SEQ ID NO: 84923 - protein, 18 aa, Homo sapiens
  CDR3 for alpha chain variable domain of TCR clone 42462 (TRAV21, TRAJ52)
CAVRPSPAGGTSYGKLTF

SEQ ID NO: 84924 - protein, 13 aa, Homo sapiens
  CDR3 for beta chain variable domain of TCR clone 42462 (TRBV4-2, TRBJ1-1)
CASSQAGSTEAFF

SEQ ID NO: 84925 - protein, 15 aa, Homo sapiens
  CDR3 for alpha chain variable domain of TCR clone 42463 (TRAV8-3, TRAJ27)
CAVGPSKTNAGKSTF

SEQ ID NO: 84926 - protein, 13 aa, Homo sapiens
  CDR3 for beta chain variable domain of TCR clone 42463 (TRBV7-9, TRBJ1-2)
CASSLKQNYGYTF

SEQ ID NO: 84927 - protein, 13 aa, Homo sapiens
  CDR3 for alpha chain variable domain of TCR clone 42464 (TRAV35, TRAJ42)
CAGFPGSQGNLIF

SEQ ID NO: 84928 - protein, 14 aa, Homo sapiens
  CDR3 for beta chain variable domain of TCR clone 42464 (TRBV7-2, TRBJ2-7)
CASRSQGAAYEQYF

SEQ ID NO: 84929 - protein, 12 aa, Homo sapiens
  CDR3 for alpha chain variable domain of TCR clone 42465 (TRAV8-3, TRAJ20)
CAVGANDYKLSF

SEQ ID NO: 84930 - protein, 16 aa, Homo sapiens
  CDR3 for beta chain variable domain of TCR clone 42465 (TRBV19, TRBJ2-2)
CASRSPGTVATGELFF

SEQ ID NO: 84931 - protein, 11 aa, Homo sapiens
  CDR3 for alpha chain variable domain of TCR clone 42466 (TRAV2, TRAJ13)
CASGGYQKVTF

SEQ ID NO: 84932 - protein, 11 aa, Homo sapiens
  CDR3 for beta chain variable domain of TCR clone 42466 (TRBV11-2, TRBJ2-2)
CASSLPGELFF

SEQ ID NO: 84933 - protein, 16 aa, Homo sapiens
  CDR3 for alpha chain variable domain of TCR clone 42467 (TRAV3, TRAJ10)
CAVRDMRAGGGNKLTF

SEQ ID NO: 84934 - protein, 15 aa, Homo sapiens
  CDR3 for beta chain variable domain of TCR clone 42467 (TRBV12-4, TRBJ2-5)
CASSPPTGLQETQYF

SEQ ID NO: 84935 - protein, 17 aa, Homo sapiens
  CDR3 for alpha chain variable domain of TCR clone 42468 (TRAV13-1, TRAJ31)
CAPRDRLMFGDGTQLVV

SEQ ID NO: 84936 - protein, 12 aa, Homo sapiens
  CDR3 for beta chain variable domain of TCR clone 42468 (TRBV7-9, TRBJ2-7)
CASSLEGYEQYI

SEQ ID NO: 84937 - protein, 16 aa, Homo sapiens
  CDR3 for alpha chain variable domain of TCR clone 42469 (TRAV30, TRAJ24)
CGTEIVDADSWGKFQF

SEQ ID NO: 84938 - protein, 12 aa, Homo sapiens
  CDR3 for beta chain variable domain of TCR clone 42469 (TRBV11-2, TRBJ2-1)
CASSPGSNEQFF

SEQ ID NO: 84939 - protein, 13 aa, Homo sapiens
  CDR3 for alpha chain variable domain of TCR clone 42470 (TRAV13-1, TRAJ20)
CAARVSNYHKLSF

SEQ ID NO: 84940 - protein, 12 aa, Homo sapiens
  CDR3 for beta chain variable domain of TCR clone 42470 (TRBV20-1, TRBJ2-1)
CSARLGTDEQFF

SEQ ID NO: 84941 - protein, 11 aa, Homo sapiens
  CDR3 for alpha chain variable domain of TCR clone 42471 (TRAV12-3, TRAJ27)
CAMANAGKSTF

SEQ ID NO: 84942 - protein, 15 aa, Homo sapiens
  CDR3 for beta chain variable domain of TCR clone 42471 (TRBV3-1, TRBJ2-1)
CASSQQPSGGNEQFF

SEQ ID NO: 84943 - protein, 13 aa, Homo sapiens
  CDR3 for alpha chain variable domain of TCR clone 42472 (TRAV8-3, TRAJ4)
WVFYSVGYNKLIF

SEQ ID NO: 84944 - protein, 14 aa, Homo sapiens
  CDR3 for beta chain variable domain of TCR clone 42472 (TRBV7-9, TRBJ2-3)
CASSLEDGTDTQYF

SEQ ID NO: 84945 - protein, 16 aa, Homo sapiens
  CDR3 for alpha chain variable domain of TCR clone 42473 (TRAV35, TRAJ28)
CAGQRYSGAGSYKLTF

SEQ ID NO: 84946 - protein, 13 aa, Homo sapiens
  CDR3 for beta chain variable domain of TCR clone 42473 (TRBV19, TRBJ1-2)
CASSQGQVYGYTF

SEQ ID NO: 84947 - protein, 14 aa, Homo sapiens
  CDR3 for alpha chain variable domain of TCR clone 42474 (TRAV12-3, TRAJ10)
SHLPLTGGGNKLTF

SEQ ID NO: 84948 - protein, 15 aa, Homo sapiens
  CDR3 for beta chain variable domain of TCR clone 42474 (TRBV7-9, TRBJ1-4)
CASSRTWGFNEKLFF

SEQ ID NO: 84949 - protein, 14 aa, Homo sapiens
  CDR3 for alpha chain variable domain of TCR clone 42475 (TRAV12-2, TRAJ15)
CAPHTGQAGTALIF

SEQ ID NO: 84950 - protein, 14 aa, Homo sapiens
  CDR3 for beta chain variable domain of TCR clone 42475 (TRBV13, TRBJ2-5)
CASSLERVGETQYF

SEQ ID NO: 84951 - protein, 13 aa, Homo sapiens
  CDR3 for alpha chain variable domain of TCR clone 42476 (TRAV30, TRAJ18)
CGTEASTLGRLYF

SEQ ID NO: 84952 - protein, 12 aa, Homo sapiens
  CDR3 for beta chain variable domain of TCR clone 42476 (TRBV11-2, TRBJ2-2)
CASSLGGGELFF

SEQ ID NO: 84953 - protein, 17 aa, Homo sapiens
  CDR3 for alpha chain variable domain of TCR clone 42477 (TRAV13-1, TRAJ52)
CAASSGAGGTSHGKLTF

SEQ ID NO: 84954 - protein, 15 aa, Homo sapiens
  CDR3 for beta chain variable domain of TCR clone 42477 (TRBV2, TRBJ2-1)
CASSELAGSYNEQFF

SEQ ID NO: 84955 - protein, 13 aa, Homo sapiens
  CDR3 for alpha chain variable domain of TCR clone 42478 (TRAV1-1, TRAJ38)
CASNAGNNRKLTW

SEQ ID NO: 84956 - protein, 14 aa, Homo sapiens
  CDR3 for beta chain variable domain of TCR clone 42478 (TRBV15, TRBJ2-1)
CATSGVEDYNEQFF

SEQ ID NO: 84957 - protein, 13 aa, Homo sapiens
  CDR3 for alpha chain variable domain of TCR clone 42479 (TRAV17, TRAJ9)
CATDYTGGFKTIF

SEQ ID NO: 84958 - protein, 16 aa, Homo sapiens
  CDR3 for beta chain variable domain of TCR clone 42479 (TRBV7-7, TRBJ2-1)
CASSLASGTSYNVQFF

SEQ ID NO: 84959 - protein, 18 aa, Homo sapiens
  CDR3 for alpha chain variable domain of TCR clone 42480 (TRAV26-2, TRAJ45)
CILRVDKYSGGGADGLNF

SEQ ID NO: 84960 - protein, 16 aa, Homo sapiens
  CDR3 for beta chain variable domain of TCR clone 42480 (TRBV2, TRBJ1-4)
CASNLLQGATNEKLFF

SEQ ID NO: 84961 - protein, 11 aa, Homo sapiens
  CDR3 for alpha chain variable domain of TCR clone 42481 (TRAV35, TRAJ30)
CAGERDDKIIF

SEQ ID NO: 84962 - protein, 13 aa, Homo sapiens
  CDR3 for beta chain variable domain of TCR clone 42481 (TRBV4-2, TRBJ1-1)
CASSQAGNTEAFF

SEQ ID NO: 84963 - protein, 12 aa, Homo sapiens
  CDR3 for alpha chain variable domain of TCR clone 42482 (TRAV13-2, TRAJ42)
CAEGGSQGNLIF

SEQ ID NO: 84964 - protein, 13 aa, Homo sapiens
  CDR3 for beta chain variable domain of TCR clone 42482 (TRBV27, TRBJ2-7)
CASSLSRSHEQYF

SEQ ID NO: 84965 - protein, 14 aa, Homo sapiens
  CDR3 for alpha chain variable domain of TCR clone 42483 (TRAV27, TRAJ17)
CRSTIRAAGNKLTF

SEQ ID NO: 84966 - protein, 16 aa, Homo sapiens
  CDR3 for beta chain variable domain of TCR clone 42483 (TRBV5-6, TRBJ2-5)
CASTLAPAGGRETQYF

SEQ ID NO: 84967 - protein, 15 aa, Homo sapiens
  CDR3 for alpha chain variable domain of TCR clone 42484 (TRAV3, TRAJ47)
CAVRDIGEYGNKLVF

SEQ ID NO: 84968 - protein, 14 aa, Homo sapiens
  CDR3 for beta chain variable domain of TCR clone 42484 (TRBV13, TRBJ2-5)
CASSLERVGGTQYF

SEQ ID NO: 84969 - protein, 14 aa, Homo sapiens
  CDR3 for alpha chain variable domain of TCR clone 42485 (TRAV12-2, TRAJ40)
CAVKIPSGTYKYIF

SEQ ID NO: 84970 - protein, 13 aa, Homo sapiens
  CDR3 for beta chain variable domain of TCR clone 42485 (TRBV20-1, TRBJ1-1)
QCTNTDGGTEAFF

SEQ ID NO: 84971 - protein, 12 aa, Homo sapiens
  CDR3 for alpha chain variable domain of TCR clone 42486 (TRAV16, TRAJ26)
CALRSYGQNFVF

SEQ ID NO: 84972 - protein, 14 aa, Homo sapiens
  CDR3 for beta chain variable domain of TCR clone 42486 (TRBV10-3, TRBJ2-1)
CAISSDPAYNEQFF

SEQ ID NO: 84973 - protein, 12 aa, Homo sapiens
  CDR3 for alpha chain variable domain of TCR clone 42487 (TRAV25, TRAJ20)
CAGRSNDYKLSF

SEQ ID NO: 84974 - protein, 15 aa, Homo sapiens
  CDR3 for beta chain variable domain of TCR clone 42487 (TRBV7-7, TRBJ2-7)
CASSGRRDTFGEQYF

SEQ ID NO: 84975 - protein, 17 aa, Homo sapiens
  CDR3 for alpha chain variable domain of TCR clone 42488 (TRAV3, TRAJ6)
CAVRDGPRAGGSYIPTF

SEQ ID NO: 84976 - protein, 20 aa, Homo sapiens
  CDR3 for beta chain variable domain of TCR clone 42488 (TRBV28, TRBJ2-1)
CASTPIGRSPGLAGGDEQFF

SEQ ID NO: 84977 - protein, 12 aa, Homo sapiens
  CDR3 for alpha chain variable domain of TCR clone 42489 (TRAV1-1, TRAJ8)
CAGGTGFQKLAF

SEQ ID NO: 84978 - protein, 15 aa, Homo sapiens
  CDR3 for beta chain variable domain of TCR clone 42489 (TRBV7-9, TRBJ1-4)
CASSRTGGFNEKLFF

SEQ ID NO: 84979 - protein, 14 aa, Homo sapiens
  CDR3 for alpha chain variable domain of TCR clone 42490 (TRAV20, TRAJ42)
CAVQAGRSQGNLIF

SEQ ID NO: 84980 - protein, 14 aa, Homo sapiens
  CDR3 for beta chain variable domain of TCR clone 42490 (TRBV28, TRBJ1-2)
CASRIQGANYGYTF

SEQ ID NO: 84981 - protein, 16 aa, Homo sapiens
  CDR3 for alpha chain variable domain of TCR clone 42491 (TRAV23/DV6, TRAJ9)
CAASIGGNTGGFKTIF

SEQ ID NO: 84982 - protein, 14 aa, Homo sapiens
  CDR3 for beta chain variable domain of TCR clone 42491 (TRBV11-2, TRBJ1-5)
CASSLDRGRQPQHF

SEQ ID NO: 84983 - protein, 15 aa, Homo sapiens
  CDR3 for alpha chain variable domain of TCR clone 42492 (TRAV27, TRAJ38)
CAARRNAGNNRKLFW

SEQ ID NO: 84984 - protein, 13 aa, Homo sapiens
  CDR3 for beta chain variable domain of TCR clone 42492 (TRBV12-5, TRBJ2-3)
CASGDRQSDTQYF

SEQ ID NO: 84985 - protein, 13 aa, Homo sapiens
  CDR3 for alpha chain variable domain of TCR clone 42493 (TRAV21, TRAJ27)
CAARPGNAGKSTF

SEQ ID NO: 84986 - protein, 14 aa, Homo sapiens
  CDR3 for beta chain variable domain of TCR clone 42493 (TRBV7-6, TRBJ2-3)
CASSLGTVTNTQYF

SEQ ID NO: 84987 - protein, 14 aa, Homo sapiens
  CDR3 for alpha chain variable domain of TCR clone 42494 (TRAV26-1, TRAJ39)
CIVRGSRAGIMLTF

SEQ ID NO: 84988 - protein, 15 aa, Homo sapiens
  CDR3 for beta chain variable domain of TCR clone 42494 (TRBV7-9, TRBJ1-5)
CASSQGHQPNQPQHF

SEQ ID NO: 84989 - protein, 15 aa, Homo sapiens
  CDR3 for alpha chain variable domain of TCR clone 42495 (TRAV13-1, TRAJ10)
CAAEVVTGEGNKLTF

SEQ ID NO: 84990 - protein, 13 aa, Homo sapiens
  CDR3 for beta chain variable domain of TCR clone 42495 (TRBV28, TRBJ2-5)
CAGVSRGEETQYF

SEQ ID NO: 84991 - protein, 10 aa, Homo sapiens
  CDR3 for alpha chain variable domain of TCR clone 42496 (TRAV1-2, TRAJ31)
CAFFDARLMF

SEQ ID NO: 84992 - protein, 15 aa, Homo sapiens
  CDR3 for beta chain variable domain of TCR clone 42496 (TRBV5-1, TRBJ1-1)
CASSSTTGTNTEAFF

SEQ ID NO: 84993 - protein, 13 aa, Homo sapiens
  CDR3 for alpha chain variable domain of TCR clone 42497 (TRAV3, TRAJ27)
CAVRPLGAGKSTF

SEQ ID NO: 84994 - protein, 17 aa, Homo sapiens
  CDR3 for beta chain variable domain of TCR clone 42497 (TRBV20-1, TRBJ2-1)
CSASSSGLAGSYNEQFF

SEQ ID NO: 84995 - protein, 23 aa, Homo sapiens
  CDR3 for alpha chain variable domain of TCR clone 42498 (TRAV26-1, TRAJ38)
CIADNAGNNHIQNPDPAVYQLRD

SEQ ID NO: 84996 - protein, 13 aa, Homo sapiens
  CDR3 for beta chain variable domain of TCR clone 42498 (TRBV20-1, TRBJ1-1)
CSARGGGNTGAFF

SEQ ID NO: 84997 - protein, 13 aa, Homo sapiens
  CDR3 for alpha chain variable domain of TCR clone 42499 (TRAV8-3, TRAJ28)
CAVGAVGSYQLTF

SEQ ID NO: 84998 - protein, 16 aa, Homo sapiens
  CDR3 for beta chain variable domain of TCR clone 42499 (TRBV18, TRBJ1-5)
CASSPSTGNSNQPQHF

SEQ ID NO: 84999 - protein, 12 aa, Homo sapiens
  CDR3 for alpha chain variable domain of TCR clone 42500 (TRAV13-1, TRAJ21)
CAAKEGCNKFYF

SEQ ID NO: 85000 - protein, 14 aa, Homo sapiens
  CDR3 for beta chain variable domain of TCR clone 42500 (TRBV5-4, TRBJ1-1)
CASSLDSRRDEAFF

SEQ ID NO: 85001 - protein, 14 aa, Homo sapiens
  CDR3 for alpha chain variable domain of TCR clone 42501 (TRAV12-2, TRAJ36)
RAVNPPTGANNLFF

SEQ ID NO: 85002 - protein, 13 aa, Homo sapiens
  CDR3 for beta chain variable domain of TCR clone 42501 (TRBV20-1, TRBJ1-6)
CSAPTGLGSPLHF

SEQ ID NO: 85003 - protein, 15 aa, Homo sapiens
  CDR3 for alpha chain variable domain of TCR clone 42502 (TRAV23/DV6, TRAJ18)
CAARYRGSTLGRLYF

SEQ ID NO: 85004 - protein, 14 aa, Homo sapiens
  CDR3 for beta chain variable domain of TCR clone 42502 (TRBV12-5, TRBJ2-5)
CASGSRTHQETQYF

SEQ ID NO: 85005 - protein, 15 aa, Homo sapiens
  CDR3 for alpha chain variable domain of TCR clone 42503 (TRAV29/DV5, TRAJ20)
CAASAIRSNDYKLSF

SEQ ID NO: 85006 - protein, 15 aa, Homo sapiens
  CDR3 for beta chain variable domain of TCR clone 42503 (TRBV28, TRBJ2-7)
CASRPWDRFSYEQYF

SEQ ID NO: 85007 - protein, 14 aa, Homo sapiens
  CDR3 for alpha chain variable domain of TCR clone 42504 (TRAV1-2, TRAJ16)
CAVNRFSDGQELLF

SEQ ID NO: 85008 - protein, 14 aa, Homo sapiens
  CDR3 for beta chain variable domain of TCR clone 42504 (TRBV4-1, TRBJ2-2)
CASSQAVNTGELFF

SEQ ID NO: 85009 - protein, 15 aa, Homo sapiens
  CDR3 for alpha chain variable domain of TCR clone 42505 (TRAV8-3, TRAJ23)
CAVGDRYNQGGKLIF

SEQ ID NO: 85010 - protein, 22 aa, Homo sapiens
  CDR3 for beta chain variable domain of TCR clone 42505 (TRBV29-1, TRBJ2-5)
TVSNMSPEDSSIYRCSAGTQYF

SEQ ID NO: 85011 - protein, 20 aa, Homo sapiens
  CDR3 for alpha chain variable domain of TCR clone 42506 (TRAV19, TRAJ48)
CALSETPEDISNFGNEKLTF

SEQ ID NO: 85012 - protein, 15 aa, Homo sapiens
  CDR3 for beta chain variable domain of TCR clone 42506 (TRBV7-3, TRBJ2-1)
CASSQRGGALIEQFF

SEQ ID NO: 85013 - protein, 13 aa, Homo sapiens
  CDR3 for alpha chain variable domain of TCR clone 42507 (TRAV8-3, TRAJ21)
CAVGAYNFNKLYF

SEQ ID NO: 85014 - protein, 16 aa, Homo sapiens
  CDR3 for beta chain variable domain of TCR clone 42507 (TRBV19, TRBJ2-1)
CASSMGGGSSYNEQFF

SEQ ID NO: 85015 - protein, 15 aa, Homo sapiens
  CDR3 for alpha chain variable domain of TCR clone 42508 (TRAV1-1, TRAJ24)
CALSGGTDSWGKFQF

SEQ ID NO: 85016 - protein, 16 aa, Homo sapiens
  CDR3 for beta chain variable domain of TCR clone 42508 (TRBV2, TRBJ2-7)
CASSEPWAGPSYEQYF

SEQ ID NO: 85017 - protein, 13 aa, Homo sapiens
  CDR3 for alpha chain variable domain of TCR clone 42509 (TRAV3, TRAJ20)
CAVRSLNDYKLRF

SEQ ID NO: 85018 - protein, 13 aa, Homo sapiens
  CDR3 for beta chain variable domain of TCR clone 42509 (TRBV7-3, TRBJ1-1)
CASSQDWGAEAFF

SEQ ID NO: 85019 - protein, 11 aa, Homo sapiens
  CDR3 for alpha chain variable domain of TCR clone 42510 (TRAV39, TRAJ49)
CAVDISTQFHF

SEQ ID NO: 85020 - protein, 11 aa, Homo sapiens
  CDR3 for beta chain variable domain of TCR clone 42510 (TRBV7-8, TRBJ2-7)
CASSLSLEQYF

SEQ ID NO: 85021 - protein, 12 aa, Homo sapiens
  CDR3 for alpha chain variable domain of TCR clone 42511 (TRAV12-3, TRAJ17)
CAITLTGNKLTF

SEQ ID NO: 85022 - protein, 11 aa, Homo sapiens
  CDR3 for beta chain variable domain of TCR clone 42511 (TRBV11-2, TRBJ1-1)
CASSINTEAFF

SEQ ID NO: 85023 - protein, 14 aa, Homo sapiens
  CDR3 for alpha chain variable domain of TCR clone 42512 (TRAV1-2, TRAJ16)
CAVNRFSDGQKLLF

SEQ ID NO: 85024 - protein, 16 aa, Homo sapiens
  CDR3 for beta chain variable domain of TCR clone 42512 (TRBV7-2, TRBJ1-4)
CASSPVGRFDREKLFF

SEQ ID NO: 85025 - protein, 12 aa, Homo sapiens
  CDR3 for alpha chain variable domain of TCR clone 42513 (TRAV26-2, TRAJ21)
CILKGNFNKFYF

SEQ ID NO: 85026 - protein, 14 aa, Homo sapiens
  CDR3 for beta chain variable domain of TCR clone 42513 (TRBV7-9, TRBJ1-1)
CASTPLQSYTVAFF

SEQ ID NO: 85027 - protein, 13 aa, Homo sapiens
  CDR3 for alpha chain variable domain of TCR clone 42514 (TRAV29/DV5, TRAJ31)
CAASRNNNSRLMF

SEQ ID NO: 85028 - protein, 13 aa, Homo sapiens
  CDR3 for beta chain variable domain of TCR clone 42514 (TRBV7-2, TRBJ2-4)
CASSREHANIQYF

SEQ ID NO: 85029 - protein, 12 aa, Homo sapiens
  CDR3 for alpha chain variable domain of TCR clone 42515 (TRAV27, TRAJ38)
SPVAGNNRKLIW

SEQ ID NO: 85030 - protein, 13 aa, Homo sapiens
  CDR3 for beta chain variable domain of TCR clone 42515 (TRBV19, TRBJ1-4)
CASPTQGNEKLFF

SEQ ID NO: 85031 - protein, 14 aa, Homo sapiens
  CDR3 for alpha chain variable domain of TCR clone 42516 (TRAV3, TRAJ36)
CAVRDGPGANNLFF

SEQ ID NO: 85032 - protein, 16 aa, Homo sapiens
  CDR3 for beta chain variable domain of TCR clone 42516 (TRBV20-1, TRBJ2-6)
CSAREGPGVGANVLTF

SEQ ID NO: 85033 - protein, 12 aa, Homo sapiens
  CDR3 for alpha chain variable domain of TCR clone 42517 (TRAV21, TRAJ11)
YAATSGYSTLTF

SEQ ID NO: 85034 - protein, 14 aa, Homo sapiens
  CDR3 for beta chain variable domain of TCR clone 42517 (TRBV20-1, TRBJ2-7)
CSAPELAGVGEQYF

SEQ ID NO: 85035 - protein, 13 aa, Homo sapiens
  CDR3 for alpha chain variable domain of TCR clone 42518 (TRAV26-2, TRAJ43)
CILKAVNNNDMRF

SEQ ID NO: 85036 - protein, 15 aa, Homo sapiens
  CDR3 for beta chain variable domain of TCR clone 42518 (TRBV7-2, TRBJ2-1)
CASTHGTGIYNEQFF

SEQ ID NO: 85037 - protein, 11 aa, Homo sapiens
  CDR3 for alpha chain variable domain of TCR clone 42519 (TRAV1-2, TRAJ40)
CAVPGTYKYIS

SEQ ID NO: 85038 - protein, 14 aa, Homo sapiens
  CDR3 for beta chain variable domain of TCR clone 42519 (TRBV5-1, TRBJ2-7)
CASSRGESLYEQYF

SEQ ID NO: 85039 - protein, 13 aa, Homo sapiens
  CDR3 for alpha chain variable domain of TCR clone 42520 (TRAV2, TRAJ15)
CAVASQAGTALIF

SEQ ID NO: 85040 - protein, 10 aa, Homo sapiens
  CDR3 for beta chain variable domain of TCR clone 42520 (TRBV12-4, TRBJ1-2)
CASSFIWLHL

SEQ ID NO: 85041 - protein, 11 aa, Homo sapiens
  CDR3 for alpha chain variable domain of TCR clone 42521 (TRAV3, TRAJ21)
CAVGNFNKFYF

SEQ ID NO: 85042 - protein, 13 aa, Homo sapiens
  CDR3 for beta chain variable domain of TCR clone 42521 (TRBV27, TRBJ2-7)
CASSLTTGYEQYF

SEQ ID NO: 85043 - protein, 12 aa, Homo sapiens
  CDR3 for alpha chain variable domain of TCR clone 42522 (TRAV3, TRAJ39)
CAVIEWSNMLTF

SEQ ID NO: 85044 - protein, 14 aa, Homo sapiens
  CDR3 for beta chain variable domain of TCR clone 42522 (TRBV7-8, TRBJ2-3)
CANSFPDGQDTQYF

SEQ ID NO: 85045 - protein, 13 aa, Homo sapiens
  CDR3 for alpha chain variable domain of TCR clone 42523 (TRAV13-1, TRAJ5)
CAASDTGSRALTF

SEQ ID NO: 85046 - protein, 12 aa, Homo sapiens
  CDR3 for beta chain variable domain of TCR clone 42523 (TRBV28, TRBJ2-3)
CASSLYRDTQYF

SEQ ID NO: 85047 - protein, 13 aa, Homo sapiens
  CDR3 for alpha chain variable domain of TCR clone 42524 (TRAV12-1, TRAJ40)
CVVPTSGTYKYIF

SEQ ID NO: 85048 - protein, 18 aa, Homo sapiens
  CDR3 for beta chain variable domain of TCR clone 42524 (TRBV7-6, TRBJ2-1)
CASSPRSSGMSSYNEQFF

SEQ ID NO: 85049 - protein, 17 aa, Homo sapiens
  CDR3 for alpha chain variable domain of TCR clone 42525 (TRAV13-1, TRAJ52)
CAASSGAGGTSYGKLTF

SEQ ID NO: 85050 - protein, 17 aa, Homo sapiens
  CDR3 for beta chain variable domain of TCR clone 42525 (TRBV11-2, TRBJ2-1)
CASSLYPPGVEYNERFF

SEQ ID NO: 85051 - protein, 13 aa, Homo sapiens
  CDR3 for alpha chain variable domain of TCR clone 42526 (TRAV13-2, TRAJ13)
CAERPGGYQKVTF

SEQ ID NO: 85052 - protein, 14 aa, Homo sapiens
  CDR3 for beta chain variable domain of TCR clone 42526 (TRBV6-1, TRBJ1-3)
CASVQGGGGNTIYF

SEQ ID NO: 85053 - protein, 14 aa, Homo sapiens
  CDR3 for alpha chain variable domain of TCR clone 42527 (TRAV35, TRAJ50)
CAGHRKTSYDKVTF

SEQ ID NO: 85054 - protein, 13 aa, Homo sapiens
  CDR3 for beta chain variable domain of TCR clone 42527 (TRBV7-7, TRBJ2-3)
CASSLSRADTQYF

SEQ ID NO: 85055 - protein, 15 aa, Homo sapiens
  CDR3 for alpha chain variable domain of TCR clone 42528 (TRAV36/DV7, TRAJ54)
CAVEKPVQGAQKLVF

SEQ ID NO: 85056 - protein, 14 aa, Homo sapiens
  CDR3 for beta chain variable domain of TCR clone 42528 (TRBV12-4, TRBJ1-1)
CASSSARGYTGAFF

SEQ ID NO: 85057 - protein, 12 aa, Homo sapiens
  CDR3 for alpha chain variable domain of TCR clone 42529 (TRAV2, TRAJ9)
CAVGAGGFKTIF

SEQ ID NO: 85058 - protein, 14 aa, Homo sapiens
  CDR3 for beta chain variable domain of TCR clone 42529 (TRBV4-1, TRBJ2-2)
CASSQAVNTGELFF

SEQ ID NO: 85059 - protein, 10 aa, Homo sapiens
  CDR3 for alpha chain variable domain of TCR clone 42530 (TRAV1-2, TRAJ20)
CACSDYKLSF

SEQ ID NO: 85060 - protein, 16 aa, Homo sapiens
  CDR3 for beta chain variable domain of TCR clone 42530 (TRBV20-1, TRBJ2-1)
CSARDLKQGMNNEQFF

SEQ ID NO: 85061 - protein, 12 aa, Homo sapiens
  CDR3 for alpha chain variable domain of TCR clone 42531 (TRAV12-3, TRAJ17)
CAMTLTGNKLTF

SEQ ID NO: 85062 - protein, 12 aa, Homo sapiens
  CDR3 for beta chain variable domain of TCR clone 42531 (TRBV2, TRBJ2-1)
CAKREGYNEQFF

SEQ ID NO: 85063 - protein, 16 aa, Homo sapiens
  CDR3 for alpha chain variable domain of TCR clone 42532 (TRAV12-3, TRAJ53)
CAMSPGSGGSNYKLTF

SEQ ID NO: 85064 - protein, 13 aa, Homo sapiens
  CDR3 for beta chain variable domain of TCR clone 42532 (TRBV7-9, TRBJ2-3)
CASSPGSTDTQYF

SEQ ID NO: 85065 - protein, 14 aa, Homo sapiens
  CDR3 for alpha chain variable domain of TCR clone 42533 (TRAV16, TRAJ33)
CAPSAMDSNYQLIW

SEQ ID NO: 85066 - protein, 12 aa, Homo sapiens
  CDR3 for beta chain variable domain of TCR clone 42533 (TRBV5-1, TRBJ1-2)
CASSQDTYGYTF

SEQ ID NO: 85067 - protein, 12 aa, Homo sapiens
  CDR3 for alpha chain variable domain of TCR clone 42534 (TRAV12-3, TRAJ17)
CAMTLTGNKLTF

SEQ ID NO: 85068 - protein, 16 aa, Homo sapiens
  CDR3 for beta chain variable domain of TCR clone 42534 (TRBV28, TRBJ2-7)
CASSFPDRRLTYEQYF

SEQ ID NO: 85069 - protein, 15 aa, Homo sapiens
  CDR3 for alpha chain variable domain of TCR clone 42535 (TRAV8-4, TRAJ37)
CAVSTRSGNTGKLIF

SEQ ID NO: 85070 - protein, 20 aa, Homo sapiens
  CDR3 for beta chain variable domain of TCR clone 42535 (TRBV7-8, TRBJ2-2)
CASSHLFPGPTIHLTGELFF

SEQ ID NO: 85071 - protein, 17 aa, Homo sapiens
  CDR3 for alpha chain variable domain of TCR clone 42536 (TRAV8-6, TRAJ58)
CAVSSLVGETSGSRLTF

SEQ ID NO: 85072 - protein, 14 aa, Homo sapiens
  CDR3 for beta chain variable domain of TCR clone 42536 (TRBV4-2, TRBJ2-1)
CASGLDRAYNEQFF

SEQ ID NO: 85073 - protein, 14 aa, Homo sapiens
  CDR3 for alpha chain variable domain of TCR clone 42537 (TRAV3, TRAJ9)
CAVRGNTGVFKTIF

SEQ ID NO: 85074 - protein, 14 aa, Homo sapiens
  CDR3 for beta chain variable domain of TCR clone 42537 (TRBV15, TRBJ2-1)
CATSGVEDYNEQFF

SEQ ID NO: 85075 - protein, 16 aa, Homo sapiens
  CDR3 for alpha chain variable domain of TCR clone 42538 (TRAV12-2, TRAJ40)
CAVIRGGTSGTYKYIF

SEQ ID NO: 85076 - protein, 12 aa, Homo sapiens
  CDR3 for beta chain variable domain of TCR clone 42538 (TRBV29-1, TRBJ2-3)
CSVTGGADTQYF

SEQ ID NO: 85077 - protein, 17 aa, Homo sapiens
  CDR3 for alpha chain variable domain of TCR clone 42539 (TRAV3, TRAJ42)
CAVRDRDYGGSQGNLIF

SEQ ID NO: 85078 - protein, 14 aa, Homo sapiens
  CDR3 for beta chain variable domain of TCR clone 42539 (TRBV12-4, TRBJ2-5)
CASSQSGGGETQYF

SEQ ID NO: 85079 - protein, 14 aa, Homo sapiens
  CDR3 for alpha chain variable domain of TCR clone 42540 (TRAV1-2, TRAJ16)
CAVNRFSDGQKLLF

SEQ ID NO: 85080 - protein, 12 aa, Homo sapiens
  CDR3 for beta chain variable domain of TCR clone 42540 (TRBV12-4, TRBJ2-1)
CASSPGRNEQFF

SEQ ID NO: 85081 - protein, 10 aa, Homo sapiens
  CDR3 for alpha chain variable domain of TCR clone 42541 (TRAV13-1, TRAJ4)
CAASIGPLLR

SEQ ID NO: 85082 - protein, 14 aa, Homo sapiens
  CDR3 for beta chain variable domain of TCR clone 42541 (TRBV2, TRBJ2-7)
CASSLTSGGYEQYF

SEQ ID NO: 85083 - protein, 13 aa, Homo sapiens
  CDR3 for alpha chain variable domain of TCR clone 42542 (TRAV17, )
CATDPTPGITMIS

SEQ ID NO: 85084 - protein, 13 aa, Homo sapiens
  CDR3 for beta chain variable domain of TCR clone 42542 (TRBV11-2, TRBJ2-5)
CASSRGPSETQYF

SEQ ID NO: 85085 - protein, 11 aa, Homo sapiens
  CDR3 for alpha chain variable domain of TCR clone 42543 (TRAV2, TRAJ21)
CAVFNFNKFYF

SEQ ID NO: 85086 - protein, 14 aa, Homo sapiens
  CDR3 for beta chain variable domain of TCR clone 42543 (TRBV15, TRBJ2-3)
CATSSGTSTDTQYF

SEQ ID NO: 85087 - protein, 14 aa, Homo sapiens
  CDR3 for alpha chain variable domain of TCR clone 42544 (TRAV17, TRAJ40)
CATALTSGTYKYIF

SEQ ID NO: 85088 - protein, 20 aa, Homo sapiens
  CDR3 for beta chain variable domain of TCR clone 42544 (TRBV7-8, TRBJ2-2)
CASSHLFPGPTIHITGELFF

SEQ ID NO: 85089 - protein, 14 aa, Homo sapiens
  CDR3 for alpha chain variable domain of TCR clone 42545 (TRAV13-1, TRAJ44)
CAAKATGTASKLTF

SEQ ID NO: 85090 - protein, 15 aa, Homo sapiens
  CDR3 for beta chain variable domain of TCR clone 42545 (TRBV10-3, TRBJ2-1)
CAVSDVQDRAYEQFF

SEQ ID NO: 85091 - protein, 12 aa, Homo sapiens
  CDR3 for alpha chain variable domain of TCR clone 42546 (TRAV21, TRAJ33)
CAKMDSNYQLIW

SEQ ID NO: 85092 - protein, 17 aa, Homo sapiens
  CDR3 for beta chain variable domain of TCR clone 42546 (TRBV7-8, TRBJ2-6)
CASSAGTGGAGANVLTF

SEQ ID NO: 85093 - protein, 16 aa, Homo sapiens
  CDR3 for alpha chain variable domain of TCR clone 42547 (TRAV4, TRAJ18)
CCVLLIGGSTLGRLYF

SEQ ID NO: 85094 - protein, 14 aa, Homo sapiens
  CDR3 for beta chain variable domain of TCR clone 42547 (TRBV18, TRBJ2-7)
CASSPRGGAYEQYF

SEQ ID NO: 85095 - protein, 14 aa, Homo sapiens
  CDR3 for alpha chain variable domain of TCR clone 42548 (TRAV16, TRAJ33)
CALSAMDSNYQLIW

SEQ ID NO: 85096 - protein, 12 aa, Homo sapiens
  CDR3 for beta chain variable domain of TCR clone 42548 (TRBV5-1, TRBJ1-2)
CASRQDTYGYTF

SEQ ID NO: 85097 - protein, 13 aa, Homo sapiens
  CDR3 for alpha chain variable domain of TCR clone 42549 (TRAV12-3, TRAJ9)
CAMRNIGGFKTIF

SEQ ID NO: 85098 - protein, 14 aa, Homo sapiens
  CDR3 for beta chain variable domain of TCR clone 42549 (TRBV11-2, TRBJ2-7)
CASSSTGEGYEQYF

SEQ ID NO: 85099 - protein, 16 aa, Homo sapiens
  CDR3 for alpha chain variable domain of TCR clone 42550 (TRAV23/DV6, TRAJ9)
FAASIGGNTGGFKTIF

SEQ ID NO: 85100 - protein, 18 aa, Homo sapiens
  CDR3 for beta chain variable domain of TCR clone 42550 (TRBV7-9, TRBJ2-7)
CASSLTTSGSRTWYEQYF

SEQ ID NO: 85101 - protein, 14 aa, Homo sapiens
  CDR3 for alpha chain variable domain of TCR clone 42551 (TRAV12-3, TRAJ10)
SHLPLTGGGNKLTF

SEQ ID NO: 85102 - protein, 15 aa, Homo sapiens
  CDR3 for beta chain variable domain of TCR clone 42551 (TRBV7-2, TRBJ2-3)
CASSLAGAFIDTQYF

SEQ ID NO: 85103 - protein, 15 aa, Homo sapiens
  CDR3 for alpha chain variable domain of TCR clone 42552 (TRAV20, TRAJ4)
CAVEGSSGGHNKLIF

SEQ ID NO: 85104 - protein, 14 aa, Homo sapiens
  CDR3 for beta chain variable domain of TCR clone 42552 (TRBV7-8, TRBJ2-7)
CASTLGGALGEQYF

SEQ ID NO: 85105 - protein, 14 aa, Homo sapiens
  CDR3 for alpha chain variable domain of TCR clone 42553 (TRAV12-2, TRAJ44)
CAVNPAGTASKITF

SEQ ID NO: 85106 - protein, 13 aa, Homo sapiens
  CDR3 for beta chain variable domain of TCR clone 42553 (TRBV20-1, TRBJ1-6)
CSAPLGVGSPLHF

SEQ ID NO: 85107 - protein, 13 aa, Homo sapiens
  CDR3 for alpha chain variable domain of TCR clone 42554 (TRAV8-2, TRAJ43)
CVVNDQGDNDMRF

SEQ ID NO: 85108 - protein, 12 aa, Homo sapiens
  CDR3 for beta chain variable domain of TCR clone 42554 (TRBV7-8, TRBJ2-7)
CASSLGDREQYF

SEQ ID NO: 85109 - protein, 13 aa, Homo sapiens
  CDR3 for alpha chain variable domain of TCR clone 42555 (TRAV3, TRAJ20)
CAVRPLNDYKLSF

SEQ ID NO: 85110 - protein, 14 aa, Homo sapiens
  CDR3 for beta chain variable domain of TCR clone 42555 (TRBV11-2, TRBJ1-2)
CASSLYRGNYGYTF

SEQ ID NO: 85111 - protein, 11 aa, Homo sapiens
  CDR3 for alpha chain variable domain of TCR clone 42556 (TRAV12-2, TRAJ33)
CAVTGNYQLIW

SEQ ID NO: 85112 - protein, 14 aa, Homo sapiens
  CDR3 for beta chain variable domain of TCR clone 42556 (TRBV12-4, TRBJ2-2)
CASNQGANTGELFF

SEQ ID NO: 85113 - protein, 18 aa, Homo sapiens
  CDR3 for alpha chain variable domain of TCR clone 42557 (TRAV13-1, TRAJ52)
CAAKNPNAGGTSYGKLTF

SEQ ID NO: 85114 - protein, 15 aa, Homo sapiens
  CDR3 for beta chain variable domain of TCR clone 42557 (TRBV6-1, TRBJ2-3)
CASSERGGITDTQYL

SEQ ID NO: 85115 - protein, 15 aa, Homo sapiens
  CDR3 for alpha chain variable domain of TCR clone 42558 (TRAV3, TRAJ5)
CAVRDLDTGRRALTF

SEQ ID NO: 85116 - protein, 15 aa, Homo sapiens
  CDR3 for beta chain variable domain of TCR clone 42558 (TRBV20-1, TRBJ2-1)
CSSRSPGGPGNEQFF

SEQ ID NO: 85117 - protein, 16 aa, Homo sapiens
  CDR3 for alpha chain variable domain of TCR clone 42559 (TRAV12-2, TRAJ43)
CAGDDIRFGAGTRLTV

SEQ ID NO: 85118 - protein, 16 aa, Homo sapiens
  CDR3 for beta chain variable domain of TCR clone 42559 (TRBV2, TRBJ2-4)
CASSEAPGGEQNIQYF

SEQ ID NO: 85119 - protein, 10 aa, Homo sapiens
  CDR3 for alpha chain variable domain of TCR clone 42560 (TRAV26-1, TRAJ40)
CIAGTYKYIF

SEQ ID NO: 85120 - protein, 15 aa, Homo sapiens
  CDR3 for beta chain variable domain of TCR clone 42560 (TRBV19, TRBJ2-1)
CASSSPGVPLDERFF

SEQ ID NO: 85121 - protein, 12 aa, Homo sapiens
  CDR3 for alpha chain variable domain of TCR clone 42561 (TRAV13-1, TRAJ21)
CAAKEGFNKFYF

SEQ ID NO: 85122 - protein, 15 aa, Homo sapiens
  CDR3 for beta chain variable domain of TCR clone 42561 (TRBV5-1, TRBJ2-1)
CASSPPRAPYNEQFF

SEQ ID NO: 85123 - protein, 15 aa, Homo sapiens
  CDR3 for alpha chain variable domain of TCR clone 42562 (TRAV16, TRAJ12)
CSKWPLRDSSYKLIF

SEQ ID NO: 85124 - protein, 13 aa, Homo sapiens
  CDR3 for beta chain variable domain of TCR clone 42562 (TRBV4-2, TRBJ1-1)
CASSQAGNTEALF

SEQ ID NO: 85125 - protein, 13 aa, Homo sapiens
  CDR3 for alpha chain variable domain of TCR clone 42563 (TRAV23/DV6, TRAJ20)
CAAGGFHDYKLSF

SEQ ID NO: 85126 - protein, 14 aa, Homo sapiens
  CDR3 for beta chain variable domain of TCR clone 42563 (TRBV3-1, TRBJ2-7)
CASSQSGSHYEQYF

SEQ ID NO: 85127 - protein, 13 aa, Homo sapiens
  CDR3 for alpha chain variable domain of TCR clone 42564 (TRAV2, TRAJ40)
CAVVTSGTYKYIF

SEQ ID NO: 85128 - protein, 14 aa, Homo sapiens
  CDR3 for beta chain variable domain of TCR clone 42564 (TRBV19, TRBJ2-2)
CASSTLHRSGELFF

SEQ ID NO: 85129 - protein, 14 aa, Homo sapiens
  CDR3 for alpha chain variable domain of TCR clone 42565 (TRAV8-3, TRAJ15)
CAVGRHQAGTALIF

SEQ ID NO: 85130 - protein, 13 aa, Homo sapiens
  CDR3 for beta chain variable domain of TCR clone 42565 (TRBV9, TRBJ2-7)
CASSASDSYEQYL

SEQ ID NO: 85131 - protein, 13 aa, Homo sapiens
  CDR3 for alpha chain variable domain of TCR clone 42566 (TRAV12-1, TRAJ7)
CVVNVRGNNRLAF

SEQ ID NO: 85132 - protein, 15 aa, Homo sapiens
  CDR3 for beta chain variable domain of TCR clone 42566 (TRBV27, TRBJ2-3)
CASSLGLAATDTQYF

SEQ ID NO: 85133 - protein, 14 aa, Homo sapiens
  CDR3 for alpha chain variable domain of TCR clone 42567 (TRAV13-1, TRAJ35)
CAASKGSFGNVLHC

SEQ ID NO: 85134 - protein, 13 aa, Homo sapiens
  CDR3 for beta chain variable domain of TCR clone 42567 (TRBV7-3, TRBJ1-1)
CASSQDWRAEAFF

SEQ ID NO: 85135 - protein, 13 aa, Homo sapiens
  CDR3 for alpha chain variable domain of TCR clone 42568 (TRAV13-1, TRAJ5)
CAASDTGRRALTF

SEQ ID NO: 85136 - protein, 11 aa, Homo sapiens
  CDR3 for beta chain variable domain of TCR clone 42568 (TRBV19, TRBJ1-1)
CASSIGSEAFF

SEQ ID NO: 85137 - protein, 12 aa, Homo sapiens
  CDR3 for alpha chain variable domain of TCR clone 42569 (TRAV21, TRAJ33)
CAKMDSNYQLIW

SEQ ID NO: 85138 - protein, 14 aa, Homo sapiens
  CDR3 for beta chain variable domain of TCR clone 42569 (TRBV2, TRBJ2-7)
CASSLTSGGCEQYF

SEQ ID NO: 85139 - protein, 13 aa, Homo sapiens
  CDR3 for alpha chain variable domain of TCR clone 42570 (TRAV8-3, TRAJ48)
CAVVPFGNEKLTF

SEQ ID NO: 85140 - protein, 15 aa, Homo sapiens
  CDR3 for beta chain variable domain of TCR clone 42570 (TRBV11-2, TRBJ2-1)
CASSSPSTRDNEQFF

SEQ ID NO: 85141 - protein, 13 aa, Homo sapiens
  CDR3 for alpha chain variable domain of TCR clone 42571 (TRAV8-3, TRAJ6)
CAVGSGGSYIPTF

SEQ ID NO: 85142 - protein, 14 aa, Homo sapiens
  CDR3 for beta chain variable domain of TCR clone 42571 (TRBV11-2, TRBJ1-1)
CASSTRRGRTEAFF

SEQ ID NO: 85143 - protein, 18 aa, Homo sapiens
  CDR3 for alpha chain variable domain of TCR clone 42572 (TRAV13-1, TRAJ52)
CAAKNPNAGGTSYGKLTF

SEQ ID NO: 85144 - protein, 14 aa, Homo sapiens
  CDR3 for beta chain variable domain of TCR clone 42572 (TRBV7-3, TRBJ2-1)
RASSLAGGTNEQFF

SEQ ID NO: 85145 - protein, 14 aa, Homo sapiens
  CDR3 for alpha chain variable domain of TCR clone 42573 (TRAV8-4, TRAJ13)
CAVTLSGGYQKVTF

SEQ ID NO: 85146 - protein, 16 aa, Homo sapiens
  CDR3 for beta chain variable domain of TCR clone 42573 (TRBV19, TRBJ2-2)
CANRSPGTGATGELFF

SEQ ID NO: 85147 - protein, 18 aa, Homo sapiens
  CDR3 for alpha chain variable domain of TCR clone 42574 (TRAV12-3, TRAJ52)
CAMSVGGAGGTSYGKLTF

SEQ ID NO: 85148 - protein, 16 aa, Homo sapiens
  CDR3 for beta chain variable domain of TCR clone 42574 (TRBV24-1, TRBJ2-3)
CATSDPGTGATDTQYF

SEQ ID NO: 85149 - protein, 15 aa, Homo sapiens
  CDR3 for alpha chain variable domain of TCR clone 42575 (TRAV21, TRAJ24)
CSARSSTDSWGKLQF

SEQ ID NO: 85150 - protein, 13 aa, Homo sapiens
  CDR3 for beta chain variable domain of TCR clone 42575 (TRBV11-2, TRBJ2-5)
CASSSTGEETQYF

SEQ ID NO: 85151 - protein, 13 aa, Homo sapiens
  CDR3 for alpha chain variable domain of TCR clone 42576 (TRAV21, TRAJ57)
CAVTQGGSGKLVF

SEQ ID NO: 85152 - protein, 14 aa, Homo sapiens
  CDR3 for beta chain variable domain of TCR clone 42576 (TRBV5-1, TRBJ2-1)
CASSDLWAGNEQFF

SEQ ID NO: 85153 - protein, 14 aa, Homo sapiens
  CDR3 for alpha chain variable domain of TCR clone 42577 (TRAV12-1, TRAJ17)
CVVNYKAAGNKLTF

SEQ ID NO: 85154 - protein, 17 aa, Homo sapiens
  CDR3 for beta chain variable domain of TCR clone 42577 (TRBV20-1, TRBJ2-1)
CSASSSRLAGSYNEQFF

SEQ ID NO: 85155 - protein, 14 aa, Homo sapiens
  CDR3 for alpha chain variable domain of TCR clone 42578 (TRAV8-3, TRAJ9)
CAVVYNTGGFKNIF

SEQ ID NO: 85156 - protein, 14 aa, Homo sapiens
  CDR3 for beta chain variable domain of TCR clone 42578 (TRBV7-3, TRBJ2-2)
CASSSGGYTGELFF

SEQ ID NO: 85157 - protein, 12 aa, Homo sapiens
  CDR3 for alpha chain variable domain of TCR clone 42579 (TRAV35, TRAJ49)
CAGWNTGNQFYF

SEQ ID NO: 85158 - protein, 16 aa, Homo sapiens
  CDR3 for beta chain variable domain of TCR clone 42579 (TRBV5-1, TRBJ2-2)
CASSLWDTTNTGELSF

SEQ ID NO: 85159 - protein, 18 aa, Homo sapiens
  CDR3 for alpha chain variable domain of TCR clone 42580 (TRAV26-1, TRAJ52)
CIVRVEGAGGTSYGKLTS

SEQ ID NO: 85160 - protein, 13 aa, Homo sapiens
  CDR3 for beta chain variable domain of TCR clone 42580 (TRBV7-3, TRBJ1-2)
CASSLKRGYGYTF

SEQ ID NO: 85161 - protein, 14 aa, Homo sapiens
  CDR3 for alpha chain variable domain of TCR clone 42581 (TRAV1-2, TRAJ16)
CAVNRFSDGQKLLF

SEQ ID NO: 85162 - protein, 13 aa, Homo sapiens
  CDR3 for beta chain variable domain of TCR clone 42581 (TRBV7-9, TRBJ2-7)
CASSFAGAYEQYF

SEQ ID NO: 85163 - protein, 21 aa, Homo sapiens
  CDR3 for alpha chain variable domain of TCR clone 42582 (TRAV8-6, TRAJ38)
CAVRNAGNNHIQNPDPAVYQL

SEQ ID NO: 85164 - protein, 15 aa, Homo sapiens
  CDR3 for beta chain variable domain of TCR clone 42582 (TRBV4-1, TRBJ2-2)
CASSEGQGITEELFF

SEQ ID NO: 85165 - protein, 18 aa, Homo sapiens
  CDR3 for alpha chain variable domain of TCR clone 42583 (TRAV13-1, TRAJ52)
CAAKNPNAGGTSYGKLTF

SEQ ID NO: 85166 - protein, 15 aa, Homo sapiens
  CDR3 for beta chain variable domain of TCR clone 42583 (TRBV6-1, TRBJ2-3)
CASSERGGISDTQYF

SEQ ID NO: 85167 - protein, 14 aa, Homo sapiens
  CDR3 for alpha chain variable domain of TCR clone 42584 (TRAV12-3, TRAJ10)
SHLPLTGGGNKLTF

SEQ ID NO: 85168 - protein, 14 aa, Homo sapiens
  CDR3 for beta chain variable domain of TCR clone 42584 (TRBV13, TRBJ2-7)
CASSLKGASYEQYF

SEQ ID NO: 85169 - protein, 16 aa, Homo sapiens
  CDR3 for alpha chain variable domain of TCR clone 42585 (TRAV26-1, TRAJ45)
CIVEKYSGGGADGLTF

SEQ ID NO: 85170 - protein, 18 aa, Homo sapiens
  CDR3 for beta chain variable domain of TCR clone 42585 (TRBV15, TRBJ2-7)
CATSRGPSNRPTSSTSGR

SEQ ID NO: 85171 - protein, 15 aa, Homo sapiens
  CDR3 for alpha chain variable domain of TCR clone 42586 (TRAV8-6, TRAJ10)
CAVSDQAGGGNKLTF

SEQ ID NO: 85172 - protein, 12 aa, Homo sapiens
  CDR3 for beta chain variable domain of TCR clone 42586 (TRBV11-2, TRBJ2-2)
CASSLGGGELFF

SEQ ID NO: 85173 - protein, 13 aa, Homo sapiens
  CDR3 for alpha chain variable domain of TCR clone 42587 (TRAV3, TRAJ16)
CAVRDRNGQKLLF

SEQ ID NO: 85174 - protein, 15 aa, Homo sapiens
  CDR3 for beta chain variable domain of TCR clone 42587 (TRBV5-1, TRBJ2-1)
CASSPPRAPYNEQLF

SEQ ID NO: 85175 - protein, 12 aa, Homo sapiens
  CDR3 for alpha chain variable domain of TCR clone 42588 (TRAV17, TRAJ57)
CATDGGSEKLVF

SEQ ID NO: 85176 - protein, 15 aa, Homo sapiens
  CDR3 for beta chain variable domain of TCR clone 42588 (TRBV6-3, TRBJ2-2)
SASSFLATLTGELFF

SEQ ID NO: 85177 - protein, 12 aa, Homo sapiens
  CDR3 for alpha chain variable domain of TCR clone 42589 (TRAV8-6, TRAJ43)
RAVSNNNNDMRF

SEQ ID NO: 85178 - protein, 15 aa, Homo sapiens
  CDR3 for beta chain variable domain of TCR clone 42589 (TRBV7-3, TRBJ2-6)
CASSLGGSGANVPTF

SEQ ID NO: 85179 - protein, 13 aa, Homo sapiens
  CDR3 for alpha chain variable domain of TCR clone 42590 (TRAV13-2, TRAJ53)
CSENMGSNYKLTF

SEQ ID NO: 85180 - protein, 13 aa, Homo sapiens
  CDR3 for beta chain variable domain of TCR clone 42590 (TRBV4-1, TRBJ2-2)
CASSQENTGELFF

SEQ ID NO: 85181 - protein, 18 aa, Homo sapiens
  CDR3 for alpha chain variable domain of TCR clone 42591 (TRAV13-1, TRAJ52)
CAASKRSAGGTSNGKLTF

SEQ ID NO: 85182 - protein, 13 aa, Homo sapiens
  CDR3 for beta chain variable domain of TCR clone 42591 (TRBV12-4, TRBJ1-2)
CASSLRQGKGYTF

SEQ ID NO: 85183 - protein, 19 aa, Homo sapiens
  CDR3 for alpha chain variable domain of TCR clone 42592 (TRAV16, TRAJ45)
CAPRPLLVFSGGGADGLTF

SEQ ID NO: 85184 - protein, 15 aa, Homo sapiens
  CDR3 for beta chain variable domain of TCR clone 42592 (TRBV3-1, TRBJ2-5)
CASSANLGGPETQYF

SEQ ID NO: 85185 - protein, 17 aa, Homo sapiens
  CDR3 for alpha chain variable domain of TCR clone 42593 (TRAV3, TRAJ42)
CAVRDRDYGGSQGNLIF

SEQ ID NO: 85186 - protein, 14 aa, Homo sapiens
  CDR3 for beta chain variable domain of TCR clone 42593 (TRBV7-3, TRBJ1-1)
CASSLKGGNTEAFF

SEQ ID NO: 85187 - protein, 12 aa, Homo sapiens
  CDR3 for alpha chain variable domain of TCR clone 42594 (TRAV21, TRAJ23)
CAVGPQVGKLIF

SEQ ID NO: 85188 - protein, 13 aa, Homo sapiens
  CDR3 for beta chain variable domain of TCR clone 42594 (TRBV20-1, TRBJ2-7)
CSARTGAGYEQYF

SEQ ID NO: 85189 - protein, 16 aa, Homo sapiens
  CDR3 for alpha chain variable domain of TCR clone 42595 (TRAV16, TRAJ52)
CALSGVGGTSCGKLTF

SEQ ID NO: 85190 - protein, 14 aa, Homo sapiens
  CDR3 for beta chain variable domain of TCR clone 42595 (TRBV19, TRBJ1-2)
CASSLQGQAYGYTF

SEQ ID NO: 85191 - protein, 15 aa, Homo sapiens
  CDR3 for alpha chain variable domain of TCR clone 42596 (TRAV21, TRAJ24)
LAARSSTDSWGKLQF

SEQ ID NO: 85192 - protein, 13 aa, Homo sapiens
  CDR3 for beta chain variable domain of TCR clone 42596 (TRBV11-2, TRBJ2-5)
CASSSTGEETQYF

SEQ ID NO: 85193 - protein, 14 aa, Homo sapiens
  CDR3 for alpha chain variable domain of TCR clone 42597 (TRAV12-2, TRAJ53)
CAVKGGGSNYKLTF

SEQ ID NO: 85194 - protein, 14 aa, Homo sapiens
  CDR3 for beta chain variable domain of TCR clone 42597 (TRBV7-7, TRBJ2-2)
CTTRQDSDTGELFF

SEQ ID NO: 85195 - protein, 15 aa, Homo sapiens
  CDR3 for alpha chain variable domain of TCR clone 42598 (TRAV3, TRAJ22)
CAVRDRGGSVRQLTF

SEQ ID NO: 85196 - protein, 16 aa, Homo sapiens
  CDR3 for beta chain variable domain of TCR clone 42598 (TRBV5-4, TRBJ2-3)
CASQQPGAGGADTQYF

SEQ ID NO: 85197 - protein, 18 aa, Homo sapiens
  CDR3 for alpha chain variable domain of TCR clone 42599 (TRAV21, TRAJ52)
CAVRPSPAGGTSYGKLTF

SEQ ID NO: 85198 - protein, 18 aa, Homo sapiens
  CDR3 for beta chain variable domain of TCR clone 42599 (TRBV12-4, TRBJ2-2)
CASSLVAGTRGRTGELFF

SEQ ID NO: 85199 - protein, 15 aa, Homo sapiens
  CDR3 for alpha chain variable domain of TCR clone 42600 (TRAV27, TRAJ38)
CAARRNAGNNRKLIW

SEQ ID NO: 85200 - protein, 13 aa, Homo sapiens
  CDR3 for beta chain variable domain of TCR clone 42600 (TRBV12-5, TRBJ2-3)
CGSGDRQSDTQYF

SEQ ID NO: 85201 - protein, 16 aa, Homo sapiens
  CDR3 for alpha chain variable domain of TCR clone 42601 (TRAV38-1, TRAJ32)
CAFMKGGGGATNKLLF

SEQ ID NO: 85202 - protein, 13 aa, Homo sapiens
  CDR3 for beta chain variable domain of TCR clone 42601 (TRBV20-1, TRBJ2-5)
CSAREAFQETQYF

SEQ ID NO: 85203 - protein, 12 aa, Homo sapiens
  CDR3 for alpha chain variable domain of TCR clone 42602 (TRAV1-2, TRAJ33)
CAALDSNYQLIW

SEQ ID NO: 85204 - protein, 17 aa, Homo sapiens
  CDR3 for beta chain variable domain of TCR clone 42602 (TRBV7-3, TRBJ2-3)
CASSLMKRMRGADTQYF

SEQ ID NO: 85205 - protein, 12 aa, Homo sapiens
  CDR3 for alpha chain variable domain of TCR clone 42603 (TRAV13-1, TRAJ21)
CAAKEGFNKFYF

SEQ ID NO: 85206 - protein, 14 aa, Homo sapiens
  CDR3 for beta chain variable domain of TCR clone 42603 (TRBV19, TRBJ2-1)
CASSPGLAPNEQFF

SEQ ID NO: 85207 - protein, 13 aa, Homo sapiens
  CDR3 for alpha chain variable domain of TCR clone 42604 (TRAV20, TRAJ15)
CATINQAGTALIF

SEQ ID NO: 85208 - protein, 13 aa, Homo sapiens
  CDR3 for beta chain variable domain of TCR clone 42604 (TRBV12-4, TRBJ2-1)
CASRQPSNNEQSF

SEQ ID NO: 85209 - protein, 14 aa, Homo sapiens
  CDR3 for alpha chain variable domain of TCR clone 42605 (TRAV1-2, TRAJ16)
CAVNRFSDGQKLLF

SEQ ID NO: 85210 - protein, 12 aa, Homo sapiens
  CDR3 for beta chain variable domain of TCR clone 42605 (TRBV28, TRBJ2-6)
CAIQAGANDLTF

SEQ ID NO: 85211 - protein, 12 aa, Homo sapiens
  CDR3 for alpha chain variable domain of TCR clone 42606 (TRAV17, TRAJ12)
CATLRGSYKLIF

SEQ ID NO: 85212 - protein, 16 aa, Homo sapiens
  CDR3 for beta chain variable domain of TCR clone 42606 (TRBV28, TRBJ2-7)
CASSLFFETGGPEQYF

SEQ ID NO: 85213 - protein, 16 aa, Homo sapiens
  CDR3 for alpha chain variable domain of TCR clone 42607 (TRAV8-3, TRAJ13)
CAVGAYPSGGYQKVNF

SEQ ID NO: 85214 - protein, 15 aa, Homo sapiens
  CDR3 for beta chain variable domain of TCR clone 42607 (TRBV19, TRBJ1-5)
CASSIVWADNQPQHF

SEQ ID NO: 85215 - protein, 12 aa, Homo sapiens
  CDR3 for alpha chain variable domain of TCR clone 42608 (TRAV12-3, TRAJ17)
CAMTLTGNKLTF

SEQ ID NO: 85216 - protein, 15 aa, Homo sapiens
  CDR3 for beta chain variable domain of TCR clone 42608 (TRBV29-1, TRBJ2-6)
CSFTGGRSGANDLTF

SEQ ID NO: 85217 - protein, 12 aa, Homo sapiens
  CDR3 for alpha chain variable domain of TCR clone 42609 (TRAV12-3, TRAJ17)
CAMTLTGNKLTF

SEQ ID NO: 85218 - protein, 16 aa, Homo sapiens
  CDR3 for beta chain variable domain of TCR clone 42609 (TRBV12-5, TRBJ2-5)
CASGTRTSGNQETQYF

SEQ ID NO: 85219 - protein, 17 aa, Homo sapiens
  CDR3 for alpha chain variable domain of TCR clone 42610 (TRAV23/DV6, TRAJ57)
CAASSTLSQGGSEKLVF

SEQ ID NO: 85220 - protein, 14 aa, Homo sapiens
  CDR3 for beta chain variable domain of TCR clone 42610 (TRBV25-1, TRBJ1-1)
CASTHLGGNTESFF

SEQ ID NO: 85221 - protein, 23 aa, Homo sapiens
  CDR3 for alpha chain variable domain of TCR clone 42611 (TRAV8-3, )
CAVVTTRIPDIQNPDHAVYQLRD

SEQ ID NO: 85222 - protein, 14 aa, Homo sapiens
  CDR3 for beta chain variable domain of TCR clone 42611 (TRBV11-2, TRBJ2-7)
CASSPSTTSYEQYF

SEQ ID NO: 85223 - protein, 14 aa, Homo sapiens
  CDR3 for alpha chain variable domain of TCR clone 42612 (TRAV1-2, TRAJ16)
CAVNRFSDGQKLLF

SEQ ID NO: 85224 - protein, 17 aa, Homo sapiens
  CDR3 for beta chain variable domain of TCR clone 42612 (TRBV10-3, TRBJ2-4)
CTSVPSVNKGSKNSQYF

SEQ ID NO: 85225 - protein, 16 aa, Homo sapiens
  CDR3 for alpha chain variable domain of TCR clone 42613 (TRAV8-3, TRAJ44)
CAVGPLNTGTASKLTF

SEQ ID NO: 85226 - protein, 18 aa, Homo sapiens
  CDR3 for beta chain variable domain of TCR clone 42613 (TRBV3-1, TRBJ2-1)
CASSQDLPGRPLSDEQFF

SEQ ID NO: 85227 - protein, 13 aa, Homo sapiens
  CDR3 for alpha chain variable domain of TCR clone 42614 (TRAV2, TRAJ40)
CAVVTSGTYKYIF

SEQ ID NO: 85228 - protein, 14 aa, Homo sapiens
  CDR3 for beta chain variable domain of TCR clone 42614 (TRBV3-1, TRBJ2-5)
CASSQGPDQETQYF

SEQ ID NO: 85229 - protein, 13 aa, Homo sapiens
  CDR3 for alpha chain variable domain of TCR clone 42615 (TRAV3, TRAJ21)
CAVREPDFNKFYF

SEQ ID NO: 85230 - protein, 13 aa, Homo sapiens
  CDR3 for beta chain variable domain of TCR clone 42615 (TRBV11-3, TRBJ1-1)
CASSRQPNTEAFF

SEQ ID NO: 85231 - protein, 11 aa, Homo sapiens
  CDR3 for alpha chain variable domain of TCR clone 42616 (TRAV30, TRAJ24)
WMLTAGGKFQF

SEQ ID NO: 85232 - protein, 14 aa, Homo sapiens
  CDR3 for beta chain variable domain of TCR clone 42616 (TRBV13, TRBJ2-1)
CASSPRPRYNEQFF

SEQ ID NO: 85233 - protein, 14 aa, Homo sapiens
  CDR3 for alpha chain variable domain of TCR clone 42617 (TRAV26-1, TRAJ26)
CIVRATFLGKNFVF

SEQ ID NO: 85234 - protein, 16 aa, Homo sapiens
  CDR3 for beta chain variable domain of TCR clone 42617 (TRBV12-4, TRBJ2-7)
CASRSTGTGPSYEQYF

SEQ ID NO: 85235 - protein, 14 aa, Homo sapiens
  CDR3 for alpha chain variable domain of TCR clone 42618 (TRAV12-1, TRAJ30)
CVPTGTSRDDKIIF

SEQ ID NO: 85236 - protein, 11 aa, Homo sapiens
  CDR3 for beta chain variable domain of TCR clone 42618 (TRBV4-1, TRBJ2-2)
CASEHTGELFF

SEQ ID NO: 85237 - protein, 18 aa, Homo sapiens
  CDR3 for alpha chain variable domain of TCR clone 42619 (TRAV26-2, TRAJ54)
CILRDVEVGIQGAQKLVF

SEQ ID NO: 85238 - protein, 17 aa, Homo sapiens
  CDR3 for beta chain variable domain of TCR clone 42619 (TRBV20-1, TRBJ1-5)
CSASLGPGQGGNQPQHF

SEQ ID NO: 85239 - protein, 19 aa, Homo sapiens
  CDR3 for alpha chain variable domain of TCR clone 42620 (TRAV1-2, TRAJ26)
CLLPLCCERPDNYDQNFVF

SEQ ID NO: 85240 - protein, 11 aa, Homo sapiens
  CDR3 for beta chain variable domain of TCR clone 42620 (TRBV12-4, TRBJ2-3)
CASTATDTQYF

SEQ ID NO: 85241 - protein, 14 aa, Homo sapiens
  CDR3 for alpha chain variable domain of TCR clone 42621 (TRAV38-1, TRAJ40)
CALRPASGTYKYIF

SEQ ID NO: 85242 - protein, 13 aa, Homo sapiens
  CDR3 for beta chain variable domain of TCR clone 42621 (TRBV25-1, TRBJ1-1)
CQHPPGGNTEAFF

SEQ ID NO: 85243 - protein, 15 aa, Homo sapiens
  CDR3 for alpha chain variable domain of TCR clone 42622 (TRAV38-2/DV8, TRAJ48)
CAYRSGGCGNEKLTF

SEQ ID NO: 85244 - protein, 16 aa, Homo sapiens
  CDR3 for beta chain variable domain of TCR clone 42622 (TRBV28, TRBJ2-7)
CASSPWVATGDLSQYF

SEQ ID NO: 85245 - protein, 11 aa, Homo sapiens
  CDR3 for alpha chain variable domain of TCR clone 42623 (TRAV12-1, TRAJ3)
CVVSSASKIIF

SEQ ID NO: 85246 - protein, 15 aa, Homo sapiens
  CDR3 for beta chain variable domain of TCR clone 42623 (TRBV20-1, TRBJ2-5)
SAVLVGLAGGETQYF

SEQ ID NO: 85247 - protein, 14 aa, Homo sapiens
  CDR3 for alpha chain variable domain of TCR clone 42624 (TRAV12-3, TRAJ10)
SHLPLKGGGNKLTF

SEQ ID NO: 85248 - protein, 14 aa, Homo sapiens
  CDR3 for beta chain variable domain of TCR clone 42624 (TRBV6-1, TRBJ1-3)
CASVQGGGGDTIYF

SEQ ID NO: 85249 - protein, 19 aa, Homo sapiens
  CDR3 for alpha chain variable domain of TCR clone 42625 (TRAV38-1, TRAJ53)
CAFMKHGLESGGSNYKMTF

SEQ ID NO: 85250 - protein, 13 aa, Homo sapiens
  CDR3 for beta chain variable domain of TCR clone 42625 (TRBV19, TRBJ2-7)
CASSPRQSYEQYF

SEQ ID NO: 85251 - protein, 12 aa, Homo sapiens
  CDR3 for alpha chain variable domain of TCR clone 42626 (TRAV12-3, TRAJ17)
CAMTLTGNKLTL

SEQ ID NO: 85252 - protein, 15 aa, Homo sapiens
  CDR3 for beta chain variable domain of TCR clone 42626 (TRBV20-1, TRBJ2-7)
CSARDRVSGVDEQYF

SEQ ID NO: 85253 - protein, 16 aa, Homo sapiens
  CDR3 for alpha chain variable domain of TCR clone 42627 (TRAV8-3, TRAJ13)
CAVGAYPTGGYQKVTF

SEQ ID NO: 85254 - protein, 15 aa, Homo sapiens
  CDR3 for beta chain variable domain of TCR clone 42627 (TRBV19, TRBJ1-5)
CASSIVWADNQPQHF

SEQ ID NO: 85255 - protein, 12 aa, Homo sapiens
  CDR3 for alpha chain variable domain of TCR clone 42628 (TRAV3, TRAJ20)
CAVRDRDYKLSF

SEQ ID NO: 85256 - protein, 14 aa, Homo sapiens
  CDR3 for beta chain variable domain of TCR clone 42628 (TRBV4-2, TRBJ2-1)
CASGLDRAYNEQFF

SEQ ID NO: 85257 - protein, 16 aa, Homo sapiens
  CDR3 for alpha chain variable domain of TCR clone 42629 (TRAV12-2, TRAJ10)
CAVNRVLTGGGNKLTF

SEQ ID NO: 85258 - protein, 12 aa, Homo sapiens
  CDR3 for beta chain variable domain of TCR clone 42629 (TRBV28, TRBJ2-7)
CASSFSSHEQYF

SEQ ID NO: 85259 - protein, 15 aa, Homo sapiens
  CDR3 for alpha chain variable domain of TCR clone 42630 (TRAV3, TRAJ3)
CAVRDRDSSASKIIF

SEQ ID NO: 85260 - protein, 18 aa, Homo sapiens
  CDR3 for beta chain variable domain of TCR clone 42630 (TRBV25-1, TRBJ1-2)
CASSGLQNVQGLIFGYTF

SEQ ID NO: 85261 - protein, 10 aa, Homo sapiens
  CDR3 for alpha chain variable domain of TCR clone 42631 (TRAV8-2, TRAJ29)
CTGGNTPLVL

SEQ ID NO: 85262 - protein, 17 aa, Homo sapiens
  CDR3 for beta chain variable domain of TCR clone 42631 (TRBV2, TRBJ2-7)
CASSQALTGWDSYEQYF

SEQ ID NO: 85263 - protein, 14 aa, Homo sapiens
  CDR3 for alpha chain variable domain of TCR clone 42632 (TRAV19, TRAJ34)
CALSEGVGTDKLIF

SEQ ID NO: 85264 - protein, 13 aa, Homo sapiens
  CDR3 for beta chain variable domain of TCR clone 42632 (TRBV7-9, TRBJ2-3)
CASSPGSTDTQYF

SEQ ID NO: 85265 - protein, 14 aa, Homo sapiens
  CDR3 for alpha chain variable domain of TCR clone 42633 (TRAV12-2, TRAJ44)
CAVNEAGTASKLTF

SEQ ID NO: 85266 - protein, 12 aa, Homo sapiens
  CDR3 for beta chain variable domain of TCR clone 42633 (TRBV19, TRBJ1-4)
CASKDWPGGLFF

SEQ ID NO: 85267 - protein, 15 aa, Homo sapiens
  CDR3 for alpha chain variable domain of TCR clone 42634 (TRAV8-2, TRAJ15)
CVVTMGNQAGTALIF

SEQ ID NO: 85268 - protein, 14 aa, Homo sapiens
  CDR3 for beta chain variable domain of TCR clone 42634 (TRBV7-2, TRBJ1-2)
CASSQTGSTYGYTF

SEQ ID NO: 85269 - protein, 14 aa, Homo sapiens
  CDR3 for alpha chain variable domain of TCR clone 42635 (TRAV35, TRAJ33)
CAGSSQDSYYQLIW

SEQ ID NO: 85270 - protein, 15 aa, Homo sapiens
  CDR3 for beta chain variable domain of TCR clone 42635 (TRBV20-1, TRBJ2-7)
CSAESGTSGAYEQYF

SEQ ID NO: 85271 - protein, 15 aa, Homo sapiens
  CDR3 for alpha chain variable domain of TCR clone 42636 (TRAV3, TRAJ22)
CAVGDRGGSARQLTF

SEQ ID NO: 85272 - protein, 16 aa, Homo sapiens
  CDR3 for beta chain variable domain of TCR clone 42636 (TRBV4-2, TRBJ1-1)
CASSPSPGRAAPEAFF

SEQ ID NO: 85273 - protein, 15 aa, Homo sapiens
  CDR3 for alpha chain variable domain of TCR clone 42637 (TRAV3, TRAJ3)
CAVRDGHSSASKIIF

SEQ ID NO: 85274 - protein, 14 aa, Homo sapiens
  CDR3 for beta chain variable domain of TCR clone 42637 (TRBV28, TRBJ1-4)
CANSFGTFDEKLFF

SEQ ID NO: 85275 - protein, 13 aa, Homo sapiens
  CDR3 for alpha chain variable domain of TCR clone 42638 (TRAV29/DV5, TRAJ31)
CAASRNNNARIMF

SEQ ID NO: 85276 - protein, 12 aa, Homo sapiens
  CDR3 for beta chain variable domain of TCR clone 42638 (TRBV14, TRBJ2-5)
CASSQLKETQYF

SEQ ID NO: 85277 - protein, 16 aa, Homo sapiens
  CDR3 for alpha chain variable domain of TCR clone 42639 (TRAV20, TRAJ22)
CAVQASSSGSARQLPF

SEQ ID NO: 85278 - protein, 13 aa, Homo sapiens
  CDR3 for beta chain variable domain of TCR clone 42639 (TRBV7-2, TRBJ2-5)
CASSQTSVETQYF

SEQ ID NO: 85279 - protein, 15 aa, Homo sapiens
  CDR3 for alpha chain variable domain of TCR clone 42640 (TRAV12-1, TRAJ44)
CVVFVNTGTASKLTF

SEQ ID NO: 85280 - protein, 14 aa, Homo sapiens
  CDR3 for beta chain variable domain of TCR clone 42640 (TRBV12-5, TRBJ2-5)
CASGSRTHQETQYF

SEQ ID NO: 85281 - protein, 15 aa, Homo sapiens
  CDR3 for alpha chain variable domain of TCR clone 42641 (TRAV13-1, TRAJ57)
CAASNTQGGSEKLGF

SEQ ID NO: 85282 - protein, 16 aa, Homo sapiens
  CDR3 for beta chain variable domain of TCR clone 42641 (TRBV19, TRBJ2-1)
CASSKAGPSSYNEQFF

SEQ ID NO: 85283 - protein, 13 aa, Homo sapiens
  CDR3 for alpha chain variable domain of TCR clone 42642 (TRAV36/DV7, TRAJ53)
CALSGGSNYKLTF

SEQ ID NO: 85284 - protein, 13 aa, Homo sapiens
  CDR3 for beta chain variable domain of TCR clone 42642 (TRBV28, TRBJ2-7)
RASSLPSRYEQYF

SEQ ID NO: 85285 - protein, 14 aa, Homo sapiens
  CDR3 for alpha chain variable domain of TCR clone 42643 (TRAV12-2, TRAJ11)
CAVRKNSGYSTLTF

SEQ ID NO: 85286 - protein, 14 aa, Homo sapiens
  CDR3 for beta chain variable domain of TCR clone 42643 (TRBV7-2, TRBJ2-5)
CASWKERFRETQYF

SEQ ID NO: 85287 - protein, 13 aa, Homo sapiens
  CDR3 for alpha chain variable domain of TCR clone 42644 (TRAV13-2, TRAJ53)
CAENMGSNYKLTF

SEQ ID NO: 85288 - protein, 17 aa, Homo sapiens
  CDR3 for beta chain variable domain of TCR clone 42644 (TRBV11-2, TRBJ2-1)
CASSLALAEFGRNEQFF

SEQ ID NO: 85289 - protein, 12 aa, Homo sapiens
  CDR3 for alpha chain variable domain of TCR clone 42645 (TRAV12-3, TRAJ17)
CAMTLTGNKLTF

SEQ ID NO: 85290 - protein, 16 aa, Homo sapiens
  CDR3 for beta chain variable domain of TCR clone 42645 (TRBV10-3, TRBJ2-6)
CAISTSGDLGANVLTF

SEQ ID NO: 85291 - protein, 18 aa, Homo sapiens
  CDR3 for alpha chain variable domain of TCR clone 42646 (TRAV21, TRAJ52)
CAVRPSPAGGTSYGELTF

SEQ ID NO: 85292 - protein, 15 aa, Homo sapiens
  CDR3 for beta chain variable domain of TCR clone 42646 (TRBV7-9, TRBJ2-7)
CASSSSGLAVYEQYF

SEQ ID NO: 85293 - protein, 14 aa, Homo sapiens
  CDR3 for alpha chain variable domain of TCR clone 42647 (TRAV1-2, TRAJ8)
CAVREDTGFQKLVF

SEQ ID NO: 85294 - protein, 14 aa, Homo sapiens
  CDR3 for beta chain variable domain of TCR clone 42647 (TRBV27, TRBJ2-5)
CASSRTFLVDTQYF

SEQ ID NO: 85295 - protein, 14 aa, Homo sapiens
  CDR3 for alpha chain variable domain of TCR clone 42648 (TRAV12-3, TRAJ57)
CAMSAWGGSEKLVF

SEQ ID NO: 85296 - protein, 14 aa, Homo sapiens
  CDR3 for beta chain variable domain of TCR clone 42648 (TRBV19, TRBJ2-2)
CASSGQGIAGELFF

SEQ ID NO: 85297 - protein, 12 aa, Homo sapiens
  CDR3 for alpha chain variable domain of TCR clone 42649 (TRAV1-1, TRAJ8)
CAGGTGFQKLVF

SEQ ID NO: 85298 - protein, 17 aa, Homo sapiens
  CDR3 for beta chain variable domain of TCR clone 42649 (TRBV7-9, TRBJ1-4)
CASSRTGALMKNCFLAV

SEQ ID NO: 85299 - protein, 16 aa, Homo sapiens
  CDR3 for alpha chain variable domain of TCR clone 42650 (TRAV26-1, TRAJ53)
CIVRVAMGGSNYKLTF

SEQ ID NO: 85300 - protein, 12 aa, Homo sapiens
  CDR3 for beta chain variable domain of TCR clone 42650 (TRBV7-9, TRBJ1-5)
CASSLQGQPQHF

SEQ ID NO: 85301 - protein, 11 aa, Homo sapiens
  CDR3 for alpha chain variable domain of TCR clone 42651 (TRAV16, TRAJ31)
CVLFNNARLMF

SEQ ID NO: 85302 - protein, 15 aa, Homo sapiens
  CDR3 for beta chain variable domain of TCR clone 42651 (TRBV18, TRBJ1-1)
CASSPRQGENTEAFF

SEQ ID NO: 85303 - protein, 18 aa, Homo sapiens
  CDR3 for alpha chain variable domain of TCR clone 42652 (TRAV26-1, TRAJ23)
CIVRVGLEVWNRGGKLIF

SEQ ID NO: 85304 - protein, 15 aa, Homo sapiens
  CDR3 for beta chain variable domain of TCR clone 42652 (TRBV10-3, TRBJ2-3)
CAISDWDRDTDTQYF

SEQ ID NO: 85305 - protein, 14 aa, Homo sapiens
  CDR3 for alpha chain variable domain of TCR clone 42653 (TRAV17, TRAJ22)
CATSPSGSARQLTF

SEQ ID NO: 85306 - protein, 15 aa, Homo sapiens
  CDR3 for beta chain variable domain of TCR clone 42653 (TRBV4-1, TRBJ2-5)
CAGSQWDLYQETQYF

SEQ ID NO: 85307 - protein, 12 aa, Homo sapiens
  CDR3 for alpha chain variable domain of TCR clone 42654 (TRAV30, TRAJ43)
CGTEERGNDMRV

SEQ ID NO: 85308 - protein, 13 aa, Homo sapiens
  CDR3 for beta chain variable domain of TCR clone 42654 (TRBV27, TRBJ2-7)
CASSFSQGYEQYF

SEQ ID NO: 85309 - protein, 15 aa, Homo sapiens
  CDR3 for alpha chain variable domain of TCR clone 42655 (TRAV3, TRAJ4)
CAVRDGTGGYNKLIF

SEQ ID NO: 85310 - protein, 16 aa, Homo sapiens
  CDR3 for beta chain variable domain of TCR clone 42655 (TRBV27, TRBJ2-2)
CASSSSGVSNNGELFF

SEQ ID NO: 85311 - protein, 15 aa, Homo sapiens
  CDR3 for alpha chain variable domain of TCR clone 42656 (TRAV21, TRAJ56)
CAVTKYTGANRKLTF

SEQ ID NO: 85312 - protein, 14 aa, Homo sapiens
  CDR3 for beta chain variable domain of TCR clone 42656 (TRBV20-1, TRBJ2-3)
CSARVRGSTDTQYF

SEQ ID NO: 85313 - protein, 15 aa, Homo sapiens
  CDR3 for alpha chain variable domain of TCR clone 42657 (TRAV27, TRAJ38)
GAARRNAGNNRKLIW

SEQ ID NO: 85314 - protein, 13 aa, Homo sapiens
  CDR3 for beta chain variable domain of TCR clone 42657 (TRBV12-5, TRBJ2-3)
CASGDRQSDTQYF

SEQ ID NO: 85315 - protein, 12 aa, Homo sapiens
  CDR3 for alpha chain variable domain of TCR clone 42658 (TRAV12-3, TRAJ20)
CAMVRGDYKLSF

SEQ ID NO: 85316 - protein, 16 aa, Homo sapiens
  CDR3 for beta chain variable domain of TCR clone 42658 (TRBV28, TRBJ1-4)
CASSPPYRGRSEKLFF

SEQ ID NO: 85317 - protein, 12 aa, Homo sapiens
  CDR3 for alpha chain variable domain of TCR clone 42659 (TRAV12-3, TRAJ17)
CAMTLTGNKLTF

SEQ ID NO: 85318 - protein, 17 aa, Homo sapiens
  CDR3 for beta chain variable domain of TCR clone 42659 (TRBV4-2, TRBJ1-1)
CASTQFGGGSGNTEAFF

SEQ ID NO: 85319 - protein, 10 aa, Homo sapiens
  CDR3 for alpha chain variable domain of TCR clone 42660 (TRAV30, TRAJ48)
CGIGNEKLTF

SEQ ID NO: 85320 - protein, 14 aa, Homo sapiens
  CDR3 for beta chain variable domain of TCR clone 42660 (TRBV7-6, TRBJ2-3)
CASSVAGGTDMQYF

SEQ ID NO: 85321 - protein, 13 aa, Homo sapiens
  CDR3 for alpha chain variable domain of TCR clone 42661 (TRAV2, TRAJ40)
CAVVTSGTYKYIF

SEQ ID NO: 85322 - protein, 15 aa, Homo sapiens
  CDR3 for beta chain variable domain of TCR clone 42661 (TRBV11-3, TRBJ2-3)
CASLKDGREGDMQYF

SEQ ID NO: 85323 - protein, 14 aa, Homo sapiens
  CDR3 for alpha chain variable domain of TCR clone 42662 (TRAV17, TRAJ39)
CATDPVRPGNMLTF

SEQ ID NO: 85324 - protein, 15 aa, Homo sapiens
  CDR3 for beta chain variable domain of TCR clone 42662 (TRBV13, TRBJ1-5)
CASSFGQGGVQPQHF

SEQ ID NO: 85325 - protein, 14 aa, Homo sapiens
  CDR3 for alpha chain variable domain of TCR clone 42663 (TRAV13-1, TRAJ35)
CAASKGGFGNVLHC

SEQ ID NO: 85326 - protein, 13 aa, Homo sapiens
  CDR3 for beta chain variable domain of TCR clone 42663 (TRBV7-3, TRBJ1-1)
CASSQDWGAEACF

SEQ ID NO: 85327 - protein, 14 aa, Homo sapiens
  CDR3 for alpha chain variable domain of TCR clone 42664 (TRAV26-1, TRAJ48)
CIVRVGFGNEKLTF

SEQ ID NO: 85328 - protein, 13 aa, Homo sapiens
  CDR3 for beta chain variable domain of TCR clone 42664 (TRBV11-3, TRBJ2-3)
CASGHDTKDTQYF

SEQ ID NO: 85329 - protein, 12 aa, Homo sapiens
  CDR3 for alpha chain variable domain of TCR clone 42665 (TRAV23/DV6, TRAJ3)
CAARAPQQCFQD

SEQ ID NO: 85330 - protein, 17 aa, Homo sapiens
  CDR3 for beta chain variable domain of TCR clone 42665 (TRBV7-9, TRBJ2-3)
CASSPTVAGDLADTQYF

SEQ ID NO: 85331 - protein, 13 aa, Homo sapiens
  CDR3 for alpha chain variable domain of TCR clone 42666 (TRAV21, TRAJ36)
CAVIKTRANNLFF

SEQ ID NO: 85332 - protein, 13 aa, Homo sapiens
  CDR3 for beta chain variable domain of TCR clone 42666 (TRBV29-1, TRBJ2-3)
CSATRGGRDTQYF

SEQ ID NO: 85333 - protein, 13 aa, Homo sapiens
  CDR3 for alpha chain variable domain of TCR clone 42667 (TRAV35, TRAJ42)
CAGFPGSKGNLIF

SEQ ID NO: 85334 - protein, 14 aa, Homo sapiens
  CDR3 for beta chain variable domain of TCR clone 42667 (TRBV19, TRBJ2-1)
CASPTFVLSGEQFF

SEQ ID NO: 85335 - protein, 14 aa, Homo sapiens
  CDR3 for alpha chain variable domain of TCR clone 42668 (TRAV12-1, TRAJ15)
CLPPANQAGTALIF

SEQ ID NO: 85336 - protein, 13 aa, Homo sapiens
  CDR3 for beta chain variable domain of TCR clone 42668 (TRBV7-2, TRBJ2-4)
CASSREHANMQYF

SEQ ID NO: 85337 - protein, 14 aa, Homo sapiens
  CDR3 for alpha chain variable domain of TCR clone 42669 (TRAV12-2, TRAJ13)
CAAKKTGGYQKVTF

SEQ ID NO: 85338 - protein, 16 aa, Homo sapiens
  CDR3 for beta chain variable domain of TCR clone 42669 (TRBV9, TRBJ2-3)
CASSGTSGKDTDTQYF

SEQ ID NO: 85339 - protein, 12 aa, Homo sapiens
  CDR3 for alpha chain variable domain of TCR clone 42670 (TRAV12-3, TRAJ43)
CAISSNNNDMRF

SEQ ID NO: 85340 - protein, 16 aa, Homo sapiens
  CDR3 for beta chain variable domain of TCR clone 42670 (TRBV2, TRBJ1-5)
CASSESPQGLNQPQHF

SEQ ID NO: 85341 - protein, 16 aa, Homo sapiens
  CDR3 for alpha chain variable domain of TCR clone 42671 (TRAV38-2/DV8, TRAJ56)
CAYRRGARGANSKLTF

SEQ ID NO: 85342 - protein, 16 aa, Homo sapiens
  CDR3 for beta chain variable domain of TCR clone 42671 (TRBV2, TRBJ2-3)
CASSTSVEGVTDTQYF

SEQ ID NO: 85343 - protein, 10 aa, Homo sapiens
  CDR3 for alpha chain variable domain of TCR clone 42672 (TRAV12-3, TRAJ49)
CAMNDDQFYF

SEQ ID NO: 85344 - protein, 13 aa, Homo sapiens
  CDR3 for beta chain variable domain of TCR clone 42672 (TRBV12-4, TRBJ1-1)
CASSPGTGFEAFC

SEQ ID NO: 85345 - protein, 16 aa, Homo sapiens
  CDR3 for alpha chain variable domain of TCR clone 42673 (TRAV26-1, TRAJ37)
CIVRGDGPGNTGKLIF

SEQ ID NO: 85346 - protein, 19 aa, Homo sapiens
  CDR3 for beta chain variable domain of TCR clone 42673 (TRBV4-1, TRBJ2-7)
CASSRDPLGVRGGSSTSGR

SEQ ID NO: 85347 - protein, 19 aa, Homo sapiens
  CDR3 for alpha chain variable domain of TCR clone 42674 (TRAV2, TRAJ20)
ILQVREADAAVYRDCKLSF

SEQ ID NO: 85348 - protein, 14 aa, Homo sapiens
  CDR3 for beta chain variable domain of TCR clone 42674 (TRBV12-5, TRBJ2-5)
CASGSRTHQETQYF

SEQ ID NO: 85349 - protein, 16 aa, Homo sapiens
  CDR3 for alpha chain variable domain of TCR clone 42675 (TRAV35, TRAJ28)
CAGQKYSGAGSYQLTF

SEQ ID NO: 85350 - protein, 13 aa, Homo sapiens
  CDR3 for beta chain variable domain of TCR clone 42675 (TRBV7-9, TRBJ1-2)
CASSLKQNYGYTF

SEQ ID NO: 85351 - protein, 14 aa, Homo sapiens
  CDR3 for alpha chain variable domain of TCR clone 42676 (TRAV12-3, TRAJ10)
SHLPLTGGGNKLTF

SEQ ID NO: 85352 - protein, 12 aa, Homo sapiens
  CDR3 for beta chain variable domain of TCR clone 42676 (TRBV7-3, TRBJ2-5)
CASSSPGGTQYS

SEQ ID NO: 85353 - protein, 13 aa, Homo sapiens
  CDR3 for alpha chain variable domain of TCR clone 42677 (TRAV23/DV6, TRAJ27)
CEASNTNAGKSTF

SEQ ID NO: 85354 - protein, 14 aa, Homo sapiens
  CDR3 for beta chain variable domain of TCR clone 42677 (TRBV20-1, TRBJ2-5)
CSASGLAVQETQYF

SEQ ID NO: 85355 - protein, 14 aa, Homo sapiens
  CDR3 for alpha chain variable domain of TCR clone 42678 (TRAV8-1, TRAJ23)
CAVGTYNQGGKLIS

SEQ ID NO: 85356 - protein, 16 aa, Homo sapiens
  CDR3 for beta chain variable domain of TCR clone 42678 (TRBV18, TRBJ1-5)
CASSPSTGNSNQPQHF

SEQ ID NO: 85357 - protein, 15 aa, Homo sapiens
  CDR3 for alpha chain variable domain of TCR clone 42679 (TRAV23/DV6, TRAJ13)
CAAWPGGGGYQKVTF

SEQ ID NO: 85358 - protein, 14 aa, Homo sapiens
  CDR3 for beta chain variable domain of TCR clone 42679 (TRBV19, TRBJ2-1)
CASPTFVLSGEQFF

SEQ ID NO: 85359 - protein, 15 aa, Homo sapiens
  CDR3 for alpha chain variable domain of TCR clone 42680 (TRAV38-2/DV8, TRAJ57)
CAYRSVTGGSEKLVF

SEQ ID NO: 85360 - protein, 16 aa, Homo sapiens
  CDR3 for beta chain variable domain of TCR clone 42680 (TRBV2, TRBJ2-5)
CASSEAQGLGQETQYF

SEQ ID NO: 85361 - protein, 12 aa, Homo sapiens
  CDR3 for alpha chain variable domain of TCR clone 42681 (TRAV3, TRAJ43)
CAVRDPNTDMRF

SEQ ID NO: 85362 - protein, 15 aa, Homo sapiens
  CDR3 for beta chain variable domain of TCR clone 42681 (TRBV27, TRBJ1-5)
CASSLGTGFDQPQHF

SEQ ID NO: 85363 - protein, 13 aa, Homo sapiens
  CDR3 for alpha chain variable domain of TCR clone 42682 (TRAV27, TRAJ57)
CRGAQGGSEKLVF

SEQ ID NO: 85364 - protein, 11 aa, Homo sapiens
  CDR3 for beta chain variable domain of TCR clone 42682 (TRBV11-2, TRBJ1-1)
CASSINTEAFF

SEQ ID NO: 85365 - protein, 17 aa, Homo sapiens
  CDR3 for alpha chain variable domain of TCR clone 42683 (TRAV21, TRAJ24)
CAGIRLRSTDSRGKLQF

SEQ ID NO: 85366 - protein, 15 aa, Homo sapiens
  CDR3 for beta chain variable domain of TCR clone 42683 (TRBV7-2, TRBJ2-3)
CASSPRGLSTDTQYF

SEQ ID NO: 85367 - protein, 12 aa, Homo sapiens
  CDR3 for alpha chain variable domain of TCR clone 42684 (TRAV21, TRAJ33)
CAQMDSNYQLIW

SEQ ID NO: 85368 - protein, 14 aa, Homo sapiens
  CDR3 for beta chain variable domain of TCR clone 42684 (TRBV2, TRBJ2-7)
CASSLTSGGYEQYF

SEQ ID NO: 85369 - protein, 14 aa, Homo sapiens
  CDR3 for alpha chain variable domain of TCR clone 42685 (TRAV1-2, TRAJ16)
CAVNRFSDGQKLLF

SEQ ID NO: 85370 - protein, 14 aa, Homo sapiens
  CDR3 for beta chain variable domain of TCR clone 42685 (TRBV7-2, TRBJ1-1)
CASSFLTGTTEALF

SEQ ID NO: 85371 - protein, 16 aa, Homo sapiens
  CDR3 for alpha chain variable domain of TCR clone 42686 (TRAV1-2, TRAJ10)
CAVRGVLTGGGNKLTF

SEQ ID NO: 85372 - protein, 12 aa, Homo sapiens
  CDR3 for beta chain variable domain of TCR clone 42686 (TRBV11-2, TRBJ2-1)
CASGPGNNEQFF

SEQ ID NO: 85373 - protein, 16 aa, Homo sapiens
  CDR3 for alpha chain variable domain of TCR clone 42687 (TRAV21, TRAJ37)
CAVRPRGSSNTGKLVF

SEQ ID NO: 85374 - protein, 13 aa, Homo sapiens
  CDR3 for beta chain variable domain of TCR clone 42687 (TRBV20-1, TRBJ2-2)
CSALSGGAGELFF

SEQ ID NO: 85375 - protein, 17 aa, Homo sapiens
  CDR3 for alpha chain variable domain of TCR clone 42688 (TRAV8-6, TRAJ58)
CAVSSWVGEASGSRLTL

SEQ ID NO: 85376 - protein, 14 aa, Homo sapiens
  CDR3 for beta chain variable domain of TCR clone 42688 (TRBV4-2, TRBJ2-1)
CASGLDRAYNEQFF

SEQ ID NO: 85377 - protein, 14 aa, Homo sapiens
  CDR3 for alpha chain variable domain of TCR clone 42689 (TRAV1-2, TRAJ8)
CAVREDTGFQKLVF

SEQ ID NO: 85378 - protein, 15 aa, Homo sapiens
  CDR3 for beta chain variable domain of TCR clone 42689 (TRBV6-3, TRBJ2-7)
CASSSPGTVFYQQYF

SEQ ID NO: 85379 - protein, 13 aa, Homo sapiens
  CDR3 for alpha chain variable domain of TCR clone 42690 (TRAV3, TRAJ29)
CAVRDIIDTPLVF

SEQ ID NO: 85380 - protein, 14 aa, Homo sapiens
  CDR3 for beta chain variable domain of TCR clone 42690 (TRBV27, TRBJ2-1)
CASSATGGYNEQLF

SEQ ID NO: 85381 - protein, 14 aa, Homo sapiens
  CDR3 for alpha chain variable domain of TCR clone 42691 (TRAV8-3, TRAJ27)
CAGGRNTNAGKSTL

SEQ ID NO: 85382 - protein, 15 aa, Homo sapiens
  CDR3 for beta chain variable domain of TCR clone 42691 (TRBV11-3, TRBJ2-5)
CASSLRGRVQETQYF

SEQ ID NO: 85383 - protein, 13 aa, Homo sapiens
  CDR3 for alpha chain variable domain of TCR clone 42692 (TRAV17, TRAJ57)
CAIYQGGSEKLVF

SEQ ID NO: 85384 - protein, 16 aa, Homo sapiens
  CDR3 for beta chain variable domain of TCR clone 42692 (TRBV4-3, TRBJ2-1)
CASSQERLAGLNEQFF

SEQ ID NO: 85385 - protein, 14 aa, Homo sapiens
  CDR3 for alpha chain variable domain of TCR clone 42693 (TRAV26-1, TRAJ45)
CIEVTGGGADGLPF

SEQ ID NO: 85386 - protein, 19 aa, Homo sapiens
  CDR3 for beta chain variable domain of TCR clone 42693 (TRBV19, TRBJ2-2)
CASTRPGLAGGRVTGELFF

SEQ ID NO: 85387 - protein, 16 aa, Homo sapiens
  CDR3 for alpha chain variable domain of TCR clone 42694 (TRAV3, TRAJ3)
CAVRARAKSSASKIIF

SEQ ID NO: 85388 - protein, 16 aa, Homo sapiens
  CDR3 for beta chain variable domain of TCR clone 42694 (TRBV20-1, TRBJ2-4)
CSATSLAELAKNIQYF

SEQ ID NO: 85389 - protein, 11 aa, Homo sapiens
  CDR3 for alpha chain variable domain of TCR clone 42695 (TRAV13-1, TRAJ6)
CATLGSYIPTF

SEQ ID NO: 85390 - protein, 12 aa, Homo sapiens
  CDR3 for beta chain variable domain of TCR clone 42695 (TRBV11-2, TRBJ2-1)
CASSPGNNEQFF

SEQ ID NO: 85391 - protein, 10 aa, Homo sapiens
  CDR3 for alpha chain variable domain of TCR clone 42696 (TRAV21, TRAJ43)
CAARIGDMRF

SEQ ID NO: 85392 - protein, 13 aa, Homo sapiens
  CDR3 for beta chain variable domain of TCR clone 42696 (TRBV20-1, TRBJ2-7)
CSAPGLADYEQYF

SEQ ID NO: 85393 - protein, 14 aa, Homo sapiens
  CDR3 for alpha chain variable domain of TCR clone 42697 (TRAV12-3, TRAJ6)
CAMSATGGSYIPTF

SEQ ID NO: 85394 - protein, 16 aa, Homo sapiens
  CDR3 for beta chain variable domain of TCR clone 42697 (TRBV4-2, TRBJ2-1)
CASSPRAGQGANEQFL

SEQ ID NO: 85395 - protein, 13 aa, Homo sapiens
  CDR3 for alpha chain variable domain of TCR clone 42698 (TRAV35, TRAJ42)
CAGSPGSQGNLIF

SEQ ID NO: 85396 - protein, 14 aa, Homo sapiens
  CDR3 for beta chain variable domain of TCR clone 42698 (TRBV4-1, TRBJ2-2)
CASSQAVNTGELFF

SEQ ID NO: 85397 - protein, 13 aa, Homo sapiens
  CDR3 for alpha chain variable domain of TCR clone 42699 (TRAV2, TRAJ40)
CAVVTSGTYKYIF

SEQ ID NO: 85398 - protein, 14 aa, Homo sapiens
  CDR3 for beta chain variable domain of TCR clone 42699 (TRBV19, TRBJ2-5)
CASPTFVLSGEQFF

SEQ ID NO: 85399 - protein, 12 aa, Homo sapiens
  CDR3 for alpha chain variable domain of TCR clone 42700 (TRAV13-2, TRAJ23)
CAERHRGGKLIF

SEQ ID NO: 85400 - protein, 14 aa, Homo sapiens
  CDR3 for beta chain variable domain of TCR clone 42700 (TRBV2, TRBJ2-7)
CASSLTAGGYEQYF

SEQ ID NO: 85401 - protein, 12 aa, Homo sapiens
  CDR3 for alpha chain variable domain of TCR clone 42701 (TRAV21, TRAJ58)
CAVTPIQTRLTF

SEQ ID NO: 85402 - protein, 14 aa, Homo sapiens
  CDR3 for beta chain variable domain of TCR clone 42701 (TRBV19, TRBJ2-2)
CASSGQGIAGELSF

SEQ ID NO: 85403 - protein, 15 aa, Homo sapiens
  CDR3 for alpha chain variable domain of TCR clone 42702 (TRAV17, TRAJ23)
CATDAEDNQGGQLIF

SEQ ID NO: 85404 - protein, 12 aa, Homo sapiens
  CDR3 for beta chain variable domain of TCR clone 42702 (TRBV2, TRBJ2-1)
CAKREGYNEQFF

SEQ ID NO: 85405 - protein, 13 aa, Homo sapiens
  CDR3 for alpha chain variable domain of TCR clone 42703 (TRAV16, TRAJ10)
CAPARDEETNSPL

SEQ ID NO: 85406 - protein, 15 aa, Homo sapiens
  CDR3 for beta chain variable domain of TCR clone 42703 (TRBV6-3, TRBJ2-7)
CASSSPGTVFYEQYF

SEQ ID NO: 85407 - protein, 12 aa, Homo sapiens
  CDR3 for alpha chain variable domain of TCR clone 42704 (TRAV17, TRAJ12)
CATLRSSYKLIF

SEQ ID NO: 85408 - protein, 16 aa, Homo sapiens
  CDR3 for beta chain variable domain of TCR clone 42704 (TRBV28, TRBJ2-7)
CASSLCFETGGPEQYF

SEQ ID NO: 85409 - protein, 11 aa, Homo sapiens
  CDR3 for alpha chain variable domain of TCR clone 42705 (TRAV12-3, TRAJ17)
CAMTLTGKLTF

SEQ ID NO: 85410 - protein, 15 aa, Homo sapiens
  CDR3 for beta chain variable domain of TCR clone 42705 (TRBV20-1, TRBJ2-7)
CSARDRVSGTDEQYF

SEQ ID NO: 85411 - protein, 15 aa, Homo sapiens
  CDR3 for alpha chain variable domain of TCR clone 42706 (TRAV13-1, TRAJ10)
CAATTLTGGGNKLTF

SEQ ID NO: 85412 - protein, 15 aa, Homo sapiens
  CDR3 for beta chain variable domain of TCR clone 42706 (TRBV2, TRBJ2-7)
CASTLLGSGATEQYF

SEQ ID NO: 85413 - protein, 12 aa, Homo sapiens
  CDR3 for alpha chain variable domain of TCR clone 42707 (TRAV17, TRAJ57)
CATDGGSEKLVF

SEQ ID NO: 85414 - protein, 15 aa, Homo sapiens
  CDR3 for beta chain variable domain of TCR clone 42707 (TRBV5-7, TRBJ1-5)
CASSYGKLWDQPQHF

SEQ ID NO: 85415 - protein, 17 aa, Homo sapiens
  CDR3 for alpha chain variable domain of TCR clone 42708 (TRAV4, TRAJ42)
CLVGVLNYGGSQGNLVF

SEQ ID NO: 85416 - protein, 12 aa, Homo sapiens
  CDR3 for beta chain variable domain of TCR clone 42708 (TRBV20-1, TRBJ2-1)
CSAQYTYNEQFF

SEQ ID NO: 85417 - protein, 13 aa, Homo sapiens
  CDR3 for alpha chain variable domain of TCR clone 42709 (TRAV13-1, TRAJ21)
CAASIYNFNKFYF

SEQ ID NO: 85418 - protein, 14 aa, Homo sapiens
  CDR3 for beta chain variable domain of TCR clone 42709 (TRBV12-5, TRBJ2-5)
CASGSRTHQETQYF

SEQ ID NO: 85419 - protein, 22 aa, Homo sapiens
  CDR3 for alpha chain variable domain of TCR clone 42710 (TRAV4, )
CLVGPHNYGIQNPDPAVYQLRD

SEQ ID NO: 85420 - protein, 17 aa, Homo sapiens
  CDR3 for beta chain variable domain of TCR clone 42710 (TRBV24-1, TRBJ2-1)
CATSDVSTSGTYNEQFF

SEQ ID NO: 85421 - protein, 14 aa, Homo sapiens
  CDR3 for alpha chain variable domain of TCR clone 42711 (TRAV1-2, TRAJ8)
CAVREDTGFHELVF

SEQ ID NO: 85422 - protein, 17 aa, Homo sapiens
  CDR3 for beta chain variable domain of TCR clone 42711 (TRBV11-2, TRBJ2-1)
CASSLYPPGVEYNEQFF

SEQ ID NO: 85423 - protein, 17 aa, Homo sapiens
  CDR3 for alpha chain variable domain of TCR clone 42712 (TRAV8-3, TRAJ50)
CAVGAVDTETSYDKVIF

SEQ ID NO: 85424 - protein, 13 aa, Homo sapiens
  CDR3 for beta chain variable domain of TCR clone 42712 (TRBV7-9, TRBJ2-2)
CASSSAGIGELFF

SEQ ID NO: 85425 - protein, 14 aa, Homo sapiens
  CDR3 for alpha chain variable domain of TCR clone 42713 (TRAV9-2, TRAJ39)
CALYIYNAGNMLTF

SEQ ID NO: 85426 - protein, 18 aa, Homo sapiens
  CDR3 for beta chain variable domain of TCR clone 42713 (TRBV20-1, TRBJ2-6)
CSAETTPTHGTGANVLTF

SEQ ID NO: 85427 - protein, 16 aa, Homo sapiens
  CDR3 for alpha chain variable domain of TCR clone 42714 (TRAV30, TRAJ24)
CGIEIVDADSWGKFQF

SEQ ID NO: 85428 - protein, 15 aa, Homo sapiens
  CDR3 for beta chain variable domain of TCR clone 42714 (TRBV9, TRBJ1-6)
CASSVAGTGDSPLHF

SEQ ID NO: 85429 - protein, 12 aa, Homo sapiens
  CDR3 for alpha chain variable domain of TCR clone 42715 (TRAV12-3, TRAJ17)
CAMTLTGNKLTF

SEQ ID NO: 85430 - protein, 12 aa, Homo sapiens
  CDR3 for beta chain variable domain of TCR clone 42715 (TRBV6-3, TRBJ2-1)
CASSGSYNEQFF

SEQ ID NO: 85431 - protein, 14 aa, Homo sapiens
  CDR3 for alpha chain variable domain of TCR clone 42716 (TRAV2, TRAJ9)
CAVEDRSGGFKTTF

SEQ ID NO: 85432 - protein, 18 aa, Homo sapiens
  CDR3 for beta chain variable domain of TCR clone 42716 (TRBV11-2, TRBJ2-3)
CASSLGGASRGASNTQYF

SEQ ID NO: 85433 - protein, 14 aa, Homo sapiens
  CDR3 for alpha chain variable domain of TCR clone 42717 (TRAV3, TRAJ7)
CAVREEEREQQTRF

SEQ ID NO: 85434 - protein, 12 aa, Homo sapiens
  CDR3 for beta chain variable domain of TCR clone 42717 (TRBV7-8, TRBJ2-7)
CASSLGGREQYF

SEQ ID NO: 85435 - protein, 15 aa, Homo sapiens
  CDR3 for alpha chain variable domain of TCR clone 42718 (TRAV8-3, TRAJ11)
CAVGLLNSGYSTLTF

SEQ ID NO: 85436 - protein, 16 aa, Homo sapiens
  CDR3 for beta chain variable domain of TCR clone 42718 (TRBV19, TRBJ2-1)
CASSKAGPSSYNEQFF

SEQ ID NO: 85437 - protein, 17 aa, Homo sapiens
  CDR3 for alpha chain variable domain of TCR clone 42719 (TRAV14/DV4, TRAJ12)
CAMRELPWMDSSYKLIF

SEQ ID NO: 85438 - protein, 13 aa, Homo sapiens
  CDR3 for beta chain variable domain of TCR clone 42719 (TRBV6-5, TRBJ2-5)
CASSPQGGETQYF

SEQ ID NO: 85439 - protein, 14 aa, Homo sapiens
  CDR3 for alpha chain variable domain of TCR clone 42720 (TRAV1-2, TRAJ8)
CAVREDTGFQKLVF

SEQ ID NO: 85440 - protein, 14 aa, Homo sapiens
  CDR3 for beta chain variable domain of TCR clone 42720 (TRBV5-5, TRBJ1-5)
CASSGQGVDQPQHF

SEQ ID NO: 85441 - protein, 13 aa, Homo sapiens
  CDR3 for alpha chain variable domain of TCR clone 42721 (TRAV27, TRAJ45)
CRSSGGGADGLTF

SEQ ID NO: 85442 - protein, 13 aa, Homo sapiens
  CDR3 for beta chain variable domain of TCR clone 42721 (TRBV7-7, TRBJ2-5)
CASSRSSQETQYF

SEQ ID NO: 85443 - protein, 15 aa, Homo sapiens
  CDR3 for alpha chain variable domain of TCR clone 42722 (TRAV19, TRAJ57)
CARDTPRGGSEKLVF

SEQ ID NO: 85444 - protein, 10 aa, Homo sapiens
  CDR3 for beta chain variable domain of TCR clone 42722 (TRBV6-4, TRBJ2-1)
CASWMFTQFF

SEQ ID NO: 85445 - protein, 15 aa, Homo sapiens
  CDR3 for alpha chain variable domain of TCR clone 42723 (TRAV26-1, TRAJ38)
CIVRAEGGNNRKLIW

SEQ ID NO: 85446 - protein, 14 aa, Homo sapiens
  CDR3 for beta chain variable domain of TCR clone 42723 (TRBV7-6, TRBJ2-5)
CTSSSPSGSETQYF

SEQ ID NO: 85447 - protein, 13 aa, Homo sapiens
  CDR3 for alpha chain variable domain of TCR clone 42724 (TRAV17, TRAJ5)
CAPMDTGRRALTF

SEQ ID NO: 85448 - protein, 14 aa, Homo sapiens
  CDR3 for beta chain variable domain of TCR clone 42724 (TRBV7-2, TRBJ2-7)
CASSPKTSFYEQYF

SEQ ID NO: 85449 - protein, 13 aa, Homo sapiens
  CDR3 for alpha chain variable domain of TCR clone 42725 (TRAV36/DV7, TRAJ38)
CVANAGNNSKLIW

SEQ ID NO: 85450 - protein, 14 aa, Homo sapiens
  CDR3 for beta chain variable domain of TCR clone 42725 (TRBV7-2, TRBJ2-7)
CASSLRWEVNEQYF

SEQ ID NO: 85451 - protein, 18 aa, Homo sapiens
  CDR3 for alpha chain variable domain of TCR clone 42726 (TRAV26-1, TRAJ23)
CIVRVGLEVWNQGGKLIF

SEQ ID NO: 85452 - protein, 15 aa, Homo sapiens
  CDR3 for beta chain variable domain of TCR clone 42726 (TRBV10-3, TRBJ2-3)
CAISDWDRDTDTQCF

SEQ ID NO: 85453 - protein, 15 aa, Homo sapiens
  CDR3 for alpha chain variable domain of TCR clone 42727 (TRAV12-2, TRAJ50)
CAVNGLETSYDKVIF

SEQ ID NO: 85454 - protein, 16 aa, Homo sapiens
  CDR3 for beta chain variable domain of TCR clone 42727 (TRBV2, TRBJ1-3)
CASSRTGGSTGNTIYF

SEQ ID NO: 85455 - protein, 11 aa, Homo sapiens
  CDR3 for alpha chain variable domain of TCR clone 42728 (TRAV1-1, TRAJ23)
CAVRQGGKLIF

SEQ ID NO: 85456 - protein, 14 aa, Homo sapiens
  CDR3 for beta chain variable domain of TCR clone 42728 (TRBV20-1, TRBJ1-1)
CSAQTRIGGTEAFF

SEQ ID NO: 85457 - protein, 15 aa, Homo sapiens
  CDR3 for alpha chain variable domain of TCR clone 42729 (TRAV26-1, TRAJ38)
CIVRAEGGNNRRLIW

SEQ ID NO: 85458 - protein, 14 aa, Homo sapiens
  CDR3 for beta chain variable domain of TCR clone 42729 (TRBV7-6, TRBJ2-5)
CASSSPSGSETQYF

SEQ ID NO: 85459 - protein, 16 aa, Homo sapiens
  CDR3 for alpha chain variable domain of TCR clone 42730 (TRAV12-2, TRAJ18)
CAVTTDRGSTLGRLYF

SEQ ID NO: 85460 - protein, 14 aa, Homo sapiens
  CDR3 for beta chain variable domain of TCR clone 42730 (TRBV4-2, TRBJ1-5)
CASSQDSTNQPQHF

SEQ ID NO: 85461 - protein, 18 aa, Homo sapiens
  CDR3 for alpha chain variable domain of TCR clone 42731 (TRAV13-1, TRAJ10)
CAASKGRAVTGGGNKLTF

SEQ ID NO: 85462 - protein, 14 aa, Homo sapiens
  CDR3 for beta chain variable domain of TCR clone 42731 (TRBV27, TRBJ2-2)
CASSLGAATGELFF

SEQ ID NO: 85463 - protein, 13 aa, Homo sapiens
  CDR3 for alpha chain variable domain of TCR clone 42732 (TRAV29/DV5, TRAJ49)
CAASTNTGNQFYF

SEQ ID NO: 85464 - protein, 13 aa, Homo sapiens
  CDR3 for beta chain variable domain of TCR clone 42732 (TRBV7-2, TRBJ1-4)
CASSLTGLEKLFF

SEQ ID NO: 85465 - protein, 15 aa, Homo sapiens
  CDR3 for alpha chain variable domain of TCR clone 42733 (TRAV2, TRAJ11)
CAVGGRNSGYSTLTF

SEQ ID NO: 85466 - protein, 15 aa, Homo sapiens
  CDR3 for beta chain variable domain of TCR clone 42733 (TRBV11-2, TRBJ2-1)
CASSLGTSGLNEQFF

SEQ ID NO: 85467 - protein, 14 aa, Homo sapiens
  CDR3 for alpha chain variable domain of TCR clone 42734 (TRAV26-1, TRAJ3)
CIVRVGSSASKIIF

SEQ ID NO: 85468 - protein, 13 aa, Homo sapiens
  CDR3 for beta chain variable domain of TCR clone 42734 (TRBV4-2, TRBJ2-5)
CASSRGGGETQYF

SEQ ID NO: 85469 - protein, 12 aa, Homo sapiens
  CDR3 for alpha chain variable domain of TCR clone 42735 (TRAV29/DV5, TRAJ49)
CAATDTGNQFYF

SEQ ID NO: 85470 - protein, 13 aa, Homo sapiens
  CDR3 for beta chain variable domain of TCR clone 42735 (TRBV27, TRBJ1-1)
CASSLSIGAEAFF

SEQ ID NO: 85471 - protein, 14 aa, Homo sapiens
  CDR3 for alpha chain variable domain of TCR clone 42736 (TRAV17, TRAJ37)
CVTDGSSNTGKLIF

SEQ ID NO: 85472 - protein, 13 aa, Homo sapiens
  CDR3 for beta chain variable domain of TCR clone 42736 (TRBV11-2, TRBJ2-1)
CASSLDLVNEQFF

SEQ ID NO: 85473 - protein, 14 aa, Homo sapiens
  CDR3 for alpha chain variable domain of TCR clone 42737 (TRAV12-3, TRAJ10)
SHLPLTGGGNKLTF

SEQ ID NO: 85474 - protein, 14 aa, Homo sapiens
  CDR3 for beta chain variable domain of TCR clone 42737 (TRBV7-9, TRBJ2-1)
CASSPRDSLYERFF

SEQ ID NO: 85475 - protein, 12 aa, Homo sapiens
  CDR3 for alpha chain variable domain of TCR clone 42738 (TRAV27, TRAJ35)
CAGADFGHVLHC

SEQ ID NO: 85476 - protein, 16 aa, Homo sapiens
  CDR3 for beta chain variable domain of TCR clone 42738 (TRBV6-1, TRBJ2-1)
CASILRQGSSYNEQFF

SEQ ID NO: 85477 - protein, 13 aa, Homo sapiens
  CDR3 for alpha chain variable domain of TCR clone 42739 (TRAV12-2, TRAJ20)
CAVYPSNDYKLSF

SEQ ID NO: 85478 - protein, 14 aa, Homo sapiens
  CDR3 for beta chain variable domain of TCR clone 42739 (TRBV6-1, TRBJ1-3)
CASVQEGGGNTIYF

SEQ ID NO: 85479 - protein, 13 aa, Homo sapiens
  CDR3 for alpha chain variable domain of TCR clone 42740 (TRAV19, TRAJ54)
CSECRKGAQKLVF

SEQ ID NO: 85480 - protein, 14 aa, Homo sapiens
  CDR3 for beta chain variable domain of TCR clone 42740 (TRBV20-1, TRBJ2-7)
CSAKRGRSSYEQYF

SEQ ID NO: 85481 - protein, 12 aa, Homo sapiens
  CDR3 for alpha chain variable domain of TCR clone 42741 (TRAV27, TRAJ9)
CAGESGGFKTIF

SEQ ID NO: 85482 - protein, 15 aa, Homo sapiens
  CDR3 for beta chain variable domain of TCR clone 42741 (TRBV10-2, TRBJ2-2)
CASSASTSRCRGAVF

SEQ ID NO: 85483 - protein, 10 aa, Homo sapiens
  CDR3 for alpha chain variable domain of TCR clone 42742 (TRAV12-1, TRAJ37)
ARGNTGKLIF

SEQ ID NO: 85484 - protein, 15 aa, Homo sapiens
  CDR3 for beta chain variable domain of TCR clone 42742 (TRBV7-2, TRBJ2-3)
CASSLEQGSTDTQYF

SEQ ID NO: 85485 - protein, 18 aa, Homo sapiens
  CDR3 for alpha chain variable domain of TCR clone 42743 (TRAV21, TRAJ52)
CAVRPSPAGGTSYGKLTF

SEQ ID NO: 85486 - protein, 14 aa, Homo sapiens
  CDR3 for beta chain variable domain of TCR clone 42743 (TRBV6-6, TRBJ2-7)
CASSDSGAGYEQYF

SEQ ID NO: 85487 - protein, 14 aa, Homo sapiens
  CDR3 for alpha chain variable domain of TCR clone 42744 (TRAV1-2, TRAJ16)
CAVNRFSDGQKLLF

SEQ ID NO: 85488 - protein, 15 aa, Homo sapiens
  CDR3 for beta chain variable domain of TCR clone 42744 (TRBV7-6, TRBJ1-5)
CASSQSSGINQPQHF

SEQ ID NO: 85489 - protein, 14 aa, Homo sapiens
  CDR3 for alpha chain variable domain of TCR clone 42745 (TRAV26-1, TRAJ39)
CIVRGSRAGNMLIF

SEQ ID NO: 85490 - protein, 15 aa, Homo sapiens
  CDR3 for beta chain variable domain of TCR clone 42745 (TRBV7-9, TRBJ1-5)
CASSQGHQPNQPQHF

SEQ ID NO: 85491 - protein, 12 aa, Homo sapiens
  CDR3 for alpha chain variable domain of TCR clone 42746 (TRAV13-1, TRAJ15)
CAASQAGTALIF

SEQ ID NO: 85492 - protein, 14 aa, Homo sapiens
  CDR3 for beta chain variable domain of TCR clone 42746 (TRBV19, TRBJ2-2)
CASSTLHRSGELFL

SEQ ID NO: 85493 - protein, 14 aa, Homo sapiens
  CDR3 for alpha chain variable domain of TCR clone 42747 (TRAV13-1, TRAJ44)
CAAKATGTASKLTF

SEQ ID NO: 85494 - protein, 16 aa, Homo sapiens
  CDR3 for beta chain variable domain of TCR clone 42747 (TRBV7-9, TRBJ2-6)
CASSWKGPLRANVLTF

SEQ ID NO: 85495 - protein, 16 aa, Homo sapiens
  CDR3 for alpha chain variable domain of TCR clone 42748 (TRAV12-2, TRAJ52)
CRLANAGGASYGKLTF

SEQ ID NO: 85496 - protein, 14 aa, Homo sapiens
  CDR3 for beta chain variable domain of TCR clone 42748 (TRBV7-6, TRBJ2-3)
CASSLGTVTDTQYF

SEQ ID NO: 85497 - protein, 13 aa, Homo sapiens
  CDR3 for alpha chain variable domain of TCR clone 42749 (TRAV29/DV5, TRAJ49)
CAASMNTGNQFYF

SEQ ID NO: 85498 - protein, 11 aa, Homo sapiens
  CDR3 for beta chain variable domain of TCR clone 42749 (TRBV6-1, TRBJ2-1)
CASISSNEQFF

SEQ ID NO: 85499 - protein, 11 aa, Homo sapiens
  CDR3 for alpha chain variable domain of TCR clone 42750 (TRAV1-2, TRAJ40)
CAVPGTYKDIF

SEQ ID NO: 85500 - protein, 16 aa, Homo sapiens
  CDR3 for beta chain variable domain of TCR clone 42750 (TRBV29-1, TRBJ2-7)
CSVEVVGTSGSYEQYF

SEQ ID NO: 85501 - protein, 13 aa, Homo sapiens
  CDR3 for alpha chain variable domain of TCR clone 42751 (TRAV20, TRAJ56)
CAVQAGANSKLTF

SEQ ID NO: 85502 - protein, 14 aa, Homo sapiens
  CDR3 for beta chain variable domain of TCR clone 42751 (TRBV28, TRBJ1-1)
CASSPRTRWAEASF

SEQ ID NO: 85503 - protein, 13 aa, Homo sapiens
  CDR3 for alpha chain variable domain of TCR clone 42752 (TRAV21, TRAJ27)
CAARPGNAGKSTF

SEQ ID NO: 85504 - protein, 12 aa, Homo sapiens
  CDR3 for beta chain variable domain of TCR clone 42752 (TRBV12-4, TRBJ2-7)
CASSLGGYEQYF

SEQ ID NO: 85505 - protein, 14 aa, Homo sapiens
  CDR3 for alpha chain variable domain of TCR clone 42753 (TRAV8-4, TRAJ13)
CAVTLSGGYQKVTF

SEQ ID NO: 85506 - protein, 14 aa, Homo sapiens
  CDR3 for beta chain variable domain of TCR clone 42753 (TRBV7-2, TRBJ1-2)
CASSQTGPTYGYTF

SEQ ID NO: 85507 - protein, 12 aa, Homo sapiens
  CDR3 for alpha chain variable domain of TCR clone 42754 (TRAV12-2, TRAJ31)
CAVNTPDARLMF

SEQ ID NO: 85508 - protein, 15 aa, Homo sapiens
  CDR3 for beta chain variable domain of TCR clone 42754 (TRBV4-2, TRBJ1-1)
CASSLDQGLNTEAFF

SEQ ID NO: 85509 - protein, 16 aa, Homo sapiens
  CDR3 for alpha chain variable domain of TCR clone 42755 (TRAV23/DV6, TRAJ9)
CAASIGGNTGGFKTIF

SEQ ID NO: 85510 - protein, 15 aa, Homo sapiens
  CDR3 for beta chain variable domain of TCR clone 42755 (TRBV6-3, TRBJ2-7)
CASSSPGTVFYEQYF

SEQ ID NO: 85511 - protein, 14 aa, Homo sapiens
  CDR3 for alpha chain variable domain of TCR clone 42756 (TRAV17, TRAJ56)
CATVPPGANSKLTF

SEQ ID NO: 85512 - protein, 13 aa, Homo sapiens
  CDR3 for beta chain variable domain of TCR clone 42756 (TRBV12-4, TRBJ2-2)
CASSITGSGELFF

SEQ ID NO: 85513 - protein, 14 aa, Homo sapiens
  CDR3 for alpha chain variable domain of TCR clone 42757 (TRAV13-1, TRAJ50)
CAARSKASYDKVIF

SEQ ID NO: 85514 - protein, 17 aa, Homo sapiens
  CDR3 for beta chain variable domain of TCR clone 42757 (TRBV13, TRBJ2-3)
CASSLSRVAGGRNTQYF

SEQ ID NO: 85515 - protein, 16 aa, Homo sapiens
  CDR3 for alpha chain variable domain of TCR clone 42758 (TRAV1-2, TRAJ6)
CAVRDQGTGGSYIPTF

SEQ ID NO: 85516 - protein, 13 aa, Homo sapiens
  CDR3 for beta chain variable domain of TCR clone 42758 (TRBV28, TRBJ2-7)
CASTPGLAGEQYL

SEQ ID NO: 85517 - protein, 10 aa, Homo sapiens
  CDR3 for alpha chain variable domain of TCR clone 42759 (TRAV13-1, TRAJ15)
INQAGTALIF

SEQ ID NO: 85518 - protein, 14 aa, Homo sapiens
  CDR3 for beta chain variable domain of TCR clone 42759 (TRBV7-9, TRBJ2-1)
CASSDSSGYNEQFF

SEQ ID NO: 85519 - protein, 16 aa, Homo sapiens
  CDR3 for alpha chain variable domain of TCR clone 42760 (TRAV30, TRAJ24)
CGTEIVDADSWGKFQF

SEQ ID NO: 85520 - protein, 15 aa, Homo sapiens
  CDR3 for beta chain variable domain of TCR clone 42760 (TRBV19, TRBJ1-1)
CASTSGQIQNTEALF

SEQ ID NO: 85521 - protein, 12 aa, Homo sapiens
  CDR3 for alpha chain variable domain of TCR clone 42761 (TRAV12-3, TRAJ17)
CAVTLTGNKLTF

SEQ ID NO: 85522 - protein, 11 aa, Homo sapiens
  CDR3 for beta chain variable domain of TCR clone 42761 (TRBV28, TRBJ2-1)
CASRRVNEQFF

SEQ ID NO: 85523 - protein, 16 aa, Homo sapiens
  CDR3 for alpha chain variable domain of TCR clone 42762 (TRAV12-2, TRAJ28)
CAVITDSGAGSYQLTF

SEQ ID NO: 85524 - protein, 11 aa, Homo sapiens
  CDR3 for beta chain variable domain of TCR clone 42762 (TRBV25-1, TRBJ1-1)
PTWGGNTEAFF

SEQ ID NO: 85525 - protein, 14 aa, Homo sapiens
  CDR3 for alpha chain variable domain of TCR clone 42763 (TRAV29/DV5, TRAJ36)
CAARRKTGANNLFF

SEQ ID NO: 85526 - protein, 13 aa, Homo sapiens
  CDR3 for beta chain variable domain of TCR clone 42763 (TRBV20-1, TRBJ1-1)
CSAPLGGGTEAFF

SEQ ID NO: 85527 - protein, 14 aa, Homo sapiens
  CDR3 for alpha chain variable domain of TCR clone 42764 (TRAV12-3, TRAJ13)
RAMRNSGGYQKVTF

SEQ ID NO: 85528 - protein, 14 aa, Homo sapiens
  CDR3 for beta chain variable domain of TCR clone 42764 (TRBV4-1, TRBJ1-6)
CASSPGSDSSPLHF

SEQ ID NO: 85529 - protein, 14 aa, Homo sapiens
  CDR3 for alpha chain variable domain of TCR clone 42765 (TRAV1-2, TRAJ16)
CAVNRFSDGQKLLF

SEQ ID NO: 85530 - protein, 18 aa, Homo sapiens
  CDR3 for beta chain variable domain of TCR clone 42765 (TRBV20-1, TRBJ2-6)
CSAETTPTHGSGANVLTL

SEQ ID NO: 85531 - protein, 11 aa, Homo sapiens
  CDR3 for alpha chain variable domain of TCR clone 42766 (TRAV2, TRAJ13)
CASGGYQKVTF

SEQ ID NO: 85532 - protein, 14 aa, Homo sapiens
  CDR3 for beta chain variable domain of TCR clone 42766 (TRBV7-3, TRBJ1-1)
CASSLGTGYTEAFF

SEQ ID NO: 85533 - protein, 16 aa, Homo sapiens
  CDR3 for alpha chain variable domain of TCR clone 42767 (TRAV3, TRAJ10)
CAVRDMRAGGGNKLTF

SEQ ID NO: 85534 - protein, 12 aa, Homo sapiens
  CDR3 for beta chain variable domain of TCR clone 42767 (TRBV5-1, TRBJ2-5)
CASSFSWETQYF

SEQ ID NO: 85535 - protein, 10 aa, Homo sapiens
  CDR3 for alpha chain variable domain of TCR clone 42768 (TRAV36/DV7, TRAJ56)
CAGPAVELTL

SEQ ID NO: 85536 - protein, 13 aa, Homo sapiens
  CDR3 for beta chain variable domain of TCR clone 42768 (TRBV7-9, TRBJ2-7)
CASSFWSSYEQYF

SEQ ID NO: 85537 - protein, 22 aa, Homo sapiens
  CDR3 for alpha chain variable domain of TCR clone 42769 (TRAV27, TRAJ36)
TSLRPSLVIQASTPAGANNLFF

SEQ ID NO: 85538 - protein, 13 aa, Homo sapiens
  CDR3 for beta chain variable domain of TCR clone 42769 (TRBV7-9, TRBJ2-3)
CASSPGSTDTQYF

SEQ ID NO: 85539 - protein, 13 aa, Homo sapiens
  CDR3 for alpha chain variable domain of TCR clone 42770 (TRAV12-1, TRAJ5)
CVVNLPGRRALTF

SEQ ID NO: 85540 - protein, 15 aa, Homo sapiens
  CDR3 for beta chain variable domain of TCR clone 42770 (TRBV7-9, TRBJ1-4)
CASSRTGGFNEKLFF

SEQ ID NO: 85541 - protein, 17 aa, Homo sapiens
  CDR3 for alpha chain variable domain of TCR clone 42771 (TRAV3, TRAJ6)
CAVRDGPRAGGSYIPTF

SEQ ID NO: 85542 - protein, 14 aa, Homo sapiens
  CDR3 for beta chain variable domain of TCR clone 42771 (TRBV7-6, TRBJ1-6)
CASSQAGGGSPLHF

SEQ ID NO: 85543 - protein, 14 aa, Homo sapiens
  CDR3 for alpha chain variable domain of TCR clone 42772 (TRAV12-2, TRAJ45)
CAVNIGGGADGLTF

SEQ ID NO: 85544 - protein, 13 aa, Homo sapiens
  CDR3 for beta chain variable domain of TCR clone 42772 (TRBV5-5, TRBJ1-2)
CASSLWRGEDYTF

SEQ ID NO: 85545 - protein, 14 aa, Homo sapiens
  CDR3 for alpha chain variable domain of TCR clone 42773 (TRAV1-2, TRAJ16)
CAVNRFSDGQKLPF

SEQ ID NO: 85546 - protein, 11 aa, Homo sapiens
  CDR3 for beta chain variable domain of TCR clone 42773 (TRBV29-1, TRBJ2-5)
CSEDRTGTQYF

SEQ ID NO: 85547 - protein, 13 aa, Homo sapiens
  CDR3 for alpha chain variable domain of TCR clone 42774 (TRAV12-2, TRAJ30)
RAVNLNRDDKIIF

SEQ ID NO: 85548 - protein, 12 aa, Homo sapiens
  CDR3 for beta chain variable domain of TCR clone 42774 (TRBV11-2, TRBJ2-2)
CAGSLGGGELFF

SEQ ID NO: 85549 - protein, 12 aa, Homo sapiens
  CDR3 for alpha chain variable domain of TCR clone 42775 (TRAV13-1, TRAJ21)
CAAKEGFNKFYF

SEQ ID NO: 85550 - protein, 15 aa, Homo sapiens
  CDR3 for beta chain variable domain of TCR clone 42775 (TRBV10-2, TRBJ1-4)
CASTPIDRGNEKLFF

SEQ ID NO: 85551 - protein, 14 aa, Homo sapiens
  CDR3 for alpha chain variable domain of TCR clone 42776 (TRAV9-2, TRAJ39)
CALYICNAGNMLTF

SEQ ID NO: 85552 - protein, 14 aa, Homo sapiens
  CDR3 for beta chain variable domain of TCR clone 42776 (TRBV6-1, TRBJ1-3)
CASVQGGGGNTIYF

SEQ ID NO: 85553 - protein, 17 aa, Homo sapiens
  CDR3 for alpha chain variable domain of TCR clone 42777 (TRAV4, TRAJ42)
CLVGVLNDGGSQGNLIF

SEQ ID NO: 85554 - protein, 12 aa, Homo sapiens
  CDR3 for beta chain variable domain of TCR clone 42777 (TRBV20-1, TRBJ2-1)
CSAQYTYNEQFF

SEQ ID NO: 85555 - protein, 14 aa, Homo sapiens
  CDR3 for alpha chain variable domain of TCR clone 42778 (TRAV38-1, TRAJ40)
CALRPTSGNYKYIF

SEQ ID NO: 85556 - protein, 16 aa, Homo sapiens
  CDR3 for beta chain variable domain of TCR clone 42778 (TRBV6-1, TRBJ1-2)
CASSGAWQGRSHGYTF

SEQ ID NO: 85557 - protein, 12 aa, Homo sapiens
  CDR3 for alpha chain variable domain of TCR clone 42779 (TRAV21, TRAJ31)
CAVWGNNASLMF

SEQ ID NO: 85558 - protein, 16 aa, Homo sapiens
  CDR3 for beta chain variable domain of TCR clone 42779 (TRBV27, TRBJ2-5)
CASSYGPGGQKETQYF

SEQ ID NO: 85559 - protein, 12 aa, Homo sapiens
  CDR3 for alpha chain variable domain of TCR clone 42780 (TRAV13-2, TRAJ31)
CAENYNNARLMF

SEQ ID NO: 85560 - protein, 13 aa, Homo sapiens
  CDR3 for beta chain variable domain of TCR clone 42780 (TRBV24-1, TRBJ1-3)
CATMADSGNTIYF

SEQ ID NO: 85561 - protein, 12 aa, Homo sapiens
  CDR3 for alpha chain variable domain of TCR clone 42781 (TRAV21, TRAJ33)
CAKMDSNYQLIW

SEQ ID NO: 85562 - protein, 14 aa, Homo sapiens
  CDR3 for beta chain variable domain of TCR clone 42781 (TRBV7-3, TRBJ1-1)
CTSSLKGGNTEAFF

SEQ ID NO: 85563 - protein, 14 aa, Homo sapiens
  CDR3 for alpha chain variable domain of TCR clone 42782 (TRAV12-1, TRAJ9)
CVVNRRIGGFKTIF

SEQ ID NO: 85564 - protein, 16 aa, Homo sapiens
  CDR3 for beta chain variable domain of TCR clone 42782 (TRBV4-1, TRBJ2-3)
CASSQSTSGAEDTQYF

SEQ ID NO: 85565 - protein, 16 aa, Homo sapiens
  CDR3 for alpha chain variable domain of TCR clone 42783 (TRAV12-1, TRAJ42)
CVVTPYYGGSQGNLIF

SEQ ID NO: 85566 - protein, 15 aa, Homo sapiens
  CDR3 for beta chain variable domain of TCR clone 42783 (TRBV4-3, TRBJ2-7)
CTSSQGGRGIYEQYF

SEQ ID NO: 85567 - protein, 13 aa, Homo sapiens
  CDR3 for alpha chain variable domain of TCR clone 42784 (TRAV38-1, TRAJ7)
CAFMMDGSSRLAF

SEQ ID NO: 85568 - protein, 14 aa, Homo sapiens
  CDR3 for beta chain variable domain of TCR clone 42784 (TRBV4-2, TRBJ2-3)
CASRETRAPGMQYF

SEQ ID NO: 85569 - protein, 16 aa, Homo sapiens
  CDR3 for alpha chain variable domain of TCR clone 42785 (TRAV13-1, TRAJ48)
CAASIFGNFGNEKLTF

SEQ ID NO: 85570 - protein, 13 aa, Homo sapiens
  CDR3 for beta chain variable domain of TCR clone 42785 (TRBV19, TRBJ1-2)
CASSVPGQDGYTF

SEQ ID NO: 85571 - protein, 16 aa, Homo sapiens
  CDR3 for alpha chain variable domain of TCR clone 42786 (TRAV26-1, TRAJ28)
CIVRPYSGAGSYQLTF

SEQ ID NO: 85572 - protein, 15 aa, Homo sapiens
  CDR3 for beta chain variable domain of TCR clone 42786 (TRBV2, TRBJ2-3)
CASSDFEKATDTQYF

SEQ ID NO: 85573 - protein, 18 aa, Homo sapiens
  CDR3 for alpha chain variable domain of TCR clone 42787 (TRAV21, TRAJ52)
RAVRPSPAGGTSYGKLTF

SEQ ID NO: 85574 - protein, 17 aa, Homo sapiens
  CDR3 for beta chain variable domain of TCR clone 42787 (TRBV13, TRBJ2-3)
CASSLSRVAGGKNTQYF

SEQ ID NO: 85575 - protein, 11 aa, Homo sapiens
  CDR3 for alpha chain variable domain of TCR clone 42788 (TRAV12-3, TRAJ43)
CAMSVSNDMRF

SEQ ID NO: 85576 - protein, 13 aa, Homo sapiens
  CDR3 for beta chain variable domain of TCR clone 42788 (TRBV19, TRBJ1-2)
CASSVPGQDGYTF

SEQ ID NO: 85577 - protein, 15 aa, Homo sapiens
  CDR3 for alpha chain variable domain of TCR clone 42789 (TRAV12-2, TRAJ53)
CAVNGGGGSNYKLTF

SEQ ID NO: 85578 - protein, 17 aa, Homo sapiens
  CDR3 for beta chain variable domain of TCR clone 42789 (TRBV7-3, TRBJ2-3)
CASSLMRRMRGADTQYF

SEQ ID NO: 85579 - protein, 14 aa, Homo sapiens
  CDR3 for alpha chain variable domain of TCR clone 42790 (TRAV1-2, TRAJ8)
CAVREDTGFQKLVF

SEQ ID NO: 85580 - protein, 15 aa, Homo sapiens
  CDR3 for beta chain variable domain of TCR clone 42790 (TRBV6-3, TRBJ2-7)
CASSSPGTVFYELYF

SEQ ID NO: 85581 - protein, 15 aa, Homo sapiens
  CDR3 for alpha chain variable domain of TCR clone 42791 (TRAV8-3, TRAJ45)
CASSYSGGGADGLTF

SEQ ID NO: 85582 - protein, 13 aa, Homo sapiens
  CDR3 for beta chain variable domain of TCR clone 42791 (TRBV10-3, TRBJ2-7)
CASKLAVNYEQNF

SEQ ID NO: 85583 - protein, 18 aa, Homo sapiens
  CDR3 for alpha chain variable domain of TCR clone 42792 (TRAV2, TRAJ20)
LRVREADAAVYRDCKLSF

SEQ ID NO: 85584 - protein, 12 aa, Homo sapiens
  CDR3 for beta chain variable domain of TCR clone 42792 (TRBV11-2, TRBJ2-1)
CASSPGNNEQFF

SEQ ID NO: 85585 - protein, 17 aa, Homo sapiens
  CDR3 for alpha chain variable domain of TCR clone 42793 (TRAV4, TRAJ13)
FLVGVQGSSGGYQKVTF

SEQ ID NO: 85586 - protein, 18 aa, Homo sapiens
  CDR3 for beta chain variable domain of TCR clone 42793 (TRBV15, TRBJ2-3)
CATSRDGARSWDTDTQYF

SEQ ID NO: 85587 - protein, 18 aa, Homo sapiens
  CDR3 for alpha chain variable domain of TCR clone 42794 (TRAV13-1, TRAJ52)
CAAKNPNAGGTSYGKLTF

SEQ ID NO: 85588 - protein, 14 aa, Homo sapiens
  CDR3 for beta chain variable domain of TCR clone 42794 (TRBV7-2, TRBJ2-7)
CASRSQRAAYEQYF

SEQ ID NO: 85589 - protein, 14 aa, Homo sapiens
  CDR3 for alpha chain variable domain of TCR clone 42795 (TRAV13-1, TRAJ9)
CAASALTGGFKTIF

SEQ ID NO: 85590 - protein, 16 aa, Homo sapiens
  CDR3 for beta chain variable domain of TCR clone 42795 (TRBV12-4, TRBJ2-3)
CASSFGTGGISDKQYF

SEQ ID NO: 85591 - protein, 17 aa, Homo sapiens
  CDR3 for alpha chain variable domain of TCR clone 42796 (TRAV3, TRAJ6)
CAVRDGPRVGGSYIPTF

SEQ ID NO: 85592 - protein, 12 aa, Homo sapiens
  CDR3 for beta chain variable domain of TCR clone 42796 (TRBV7-8, TRBJ2-7)
CASSLGDREQYF

SEQ ID NO: 85593 - protein, 12 aa, Homo sapiens
  CDR3 for alpha chain variable domain of TCR clone 42797 (TRAV13-1, TRAJ9)
CTSHTGGFKTIF

SEQ ID NO: 85594 - protein, 13 aa, Homo sapiens
  CDR3 for beta chain variable domain of TCR clone 42797 (TRBV12-4, TRBJ1-2)
CASSSGSKDGYTF

SEQ ID NO: 85595 - protein, 16 aa, Homo sapiens
  CDR3 for alpha chain variable domain of TCR clone 42798 (TRAV4, TRAJ22)
CLVGDLYSGAARQLTF

SEQ ID NO: 85596 - protein, 16 aa, Homo sapiens
  CDR3 for beta chain variable domain of TCR clone 42798 (TRBV7-9, TRBJ2-1)
CASSDVAGGSYNEQFF

SEQ ID NO: 85597 - protein, 17 aa, Homo sapiens
  CDR3 for alpha chain variable domain of TCR clone 42799 (TRAV38-1, TRAJ28)
CAFMKPTSGAGSYKLTF

SEQ ID NO: 85598 - protein, 15 aa, Homo sapiens
  CDR3 for beta chain variable domain of TCR clone 42799 (TRBV5-1, TRBJ2-4)
CASSLGGGGSYIQYF

SEQ ID NO: 85599 - protein, 14 aa, Homo sapiens
  CDR3 for alpha chain variable domain of TCR clone 42800 (TRAV9-2, TRAJ39)
CALYIYNAGNMLTF

SEQ ID NO: 85600 - protein, 16 aa, Homo sapiens
  CDR3 for beta chain variable domain of TCR clone 42800 (TRBV28, TRBJ2-7)
CASSSGTSGRGYEQYF

SEQ ID NO: 85601 - protein, 12 aa, Homo sapiens
  CDR3 for alpha chain variable domain of TCR clone 42801 (TRAV12-3, TRAJ5)
CASGQGRRALTF

SEQ ID NO: 85602 - protein, 12 aa, Homo sapiens
  CDR3 for beta chain variable domain of TCR clone 42801 (TRBV5-1, TRBJ1-2)
CASSQDTYGYTF

SEQ ID NO: 85603 - protein, 12 aa, Homo sapiens
  CDR3 for alpha chain variable domain of TCR clone 42802 (TRAV13-1, TRAJ49)
CAASPMGNQFYF

SEQ ID NO: 85604 - protein, 14 aa, Homo sapiens
  CDR3 for beta chain variable domain of TCR clone 42802 (TRBV4-1, TRBJ2-2)
CASSQAVNTGELFF

SEQ ID NO: 85605 - protein, 14 aa, Homo sapiens
  CDR3 for alpha chain variable domain of TCR clone 42803 (TRAV1-2, TRAJ16)
CAVNRFSDGQELLF

SEQ ID NO: 85606 - protein, 15 aa, Homo sapiens
  CDR3 for beta chain variable domain of TCR clone 42803 (TRBV2, TRBJ2-1)
CASSEEREGDNEQFF

SEQ ID NO: 85607 - protein, 14 aa, Homo sapiens
  CDR3 for alpha chain variable domain of TCR clone 42804 (TRAV2, TRAJ37)
CAVDFTSNTAKLIF

SEQ ID NO: 85608 - protein, 15 aa, Homo sapiens
  CDR3 for beta chain variable domain of TCR clone 42804 (TRBV20-1, TRBJ1-1)
CSASRGVTGNTEAFF

SEQ ID NO: 85609 - protein, 18 aa, Homo sapiens
  CDR3 for alpha chain variable domain of TCR clone 42805 (TRAV12-2, )
CAVEDIQNPDPAVYQLRD

SEQ ID NO: 85610 - protein, 20 aa, Homo sapiens
  CDR3 for beta chain variable domain of TCR clone 42805 (TRBV11-3, TRBJ2-7)
CASSQRTSGSLRVVLRAGHQ

SEQ ID NO: 85611 - protein, 15 aa, Homo sapiens
  CDR3 for alpha chain variable domain of TCR clone 42806 (TRAV26-2, TRAJ13)
CILRDLSGGYQKVTF

SEQ ID NO: 85612 - protein, 11 aa, Homo sapiens
  CDR3 for beta chain variable domain of TCR clone 42806 (TRBV7-9, TRBJ2-3)
CASGYTDTQYF

SEQ ID NO: 85613 - protein, 13 aa, Homo sapiens
  CDR3 for alpha chain variable domain of TCR clone 42807 (TRAV29/DV5, TRAJ31)
CAASGNNNARLMF

SEQ ID NO: 85614 - protein, 12 aa, Homo sapiens
  CDR3 for beta chain variable domain of TCR clone 42807 (TRBV14, TRBJ2-7)
CASSLYKDEQYF

SEQ ID NO: 85615 - protein, 15 aa, Homo sapiens
  CDR3 for alpha chain variable domain of TCR clone 42808 (TRAV3, TRAJ17)
CAVRDTGAAGTKLTF

SEQ ID NO: 85616 - protein, 14 aa, Homo sapiens
  CDR3 for beta chain variable domain of TCR clone 42808 (TRBV6-3, TRBJ1-1)
CASSNLLPGAEAFF

SEQ ID NO: 85617 - protein, 14 aa, Homo sapiens
  CDR3 for alpha chain variable domain of TCR clone 42809 (TRAV1-2, TRAJ16)
CAVNRFSYGQKLLF

SEQ ID NO: 85618 - protein, 13 aa, Homo sapiens
  CDR3 for beta chain variable domain of TCR clone 42809 (TRBV4-1, TRBJ2-1)
CASSQAGGDEQFF

SEQ ID NO: 85619 - protein, 12 aa, Homo sapiens
  CDR3 for alpha chain variable domain of TCR clone 42810 (TRAV3, TRAJ20)
CAVRDPDYKLSF

SEQ ID NO: 85620 - protein, 13 aa, Homo sapiens
  CDR3 for beta chain variable domain of TCR clone 42810 (TRBV9, TRBJ2-1)
CASSVGQGGGQFF

SEQ ID NO: 85621 - protein, 15 aa, Homo sapiens
  CDR3 for alpha chain variable domain of TCR clone 42811 (TRAV35, TRAJ40)
CAGQLGTSGTYKYIF

SEQ ID NO: 85622 - protein, 14 aa, Homo sapiens
  CDR3 for beta chain variable domain of TCR clone 42811 (TRBV7-3, TRBJ2-1)
CASSLAGGTNEQFV

SEQ ID NO: 85623 - protein, 14 aa, Homo sapiens
  CDR3 for alpha chain variable domain of TCR clone 42812 (TRAV16, TRAJ26)
CALSSANYGQNFVF

SEQ ID NO: 85624 - protein, 12 aa, Homo sapiens
  CDR3 for beta chain variable domain of TCR clone 42812 (TRBV6-5, TRBJ2-2)
CASRTETGELFF

SEQ ID NO: 85625 - protein, 14 aa, Homo sapiens
  CDR3 for alpha chain variable domain of TCR clone 42813 (TRAV20, TRAJ29)
CAVQAWVGNTPLVF

SEQ ID NO: 85626 - protein, 15 aa, Homo sapiens
  CDR3 for beta chain variable domain of TCR clone 42813 (TRBV29-1, TRBJ2-7)
CSVEFFNRGSYEQYF

SEQ ID NO: 85627 - protein, 12 aa, Homo sapiens
  CDR3 for alpha chain variable domain of TCR clone 42814 (TRAV25, TRAJ11)
CAGASGYSTLTF

SEQ ID NO: 85628 - protein, 14 aa, Homo sapiens
  CDR3 for beta chain variable domain of TCR clone 42814 (TRBV5-8, TRBJ2-3)
CASSLGQGTGTQYF

SEQ ID NO: 85629 - protein, 15 aa, Homo sapiens
  CDR3 for alpha chain variable domain of TCR clone 42815 (TRAV26-1, TRAJ29)
CIVRVEGSGNTPLVF

SEQ ID NO: 85630 - protein, 15 aa, Homo sapiens
  CDR3 for beta chain variable domain of TCR clone 42815 (TRBV7-9, TRBJ1-5)
CASSEGHQPNQPQHF

SEQ ID NO: 85631 - protein, 13 aa, Homo sapiens
  CDR3 for alpha chain variable domain of TCR clone 42816 (TRAV8-3, TRAJ4)
WVFYPGGYNKLIF

SEQ ID NO: 85632 - protein, 14 aa, Homo sapiens
  CDR3 for beta chain variable domain of TCR clone 42816 (TRBV7-9, TRBJ2-3)
CASSLEDGTDTQYF

SEQ ID NO: 85633 - protein, 15 aa, Homo sapiens
  CDR3 for alpha chain variable domain of TCR clone 42817 (TRAV26-1, TRAJ29)
CIVRVEGSGNTPLVF

SEQ ID NO: 85634 - protein, 15 aa, Homo sapiens
  CDR3 for beta chain variable domain of TCR clone 42817 (TRBV28, TRBJ2-5)
CASSPGQGSIGTQYF

SEQ ID NO: 85635 - protein, 14 aa, Homo sapiens
  CDR3 for alpha chain variable domain of TCR clone 42818 (TRAV26-1, TRAJ45)
CIEVTGGGADVLTF

SEQ ID NO: 85636 - protein, 13 aa, Homo sapiens
  CDR3 for beta chain variable domain of TCR clone 42818 (TRBV7-6, TRBJ1-2)
CASSLVADYGYTF

SEQ ID NO: 85637 - protein, 18 aa, Homo sapiens
  CDR3 for alpha chain variable domain of TCR clone 42819 (TRAV8-3, TRAJ4)
WVRDPTSNDPGGDNKLIF

SEQ ID NO: 85638 - protein, 13 aa, Homo sapiens
  CDR3 for beta chain variable domain of TCR clone 42819 (TRBV20-1, TRBJ1-2)
CSATGIQGSGYTF

SEQ ID NO: 85639 - protein, 15 aa, Homo sapiens
  CDR3 for alpha chain variable domain of TCR clone 42820 (TRAV4, TRAJ26)
CLVGDMNNYGQNFAF

SEQ ID NO: 85640 - protein, 16 aa, Homo sapiens
  CDR3 for beta chain variable domain of TCR clone 42820 (TRBV28, TRBJ1-4)
CASSSRTGAANGKLFF

SEQ ID NO: 85641 - protein, 12 aa, Homo sapiens
  CDR3 for alpha chain variable domain of TCR clone 42821 (TRAV27, TRAJ35)
CAGADFGNVLHC

SEQ ID NO: 85642 - protein, 16 aa, Homo sapiens
  CDR3 for beta chain variable domain of TCR clone 42821 (TRBV6-1, TRBJ2-1)
CASILRQGSSYNERFF

SEQ ID NO: 85643 - protein, 11 aa, Homo sapiens
  CDR3 for alpha chain variable domain of TCR clone 42822 (TRAV1-2, TRAJ20)
CAVSNDYKLSF

SEQ ID NO: 85644 - protein, 12 aa, Homo sapiens
  CDR3 for beta chain variable domain of TCR clone 42822 (TRBV11-2, TRBJ2-2)
CASSLGGGELFF

SEQ ID NO: 85645 - protein, 17 aa, Homo sapiens
  CDR3 for alpha chain variable domain of TCR clone 42823 (TRAV3, TRAJ38)
CAVRDCLNAGNNRKLIW

SEQ ID NO: 85646 - protein, 13 aa, Homo sapiens
  CDR3 for beta chain variable domain of TCR clone 42823 (TRBV7-6, TRBJ1-3)
CASSSQQGNTIYF

SEQ ID NO: 85647 - protein, 11 aa, Homo sapiens
  CDR3 for alpha chain variable domain of TCR clone 42824 (TRAV35, TRAJ34)
CWARNTDTLIF

SEQ ID NO: 85648 - protein, 14 aa, Homo sapiens
  CDR3 for beta chain variable domain of TCR clone 42824 (TRBV5-1, TRBJ2-7)
CASSRGESLYEQYF

SEQ ID NO: 85649 - protein, 13 aa, Homo sapiens
  CDR3 for alpha chain variable domain of TCR clone 42825 (TRAV12-2, TRAJ50)
CAVIVTSYDKVIF

SEQ ID NO: 85650 - protein, 14 aa, Homo sapiens
  CDR3 for beta chain variable domain of TCR clone 42825 (TRBV7-8, TRBJ2-7)
CASSPRDRVYEQYF

SEQ ID NO: 85651 - protein, 16 aa, Homo sapiens
  CDR3 for alpha chain variable domain of TCR clone 42826 (TRAV8-3, TRAJ8)
CAVPRDGNTGFQKLVF

SEQ ID NO: 85652 - protein, 15 aa, Homo sapiens
  CDR3 for beta chain variable domain of TCR clone 42826 (TRBV19, TRBJ1-5)
CAWSVVWADNQPQHF

SEQ ID NO: 85653 - protein, 18 aa, Homo sapiens
  CDR3 for alpha chain variable domain of TCR clone 42827 (TRAV26-2, TRAJ54)
CTLRDVEVGIQGAQKLVF

SEQ ID NO: 85654 - protein, 16 aa, Homo sapiens
  CDR3 for beta chain variable domain of TCR clone 42827 (TRBV6-1, TRBJ2-5)
CASSETLDRGAETQYF

SEQ ID NO: 85655 - protein, 12 aa, Homo sapiens
  CDR3 for alpha chain variable domain of TCR clone 42828 (TRAV12-1, TRAJ17)
RAMTLTGNKLTF

SEQ ID NO: 85656 - protein, 15 aa, Homo sapiens
  CDR3 for beta chain variable domain of TCR clone 42828 (TRBV20-1, TRBJ2-7)
CSARDRVSGMDEQYF

SEQ ID NO: 85657 - protein, 15 aa, Homo sapiens
  CDR3 for alpha chain variable domain of TCR clone 42829 (TRAV8-4, TRAJ12)
CAASDRVDSSYKLIF

SEQ ID NO: 85658 - protein, 15 aa, Homo sapiens
  CDR3 for beta chain variable domain of TCR clone 42829 (TRBV11-3, TRBJ2-1)
CASSLAGQTYNEQFF

SEQ ID NO: 85659 - protein, 12 aa, Homo sapiens
  CDR3 for alpha chain variable domain of TCR clone 42830 (TRAV3, TRAJ27)
CAVRDGAGKSTL

SEQ ID NO: 85660 - protein, 13 aa, Homo sapiens
  CDR3 for beta chain variable domain of TCR clone 42830 (TRBV10-3, TRBJ1-2)
CAINADLNYGYTF

SEQ ID NO: 85661 - protein, 15 aa, Homo sapiens
  CDR3 for alpha chain variable domain of TCR clone 42831 (TRAV2, TRAJ15)
CAVEDRGQAGTALIF

SEQ ID NO: 85662 - protein, 13 aa, Homo sapiens
  CDR3 for beta chain variable domain of TCR clone 42831 (TRBV10-2, TRBJ2-7)
CASGASGGHEQYF

SEQ ID NO: 85663 - protein, 13 aa, Homo sapiens
  CDR3 for alpha chain variable domain of TCR clone 42832 (TRAV8-3, TRAJ48)
CAVVRFGNEELTF

SEQ ID NO: 85664 - protein, 16 aa, Homo sapiens
  CDR3 for beta chain variable domain of TCR clone 42832 (TRBV20-1, TRBJ2-5)
CSARDFASGIQETQYF

SEQ ID NO: 85665 - protein, 13 aa, Homo sapiens
  CDR3 for alpha chain variable domain of TCR clone 42833 (TRAV8-6, TRAJ9)
CAVWDTGGFKTIF

SEQ ID NO: 85666 - protein, 14 aa, Homo sapiens
  CDR3 for beta chain variable domain of TCR clone 42833 (TRBV2, TRBJ2-1)
CASSEALTYNEQFF

SEQ ID NO: 85667 - protein, 14 aa, Homo sapiens
  CDR3 for alpha chain variable domain of TCR clone 42834 (TRAV1-2, TRAJ16)
CAVNRFSDGQKLLF

SEQ ID NO: 85668 - protein, 15 aa, Homo sapiens
  CDR3 for beta chain variable domain of TCR clone 42834 (TRBV7-3, TRBJ2-1)
CASSLTSGSYNEQFF

SEQ ID NO: 85669 - protein, 12 aa, Homo sapiens
  CDR3 for alpha chain variable domain of TCR clone 42835 (TRAV3, TRAJ20)
CAVRDTDYKLSF

SEQ ID NO: 85670 - protein, 13 aa, Homo sapiens
  CDR3 for beta chain variable domain of TCR clone 42835 (TRBV9, TRBJ2-1)
CASSVGQGGEQFF

SEQ ID NO: 85671 - protein, 23 aa, Homo sapiens
  CDR3 for alpha chain variable domain of TCR clone 42836 (TRAV13-1, TRAJ32)
CAASNGWWCYKQAHLWNWHSACF

SEQ ID NO: 85672 - protein, 15 aa, Homo sapiens
  CDR3 for beta chain variable domain of TCR clone 42836 (TRBV20-1, TRBJ1-2)
CSAIRTGAFNYGYTF

SEQ ID NO: 85673 - protein, 16 aa, Homo sapiens
  CDR3 for alpha chain variable domain of TCR clone 42837 (TRAV12-3, TRAJ53)
CAMSPGSGGSNYKLPF

SEQ ID NO: 85674 - protein, 16 aa, Homo sapiens
  CDR3 for beta chain variable domain of TCR clone 42837 (TRBV4-2, TRBJ1-1)
CASSQAGFGMNTEAFF

SEQ ID NO: 85675 - protein, 13 aa, Homo sapiens
  CDR3 for alpha chain variable domain of TCR clone 42838 (TRAV30, TRAJ49)
CGSESQPVTSSIL

SEQ ID NO: 85676 - protein, 13 aa, Homo sapiens
  CDR3 for beta chain variable domain of TCR clone 42838 (TRBV7-2, TRBJ2-2)
CASSLAVTGELFF

SEQ ID NO: 85677 - protein, 14 aa, Homo sapiens
  CDR3 for alpha chain variable domain of TCR clone 42839 (TRAV12-2, TRAJ44)
CAVSKAGTASKLTF

SEQ ID NO: 85678 - protein, 12 aa, Homo sapiens
  CDR3 for beta chain variable domain of TCR clone 42839 (TRBV12-4, TRBJ2-7)
CASSLGGYEQYF

SEQ ID NO: 85679 - protein, 14 aa, Homo sapiens
  CDR3 for alpha chain variable domain of TCR clone 42840 (TRAV17, TRAJ15)
CATAPNQAGTALIF

SEQ ID NO: 85680 - protein, 14 aa, Homo sapiens
  CDR3 for beta chain variable domain of TCR clone 42840 (TRBV19, TRBJ2-7)
CASSMGQGAIEQHF

SEQ ID NO: 85681 - protein, 14 aa, Homo sapiens
  CDR3 for alpha chain variable domain of TCR clone 42841 (TRAV1-2, TRAJ16)
CAVNRFSDGQKLLF

SEQ ID NO: 85682 - protein, 14 aa, Homo sapiens
  CDR3 for beta chain variable domain of TCR clone 42841 (TRBV7-9, TRBJ2-3)
CASSVEDGTDTQYF

SEQ ID NO: 85683 - protein, 16 aa, Homo sapiens
  CDR3 for alpha chain variable domain of TCR clone 42842 (TRAV3, TRAJ37)
CAVRGKGSGNTGKLIF

SEQ ID NO: 85684 - protein, 13 aa, Homo sapiens
  CDR3 for beta chain variable domain of TCR clone 42842 (TRBV14, TRBJ2-7)
CARSQDRRYEQYF

SEQ ID NO: 85685 - protein, 17 aa, Homo sapiens
  CDR3 for alpha chain variable domain of TCR clone 42843 (TRAV23/DV6, TRAJ57)
CAASSTLSQGGYEKLVF

SEQ ID NO: 85686 - protein, 14 aa, Homo sapiens
  CDR3 for beta chain variable domain of TCR clone 42843 (TRBV25-1, TRBJ1-1)
CASTHLGGNTEAFF

SEQ ID NO: 85687 - protein, 17 aa, Homo sapiens
  CDR3 for alpha chain variable domain of TCR clone 42844 (TRAV3, TRAJ6)
CAGRDGPRAGGSYIPTF

SEQ ID NO: 85688 - protein, 20 aa, Homo sapiens
  CDR3 for beta chain variable domain of TCR clone 42844 (TRBV28, TRBJ2-1)
CASTPIGRSPGLAGGNEQFF

SEQ ID NO: 85689 - protein, 12 aa, Homo sapiens
  CDR3 for alpha chain variable domain of TCR clone 42845 (TRAV1-2, TRAJ7)
CAVAYGNNRLAF

SEQ ID NO: 85690 - protein, 16 aa, Homo sapiens
  CDR3 for beta chain variable domain of TCR clone 42845 (TRBV5-1, TRBJ2-7)
CASSPMTGALSYDQYF

SEQ ID NO: 85691 - protein, 13 aa, Homo sapiens
  CDR3 for alpha chain variable domain of TCR clone 42846 (TRAV3, TRAJ21)
CAVREPDFNKFHF

SEQ ID NO: 85692 - protein, 13 aa, Homo sapiens
  CDR3 for beta chain variable domain of TCR clone 42846 (TRBV9, TRBJ2-1)
CASSPSGGNEQFF

SEQ ID NO: 85693 - protein, 16 aa, Homo sapiens
  CDR3 for alpha chain variable domain of TCR clone 42847 (TRAV30, TRAJ57)
CGTGWAPQGGYEKLVF

SEQ ID NO: 85694 - protein, 14 aa, Homo sapiens
  CDR3 for beta chain variable domain of TCR clone 42847 (TRBV18, TRBJ1-1)
CASSPGFQGVEAFF

SEQ ID NO: 85695 - protein, 14 aa, Homo sapiens
  CDR3 for alpha chain variable domain of TCR clone 42848 (TRAV1-2, TRAJ16)
CAVNRFSDGQKLLF

SEQ ID NO: 85696 - protein, 15 aa, Homo sapiens
  CDR3 for beta chain variable domain of TCR clone 42848 (TRBV7-3, TRBJ2-1)
CASSLGQGPFGEQFF

SEQ ID NO: 85697 - protein, 11 aa, Homo sapiens
  CDR3 for alpha chain variable domain of TCR clone 42849 (TRAV1-1, TRAJ23)
CAVRQGGKLIF

SEQ ID NO: 85698 - protein, 20 aa, Homo sapiens
  CDR3 for beta chain variable domain of TCR clone 42849 (TRBV7-8, TRBJ2-2)
CASSHLFPGPTIHITWELFF

SEQ ID NO: 85699 - protein, 18 aa, Homo sapiens
  CDR3 for alpha chain variable domain of TCR clone 42850 (TRAV21, TRAJ53)
CAVKGGENSGGSNYKLTF

SEQ ID NO: 85700 - protein, 12 aa, Homo sapiens
  CDR3 for beta chain variable domain of TCR clone 42850 (TRBV12-4, TRBJ2-4)
CASSSSGNIQYF

SEQ ID NO: 85701 - protein, 12 aa, Homo sapiens
  CDR3 for alpha chain variable domain of TCR clone 42851 (TRAV1-1, TRAJ8)
CAGGTGFQKLVF

SEQ ID NO: 85702 - protein, 13 aa, Homo sapiens
  CDR3 for beta chain variable domain of TCR clone 42851 (TRBV20-1, TRBJ2-1)
CSARPGRYNEQFF

SEQ ID NO: 85703 - protein, 15 aa, Homo sapiens
  CDR3 for alpha chain variable domain of TCR clone 42852 (TRAV12-2, TRAJ43)
CAFDMRFGAGTRLTV

SEQ ID NO: 85704 - protein, 18 aa, Homo sapiens
  CDR3 for beta chain variable domain of TCR clone 42852 (TRBV20-1, TRBJ2-3)
CSASGLAGGPGTTDAQYF

SEQ ID NO: 85705 - protein, 15 aa, Homo sapiens
  CDR3 for alpha chain variable domain of TCR clone 42853 (TRAV38-1, TRAJ37)
CAFIHGSGNTGKLTF

SEQ ID NO: 85706 - protein, 12 aa, Homo sapiens
  CDR3 for beta chain variable domain of TCR clone 42853 (TRBV7-9, TRBJ2-7)
CASSFGSYEQYF

SEQ ID NO: 85707 - protein, 13 aa, Homo sapiens
  CDR3 for alpha chain variable domain of TCR clone 42854 (TRAV12-3, TRAJ41)
CAIAPNSGYALNF

SEQ ID NO: 85708 - protein, 14 aa, Homo sapiens
  CDR3 for beta chain variable domain of TCR clone 42854 (TRBV7-2, TRBJ1-3)
CASSLGAAGNTIYF

SEQ ID NO: 85709 - protein, 13 aa, Homo sapiens
  CDR3 for alpha chain variable domain of TCR clone 42855 (TRAV3, TRAJ27)
CTVRPLGAGKSTF

SEQ ID NO: 85710 - protein, 13 aa, Homo sapiens
  CDR3 for beta chain variable domain of TCR clone 42855 (TRBV7-9, TRBJ2-3)
CASSPGSTDTQYF

SEQ ID NO: 85711 - protein, 15 aa, Homo sapiens
  CDR3 for alpha chain variable domain of TCR clone 42856 (TRAV3, TRAJ22)
CAVRDRGGSARQLTF

SEQ ID NO: 85712 - protein, 16 aa, Homo sapiens
  CDR3 for beta chain variable domain of TCR clone 42856 (TRBV5-4, TRBJ2-3)
CASPQPGAGGADTQYF

SEQ ID NO: 85713 - protein, 14 aa, Homo sapiens
  CDR3 for alpha chain variable domain of TCR clone 42857 (TRAV1-2, TRAJ8)
CAVREDTGFQKLVF

SEQ ID NO: 85714 - protein, 16 aa, Homo sapiens
  CDR3 for beta chain variable domain of TCR clone 42857 (TRBV4-1, TRBJ2-3)
CASSQSTSGAKDTQYF

SEQ ID NO: 85715 - protein, 15 aa, Homo sapiens
  CDR3 for alpha chain variable domain of TCR clone 42858 (TRAV26-1, TRAJ29)
CIVRVEGSANTPLVF

SEQ ID NO: 85716 - protein, 15 aa, Homo sapiens
  CDR3 for beta chain variable domain of TCR clone 42858 (TRBV7-9, TRBJ1-5)
CASSQGHQPNQPQHF

SEQ ID NO: 85717 - protein, 16 aa, Homo sapiens
  CDR3 for alpha chain variable domain of TCR clone 42859 (TRAV13-1, TRAJ48)
CAASIFGNFGNEKLTS

SEQ ID NO: 85718 - protein, 12 aa, Homo sapiens
  CDR3 for beta chain variable domain of TCR clone 42859 (TRBV14, TRBJ2-4)
CASSNLKSIQYF

SEQ ID NO: 85719 - protein, 15 aa, Homo sapiens
  CDR3 for alpha chain variable domain of TCR clone 42860 (TRAV26-1, TRAJ56)
CIVRVATGANSRLTF

SEQ ID NO: 85720 - protein, 15 aa, Homo sapiens
  CDR3 for beta chain variable domain of TCR clone 42860 (TRBV27, TRBJ2-7)
CASSPQREGQREQYF

SEQ ID NO: 85721 - protein, 13 aa, Homo sapiens
  CDR3 for alpha chain variable domain of TCR clone 42861 (TRAV26-1, TRAJ48)
CIVRVVGDEKLTF

SEQ ID NO: 85722 - protein, 17 aa, Homo sapiens
  CDR3 for beta chain variable domain of TCR clone 42861 (TRBV24-1, TRBJ2-1)
CATSDVSTSGTYNEQFF

SEQ ID NO: 85723 - protein, 14 aa, Homo sapiens
  CDR3 for alpha chain variable domain of TCR clone 42862 (TRAV13-1, TRAJ9)
CAASALTGGFKTIF

SEQ ID NO: 85724 - protein, 12 aa, Homo sapiens
  CDR3 for beta chain variable domain of TCR clone 42862 (TRBV20-1, TRBJ1-1)
QCWTVGNTEAFF

SEQ ID NO: 85725 - protein, 15 aa, Homo sapiens
  CDR3 for alpha chain variable domain of TCR clone 42863 (TRAV2, TRAJ9)
CAVEDRGTGGFKTIF

SEQ ID NO: 85726 - protein, 15 aa, Homo sapiens
  CDR3 for beta chain variable domain of TCR clone 42863 (TRBV9, TRBJ1-6)
CASSVAGTGDSPLHF

SEQ ID NO: 85727 - protein, 15 aa, Homo sapiens
  CDR3 for alpha chain variable domain of TCR clone 42864 (TRAV13-2, TRAJ10)
CAENRDTGGGNKLTF

SEQ ID NO: 85728 - protein, 20 aa, Homo sapiens
  CDR3 for beta chain variable domain of TCR clone 42864 (TRBV28, TRBJ2-1)
CASTPVGRSPGLAGGNEQFF

SEQ ID NO: 85729 - protein, 14 aa, Homo sapiens
  CDR3 for alpha chain variable domain of TCR clone 42865 (TRAV1-2, TRAJ16)
RAVNRFSDGQKLLF

SEQ ID NO: 85730 - protein, 11 aa, Homo sapiens
  CDR3 for beta chain variable domain of TCR clone 42865 (TRBV29-1, TRBJ2-5)
CSEDRTGTQYF

SEQ ID NO: 85731 - protein, 12 aa, Homo sapiens
  CDR3 for alpha chain variable domain of TCR clone 42866 (TRAV12-3, TRAJ40)
CAMSSGTYKYIF

SEQ ID NO: 85732 - protein, 15 aa, Homo sapiens
  CDR3 for beta chain variable domain of TCR clone 42866 (TRBV7-3, TRBJ2-2)
CASSGTGQGTGELFF

SEQ ID NO: 85733 - protein, 14 aa, Homo sapiens
  CDR3 for alpha chain variable domain of TCR clone 42867 (TRAV17, TRAJ56)
CATVPAGANSKLTF

SEQ ID NO: 85734 - protein, 12 aa, Homo sapiens
  CDR3 for beta chain variable domain of TCR clone 42867 (TRBV7-8, TRBJ2-7)
CASSLGDREQCF

SEQ ID NO: 85735 - protein, 11 aa, Homo sapiens
  CDR3 for alpha chain variable domain of TCR clone 42868 (TRAV8-3, TRAJ49)
CTVNTGNQFYF

SEQ ID NO: 85736 - protein, 12 aa, Homo sapiens
  CDR3 for beta chain variable domain of TCR clone 42868 (TRBV11-2, TRBJ2-7)
CASSPPADEQYF

SEQ ID NO: 85737 - protein, 13 aa, Homo sapiens
  CDR3 for alpha chain variable domain of TCR clone 42869 (TRAV8-3, TRAJ44)
CAVVPGTASKLTF

SEQ ID NO: 85738 - protein, 11 aa, Homo sapiens
  CDR3 for beta chain variable domain of TCR clone 42869 (TRBV19, TRBJ1-1)
CASSIGSEAFF

SEQ ID NO: 85739 - protein, 13 aa, Homo sapiens
  CDR3 for alpha chain variable domain of TCR clone 42870 (TRAV2, TRAJ29)
CAEQNSGSTPLVF

SEQ ID NO: 85740 - protein, 13 aa, Homo sapiens
  CDR3 for beta chain variable domain of TCR clone 42870 (TRBV28, TRBJ1-2)
CASSPGSRNGYTF

SEQ ID NO: 85741 - protein, 13 aa, Homo sapiens
  CDR3 for alpha chain variable domain of TCR clone 42871 (TRAV12-3, TRAJ9)
CAMRNTGGFKTIF

SEQ ID NO: 85742 - protein, 14 aa, Homo sapiens
  CDR3 for beta chain variable domain of TCR clone 42871 (TRBV11-2, TRBJ2-7)
CASSSTGEGYGQYF

SEQ ID NO: 85743 - protein, 13 aa, Homo sapiens
  CDR3 for alpha chain variable domain of TCR clone 42872 (TRAV12-3, TRAJ33)
CAMSLNSNYQLIW

SEQ ID NO: 85744 - protein, 15 aa, Homo sapiens
  CDR3 for beta chain variable domain of TCR clone 42872 (TRBV7-3, TRBJ2-1)
CASSPTGGGEVEQFF

SEQ ID NO: 85745 - protein, 15 aa, Homo sapiens
  CDR3 for alpha chain variable domain of TCR clone 42873 (TRAV13-2, TRAJ58)
CVNAQKETSGSRLTF

SEQ ID NO: 85746 - protein, 14 aa, Homo sapiens
  CDR3 for beta chain variable domain of TCR clone 42873 (TRBV7-2, TRBJ2-3)
CASRRGLAADTQYF

SEQ ID NO: 85747 - protein, 14 aa, Homo sapiens
  CDR3 for alpha chain variable domain of TCR clone 42874 (TRAV12-1, TRAJ9)
GVVTGYTGGFKTIF

SEQ ID NO: 85748 - protein, 13 aa, Homo sapiens
  CDR3 for beta chain variable domain of TCR clone 42874 (TRBV20-1, TRBJ1-1)
CSARAGGNTEAFF

SEQ ID NO: 85749 - protein, 13 aa, Homo sapiens
  CDR3 for alpha chain variable domain of TCR clone 42875 (TRAV27, TRAJ53)
CAGQGGSNYKLKF

SEQ ID NO: 85750 - protein, 13 aa, Homo sapiens
  CDR3 for beta chain variable domain of TCR clone 42875 (TRBV29-1, TRBJ1-1)
CSVESGFGTEAFF

SEQ ID NO: 85751 - protein, 13 aa, Homo sapiens
  CDR3 for alpha chain variable domain of TCR clone 42876 (TRAV21, TRAJ27)
CAALNTNAGKSAF

SEQ ID NO: 85752 - protein, 14 aa, Homo sapiens
  CDR3 for beta chain variable domain of TCR clone 42876 (TRBV27, TRBJ1-1)
CAGSLLSGLSEAFF

SEQ ID NO: 85753 - protein, 11 aa, Homo sapiens
  CDR3 for alpha chain variable domain of TCR clone 42877 (TRAV1-2, TRAJ40)
CAVPGTYKYIF

SEQ ID NO: 85754 - protein, 19 aa, Homo sapiens
  CDR3 for beta chain variable domain of TCR clone 42877 (TRBV29-1, TRBJ2-7)
SAALKSWGLAGAKSSTSGR

SEQ ID NO: 85755 - protein, 14 aa, Homo sapiens
  CDR3 for alpha chain variable domain of TCR clone 42878 (TRAV14/DV4, TRAJ42)
CPRGSLRGQGNLIF

SEQ ID NO: 85756 - protein, 18 aa, Homo sapiens
  CDR3 for beta chain variable domain of TCR clone 42878 (TRBV20-1, TRBJ2-3)
CSASGLAGGPGTTDTQYF

SEQ ID NO: 85757 - protein, 16 aa, Homo sapiens
  CDR3 for alpha chain variable domain of TCR clone 42879 (TRAV17, TRAJ53)
CATDALSGGSNYKLTL

SEQ ID NO: 85758 - protein, 13 aa, Homo sapiens
  CDR3 for beta chain variable domain of TCR clone 42879 (TRBV7-6, TRBJ2-3)
CASSLRSDNTQYF

SEQ ID NO: 85759 - protein, 16 aa, Homo sapiens
  CDR3 for alpha chain variable domain of TCR clone 42880 (TRAV16, TRAJ57)
CAPYLITQGGSEKLFF

SEQ ID NO: 85760 - protein, 17 aa, Homo sapiens
  CDR3 for beta chain variable domain of TCR clone 42880 (TRBV24-1, TRBJ2-4)
CATSDAEARGVRNIQYF

SEQ ID NO: 85761 - protein, 15 aa, Homo sapiens
  CDR3 for alpha chain variable domain of TCR clone 42881 (TRAV26-1, TRAJ29)
CIVRVEGSGITPLVF

SEQ ID NO: 85762 - protein, 15 aa, Homo sapiens
  CDR3 for beta chain variable domain of TCR clone 42881 (TRBV7-9, TRBJ1-5)
CASSQGHQPNQPQHF

SEQ ID NO: 85763 - protein, 16 aa, Homo sapiens
  CDR3 for alpha chain variable domain of TCR clone 42882 (TRAV26-1, TRAJ23)
CIVRVERYDQGGKLIF

SEQ ID NO: 85764 - protein, 15 aa, Homo sapiens
  CDR3 for beta chain variable domain of TCR clone 42882 (TRBV18, TRBJ2-7)
CASSPRGGKGYEQYF

SEQ ID NO: 85765 - protein, 13 aa, Homo sapiens
  CDR3 for alpha chain variable domain of TCR clone 42883 (TRAV13-2, TRAJ48)
CAEMDFGKEKLTF

SEQ ID NO: 85766 - protein, 15 aa, Homo sapiens
  CDR3 for beta chain variable domain of TCR clone 42883 (TRBV7-9, TRBJ1-6)
CASSSPGRGNSPLHF

SEQ ID NO: 85767 - protein, 13 aa, Homo sapiens
  CDR3 for alpha chain variable domain of TCR clone 42884 (TRAV17, TRAJ5)
CAPMDTGRRALTF

SEQ ID NO: 85768 - protein, 15 aa, Homo sapiens
  CDR3 for beta chain variable domain of TCR clone 42884 (TRBV6-6, TRBJ2-5)
CASSPEGGLEETQYF

SEQ ID NO: 85769 - protein, 14 aa, Homo sapiens
  CDR3 for alpha chain variable domain of TCR clone 42885 (TRAV38-1, TRAJ45)
CAYYSGGGADGLTF

SEQ ID NO: 85770 - protein, 13 aa, Homo sapiens
  CDR3 for beta chain variable domain of TCR clone 42885 (TRBV7-6, TRBJ2-3)
CASSLRSDNTQYF

SEQ ID NO: 85771 - protein, 12 aa, Homo sapiens
  CDR3 for alpha chain variable domain of TCR clone 42886 (TRAV13-1, TRAJ17)
CAARTAGNKLTF

SEQ ID NO: 85772 - protein, 14 aa, Homo sapiens
  CDR3 for beta chain variable domain of TCR clone 42886 (TRBV7-6, TRBJ1-1)
CQQPPGGANTEAFF

SEQ ID NO: 85773 - protein, 18 aa, Homo sapiens
  CDR3 for alpha chain variable domain of TCR clone 42887 (TRAV8-3, TRAJ4)
WVRDPTSNDPGGYNKLIF

SEQ ID NO: 85774 - protein, 13 aa, Homo sapiens
  CDR3 for beta chain variable domain of TCR clone 42887 (TRBV20-1, TRBJ1-2)
CSATGIQGSGCTF

SEQ ID NO: 85775 - protein, 15 aa, Homo sapiens
  CDR3 for alpha chain variable domain of TCR clone 42888 (TRAV3, TRAJ4)
FAVRDGTGGYNKLIF

SEQ ID NO: 85776 - protein, 16 aa, Homo sapiens
  CDR3 for beta chain variable domain of TCR clone 42888 (TRBV27, TRBJ2-2)
CASSSSGVSNTGELFF

SEQ ID NO: 85777 - protein, 15 aa, Homo sapiens
  CDR3 for alpha chain variable domain of TCR clone 42889 (TRAV13-1, TRAJ44)
CAASRNTGTASKPTF

SEQ ID NO: 85778 - protein, 14 aa, Homo sapiens
  CDR3 for beta chain variable domain of TCR clone 42889 (TRBV11-2, TRBJ1-2)
CASSLYRGNYGYTF

SEQ ID NO: 85779 - protein, 14 aa, Homo sapiens
  CDR3 for alpha chain variable domain of TCR clone 42890 (TRAV13-2, TRAJ22)
CADGTLGSARQLAF

SEQ ID NO: 85780 - protein, 15 aa, Homo sapiens
  CDR3 for beta chain variable domain of TCR clone 42890 (TRBV6-3, TRBJ2-7)
CASSSPGTVFYEQYF

SEQ ID NO: 85781 - protein, 14 aa, Homo sapiens
  CDR3 for alpha chain variable domain of TCR clone 42891 (TRAV12-1, TRAJ9)
CVVTGYTRGFKTIF

SEQ ID NO: 85782 - protein, 13 aa, Homo sapiens
  CDR3 for beta chain variable domain of TCR clone 42891 (TRBV20-1, TRBJ1-1)
CSARAGGNTEAFF

SEQ ID NO: 85783 - protein, 16 aa, Homo sapiens
  CDR3 for alpha chain variable domain of TCR clone 42892 (TRAV30, TRAJ24)
CGTEIVDADSWGKFQF

SEQ ID NO: 85784 - protein, 13 aa, Homo sapiens
  CDR3 for beta chain variable domain of TCR clone 42892 (TRBV10-2, TRBJ2-7)
CASGASGGYEQYF

SEQ ID NO: 85785 - protein, 17 aa, Homo sapiens
  CDR3 for alpha chain variable domain of TCR clone 42893 (TRAV23/DV6, TRAJ57)
CAASTTLSQGGSEKLVF

SEQ ID NO: 85786 - protein, 14 aa, Homo sapiens
  CDR3 for beta chain variable domain of TCR clone 42893 (TRBV25-1, TRBJ1-1)
CASTHLGGNTEAFF

SEQ ID NO: 85787 - protein, 19 aa, Homo sapiens
  CDR3 for alpha chain variable domain of TCR clone 42894 (TRAV29/DV5, TRAJ49)
CSVLLCSKLTVDTGNQSYF

SEQ ID NO: 85788 - protein, 17 aa, Homo sapiens
  CDR3 for beta chain variable domain of TCR clone 42894 (TRBV13, TRBJ2-3)
CASSLSRVAGGRNTQYF

SEQ ID NO: 85789 - protein, 13 aa, Homo sapiens
  CDR3 for alpha chain variable domain of TCR clone 42895 (TRAV2, TRAJ40)
CAVVTSGTYKYIF

SEQ ID NO: 85790 - protein, 14 aa, Homo sapiens
  CDR3 for beta chain variable domain of TCR clone 42895 (TRBV19, TRBJ2-1)
CASPTVVVSGEQFF

SEQ ID NO: 85791 - protein, 12 aa, Homo sapiens
  CDR3 for alpha chain variable domain of TCR clone 42896 (TRAV17, TRAJ4)
CATDGGYNKLIF

SEQ ID NO: 85792 - protein, 13 aa, Homo sapiens
  CDR3 for beta chain variable domain of TCR clone 42896 (TRBV29-1, TRBJ2-2)
CSTTWVNTGELFF

SEQ ID NO: 85793 - protein, 15 aa, Homo sapiens
  CDR3 for alpha chain variable domain of TCR clone 42897 (TRAV20, TRAJ53)
CAVQASGGSKYKLTF

SEQ ID NO: 85794 - protein, 12 aa, Homo sapiens
  CDR3 for beta chain variable domain of TCR clone 42897 (TRBV7-8, TRBJ2-7)
CASSLGDREQYF

SEQ ID NO: 85795 - protein, 13 aa, Homo sapiens
  CDR3 for alpha chain variable domain of TCR clone 42898 (TRAV13-2, TRAJ48)
CAEMDFGNEKLTF

SEQ ID NO: 85796 - protein, 15 aa, Homo sapiens
  CDR3 for beta chain variable domain of TCR clone 42898 (TRBV7-9, TRBJ1-6)
CAISSPGRGNSPLHF

SEQ ID NO: 85797 - protein, 12 aa, Homo sapiens
  CDR3 for alpha chain variable domain of TCR clone 42899 (TRAV36/DV7, TRAJ54)
CAVVRGAPKLVF

SEQ ID NO: 85798 - protein, 14 aa, Homo sapiens
  CDR3 for beta chain variable domain of TCR clone 42899 (TRBV7-3, TRBJ1-1)
CASSLKGGNTEAFF

SEQ ID NO: 85799 - protein, 15 aa, Homo sapiens
  CDR3 for alpha chain variable domain of TCR clone 42900 (TRAV8-3, TRAJ11)
CAVGLLNSGYSTLTF

SEQ ID NO: 85800 - protein, 16 aa, Homo sapiens
  CDR3 for beta chain variable domain of TCR clone 42900 (TRBV7-9, TRBJ1-2)
CASSLCFSSGEDGYTF

SEQ ID NO: 85801 - protein, 14 aa, Homo sapiens
  CDR3 for alpha chain variable domain of TCR clone 42901 (TRAV12-3, TRAJ37)
CVSEGSSNTGKLIF

SEQ ID NO: 85802 - protein, 14 aa, Homo sapiens
  CDR3 for beta chain variable domain of TCR clone 42901 (TRBV20-1, TRBJ1-1)
CSAQTRIGGTEALF

SEQ ID NO: 85803 - protein, 14 aa, Homo sapiens
  CDR3 for alpha chain variable domain of TCR clone 42902 (TRAV38-1, TRAJ43)
CAFMKHNNNNEMRF

SEQ ID NO: 85804 - protein, 17 aa, Homo sapiens
  CDR3 for beta chain variable domain of TCR clone 42902 (TRBV7-7, TRBJ1-4)
CASSLVGQGASNEKLFF

SEQ ID NO: 85805 - protein, 10 aa, Homo sapiens
  CDR3 for alpha chain variable domain of TCR clone 42903 (TRAV13-1, TRAJ30)
CAARDDKIIF

SEQ ID NO: 85806 - protein, 15 aa, Homo sapiens
  CDR3 for beta chain variable domain of TCR clone 42903 (TRBV7-9, TRBJ1-2)
CASSPDREPNYGYTF

SEQ ID NO: 85807 - protein, 15 aa, Homo sapiens
  CDR3 for alpha chain variable domain of TCR clone 42904 (TRAV26-1, TRAJ29)
CIVRVEGSGNTPIVF

SEQ ID NO: 85808 - protein, 15 aa, Homo sapiens
  CDR3 for beta chain variable domain of TCR clone 42904 (TRBV7-9, TRBJ1-5)
RASSQGHQPNQPQHF

SEQ ID NO: 85809 - protein, 13 aa, Homo sapiens
  CDR3 for alpha chain variable domain of TCR clone 42905 (TRAV8-3, TRAJ28)
CAVGAVGSYQLTF

SEQ ID NO: 85810 - protein, 15 aa, Homo sapiens
  CDR3 for beta chain variable domain of TCR clone 42905 (TRBV7-9, TRBJ1-5)
CASSQGHQPNQPQQF

SEQ ID NO: 85811 - protein, 12 aa, Homo sapiens
  CDR3 for alpha chain variable domain of TCR clone 42906 (TRAV16, TRAJ49)
CALNEGGNQLYF

SEQ ID NO: 85812 - protein, 14 aa, Homo sapiens
  CDR3 for beta chain variable domain of TCR clone 42906 (TRBV7-9, TRBJ2-1)
CASRPTGLRNEQFF

SEQ ID NO: 85813 - protein, 17 aa, Homo sapiens
  CDR3 for alpha chain variable domain of TCR clone 42907 (TRAV3, TRAJ38)
CAVRDCPNAGNNRKLIW

SEQ ID NO: 85814 - protein, 14 aa, Homo sapiens
  CDR3 for beta chain variable domain of TCR clone 42907 (TRBV5-5, TRBJ1-5)
CASSGQGVDQPQHF

SEQ ID NO: 85815 - protein, 12 aa, Homo sapiens
  CDR3 for alpha chain variable domain of TCR clone 42908 (TRAV27, TRAJ9)
CAGESGGFKTIF

SEQ ID NO: 85816 - protein, 13 aa, Homo sapiens
  CDR3 for beta chain variable domain of TCR clone 42908 (TRBV19, TRBJ1-3)
CASRLSLGNTIYF

SEQ ID NO: 85817 - protein, 15 aa, Homo sapiens
  CDR3 for alpha chain variable domain of TCR clone 42909 (TRAV20, TRAJ39)
CAVQALLVAGNMLTF

SEQ ID NO: 85818 - protein, 13 aa, Homo sapiens
  CDR3 for beta chain variable domain of TCR clone 42909 (TRBV10-3, TRBJ2-7)
CASKLAVDYEQYF

SEQ ID NO: 85819 - protein, 11 aa, Homo sapiens
  CDR3 for alpha chain variable domain of TCR clone 42910 (TRAV21, TRAJ34)
CAVTNTDKLIF

SEQ ID NO: 85820 - protein, 17 aa, Homo sapiens
  CDR3 for beta chain variable domain of TCR clone 42910 (TRBV7-8, TRBJ2-6)
CASSAGTGGAGANVLTF

SEQ ID NO: 85821 - protein, 15 aa, Homo sapiens
  CDR3 for alpha chain variable domain of TCR clone 42911 (TRAV3, TRAJ5)
CAVRDLDTGKRALTF

SEQ ID NO: 85822 - protein, 13 aa, Homo sapiens
  CDR3 for beta chain variable domain of TCR clone 42911 (TRBV12-4, TRBJ2-7)
CASSPTETYEQYF

SEQ ID NO: 85823 - protein, 15 aa, Homo sapiens
  CDR3 for alpha chain variable domain of TCR clone 42912 (TRAV12-3, TRAJ27)
CAMRAYNTNAGKSPF

SEQ ID NO: 85824 - protein, 13 aa, Homo sapiens
  CDR3 for beta chain variable domain of TCR clone 42912 (TRBV11-2, TRBJ2-5)
CASSRGPSETQYF

SEQ ID NO: 85825 - protein, 12 aa, Homo sapiens
  CDR3 for alpha chain variable domain of TCR clone 42913 (TRAV20, TRAJ33)
CAVRGSNYQLIW

SEQ ID NO: 85826 - protein, 13 aa, Homo sapiens
  CDR3 for beta chain variable domain of TCR clone 42913 (TRBV4-3, TRBJ1-1)
CASSPTENTEAFF

SEQ ID NO: 85827 - protein, 13 aa, Homo sapiens
  CDR3 for alpha chain variable domain of TCR clone 42914 (TRAV8-6, TRAJ21)
CAVSPSSLNKFYF

SEQ ID NO: 85828 - protein, 14 aa, Homo sapiens
  CDR3 for beta chain variable domain of TCR clone 42914 (TRBV7-9, TRBJ2-5)
CASSLDTAQKTQYF

SEQ ID NO: 85829 - protein, 12 aa, Homo sapiens
  CDR3 for alpha chain variable domain of TCR clone 42915 (TRAV12-1, TRAJ40)
CVFYSGTYKYIF

SEQ ID NO: 85830 - protein, 15 aa, Homo sapiens
  CDR3 for beta chain variable domain of TCR clone 42915 (TRBV7-2, TRBJ2-3)
CASSSTGLETDTQYF

SEQ ID NO: 85831 - protein, 16 aa, Homo sapiens
  CDR3 for alpha chain variable domain of TCR clone 42916 (TRAV14/DV4, TRAJ20)
CAMREGRSRDDYKLSF

SEQ ID NO: 85832 - protein, 14 aa, Homo sapiens
  CDR3 for beta chain variable domain of TCR clone 42916 (TRBV20-1, TRBJ1-1)
CSAQTRIGGTEAFF

SEQ ID NO: 85833 - protein, 11 aa, Homo sapiens
  CDR3 for alpha chain variable domain of TCR clone 42917 (TRAV4, TRAJ20)
CLVGDKVTTTS

SEQ ID NO: 85834 - protein, 13 aa, Homo sapiens
  CDR3 for beta chain variable domain of TCR clone 42917 (TRBV27, TRBJ1-4)
CASSLMGDEKLFF

SEQ ID NO: 85835 - protein, 12 aa, Homo sapiens
  CDR3 for alpha chain variable domain of TCR clone 42918 (TRAV4, TRAJ26)
CLVGDYGQNFVF

SEQ ID NO: 85836 - protein, 16 aa, Homo sapiens
  CDR3 for beta chain variable domain of TCR clone 42918 (TRBV7-2, TRBJ1-2)
CASSSNQDRRGNGYTF

SEQ ID NO: 85837 - protein, 13 aa, Homo sapiens
  CDR3 for alpha chain variable domain of TCR clone 42919 (TRAV3, TRAJ21)
CAVREPDFNKFYF

SEQ ID NO: 85838 - protein, 18 aa, Homo sapiens
  CDR3 for beta chain variable domain of TCR clone 42919 (TRBV20-1, TRBJ2-3)
CSASGLAGGPGTTDTQYF

SEQ ID NO: 85839 - protein, 14 aa, Homo sapiens
  CDR3 for alpha chain variable domain of TCR clone 42920 (TRAV2, TRAJ37)
CAVEDQGNTGKLIF

SEQ ID NO: 85840 - protein, 14 aa, Homo sapiens
  CDR3 for beta chain variable domain of TCR clone 42920 (TRBV18, TRBJ2-1)
CASPPQGRFNEQFF

SEQ ID NO: 85841 - protein, 18 aa, Homo sapiens
  CDR3 for alpha chain variable domain of TCR clone 42921 (TRAV21, TRAJ52)
CAVRPSPAGGTSYGKLTF

SEQ ID NO: 85842 - protein, 13 aa, Homo sapiens
  CDR3 for beta chain variable domain of TCR clone 42921 (TRBV29-1, TRBJ2-2)
RSVYREDTGELFF

SEQ ID NO: 85843 - protein, 17 aa, Homo sapiens
  CDR3 for alpha chain variable domain of TCR clone 42922 (TRAV19, TRAJ28)
CALSEASSGAGSYQLTF

SEQ ID NO: 85844 - protein, 15 aa, Homo sapiens
  CDR3 for beta chain variable domain of TCR clone 42922 (TRBV29-1, TRBJ2-7)
CSVEFFDRGSYEQYF

SEQ ID NO: 85845 - protein, 13 aa, Homo sapiens
  CDR3 for alpha chain variable domain of TCR clone 42923 (TRAV2, TRAJ15)
CAVASQAVTALIF

SEQ ID NO: 85846 - protein, 16 aa, Homo sapiens
  CDR3 for beta chain variable domain of TCR clone 42923 (TRBV5-1, TRBJ1-1)
CASSSGGNSLNTEAFF

SEQ ID NO: 85847 - protein, 11 aa, Homo sapiens
  CDR3 for alpha chain variable domain of TCR clone 42924 (TRAV3, TRAJ21)
CAVGNFNRFYF

SEQ ID NO: 85848 - protein, 17 aa, Homo sapiens
  CDR3 for beta chain variable domain of TCR clone 42924 (TRBV24-1, TRBJ2-1)
CATSDVSTSGTYNEQFF

SEQ ID NO: 85849 - protein, 13 aa, Homo sapiens
  CDR3 for alpha chain variable domain of TCR clone 42925 (TRAV3, TRAJ13)
CAVRDGGYQKVTF

SEQ ID NO: 85850 - protein, 16 aa, Homo sapiens
  CDR3 for beta chain variable domain of TCR clone 42925 (TRBV28, TRBJ2-5)
CASSFSPAGGWETQYF

SEQ ID NO: 85851 - protein, 15 aa, Homo sapiens
  CDR3 for alpha chain variable domain of TCR clone 42926 (TRAV3, TRAJ32)
CAVSSYGGATTKLIF

SEQ ID NO: 85852 - protein, 13 aa, Homo sapiens
  CDR3 for beta chain variable domain of TCR clone 42926 (TRBV20-1, TRBJ2-7)
CSARPSTNYEQYF

SEQ ID NO: 85853 - protein, 14 aa, Homo sapiens
  CDR3 for alpha chain variable domain of TCR clone 42927 (TRAV12-3, TRAJ10)
SHLPLTGGGNKLTF

SEQ ID NO: 85854 - protein, 14 aa, Homo sapiens
  CDR3 for beta chain variable domain of TCR clone 42927 (TRBV6-1, TRBJ1-3)
CACVQGGGGNTIYF

SEQ ID NO: 85855 - protein, 16 aa, Homo sapiens
  CDR3 for alpha chain variable domain of TCR clone 42928 (TRAV13-2, TRAJ32)
CAENMNYGGSTNKLIF

SEQ ID NO: 85856 - protein, 14 aa, Homo sapiens
  CDR3 for beta chain variable domain of TCR clone 42928 (TRBV15, TRBJ2-5)
CATSSTGYQETQYF

SEQ ID NO: 85857 - protein, 17 aa, Homo sapiens
  CDR3 for alpha chain variable domain of TCR clone 42929 (TRAV1-2, TRAJ27)
CAVRDKTGDTNAGKSTF

SEQ ID NO: 85858 - protein, 15 aa, Homo sapiens
  CDR3 for beta chain variable domain of TCR clone 42929 (TRBV19, TRBJ1-1)
CASTSGQIQNTEAFF

SEQ ID NO: 85859 - protein, 13 aa, Homo sapiens
  CDR3 for alpha chain variable domain of TCR clone 42930 (TRAV8-6, TRAJ21)
FAVSPSSLNKFYF

SEQ ID NO: 85860 - protein, 14 aa, Homo sapiens
  CDR3 for beta chain variable domain of TCR clone 42930 (TRBV7-9, TRBJ2-5)
CASSLDTAQETQYF

SEQ ID NO: 85861 - protein, 15 aa, Homo sapiens
  CDR3 for alpha chain variable domain of TCR clone 42931 (TRAV13-1, TRAJ44)
CAASRGDGTASKLTF

SEQ ID NO: 85862 - protein, 14 aa, Homo sapiens
  CDR3 for beta chain variable domain of TCR clone 42931 (TRBV7-2, TRBJ2-5)
CASSPRGSSETQYF

SEQ ID NO: 85863 - protein, 12 aa, Homo sapiens
  CDR3 for alpha chain variable domain of TCR clone 42932 (TRAV21, TRAJ33)
CAKMDSIYQLIW

SEQ ID NO: 85864 - protein, 14 aa, Homo sapiens
  CDR3 for beta chain variable domain of TCR clone 42932 (TRBV2, TRBJ2-7)
CASSLTSGGYEQYF

SEQ ID NO: 85865 - protein, 14 aa, Homo sapiens
  CDR3 for alpha chain variable domain of TCR clone 42933 (TRAV12-2, TRAJ13)
CAVKKTGGYQKVTF

SEQ ID NO: 85866 - protein, 14 aa, Homo sapiens
  CDR3 for beta chain variable domain of TCR clone 42933 (TRBV19, TRBJ2-7)
CASSIRLGDHEQYF

SEQ ID NO: 85867 - protein, 15 aa, Homo sapiens
  CDR3 for alpha chain variable domain of TCR clone 42934 (TRAV3, TRAJ3)
CAVRDRDSIASKIIF

SEQ ID NO: 85868 - protein, 18 aa, Homo sapiens
  CDR3 for beta chain variable domain of TCR clone 42934 (TRBV25-1, TRBJ1-2)
CASSGLQNGQGLIFGYTF

SEQ ID NO: 85869 - protein, 11 aa, Homo sapiens
  CDR3 for alpha chain variable domain of TCR clone 42935 (TRAV3, TRAJ21)
CAVGNFNKLYF

SEQ ID NO: 85870 - protein, 16 aa, Homo sapiens
  CDR3 for beta chain variable domain of TCR clone 42935 (TRBV19, TRBJ2-1)
CASSKAGPSSYNGQFF

SEQ ID NO: 85871 - protein, 12 aa, Homo sapiens
  CDR3 for alpha chain variable domain of TCR clone 42936 (TRAV2, TRAJ8)
CAVGQGFQKLVF

SEQ ID NO: 85872 - protein, 15 aa, Homo sapiens
  CDR3 for beta chain variable domain of TCR clone 42936 (TRBV20-1, TRBJ1-1)
CSASRGVTGNTEAFF

SEQ ID NO: 85873 - protein, 14 aa, Homo sapiens
  CDR3 for alpha chain variable domain of TCR clone 42937 (TRAV12-2, TRAJ40)
CAVKIPSGTYKYIF

SEQ ID NO: 85874 - protein, 13 aa, Homo sapiens
  CDR3 for beta chain variable domain of TCR clone 42937 (TRBV2, TRBJ1-1)
CASRWTVNTEAFF

SEQ ID NO: 85875 - protein, 11 aa, Homo sapiens
  CDR3 for alpha chain variable domain of TCR clone 42938 (TRAV1-2, TRAJ40)
CAVPGTYKYIF

SEQ ID NO: 85876 - protein, 19 aa, Homo sapiens
  CDR3 for beta chain variable domain of TCR clone 42938 (TRBV29-1, TRBJ2-7)
SAALKSWGLAGATSSTSGR

SEQ ID NO: 85877 - protein, 12 aa, Homo sapiens
  CDR3 for alpha chain variable domain of TCR clone 42939 (TRAV27, TRAJ35)
CAGADFGKVLHC

SEQ ID NO: 85878 - protein, 16 aa, Homo sapiens
  CDR3 for beta chain variable domain of TCR clone 42939 (TRBV6-1, TRBJ2-1)
CASILRQGSSYNEQFF

SEQ ID NO: 85879 - protein, 16 aa, Homo sapiens
  CDR3 for alpha chain variable domain of TCR clone 42940 (TRAV1-2, TRAJ10)
CAVRGVLTGGGNKLTF

SEQ ID NO: 85880 - protein, 15 aa, Homo sapiens
  CDR3 for beta chain variable domain of TCR clone 42940 (TRBV7-9, TRBJ1-4)
CASSARTGGNEKLFF

SEQ ID NO: 85881 - protein, 15 aa, Homo sapiens
  CDR3 for alpha chain variable domain of TCR clone 42941 (TRAV8-3, TRAJ23)
CAVGDRYNQGGKLIL

SEQ ID NO: 85882 - protein, 22 aa, Homo sapiens
  CDR3 for beta chain variable domain of TCR clone 42941 (TRBV29-1, TRBJ2-5)
TVSNMSPEDSSIYLCSAGTQYF

SEQ ID NO: 85883 - protein, 14 aa, Homo sapiens
  CDR3 for alpha chain variable domain of TCR clone 42942 (TRAV12-3, TRAJ53)
CGATSGGSNYKLTF

SEQ ID NO: 85884 - protein, 13 aa, Homo sapiens
  CDR3 for beta chain variable domain of TCR clone 42942 (TRBV19, TRBJ1-5)
CDSSTQDGQPQHF

SEQ ID NO: 85885 - protein, 14 aa, Homo sapiens
  CDR3 for alpha chain variable domain of TCR clone 42943 (TRAV13-1, TRAJ20)
CAARPGSNDYKLSF

SEQ ID NO: 85886 - protein, 13 aa, Homo sapiens
  CDR3 for beta chain variable domain of TCR clone 42943 (TRBV20-1, TRBJ1-1)
CSTPPGGHTEAFF

SEQ ID NO: 85887 - protein, 17 aa, Homo sapiens
  CDR3 for alpha chain variable domain of TCR clone 42944 (TRAV26-2, TRAJ42)
CILRDVGYGGSQGNLIF

SEQ ID NO: 85888 - protein, 14 aa, Homo sapiens
  CDR3 for beta chain variable domain of TCR clone 42944 (TRBV25-1, TRBJ1-1)
CASTHLGGNTEAFF

SEQ ID NO: 85889 - protein, 16 aa, Homo sapiens
  CDR3 for alpha chain variable domain of TCR clone 42945 (TRAV21, TRAJ52)
CAVTNAGGTGYGKLTF

SEQ ID NO: 85890 - protein, 16 aa, Homo sapiens
  CDR3 for beta chain variable domain of TCR clone 42945 (TRBV2, TRBJ2-1)
CASSVGGSLSYNEQFF

SEQ ID NO: 85891 - protein, 13 aa, Homo sapiens
  CDR3 for alpha chain variable domain of TCR clone 42946 (TRAV17, TRAJ26)
CATVANYGQNFVF

SEQ ID NO: 85892 - protein, 16 aa, Homo sapiens
  CDR3 for beta chain variable domain of TCR clone 42946 (TRBV2, TRBJ2-1)
CASSVGGSLSYNEQFF

SEQ ID NO: 85893 - protein, 17 aa, Homo sapiens
  CDR3 for alpha chain variable domain of TCR clone 42947 (TRAV3, TRAJ4)
CAVRDIMFSSGYNKLIF

SEQ ID NO: 85894 - protein, 13 aa, Homo sapiens
  CDR3 for beta chain variable domain of TCR clone 42947 (TRBV28, TRBJ2-1)
CASSLIGRDEQFF

SEQ ID NO: 85895 - protein, 15 aa, Homo sapiens
  CDR3 for alpha chain variable domain of TCR clone 42948 (TRAV38-1, TRAJ37)
CGFIHGSGNTGKLIF

SEQ ID NO: 85896 - protein, 12 aa, Homo sapiens
  CDR3 for beta chain variable domain of TCR clone 42948 (TRBV7-9, TRBJ2-7)
CASSFGSYEQYF

SEQ ID NO: 85897 - protein, 14 aa, Homo sapiens
  CDR3 for alpha chain variable domain of TCR clone 42949 (TRAV12-2, TRAJ9)
CAVNALEGGFKTVF

SEQ ID NO: 85898 - protein, 16 aa, Homo sapiens
  CDR3 for beta chain variable domain of TCR clone 42949 (TRBV19, TRBJ1-6)
CASSVAPVAGNSPLHF

SEQ ID NO: 85899 - protein, 15 aa, Homo sapiens
  CDR3 for alpha chain variable domain of TCR clone 42950 (TRAV26-1, TRAJ29)
CIVRVEGSGNKPLVL

SEQ ID NO: 85900 - protein, 15 aa, Homo sapiens
  CDR3 for beta chain variable domain of TCR clone 42950 (TRBV7-9, TRBJ1-5)
CASSQGHQPNQPQHF

SEQ ID NO: 85901 - protein, 12 aa, Homo sapiens
  CDR3 for alpha chain variable domain of TCR clone 42951 (TRAV13-1, TRAJ21)
CAAKEGFNKFYF

SEQ ID NO: 85902 - protein, 13 aa, Homo sapiens
  CDR3 for beta chain variable domain of TCR clone 42951 (TRBV19, TRBJ2-7)
CASGPRQSYEQYF

SEQ ID NO: 85903 - protein, 14 aa, Homo sapiens
  CDR3 for alpha chain variable domain of TCR clone 42952 (TRAV26-1, TRAJ38)
CIADNAGNNRKLIW

SEQ ID NO: 85904 - protein, 13 aa, Homo sapiens
  CDR3 for beta chain variable domain of TCR clone 42952 (TRBV20-1, TRBJ1-1)
CSARGGVNTEAFF

SEQ ID NO: 85905 - protein, 13 aa, Homo sapiens
  CDR3 for alpha chain variable domain of TCR clone 42953 (TRAV35, TRAJ48)
CAGHEFGNEKLTF

SEQ ID NO: 85906 - protein, 14 aa, Homo sapiens
  CDR3 for beta chain variable domain of TCR clone 42953 (TRBV19, TRBJ2-1)
CASPTVVLSGEQFF

SEQ ID NO: 85907 - protein, 13 aa, Homo sapiens
  CDR3 for alpha chain variable domain of TCR clone 42954 (TRAV12-2, TRAJ18)
CAVRGSTLGRLYF

SEQ ID NO: 85908 - protein, 16 aa, Homo sapiens
  CDR3 for beta chain variable domain of TCR clone 42954 (TRBV5-1, TRBJ1-1)
CASSSGGNSLNTEAFF

SEQ ID NO: 85909 - protein, 14 aa, Homo sapiens
  CDR3 for alpha chain variable domain of TCR clone 42955 (TRAV1-2, TRAJ16)
CAVNRFSDGQKLLF

SEQ ID NO: 85910 - protein, 16 aa, Homo sapiens
  CDR3 for beta chain variable domain of TCR clone 42955 (TRBV20-1, TRBJ1-4)
CSAPGQGLLTNENLFF

SEQ ID NO: 85911 - protein, 13 aa, Homo sapiens
  CDR3 for alpha chain variable domain of TCR clone 42956 (TRAV12-3, TRAJ13)
CAMSSGGYQKVTF

SEQ ID NO: 85912 - protein, 16 aa, Homo sapiens
  CDR3 for beta chain variable domain of TCR clone 42956 (TRBV7-3, TRBJ2-2)
CASSLKRGTLSGELFF

SEQ ID NO: 85913 - protein, 15 aa, Homo sapiens
  CDR3 for alpha chain variable domain of TCR clone 42957 (TRAV3, TRAJ5)
CAVRDRKTGRRSLTF

SEQ ID NO: 85914 - protein, 15 aa, Homo sapiens
  CDR3 for beta chain variable domain of TCR clone 42957 (TRBV7-8, TRBJ2-1)
CASSLADSLYNEQFF

SEQ ID NO: 85915 - protein, 15 aa, Homo sapiens
  CDR3 for alpha chain variable domain of TCR clone 42958 (TRAV17, TRAJ23)
CTTDAEDNQGGKLIF

SEQ ID NO: 85916 - protein, 12 aa, Homo sapiens
  CDR3 for beta chain variable domain of TCR clone 42958 (TRBV2, TRBJ2-1)
CAKREGYNEQFF

SEQ ID NO: 85917 - protein, 15 aa, Homo sapiens
  CDR3 for alpha chain variable domain of TCR clone 42959 (TRAV12-2, TRAJ42)
CAVNSHGGSQGNLIF

SEQ ID NO: 85918 - protein, 15 aa, Homo sapiens
  CDR3 for beta chain variable domain of TCR clone 42959 (TRBV5-4, TRBJ2-5)
CAARDRGKEKETQYF

SEQ ID NO: 85919 - protein, 10 aa, Homo sapiens
  CDR3 for alpha chain variable domain of TCR clone 42960 (TRAV12-3, TRAJ49)
CAMNDDQFYF

SEQ ID NO: 85920 - protein, 13 aa, Homo sapiens
  CDR3 for beta chain variable domain of TCR clone 42960 (TRBV12-4, TRBJ1-1)
SASSPGTGFEAFF

SEQ ID NO: 85921 - protein, 11 aa, Homo sapiens
  CDR3 for alpha chain variable domain of TCR clone 42961 (TRAV12-3, TRAJ43)
CAMSVSNDMRF

SEQ ID NO: 85922 - protein, 13 aa, Homo sapiens
  CDR3 for beta chain variable domain of TCR clone 42961 (TRBV20-1, TRBJ1-1)
CSAPLGGSTEAFF

SEQ ID NO: 85923 - protein, 17 aa, Homo sapiens
  CDR3 for alpha chain variable domain of TCR clone 42962 (TRAV13-1, TRAJ52)
CAAGRNAGGTSYGKLTF

SEQ ID NO: 85924 - protein, 13 aa, Homo sapiens
  CDR3 for beta chain variable domain of TCR clone 42962 (TRBV7-2, TRBJ1-1)
CACNLKGAKVAFF

SEQ ID NO: 85925 - protein, 16 aa, Homo sapiens
  CDR3 for alpha chain variable domain of TCR clone 42963 (TRAV8-3, TRAJ8)
CAVPRDGNTGFQKLGF

SEQ ID NO: 85926 - protein, 14 aa, Homo sapiens
  CDR3 for beta chain variable domain of TCR clone 42963 (TRBV28, TRBJ1-1)
CASSESGRGTEAFF

SEQ ID NO: 85927 - protein, 12 aa, Homo sapiens
  CDR3 for alpha chain variable domain of TCR clone 42964 (TRAV12-3, TRAJ17)
CAMTLTGNKLTF

SEQ ID NO: 85928 - protein, 15 aa, Homo sapiens
  CDR3 for beta chain variable domain of TCR clone 42964 (TRBV11-2, TRBJ2-1)
CASSLGTSGLNEQFF

SEQ ID NO: 85929 - protein, 17 aa, Homo sapiens
  CDR3 for alpha chain variable domain of TCR clone 42965 (TRAV12-3, TRAJ6)
CTMSARGGAGGSYIPTF

SEQ ID NO: 85930 - protein, 12 aa, Homo sapiens
  CDR3 for beta chain variable domain of TCR clone 42965 (TRBV12-4, TRBJ2-3)
CASSTLPDTQYF

SEQ ID NO: 85931 - protein, 12 aa, Homo sapiens
  CDR3 for alpha chain variable domain of TCR clone 42966 (TRAV8-1, TRAJ26)
CAVNNYGQNFVF

SEQ ID NO: 85932 - protein, 15 aa, Homo sapiens
  CDR3 for beta chain variable domain of TCR clone 42966 (TRBV20-1, TRBJ1-1)
CSASWDRFPNTEAFF

SEQ ID NO: 85933 - protein, 14 aa, Homo sapiens
  CDR3 for alpha chain variable domain of TCR clone 42967 (TRAV8-3, TRAJ16)
CAVDRFSDGQKLLF

SEQ ID NO: 85934 - protein, 15 aa, Homo sapiens
  CDR3 for beta chain variable domain of TCR clone 42967 (TRBV7-7, TRBJ2-1)
CASSPGQGPYNEQFF

SEQ ID NO: 85935 - protein, 11 aa, Homo sapiens
  CDR3 for alpha chain variable domain of TCR clone 42968 (TRAV3, TRAJ21)
CAVGNFNKFYF

SEQ ID NO: 85936 - protein, 13 aa, Homo sapiens
  CDR3 for beta chain variable domain of TCR clone 42968 (TRBV20-1, TRBJ2-7)
CSADPGATYEQYF

SEQ ID NO: 85937 - protein, 11 aa, Homo sapiens
  CDR3 for alpha chain variable domain of TCR clone 42969 (TRAV3, TRAJ21)
CAVGNFNKFYF

SEQ ID NO: 85938 - protein, 12 aa, Homo sapiens
  CDR3 for beta chain variable domain of TCR clone 42969 (TRBV3-1, TRBJ2-2)
CASSLFPRELFF

SEQ ID NO: 85939 - protein, 12 aa, Homo sapiens
  CDR3 for alpha chain variable domain of TCR clone 42970 (TRAV29/DV5, TRAJ27)
CAASTNAGKSAF

SEQ ID NO: 85940 - protein, 13 aa, Homo sapiens
  CDR3 for beta chain variable domain of TCR clone 42970 (TRBV6-5, TRBJ2-7)
CASSYSGQYEQYF

SEQ ID NO: 85941 - protein, 16 aa, Homo sapiens
  CDR3 for alpha chain variable domain of TCR clone 42971 (TRAV3, TRAJ37)
CAVRGKGSGNTGKLIF

SEQ ID NO: 85942 - protein, 16 aa, Homo sapiens
  CDR3 for beta chain variable domain of TCR clone 42971 (TRBV2, TRBJ2-5)
CASSETQGVGEETQYF

SEQ ID NO: 85943 - protein, 13 aa, Homo sapiens
  CDR3 for alpha chain variable domain of TCR clone 42972 (TRAV22, TRAJ29)
CAVGGSGNTPLVF

SEQ ID NO: 85944 - protein, 13 aa, Homo sapiens
  CDR3 for beta chain variable domain of TCR clone 42972 (TRBV4-2, TRBJ1-1)
CASSQAGNTEAFS

SEQ ID NO: 85945 - protein, 14 aa, Homo sapiens
  CDR3 for alpha chain variable domain of TCR clone 42973 (TRAV38-1, TRAJ45)
CASHSGGGADGLTF

SEQ ID NO: 85946 - protein, 16 aa, Homo sapiens
  CDR3 for beta chain variable domain of TCR clone 42973 (TRBV27, TRBJ2-2)
CASSFRGLVRAGELFF

SEQ ID NO: 85947 - protein, 15 aa, Homo sapiens
  CDR3 for alpha chain variable domain of TCR clone 42974 (TRAV26-1, TRAJ23)
CIVRVAGYQGGKLIF

SEQ ID NO: 85948 - protein, 18 aa, Homo sapiens
  CDR3 for beta chain variable domain of TCR clone 42974 (TRBV28, TRBJ2-1)
CASSSTSGRANSYNGQFF

SEQ ID NO: 85949 - protein, 16 aa, Homo sapiens
  CDR3 for alpha chain variable domain of TCR clone 42975 (TRAV8-3, TRAJ10)
CAVGPGVTGGGDKLTF

SEQ ID NO: 85950 - protein, 13 aa, Homo sapiens
  CDR3 for beta chain variable domain of TCR clone 42975 (TRBV18, TRBJ1-1)
CASSPGPSGEAFF

SEQ ID NO: 85951 - protein, 12 aa, Homo sapiens
  CDR3 for alpha chain variable domain of TCR clone 42976 (TRAV2, TRAJ9)
CAVGAGGFKTIF

SEQ ID NO: 85952 - protein, 16 aa, Homo sapiens
  CDR3 for beta chain variable domain of TCR clone 42976 (TRBV13, TRBJ2-2)
CASSPRTGEHTGKLFF

SEQ ID NO: 85953 - protein, 15 aa, Homo sapiens
  CDR3 for alpha chain variable domain of TCR clone 42977 (TRAV26-1, TRAJ29)
CIVRVEGSGNTPLVF

SEQ ID NO: 85954 - protein, 15 aa, Homo sapiens
  CDR3 for beta chain variable domain of TCR clone 42977 (TRBV5-1, TRBJ2-2)
CASSSQGGNTGELFF

SEQ ID NO: 85955 - protein, 14 aa, Homo sapiens
  CDR3 for alpha chain variable domain of TCR clone 42978 (TRAV12-1, TRAJ30)
CVVSIGGRDYKIIF

SEQ ID NO: 85956 - protein, 14 aa, Homo sapiens
  CDR3 for beta chain variable domain of TCR clone 42978 (TRBV7-6, TRBJ2-3)
CASSLGTVTDTQYF

SEQ ID NO: 85957 - protein, 14 aa, Homo sapiens
  CDR3 for alpha chain variable domain of TCR clone 42979 (TRAV20, TRAJ10)
CAVRVEGGGNKLTF

SEQ ID NO: 85958 - protein, 18 aa, Homo sapiens
  CDR3 for beta chain variable domain of TCR clone 42979 (TRBV24-1, TRBJ2-1)
CATSDLMFLVRGVHEQFF

SEQ ID NO: 85959 - protein, 12 aa, Homo sapiens
  CDR3 for alpha chain variable domain of TCR clone 42980 (TRAV16, TRAJ10)
CSRTGGGNKLTF

SEQ ID NO: 85960 - protein, 12 aa, Homo sapiens
  CDR3 for beta chain variable domain of TCR clone 42980 (TRBV7-9, TRBJ2-7)
CASSIKREEQYF

SEQ ID NO: 85961 - protein, 17 aa, Homo sapiens
  CDR3 for alpha chain variable domain of TCR clone 42981 (TRAV8-4, TRAJ11)
CAVSDRGENPGYSTLTF

SEQ ID NO: 85962 - protein, 14 aa, Homo sapiens
  CDR3 for beta chain variable domain of TCR clone 42981 (TRBV20-1, TRBJ2-1)
CSPNDEASYNEQFF

SEQ ID NO: 85963 - protein, 16 aa, Homo sapiens
  CDR3 for alpha chain variable domain of TCR clone 42982 (TRAV30, TRAJ24)
CGTEIVDADSWGKFQF

SEQ ID NO: 85964 - protein, 14 aa, Homo sapiens
  CDR3 for beta chain variable domain of TCR clone 42982 (TRBV7-9, TRBJ1-1)
CASSLGHGNTEAFF

SEQ ID NO: 85965 - protein, 14 aa, Homo sapiens
  CDR3 for alpha chain variable domain of TCR clone 42983 (TRAV1-2, TRAJ16)
RAVNRFSDGQKLLF

SEQ ID NO: 85966 - protein, 12 aa, Homo sapiens
  CDR3 for beta chain variable domain of TCR clone 42983 (TRBV11-2, TRBJ2-2)
CASSLGGGELFF

SEQ ID NO: 85967 - protein, 13 aa, Homo sapiens
  CDR3 for alpha chain variable domain of TCR clone 42984 (TRAV2, TRAJ40)
CAVVTSGTYKYIF

SEQ ID NO: 85968 - protein, 13 aa, Homo sapiens
  CDR3 for beta chain variable domain of TCR clone 42984 (TRBV4-1, TRBJ2-7)
CASSQGQAYEQYF

SEQ ID NO: 85969 - protein, 14 aa, Homo sapiens
  CDR3 for alpha chain variable domain of TCR clone 42985 (TRAV12-1, TRAJ17)
CVVNYKAAGNKLTF

SEQ ID NO: 85970 - protein, 18 aa, Homo sapiens
  CDR3 for beta chain variable domain of TCR clone 42985 (TRBV12-4, TRBJ2-2)
CASSLVAGTRGRTGELFF

SEQ ID NO: 85971 - protein, 11 aa, Homo sapiens
  CDR3 for alpha chain variable domain of TCR clone 42986 (TRAV3, TRAJ21)
CAVGNFNKFYF

SEQ ID NO: 85972 - protein, 16 aa, Homo sapiens
  CDR3 for beta chain variable domain of TCR clone 42986 (TRBV19, TRBJ2-1)
CASSKAGPSSNNEQFF

SEQ ID NO: 85973 - protein, 22 aa, Homo sapiens
  CDR3 for alpha chain variable domain of TCR clone 42987 (TRAV26-1, TRAJ38)
CIASSNAGNNHIQNPDPAVYQL

SEQ ID NO: 85974 - protein, 12 aa, Homo sapiens
  CDR3 for beta chain variable domain of TCR clone 42987 (TRBV5-8, TRBJ1-2)
CASSFGVYGYTF

SEQ ID NO: 85975 - protein, 12 aa, Homo sapiens
  CDR3 for alpha chain variable domain of TCR clone 42988 (TRAV2, TRAJ9)
CAVGAGGFKTIF

SEQ ID NO: 85976 - protein, 11 aa, Homo sapiens
  CDR3 for beta chain variable domain of TCR clone 42988 (TRBV13, TRBJ2-2)
CASSPRTGSTP

SEQ ID NO: 85977 - protein, 14 aa, Homo sapiens
  CDR3 for alpha chain variable domain of TCR clone 42989 (TRAV1-2, TRAJ16)
CAVNRFSDGQKLLF

SEQ ID NO: 85978 - protein, 14 aa, Homo sapiens
  CDR3 for beta chain variable domain of TCR clone 42989 (TRBV7-3, TRBJ1-1)
CASSLGTEYTEAFF

SEQ ID NO: 85979 - protein, 17 aa, Homo sapiens
  CDR3 for alpha chain variable domain of TCR clone 42990 (TRAV3, TRAJ42)
CAVRDRDYGGSQGNLIF

SEQ ID NO: 85980 - protein, 15 aa, Homo sapiens
  CDR3 for beta chain variable domain of TCR clone 42990 (TRBV11-3, TRBJ2-3)
CASLKDGREGDTQYF

SEQ ID NO: 85981 - protein, 17 aa, Homo sapiens
  CDR3 for alpha chain variable domain of TCR clone 42991 (TRAV3, TRAJ6)
CAVRDGPRAGGSYILTF

SEQ ID NO: 85982 - protein, 20 aa, Homo sapiens
  CDR3 for beta chain variable domain of TCR clone 42991 (TRBV28, TRBJ2-1)
CASTPIGRSPGLAGGNEQSF

SEQ ID NO: 85983 - protein, 11 aa, Homo sapiens
  CDR3 for alpha chain variable domain of TCR clone 42992 (TRAV2, TRAJ23)
CAVETRGMLIF

SEQ ID NO: 85984 - protein, 14 aa, Homo sapiens
  CDR3 for beta chain variable domain of TCR clone 42992 (TRBV2, TRBJ2-3)
CASSEGQNTDTQYF

SEQ ID NO: 85985 - protein, 11 aa, Homo sapiens
  CDR3 for alpha chain variable domain of TCR clone 42993 (TRAV21, TRAJ48)
CAVDGNEKLTS

SEQ ID NO: 85986 - protein, 16 aa, Homo sapiens
  CDR3 for beta chain variable domain of TCR clone 42993 (TRBV12-4, TRBJ1-5)
CASSSGPRGSNQPQHF

SEQ ID NO: 85987 - protein, 23 aa, Homo sapiens
  CDR3 for alpha chain variable domain of TCR clone 42994 (TRAV8-6, )
CAVRDAGNNHIQNPDPAVYQLRD

SEQ ID NO: 85988 - protein, 15 aa, Homo sapiens
  CDR3 for beta chain variable domain of TCR clone 42994 (TRBV4-1, TRBJ2-2)
CASSEGQGITGELFF

SEQ ID NO: 85989 - protein, 11 aa, Homo sapiens
  CDR3 for alpha chain variable domain of TCR clone 42995 (TRAV12-3, TRAJ49)
CAANTGNQFYF

SEQ ID NO: 85990 - protein, 15 aa, Homo sapiens
  CDR3 for beta chain variable domain of TCR clone 42995 (TRBV6-6, TRBJ2-7)
CASSYSYGGSYEQYF

SEQ ID NO: 85991 - protein, 14 aa, Homo sapiens
  CDR3 for alpha chain variable domain of TCR clone 42996 (TRAV13-1, TRAJ44)
CAAKATGPASKLTF

SEQ ID NO: 85992 - protein, 22 aa, Homo sapiens
  CDR3 for beta chain variable domain of TCR clone 42996 (TRBV19, TRBJ2-1)
CASSVRDRVTGTSGRIYNEQFF

SEQ ID NO: 85993 - protein, 17 aa, Homo sapiens
  CDR3 for alpha chain variable domain of TCR clone 42997 (TRAV3, TRAJ38)
CAVRDCLNASNNRKLIW

SEQ ID NO: 85994 - protein, 14 aa, Homo sapiens
  CDR3 for beta chain variable domain of TCR clone 42997 (TRBV5-5, TRBJ1-5)
CASSGQGVDQPQHF

SEQ ID NO: 85995 - protein, 14 aa, Homo sapiens
  CDR3 for alpha chain variable domain of TCR clone 42998 (TRAV20, TRAJ10)
CAVRVEGGGNKLTF

SEQ ID NO: 85996 - protein, 18 aa, Homo sapiens
  CDR3 for beta chain variable domain of TCR clone 42998 (TRBV24-1, TRBJ2-1)
CATSDLMFLGRGVHEQFL

SEQ ID NO: 85997 - protein, 13 aa, Homo sapiens
  CDR3 for alpha chain variable domain of TCR clone 42999 (TRAV2, TRAJ40)
CAVVTSGTYKYIF

SEQ ID NO: 85998 - protein, 16 aa, Homo sapiens
  CDR3 for beta chain variable domain of TCR clone 42999 (TRBV7-9, TRBJ1-3)
CASSLGAGSSGNTIYF

SEQ ID NO: 85999 - protein, 17 aa, Homo sapiens
  CDR3 for alpha chain variable domain of TCR clone 43000 (TRAV3, TRAJ42)
CAVRDRDYGGSQGNLIF

SEQ ID NO: 86000 - protein, 13 aa, Homo sapiens
  CDR3 for beta chain variable domain of TCR clone 43000 (TRBV20-1, TRBJ1-1)
CSAPLGGGTEAFF

SEQ ID NO: 86001 - protein, 13 aa, Homo sapiens
  CDR3 for alpha chain variable domain of TCR clone 43001 (TRAV13-1, TRAJ10)
CAATTGGGNKLTF

SEQ ID NO: 86002 - protein, 14 aa, Homo sapiens
  CDR3 for beta chain variable domain of TCR clone 43001 (TRBV12-4, TRBJ2-7)
CASSPAGLKYEQYF

SEQ ID NO: 86003 - protein, 14 aa, Homo sapiens
  CDR3 for alpha chain variable domain of TCR clone 43002 (TRAV26-1, TRAJ22)
CIVRVYGSARQLPF

SEQ ID NO: 86004 - protein, 17 aa, Homo sapiens
  CDR3 for beta chain variable domain of TCR clone 43002 (TRBV7-3, TRBJ2-3)
CASSPGGLAGFGDTQYF

SEQ ID NO: 86005 - protein, 12 aa, Homo sapiens
  CDR3 for alpha chain variable domain of TCR clone 43003 (TRAV21, TRAJ11)
CAATPGYSTLTF

SEQ ID NO: 86006 - protein, 14 aa, Homo sapiens
  CDR3 for beta chain variable domain of TCR clone 43003 (TRBV20-1, TRBJ2-7)
CSAPELAGVGEQYF

SEQ ID NO: 86007 - protein, 12 aa, Homo sapiens
  CDR3 for alpha chain variable domain of TCR clone 43004 (TRAV13-2, TRAJ23)
CAARHRGGKLIF

SEQ ID NO: 86008 - protein, 16 aa, Homo sapiens
  CDR3 for beta chain variable domain of TCR clone 43004 (TRBV20-1, TRBJ1-4)
CSAPGQGLLTNEKLFF

SEQ ID NO: 86009 - protein, 14 aa, Homo sapiens
  CDR3 for alpha chain variable domain of TCR clone 43005 (TRAV12-3, TRAJ10)
SHLPLTGGGNKLTF

SEQ ID NO: 86010 - protein, 13 aa, Homo sapiens
  CDR3 for beta chain variable domain of TCR clone 43005 (TRBV7-9, TRBJ2-3)
RASSPGSTDTQYF

SEQ ID NO: 86011 - protein, 13 aa, Homo sapiens
  CDR3 for alpha chain variable domain of TCR clone 43006 (TRAV6, TRAJ16)
CALDDSDGQKLLF

SEQ ID NO: 86012 - protein, 16 aa, Homo sapiens
  CDR3 for beta chain variable domain of TCR clone 43006 (TRBV12-4, TRBJ1-6)
CASNLQGKGSPLHLGT

SEQ ID NO: 86013 - protein, 14 aa, Homo sapiens
  CDR3 for alpha chain variable domain of TCR clone 43007 (TRAV17, TRAJ57)
CATDPQGGAEKLVF

SEQ ID NO: 86014 - protein, 16 aa, Homo sapiens
  CDR3 for beta chain variable domain of TCR clone 43007 (TRBV20-1, TRBJ1-4)
CSAPGQGLLTNEKLFF

SEQ ID NO: 86015 - protein, 13 aa, Homo sapiens
  CDR3 for alpha chain variable domain of TCR clone 43008 (TRAV16, TRAJ34)
CALSPNNTDKLIF

SEQ ID NO: 86016 - protein, 17 aa, Homo sapiens
  CDR3 for beta chain variable domain of TCR clone 43008 (TRBV5-1, TRBJ2-1)
CASSTGTSGYSYNEQFF

SEQ ID NO: 86017 - protein, 16 aa, Homo sapiens
  CDR3 for alpha chain variable domain of TCR clone 43009 (TRAV30, TRAJ24)
CGTEIVDADSWGKFQF

SEQ ID NO: 86018 - protein, 19 aa, Homo sapiens
  CDR3 for beta chain variable domain of TCR clone 43009 (TRBV25-1, TRBJ2-2)
CAILVYRVDRGRRTGELFF

SEQ ID NO: 86019 - protein, 17 aa, Homo sapiens
  CDR3 for alpha chain variable domain of TCR clone 43010 (TRAV23/DV6, TRAJ57)
CAARSTLSQGGSEKLVF

SEQ ID NO: 86020 - protein, 14 aa, Homo sapiens
  CDR3 for beta chain variable domain of TCR clone 43010 (TRBV25-1, TRBJ1-1)
CASTHLGGNTEAFF

SEQ ID NO: 86021 - protein, 12 aa, Homo sapiens
  CDR3 for alpha chain variable domain of TCR clone 43011 (TRAV30, TRAJ43)
CGTEERGNDMRF

SEQ ID NO: 86022 - protein, 15 aa, Homo sapiens
  CDR3 for beta chain variable domain of TCR clone 43011 (TRBV28, TRBJ2-1)
CASSIIAGGRSEQFF

SEQ ID NO: 86023 - protein, 18 aa, Homo sapiens
  CDR3 for alpha chain variable domain of TCR clone 43012 (TRAV12-2, )
CAVEDIQNPDPAVYQLRD

SEQ ID NO: 86024 - protein, 16 aa, Homo sapiens
  CDR3 for beta chain variable domain of TCR clone 43012 (TRBV6-1, TRBJ1-2)
CASSRAWQGRSHGYTF

SEQ ID NO: 86025 - protein, 15 aa, Homo sapiens
  CDR3 for alpha chain variable domain of TCR clone 43013 (TRAV21, TRAJ40)
CAVRPRTSGTYKYIF

SEQ ID NO: 86026 - protein, 13 aa, Homo sapiens
  CDR3 for beta chain variable domain of TCR clone 43013 (TRBV7-2, TRBJ2-2)
CASSSVRAGELFF

SEQ ID NO: 86027 - protein, 11 aa, Homo sapiens
  CDR3 for alpha chain variable domain of TCR clone 43014 (TRAV12-3, TRAJ27)
CAMANAGKATF

SEQ ID NO: 86028 - protein, 13 aa, Homo sapiens
  CDR3 for beta chain variable domain of TCR clone 43014 (TRBV20-1, TRBJ1-1)
CSARVGGNTEAFF

SEQ ID NO: 86029 - protein, 14 aa, Homo sapiens
  CDR3 for alpha chain variable domain of TCR clone 43015 (TRAV12-2, TRAJ17)
CAVLFKAAGNKLTF

SEQ ID NO: 86030 - protein, 12 aa, Homo sapiens
  CDR3 for beta chain variable domain of TCR clone 43015 (TRBV19, TRBJ1-5)
CASSIAQQPQHF

SEQ ID NO: 86031 - protein, 13 aa, Homo sapiens
  CDR3 for alpha chain variable domain of TCR clone 43016 (TRAV13-1, TRAJ21)
CAASIYNFNKFYF

SEQ ID NO: 86032 - protein, 13 aa, Homo sapiens
  CDR3 for beta chain variable domain of TCR clone 43016 (TRBV4-2, TRBJ1-1)
CASSQAGNTEAFF

SEQ ID NO: 86033 - protein, 13 aa, Homo sapiens
  CDR3 for alpha chain variable domain of TCR clone 43017 (TRAV1-2, TRAJ9)
CAALNTGGFKTIF

SEQ ID NO: 86034 - protein, 13 aa, Homo sapiens
  CDR3 for beta chain variable domain of TCR clone 43017 (TRBV27, TRBJ2-7)
CASSLRHRYEQYF

SEQ ID NO: 86035 - protein, 14 aa, Homo sapiens
  CDR3 for alpha chain variable domain of TCR clone 43018 (TRAV35, TRAJ42)
CAGRYGGSQRNLIF

SEQ ID NO: 86036 - protein, 15 aa, Homo sapiens
  CDR3 for beta chain variable domain of TCR clone 43018 (TRBV7-9, TRBJ2-1)
CASSLGWGRANEQFF

SEQ ID NO: 86037 - protein, 14 aa, Homo sapiens
  CDR3 for alpha chain variable domain of TCR clone 43019 (TRAV1-2, TRAJ8)
CAVREDTGFRKLVF

SEQ ID NO: 86038 - protein, 15 aa, Homo sapiens
  CDR3 for beta chain variable domain of TCR clone 43019 (TRBV20-1, TRBJ2-7)
CSARDRVSGMDEQYF

SEQ ID NO: 86039 - protein, 13 aa, Homo sapiens
  CDR3 for alpha chain variable domain of TCR clone 43020 (TRAV27, TRAJ57)
CRSAQGGSEKLVF

SEQ ID NO: 86040 - protein, 15 aa, Homo sapiens
  CDR3 for beta chain variable domain of TCR clone 43020 (TRBV11-2, TRBJ2-2)
CASSLVLRNTGELFF

SEQ ID NO: 86041 - protein, 15 aa, Homo sapiens
  CDR3 for alpha chain variable domain of TCR clone 43021 (TRAV12-3, TRAJ6)
CAMSATTGGSYIPTF

SEQ ID NO: 86042 - protein, 16 aa, Homo sapiens
  CDR3 for beta chain variable domain of TCR clone 43021 (TRBV20-1, TRBJ2-1)
CSALTWTSGSYNEQFF

SEQ ID NO: 86043 - protein, 17 aa, Homo sapiens
  CDR3 for alpha chain variable domain of TCR clone 43022 (TRAV3, TRAJ6)
YAVRDGPRAGGSYIPTF

SEQ ID NO: 86044 - protein, 20 aa, Homo sapiens
  CDR3 for beta chain variable domain of TCR clone 43022 (TRBV28, TRBJ2-1)
CASTPIGRSPGLAGGNEQFF

SEQ ID NO: 86045 - protein, 14 aa, Homo sapiens
  CDR3 for alpha chain variable domain of TCR clone 43023 (TRAV12-1, TRAJ17)
CVVNYKAAGNKLTF

SEQ ID NO: 86046 - protein, 17 aa, Homo sapiens
  CDR3 for beta chain variable domain of TCR clone 43023 (TRBV20-1, TRBJ2-1)
CSASSSELAGSYNEQFF

SEQ ID NO: 86047 - protein, 14 aa, Homo sapiens
  CDR3 for alpha chain variable domain of TCR clone 43024 (TRAV1-2, TRAJ16)
CAVNRFSDGQKLLF

SEQ ID NO: 86048 - protein, 14 aa, Homo sapiens
  CDR3 for beta chain variable domain of TCR clone 43024 (TRBV19, TRBJ2-1)
CASLTFVLSGEQFF

SEQ ID NO: 86049 - protein, 12 aa, Homo sapiens
  CDR3 for alpha chain variable domain of TCR clone 43025 (TRAV13-1, TRAJ21)
CAATEGFNKFYF

SEQ ID NO: 86050 - protein, 14 aa, Homo sapiens
  CDR3 for beta chain variable domain of TCR clone 43025 (TRBV5-4, TRBJ1-1)
CASSLDSRRDEAFF

SEQ ID NO: 86051 - protein, 12 aa, Homo sapiens
  CDR3 for alpha chain variable domain of TCR clone 43026 (TRAV12-1, TRAJ40)
CVVYSGTYKYIF

SEQ ID NO: 86052 - protein, 18 aa, Homo sapiens
  CDR3 for beta chain variable domain of TCR clone 43026 (TRBV11-2, TRBJ2-3)
CASSLGGASRGAPNTQDF

SEQ ID NO: 86053 - protein, 16 aa, Homo sapiens
  CDR3 for alpha chain variable domain of TCR clone 43027 (TRAV38-1, TRAJ32)
CAFMKGGGGATNKRIF

SEQ ID NO: 86054 - protein, 13 aa, Homo sapiens
  CDR3 for beta chain variable domain of TCR clone 43027 (TRBV20-1, TRBJ2-5)
CSAREAFQETQYF

SEQ ID NO: 86055 - protein, 11 aa, Homo sapiens
  CDR3 for alpha chain variable domain of TCR clone 43028 (TRAV13-1, TRAJ40)
CAVSGTYKYIL

SEQ ID NO: 86056 - protein, 16 aa, Homo sapiens
  CDR3 for beta chain variable domain of TCR clone 43028 (TRBV10-3, TRBJ2-3)
CAISVSRLALTDTQYF

SEQ ID NO: 86057 - protein, 15 aa, Homo sapiens
  CDR3 for alpha chain variable domain of TCR clone 43029 (TRAV17, TRAJ35)
CAAAFVIGFGNVLHC

SEQ ID NO: 86058 - protein, 15 aa, Homo sapiens
  CDR3 for beta chain variable domain of TCR clone 43029 (TRBV7-9, TRBJ2-7)
CASSLALAEAYEQYF

SEQ ID NO: 86059 - protein, 12 aa, Homo sapiens
  CDR3 for alpha chain variable domain of TCR clone 43030 (TRAV4, TRAJ37)
TGGSGNTGKLIF

SEQ ID NO: 86060 - protein, 15 aa, Homo sapiens
  CDR3 for beta chain variable domain of TCR clone 43030 (TRBV6-6, TRBJ1-1)
CASSYASGAGTEAFF

SEQ ID NO: 86061 - protein, 12 aa, Homo sapiens
  CDR3 for alpha chain variable domain of TCR clone 43031 (TRAV12-2, TRAJ16)
CAVNLDGQKLLF

SEQ ID NO: 86062 - protein, 16 aa, Homo sapiens
  CDR3 for beta chain variable domain of TCR clone 43031 (TRBV29-1, TRBJ2-7)
CSVEVVGTSGSYEQYF

SEQ ID NO: 86063 - protein, 17 aa, Homo sapiens
  CDR3 for alpha chain variable domain of TCR clone 43032 (TRAV13-1, TRAJ52)
CAASSGAGGTSYGKLTF

SEQ ID NO: 86064 - protein, 15 aa, Homo sapiens
  CDR3 for beta chain variable domain of TCR clone 43032 (TRBV2, TRBJ2-1)
CASSELVGSYNEQFF

SEQ ID NO: 86065 - protein, 13 aa, Homo sapiens
  CDR3 for alpha chain variable domain of TCR clone 43033 (TRAV27, TRAJ45)
CRSSGGGADGLTF

SEQ ID NO: 86066 - protein, 17 aa, Homo sapiens
  CDR3 for beta chain variable domain of TCR clone 43033 (TRBV11-2, TRBJ2-1)
CASNLYPPGVEYNEQFF

SEQ ID NO: 86067 - protein, 12 aa, Homo sapiens
  CDR3 for alpha chain variable domain of TCR clone 43034 (TRAV12-3, TRAJ17)
CAMTLTGNKLTF

SEQ ID NO: 86068 - protein, 19 aa, Homo sapiens
  CDR3 for beta chain variable domain of TCR clone 43034 (TRBV5-1, TRBJ2-3)
CASSLWLAGGITTTDTQYF

SEQ ID NO: 86069 - protein, 15 aa, Homo sapiens
  CDR3 for alpha chain variable domain of TCR clone 43035 (TRAV25, TRAJ52)
CAGRPGGTSYGKLPF

SEQ ID NO: 86070 - protein, 17 aa, Homo sapiens
  CDR3 for beta chain variable domain of TCR clone 43035 (TRBV7-8, TRBJ2-6)
CASSAGTGGAGANVLTF

SEQ ID NO: 86071 - protein, 14 aa, Homo sapiens
  CDR3 for alpha chain variable domain of TCR clone 43036 (TRAV12-3, TRAJ10)
SHLPLTGGGNKLTF

SEQ ID NO: 86072 - protein, 13 aa, Homo sapiens
  CDR3 for beta chain variable domain of TCR clone 43036 (TRBV7-9, TRBJ2-7)
CASSFAGAYEQYF

SEQ ID NO: 86073 - protein, 13 aa, Homo sapiens
  CDR3 for alpha chain variable domain of TCR clone 43037 (TRAV27, TRAJ49)
CAPRPYTGNQFYF

SEQ ID NO: 86074 - protein, 13 aa, Homo sapiens
  CDR3 for beta chain variable domain of TCR clone 43037 (TRBV4-1, TRBJ1-1)
CASSRKMNTEAFF

SEQ ID NO: 86075 - protein, 11 aa, Homo sapiens
  CDR3 for alpha chain variable domain of TCR clone 43038 (TRAV1-2, TRAJ20)
CAVANDYKLSF

SEQ ID NO: 86076 - protein, 16 aa, Homo sapiens
  CDR3 for beta chain variable domain of TCR clone 43038 (TRBV12-4, TRBJ1-4)
CASSLKGIGHGEKLFF

SEQ ID NO: 86077 - protein, 15 aa, Homo sapiens
  CDR3 for alpha chain variable domain of TCR clone 43039 (TRAV21, TRAJ53)
CATLNSGGSNYRLTF

SEQ ID NO: 86078 - protein, 16 aa, Homo sapiens
  CDR3 for beta chain variable domain of TCR clone 43039 (TRBV9, TRBJ2-1)
CASSVGGGGNYNEQFF

SEQ ID NO: 86079 - protein, 11 aa, Homo sapiens
  CDR3 for alpha chain variable domain of TCR clone 43040 (TRAV12-3, TRAJ27)
CAMANAGKSTF

SEQ ID NO: 86080 - protein, 16 aa, Homo sapiens
  CDR3 for beta chain variable domain of TCR clone 43040 (TRBV20-1, TRBJ1-4)
CSAPGQGLLTNEKLFF

SEQ ID NO: 86081 - protein, 14 aa, Homo sapiens
  CDR3 for alpha chain variable domain of TCR clone 43041 (TRAV12-1, TRAJ8)
CVVNSNTGFQKLVF

SEQ ID NO: 86082 - protein, 16 aa, Homo sapiens
  CDR3 for beta chain variable domain of TCR clone 43041 (TRBV20-1, TRBJ2-2)
CSARYDRVGLTGELFF

SEQ ID NO: 86083 - protein, 13 aa, Homo sapiens
  CDR3 for alpha chain variable domain of TCR clone 43042 (TRAV1-2, TRAJ9)
CAALNTGGFKTIF

SEQ ID NO: 86084 - protein, 15 aa, Homo sapiens
  CDR3 for beta chain variable domain of TCR clone 43042 (TRBV7-9, TRBJ1-6)
CASSSPGRGNSPLHF

SEQ ID NO: 86085 - protein, 16 aa, Homo sapiens
  CDR3 for alpha chain variable domain of TCR clone 43043 (TRAV21, TRAJ45)
CAVSCGSGGGADGLTF

SEQ ID NO: 86086 - protein, 14 aa, Homo sapiens
  CDR3 for beta chain variable domain of TCR clone 43043 (TRBV4-2, TRBJ1-2)
CASSPGGSNYGYTF

SEQ ID NO: 86087 - protein, 16 aa, Homo sapiens
  CDR3 for alpha chain variable domain of TCR clone 43044 (TRAV23/DV6, TRAJ9)
CEASIGGNTGGFKTIF

SEQ ID NO: 86088 - protein, 14 aa, Homo sapiens
  CDR3 for beta chain variable domain of TCR clone 43044 (TRBV9, TRBJ2-7)
CASSVGVGSYEQYF

SEQ ID NO: 86089 - protein, 14 aa, Homo sapiens
  CDR3 for alpha chain variable domain of TCR clone 43045 (TRAV38-1, TRAJ45)
CASHSGGGADGLTF

SEQ ID NO: 86090 - protein, 13 aa, Homo sapiens
  CDR3 for beta chain variable domain of TCR clone 43045 (TRBV4-2, TRBJ1-1)
CASSQAGNTEAFF

SEQ ID NO: 86091 - protein, 12 aa, Homo sapiens
  CDR3 for alpha chain variable domain of TCR clone 43046 (TRAV8-3, TRAJ26)
CAGDNYGQNFFF

SEQ ID NO: 86092 - protein, 15 aa, Homo sapiens
  CDR3 for beta chain variable domain of TCR clone 43046 (TRBV5-1, TRBJ2-3)
CASSVTSGSTDTQYF

SEQ ID NO: 86093 - protein, 17 aa, Homo sapiens
  CDR3 for alpha chain variable domain of TCR clone 43047 (TRAV17, TRAJ7)
CATLGGLAFGKGNQVVV

SEQ ID NO: 86094 - protein, 13 aa, Homo sapiens
  CDR3 for beta chain variable domain of TCR clone 43047 (TRBV12-4, TRBJ2-7)
CASSLERVREQYF

SEQ ID NO: 86095 - protein, 15 aa, Homo sapiens
  CDR3 for alpha chain variable domain of TCR clone 43048 (TRAV8-3, TRAJ11)
CAVGLLNSGYSTLTF

SEQ ID NO: 86096 - protein, 18 aa, Homo sapiens
  CDR3 for beta chain variable domain of TCR clone 43048 (TRBV25-1, TRBJ1-2)
CASSGLQNGQGLIFGYTF

SEQ ID NO: 86097 - protein, 20 aa, Homo sapiens
  CDR3 for alpha chain variable domain of TCR clone 43049 (TRAV26-1, TRAJ42)
CCVLLHRQTYYGGSQGNLIF

SEQ ID NO: 86098 - protein, 16 aa, Homo sapiens
  CDR3 for beta chain variable domain of TCR clone 43049 (TRBV7-3, TRBJ2-2)
CASSLKRGTLSGELLF

SEQ ID NO: 86099 - protein, 13 aa, Homo sapiens
  CDR3 for alpha chain variable domain of TCR clone 43050 (TRAV1-2, TRAJ9)
CAALNTGGFKTIF

SEQ ID NO: 86100 - protein, 20 aa, Homo sapiens
  CDR3 for beta chain variable domain of TCR clone 43050 (TRBV7-8, TRBJ2-2)
CASSHLFPGPTIHITGELFF

SEQ ID NO: 86101 - protein, 15 aa, Homo sapiens
  CDR3 for alpha chain variable domain of TCR clone 43051 (TRAV12-3, TRAJ6)
CAMSATTGGSYIPTF

SEQ ID NO: 86102 - protein, 19 aa, Homo sapiens
  CDR3 for beta chain variable domain of TCR clone 43051 (TRBV25-1, TRBJ2-2)
YAILVYRVDRGRKTGELFF

SEQ ID NO: 86103 - protein, 14 aa, Homo sapiens
  CDR3 for alpha chain variable domain of TCR clone 43052 (TRAV35, TRAJ38)
RAGSNAGNNRKLIW

SEQ ID NO: 86104 - protein, 12 aa, Homo sapiens
  CDR3 for beta chain variable domain of TCR clone 43052 (TRBV19, TRBJ2-7)
CASTDRGYEQYF

SEQ ID NO: 86105 - protein, 12 aa, Homo sapiens
  CDR3 for alpha chain variable domain of TCR clone 43053 (TRAV35, TRAJ49)
CAGWNTGNQFYF

SEQ ID NO: 86106 - protein, 16 aa, Homo sapiens
  CDR3 for beta chain variable domain of TCR clone 43053 (TRBV5-1, TRBJ2-2)
CASSLWDTTNTGGLFF

SEQ ID NO: 86107 - protein, 18 aa, Homo sapiens
  CDR3 for alpha chain variable domain of TCR clone 43054 (TRAV12-3, TRAJ52)
CAMSRTNAGGTSYGQLTF

SEQ ID NO: 86108 - protein, 17 aa, Homo sapiens
  CDR3 for beta chain variable domain of TCR clone 43054 (TRBV7-3, TRBJ2-3)
CASSLMKRMRGADTQYF

SEQ ID NO: 86109 - protein, 15 aa, Homo sapiens
  CDR3 for alpha chain variable domain of TCR clone 43055 (TRAV3, TRAJ5)
CAVRDLDTGRRALTF

SEQ ID NO: 86110 - protein, 13 aa, Homo sapiens
  CDR3 for beta chain variable domain of TCR clone 43055 (TRBV12-4, TRBJ2-7)
CSSSPTETYEQYF

SEQ ID NO: 86111 - protein, 13 aa, Homo sapiens
  CDR3 for alpha chain variable domain of TCR clone 43056 (TRAV17, TRAJ9)
CATDGTGGFKTIF

SEQ ID NO: 86112 - protein, 17 aa, Homo sapiens
  CDR3 for beta chain variable domain of TCR clone 43056 (TRBV6-5, TRBJ2-7)
CARSYSFWGQGSYEQYF

SEQ ID NO: 86113 - protein, 15 aa, Homo sapiens
  CDR3 for alpha chain variable domain of TCR clone 43057 (TRAV3, TRAJ5)
CAVRDLDTGRRALTF

SEQ ID NO: 86114 - protein, 15 aa, Homo sapiens
  CDR3 for beta chain variable domain of TCR clone 43057 (TRBV20-1, TRBJ2-1)
CSARSTGGPGNEQFF

SEQ ID NO: 86115 - protein, 13 aa, Homo sapiens
  CDR3 for alpha chain variable domain of TCR clone 43058 (TRAV26-2, TRAJ43)
CILRAVNNNDMRF

SEQ ID NO: 86116 - protein, 15 aa, Homo sapiens
  CDR3 for beta chain variable domain of TCR clone 43058 (TRBV7-2, TRBJ2-1)
CASTHGTGIYNKQFF

SEQ ID NO: 86117 - protein, 12 aa, Homo sapiens
  CDR3 for alpha chain variable domain of TCR clone 43059 (TRAV41, TRAJ58)
CAVETSGSRLTF

SEQ ID NO: 86118 - protein, 15 aa, Homo sapiens
  CDR3 for beta chain variable domain of TCR clone 43059 (TRBV29-1, TRBJ2-6)
CSVGDRGSGVNVLTF

SEQ ID NO: 86119 - protein, 13 aa, Homo sapiens
  CDR3 for alpha chain variable domain of TCR clone 43060 (TRAV13-2, TRAJ13)
CAERPGGYQKVTL

SEQ ID NO: 86120 - protein, 14 aa, Homo sapiens
  CDR3 for beta chain variable domain of TCR clone 43060 (TRBV23-1, TRBJ2-5)
CASSFLRSQETQYF

SEQ ID NO: 86121 - protein, 14 aa, Homo sapiens
  CDR3 for alpha chain variable domain of TCR clone 43061 (TRAV13-2, TRAJ41)
CAERPDWAGYALNF

SEQ ID NO: 86122 - protein, 16 aa, Homo sapiens
  CDR3 for beta chain variable domain of TCR clone 43061 (TRBV9, TRBJ2-3)
CASSGTSGKDTDAQYF

SEQ ID NO: 86123 - protein, 13 aa, Homo sapiens
  CDR3 for alpha chain variable domain of TCR clone 43062 (TRAV3, TRAJ27)
CAVRPLGAGKSTV

SEQ ID NO: 86124 - protein, 13 aa, Homo sapiens
  CDR3 for beta chain variable domain of TCR clone 43062 (TRBV7-9, TRBJ2-3)
CASSPGSTDTQYF

SEQ ID NO: 86125 - protein, 13 aa, Homo sapiens
  CDR3 for alpha chain variable domain of TCR clone 43063 (TRAV12-2, TRAJ54)
CAVNRRGAQKLGF

SEQ ID NO: 86126 - protein, 18 aa, Homo sapiens
  CDR3 for beta chain variable domain of TCR clone 43063 (TRBV7-3, TRBJ2-5)
CASSLGGAAQGRWETQYF

SEQ ID NO: 86127 - protein, 12 aa, Homo sapiens
  CDR3 for alpha chain variable domain of TCR clone 43064 (TRAV13-2, TRAJ54)
CGAHEGAQKLVF

SEQ ID NO: 86128 - protein, 16 aa, Homo sapiens
  CDR3 for beta chain variable domain of TCR clone 43064 (TRBV12-5, TRBJ2-5)
CASGPRTSGNQEAQYF

SEQ ID NO: 86129 - protein, 14 aa, Homo sapiens
  CDR3 for alpha chain variable domain of TCR clone 43065 (TRAV12-2, TRAJ6)
CASKWGGGSYITTF

SEQ ID NO: 86130 - protein, 13 aa, Homo sapiens
  CDR3 for beta chain variable domain of TCR clone 43065 (TRBV2, TRBJ1-1)
CASSEGGNTEAFF

SEQ ID NO: 86131 - protein, 14 aa, Homo sapiens
  CDR3 for alpha chain variable domain of TCR clone 43066 (TRAV12-1, TRAJ31)
CVVNNRDNNARLMF

SEQ ID NO: 86132 - protein, 16 aa, Homo sapiens
  CDR3 for beta chain variable domain of TCR clone 43066 (TRBV3-1, TRBJ2-3)
CGSSRRAAGGRDTQYF

SEQ ID NO: 86133 - protein, 16 aa, Homo sapiens
  CDR3 for alpha chain variable domain of TCR clone 43067 (TRAV12-3, TRAJ53)
CAMSPGSGGSNYKLTF

SEQ ID NO: 86134 - protein, 16 aa, Homo sapiens
  CDR3 for beta chain variable domain of TCR clone 43067 (TRBV13, TRBJ2-2)
CASSPRTGEHTGELFF

SEQ ID NO: 86135 - protein, 13 aa, Homo sapiens
  CDR3 for alpha chain variable domain of TCR clone 43068 (TRAV35, TRAJ48)
CAGHKFGNEKLTF

SEQ ID NO: 86136 - protein, 16 aa, Homo sapiens
  CDR3 for beta chain variable domain of TCR clone 43068 (TRBV12-5, TRBJ2-5)
CASGPRTSGNQETQYS

SEQ ID NO: 86137 - protein, 15 aa, Homo sapiens
  CDR3 for alpha chain variable domain of TCR clone 43069 (TRAV25, TRAJ53)
CAATGGGGSNYKLTF

SEQ ID NO: 86138 - protein, 19 aa, Homo sapiens
  CDR3 for beta chain variable domain of TCR clone 43069 (TRBV7-2, TRBJ2-3)
WASSFLSRNWGGGTDTQYF

SEQ ID NO: 86139 - protein, 13 aa, Homo sapiens
  CDR3 for alpha chain variable domain of TCR clone 43070 (TRAV27, TRAJ45)
CRSSGGGADGLTF

SEQ ID NO: 86140 - protein, 17 aa, Homo sapiens
  CDR3 for beta chain variable domain of TCR clone 43070 (TRBV11-2, TRBJ2-1)
CAISLYPPGVEYNEQFF

SEQ ID NO: 86141 - protein, 23 aa, Homo sapiens
  CDR3 for alpha chain variable domain of TCR clone 43071 (TRAV8-6, TRAJ26)
PLEETLSPYKRHGRVLLSQNFVF

SEQ ID NO: 86142 - protein, 15 aa, Homo sapiens
  CDR3 for beta chain variable domain of TCR clone 43071 (TRBV20-1, TRBJ2-7)
CSARDRVSGMDEQYF

SEQ ID NO: 86143 - protein, 14 aa, Homo sapiens
  CDR3 for alpha chain variable domain of TCR clone 43072 (TRAV1-2, TRAJ8)
CAVREDTGFQKLVF

SEQ ID NO: 86144 - protein, 15 aa, Homo sapiens
  CDR3 for beta chain variable domain of TCR clone 43072 (TRBV28, TRBJ2-4)
CAAGSGTLLMGMQYF

SEQ ID NO: 86145 - protein, 15 aa, Homo sapiens
  CDR3 for alpha chain variable domain of TCR clone 43073 (TRAV19, TRAJ9)
CALSLPDTGGFKTIF

SEQ ID NO: 86146 - protein, 14 aa, Homo sapiens
  CDR3 for beta chain variable domain of TCR clone 43073 (TRBV25-1, TRBJ1-1)
CASTHLGGNTEAFF

SEQ ID NO: 86147 - protein, 13 aa, Homo sapiens
  CDR3 for alpha chain variable domain of TCR clone 43074 (TRAV12-2, TRAJ20)
CAVYPSNDYKLSF

SEQ ID NO: 86148 - protein, 15 aa, Homo sapiens
  CDR3 for beta chain variable domain of TCR clone 43074 (TRBV5-1, TRBJ2-3)
CASSVTSGSTDTQYF

SEQ ID NO: 86149 - protein, 14 aa, Homo sapiens
  CDR3 for alpha chain variable domain of TCR clone 43075 (TRAV4, TRAJ30)
CLVGDMDRDDKIIF

SEQ ID NO: 86150 - protein, 15 aa, Homo sapiens
  CDR3 for beta chain variable domain of TCR clone 43075 (TRBV7-2, TRBJ2-7)
CASSLSSGRTYEQYF

SEQ ID NO: 86151 - protein, 14 aa, Homo sapiens
  CDR3 for alpha chain variable domain of TCR clone 43076 (TRAV23/DV6, TRAJ8)
CAASKATGFKKLVF

SEQ ID NO: 86152 - protein, 15 aa, Homo sapiens
  CDR3 for beta chain variable domain of TCR clone 43076 (TRBV28, TRBJ2-3)
CASSPDRQGANTQYF

SEQ ID NO: 86153 - protein, 15 aa, Homo sapiens
  CDR3 for alpha chain variable domain of TCR clone 43077 (TRAV16, TRAJ17)
CALSGNKAAGNKLTF

SEQ ID NO: 86154 - protein, 16 aa, Homo sapiens
  CDR3 for beta chain variable domain of TCR clone 43077 (TRBV7-6, TRBJ1-6)
CASSSPPAGEYSPLHF

SEQ ID NO: 86155 - protein, 12 aa, Homo sapiens
  CDR3 for alpha chain variable domain of TCR clone 43078 (TRAV21, TRAJ13)
PGPSGGYQKVTF

SEQ ID NO: 86156 - protein, 16 aa, Homo sapiens
  CDR3 for beta chain variable domain of TCR clone 43078 (TRBV29-1, TRBJ2-7)
CSVEVVGTSGSYEQYF

SEQ ID NO: 86157 - protein, 13 aa, Homo sapiens
  CDR3 for alpha chain variable domain of TCR clone 43079 (TRAV27, TRAJ45)
CRSSGGGADGLTF

SEQ ID NO: 86158 - protein, 17 aa, Homo sapiens
  CDR3 for beta chain variable domain of TCR clone 43079 (TRBV11-2, TRBJ2-1)
CASSLYPPEVEYNEQFF

SEQ ID NO: 86159 - protein, 11 aa, Homo sapiens
  CDR3 for alpha chain variable domain of TCR clone 43080 (TRAV12-3, TRAJ27)
CAMANAGKSTF

SEQ ID NO: 86160 - protein, 15 aa, Homo sapiens
  CDR3 for beta chain variable domain of TCR clone 43080 (TRBV12-4, TRBJ2-5)
CASSPPTGLQETQYF

SEQ ID NO: 86161 - protein, 21 aa, Homo sapiens
  CDR3 for alpha chain variable domain of TCR clone 43081 (TRAV12-1, TRAJ17)
CVVLVKPNIQNPDPAVYQLRD

SEQ ID NO: 86162 - protein, 15 aa, Homo sapiens
  CDR3 for beta chain variable domain of TCR clone 43081 (TRBV20-1, TRBJ2-7)
CSARDRVSGMDEQYF

SEQ ID NO: 86163 - protein, 14 aa, Homo sapiens
  CDR3 for alpha chain variable domain of TCR clone 43082 (TRAV1-2, TRAJ16)
CAVNRFSDGQRLLF

SEQ ID NO: 86164 - protein, 13 aa, Homo sapiens
  CDR3 for beta chain variable domain of TCR clone 43082 (TRBV10-3, TRBJ2-7)
CASKLAVNYEQYF

SEQ ID NO: 86165 - protein, 12 aa, Homo sapiens
  CDR3 for alpha chain variable domain of TCR clone 43083 (TRAV16, TRAJ10)
CSRTGGGNKLTF

SEQ ID NO: 86166 - protein, 15 aa, Homo sapiens
  CDR3 for beta chain variable domain of TCR clone 43083 (TRBV6-3, TRBJ2-7)
CASSSPGTVSYEQYF

SEQ ID NO: 86167 - protein, 15 aa, Homo sapiens
  CDR3 for alpha chain variable domain of TCR clone 43084 (TRAV21, TRAJ53)
CATLNSGGSNYKLTF

SEQ ID NO: 86168 - protein, 13 aa, Homo sapiens
  CDR3 for beta chain variable domain of TCR clone 43084 (TRBV7-9, TRBJ2-3)
CASSPGSTGTQYF

SEQ ID NO: 86169 - protein, 14 aa, Homo sapiens
  CDR3 for alpha chain variable domain of TCR clone 43085 (TRAV8-1, TRAJ39)
CAVNASNAGNMLTF

SEQ ID NO: 86170 - protein, 13 aa, Homo sapiens
  CDR3 for beta chain variable domain of TCR clone 43085 (TRBV7-3, TRBJ1-1)
CASSQDWGAEAFF

SEQ ID NO: 86171 - protein, 15 aa, Homo sapiens
  CDR3 for alpha chain variable domain of TCR clone 43086 (TRAV8-3, TRAJ45)
CASSYSGGGADGLTF

SEQ ID NO: 86172 - protein, 14 aa, Homo sapiens
  CDR3 for beta chain variable domain of TCR clone 43086 (TRBV7-8, TRBJ2-3)
CASSLEAGTDTQYF

SEQ ID NO: 86173 - protein, 14 aa, Homo sapiens
  CDR3 for alpha chain variable domain of TCR clone 43087 (TRAV13-1, TRAJ44)
CAAKATGTASKLTF

SEQ ID NO: 86174 - protein, 15 aa, Homo sapiens
  CDR3 for beta chain variable domain of TCR clone 43087 (TRBV5-1, TRBJ2-2)
CASSSQGGNTGELFF

SEQ ID NO: 86175 - protein, 14 aa, Homo sapiens
  CDR3 for alpha chain variable domain of TCR clone 43088 (TRAV29/DV5, TRAJ36)
CAARRKTGANNLVF

SEQ ID NO: 86176 - protein, 14 aa, Homo sapiens
  CDR3 for beta chain variable domain of TCR clone 43088 (TRBV12-5, TRBJ2-5)
CASGSRTHQETQYF

SEQ ID NO: 86177 - protein, 14 aa, Homo sapiens
  CDR3 for alpha chain variable domain of TCR clone 43089 (TRAV1-2, TRAJ16)
CAVNRFSDGQKLLF

SEQ ID NO: 86178 - protein, 14 aa, Homo sapiens
  CDR3 for beta chain variable domain of TCR clone 43089 (TRBV7-9, TRBJ2-3)
CASSLEDGTDAQYF

SEQ ID NO: 86179 - protein, 12 aa, Homo sapiens
  CDR3 for alpha chain variable domain of TCR clone 43090 (TRAV13-1, TRAJ53)
AASGGSNYKLTF

SEQ ID NO: 86180 - protein, 16 aa, Homo sapiens
  CDR3 for beta chain variable domain of TCR clone 43090 (TRBV28, TRBJ2-7)
CASSLFFETGGPEQYF

SEQ ID NO: 86181 - protein, 13 aa, Homo sapiens
  CDR3 for alpha chain variable domain of TCR clone 43091 (TRAV13-1, TRAJ8)
CAASIRGFQKLVF

SEQ ID NO: 86182 - protein, 14 aa, Homo sapiens
  CDR3 for beta chain variable domain of TCR clone 43091 (TRBV7-2, TRBJ2-1)
CASSLVQGRNERFF

SEQ ID NO: 86183 - protein, 17 aa, Homo sapiens
  CDR3 for alpha chain variable domain of TCR clone 43092 (TRAV3, TRAJ42)
RAVRDRDYGGSQGNLIF

SEQ ID NO: 86184 - protein, 15 aa, Homo sapiens
  CDR3 for beta chain variable domain of TCR clone 43092 (TRBV6-6, TRBJ2-7)
CASSYSYGGSYEQYF

SEQ ID NO: 86185 - protein, 17 aa, Homo sapiens
  CDR3 for alpha chain variable domain of TCR clone 43093 (TRAV13-1, TRAJ52)
CAAGRNASGTSYGKLTF

SEQ ID NO: 86186 - protein, 13 aa, Homo sapiens
  CDR3 for beta chain variable domain of TCR clone 43093 (TRBV7-2, TRBJ1-1)
CASNLKGAKVAFF

SEQ ID NO: 86187 - protein, 11 aa, Homo sapiens
  CDR3 for alpha chain variable domain of TCR clone 43094 (TRAV13-1, TRAJ6)
CATLGSYIPTF

SEQ ID NO: 86188 - protein, 12 aa, Homo sapiens
  CDR3 for beta chain variable domain of TCR clone 43094 (TRBV11-2, TRBJ2-1)
RASSPGNNEQFF

SEQ ID NO: 86189 - protein, 16 aa, Homo sapiens
  CDR3 for alpha chain variable domain of TCR clone 43095 (TRAV30, TRAJ24)
CGTEIVDADSWGKFQF

SEQ ID NO: 86190 - protein, 14 aa, Homo sapiens
  CDR3 for beta chain variable domain of TCR clone 43095 (TRBV20-1, TRBJ2-3)
CSARGGTSTDTQYF

SEQ ID NO: 86191 - protein, 15 aa, Homo sapiens
  CDR3 for alpha chain variable domain of TCR clone 43096 (TRAV8-2, TRAJ40)
CVVSDRGSGTYKYIF

SEQ ID NO: 86192 - protein, 13 aa, Homo sapiens
  CDR3 for beta chain variable domain of TCR clone 43096 (TRBV7-3, TRBJ1-1)
CASSQDWGAEAFF

SEQ ID NO: 86193 - protein, 14 aa, Homo sapiens
  CDR3 for alpha chain variable domain of TCR clone 43097 (TRAV12-1, TRAJ17)
CVVNYKAAGNKLTF

SEQ ID NO: 86194 - protein, 16 aa, Homo sapiens
  CDR3 for beta chain variable domain of TCR clone 43097 (TRBV19, TRBJ2-1)
CASSKAGPSSYNEQFF

SEQ ID NO: 86195 - protein, 16 aa, Homo sapiens
  CDR3 for alpha chain variable domain of TCR clone 43098 (TRAV30, TRAJ57)
CGIGWAPQGGSEKLVF

SEQ ID NO: 86196 - protein, 14 aa, Homo sapiens
  CDR3 for beta chain variable domain of TCR clone 43098 (TRBV18, TRBJ1-1)
CASSPGFQGVEAFF

SEQ ID NO: 86197 - protein, 16 aa, Homo sapiens
  CDR3 for alpha chain variable domain of TCR clone 43099 (TRAV3, TRAJ37)
CAVRGKGSGNTGKLIF

SEQ ID NO: 86198 - protein, 15 aa, Homo sapiens
  CDR3 for beta chain variable domain of TCR clone 43099 (TRBV7-9, TRBJ2-2)
CASGPLDTFPGELLF

SEQ ID NO: 86199 - protein, 14 aa, Homo sapiens
  CDR3 for alpha chain variable domain of TCR clone 43100 (TRAV20, TRAJ56)
CAVQFGGANSKLTF

SEQ ID NO: 86200 - protein, 13 aa, Homo sapiens
  CDR3 for beta chain variable domain of TCR clone 43100 (TRBV4-2, TRBJ1-1)
CASSQAGNTEAFF

SEQ ID NO: 86201 - protein, 15 aa, Homo sapiens
  CDR3 for alpha chain variable domain of TCR clone 43101 (TRAV35, TRAJ50)
CAGQLRKTSYDKVIF

SEQ ID NO: 86202 - protein, 12 aa, Homo sapiens
  CDR3 for beta chain variable domain of TCR clone 43101 (TRBV5-1, TRBJ2-5)
CASSLGLETQYL

SEQ ID NO: 86203 - protein, 12 aa, Homo sapiens
  CDR3 for alpha chain variable domain of TCR clone 43102 (TRAV38-2/DV8, TRAJ57)
CAWKGGSEKLVF

SEQ ID NO: 86204 - protein, 13 aa, Homo sapiens
  CDR3 for beta chain variable domain of TCR clone 43102 (TRBV5-1, TRBJ1-5)
CASSLAQGQPQHF

SEQ ID NO: 86205 - protein, 15 aa, Homo sapiens
  CDR3 for alpha chain variable domain of TCR clone 43103 (TRAV2, TRAJ22)
CSVPSRGGSARQLTF

SEQ ID NO: 86206 - protein, 11 aa, Homo sapiens
  CDR3 for beta chain variable domain of TCR clone 43103 (TRBV27, TRBJ2-3)
CASSLGDTQYF

SEQ ID NO: 86207 - protein, 13 aa, Homo sapiens
  CDR3 for alpha chain variable domain of TCR clone 43104 (TRAV13-1, TRAJ8)
CAVRNTGFQKLVF

SEQ ID NO: 86208 - protein, 13 aa, Homo sapiens
  CDR3 for beta chain variable domain of TCR clone 43104 (TRBV19, TRBJ2-7)
CASSMGSWPEQYF

SEQ ID NO: 86209 - protein, 13 aa, Homo sapiens
  CDR3 for alpha chain variable domain of TCR clone 43105 (TRAV12-2, TRAJ20)
CAVYPSNDYKLSF

SEQ ID NO: 86210 - protein, 14 aa, Homo sapiens
  CDR3 for beta chain variable domain of TCR clone 43105 (TRBV27, TRBJ2-5)
CQQLYPRGGETQYF

SEQ ID NO: 86211 - protein, 12 aa, Homo sapiens
  CDR3 for alpha chain variable domain of TCR clone 43106 (TRAV1-2, TRAJ33)
CAAPDSNYQLIW

SEQ ID NO: 86212 - protein, 16 aa, Homo sapiens
  CDR3 for beta chain variable domain of TCR clone 43106 (TRBV6-4, TRBJ1-2)
CASSEAVGDPNYGYTF

SEQ ID NO: 86213 - protein, 14 aa, Homo sapiens
  CDR3 for alpha chain variable domain of TCR clone 43107 (TRAV1-2, TRAJ16)
CAVNRFSDGQKLLF

SEQ ID NO: 86214 - protein, 16 aa, Homo sapiens
  CDR3 for beta chain variable domain of TCR clone 43107 (TRBV5-4, TRBJ2-1)
CASSLVGSGQDNEQFF

SEQ ID NO: 86215 - protein, 12 aa, Homo sapiens
  CDR3 for alpha chain variable domain of TCR clone 43108 (TRAV16, TRAJ57)
CALEGGSEELVF

SEQ ID NO: 86216 - protein, 12 aa, Homo sapiens
  CDR3 for beta chain variable domain of TCR clone 43108 (TRBV28, TRBJ2-7)
CASSGRPYEQYF

SEQ ID NO: 86217 - protein, 15 aa, Homo sapiens
  CDR3 for alpha chain variable domain of TCR clone 43109 (TRAV3, TRAJ4)
CAVRDGTGDYNKLIF

SEQ ID NO: 86218 - protein, 16 aa, Homo sapiens
  CDR3 for beta chain variable domain of TCR clone 43109 (TRBV27, TRBJ2-2)
CASSSSGVSNTGELFF

SEQ ID NO: 86219 - protein, 14 aa, Homo sapiens
  CDR3 for alpha chain variable domain of TCR clone 43110 (TRAV20, TRAJ56)
CAVQFGGANSKLTF

SEQ ID NO: 86220 - protein, 14 aa, Homo sapiens
  CDR3 for beta chain variable domain of TCR clone 43110 (TRBV20-1, TRBJ2-7)
CSAKRCRSSYEQYF

SEQ ID NO: 86221 - protein, 18 aa, Homo sapiens
  CDR3 for alpha chain variable domain of TCR clone 43111 (TRAV21, TRAJ52)
CAVRPSPAGGTSYGKLTF

SEQ ID NO: 86222 - protein, 17 aa, Homo sapiens
  CDR3 for beta chain variable domain of TCR clone 43111 (TRBV13, TRBJ2-3)
CASSLSRVAAGRNTQYF

SEQ ID NO: 86223 - protein, 15 aa, Homo sapiens
  CDR3 for alpha chain variable domain of TCR clone 43112 (TRAV2, TRAJ9)
CAVEDRGTGGFKTIF

SEQ ID NO: 86224 - protein, 13 aa, Homo sapiens
  CDR3 for beta chain variable domain of TCR clone 43112 (TRBV20-1, TRBJ1-1)
CSARGGGNTEAFS

SEQ ID NO: 86225 - protein, 14 aa, Homo sapiens
  CDR3 for alpha chain variable domain of TCR clone 43113 (TRAV1-2, TRAJ16)
CAVNRFSDGQKLLF

SEQ ID NO: 86226 - protein, 12 aa, Homo sapiens
  CDR3 for beta chain variable domain of TCR clone 43113 (TRBV11-2, TRBJ2-7)
CASSPPADEQYF

SEQ ID NO: 86227 - protein, 15 aa, Homo sapiens
  CDR3 for alpha chain variable domain of TCR clone 43114 (TRAV25, TRAJ52)
CAGRPGGTSYGKLTF

SEQ ID NO: 86228 - protein, 17 aa, Homo sapiens
  CDR3 for beta chain variable domain of TCR clone 43114 (TRBV7-8, TRBJ2-6)
CASSAGTGGAGANVLTF

SEQ ID NO: 86229 - protein, 13 aa, Homo sapiens
  CDR3 for alpha chain variable domain of TCR clone 43115 (TRAV8-4, TRAJ30)
CAVSVNRGDKIIF

SEQ ID NO: 86230 - protein, 13 aa, Homo sapiens
  CDR3 for beta chain variable domain of TCR clone 43115 (TRBV3-1, TRBJ2-2)
CASLARGSGELFF

SEQ ID NO: 86231 - protein, 10 aa, Homo sapiens
  CDR3 for alpha chain variable domain of TCR clone 43116 (TRAV16, TRAJ22)
SAMYLRQLTF

SEQ ID NO: 86232 - protein, 15 aa, Homo sapiens
  CDR3 for beta chain variable domain of TCR clone 43116 (TRBV7-9, TRBJ1-6)
CACSSPGRGNSPLHF

SEQ ID NO: 86233 - protein, 21 aa, Homo sapiens
  CDR3 for alpha chain variable domain of TCR clone 43117 (TRAV1-1, TRAJ6)
CLLLLRCERLERTGGSYIPTF

SEQ ID NO: 86234 - protein, 14 aa, Homo sapiens
  CDR3 for beta chain variable domain of TCR clone 43117 (TRBV19, TRBJ2-1)
CASPTFVLSGEQFF

SEQ ID NO: 86235 - protein, 16 aa, Homo sapiens
  CDR3 for alpha chain variable domain of TCR clone 43118 (TRAV20, TRAJ22)
CAVQASSSGSARQLTF

SEQ ID NO: 86236 - protein, 16 aa, Homo sapiens
  CDR3 for beta chain variable domain of TCR clone 43118 (TRBV20-1, TRBJ1-5)
CSASRGTGYSNQTQHF

SEQ ID NO: 86237 - protein, 16 aa, Homo sapiens
  CDR3 for alpha chain variable domain of TCR clone 43119 (TRAV20, TRAJ10)
CAVLRGLTGGGNKLTF

SEQ ID NO: 86238 - protein, 14 aa, Homo sapiens
  CDR3 for beta chain variable domain of TCR clone 43119 (TRBV19, TRBJ1-5)
CASRAPYSFLSQHF

SEQ ID NO: 86239 - protein, 13 aa, Homo sapiens
  CDR3 for alpha chain variable domain of TCR clone 43120 (TRAV26-2, TRAJ43)
CILRAVNNNDMSF

SEQ ID NO: 86240 - protein, 15 aa, Homo sapiens
  CDR3 for beta chain variable domain of TCR clone 43120 (TRBV7-2, TRBJ2-1)
CASTHGTGIYNEQFF

SEQ ID NO: 86241 - protein, 15 aa, Homo sapiens
  CDR3 for alpha chain variable domain of TCR clone 43121 (TRAV23/DV6, TRAJ13)
CAAWSGGGGYQKVTF

SEQ ID NO: 86242 - protein, 17 aa, Homo sapiens
  CDR3 for beta chain variable domain of TCR clone 43121 (TRBV19, TRBJ2-7)
CASSISFYDSYPYEQYF

SEQ ID NO: 86243 - protein, 13 aa, Homo sapiens
  CDR3 for alpha chain variable domain of TCR clone 43122 (TRAV27, TRAJ56)
CAGLTGANSKLTF

SEQ ID NO: 86244 - protein, 12 aa, Homo sapiens
  CDR3 for beta chain variable domain of TCR clone 43122 (TRBV11-2, TRBJ2-2)
CASSLGGGELFF

SEQ ID NO: 86245 - protein, 15 aa, Homo sapiens
  CDR3 for alpha chain variable domain of TCR clone 43123 (TRAV3, TRAJ22)
CAVRERGGSARQLTF

SEQ ID NO: 86246 - protein, 16 aa, Homo sapiens
  CDR3 for beta chain variable domain of TCR clone 43123 (TRBV5-4, TRBJ2-3)
CASQQPGAGGADTQYF

SEQ ID NO: 86247 - protein, 15 aa, Homo sapiens
  CDR3 for alpha chain variable domain of TCR clone 43124 (TRAV12-3, TRAJ27)
CSMRAYNTNAGKSTF

SEQ ID NO: 86248 - protein, 13 aa, Homo sapiens
  CDR3 for beta chain variable domain of TCR clone 43124 (TRBV11-2, TRBJ2-5)
CASSRGPSETQYF

SEQ ID NO: 86249 - protein, 14 aa, Homo sapiens
  CDR3 for alpha chain variable domain of TCR clone 43125 (TRAV26-1, TRAJ38)
CIADNAGNNRKLIW

SEQ ID NO: 86250 - protein, 12 aa, Homo sapiens
  CDR3 for beta chain variable domain of TCR clone 43125 (TRBV19, TRBJ1-5)
CASSIAQQPQHF

SEQ ID NO: 86251 - protein, 12 aa, Homo sapiens
  CDR3 for alpha chain variable domain of TCR clone 43126 (TRAV8-3, TRAJ20)
CAVGANDYKLSF

SEQ ID NO: 86252 - protein, 16 aa, Homo sapiens
  CDR3 for beta chain variable domain of TCR clone 43126 (TRBV19, TRBJ1-1)
CASRPRSEALNTEAFF

SEQ ID NO: 86253 - protein, 13 aa, Homo sapiens
  CDR3 for alpha chain variable domain of TCR clone 43127 (TRAV20, TRAJ21)
CAVEGYSFNKFYF

SEQ ID NO: 86254 - protein, 14 aa, Homo sapiens
  CDR3 for beta chain variable domain of TCR clone 43127 (TRBV3-1, TRBJ2-5)
CASSQGPDQETQYF

SEQ ID NO: 86255 - protein, 10 aa, Homo sapiens
  CDR3 for alpha chain variable domain of TCR clone 43128 (TRAV1-2, TRAJ20)
CALNDYRLSF

SEQ ID NO: 86256 - protein, 16 aa, Homo sapiens
  CDR3 for beta chain variable domain of TCR clone 43128 (TRBV20-1, TRBJ1-1)
CSARALTQGMNTEAFF

SEQ ID NO: 86257 - protein, 14 aa, Homo sapiens
  CDR3 for alpha chain variable domain of TCR clone 43129 (TRAV1-2, TRAJ8)
CAVREDTGFQKLVF

SEQ ID NO: 86258 - protein, 15 aa, Homo sapiens
  CDR3 for beta chain variable domain of TCR clone 43129 (TRBV6-3, TRBJ2-7)
FASSSPGTVFYEQYF

SEQ ID NO: 86259 - protein, 15 aa, Homo sapiens
  CDR3 for alpha chain variable domain of TCR clone 43130 (TRAV27, TRAJ38)
CAARRNAGNNRKLIW

SEQ ID NO: 86260 - protein, 14 aa, Homo sapiens
  CDR3 for beta chain variable domain of TCR clone 43130 (TRBV11-2, TRBJ2-3)
CASSRLARTDTQYF

SEQ ID NO: 86261 - protein, 13 aa, Homo sapiens
  CDR3 for alpha chain variable domain of TCR clone 43131 (TRAV12-2, TRAJ37)
CAGGSGNTGKLIF

SEQ ID NO: 86262 - protein, 14 aa, Homo sapiens
  CDR3 for beta chain variable domain of TCR clone 43131 (TRBV6-1, TRBJ2-6)
CASRQGAGANVLTF

SEQ ID NO: 86263 - protein, 15 aa, Homo sapiens
  CDR3 for alpha chain variable domain of TCR clone 43132 (TRAV27, TRAJ38)
CAARRNAGNNRKLIW

SEQ ID NO: 86264 - protein, 13 aa, Homo sapiens
  CDR3 for beta chain variable domain of TCR clone 43132 (TRBV20-1, TRBJ1-1)
CSARGGGNPEAFF

SEQ ID NO: 86265 - protein, 16 aa, Homo sapiens
  CDR3 for alpha chain variable domain of TCR clone 43133 (TRAV30, TRAJ24)
CGTEIVDADSWGKFQF

SEQ ID NO: 86266 - protein, 13 aa, Homo sapiens
  CDR3 for beta chain variable domain of TCR clone 43133 (TRBV18, TRBJ1-2)
CASAASATEGYTF

SEQ ID NO: 86267 - protein, 13 aa, Homo sapiens
  CDR3 for alpha chain variable domain of TCR clone 43134 (TRAV13-1, TRAJ39)
CSKYSNAGNMLTF

SEQ ID NO: 86268 - protein, 17 aa, Homo sapiens
  CDR3 for beta chain variable domain of TCR clone 43134 (TRBV7-3, TRBJ2-5)
CASSLGSGRSGSETQYF

SEQ ID NO: 86269 - protein, 18 aa, Homo sapiens
  CDR3 for alpha chain variable domain of TCR clone 43135 (TRAV26-1, TRAJ23)
CIVRVGLEVWNQGGTLIF

SEQ ID NO: 86270 - protein, 16 aa, Homo sapiens
  CDR3 for beta chain variable domain of TCR clone 43135 (TRBV12-4, TRBJ2-5)
CASSFFVRGRQETQYF

SEQ ID NO: 86271 - protein, 14 aa, Homo sapiens
  CDR3 for alpha chain variable domain of TCR clone 43136 (TRAV26-1, TRAJ22)
CIVRVHGSARQLTF

SEQ ID NO: 86272 - protein, 17 aa, Homo sapiens
  CDR3 for beta chain variable domain of TCR clone 43136 (TRBV7-3, TRBJ2-3)
CASSPGGLAGFGDTQYF

SEQ ID NO: 86273 - protein, 18 aa, Homo sapiens
  CDR3 for alpha chain variable domain of TCR clone 43137 (TRAV12-2, )
CAVEDIQNPDPAVYQLRD

SEQ ID NO: 86274 - protein, 18 aa, Homo sapiens
  CDR3 for beta chain variable domain of TCR clone 43137 (TRBV11-2, TRBJ2-3)
CASSLGGASRGAPNAQYF

SEQ ID NO: 86275 - protein, 12 aa, Homo sapiens
  CDR3 for alpha chain variable domain of TCR clone 43138 (TRAV3, TRAJ20)
CAVRDHDYKLSF

SEQ ID NO: 86276 - protein, 13 aa, Homo sapiens
  CDR3 for beta chain variable domain of TCR clone 43138 (TRBV9, TRBJ2-7)
CASSVGKGGEQYF

SEQ ID NO: 86277 - protein, 11 aa, Homo sapiens
  CDR3 for alpha chain variable domain of TCR clone 43139 (TRAV12-3, TRAJ27)
CAMANAGKSTF

SEQ ID NO: 86278 - protein, 13 aa, Homo sapiens
  CDR3 for beta chain variable domain of TCR clone 43139 (TRBV20-1, TRBJ1-1)
CSTRVGGNTEAFF

SEQ ID NO: 86279 - protein, 13 aa, Homo sapiens
  CDR3 for alpha chain variable domain of TCR clone 43140 (TRAV1-2, TRAJ9)
CAALNTGGFKTIF

SEQ ID NO: 86280 - protein, 13 aa, Homo sapiens
  CDR3 for beta chain variable domain of TCR clone 43140 (TRBV19, TRBJ1-2)
CASSVPGQDGYTF

SEQ ID NO: 86281 - protein, 23 aa, Homo sapiens
  CDR3 for alpha chain variable domain of TCR clone 43141 (TRAV26-1, TRAJ38)
CIADNAGNNHIQNPDPAVYQLRD

SEQ ID NO: 86282 - protein, 13 aa, Homo sapiens
  CDR3 for beta chain variable domain of TCR clone 43141 (TRBV20-1, TRBJ1-1)
GSARGGGNTEAFF

SEQ ID NO: 86283 - protein, 13 aa, Homo sapiens
  CDR3 for alpha chain variable domain of TCR clone 43142 (TRAV2, TRAJ29)
CAAGGPGNTPLVF

SEQ ID NO: 86284 - protein, 16 aa, Homo sapiens
  CDR3 for beta chain variable domain of TCR clone 43142 (TRBV5-4, TRBJ2-7)
CASSSKMTSGTYEQYF

SEQ ID NO: 86285 - protein, 15 aa, Homo sapiens
  CDR3 for alpha chain variable domain of TCR clone 43143 (TRAV3, TRAJ22)
CAVRDRGGSARQLTF

SEQ ID NO: 86286 - protein, 15 aa, Homo sapiens
  CDR3 for beta chain variable domain of TCR clone 43143 (TRBV7-9, TRBJ1-4)
CASSARTGGNEKLFF

SEQ ID NO: 86287 - protein, 12 aa, Homo sapiens
  CDR3 for alpha chain variable domain of TCR clone 43144 (TRAV13-1, TRAJ21)
CAAKEGFNKFYF

SEQ ID NO: 86288 - protein, 15 aa, Homo sapiens
  CDR3 for beta chain variable domain of TCR clone 43144 (TRBV15, TRBJ1-5)
CATSRDPVSNQPRHF

SEQ ID NO: 86289 - protein, 15 aa, Homo sapiens
  CDR3 for alpha chain variable domain of TCR clone 43145 (TRAV4, TRAJ39)
CLVGPSNNAGNMLTF

SEQ ID NO: 86290 - protein, 15 aa, Homo sapiens
  CDR3 for beta chain variable domain of TCR clone 43145 (TRBV19, TRBJ1-1)
CASTSGQIQNTEAFF

SEQ ID NO: 86291 - protein, 17 aa, Homo sapiens
  CDR3 for alpha chain variable domain of TCR clone 43146 (TRAV3, TRAJ12)
CAVRDGGRMDSSYKLIF

SEQ ID NO: 86292 - protein, 14 aa, Homo sapiens
  CDR3 for beta chain variable domain of TCR clone 43146 (TRBV7-9, TRBJ1-2)
CASSRQGANYGYAF

SEQ ID NO: 86293 - protein, 16 aa, Homo sapiens
  CDR3 for alpha chain variable domain of TCR clone 43147 (TRAV30, TRAJ24)
CGTEIVDADSWGKFQV

SEQ ID NO: 86294 - protein, 12 aa, Homo sapiens
  CDR3 for beta chain variable domain of TCR clone 43147 (TRBV11-2, TRBJ2-1)
CASSPGNNEQFF

SEQ ID NO: 86295 - protein, 15 aa, Homo sapiens
  CDR3 for alpha chain variable domain of TCR clone 43148 (TRAV16, TRAJ16)
CALQGGGSDGQKLPF

SEQ ID NO: 86296 - protein, 15 aa, Homo sapiens
  CDR3 for beta chain variable domain of TCR clone 43148 (TRBV20-1, TRBJ2-7)
CSARDRVSGMDEQYF

SEQ ID NO: 86297 - protein, 12 aa, Homo sapiens
  CDR3 for alpha chain variable domain of TCR clone 43149 (TRAV21, TRAJ27)
CSPPGNAGKSTF

SEQ ID NO: 86298 - protein, 13 aa, Homo sapiens
  CDR3 for beta chain variable domain of TCR clone 43149 (TRBV2, TRBJ1-1)
CARNPTGGFHAFF

SEQ ID NO: 86299 - protein, 14 aa, Homo sapiens
  CDR3 for alpha chain variable domain of TCR clone 43150 (TRAV12-3, TRAJ20)
CAMSARRGDYKLSF

SEQ ID NO: 86300 - protein, 14 aa, Homo sapiens
  CDR3 for beta chain variable domain of TCR clone 43150 (TRBV7-3, TRBJ2-3)
CASSPSAGTDTQYF

SEQ ID NO: 86301 - protein, 14 aa, Homo sapiens
  CDR3 for alpha chain variable domain of TCR clone 43151 (TRAV26-1, TRAJ40)
CIVRVARGTYKCIF

SEQ ID NO: 86302 - protein, 14 aa, Homo sapiens
  CDR3 for beta chain variable domain of TCR clone 43151 (TRBV7-3, TRBJ2-7)
CASSLKADSYEQYF

SEQ ID NO: 86303 - protein, 14 aa, Homo sapiens
  CDR3 for alpha chain variable domain of TCR clone 43152 (TRAV22, TRAJ6)
CAGVGPGGSYIPTF

SEQ ID NO: 86304 - protein, 14 aa, Homo sapiens
  CDR3 for beta chain variable domain of TCR clone 43152 (TRBV19, TRBJ2-2)
CASSTLHRSGELFF

SEQ ID NO: 86305 - protein, 13 aa, Homo sapiens
  CDR3 for alpha chain variable domain of TCR clone 43153 (TRAV12-1, TRAJ40)
CVVNSSGTYEYIF

SEQ ID NO: 86306 - protein, 14 aa, Homo sapiens
  CDR3 for beta chain variable domain of TCR clone 43153 (TRBV2, TRBJ1-6)
CASEVSSYNSPLHF

SEQ ID NO: 86307 - protein, 15 aa, Homo sapiens
  CDR3 for alpha chain variable domain of TCR clone 43154 (TRAV14/DV4, TRAJ49)
CAMREGHDTGNQFYF

SEQ ID NO: 86308 - protein, 17 aa, Homo sapiens
  CDR3 for beta chain variable domain of TCR clone 43154 (TRBV12-4, TRBJ1-5)
CASSLRGDRGPNQPQHF

SEQ ID NO: 86309 - protein, 18 aa, Homo sapiens
  CDR3 for alpha chain variable domain of TCR clone 43155 (TRAV21, TRAJ52)
CAVGPSPAGGTSYGRLTS

SEQ ID NO: 86310 - protein, 17 aa, Homo sapiens
  CDR3 for beta chain variable domain of TCR clone 43155 (TRBV13, TRBJ2-3)
CASSLSRVAGGRNTQYF

SEQ ID NO: 86311 - protein, 16 aa, Homo sapiens
  CDR3 for alpha chain variable domain of TCR clone 43156 (TRAV13-1, TRAJ37)
CAASSLGSSNTGNLIF

SEQ ID NO: 86312 - protein, 12 aa, Homo sapiens
  CDR3 for beta chain variable domain of TCR clone 43156 (TRBV6-1, TRBJ2-5)
CASSEGRETQYF

SEQ ID NO: 86313 - protein, 13 aa, Homo sapiens
  CDR3 for alpha chain variable domain of TCR clone 43157 (TRAV12-3, TRAJ6)
CANPSGGSYIPAF

SEQ ID NO: 86314 - protein, 14 aa, Homo sapiens
  CDR3 for beta chain variable domain of TCR clone 43157 (TRBV19, TRBJ1-1)
CASSRDRDATEAFF

SEQ ID NO: 86315 - protein, 16 aa, Homo sapiens
  CDR3 for alpha chain variable domain of TCR clone 43158 (TRAV3, TRAJ37)
CAVRGKGSGNTGKLIF

SEQ ID NO: 86316 - protein, 15 aa, Homo sapiens
  CDR3 for beta chain variable domain of TCR clone 43158 (TRBV7-9, TRBJ1-6)
CASSSPGRGNSTLHF

SEQ ID NO: 86317 - protein, 15 aa, Homo sapiens
  CDR3 for alpha chain variable domain of TCR clone 43159 (TRAV8-1, TRAJ6)
CAVNTPPEGSYIPTF

SEQ ID NO: 86318 - protein, 14 aa, Homo sapiens
  CDR3 for beta chain variable domain of TCR clone 43159 (TRBV12-4, TRBJ2-1)
CASSLGQGASEQFF

SEQ ID NO: 86319 - protein, 13 aa, Homo sapiens
  CDR3 for alpha chain variable domain of TCR clone 43160 (TRAV35, TRAJ42)
CAGFPGSQGSLIF

SEQ ID NO: 86320 - protein, 13 aa, Homo sapiens
  CDR3 for beta chain variable domain of TCR clone 43160 (TRBV29-1, TRBJ2-1)
CSVEGGRVNEQFF

SEQ ID NO: 86321 - protein, 11 aa, Homo sapiens
  CDR3 for alpha chain variable domain of TCR clone 43161 (TRAV21, TRAJ39)
LLVDAGNMLTF

SEQ ID NO: 86322 - protein, 17 aa, Homo sapiens
  CDR3 for beta chain variable domain of TCR clone 43161 (TRBV7-8, TRBJ2-6)
CASSAGTGGAGANVLTF

SEQ ID NO: 86323 - protein, 14 aa, Homo sapiens
  CDR3 for alpha chain variable domain of TCR clone 43162 (TRAV12-1, TRAJ30)
CVPTGTNRDDKVIF

SEQ ID NO: 86324 - protein, 11 aa, Homo sapiens
  CDR3 for beta chain variable domain of TCR clone 43162 (TRBV4-1, TRBJ2-2)
CASEHTGELFF

SEQ ID NO: 86325 - protein, 19 aa, Homo sapiens
  CDR3 for alpha chain variable domain of TCR clone 43163 (TRAV1-2, TRAJ26)
CLLPLCCERPDNYGQNFVF

SEQ ID NO: 86326 - protein, 12 aa, Homo sapiens
  CDR3 for beta chain variable domain of TCR clone 43163 (TRBV7-9, TRBJ2-7)
RATRTDAYEQYF

SEQ ID NO: 86327 - protein, 10 aa, Homo sapiens
  CDR3 for alpha chain variable domain of TCR clone 43164 (TRAV12-3, TRAJ49)
CAMNDDQFYF

SEQ ID NO: 86328 - protein, 13 aa, Homo sapiens
  CDR3 for beta chain variable domain of TCR clone 43164 (TRBV12-4, TRBJ1-1)
CASSPGTVFEAFF

SEQ ID NO: 86329 - protein, 15 aa, Homo sapiens
  CDR3 for alpha chain variable domain of TCR clone 43165 (TRAV2, TRAJ9)
CAVEDRGTGGFKTIF

SEQ ID NO: 86330 - protein, 13 aa, Homo sapiens
  CDR3 for beta chain variable domain of TCR clone 43165 (TRBV19, TRBJ1-2)
CASSAPGQDGYTF

SEQ ID NO: 86331 - protein, 14 aa, Homo sapiens
  CDR3 for alpha chain variable domain of TCR clone 43166 (TRAV12-2, TRAJ36)
CAVNPPTGANNLFF

SEQ ID NO: 86332 - protein, 13 aa, Homo sapiens
  CDR3 for beta chain variable domain of TCR clone 43166 (TRBV20-1, TRBJ1-6)
CSAPTGLGSPLYF

SEQ ID NO: 86333 - protein, 13 aa, Homo sapiens
  CDR3 for alpha chain variable domain of TCR clone 43167 (TRAV3, TRAJ21)
CAVREPDFNKFYF

SEQ ID NO: 86334 - protein, 15 aa, Homo sapiens
  CDR3 for beta chain variable domain of TCR clone 43167 (TRBV19, TRBJ1-1)
CASTSGQIQNTEAFF

SEQ ID NO: 86335 - protein, 16 aa, Homo sapiens
  CDR3 for alpha chain variable domain of TCR clone 43168 (TRAV14/DV4, TRAJ21)
CAMREGPENNFNKFCF

SEQ ID NO: 86336 - protein, 12 aa, Homo sapiens
  CDR3 for beta chain variable domain of TCR clone 43168 (TRBV29-1, TRBJ2-2)
CSVDKYTGELFF

SEQ ID NO: 86337 - protein, 12 aa, Homo sapiens
  CDR3 for alpha chain variable domain of TCR clone 43169 (TRAV21, TRAJ33)
CAKMDSNYQLIW

SEQ ID NO: 86338 - protein, 15 aa, Homo sapiens
  CDR3 for beta chain variable domain of TCR clone 43169 (TRBV11-3, TRBJ2-3)
CASLKDGREGDTQYF

SEQ ID NO: 86339 - protein, 10 aa, Homo sapiens
  CDR3 for alpha chain variable domain of TCR clone 43170 (TRAV23/DV6, TRAJ31)
CARGGARLMF

SEQ ID NO: 86340 - protein, 14 aa, Homo sapiens
  CDR3 for beta chain variable domain of TCR clone 43170 (TRBV7-8, TRBJ1-2)
CASSPDSLSYGDTF

SEQ ID NO: 86341 - protein, 14 aa, Homo sapiens
  CDR3 for alpha chain variable domain of TCR clone 43171 (TRAV25, TRAJ53)
CSHGGGGSNYKLTF

SEQ ID NO: 86342 - protein, 19 aa, Homo sapiens
  CDR3 for beta chain variable domain of TCR clone 43171 (TRBV7-2, TRBJ2-3)
CASSFLSRNWGGGTDTQYF

SEQ ID NO: 86343 - protein, 16 aa, Homo sapiens
  CDR3 for alpha chain variable domain of TCR clone 43172 (TRAV1-2, TRAJ10)
CAVRGVLTGGGNKLTF

SEQ ID NO: 86344 - protein, 14 aa, Homo sapiens
  CDR3 for beta chain variable domain of TCR clone 43172 (TRBV7-8, TRBJ2-7)
CASSLGDREQYLGR

SEQ ID NO: 86345 - protein, 14 aa, Homo sapiens
  CDR3 for alpha chain variable domain of TCR clone 43173 (TRAV16, TRAJ33)
CALSAMDSNYQLIW

SEQ ID NO: 86346 - protein, 12 aa, Homo sapiens
  CDR3 for beta chain variable domain of TCR clone 43173 (TRBV5-1, TRBJ1-2)
CASSQDSYGYTF

SEQ ID NO: 86347 - protein, 14 aa, Homo sapiens
  CDR3 for alpha chain variable domain of TCR clone 43174 (TRAV8-2, TRAJ37)
CVVSLTGNTGKLIF

SEQ ID NO: 86348 - protein, 15 aa, Homo sapiens
  CDR3 for beta chain variable domain of TCR clone 43174 (TRBV7-2, TRBJ2-1)
CASSSGLAGGNEQFF

SEQ ID NO: 86349 - protein, 11 aa, Homo sapiens
  CDR3 for alpha chain variable domain of TCR clone 43175 (TRAV17, TRAJ9)
CGFTGGFKTIF

SEQ ID NO: 86350 - protein, 11 aa, Homo sapiens
  CDR3 for beta chain variable domain of TCR clone 43175 (TRBV11-2, TRBJ2-2)
CASSLPGELFF

SEQ ID NO: 86351 - protein, 16 aa, Homo sapiens
  CDR3 for alpha chain variable domain of TCR clone 43176 (TRAV27, TRAJ53)
CAAPEGSGGSNYKLTF

SEQ ID NO: 86352 - protein, 12 aa, Homo sapiens
  CDR3 for beta chain variable domain of TCR clone 43176 (TRBV11-2, TRBJ2-2)
CASSLGGGELFF

SEQ ID NO: 86353 - protein, 15 aa, Homo sapiens
  CDR3 for alpha chain variable domain of TCR clone 43177 (TRAV26-1, TRAJ29)
CIVRVEGSGNTPLVF

SEQ ID NO: 86354 - protein, 15 aa, Homo sapiens
  CDR3 for beta chain variable domain of TCR clone 43177 (TRBV7-2, TRBJ2-3)
CASSLAGAFIDTQYF

SEQ ID NO: 86355 - protein, 14 aa, Homo sapiens
  CDR3 for alpha chain variable domain of TCR clone 43178 (TRAV1-2, TRAJ8)
CAVREDTGFQKLVF

SEQ ID NO: 86356 - protein, 18 aa, Homo sapiens
  CDR3 for beta chain variable domain of TCR clone 43178 (TRBV4-1, TRBJ1-4)
CASSQDLRRGEKNCFLAV

SEQ ID NO: 86357 - protein, 12 aa, Homo sapiens
  CDR3 for alpha chain variable domain of TCR clone 43179 (TRAV35, TRAJ49)
CAGWNTGNQFYF

SEQ ID NO: 86358 - protein, 16 aa, Homo sapiens
  CDR3 for beta chain variable domain of TCR clone 43179 (TRBV5-1, TRBJ2-2)
CASGLWDTTNTGELFF

SEQ ID NO: 86359 - protein, 12 aa, Homo sapiens
  CDR3 for alpha chain variable domain of TCR clone 43180 (TRAV2, TRAJ10)
CASTGGGNKLTF

SEQ ID NO: 86360 - protein, 14 aa, Homo sapiens
  CDR3 for beta chain variable domain of TCR clone 43180 (TRBV7-2, TRBJ1-1)
CASSFLTGTTEAFF

SEQ ID NO: 86361 - protein, 13 aa, Homo sapiens
  CDR3 for alpha chain variable domain of TCR clone 43181 (TRAV12-3, TRAJ41)
CAIAPNSGYALNF

SEQ ID NO: 86362 - protein, 14 aa, Homo sapiens
  CDR3 for beta chain variable domain of TCR clone 43181 (TRBV25-1, TRBJ1-1)
CASTHLGGNTEAFF

SEQ ID NO: 86363 - protein, 18 aa, Homo sapiens
  CDR3 for alpha chain variable domain of TCR clone 43182 (TRAV13-1, TRAJ52)
CAAKNPNAGGTSNGKLTF

SEQ ID NO: 86364 - protein, 15 aa, Homo sapiens
  CDR3 for beta chain variable domain of TCR clone 43182 (TRBV6-1, TRBJ2-3)
CASSERGGITDTQYF

SEQ ID NO: 86365 - protein, 14 aa, Homo sapiens
  CDR3 for alpha chain variable domain of TCR clone 43183 (TRAV2, TRAJ37)
CAVDFTSNTGKLIF

SEQ ID NO: 86366 - protein, 14 aa, Homo sapiens
  CDR3 for beta chain variable domain of TCR clone 43183 (TRBV5-1, TRBJ2-5)
CASSFGGSQETQHF

SEQ ID NO: 86367 - protein, 16 aa, Homo sapiens
  CDR3 for alpha chain variable domain of TCR clone 43184 (TRAV12-2, TRAJ32)
CAVNLGQGGATDKLIF

SEQ ID NO: 86368 - protein, 15 aa, Homo sapiens
  CDR3 for beta chain variable domain of TCR clone 43184 (TRBV20-1, TRBJ2-7)
CSARGPLAGGREQYF

SEQ ID NO: 86369 - protein, 12 aa, Homo sapiens
  CDR3 for alpha chain variable domain of TCR clone 43185 (TRAV13-2, TRAJ8)
CAPWLGFQKLVF

SEQ ID NO: 86370 - protein, 13 aa, Homo sapiens
  CDR3 for beta chain variable domain of TCR clone 43185 (TRBV25-1, TRBJ1-2)
CASSEAGASGYTF

SEQ ID NO: 86371 - protein, 12 aa, Homo sapiens
  CDR3 for alpha chain variable domain of TCR clone 43186 (TRAV13-1, TRAJ21)
CAAKEGFDKFYF

SEQ ID NO: 86372 - protein, 18 aa, Homo sapiens
  CDR3 for beta chain variable domain of TCR clone 43186 (TRBV20-1, TRBJ2-6)
CSAETTPTHGSGANVLTF

SEQ ID NO: 86373 - protein, 16 aa, Homo sapiens
  CDR3 for alpha chain variable domain of TCR clone 43187 (TRAV13-2, TRAJ32)
CAENMNYGGATNKLIF

SEQ ID NO: 86374 - protein, 14 aa, Homo sapiens
  CDR3 for beta chain variable domain of TCR clone 43187 (TRBV15, TRBJ2-5)
CATSSTGYKETQYF

SEQ ID NO: 86375 - protein, 16 aa, Homo sapiens
  CDR3 for alpha chain variable domain of TCR clone 43188 (TRAV30, TRAJ24)
CGTEIVDADSWGKFPF

SEQ ID NO: 86376 - protein, 19 aa, Homo sapiens
  CDR3 for beta chain variable domain of TCR clone 43188 (TRBV25-1, TRBJ2-2)
CAILVYRVDRGRKTGELFF

SEQ ID NO: 86377 - protein, 12 aa, Homo sapiens
  CDR3 for alpha chain variable domain of TCR clone 43189 (TRAV3, TRAJ27)
CAVRGGAGKSTF

SEQ ID NO: 86378 - protein, 13 aa, Homo sapiens
  CDR3 for beta chain variable domain of TCR clone 43189 (TRBV10-3, TRBJ1-2)
CAINADLNYGYTF

SEQ ID NO: 86379 - protein, 12 aa, Homo sapiens
  CDR3 for alpha chain variable domain of TCR clone 43190 (TRAV1-1, TRAJ9)
CAVDTGGFKAIF

SEQ ID NO: 86380 - protein, 14 aa, Homo sapiens
  CDR3 for beta chain variable domain of TCR clone 43190 (TRBV7-8, TRBJ2-5)
CASSATGGQETQYF

SEQ ID NO: 86381 - protein, 16 aa, Homo sapiens
  CDR3 for alpha chain variable domain of TCR clone 43191 (TRAV1-2, TRAJ10)
CAVRGVLTGGGNKLTF

SEQ ID NO: 86382 - protein, 15 aa, Homo sapiens
  CDR3 for beta chain variable domain of TCR clone 43191 (TRBV18, TRBJ1-1)
CASSPRQGENTEAFF

SEQ ID NO: 86383 - protein, 15 aa, Homo sapiens
  CDR3 for alpha chain variable domain of TCR clone 43192 (TRAV12-1, TRAJ42)
CVVTRDGGSQGNLTF

SEQ ID NO: 86384 - protein, 14 aa, Homo sapiens
  CDR3 for beta chain variable domain of TCR clone 43192 (TRBV11-2, TRBJ2-3)
CASSLGGGANTQYF

SEQ ID NO: 86385 - protein, 18 aa, Homo sapiens
  CDR3 for alpha chain variable domain of TCR clone 43193 (TRAV13-1, TRAJ52)
CAAKNPNAGGNSYGKLTF

SEQ ID NO: 86386 - protein, 15 aa, Homo sapiens
  CDR3 for beta chain variable domain of TCR clone 43193 (TRBV6-1, TRBJ2-3)
CASSERGGITDTQYF

SEQ ID NO: 86387 - protein, 19 aa, Homo sapiens
  CDR3 for alpha chain variable domain of TCR clone 43194 (TRAV26-1, TRAJ52)
CIVRAHRNAGGTSYGKLTF

SEQ ID NO: 86388 - protein, 15 aa, Homo sapiens
  CDR3 for beta chain variable domain of TCR clone 43194 (TRBV12-4, TRBJ2-5)
CASSPPTGLQETQYV

SEQ ID NO: 86389 - protein, 12 aa, Homo sapiens
  CDR3 for alpha chain variable domain of TCR clone 43195 (TRAV3, TRAJ20)
CAVRDGDYKLSF

SEQ ID NO: 86390 - protein, 14 aa, Homo sapiens
  CDR3 for beta chain variable domain of TCR clone 43195 (TRBV19, TRBJ2-7)
CASNFRDTFTGMYF

SEQ ID NO: 86391 - protein, 14 aa, Homo sapiens
  CDR3 for alpha chain variable domain of TCR clone 43196 (TRAV21, TRAJ35)
CAVMPIGFGNVLHC

SEQ ID NO: 86392 - protein, 12 aa, Homo sapiens
  CDR3 for beta chain variable domain of TCR clone 43196 (TRBV7-9, TRBJ2-7)
CASSIKREVQYF

SEQ ID NO: 86393 - protein, 15 aa, Homo sapiens
  CDR3 for alpha chain variable domain of TCR clone 43197 (TRAV27, TRAJ38)
CAARRNAGNNRKLIW

SEQ ID NO: 86394 - protein, 14 aa, Homo sapiens
  CDR3 for beta chain variable domain of TCR clone 43197 (TRBV6-1, TRBJ1-3)
CAGVQGGGGNTIYF

SEQ ID NO: 86395 - protein, 14 aa, Homo sapiens
  CDR3 for alpha chain variable domain of TCR clone 43198 (TRAV8-2, TRAJ6)
CVVISAGGSYIPTF

SEQ ID NO: 86396 - protein, 16 aa, Homo sapiens
  CDR3 for beta chain variable domain of TCR clone 43198 (TRBV7-6, TRBJ2-6)
CASNLPGLSGANVLTF

SEQ ID NO: 86397 - protein, 12 aa, Homo sapiens
  CDR3 for alpha chain variable domain of TCR clone 43199 (TRAV12-3, TRAJ17)
CAMTLTGNKLTF

SEQ ID NO: 86398 - protein, 14 aa, Homo sapiens
  CDR3 for beta chain variable domain of TCR clone 43199 (TRBV5-1, TRBJ2-1)
CASSALWAGNEQFF

SEQ ID NO: 86399 - protein, 11 aa, Homo sapiens
  CDR3 for alpha chain variable domain of TCR clone 43200 (TRAV20, TRAJ23)
CACNQGGKLIF

SEQ ID NO: 86400 - protein, 16 aa, Homo sapiens
  CDR3 for beta chain variable domain of TCR clone 43200 (TRBV19, TRBJ2-1)
CASSKAGPSSYNEQFF

SEQ ID NO: 86401 - protein, 12 aa, Homo sapiens
  CDR3 for alpha chain variable domain of TCR clone 43201 (TRAV12-1, TRAJ40)
CVVYSGTYKYIF

SEQ ID NO: 86402 - protein, 18 aa, Homo sapiens
  CDR3 for beta chain variable domain of TCR clone 43201 (TRBV11-2, TRBJ2-3)
CASSLGGASRRAPNTQYF

SEQ ID NO: 86403 - protein, 12 aa, Homo sapiens
  CDR3 for alpha chain variable domain of TCR clone 43202 (TRAV21, TRAJ3)
CCFYSSASKIIF

SEQ ID NO: 86404 - protein, 16 aa, Homo sapiens
  CDR3 for beta chain variable domain of TCR clone 43202 (TRBV19, TRBJ2-1)
CASSKAGPSAYNEQFF

SEQ ID NO: 86405 - protein, 12 aa, Homo sapiens
  CDR3 for alpha chain variable domain of TCR clone 43203 (TRAV8-3, TRAJ26)
CAGDNYGQNFVF

SEQ ID NO: 86406 - protein, 15 aa, Homo sapiens
  CDR3 for beta chain variable domain of TCR clone 43203 (TRBV9, TRBJ2-1)
CSSSLAGSSYNEQFF

SEQ ID NO: 86407 - protein, 14 aa, Homo sapiens
  CDR3 for alpha chain variable domain of TCR clone 43204 (TRAV13-2, TRAJ48)
CAEVGLFGNEKLTF

SEQ ID NO: 86408 - protein, 19 aa, Homo sapiens
  CDR3 for beta chain variable domain of TCR clone 43204 (TRBV27, TRBJ2-2)
CASRPGTGQPSRDTGELFF

SEQ ID NO: 86409 - protein, 14 aa, Homo sapiens
  CDR3 for alpha chain variable domain of TCR clone 43205 (TRAV21, TRAJ35)
CAVMPIGFGNVLHC

SEQ ID NO: 86410 - protein, 12 aa, Homo sapiens
  CDR3 for beta chain variable domain of TCR clone 43205 (TRBV7-9, TRBJ2-7)
CASSIKREKQYF

SEQ ID NO: 86411 - protein, 16 aa, Homo sapiens
  CDR3 for alpha chain variable domain of TCR clone 43206 (TRAV12-3, TRAJ53)
CAMSPGSGGSNYKLTF

SEQ ID NO: 86412 - protein, 11 aa, Homo sapiens
  CDR3 for beta chain variable domain of TCR clone 43206 (TRBV29-1, TRBJ2-5)
CSVDRTGTQYF

SEQ ID NO: 86413 - protein, 12 aa, Homo sapiens
  CDR3 for alpha chain variable domain of TCR clone 43207 (TRAV35, TRAJ33)
PRGRDSNYQLIW

SEQ ID NO: 86414 - protein, 11 aa, Homo sapiens
  CDR3 for beta chain variable domain of TCR clone 43207 (TRBV10-3, TRBJ2-7)
CAISEGLEQYF

SEQ ID NO: 86415 - protein, 14 aa, Homo sapiens
  CDR3 for alpha chain variable domain of TCR clone 43208 (TRAV2, TRAJ9)
CAVEDRSGGFKTIF

SEQ ID NO: 86416 - protein, 17 aa, Homo sapiens
  CDR3 for beta chain variable domain of TCR clone 43208 (TRBV20-1, TRBJ2-1)
CSASSSGLAGSYNEQFF

SEQ ID NO: 86417 - protein, 19 aa, Homo sapiens
  CDR3 for alpha chain variable domain of TCR clone 43209 (TRAV25, TRAJ20)
TATQTTDVGILPHDYKLSF

SEQ ID NO: 86418 - protein, 16 aa, Homo sapiens
  CDR3 for beta chain variable domain of TCR clone 43209 (TRBV7-2, TRBJ2-2)
CASSLYRGPNTGELFF

SEQ ID NO: 86419 - protein, 11 aa, Homo sapiens
  CDR3 for alpha chain variable domain of TCR clone 43210 (TRAV17, TRAJ39)
CATGAGNMLTF

SEQ ID NO: 86420 - protein, 16 aa, Homo sapiens
  CDR3 for beta chain variable domain of TCR clone 43210 (TRBV5-1, TRBJ2-1)
CASSCGVSGSYNEQFF

SEQ ID NO: 86421 - protein, 13 aa, Homo sapiens
  CDR3 for alpha chain variable domain of TCR clone 43211 (TRAV12-2, TRAJ39)
CAVNNNAGNMLTF

SEQ ID NO: 86422 - protein, 15 aa, Homo sapiens
  CDR3 for beta chain variable domain of TCR clone 43211 (TRBV2, TRBJ2-7)
CASTLLGSGATEQYF

SEQ ID NO: 86423 - protein, 13 aa, Homo sapiens
  CDR3 for alpha chain variable domain of TCR clone 43212 (TRAV12-3, TRAJ20)
CAMRRSNDYKLSF

SEQ ID NO: 86424 - protein, 15 aa, Homo sapiens
  CDR3 for beta chain variable domain of TCR clone 43212 (TRBV9, TRBJ2-3)
RASSVAGGRSDTQYF

SEQ ID NO: 86425 - protein, 13 aa, Homo sapiens
  CDR3 for alpha chain variable domain of TCR clone 43213 (TRAV26-2, TRAJ43)
CILRAVNNNDMRF

SEQ ID NO: 86426 - protein, 15 aa, Homo sapiens
  CDR3 for beta chain variable domain of TCR clone 43213 (TRBV7-2, TRBJ2-1)
CASTHRTGIYNEQFF

SEQ ID NO: 86427 - protein, 14 aa, Homo sapiens
  CDR3 for alpha chain variable domain of TCR clone 43214 (TRAV12-2, TRAJ11)
CAVEGGSGYSTLTF

SEQ ID NO: 86428 - protein, 16 aa, Homo sapiens
  CDR3 for beta chain variable domain of TCR clone 43214 (TRBV7-3, TRBJ2-2)
CASSLKRGTLSGELFF

SEQ ID NO: 86429 - protein, 12 aa, Homo sapiens
  CDR3 for alpha chain variable domain of TCR clone 43215 (TRAV12-2, TRAJ47)
CAVAEYGNKLVF

SEQ ID NO: 86430 - protein, 14 aa, Homo sapiens
  CDR3 for beta chain variable domain of TCR clone 43215 (TRBV20-1, TRBJ1-1)
CSAMGGTANTEALF

SEQ ID NO: 86431 - protein, 15 aa, Homo sapiens
  CDR3 for alpha chain variable domain of TCR clone 43216 (TRAV3, TRAJ3)
CAVRDGHSSASNIIF

SEQ ID NO: 86432 - protein, 14 aa, Homo sapiens
  CDR3 for beta chain variable domain of TCR clone 43216 (TRBV28, TRBJ1-4)
CASSFGTFDEKLFF

SEQ ID NO: 86433 - protein, 11 aa, Homo sapiens
  CDR3 for alpha chain variable domain of TCR clone 43217 (TRAV2, TRAJ13)
CASGGYQKVTF

SEQ ID NO: 86434 - protein, 14 aa, Homo sapiens
  CDR3 for beta chain variable domain of TCR clone 43217 (TRBV6-3, TRBJ1-1)
CAGSNLLPGAEAFF

SEQ ID NO: 86435 - protein, 11 aa, Homo sapiens
  CDR3 for alpha chain variable domain of TCR clone 43218 (TRAV3, TRAJ21)
CAVGNFNKFYF

SEQ ID NO: 86436 - protein, 13 aa, Homo sapiens
  CDR3 for beta chain variable domain of TCR clone 43218 (TRBV7-9, TRBJ1-2)
CAGSLKQNYGYTF

SEQ ID NO: 86437 - protein, 12 aa, Homo sapiens
  CDR3 for alpha chain variable domain of TCR clone 43219 (TRAV13-2, TRAJ8)
CAPWLGFQRLVF

SEQ ID NO: 86438 - protein, 15 aa, Homo sapiens
  CDR3 for beta chain variable domain of TCR clone 43219 (TRBV12-4, TRBJ2-5)
CASSLSGAFQETQYF

SEQ ID NO: 86439 - protein, 11 aa, Homo sapiens
  CDR3 for alpha chain variable domain of TCR clone 43220 (TRAV1-2, TRAJ31)
CAVNNNARLML

SEQ ID NO: 86440 - protein, 16 aa, Homo sapiens
  CDR3 for beta chain variable domain of TCR clone 43220 (TRBV11-2, TRBJ2-1)
CASSPRLAGVYNEQFF

SEQ ID NO: 86441 - protein, 14 aa, Homo sapiens
  CDR3 for alpha chain variable domain of TCR clone 43221 (TRAV12-2, TRAJ28)
CAVGSGAGSYQLTF

SEQ ID NO: 86442 - protein, 14 aa, Homo sapiens
  CDR3 for beta chain variable domain of TCR clone 43221 (TRBV18, TRBJ1-4)
CASSPGPNGEKLFF

SEQ ID NO: 86443 - protein, 15 aa, Homo sapiens
  CDR3 for alpha chain variable domain of TCR clone 43222 (TRAV17, TRAJ23)
CATDAEYNQGGKLIF

SEQ ID NO: 86444 - protein, 12 aa, Homo sapiens
  CDR3 for beta chain variable domain of TCR clone 43222 (TRBV2, TRBJ2-1)
CAKREGYNEQFF

SEQ ID NO: 86445 - protein, 11 aa, Homo sapiens
  CDR3 for alpha chain variable domain of TCR clone 43223 (TRAV2, TRAJ13)
CASGGYLKVTF

SEQ ID NO: 86446 - protein, 16 aa, Homo sapiens
  CDR3 for beta chain variable domain of TCR clone 43223 (TRBV6-1, TRBJ2-5)
CASSETLDRGAETQYF

SEQ ID NO: 86447 - protein, 14 aa, Homo sapiens
  CDR3 for alpha chain variable domain of TCR clone 43224 (TRAV12-2, TRAJ5)
CAVNRSTGRRALTF

SEQ ID NO: 86448 - protein, 12 aa, Homo sapiens
  CDR3 for beta chain variable domain of TCR clone 43224 (TRBV19, TRBJ1-5)
CASSIAQKPQHF

SEQ ID NO: 86449 - protein, 13 aa, Homo sapiens
  CDR3 for alpha chain variable domain of TCR clone 43225 (TRAV12-3, TRAJ13)
CAMTSGGYQKVTF

SEQ ID NO: 86450 - protein, 13 aa, Homo sapiens
  CDR3 for beta chain variable domain of TCR clone 43225 (TRBV20-1, TRBJ2-2)
CSALSGGAGELLF

SEQ ID NO: 86451 - protein, 12 aa, Homo sapiens
  CDR3 for alpha chain variable domain of TCR clone 43226 (TRAV17, TRAJ12)
CAGGDSSYKLIF

SEQ ID NO: 86452 - protein, 12 aa, Homo sapiens
  CDR3 for beta chain variable domain of TCR clone 43226 (TRBV29-1, TRBJ1-1)
CSESDGNTEAFS

SEQ ID NO: 86453 - protein, 13 aa, Homo sapiens
  CDR3 for alpha chain variable domain of TCR clone 43227 (TRAV17, TRAJ5)
CATMDMGRRALTF

SEQ ID NO: 86454 - protein, 15 aa, Homo sapiens
  CDR3 for beta chain variable domain of TCR clone 43227 (TRBV20-1, TRBJ2-5)
CSATRTSGSLETQYF

SEQ ID NO: 86455 - protein, 17 aa, Homo sapiens
  CDR3 for alpha chain variable domain of TCR clone 43228 (TRAV3, TRAJ6)
CAVRDGPRAGGSYIPTC

SEQ ID NO: 86456 - protein, 14 aa, Homo sapiens
  CDR3 for beta chain variable domain of TCR clone 43228 (TRBV7-2, TRBJ2-7)
CASSPKTSFYEQYF

SEQ ID NO: 86457 - protein, 12 aa, Homo sapiens
  CDR3 for alpha chain variable domain of TCR clone 43229 (TRAV12-3, TRAJ41)
CAMSYSGYALNF

SEQ ID NO: 86458 - protein, 12 aa, Homo sapiens
  CDR3 for beta chain variable domain of TCR clone 43229 (TRBV20-1, TRBJ2-3)
CSADGAGDTQYF

SEQ ID NO: 86459 - protein, 15 aa, Homo sapiens
  CDR3 for alpha chain variable domain of TCR clone 43230 (TRAV12-3, TRAJ6)
CAMSATTGGSYIPTF

SEQ ID NO: 86460 - protein, 15 aa, Homo sapiens
  CDR3 for beta chain variable domain of TCR clone 43230 (TRBV10-3, TRBJ2-3)
CAISLTSGGTDTQYF

SEQ ID NO: 86461 - protein, 14 aa, Homo sapiens
  CDR3 for alpha chain variable domain of TCR clone 43231 (TRAV9-2, TRAJ39)
CALYIYNAGNMLTF

SEQ ID NO: 86462 - protein, 14 aa, Homo sapiens
  CDR3 for beta chain variable domain of TCR clone 43231 (TRBV11-2, TRBJ2-5)
CASSRTGGIETQYF

SEQ ID NO: 86463 - protein, 18 aa, Homo sapiens
  CDR3 for alpha chain variable domain of TCR clone 43232 (TRAV13-1, TRAJ52)
CAAKNPTAGGTSYGKLTF

SEQ ID NO: 86464 - protein, 15 aa, Homo sapiens
  CDR3 for beta chain variable domain of TCR clone 43232 (TRBV6-1, TRBJ2-3)
CASSERGGITDTQYF

SEQ ID NO: 86465 - protein, 11 aa, Homo sapiens
  CDR3 for alpha chain variable domain of TCR clone 43233 (TRAV2, TRAJ13)
CASGGYQKVTF

SEQ ID NO: 86466 - protein, 15 aa, Homo sapiens
  CDR3 for beta chain variable domain of TCR clone 43233 (TRBV11-2, TRBJ2-1)
CASSRNRGLMYEQFF

SEQ ID NO: 86467 - protein, 13 aa, Homo sapiens
  CDR3 for alpha chain variable domain of TCR clone 43234 (TRAV22, TRAJ26)
CAVEHNYGQNFVF

SEQ ID NO: 86468 - protein, 16 aa, Homo sapiens
  CDR3 for beta chain variable domain of TCR clone 43234 (TRBV7-2, TRBJ2-6)
CASSERRASGANVLAF

SEQ ID NO: 86469 - protein, 14 aa, Homo sapiens
  CDR3 for alpha chain variable domain of TCR clone 43235 (TRAV38-1, TRAJ29)
CAFITPSGNTPLVF

SEQ ID NO: 86470 - protein, 15 aa, Homo sapiens
  CDR3 for beta chain variable domain of TCR clone 43235 (TRBV20-1, TRBJ2-7)
CSARDRVSGMDEQYF

SEQ ID NO: 86471 - protein, 13 aa, Homo sapiens
  CDR3 for alpha chain variable domain of TCR clone 43236 (TRAV12-3, TRAJ9)
CAMRNTGGFKTIF

SEQ ID NO: 86472 - protein, 14 aa, Homo sapiens
  CDR3 for beta chain variable domain of TCR clone 43236 (TRBV19, TRBJ2-1)
CASPTFVLSGEQFF

SEQ ID NO: 86473 - protein, 13 aa, Homo sapiens
  CDR3 for alpha chain variable domain of TCR clone 43237 (TRAV12-3, TRAJ9)
CAMRNTGGFKTIF

SEQ ID NO: 86474 - protein, 14 aa, Homo sapiens
  CDR3 for beta chain variable domain of TCR clone 43237 (TRBV11-2, TRBJ1-2)
CASSLGTANYGYTF

SEQ ID NO: 86475 - protein, 11 aa, Homo sapiens
  CDR3 for alpha chain variable domain of TCR clone 43238 (TRAV3, TRAJ21)
CAVGNFNKFYF

SEQ ID NO: 86476 - protein, 13 aa, Homo sapiens
  CDR3 for beta chain variable domain of TCR clone 43238 (TRBV7-9, TRBJ2-3)
CASSPGSTDTQYF

SEQ ID NO: 86477 - protein, 14 aa, Homo sapiens
  CDR3 for alpha chain variable domain of TCR clone 43239 (TRAV20, TRAJ56)
CAVQFGGANSKLTF

SEQ ID NO: 86478 - protein, 14 aa, Homo sapiens
  CDR3 for beta chain variable domain of TCR clone 43239 (TRBV20-1, TRBJ2-7)
CIAKRGRSSYEQYF

SEQ ID NO: 86479 - protein, 11 aa, Homo sapiens
  CDR3 for alpha chain variable domain of TCR clone 43240 (TRAV1-1, TRAJ23)
CAVRQGGKLIF

SEQ ID NO: 86480 - protein, 20 aa, Homo sapiens
  CDR3 for beta chain variable domain of TCR clone 43240 (TRBV7-8, TRBJ2-2)
CANSHLFPGPTIHITGELFF

SEQ ID NO: 86481 - protein, 18 aa, Homo sapiens
  CDR3 for alpha chain variable domain of TCR clone 43241 (TRAV21, TRAJ52)
CAVRPSPAGGTSYGKLTF

SEQ ID NO: 86482 - protein, 16 aa, Homo sapiens
  CDR3 for beta chain variable domain of TCR clone 43241 (TRBV9, TRBJ2-1)
CASSVGGGGNYNEQFF

SEQ ID NO: 86483 - protein, 16 aa, Homo sapiens
  CDR3 for alpha chain variable domain of TCR clone 43242 (TRAV30, TRAJ24)
CGTEIVDADSWGKFQF

SEQ ID NO: 86484 - protein, 13 aa, Homo sapiens
  CDR3 for beta chain variable domain of TCR clone 43242 (TRBV7-2, TRBJ1-3)
CASSLAPGNTMYF

SEQ ID NO: 86485 - protein, 15 aa, Homo sapiens
  CDR3 for alpha chain variable domain of TCR clone 43243 (TRAV1-1, TRAJ5)
CAVRHMDTGRRALTF

SEQ ID NO: 86486 - protein, 12 aa, Homo sapiens
  CDR3 for beta chain variable domain of TCR clone 43243 (TRBV19, TRBJ1-5)
CASSIAQQPQHF

SEQ ID NO: 86487 - protein, 14 aa, Homo sapiens
  CDR3 for alpha chain variable domain of TCR clone 43244 (TRAV12-2, TRAJ13)
CAVKRTGGYQKVTF

SEQ ID NO: 86488 - protein, 14 aa, Homo sapiens
  CDR3 for beta chain variable domain of TCR clone 43244 (TRBV12-5, TRBJ2-5)
CASGSRTHQETQYF

SEQ ID NO: 86489 - protein, 14 aa, Homo sapiens
  CDR3 for alpha chain variable domain of TCR clone 43245 (TRAV12-3, TRAJ10)
SHLPLTGGGNKLTF

SEQ ID NO: 86490 - protein, 17 aa, Homo sapiens
  CDR3 for beta chain variable domain of TCR clone 43245 (TRBV27, TRBJ2-5)
CASRLRPGQGVQETQYF

SEQ ID NO: 86491 - protein, 12 aa, Homo sapiens
  CDR3 for alpha chain variable domain of TCR clone 43246 (TRAV16, TRAJ56)
CAPTGANSKLTF

SEQ ID NO: 86492 - protein, 17 aa, Homo sapiens
  CDR3 for beta chain variable domain of TCR clone 43246 (TRBV20-1, TRBJ2-2)
CSASGSGQGGLTGELFF

SEQ ID NO: 86493 - protein, 14 aa, Homo sapiens
  CDR3 for alpha chain variable domain of TCR clone 43247 (TRAV1-2, TRAJ16)
CAVNRFSGGQKLLF

SEQ ID NO: 86494 - protein, 16 aa, Homo sapiens
  CDR3 for beta chain variable domain of TCR clone 43247 (TRBV29-1, TRBJ2-7)
CSVEVVGTSGSYEQYF

SEQ ID NO: 86495 - protein, 18 aa, Homo sapiens
  CDR3 for alpha chain variable domain of TCR clone 43248 (TRAV12-3, TRAJ52)
CAMSVGGAGGTSYGKLTF

SEQ ID NO: 86496 - protein, 15 aa, Homo sapiens
  CDR3 for beta chain variable domain of TCR clone 43248 (TRBV27, TRBJ1-6)
CAISFDRGLGSPLHF

SEQ ID NO: 86497 - protein, 11 aa, Homo sapiens
  CDR3 for alpha chain variable domain of TCR clone 43249 (TRAV2, TRAJ13)
CASGGYQKVTF

SEQ ID NO: 86498 - protein, 12 aa, Homo sapiens
  CDR3 for beta chain variable domain of TCR clone 43249 (TRBV29-1, TRBJ2-3)
CSVTGGADTQYF

SEQ ID NO: 86499 - protein, 11 aa, Homo sapiens
  CDR3 for alpha chain variable domain of TCR clone 43250 (TRAV29/DV5, TRAJ37)
CATSNTGKLIF

SEQ ID NO: 86500 - protein, 18 aa, Homo sapiens
  CDR3 for beta chain variable domain of TCR clone 43250 (TRBV20-1, TRBJ2-6)
CSARTLAGGPSGADVLTF

SEQ ID NO: 86501 - protein, 10 aa, Homo sapiens
  CDR3 for alpha chain variable domain of TCR clone 43251 (TRAV16, TRAJ22)
SAMYLRQMTF

SEQ ID NO: 86502 - protein, 15 aa, Homo sapiens
  CDR3 for beta chain variable domain of TCR clone 43251 (TRBV7-9, TRBJ1-6)
CASSSPGRGNSPLHF

SEQ ID NO: 86503 - protein, 13 aa, Homo sapiens
  CDR3 for alpha chain variable domain of TCR clone 43252 (TRAV8-3, TRAJ44)
CAVVPGTASKLTF

SEQ ID NO: 86504 - protein, 14 aa, Homo sapiens
  CDR3 for beta chain variable domain of TCR clone 43252 (TRBV11-2, TRBJ2-5)
CASSRTGGIETQYF

SEQ ID NO: 86505 - protein, 13 aa, Homo sapiens
  CDR3 for alpha chain variable domain of TCR clone 43253 (TRAV13-1, TRAJ21)
CTASIYNFNKFYF

SEQ ID NO: 86506 - protein, 13 aa, Homo sapiens
  CDR3 for beta chain variable domain of TCR clone 43253 (TRBV27, TRBJ1-4)
CASSLMGDEKLFF

SEQ ID NO: 86507 - protein, 13 aa, Homo sapiens
  CDR3 for alpha chain variable domain of TCR clone 43254 (TRAV30, TRAJ24)
CGTVTDSWGKLQF

SEQ ID NO: 86508 - protein, 15 aa, Homo sapiens
  CDR3 for beta chain variable domain of TCR clone 43254 (TRBV25-1, TRBJ1-4)
CASSPGDSTNENLFF

SEQ ID NO: 86509 - protein, 13 aa, Homo sapiens
  CDR3 for alpha chain variable domain of TCR clone 43255 (TRAV2, TRAJ21)
CAVEDLNFNKFYF

SEQ ID NO: 86510 - protein, 15 aa, Homo sapiens
  CDR3 for beta chain variable domain of TCR clone 43255 (TRBV28, TRBJ2-5)
CASSPGQGSIETQYL

SEQ ID NO: 86511 - protein, 10 aa, Homo sapiens
  CDR3 for alpha chain variable domain of TCR clone 43256 (TRAV12-1, TRAJ37)
ARGNTGRLIF

SEQ ID NO: 86512 - protein, 15 aa, Homo sapiens
  CDR3 for beta chain variable domain of TCR clone 43256 (TRBV7-2, TRBJ2-3)
CASSLEQGGTDTQYF

SEQ ID NO: 86513 - protein, 13 aa, Homo sapiens
  CDR3 for alpha chain variable domain of TCR clone 43257 (TRAV12-2, TRAJ20)
CAVYPSNDYKLSF

SEQ ID NO: 86514 - protein, 15 aa, Homo sapiens
  CDR3 for beta chain variable domain of TCR clone 43257 (TRBV27, TRBJ2-5)
CASSLDPRGGETQYF

SEQ ID NO: 86515 - protein, 13 aa, Homo sapiens
  CDR3 for alpha chain variable domain of TCR clone 43258 (TRAV12-3, TRAJ9)
CAMRNTGGFKTIF

SEQ ID NO: 86516 - protein, 12 aa, Homo sapiens
  CDR3 for beta chain variable domain of TCR clone 43258 (TRBV11-2, TRBJ2-2)
CASSLGGGELFF

SEQ ID NO: 86517 - protein, 11 aa, Homo sapiens
  CDR3 for alpha chain variable domain of TCR clone 43259 (TRAV20, TRAJ23)
CACNQGGKLIF

SEQ ID NO: 86518 - protein, 15 aa, Homo sapiens
  CDR3 for beta chain variable domain of TCR clone 43259 (TRBV7-9, TRBJ2-7)
CASSLALAEAYEQYF

SEQ ID NO: 86519 - protein, 15 aa, Homo sapiens
  CDR3 for alpha chain variable domain of TCR clone 43260 (TRAV3, TRAJ36)
CAVRASQTGANNLFF

SEQ ID NO: 86520 - protein, 12 aa, Homo sapiens
  CDR3 for beta chain variable domain of TCR clone 43260 (TRBV28, TRBJ2-1)
CASSVQINEQFF

SEQ ID NO: 86521 - protein, 13 aa, Homo sapiens
  CDR3 for alpha chain variable domain of TCR clone 43261 (TRAV12-2, TRAJ10)
CAVPTGGGNKLAF

SEQ ID NO: 86522 - protein, 14 aa, Homo sapiens
  CDR3 for beta chain variable domain of TCR clone 43261 (TRBV25-1, TRBJ1-1)
CASTHLGGNTEAFF

SEQ ID NO: 86523 - protein, 14 aa, Homo sapiens
  CDR3 for alpha chain variable domain of TCR clone 43262 (TRAV13-1, TRAJ35)
CAASKGGFGNVQHC

SEQ ID NO: 86524 - protein, 14 aa, Homo sapiens
  CDR3 for beta chain variable domain of TCR clone 43262 (TRBV20-1, TRBJ2-2)
CSAPDTATTGELFF

SEQ ID NO: 86525 - protein, 14 aa, Homo sapiens
  CDR3 for alpha chain variable domain of TCR clone 43263 (TRAV1-2, TRAJ16)
CAVNRFSDGQKLLF

SEQ ID NO: 86526 - protein, 12 aa, Homo sapiens
  CDR3 for beta chain variable domain of TCR clone 43263 (TRBV11-2, TRBJ2-2)
CASSRGGGELFF

SEQ ID NO: 86527 - protein, 13 aa, Homo sapiens
  CDR3 for alpha chain variable domain of TCR clone 43264 (TRAV29/DV5, TRAJ31)
CAASRDNNARLMF

SEQ ID NO: 86528 - protein, 12 aa, Homo sapiens
  CDR3 for beta chain variable domain of TCR clone 43264 (TRBV14, TRBJ2-5)
CASSHLKETQYF

SEQ ID NO: 86529 - protein, 11 aa, Homo sapiens
  CDR3 for alpha chain variable domain of TCR clone 43265 (TRAV4, TRAJ21)
RLIYNFNKFYF

SEQ ID NO: 86530 - protein, 17 aa, Homo sapiens
  CDR3 for beta chain variable domain of TCR clone 43265 (TRBV23-1, TRBJ2-1)
CISAPAVNRDQGGEQFF

SEQ ID NO: 86531 - protein, 16 aa, Homo sapiens
  CDR3 for alpha chain variable domain of TCR clone 43266 (TRAV12-1, TRAJ53)
CVATSVAGGSNYKLTF

SEQ ID NO: 86532 - protein, 16 aa, Homo sapiens
  CDR3 for beta chain variable domain of TCR clone 43266 (TRBV6-6, TRBJ2-3)
CASSYSHAGSTDTRYF

SEQ ID NO: 86533 - protein, 16 aa, Homo sapiens
  CDR3 for alpha chain variable domain of TCR clone 43267 (TRAV30, TRAJ24)
CGTEIVDADSWGTFQF

SEQ ID NO: 86534 - protein, 15 aa, Homo sapiens
  CDR3 for beta chain variable domain of TCR clone 43267 (TRBV20-1, TRBJ2-7)
CSARDRVSGMDEQYF

SEQ ID NO: 86535 - protein, 13 aa, Homo sapiens
  CDR3 for alpha chain variable domain of TCR clone 43268 (TRAV13-2, TRAJ48)
CAEMDFGNEKLTF

SEQ ID NO: 86536 - protein, 15 aa, Homo sapiens
  CDR3 for beta chain variable domain of TCR clone 43268 (TRBV5-1, TRBJ1-1)
CASSSTTGTNTEAFF

SEQ ID NO: 86537 - protein, 12 aa, Homo sapiens
  CDR3 for alpha chain variable domain of TCR clone 43269 (TRAV27, TRAJ58)
CAGARDTSRLTF

SEQ ID NO: 86538 - protein, 14 aa, Homo sapiens
  CDR3 for beta chain variable domain of TCR clone 43269 (TRBV7-2, TRBJ2-7)
CASSPKTSFYEQYF

SEQ ID NO: 86539 - protein, 12 aa, Homo sapiens
  CDR3 for alpha chain variable domain of TCR clone 43270 (TRAV21, TRAJ31)
CVLAGNNASLMF

SEQ ID NO: 86540 - protein, 16 aa, Homo sapiens
  CDR3 for beta chain variable domain of TCR clone 43270 (TRBV27, TRBJ2-5)
CASSFGPGGTKETQYF

SEQ ID NO: 86541 - protein, 14 aa, Homo sapiens
  CDR3 for alpha chain variable domain of TCR clone 43271 (TRAV17, TRAJ22)
CATSPSGSARQLTF

SEQ ID NO: 86542 - protein, 15 aa, Homo sapiens
  CDR3 for beta chain variable domain of TCR clone 43271 (TRBV4-1, TRBJ2-5)
FASSQWDLYQETQYF

SEQ ID NO: 86543 - protein, 15 aa, Homo sapiens
  CDR3 for alpha chain variable domain of TCR clone 43272 (TRAV21, TRAJ53)
CATLNSGGSNYKLTF

SEQ ID NO: 86544 - protein, 16 aa, Homo sapiens
  CDR3 for beta chain variable domain of TCR clone 43272 (TRBV9, TRBJ2-1)
CASSVGGGGDYNEQFF

SEQ ID NO: 86545 - protein, 12 aa, Homo sapiens
  CDR3 for alpha chain variable domain of TCR clone 43273 (TRAV8-4, TRAJ37)
CAVRSNTGKLIF

SEQ ID NO: 86546 - protein, 16 aa, Homo sapiens
  CDR3 for beta chain variable domain of TCR clone 43273 (TRBV7-2, TRBJ2-3)
CASSVVGDASTDTQYF

SEQ ID NO: 86547 - protein, 14 aa, Homo sapiens
  CDR3 for alpha chain variable domain of TCR clone 43274 (TRAV12-2, TRAJ40)
CAAKIPSGTYKYIF

SEQ ID NO: 86548 - protein, 15 aa, Homo sapiens
  CDR3 for beta chain variable domain of TCR clone 43274 (TRBV20-1, TRBJ1-4)
CSARREWGVNEKLFF

SEQ ID NO: 86549 - protein, 15 aa, Homo sapiens
  CDR3 for alpha chain variable domain of TCR clone 43275 (TRAV1-2, TRAJ30)
CAVRPQGNRDDKIIF

SEQ ID NO: 86550 - protein, 13 aa, Homo sapiens
  CDR3 for beta chain variable domain of TCR clone 43275 (TRBV4-1, TRBJ2-7)
CASSQGQAYEQYF

SEQ ID NO: 86551 - protein, 14 aa, Homo sapiens
  CDR3 for alpha chain variable domain of TCR clone 43276 (TRAV12-3, TRAJ10)
SHLPLTGGGNKLTF

SEQ ID NO: 86552 - protein, 18 aa, Homo sapiens
  CDR3 for beta chain variable domain of TCR clone 43276 (TRBV18, TRBJ1-3)
CASSPRGGAGPSGNTIYF

SEQ ID NO: 86553 - protein, 14 aa, Homo sapiens
  CDR3 for alpha chain variable domain of TCR clone 43277 (TRAV1-2, TRAJ16)
CAVNRFSDGQKLLF

SEQ ID NO: 86554 - protein, 15 aa, Homo sapiens
  CDR3 for beta chain variable domain of TCR clone 43277 (TRBV19, TRBJ1-5)
CASSIVWAENQPQHF

SEQ ID NO: 86555 - protein, 15 aa, Homo sapiens
  CDR3 for alpha chain variable domain of TCR clone 43278 (TRAV2, TRAJ9)
CAVAALNTGGFKTIF

SEQ ID NO: 86556 - protein, 13 aa, Homo sapiens
  CDR3 for beta chain variable domain of TCR clone 43278 (TRBV10-3, TRBJ2-7)
CASKLAVNYEQYF

SEQ ID NO: 86557 - protein, 14 aa, Homo sapiens
  CDR3 for alpha chain variable domain of TCR clone 43279 (TRAV12-1, TRAJ17)
CVVNYKAAGNKLTF

SEQ ID NO: 86558 - protein, 15 aa, Homo sapiens
  CDR3 for beta chain variable domain of TCR clone 43279 (TRBV2, TRBJ2-7)
CASSEGLARSYEQYF

SEQ ID NO: 86559 - protein, 12 aa, Homo sapiens
  CDR3 for alpha chain variable domain of TCR clone 43280 (TRAV27, TRAJ35)
CAGADFGNVLHC

SEQ ID NO: 86560 - protein, 16 aa, Homo sapiens
  CDR3 for beta chain variable domain of TCR clone 43280 (TRBV6-1, TRBJ2-1)
CASISRQGSSYSEQFF

SEQ ID NO: 86561 - protein, 13 aa, Homo sapiens
  CDR3 for alpha chain variable domain of TCR clone 43281 (TRAV20, TRAJ31)
CAVQAIGGARLMF

SEQ ID NO: 86562 - protein, 14 aa, Homo sapiens
  CDR3 for beta chain variable domain of TCR clone 43281 (TRBV2, TRBJ1-5)
CASSGTVSNQTQHF

SEQ ID NO: 86563 - protein, 11 aa, Homo sapiens
  CDR3 for alpha chain variable domain of TCR clone 43282 (TRAV1-2, TRAJ40)
CAVPGTYKYIF

SEQ ID NO: 86564 - protein, 16 aa, Homo sapiens
  CDR3 for beta chain variable domain of TCR clone 43282 (TRBV29-1, TRBJ2-7)
CSVAVVGTSGSYEQYF

SEQ ID NO: 86565 - protein, 14 aa, Homo sapiens
  CDR3 for alpha chain variable domain of TCR clone 43283 (TRAV1-2, TRAJ16)
CAVNRVSDGQKLLF

SEQ ID NO: 86566 - protein, 11 aa, Homo sapiens
  CDR3 for beta chain variable domain of TCR clone 43283 (TRBV29-1, TRBJ2-5)
CSEDRTGTQYF

SEQ ID NO: 86567 - protein, 12 aa, Homo sapiens
  CDR3 for alpha chain variable domain of TCR clone 43284 (TRAV17, TRAJ39)
CATVAAGNMLTF

SEQ ID NO: 86568 - protein, 14 aa, Homo sapiens
  CDR3 for beta chain variable domain of TCR clone 43284 (TRBV7-9, TRBJ1-2)
CASSRQGANYGYTF

SEQ ID NO: 86569 - protein, 12 aa, Homo sapiens
  CDR3 for alpha chain variable domain of TCR clone 43285 (TRAV2, TRAJ34)
CAVERNTDKLIF

SEQ ID NO: 86570 - protein, 14 aa, Homo sapiens
  CDR3 for beta chain variable domain of TCR clone 43285 (TRBV7-9, TRBJ2-1)
RASSDNSGYNEQFF

SEQ ID NO: 86571 - protein, 16 aa, Homo sapiens
  CDR3 for alpha chain variable domain of TCR clone 43286 (TRAV3, TRAJ37)
CAVRPHGSGNTGKLIF

SEQ ID NO: 86572 - protein, 13 aa, Homo sapiens
  CDR3 for beta chain variable domain of TCR clone 43286 (TRBV25-1, TRBJ1-1)
CQHPPGGNTEAFF

SEQ ID NO: 86573 - protein, 17 aa, Homo sapiens
  CDR3 for alpha chain variable domain of TCR clone 43287 (TRAV3, TRAJ6)
CAVRDGPRGGGSYIPTF

SEQ ID NO: 86574 - protein, 20 aa, Homo sapiens
  CDR3 for beta chain variable domain of TCR clone 43287 (TRBV28, TRBJ2-1)
CASTPIGRSPGLAGGNEQFF

SEQ ID NO: 86575 - protein, 15 aa, Homo sapiens
  CDR3 for alpha chain variable domain of TCR clone 43288 (TRAV26-1, TRAJ29)
CIVRVEGSGNTPLVF

SEQ ID NO: 86576 - protein, 13 aa, Homo sapiens
  CDR3 for beta chain variable domain of TCR clone 43288 (TRBV19, TRBJ1-2)
CASSQGQVYGYTF

SEQ ID NO: 86577 - protein, 14 aa, Homo sapiens
  CDR3 for alpha chain variable domain of TCR clone 43289 (TRAV12-3, TRAJ13)
CAMRNSGGYQKVTF

SEQ ID NO: 86578 - protein, 14 aa, Homo sapiens
  CDR3 for beta chain variable domain of TCR clone 43289 (TRBV4-1, TRBJ1-6)
CASSPGSDSSPLHL

SEQ ID NO: 86579 - protein, 15 aa, Homo sapiens
  CDR3 for alpha chain variable domain of TCR clone 43290 (TRAV21, TRAJ53)
CATLNSGGSNYKLTF

SEQ ID NO: 86580 - protein, 16 aa, Homo sapiens
  CDR3 for beta chain variable domain of TCR clone 43290 (TRBV9, TRBJ2-1)
CASSVGGVGNYNEQFF

SEQ ID NO: 86581 - protein, 11 aa, Homo sapiens
  CDR3 for alpha chain variable domain of TCR clone 43291 (TRAV3, TRAJ13)
CAVTSYQKVTF

SEQ ID NO: 86582 - protein, 15 aa, Homo sapiens
  CDR3 for beta chain variable domain of TCR clone 43291 (TRBV7-9, TRBJ2-7)
CASSSSGLAVYEQYS

SEQ ID NO: 86583 - protein, 16 aa, Homo sapiens
  CDR3 for alpha chain variable domain of TCR clone 43292 (TRAV12-3, TRAJ53)
CAMSPGSGGSNYKLTF

SEQ ID NO: 86584 - protein, 14 aa, Homo sapiens
  CDR3 for beta chain variable domain of TCR clone 43292 (TRBV19, TRBJ1-5)
CASRAPDSFLSQHF

SEQ ID NO: 86585 - protein, 10 aa, Homo sapiens
  CDR3 for alpha chain variable domain of TCR clone 43293 (TRAV36/DV7, TRAJ48)
CAVGNEKLTF

SEQ ID NO: 86586 - protein, 15 aa, Homo sapiens
  CDR3 for beta chain variable domain of TCR clone 43293 (TRBV6-5, TRBJ1-4)
CASSSVGGAGEKPFF

SEQ ID NO: 86587 - protein, 14 aa, Homo sapiens
  CDR3 for alpha chain variable domain of TCR clone 43294 (TRAV20, TRAJ29)
CAVQAWVGNKPLVF

SEQ ID NO: 86588 - protein, 15 aa, Homo sapiens
  CDR3 for beta chain variable domain of TCR clone 43294 (TRBV29-1, TRBJ2-7)
CSVEFFDRGSYEQYF

SEQ ID NO: 86589 - protein, 15 aa, Homo sapiens
  CDR3 for alpha chain variable domain of TCR clone 43295 (TRAV3, TRAJ5)
CAVRDRKTGRRALTF

SEQ ID NO: 86590 - protein, 16 aa, Homo sapiens
  CDR3 for beta chain variable domain of TCR clone 43295 (TRBV19, TRBJ1-2)
CASSKFRDTTNYGYTF

SEQ ID NO: 86591 - protein, 16 aa, Homo sapiens
  CDR3 for alpha chain variable domain of TCR clone 43296 (TRAV23/DV6, TRAJ9)
CAASIGGNTGGFKNIF

SEQ ID NO: 86592 - protein, 14 aa, Homo sapiens
  CDR3 for beta chain variable domain of TCR clone 43296 (TRBV9, TRBJ2-7)
CASSVGVGSYEQYF

SEQ ID NO: 86593 - protein, 13 aa, Homo sapiens
  CDR3 for alpha chain variable domain of TCR clone 43297 (TRAV13-1, TRAJ20)
CAARVSNDYRLSF

SEQ ID NO: 86594 - protein, 12 aa, Homo sapiens
  CDR3 for beta chain variable domain of TCR clone 43297 (TRBV20-1, TRBJ2-1)
CSARLGTDEQFF

SEQ ID NO: 86595 - protein, 14 aa, Homo sapiens
  CDR3 for alpha chain variable domain of TCR clone 43298 (TRAV8-3, TRAJ9)
CAVVYNTGGFKTFF

SEQ ID NO: 86596 - protein, 14 aa, Homo sapiens
  CDR3 for beta chain variable domain of TCR clone 43298 (TRBV7-3, TRBJ2-2)
CASSSGGYTGELFF

SEQ ID NO: 86597 - protein, 12 aa, Homo sapiens
  CDR3 for alpha chain variable domain of TCR clone 43299 (TRAV21, TRAJ11)
CAAASGYSTLTF

SEQ ID NO: 86598 - protein, 14 aa, Homo sapiens
  CDR3 for beta chain variable domain of TCR clone 43299 (TRBV20-1, TRBJ2-7)
CSAPELAGVGEQYF

SEQ ID NO: 86599 - protein, 11 aa, Homo sapiens
  CDR3 for alpha chain variable domain of TCR clone 43300 (TRAV2, TRAJ13)
CASGGYQKVTF

SEQ ID NO: 86600 - protein, 15 aa, Homo sapiens
  CDR3 for beta chain variable domain of TCR clone 43300 (TRBV19, TRBJ2-7)
CASSPAGSGGALRYF

SEQ ID NO: 86601 - protein, 15 aa, Homo sapiens
  CDR3 for alpha chain variable domain of TCR clone 43301 (TRAV12-3, TRAJ6)
CAMSATTGGSYIPTF

SEQ ID NO: 86602 - protein, 13 aa, Homo sapiens
  CDR3 for beta chain variable domain of TCR clone 43301 (TRBV12-4, TRBJ2-7)
CASSPTETYEQYF

SEQ ID NO: 86603 - protein, 12 aa, Homo sapiens
  CDR3 for alpha chain variable domain of TCR clone 43302 (TRAV23/DV6, TRAJ30)
CAASKGDDKIIF

SEQ ID NO: 86604 - protein, 18 aa, Homo sapiens
  CDR3 for beta chain variable domain of TCR clone 43302 (TRBV10-3, TRBJ2-3)
CAISESRVGPMGGDTQYF

SEQ ID NO: 86605 - protein, 16 aa, Homo sapiens
  CDR3 for alpha chain variable domain of TCR clone 43303 (TRAV8-1, TRAJ42)
CAVASRYGGSQGNLIF

SEQ ID NO: 86606 - protein, 12 aa, Homo sapiens
  CDR3 for beta chain variable domain of TCR clone 43303 (TRBV6-3, TRBJ2-7)
CASSLGRRGLYF

SEQ ID NO: 86607 - protein, 13 aa, Homo sapiens
  CDR3 for alpha chain variable domain of TCR clone 43304 (TRAV8-4, TRAJ10)
RAAFTGGGNKLTF

SEQ ID NO: 86608 - protein, 15 aa, Homo sapiens
  CDR3 for beta chain variable domain of TCR clone 43304 (TRBV2, TRBJ2-3)
CASSDFEKATDTQYF

SEQ ID NO: 86609 - protein, 15 aa, Homo sapiens
  CDR3 for alpha chain variable domain of TCR clone 43305 (TRAV8-3, TRAJ23)
CAVGDRYNQGGKLIF

SEQ ID NO: 86610 - protein, 22 aa, Homo sapiens
  CDR3 for beta chain variable domain of TCR clone 43305 (TRBV29-1, TRBJ2-5)
TVSNMSPDDSSIYLCSAGTQYF

SEQ ID NO: 86611 - protein, 14 aa, Homo sapiens
  CDR3 for alpha chain variable domain of TCR clone 43306 (TRAV13-2, TRAJ29)
CAEGTFETNTPLVF

SEQ ID NO: 86612 - protein, 13 aa, Homo sapiens
  CDR3 for beta chain variable domain of TCR clone 43306 (TRBV2, TRBJ1-1)
CASNLFRNTEAFF

SEQ ID NO: 86613 - protein, 17 aa, Homo sapiens
  CDR3 for alpha chain variable domain of TCR clone 43307 (TRAV1-1, TRAJ32)
CAVRVDELWWCYKQAHL

SEQ ID NO: 86614 - protein, 12 aa, Homo sapiens
  CDR3 for beta chain variable domain of TCR clone 43307 (TRBV11-3, TRBJ1-4)
CASSSGSPGLFF

SEQ ID NO: 86615 - protein, 14 aa, Homo sapiens
  CDR3 for alpha chain variable domain of TCR clone 43308 (TRAV1-1, TRAJ30)
CAARSLNRDDKIIF

SEQ ID NO: 86616 - protein, 15 aa, Homo sapiens
  CDR3 for beta chain variable domain of TCR clone 43308 (TRBV27, TRBJ1-4)
CASSAQQDLNEKLFF

SEQ ID NO: 86617 - protein, 15 aa, Homo sapiens
  CDR3 for alpha chain variable domain of TCR clone 43309 (TRAV20, TRAJ4)
CAVTMFSGGYNKLIF

SEQ ID NO: 86618 - protein, 13 aa, Homo sapiens
  CDR3 for beta chain variable domain of TCR clone 43309 (TRBV7-3, TRBJ2-5)
CASSFRGSQTQYF

SEQ ID NO: 86619 - protein, 11 aa, Homo sapiens
  CDR3 for alpha chain variable domain of TCR clone 43310 (TRAV2, TRAJ13)
CASGGYQKVTF

SEQ ID NO: 86620 - protein, 13 aa, Homo sapiens
  CDR3 for beta chain variable domain of TCR clone 43310 (TRBV7-9, TRBJ1-5)
CASSLRNDQPQHF

SEQ ID NO: 86621 - protein, 11 aa, Homo sapiens
  CDR3 for alpha chain variable domain of TCR clone 43311 (TRAV23/DV6, TRAJ58)
CAARLLRGETS

SEQ ID NO: 86622 - protein, 17 aa, Homo sapiens
  CDR3 for beta chain variable domain of TCR clone 43311 (TRBV11-2, TRBJ2-1)
CASSLYPPGVEYNEQFF

SEQ ID NO: 86623 - protein, 11 aa, Homo sapiens
  CDR3 for alpha chain variable domain of TCR clone 43312 (TRAV12-2, TRAJ33)
CAVTSNYQLIC

SEQ ID NO: 86624 - protein, 14 aa, Homo sapiens
  CDR3 for beta chain variable domain of TCR clone 43312 (TRBV28, TRBJ2-2)
CASRIRSGTGELFF

SEQ ID NO: 86625 - protein, 14 aa, Homo sapiens
  CDR3 for alpha chain variable domain of TCR clone 43313 (TRAV9-2, TRAJ39)
CALYIYNAGNMLTF

SEQ ID NO: 86626 - protein, 15 aa, Homo sapiens
  CDR3 for beta chain variable domain of TCR clone 43313 (TRBV18, TRBJ2-7)
CASSPSSTGNYEQYF

SEQ ID NO: 86627 - protein, 22 aa, Homo sapiens
  CDR3 for alpha chain variable domain of TCR clone 43314 (TRAV27, TRAJ38)
CAARRNAGNNHIQNPDPAGYQL

SEQ ID NO: 86628 - protein, 13 aa, Homo sapiens
  CDR3 for beta chain variable domain of TCR clone 43314 (TRBV12-5, TRBJ2-3)
CASGDRQSDTQYF

SEQ ID NO: 86629 - protein, 13 aa, Homo sapiens
  CDR3 for alpha chain variable domain of TCR clone 43315 (TRAV23/DV6, TRAJ58)
CAARLIRGSRLTF

SEQ ID NO: 86630 - protein, 13 aa, Homo sapiens
  CDR3 for beta chain variable domain of TCR clone 43315 (TRBV2, TRBJ1-6)
RADSGSYNSPLHF

SEQ ID NO: 86631 - protein, 11 aa, Homo sapiens
  CDR3 for alpha chain variable domain of TCR clone 43316 (TRAV12-1, TRAJ30)
CVVNGQDKIIF

SEQ ID NO: 86632 - protein, 15 aa, Homo sapiens
  CDR3 for beta chain variable domain of TCR clone 43316 (TRBV28, TRBJ2-5)
CASNSGRTIQETQYF

SEQ ID NO: 86633 - protein, 16 aa, Homo sapiens
  CDR3 for alpha chain variable domain of TCR clone 43317 (TRAV17, TRAJ52)
CATSNAGGTSYGKMTF

SEQ ID NO: 86634 - protein, 13 aa, Homo sapiens
  CDR3 for beta chain variable domain of TCR clone 43317 (TRBV27, TRBJ1-6)
CASSLVLVSPLHF

SEQ ID NO: 86635 - protein, 16 aa, Homo sapiens
  CDR3 for alpha chain variable domain of TCR clone 43318 (TRAV30, TRAJ24)
CGTEIVDADSWGKFQF

SEQ ID NO: 86636 - protein, 14 aa, Homo sapiens
  CDR3 for beta chain variable domain of TCR clone 43318 (TRBV9, TRBJ2-7)
CASSVGVGFYEQYF

SEQ ID NO: 86637 - protein, 13 aa, Homo sapiens
  CDR3 for alpha chain variable domain of TCR clone 43319 (TRAV27, TRAJ49)
CAPRPYTGNHFYF

SEQ ID NO: 86638 - protein, 16 aa, Homo sapiens
  CDR3 for beta chain variable domain of TCR clone 43319 (TRBV4-1, TRBJ1-2)
CASSQDAGQVLYGYTF

SEQ ID NO: 86639 - protein, 14 aa, Homo sapiens
  CDR3 for alpha chain variable domain of TCR clone 43320 (TRAV3, TRAJ33)
CAARDMDSNYQLIW

SEQ ID NO: 86640 - protein, 19 aa, Homo sapiens
  CDR3 for beta chain variable domain of TCR clone 43320 (TRBV7-3, TRBJ1-2)
CASSFPQGNDGELWLHLRF

SEQ ID NO: 86641 - protein, 14 aa, Homo sapiens
  CDR3 for alpha chain variable domain of TCR clone 43321 (TRAV1-2, TRAJ8)
CAVREDTGFQKLLF

SEQ ID NO: 86642 - protein, 15 aa, Homo sapiens
  CDR3 for beta chain variable domain of TCR clone 43321 (TRBV20-1, TRBJ2-7)
CSARDRVSGMDEQYF

SEQ ID NO: 86643 - protein, 15 aa, Homo sapiens
  CDR3 for alpha chain variable domain of TCR clone 43322 (TRAV8-3, TRAJ11)
CAVGLLNSGYSTLTF

SEQ ID NO: 86644 - protein, 16 aa, Homo sapiens
  CDR3 for beta chain variable domain of TCR clone 43322 (TRBV7-9, TRBJ1-2)
CACSLGFSSGEDGYTF

SEQ ID NO: 86645 - protein, 15 aa, Homo sapiens
  CDR3 for alpha chain variable domain of TCR clone 43323 (TRAV12-3, TRAJ6)
CAMSATTGGSYIPTF

SEQ ID NO: 86646 - protein, 16 aa, Homo sapiens
  CDR3 for beta chain variable domain of TCR clone 43323 (TRBV20-1, TRBJ1-2)
GSASMGQGVANYGYTF

SEQ ID NO: 86647 - protein, 14 aa, Homo sapiens
  CDR3 for alpha chain variable domain of TCR clone 43324 (TRAV2, TRAJ9)
CTVDPNTGGFKTIF

SEQ ID NO: 86648 - protein, 13 aa, Homo sapiens
  CDR3 for beta chain variable domain of TCR clone 43324 (TRBV20-1, TRBJ2-1)
CSASTGTSNKQFF

SEQ ID NO: 86649 - protein, 15 aa, Homo sapiens
  CDR3 for alpha chain variable domain of TCR clone 43325 (TRAV12-3, TRAJ11)
CAMSEENSGYSTPTF

SEQ ID NO: 86650 - protein, 16 aa, Homo sapiens
  CDR3 for beta chain variable domain of TCR clone 43325 (TRBV5-1, TRBJ2-7)
CASSLEGLAGLYEQYF

SEQ ID NO: 86651 - protein, 12 aa, Homo sapiens
  CDR3 for alpha chain variable domain of TCR clone 43326 (TRAV1-1, TRAJ8)
CAGGTGFQKLVF

SEQ ID NO: 86652 - protein, 15 aa, Homo sapiens
  CDR3 for beta chain variable domain of TCR clone 43326 (TRBV7-9, IGLJ4)
CASSRTGGFNEKLFF

SEQ ID NO: 86653 - protein, 13 aa, Homo sapiens
  CDR3 for alpha chain variable domain of TCR clone 43327 (TRAV2, TRAJ29)
CAAQNSGNTPLVF

SEQ ID NO: 86654 - protein, 14 aa, Homo sapiens
  CDR3 for beta chain variable domain of TCR clone 43327 (TRBV7-9, TRBJ2-4)
CASSLAMGGNNQYF

SEQ ID NO: 86655 - protein, 13 aa, Homo sapiens
  CDR3 for alpha chain variable domain of TCR clone 43328 (TRAV21, TRAJ27)
CAARPGTAGKSTF

SEQ ID NO: 86656 - protein, 13 aa, Homo sapiens
  CDR3 for beta chain variable domain of TCR clone 43328 (TRBV20-1, TRBJ1-1)
CSARGGGNTEAFF

SEQ ID NO: 86657 - protein, 15 aa, Homo sapiens
  CDR3 for alpha chain variable domain of TCR clone 43329 (TRAV17, TRAJ57)
CATGPSQGGSEKLVF

SEQ ID NO: 86658 - protein, 13 aa, Homo sapiens
  CDR3 for beta chain variable domain of TCR clone 43329 (TRBV2, TRBJ1-1)
CASRWTVNTEAFF

SEQ ID NO: 86659 - protein, 14 aa, Homo sapiens
  CDR3 for alpha chain variable domain of TCR clone 43330 (TRAV9-2, TRAJ39)
CALYIYNAGNMLTF

SEQ ID NO: 86660 - protein, 16 aa, Homo sapiens
  CDR3 for beta chain variable domain of TCR clone 43330 (TRBV7-2, TRBJ2-6)
CAILSGVSPGANVLTF

SEQ ID NO: 86661 - protein, 11 aa, Homo sapiens
  CDR3 for alpha chain variable domain of TCR clone 43331 (TRAV1-1, TRAJ23)
CAVRQGGKLIF

SEQ ID NO: 86662 - protein, 16 aa, Homo sapiens
  CDR3 for beta chain variable domain of TCR clone 43331 (TRBV7-3, TRBJ2-1)
CASSLEGYRSYNEQFF

SEQ ID NO: 86663 - protein, 14 aa, Homo sapiens
  CDR3 for alpha chain variable domain of TCR clone 43332 (TRAV29/DV5, TRAJ48)
CAAMALFGNEKLTF

SEQ ID NO: 86664 - protein, 15 aa, Homo sapiens
  CDR3 for beta chain variable domain of TCR clone 43332 (TRBV7-2, TRBJ2-1)
CASTHGTGIYNEKFF

SEQ ID NO: 86665 - protein, 14 aa, Homo sapiens
  CDR3 for alpha chain variable domain of TCR clone 43333 (TRAV17, TRAJ22)
CATSPSGSARQLTF

SEQ ID NO: 86666 - protein, 15 aa, Homo sapiens
  CDR3 for beta chain variable domain of TCR clone 43333 (TRBV4-1, TRBJ2-5)
CASSQWDLYQETLYF

SEQ ID NO: 86667 - protein, 14 aa, Homo sapiens
  CDR3 for alpha chain variable domain of TCR clone 43334 (TRAV35, TRAJ13)
CAGSPSGGYQKVAF

SEQ ID NO: 86668 - protein, 13 aa, Homo sapiens
  CDR3 for beta chain variable domain of TCR clone 43334 (TRBV29-1, TRBJ1-1)
CSVGDSRNTEAFF

SEQ ID NO: 86669 - protein, 14 aa, Homo sapiens
  CDR3 for alpha chain variable domain of TCR clone 43335 (TRAV12-2, TRAJ29)
CAVRRNSGNTPLVF

SEQ ID NO: 86670 - protein, 13 aa, Homo sapiens
  CDR3 for beta chain variable domain of TCR clone 43335 (TRBV12-4, TRBJ2-1)
CASSHYTDNEQFL

SEQ ID NO: 86671 - protein, 13 aa, Homo sapiens
  CDR3 for alpha chain variable domain of TCR clone 43336 (TRAV12-3, TRAJ54)
CAMTLQGARKLVF

SEQ ID NO: 86672 - protein, 14 aa, Homo sapiens
  CDR3 for beta chain variable domain of TCR clone 43336 (TRBV4-1, TRBJ2-2)
CASSQAVNTGELFF

SEQ ID NO: 86673 - protein, 16 aa, Homo sapiens
  CDR3 for alpha chain variable domain of TCR clone 43337 (TRAV3, TRAJ37)
CAVRGKGSGNTGKLIF

SEQ ID NO: 86674 - protein, 14 aa, Homo sapiens
  CDR3 for beta chain variable domain of TCR clone 43337 (TRBV6-5, TRBJ1-2)
CASSYDGTGGGYTF

SEQ ID NO: 86675 - protein, 14 aa, Homo sapiens
  CDR3 for alpha chain variable domain of TCR clone 43338 (TRAV38-1, TRAJ45)
CASHSGGGADGLNF

SEQ ID NO: 86676 - protein, 13 aa, Homo sapiens
  CDR3 for beta chain variable domain of TCR clone 43338 (TRBV10-3, TRBJ1-2)
CAISERDSYGYTF

SEQ ID NO: 86677 - protein, 15 aa, Homo sapiens
  CDR3 for alpha chain variable domain of TCR clone 43339 (TRAV17, TRAJ23)
CATDAEDNQGGKLIF

SEQ ID NO: 86678 - protein, 12 aa, Homo sapiens
  CDR3 for beta chain variable domain of TCR clone 43339 (TRBV2, TRBJ2-1)
CAKREGYNEQSF

SEQ ID NO: 86679 - protein, 15 aa, Homo sapiens
  CDR3 for alpha chain variable domain of TCR clone 43340 (TRAV8-2, TRAJ40)
CVVSDRGSGTYKYIF

SEQ ID NO: 86680 - protein, 19 aa, Homo sapiens
  CDR3 for beta chain variable domain of TCR clone 43340 (TRBV2, TRBJ2-7)
CASSDDETSGRANDYEQYF

SEQ ID NO: 86681 - protein, 14 aa, Homo sapiens
  CDR3 for alpha chain variable domain of TCR clone 43341 (TRAV38-1, TRAJ54)
CAFMSPSGAQKLVF

SEQ ID NO: 86682 - protein, 16 aa, Homo sapiens
  CDR3 for beta chain variable domain of TCR clone 43341 (TRBV28, TRBJ2-1)
CASSLGGSGSYNEQFL

SEQ ID NO: 86683 - protein, 17 aa, Homo sapiens
  CDR3 for alpha chain variable domain of TCR clone 43342 (TRAV12-3, TRAJ26)
CAMSGGRWDNYGQNFVF

SEQ ID NO: 86684 - protein, 12 aa, Homo sapiens
  CDR3 for beta chain variable domain of TCR clone 43342 (TRBV19, TRBJ1-1)
CASSTTGTEAFF

SEQ ID NO: 86685 - protein, 16 aa, Homo sapiens
  CDR3 for alpha chain variable domain of TCR clone 43343 (TRAV30, TRAJ24)
CGTEIVDADSLGKFQF

SEQ ID NO: 86686 - protein, 13 aa, Homo sapiens
  CDR3 for beta chain variable domain of TCR clone 43343 (TRBV12-5, TRBJ2-3)
CASGDRQSDTQYF

SEQ ID NO: 86687 - protein, 15 aa, Homo sapiens
  CDR3 for alpha chain variable domain of TCR clone 43344 (TRAV3, TRAJ5)
CAVRDRKTGRRALTV

SEQ ID NO: 86688 - protein, 15 aa, Homo sapiens
  CDR3 for beta chain variable domain of TCR clone 43344 (TRBV7-8, TRBJ2-1)
CASSLADSLYNEQFF

SEQ ID NO: 86689 - protein, 14 aa, Homo sapiens
  CDR3 for alpha chain variable domain of TCR clone 43345 (TRAV1-2, TRAJ16)
RAVNRFSDGQKLLF

SEQ ID NO: 86690 - protein, 14 aa, Homo sapiens
  CDR3 for beta chain variable domain of TCR clone 43345 (TRBV7-9, TRBJ2-3)
CASSLEDGTDTQYF

SEQ ID NO: 86691 - protein, 14 aa, Homo sapiens
  CDR3 for alpha chain variable domain of TCR clone 43346 (TRAV38-1, TRAJ45)
CAHYSGGGADGLTF

SEQ ID NO: 86692 - protein, 14 aa, Homo sapiens
  CDR3 for beta chain variable domain of TCR clone 43346 (TRBV25-1, TRBJ1-1)
CASTHLGGNTEAFF

SEQ ID NO: 86693 - protein, 13 aa, Homo sapiens
  CDR3 for alpha chain variable domain of TCR clone 43347 (TRAV1-1, TRAJ9)
CAAKNTGGFKTIF

SEQ ID NO: 86694 - protein, 12 aa, Homo sapiens
  CDR3 for beta chain variable domain of TCR clone 43347 (TRBV3-1, TRBJ2-1)
CASSQGSSGQFF

SEQ ID NO: 86695 - protein, 18 aa, Homo sapiens
  CDR3 for alpha chain variable domain of TCR clone 43348 (TRAV21, TRAJ52)
CAVRPSPAGGTSYGKLTV

SEQ ID NO: 86696 - protein, 13 aa, Homo sapiens
  CDR3 for beta chain variable domain of TCR clone 43348 (TRBV7-3, TRBJ1-1)
CASSQDWGAEAFF

SEQ ID NO: 86697 - protein, 16 aa, Homo sapiens
  CDR3 for alpha chain variable domain of TCR clone 43349 (TRAV27, TRAJ52)
CAGAPAGGTSYGKLTL

SEQ ID NO: 86698 - protein, 12 aa, Homo sapiens
  CDR3 for beta chain variable domain of TCR clone 43349 (TRBV27, TRBJ2-1)
CASRGFYNEQFF

SEQ ID NO: 86699 - protein, 13 aa, Homo sapiens
  CDR3 for alpha chain variable domain of TCR clone 43350 (TRAV27, TRAJ41)
CAGEGNSGYALNF

SEQ ID NO: 86700 - protein, 15 aa, Homo sapiens
  CDR3 for beta chain variable domain of TCR clone 43350 (TRBV6-5, TRBJ2-1)
CASSYDAGAGNEQFF

SEQ ID NO: 86701 - protein, 13 aa, Homo sapiens
  CDR3 for alpha chain variable domain of TCR clone 43351 (TRAV3, TRAJ21)
CAVREPDFNKFYF

SEQ ID NO: 86702 - protein, 12 aa, Homo sapiens
  CDR3 for beta chain variable domain of TCR clone 43351 (TRBV12-4, TRBJ1-3)
CASSFSGNTIYF

SEQ ID NO: 86703 - protein, 12 aa, Homo sapiens
  CDR3 for alpha chain variable domain of TCR clone 43352 (TRAV17, TRAJ20)
CATDSNDYKLSF

SEQ ID NO: 86704 - protein, 14 aa, Homo sapiens
  CDR3 for beta chain variable domain of TCR clone 43352 (TRBV6-6, TRBJ1-3)
CASSRQGSGNTIYF

SEQ ID NO: 86705 - protein, 15 aa, Homo sapiens
  CDR3 for alpha chain variable domain of TCR clone 43353 (TRAV13-1, TRAJ32)
CAASNGWWCYKQAHL

SEQ ID NO: 86706 - protein, 17 aa, Homo sapiens
  CDR3 for beta chain variable domain of TCR clone 43353 (TRBV15, TRBJ1-2)
CAASGREIDVVNYGYTF

SEQ ID NO: 86707 - protein, 12 aa, Homo sapiens
  CDR3 for alpha chain variable domain of TCR clone 43354 (TRAV1-2, TRAJ29)
CAVPSGNTPLVF

SEQ ID NO: 86708 - protein, 12 aa, Homo sapiens
  CDR3 for beta chain variable domain of TCR clone 43354 (TRBV12-4, TRBJ2-7)
CASSLGGHEQYF

SEQ ID NO: 86709 - protein, 17 aa, Homo sapiens
  CDR3 for alpha chain variable domain of TCR clone 43355 (TRAV13-1, TRAJ28)
CAASPPSSGAGSYQLTF

SEQ ID NO: 86710 - protein, 15 aa, Homo sapiens
  CDR3 for beta chain variable domain of TCR clone 43355 (TRBV6-3, TRBJ2-2)
CASSFLATLTGELFF

SEQ ID NO: 86711 - protein, 12 aa, Homo sapiens
  CDR3 for alpha chain variable domain of TCR clone 43356 (TRAV36/DV7, TRAJ40)
CAVGTGTYKYTF

SEQ ID NO: 86712 - protein, 14 aa, Homo sapiens
  CDR3 for beta chain variable domain of TCR clone 43356 (TRBV19, TRBJ2-3)
CASSIDLGGDTQYF

SEQ ID NO: 86713 - protein, 12 aa, Homo sapiens
  CDR3 for alpha chain variable domain of TCR clone 43357 (TRAV13-2, TRAJ23)
CAESHRGGKLIF

SEQ ID NO: 86714 - protein, 12 aa, Homo sapiens
  CDR3 for beta chain variable domain of TCR clone 43357 (TRBV5-5, TRBJ2-5)
CASSYFGETQYF

SEQ ID NO: 86715 - protein, 13 aa, Homo sapiens
  CDR3 for alpha chain variable domain of TCR clone 43358 (TRAV2, TRAJ40)
CAVVTSGTYKYIF

SEQ ID NO: 86716 - protein, 15 aa, Homo sapiens
  CDR3 for beta chain variable domain of TCR clone 43358 (TRBV5-1, TRBJ1-1)
CASSLGEGENTEAFF

SEQ ID NO: 86717 - protein, 14 aa, Homo sapiens
  CDR3 for alpha chain variable domain of TCR clone 43359 (TRAV20, TRAJ37)
CAVQSSSNTGKLIF

SEQ ID NO: 86718 - protein, 14 aa, Homo sapiens
  CDR3 for beta chain variable domain of TCR clone 43359 (TRBV7-3, TRBJ2-2)
YASSLNSNTGELFF

SEQ ID NO: 86719 - protein, 12 aa, Homo sapiens
  CDR3 for alpha chain variable domain of TCR clone 43360 (TRAV12-3, TRAJ34)
CAMGYNTDKLIF

SEQ ID NO: 86720 - protein, 14 aa, Homo sapiens
  CDR3 for beta chain variable domain of TCR clone 43360 (TRBV5-7, TRBJ1-5)
CASSRIGGGQPQHF

SEQ ID NO: 86721 - protein, 16 aa, Homo sapiens
  CDR3 for alpha chain variable domain of TCR clone 43361 (TRAV16, TRAJ42)
CALSGILGGSQGNLIF

SEQ ID NO: 86722 - protein, 15 aa, Homo sapiens
  CDR3 for beta chain variable domain of TCR clone 43361 (TRBV5-1, TRBJ2-1)
CASSPGGLAGNEQFF

SEQ ID NO: 86723 - protein, 13 aa, Homo sapiens
  CDR3 for alpha chain variable domain of TCR clone 43362 (TRAV12-3, TRAJ7)
CAMTPYGNNRLAF

SEQ ID NO: 86724 - protein, 16 aa, Homo sapiens
  CDR3 for beta chain variable domain of TCR clone 43362 (TRBV20-1, TRBJ1-4)
CSSRPYGGELNEKLFF

SEQ ID NO: 86725 - protein, 17 aa, Homo sapiens
  CDR3 for alpha chain variable domain of TCR clone 43363 (TRAV3, TRAJ38)
CAVRDCLNAGNNRKLIW

SEQ ID NO: 86726 - protein, 16 aa, Homo sapiens
  CDR3 for beta chain variable domain of TCR clone 43363 (TRBV12-5, TRBJ2-5)
CASGPRTSGNQETQYF

SEQ ID NO: 86727 - protein, 12 aa, Homo sapiens
  CDR3 for alpha chain variable domain of TCR clone 43364 (TRAV8-3, TRAJ40)
CAVTSGTYEYIF

SEQ ID NO: 86728 - protein, 14 aa, Homo sapiens
  CDR3 for beta chain variable domain of TCR clone 43364 (TRBV12-4, TRBJ2-3)
CASSGQGSTDTQYF

SEQ ID NO: 86729 - protein, 15 aa, Homo sapiens
  CDR3 for alpha chain variable domain of TCR clone 43365 (TRAV2, TRAJ9)
CAVEDRGTGGFKTIF

SEQ ID NO: 86730 - protein, 16 aa, Homo sapiens
  CDR3 for beta chain variable domain of TCR clone 43365 (TRBV24-1, TRBJ2-3)
CATNDPGTGATDTQYF

SEQ ID NO: 86731 - protein, 15 aa, Homo sapiens
  CDR3 for alpha chain variable domain of TCR clone 43366 (TRAV26-1, TRAJ28)
CIVRVAGAGSYQLTF

SEQ ID NO: 86732 - protein, 19 aa, Homo sapiens
  CDR3 for beta chain variable domain of TCR clone 43366 (TRBV7-3, TRBJ2-7)
CASSLTGVAGGRPSYEQYF

SEQ ID NO: 86733 - protein, 14 aa, Homo sapiens
  CDR3 for alpha chain variable domain of TCR clone 43367 (TRAV12-2, TRAJ5)
CAVNRSTGRRALTS

SEQ ID NO: 86734 - protein, 12 aa, Homo sapiens
  CDR3 for beta chain variable domain of TCR clone 43367 (TRBV19, TRBJ1-5)
CASSIAQQPQHF

SEQ ID NO: 86735 - protein, 15 aa, Homo sapiens
  CDR3 for alpha chain variable domain of TCR clone 43368 (TRAV2, TRAJ15)
CAVEDRGQAGTALIF

SEQ ID NO: 86736 - protein, 13 aa, Homo sapiens
  CDR3 for beta chain variable domain of TCR clone 43368 (TRBV10-2, TRBJ2-7)
CASEASGGYEQYF

SEQ ID NO: 86737 - protein, 13 aa, Homo sapiens
  CDR3 for alpha chain variable domain of TCR clone 43369 (TRAV21, TRAJ27)
CAARPGNAGKSTF

SEQ ID NO: 86738 - protein, 13 aa, Homo sapiens
  CDR3 for beta chain variable domain of TCR clone 43369 (TRBV7-6, TRBJ2-3)
CQQLRTVTDTQYF

SEQ ID NO: 86739 - protein, 16 aa, Homo sapiens
  CDR3 for alpha chain variable domain of TCR clone 43370 (TRAV3, TRAJ37)
CAVRGKGSGNTGKPIF

SEQ ID NO: 86740 - protein, 13 aa, Homo sapiens
  CDR3 for beta chain variable domain of TCR clone 43370 (TRBV14, TRBJ2-7)
CASSQDRRYEQYF

SEQ ID NO: 86741 - protein, 14 aa, Homo sapiens
  CDR3 for alpha chain variable domain of TCR clone 43371 (TRAV12-1, TRAJ23)
CVVMIYNQGGKLIF

SEQ ID NO: 86742 - protein, 23 aa, Homo sapiens
  CDR3 for beta chain variable domain of TCR clone 43371 (TRBV7-3, TRBJ1-6)
CASSLTSRGEASDPSSYNSPLHF

SEQ ID NO: 86743 - protein, 12 aa, Homo sapiens
  CDR3 for alpha chain variable domain of TCR clone 43372 (TRAV2, TRAJ31)
CAVEDNNARLMF

SEQ ID NO: 86744 - protein, 15 aa, Homo sapiens
  CDR3 for beta chain variable domain of TCR clone 43372 (TRBV20-1, TRBJ2-7)
CSARDRVSGMDEQYF

SEQ ID NO: 86745 - protein, 15 aa, Homo sapiens
  CDR3 for alpha chain variable domain of TCR clone 43373 (TRAV17, TRAJ35)
CATAFVIGFGNVLHC

SEQ ID NO: 86746 - protein, 14 aa, Homo sapiens
  CDR3 for beta chain variable domain of TCR clone 43373 (TRBV5-4, TRBJ2-1)
CASSLDQGLNEQFF

SEQ ID NO: 86747 - protein, 15 aa, Homo sapiens
  CDR3 for alpha chain variable domain of TCR clone 43374 (TRAV21, TRAJ24)
CAARSSTDSWGKLQF

SEQ ID NO: 86748 - protein, 15 aa, Homo sapiens
  CDR3 for beta chain variable domain of TCR clone 43374 (TRBV20-1, TRBJ1-1)
CSASRGVTGNTEAFL

SEQ ID NO: 86749 - protein, 15 aa, Homo sapiens
  CDR3 for alpha chain variable domain of TCR clone 43375 (TRAV13-2, TRAJ5)
CAASKADTGRRALTF

SEQ ID NO: 86750 - protein, 15 aa, Homo sapiens
  CDR3 for beta chain variable domain of TCR clone 43375 (TRBV19, TRBJ2-1)
CASSMGWNSNNEQFF

SEQ ID NO: 86751 - protein, 17 aa, Homo sapiens
  CDR3 for alpha chain variable domain of TCR clone 43376 (TRAV3, TRAJ38)
CAMRDCLNAGNNRKLIW

SEQ ID NO: 86752 - protein, 14 aa, Homo sapiens
  CDR3 for beta chain variable domain of TCR clone 43376 (TRBV5-5, TRBJ1-5)
CASSGQGVDQPQHF

SEQ ID NO: 86753 - protein, 14 aa, Homo sapiens
  CDR3 for alpha chain variable domain of TCR clone 43377 (TRAV1-2, TRAJ8)
CAVREDTGFQKLVF

SEQ ID NO: 86754 - protein, 15 aa, Homo sapiens
  CDR3 for beta chain variable domain of TCR clone 43377 (TRBV25-1, TRBJ1-4)
CASSPGDSTNEKLFF

SEQ ID NO: 86755 - protein, 13 aa, Homo sapiens
  CDR3 for alpha chain variable domain of TCR clone 43378 (TRAV12-2, TRAJ40)
CAVKRTGTYKYIF

SEQ ID NO: 86756 - protein, 14 aa, Homo sapiens
  CDR3 for beta chain variable domain of TCR clone 43378 (TRBV19, TRBJ1-5)
CASGTEVYNQPQHF

SEQ ID NO: 86757 - protein, 17 aa, Homo sapiens
  CDR3 for alpha chain variable domain of TCR clone 43379 (TRAV3, TRAJ6)
CAVRYGPRAGGSYIPTF

SEQ ID NO: 86758 - protein, 16 aa, Homo sapiens
  CDR3 for beta chain variable domain of TCR clone 43379 (TRBV4-1, TRBJ2-7)
CASSLTAGQATYEQYF

SEQ ID NO: 86759 - protein, 11 aa, Homo sapiens
  CDR3 for alpha chain variable domain of TCR clone 43380 (TRAV8-3, TRAJ15)
CAVGPGTDLIF

SEQ ID NO: 86760 - protein, 18 aa, Homo sapiens
  CDR3 for beta chain variable domain of TCR clone 43380 (TRBV18, TRBJ2-3)
CASSYTSGAAGGTDTQYF

SEQ ID NO: 86761 - protein, 13 aa, Homo sapiens
  CDR3 for alpha chain variable domain of TCR clone 43381 (TRAV8-3, TRAJ21)
CAVGAYNFNKFYF

SEQ ID NO: 86762 - protein, 16 aa, Homo sapiens
  CDR3 for beta chain variable domain of TCR clone 43381 (TRBV19, TRBJ2-1)
FASSMGGGSSYNEQFF

SEQ ID NO: 86763 - protein, 11 aa, Homo sapiens
  CDR3 for alpha chain variable domain of TCR clone 43382 (TRAV21, TRAJ11)
CAVNGYSTLTF

SEQ ID NO: 86764 - protein, 11 aa, Homo sapiens
  CDR3 for beta chain variable domain of TCR clone 43382 (TRBV19, TRBJ1-1)
CASSIGIEAFF

SEQ ID NO: 86765 - protein, 13 aa, Homo sapiens
  CDR3 for alpha chain variable domain of TCR clone 43383 (TRAV12-3, TRAJ13)
CAMGTGGYQKVTF

SEQ ID NO: 86766 - protein, 14 aa, Homo sapiens
  CDR3 for beta chain variable domain of TCR clone 43383 (TRBV7-2, TRBJ2-5)
CASSTGGELRTQYF

SEQ ID NO: 86767 - protein, 15 aa, Homo sapiens
  CDR3 for alpha chain variable domain of TCR clone 43384 (TRAV4, TRAJ39)
CLVGPNNNAGNMPTF

SEQ ID NO: 86768 - protein, 15 aa, Homo sapiens
  CDR3 for beta chain variable domain of TCR clone 43384 (TRBV7-9, TRBJ1-6)
CASSSPGRGNSPLHF

SEQ ID NO: 86769 - protein, 12 aa, Homo sapiens
  CDR3 for alpha chain variable domain of TCR clone 43385 (TRAV17, TRAJ53)
CATEGSNYKLTF

SEQ ID NO: 86770 - protein, 19 aa, Homo sapiens
  CDR3 for beta chain variable domain of TCR clone 43385 (TRBV5-1, TRBJ2-3)
CASNLWTSGGITTPDTQYF

SEQ ID NO: 86771 - protein, 14 aa, Homo sapiens
  CDR3 for alpha chain variable domain of TCR clone 43386 (TRAV3, TRAJ7)
CAVRAEEREQQTRF

SEQ ID NO: 86772 - protein, 12 aa, Homo sapiens
  CDR3 for beta chain variable domain of TCR clone 43386 (TRBV7-8, TRBJ2-7)
CASSLGDREQYF

SEQ ID NO: 86773 - protein, 11 aa, Homo sapiens
  CDR3 for alpha chain variable domain of TCR clone 43387 (TRAV12-3, TRAJ43)
CAMSVSNDMRF

SEQ ID NO: 86774 - protein, 14 aa, Homo sapiens
  CDR3 for beta chain variable domain of TCR clone 43387 (TRBV7-3, TRBJ2-1)
CASSLAGGTNEQFF

SEQ ID NO: 86775 - protein, 15 aa, Homo sapiens
  CDR3 for alpha chain variable domain of TCR clone 43388 (TRAV13-1, TRAJ11)
CAASNRNLGYSTLTF

SEQ ID NO: 86776 - protein, 11 aa, Homo sapiens
  CDR3 for beta chain variable domain of TCR clone 43388 (TRBV20-1, TRBJ2-7)
CSARLSYEQYF

SEQ ID NO: 86777 - protein, 18 aa, Homo sapiens
  CDR3 for alpha chain variable domain of TCR clone 43389 (TRAV21, TRAJ52)
CAVRPSPAGGTSYGKLTF

SEQ ID NO: 86778 - protein, 17 aa, Homo sapiens
  CDR3 for beta chain variable domain of TCR clone 43389 (TRBV13, TRBJ2-3)
CASSRARVAGGRNTQYF

SEQ ID NO: 86779 - protein, 13 aa, Homo sapiens
  CDR3 for alpha chain variable domain of TCR clone 43390 (TRAV13-2, TRAJ13)
CADPSGGYQKVTF

SEQ ID NO: 86780 - protein, 15 aa, Homo sapiens
  CDR3 for beta chain variable domain of TCR clone 43390 (TRBV19, TRBJ1-1)
CASSIGGGRNTEAFF

SEQ ID NO: 86781 - protein, 14 aa, Homo sapiens
  CDR3 for alpha chain variable domain of TCR clone 43391 (TRAV12-3, TRAJ58)
CAMSTETSGPRLTF

SEQ ID NO: 86782 - protein, 12 aa, Homo sapiens
  CDR3 for beta chain variable domain of TCR clone 43391 (TRBV7-8, TRBJ2-7)
CASSLGDREQYF

SEQ ID NO: 86783 - protein, 14 aa, Homo sapiens
  CDR3 for alpha chain variable domain of TCR clone 43392 (TRAV13-1, TRAJ20)
CAARPGSNDYKLSL

SEQ ID NO: 86784 - protein, 13 aa, Homo sapiens
  CDR3 for beta chain variable domain of TCR clone 43392 (TRBV20-1, TRBJ1-1)
CSAPPGGHTEAFF

SEQ ID NO: 86785 - protein, 13 aa, Homo sapiens
  CDR3 for alpha chain variable domain of TCR clone 43393 (TRAV26-1, TRAJ29)
CIVRRSGNKPLVF

SEQ ID NO: 86786 - protein, 16 aa, Homo sapiens
  CDR3 for beta chain variable domain of TCR clone 43393 (TRBV11-2, TRBJ2-7)
CASSLAPTGVNYEQYF

SEQ ID NO: 86787 - protein, 15 aa, Homo sapiens
  CDR3 for alpha chain variable domain of TCR clone 43394 (TRAV3, TRAJ5)
CAVRDLDTGRRALSF

SEQ ID NO: 86788 - protein, 13 aa, Homo sapiens
  CDR3 for beta chain variable domain of TCR clone 43394 (TRBV12-4, TRBJ2-7)
CASSPTETYEQYF

SEQ ID NO: 86789 - protein, 14 aa, Homo sapiens
  CDR3 for alpha chain variable domain of TCR clone 43395 (TRAV23/DV6, TRAJ24)
RAESLSDSWGKLQF

SEQ ID NO: 86790 - protein, 16 aa, Homo sapiens
  CDR3 for beta chain variable domain of TCR clone 43395 (TRBV7-9, TRBJ2-6)
CASSLKGPLRANVLTF

SEQ ID NO: 86791 - protein, 13 aa, Homo sapiens
  CDR3 for alpha chain variable domain of TCR clone 43396 (TRAV21, TRAJ27)
CAARPGNAGKSTL

SEQ ID NO: 86792 - protein, 13 aa, Homo sapiens
  CDR3 for beta chain variable domain of TCR clone 43396 (TRBV13, TRBJ2-1)
CASILGGRGEQFF

SEQ ID NO: 86793 - protein, 14 aa, Homo sapiens
  CDR3 for alpha chain variable domain of TCR clone 43397 (TRAV9-2, TRAJ39)
CALYIYNAGNMLTF

SEQ ID NO: 86794 - protein, 16 aa, Homo sapiens
  CDR3 for beta chain variable domain of TCR clone 43397 (TRBV11-2, TRBJ1-2)
CASSLDTGGADYGYTF

SEQ ID NO: 86795 - protein, 17 aa, Homo sapiens
  CDR3 for alpha chain variable domain of TCR clone 43398 (TRAV3, TRAJ6)
CAVRDGPRAGGSYIPTF

SEQ ID NO: 86796 - protein, 12 aa, Homo sapiens
  CDR3 for beta chain variable domain of TCR clone 43398 (TRBV7-9, TRBJ2-7)
CASSIKREEQYF

SEQ ID NO: 86797 - protein, 19 aa, Homo sapiens
  CDR3 for alpha chain variable domain of TCR clone 43399 (TRAV2, TRAJ20)
ILQVREADAAVYRDCKLSF

SEQ ID NO: 86798 - protein, 13 aa, Homo sapiens
  CDR3 for beta chain variable domain of TCR clone 43399 (TRBV15, TRBJ1-6)
CATPGGLNSPLHF

SEQ ID NO: 86799 - protein, 15 aa, Homo sapiens
  CDR3 for alpha chain variable domain of TCR clone 43400 (TRAV16, TRAJ12)
CSKWPLRDRSYKLIF

SEQ ID NO: 86800 - protein, 13 aa, Homo sapiens
  CDR3 for beta chain variable domain of TCR clone 43400 (TRBV4-2, TRBJ1-1)
CASSQAGNTEAFF

SEQ ID NO: 86801 - protein, 12 aa, Homo sapiens
  CDR3 for alpha chain variable domain of TCR clone 43401 (TRAV12-1, TRAJ40)
CVVYSGTYKYIF

SEQ ID NO: 86802 - protein, 14 aa, Homo sapiens
  CDR3 for beta chain variable domain of TCR clone 43401 (TRBV7-6, TRBJ2-3)
CASSLGTVTDTQYF

SEQ ID NO: 86803 - protein, 16 aa, Homo sapiens
  CDR3 for alpha chain variable domain of TCR clone 43402 (TRAV30, TRAJ24)
CGTEIVDADSWGKSQF

SEQ ID NO: 86804 - protein, 15 aa, Homo sapiens
  CDR3 for beta chain variable domain of TCR clone 43402 (TRBV20-1, TRBJ2-4)
CSARDLTGGPNIQYF

SEQ ID NO: 86805 - protein, 14 aa, Homo sapiens
  CDR3 for alpha chain variable domain of TCR clone 43403 (TRAV1-2, TRAJ16)
CAVDRFSDGQKLLF

SEQ ID NO: 86806 - protein, 14 aa, Homo sapiens
  CDR3 for beta chain variable domain of TCR clone 43403 (TRBV11-2, TRBJ2-3)
CASSRLARTDTQYF

SEQ ID NO: 86807 - protein, 15 aa, Homo sapiens
  CDR3 for alpha chain variable domain of TCR clone 43404 (TRAV23/DV6, TRAJ12)
CAAIDLGALDSSYKL

SEQ ID NO: 86808 - protein, 12 aa, Homo sapiens
  CDR3 for beta chain variable domain of TCR clone 43404 (TRBV10-3, TRBJ2-2)
CAIRENTGELFF

SEQ ID NO: 86809 - protein, 13 aa, Homo sapiens
  CDR3 for alpha chain variable domain of TCR clone 43405 (TRAV17, TRAJ9)
CATDYTGGFKTIF

SEQ ID NO: 86810 - protein, 12 aa, Homo sapiens
  CDR3 for beta chain variable domain of TCR clone 43405 (TRBV11-2, TRBJ2-2)
CASSLGGGELFF

SEQ ID NO: 86811 - protein, 14 aa, Homo sapiens
  CDR3 for alpha chain variable domain of TCR clone 43406 (TRAV9-2, TRAJ39)
CALYIYDAGNMLTF

SEQ ID NO: 86812 - protein, 14 aa, Homo sapiens
  CDR3 for beta chain variable domain of TCR clone 43406 (TRBV6-1, TRBJ1-3)
CASVQGGGGNTIYF

SEQ ID NO: 86813 - protein, 14 aa, Homo sapiens
  CDR3 for alpha chain variable domain of TCR clone 43407 (TRAV4, TRAJ26)
CLAGPHNYGQNFVF

SEQ ID NO: 86814 - protein, 17 aa, Homo sapiens
  CDR3 for beta chain variable domain of TCR clone 43407 (TRBV24-1, TRBJ2-1)
CATSDVSTSGTYNEQFF

SEQ ID NO: 86815 - protein, 14 aa, Homo sapiens
  CDR3 for alpha chain variable domain of TCR clone 43408 (TRAV1-2, TRAJ16)
CAVNRFSDGQKLLF

SEQ ID NO: 86816 - protein, 17 aa, Homo sapiens
  CDR3 for beta chain variable domain of TCR clone 43408 (TRBV15, TRBJ1-2)
CATSGRETDVVNYGYTF

SEQ ID NO: 86817 - protein, 15 aa, Homo sapiens
  CDR3 for alpha chain variable domain of TCR clone 43409 (TRAV3, TRAJ22)
CAVRARGGSARQLTF

SEQ ID NO: 86818 - protein, 16 aa, Homo sapiens
  CDR3 for beta chain variable domain of TCR clone 43409 (TRBV5-4, TRBJ2-3)
CASQQPGAGGADTQYF

SEQ ID NO: 86819 - protein, 14 aa, Homo sapiens
  CDR3 for alpha chain variable domain of TCR clone 43410 (TRAV3, TRAJ40)
CAVRDRRGTYKYIF

SEQ ID NO: 86820 - protein, 15 aa, Homo sapiens
  CDR3 for beta chain variable domain of TCR clone 43410 (TRBV11-1, TRBJ1-3)
CASTDPRAFGNTIHF

SEQ ID NO: 86821 - protein, 15 aa, Homo sapiens
  CDR3 for alpha chain variable domain of TCR clone 43411 (TRAV16, TRAJ12)
CSKWPLRDSSYKLIF

SEQ ID NO: 86822 - protein, 14 aa, Homo sapiens
  CDR3 for beta chain variable domain of TCR clone 43411 (TRBV11-2, TRBJ2-1)
CASSLSGPYNEQFF

SEQ ID NO: 86823 - protein, 12 aa, Homo sapiens
  CDR3 for alpha chain variable domain of TCR clone 43412 (TRAV12-3, TRAJ40)
CAISSGTYKYIF

SEQ ID NO: 86824 - protein, 15 aa, Homo sapiens
  CDR3 for beta chain variable domain of TCR clone 43412 (TRBV7-9, TRBJ2-7)
CASSPGGGLTYEQYF

SEQ ID NO: 86825 - protein, 14 aa, Homo sapiens
  CDR3 for alpha chain variable domain of TCR clone 43413 (TRAV12-1, TRAJ34)
CGEPASYSTDKLIF

SEQ ID NO: 86826 - protein, 13 aa, Homo sapiens
  CDR3 for beta chain variable domain of TCR clone 43413 (TRBV7-9, TRBJ1-2)
CASNLKQNYGYTF

SEQ ID NO: 86827 - protein, 20 aa, Homo sapiens
  CDR3 for alpha chain variable domain of TCR clone 43414 (TRAV26-1, TRAJ42)
CCVLLHRQTYYGGSQGNLIF

SEQ ID NO: 86828 - protein, 16 aa, Homo sapiens
  CDR3 for beta chain variable domain of TCR clone 43414 (TRBV7-3, TRBJ2-2)
CASSLKRGTLSGELFF

SEQ ID NO: 86829 - protein, 17 aa, Homo sapiens
  CDR3 for alpha chain variable domain of TCR clone 43415 (TRAV4, TRAJ18)
CLVGERSVGSTLGRLDF

SEQ ID NO: 86830 - protein, 14 aa, Homo sapiens
  CDR3 for beta chain variable domain of TCR clone 43415 (TRBV6-5, TRBJ1-2)
CASSYDGTGGGYTF

SEQ ID NO: 86831 - protein, 14 aa, Homo sapiens
  CDR3 for alpha chain variable domain of TCR clone 43416 (TRAV1-2, TRAJ8)
CDVREDTGFQKLVF

SEQ ID NO: 86832 - protein, 12 aa, Homo sapiens
  CDR3 for beta chain variable domain of TCR clone 43416 (TRBV24-1, TRBJ1-1)
CATLYPDTEALF

SEQ ID NO: 86833 - protein, 13 aa, Homo sapiens
  CDR3 for alpha chain variable domain of TCR clone 43417 (TRAV27, TRAJ3)
ASLRVSSASKIIF

SEQ ID NO: 86834 - protein, 15 aa, Homo sapiens
  CDR3 for beta chain variable domain of TCR clone 43417 (TRBV28, TRBJ1-3)
CASSMGWASGNTIYF

SEQ ID NO: 86835 - protein, 16 aa, Homo sapiens
  CDR3 for alpha chain variable domain of TCR clone 43418 (TRAV23/DV6, TRAJ9)
CAASIGGNTGGFKTIF

SEQ ID NO: 86836 - protein, 14 aa, Homo sapiens
  CDR3 for beta chain variable domain of TCR clone 43418 (TRBV19, TRBJ2-1)
CASPTFVLSGEQFF

SEQ ID NO: 86837 - protein, 14 aa, Homo sapiens
  CDR3 for alpha chain variable domain of TCR clone 43419 (TRAV2, TRAJ9)
CAVEDRSGGFKTIF

SEQ ID NO: 86838 - protein, 15 aa, Homo sapiens
  CDR3 for beta chain variable domain of TCR clone 43419 (TRBV6-5, TRBJ2-1)
CASSYDAGAGNEQFF

SEQ ID NO: 86839 - protein, 13 aa, Homo sapiens
  CDR3 for alpha chain variable domain of TCR clone 43420 (TRAV29/DV5, TRAJ48)
CAASSFGNEKLTF

SEQ ID NO: 86840 - protein, 14 aa, Homo sapiens
  CDR3 for beta chain variable domain of TCR clone 43420 (TRBV3-1, TRBJ2-2)
CASSQDWVQGELSF

SEQ ID NO: 86841 - protein, 19 aa, Homo sapiens
  CDR3 for alpha chain variable domain of TCR clone 43421 (TRAV17, TRAJ57)
CFLLLCYGPLQGGSEKLVF

SEQ ID NO: 86842 - protein, 16 aa, Homo sapiens
  CDR3 for beta chain variable domain of TCR clone 43421 (TRBV12-4, TRBJ1-5)
CASSRPVGGSNQPQHF

SEQ ID NO: 86843 - protein, 13 aa, Homo sapiens
  CDR3 for alpha chain variable domain of TCR clone 43422 (TRAV2, TRAJ40)
CAVVTSGTYKYIF

SEQ ID NO: 86844 - protein, 13 aa, Homo sapiens
  CDR3 for beta chain variable domain of TCR clone 43422 (TRBV19, TRBJ2-1)
CQSDFRFEGEQFF

SEQ ID NO: 86845 - protein, 20 aa, Homo sapiens
  CDR3 for alpha chain variable domain of TCR clone 43423 (TRAV1-1, TRAJ4)
CLLLLRCEGSLSGGYNKLIF

SEQ ID NO: 86846 - protein, 16 aa, Homo sapiens
  CDR3 for beta chain variable domain of TCR clone 43423 (TRBV28, TRBJ1-4)
CASSPPYRGRSEKLFF

SEQ ID NO: 86847 - protein, 14 aa, Homo sapiens
  CDR3 for alpha chain variable domain of TCR clone 43424 (TRAV2, TRAJ37)
CAVDFTSNTGKLIF

SEQ ID NO: 86848 - protein, 16 aa, Homo sapiens
  CDR3 for beta chain variable domain of TCR clone 43424 (TRBV13, TRBJ2-2)
CASSPRTGEHTGELFF

SEQ ID NO: 86849 - protein, 15 aa, Homo sapiens
  CDR3 for alpha chain variable domain of TCR clone 43425 (TRAV2, TRAJ28)
CAVPCSGAGSYQLTF

SEQ ID NO: 86850 - protein, 10 aa, Homo sapiens
  CDR3 for beta chain variable domain of TCR clone 43425 (TRBV23-1, TRBJ2-1)
KWSSYNEQFF

SEQ ID NO: 86851 - protein, 13 aa, Homo sapiens
  CDR3 for alpha chain variable domain of TCR clone 43426 (TRAV13-1, TRAJ21)
CAASIYNFNKFYF

SEQ ID NO: 86852 - protein, 11 aa, Homo sapiens
  CDR3 for beta chain variable domain of TCR clone 43426 (TRBV11-2, TRBJ2-2)
CASSLPGELFF

SEQ ID NO: 86853 - protein, 14 aa, Homo sapiens
  CDR3 for alpha chain variable domain of TCR clone 43427 (TRAV13-1, TRAJ44)
CAAKATGTASKLTF

SEQ ID NO: 86854 - protein, 14 aa, Homo sapiens
  CDR3 for beta chain variable domain of TCR clone 43427 (TRBV19, TRBJ2-2)
CASSNLHRSGELFF

SEQ ID NO: 86855 - protein, 15 aa, Homo sapiens
  CDR3 for alpha chain variable domain of TCR clone 43428 (TRAV21, TRAJ53)
CATLNSGGSNYKLTF

SEQ ID NO: 86856 - protein, 14 aa, Homo sapiens
  CDR3 for beta chain variable domain of TCR clone 43428 (TRBV20-1, TRBJ1-1)
CSAQTRIGGTEAFF

SEQ ID NO: 86857 - protein, 13 aa, Homo sapiens
  CDR3 for alpha chain variable domain of TCR clone 43429 (TRAV36/DV7, TRAJ7)
CAGTRYGNNGLAF

SEQ ID NO: 86858 - protein, 14 aa, Homo sapiens
  CDR3 for beta chain variable domain of TCR clone 43429 (TRBV19, TRBJ2-1)
CASPTFVLSGEQFF

SEQ ID NO: 86859 - protein, 15 aa, Homo sapiens
  CDR3 for alpha chain variable domain of TCR clone 43430 (TRAV3, TRAJ3)
CAVRDMNSSASKIIF

SEQ ID NO: 86860 - protein, 14 aa, Homo sapiens
  CDR3 for beta chain variable domain of TCR clone 43430 (TRBV19, TRBJ2-1)
CASPTFVLSGEQFF

SEQ ID NO: 86861 - protein, 14 aa, Homo sapiens
  CDR3 for alpha chain variable domain of TCR clone 43431 (TRAV12-2, TRAJ44)
CAVNPAGTASNLTF

SEQ ID NO: 86862 - protein, 13 aa, Homo sapiens
  CDR3 for beta chain variable domain of TCR clone 43431 (TRBV20-1, TRBJ1-6)
CSAPLGVGSPLHF

SEQ ID NO: 86863 - protein, 15 aa, Homo sapiens
  CDR3 for alpha chain variable domain of TCR clone 43432 (TRAV8-4, TRAJ10)
CAVSDGPGGGNKLTF

SEQ ID NO: 86864 - protein, 13 aa, Homo sapiens
  CDR3 for beta chain variable domain of TCR clone 43432 (TRBV28, TRBJ1-3)
CASSFLGSGTMYF

SEQ ID NO: 86865 - protein, 17 aa, Homo sapiens
  CDR3 for alpha chain variable domain of TCR clone 43433 (TRAV3, TRAJ42)
CAVRDRDYGGSQGNLIF

SEQ ID NO: 86866 - protein, 17 aa, Homo sapiens
  CDR3 for beta chain variable domain of TCR clone 43433 (TRBV7-3, TRBJ2-3)
CASSLMKRMRGADTQYF

SEQ ID NO: 86867 - protein, 11 aa, Homo sapiens
  CDR3 for alpha chain variable domain of TCR clone 43434 (TRAV17, TRAJ9)
CATTGGFKTIF

SEQ ID NO: 86868 - protein, 13 aa, Homo sapiens
  CDR3 for beta chain variable domain of TCR clone 43434 (TRBV7-9, TRBJ2-2)
CQQRTSGHRELFF

SEQ ID NO: 86869 - protein, 15 aa, Homo sapiens
  CDR3 for alpha chain variable domain of TCR clone 43435 (TRAV36/DV7, TRAJ53)
CAVEGSGGSNYKLTF

SEQ ID NO: 86870 - protein, 15 aa, Homo sapiens
  CDR3 for beta chain variable domain of TCR clone 43435 (TRBV27, TRBJ2-2)
CQQFIRFLGHRGAVF

SEQ ID NO: 86871 - protein, 13 aa, Homo sapiens
  CDR3 for alpha chain variable domain of TCR clone 43436 (TRAV13-1, TRAJ39)
CAASIWAGNMLTI

SEQ ID NO: 86872 - protein, 15 aa, Homo sapiens
  CDR3 for beta chain variable domain of TCR clone 43436 (TRBV7-9, TRBJ1-1)
CASSLLEQGGTEAFF

SEQ ID NO: 86873 - protein, 12 aa, Homo sapiens
  CDR3 for alpha chain variable domain of TCR clone 43437 (TRAV8-3, TRAJ20)
CAVDFNDYKLSF

SEQ ID NO: 86874 - protein, 13 aa, Homo sapiens
  CDR3 for beta chain variable domain of TCR clone 43437 (TRBV5-7, TRBJ2-3)
RASSLGRTDTQYF

SEQ ID NO: 86875 - protein, 15 aa, Homo sapiens
  CDR3 for alpha chain variable domain of TCR clone 43438 (TRAV3, TRAJ20)
CAVRDIKLSDYKLTF

SEQ ID NO: 86876 - protein, 15 aa, Homo sapiens
  CDR3 for beta chain variable domain of TCR clone 43438 (TRBV7-9, TRBJ1-6)
CASSSPGRGNSPLHF

SEQ ID NO: 86877 - protein, 13 aa, Homo sapiens
  CDR3 for alpha chain variable domain of TCR clone 43439 (TRAV38-1, TRAJ42)
CARWGGSQGNLIF

SEQ ID NO: 86878 - protein, 15 aa, Homo sapiens
  CDR3 for beta chain variable domain of TCR clone 43439 (TRBV4-3, TRBJ1-2)
CASSRGQGRNYGYTF

SEQ ID NO: 86879 - protein, 14 aa, Homo sapiens
  CDR3 for alpha chain variable domain of TCR clone 43440 (TRAV26-1, TRAJ39)
CIVFTNNAGNMLTF

SEQ ID NO: 86880 - protein, 15 aa, Homo sapiens
  CDR3 for beta chain variable domain of TCR clone 43440 (TRBV19, TRBJ2-4)
CASSLTGLAKNIQYF

SEQ ID NO: 86881 - protein, 13 aa, Homo sapiens
  CDR3 for alpha chain variable domain of TCR clone 43441 (TRAV25, TRAJ40)
CAGSASGTYKYIF

SEQ ID NO: 86882 - protein, 14 aa, Homo sapiens
  CDR3 for beta chain variable domain of TCR clone 43441 (TRBV7-2, TRBJ2-7)
CASRSQGAAYERYF

SEQ ID NO: 86883 - protein, 13 aa, Homo sapiens
  CDR3 for alpha chain variable domain of TCR clone 43442 (TRAV6, TRAJ16)
CALDDSDGQKLLF

SEQ ID NO: 86884 - protein, 16 aa, Homo sapiens
  CDR3 for beta chain variable domain of TCR clone 43442 (TRBV12-4, TRBJ1-6)
CASNLQGKVSPLHLGT

SEQ ID NO: 86885 - protein, 15 aa, Homo sapiens
  CDR3 for alpha chain variable domain of TCR clone 43443 (TRAV26-1, TRAJ29)
CIVRVEGSGNTPLVF

SEQ ID NO: 86886 - protein, 16 aa, Homo sapiens
  CDR3 for beta chain variable domain of TCR clone 43443 (TRBV5-1, TRBJ2-2)
CASSLWDTTNTGELFF

SEQ ID NO: 86887 - protein, 14 aa, Homo sapiens
  CDR3 for alpha chain variable domain of TCR clone 43444 (TRAV1-2, TRAJ16)
CAVNRFSDGQKLLF

SEQ ID NO: 86888 - protein, 12 aa, Homo sapiens
  CDR3 for beta chain variable domain of TCR clone 43444 (TRBV14, TRBJ1-1)
CASSQLKGLASF

SEQ ID NO: 86889 - protein, 15 aa, Homo sapiens
  CDR3 for alpha chain variable domain of TCR clone 43445 (TRAV12-2, TRAJ53)
CAVNGGGGSNYKLTF

SEQ ID NO: 86890 - protein, 13 aa, Homo sapiens
  CDR3 for beta chain variable domain of TCR clone 43445 (TRBV3-1, TRBJ1-1)
CASSPGVIAEAFF

SEQ ID NO: 86891 - protein, 14 aa, Homo sapiens
  CDR3 for alpha chain variable domain of TCR clone 43446 (TRAV17, TRAJ22)
CATSPSGSARQLTF

SEQ ID NO: 86892 - protein, 15 aa, Homo sapiens
  CDR3 for beta chain variable domain of TCR clone 43446 (TRBV4-1, TRBJ2-5)
CASSQWDLYQETQCF

SEQ ID NO: 86893 - protein, 14 aa, Homo sapiens
  CDR3 for alpha chain variable domain of TCR clone 43447 (TRAV10, TRAJ32)
CGEPRGGATNKLIF

SEQ ID NO: 86894 - protein, 14 aa, Homo sapiens
  CDR3 for beta chain variable domain of TCR clone 43447 (TRBV5-4, TRBJ2-2)
CASRLDGGTGELLF

SEQ ID NO: 86895 - protein, 14 aa, Homo sapiens
  CDR3 for alpha chain variable domain of TCR clone 43448 (TRAV26-1, TRAJ34)
CIVRGAYNTDKLIF

SEQ ID NO: 86896 - protein, 15 aa, Homo sapiens
  CDR3 for beta chain variable domain of TCR clone 43448 (TRBV20-1, TRBJ2-7)
CSARVPAAYFYEQYF

SEQ ID NO: 86897 - protein, 14 aa, Homo sapiens
  CDR3 for alpha chain variable domain of TCR clone 43449 (TRAV1-2, TRAJ16)
CAVNRSSDGQKLLF

SEQ ID NO: 86898 - protein, 13 aa, Homo sapiens
  CDR3 for beta chain variable domain of TCR clone 43449 (TRBV19, TRBJ1-2)
CASSVPGQDGYTF

SEQ ID NO: 86899 - protein, 15 aa, Homo sapiens
  CDR3 for alpha chain variable domain of TCR clone 43450 (TRAV26-1, TRAJ56)
CIVRVDSGANSKLTF

SEQ ID NO: 86900 - protein, 14 aa, Homo sapiens
  CDR3 for beta chain variable domain of TCR clone 43450 (TRBV5-1, TRBJ2-7)
CASSRGESLYEQYF

SEQ ID NO: 86901 - protein, 12 aa, Homo sapiens
  CDR3 for alpha chain variable domain of TCR clone 43451 (TRAV2, TRAJ9)
CAVGAGGFKTIF

SEQ ID NO: 86902 - protein, 14 aa, Homo sapiens
  CDR3 for beta chain variable domain of TCR clone 43451 (TRBV11-2, TRBJ2-1)
CASSLEPSGGGSSS

SEQ ID NO: 86903 - protein, 15 aa, Homo sapiens
  CDR3 for alpha chain variable domain of TCR clone 43452 (TRAV12-1, TRAJ42)
CVVTRDGGSQGNHIF

SEQ ID NO: 86904 - protein, 14 aa, Homo sapiens
  CDR3 for beta chain variable domain of TCR clone 43452 (TRBV11-2, TRBJ2-3)
CASSLGGGANTQYF

SEQ ID NO: 86905 - protein, 16 aa, Homo sapiens
  CDR3 for alpha chain variable domain of TCR clone 43453 (TRAV30, TRAJ24)
CGTEIVDADSWGKFQF

SEQ ID NO: 86906 - protein, 13 aa, Homo sapiens
  CDR3 for beta chain variable domain of TCR clone 43453 (TRBV10-3, TRBJ2-7)
CASKLEVNYEQYF

SEQ ID NO: 86907 - protein, 13 aa, Homo sapiens
  CDR3 for alpha chain variable domain of TCR clone 43454 (TRAV8-6, TRAJ49)
CAVITNTGNQFYF

SEQ ID NO: 86908 - protein, 12 aa, Homo sapiens
  CDR3 for beta chain variable domain of TCR clone 43454 (TRBV6-3, TRBJ2-7)
CASSLTPYEQYF

SEQ ID NO: 86909 - protein, 16 aa, Homo sapiens
  CDR3 for alpha chain variable domain of TCR clone 43455 (TRAV38-1, TRAJ37)
CAFKGDGSSNTGKPIF

SEQ ID NO: 86910 - protein, 13 aa, Homo sapiens
  CDR3 for beta chain variable domain of TCR clone 43455 (TRBV12-4, TRBJ2-5)
CASSLFRRETQYF

SEQ ID NO: 86911 - protein, 10 aa, Homo sapiens
  CDR3 for alpha chain variable domain of TCR clone 43456 (TRAV8-4, TRAJ43)
CAMSADDMRF

SEQ ID NO: 86912 - protein, 13 aa, Homo sapiens
  CDR3 for beta chain variable domain of TCR clone 43456 (TRBV12-4, TRBJ2-5)
CASSPGTEETQYF

SEQ ID NO: 86913 - protein, 15 aa, Homo sapiens
  CDR3 for alpha chain variable domain of TCR clone 43457 (TRAV2, TRAJ13)
CATPSYSGGYQKVTF

SEQ ID NO: 86914 - protein, 12 aa, Homo sapiens
  CDR3 for beta chain variable domain of TCR clone 43457 (TRBV11-2, TRBJ2-2)
CASSLGGGELFF

SEQ ID NO: 86915 - protein, 13 aa, Homo sapiens
  CDR3 for alpha chain variable domain of TCR clone 43458 (TRAV13-2, TRAJ54)
CAENYQGAQKLVF

SEQ ID NO: 86916 - protein, 16 aa, Homo sapiens
  CDR3 for beta chain variable domain of TCR clone 43458 (TRBV7-3, TRBJ2-3)
CASSLSGYRPEDTQYF

SEQ ID NO: 86917 - protein, 14 aa, Homo sapiens
  CDR3 for alpha chain variable domain of TCR clone 43459 (TRAV26-1, TRAJ40)
CIVRLLSGTYKYIF

SEQ ID NO: 86918 - protein, 18 aa, Homo sapiens
  CDR3 for beta chain variable domain of TCR clone 43459 (TRBV15, TRBJ2-7)
CATSRDRGIRAVLRAGHQ

SEQ ID NO: 86919 - protein, 12 aa, Homo sapiens
  CDR3 for alpha chain variable domain of TCR clone 43460 (TRAV29/DV5, TRAJ49)
CAATYTGNQFYF

SEQ ID NO: 86920 - protein, 12 aa, Homo sapiens
  CDR3 for beta chain variable domain of TCR clone 43460 (TRBV12-4, TRBJ2-7)
CASSLGGYEQYF

SEQ ID NO: 86921 - protein, 12 aa, Homo sapiens
  CDR3 for alpha chain variable domain of TCR clone 43461 (TRAV12-3, TRAJ17)
CAMTLTGNKITF

SEQ ID NO: 86922 - protein, 13 aa, Homo sapiens
  CDR3 for beta chain variable domain of TCR clone 43461 (TRBV7-3, TRBJ1-1)
CASSQDWGAEAFF

SEQ ID NO: 86923 - protein, 13 aa, Homo sapiens
  CDR3 for alpha chain variable domain of TCR clone 43462 (TRAV12-1, TRAJ47)
CAVFMEYGNKLVF

SEQ ID NO: 86924 - protein, 13 aa, Homo sapiens
  CDR3 for beta chain variable domain of TCR clone 43462 (TRBV6-5, TRBJ2-5)
CASSPQGGETQYF

SEQ ID NO: 86925 - protein, 11 aa, Homo sapiens
  CDR3 for alpha chain variable domain of TCR clone 43463 (TRAV23/DV6, TRAJ48)
YAPRWGEKLTF

SEQ ID NO: 86926 - protein, 13 aa, Homo sapiens
  CDR3 for beta chain variable domain of TCR clone 43463 (TRBV12-4, TRBJ2-5)
CASSPGTEETQYF

SEQ ID NO: 86927 - protein, 14 aa, Homo sapiens
  CDR3 for alpha chain variable domain of TCR clone 43464 (TRAV12-2, TRAJ13)
CAVKKTGGYQKATF

SEQ ID NO: 86928 - protein, 15 aa, Homo sapiens
  CDR3 for beta chain variable domain of TCR clone 43464 (TRBV28, TRBJ2-5)
CASSPPWSYQETQYF

SEQ ID NO: 86929 - protein, 23 aa, Homo sapiens
  CDR3 for alpha chain variable domain of TCR clone 43465 (TRAV26-1, TRAJ38)
CIADNAGNNHIPNPDPAVYQLRD

SEQ ID NO: 86930 - protein, 13 aa, Homo sapiens
  CDR3 for beta chain variable domain of TCR clone 43465 (TRBV20-1, TRBJ1-1)
CSARGGGNTEAFF

SEQ ID NO: 86931 - protein, 13 aa, Homo sapiens
  CDR3 for alpha chain variable domain of TCR clone 43466 (TRAV1-2, TRAJ15)
CAGVNQAGTALVF

SEQ ID NO: 86932 - protein, 16 aa, Homo sapiens
  CDR3 for beta chain variable domain of TCR clone 43466 (TRBV12-5, TRBJ2-5)
CASGPRTSGNQETQYF

SEQ ID NO: 86933 - protein, 14 aa, Homo sapiens
  CDR3 for alpha chain variable domain of TCR clone 43467 (TRAV12-2, TRAJ17)
CAVNIKAAGNKLTF

SEQ ID NO: 86934 - protein, 12 aa, Homo sapiens
  CDR3 for beta chain variable domain of TCR clone 43467 (TRBV7-9, TRBJ2-7)
CASSIKREEQYF

SEQ ID NO: 86935 - protein, 12 aa, Homo sapiens
  CDR3 for alpha chain variable domain of TCR clone 43468 (TRAV13-2, TRAJ23)
CAERHRGGKLIF

SEQ ID NO: 86936 - protein, 16 aa, Homo sapiens
  CDR3 for beta chain variable domain of TCR clone 43468 (TRBV20-1, TRBJ1-4)
CIAPGQGLLTNEKLFF

SEQ ID NO: 86937 - protein, 12 aa, Homo sapiens
  CDR3 for alpha chain variable domain of TCR clone 43469 (TRAV13-2, TRAJ23)
CAERNRGGKLIF

SEQ ID NO: 86938 - protein, 13 aa, Homo sapiens
  CDR3 for beta chain variable domain of TCR clone 43469 (TRBV7-9, TRBJ1-2)
CASSLKQNYGYTF

SEQ ID NO: 86939 - protein, 13 aa, Homo sapiens
  CDR3 for alpha chain variable domain of TCR clone 43470 (TRAV9-2, TRAJ49)
CALRPNTGNQFYL

SEQ ID NO: 86940 - protein, 15 aa, Homo sapiens
  CDR3 for beta chain variable domain of TCR clone 43470 (TRBV5-1, TRBJ2-1)
CASSPPRAPYNEQFF

SEQ ID NO: 86941 - protein, 14 aa, Homo sapiens
  CDR3 for alpha chain variable domain of TCR clone 43471 (TRAV12-2, TRAJ45)
CAVYSGGGADGLTF

SEQ ID NO: 86942 - protein, 14 aa, Homo sapiens
  CDR3 for beta chain variable domain of TCR clone 43471 (TRBV6-5, TRBJ1-2)
CASTRGGGSDGYSF

SEQ ID NO: 86943 - protein, 15 aa, Homo sapiens
  CDR3 for alpha chain variable domain of TCR clone 43472 (TRAV26-1, TRAJ44)
CIVRIGTGTASKLTF

SEQ ID NO: 86944 - protein, 16 aa, Homo sapiens
  CDR3 for beta chain variable domain of TCR clone 43472 (TRBV19, TRBJ1-2)
CASSKFRDTTNYGYTF

SEQ ID NO: 86945 - protein, 14 aa, Homo sapiens
  CDR3 for alpha chain variable domain of TCR clone 43473 (TRAV1-2, TRAJ16)
CAVNRSSDGQKLLF

SEQ ID NO: 86946 - protein, 14 aa, Homo sapiens
  CDR3 for beta chain variable domain of TCR clone 43473 (TRBV7-2, TRBJ2-5)
CASSPLGQSETQYF

SEQ ID NO: 86947 - protein, 10 aa, Homo sapiens
  CDR3 for alpha chain variable domain of TCR clone 43474 (TRAV12-3, TRAJ49)
CALNDDQFYF

SEQ ID NO: 86948 - protein, 13 aa, Homo sapiens
  CDR3 for beta chain variable domain of TCR clone 43474 (TRBV12-4, TRBJ1-1)
CASSPGTGFEAFF

SEQ ID NO: 86949 - protein, 15 aa, Homo sapiens
  CDR3 for alpha chain variable domain of TCR clone 43475 (TRAV12-3, TRAJ6)
CAMSATTGGSYIPTF

SEQ ID NO: 86950 - protein, 16 aa, Homo sapiens
  CDR3 for beta chain variable domain of TCR clone 43475 (TRBV19, TRBJ2-2)
CASRSPGTGATGELFF

SEQ ID NO: 86951 - protein, 13 aa, Homo sapiens
  CDR3 for alpha chain variable domain of TCR clone 43476 (TRAV23/DV6, TRAJ35)
CAAQLGFGNVLHC

SEQ ID NO: 86952 - protein, 15 aa, Homo sapiens
  CDR3 for beta chain variable domain of TCR clone 43476 (TRBV27, TRBJ2-2)
CASSKQGASTGELFF

SEQ ID NO: 86953 - protein, 14 aa, Homo sapiens
  CDR3 for alpha chain variable domain of TCR clone 43477 (TRAV13-1, TRAJ44)
CAAKATGTASKLTF

SEQ ID NO: 86954 - protein, 13 aa, Homo sapiens
  CDR3 for beta chain variable domain of TCR clone 43477 (TRBV2, TRBJ1-4)
CASSERAGEKLFF

SEQ ID NO: 86955 - protein, 14 aa, Homo sapiens
  CDR3 for alpha chain variable domain of TCR clone 43478 (TRAV23/DV6, TRAJ13)
CAVKKTGGYQKVTF

SEQ ID NO: 86956 - protein, 15 aa, Homo sapiens
  CDR3 for beta chain variable domain of TCR clone 43478 (TRBV27, TRBJ2-1)
CASSNGGGSSNEQFF

SEQ ID NO: 86957 - protein, 15 aa, Homo sapiens
  CDR3 for alpha chain variable domain of TCR clone 43479 (TRAV12-1, TRAJ41)
CVVNSRTGSGYALNF

SEQ ID NO: 86958 - protein, 11 aa, Homo sapiens
  CDR3 for beta chain variable domain of TCR clone 43479 (TRBV6-4, TRBJ2-1)
CASSGSYAQFF

SEQ ID NO: 86959 - protein, 15 aa, Homo sapiens
  CDR3 for alpha chain variable domain of TCR clone 43480 (TRAV17, TRAJ57)
CATGPSQGGSEKLVF

SEQ ID NO: 86960 - protein, 15 aa, Homo sapiens
  CDR3 for beta chain variable domain of TCR clone 43480 (TRBV27, TRBJ1-6)
CASSFDRGLGSPLHF

SEQ ID NO: 86961 - protein, 12 aa, Homo sapiens
  CDR3 for alpha chain variable domain of TCR clone 43481 (TRAV1-1, TRAJ8)
CAGGTGFQKLVF

SEQ ID NO: 86962 - protein, 15 aa, Homo sapiens
  CDR3 for beta chain variable domain of TCR clone 43481 (TRBV7-9, TRBJ1-4)
CASSRTGCFNEKLFF

SEQ ID NO: 86963 - protein, 11 aa, Homo sapiens
  CDR3 for alpha chain variable domain of TCR clone 43482 (TRAV1-2, TRAJ40)
CAAPGTYKYIF

SEQ ID NO: 86964 - protein, 16 aa, Homo sapiens
  CDR3 for beta chain variable domain of TCR clone 43482 (TRBV7-3, TRBJ2-2)
CASSLKRGTLSGELFF

SEQ ID NO: 86965 - protein, 14 aa, Homo sapiens
  CDR3 for alpha chain variable domain of TCR clone 43483 (TRAV12-3, TRAJ10)
SHLPLTGGGNKLTF

SEQ ID NO: 86966 - protein, 14 aa, Homo sapiens
  CDR3 for beta chain variable domain of TCR clone 43483 (TRBV6-3, TRBJ1-1)
CASSYQRRDTEAFF

SEQ ID NO: 86967 - protein, 11 aa, Homo sapiens
  CDR3 for alpha chain variable domain of TCR clone 43484 (TRAV1-2, TRAJ31)
CAVNNNARLMF

SEQ ID NO: 86968 - protein, 14 aa, Homo sapiens
  CDR3 for beta chain variable domain of TCR clone 43484 (TRBV6-1, TRBJ1-3)
CASVQGGGGNTIYF

SEQ ID NO: 86969 - protein, 15 aa, Homo sapiens
  CDR3 for alpha chain variable domain of TCR clone 43485 (TRAV21, TRAJ53)
CATLNSGGSNYKLTF

SEQ ID NO: 86970 - protein, 16 aa, Homo sapiens
  CDR3 for beta chain variable domain of TCR clone 43485 (TRBV9, TRBJ2-1)
CASSVGGGRNYNEQFF

SEQ ID NO: 86971 - protein, 19 aa, Homo sapiens
  CDR3 for alpha chain variable domain of TCR clone 43486 (TRAV3, TRAJ6)
CAVRDSNPSRSGGSYIPTF

SEQ ID NO: 86972 - protein, 15 aa, Homo sapiens
  CDR3 for beta chain variable domain of TCR clone 43486 (TRBV18, TRBJ2-7)
CASSPTFMDSYEQYF

SEQ ID NO: 86973 - protein, 14 aa, Homo sapiens
  CDR3 for alpha chain variable domain of TCR clone 43487 (TRAV21, TRAJ15)
CAVSLNQAGTAPIF

SEQ ID NO: 86974 - protein, 11 aa, Homo sapiens
  CDR3 for beta chain variable domain of TCR clone 43487 (TRBV20-1, TRBJ2-7)
CSARTSYEQYF

SEQ ID NO: 86975 - protein, 14 aa, Homo sapiens
  CDR3 for alpha chain variable domain of TCR clone 43488 (TRAV12-2, TRAJ17)
CAVLFKAAGNKLTF

SEQ ID NO: 86976 - protein, 14 aa, Homo sapiens
  CDR3 for beta chain variable domain of TCR clone 43488 (TRBV15, TRBJ1-2)
CATSRDFDRVGDTF

SEQ ID NO: 86977 - protein, 15 aa, Homo sapiens
  CDR3 for alpha chain variable domain of TCR clone 43489 (TRAV3, TRAJ20)
CAVRDSRSNDYKLSF

SEQ ID NO: 86978 - protein, 14 aa, Homo sapiens
  CDR3 for beta chain variable domain of TCR clone 43489 (TRBV20-1, TRBJ2-7)
CSARHGNGIYEQYF

SEQ ID NO: 86979 - protein, 15 aa, Homo sapiens
  CDR3 for alpha chain variable domain of TCR clone 43490 (TRAV13-1, TRAJ45)
CAASGAGGGADGLTF

SEQ ID NO: 86980 - protein, 12 aa, Homo sapiens
  CDR3 for beta chain variable domain of TCR clone 43490 (TRBV11-2, TRBJ2-2)
CASSLGGGELFF

SEQ ID NO: 86981 - protein, 14 aa, Homo sapiens
  CDR3 for alpha chain variable domain of TCR clone 43491 (TRAV17, TRAJ22)
CATSPSCSARQLTF

SEQ ID NO: 86982 - protein, 15 aa, Homo sapiens
  CDR3 for beta chain variable domain of TCR clone 43491 (TRBV4-1, TRBJ2-5)
CASSQWDLYQETQYF

SEQ ID NO: 86983 - protein, 14 aa, Homo sapiens
  CDR3 for alpha chain variable domain of TCR clone 43492 (TRAV40, TRAJ41)
CLLGPPNSGYALNF

SEQ ID NO: 86984 - protein, 14 aa, Homo sapiens
  CDR3 for beta chain variable domain of TCR clone 43492 (TRBV19, TRBJ1-5)
CASRAPDSFLSQHF

SEQ ID NO: 86985 - protein, 14 aa, Homo sapiens
  CDR3 for alpha chain variable domain of TCR clone 43493 (TRAV12-3, TRAJ29)
CAMILLSGNTPLVF

SEQ ID NO: 86986 - protein, 15 aa, Homo sapiens
  CDR3 for beta chain variable domain of TCR clone 43493 (TRBV28, TRBJ1-3)
CASSMGWASGNTIYF

SEQ ID NO: 86987 - protein, 14 aa, Homo sapiens
  CDR3 for alpha chain variable domain of TCR clone 43494 (TRAV13-1, TRAJ44)
CAAKATGTASKLTF

SEQ ID NO: 86988 - protein, 16 aa, Homo sapiens
  CDR3 for beta chain variable domain of TCR clone 43494 (TRBV12-4, TRBJ2-7)
CASSLIGGTGTYEQYF

SEQ ID NO: 86989 - protein, 15 aa, Homo sapiens
  CDR3 for alpha chain variable domain of TCR clone 43495 (TRAV12-3, TRAJ11)
CAMSEENSGYSTLTF

SEQ ID NO: 86990 - protein, 16 aa, Homo sapiens
  CDR3 for beta chain variable domain of TCR clone 43495 (TRBV5-1, TRBJ2-7)
CASSWEGLAGLYEQYF

SEQ ID NO: 86991 - protein, 12 aa, Homo sapiens
  CDR3 for alpha chain variable domain of TCR clone 43496 (TRAV29/DV5, TRAJ49)
CAATDTGNQFYF

SEQ ID NO: 86992 - protein, 12 aa, Homo sapiens
  CDR3 for beta chain variable domain of TCR clone 43496 (TRBV12-4, TRBJ2-7)
CASSLGGYERYF

SEQ ID NO: 86993 - protein, 12 aa, Homo sapiens
  CDR3 for alpha chain variable domain of TCR clone 43497 (TRAV13-1, TRAJ21)
CAAKEGFNKFYF

SEQ ID NO: 86994 - protein, 16 aa, Homo sapiens
  CDR3 for beta chain variable domain of TCR clone 43497 (TRBV12-4, TRBJ1-5)
CASSRPVGGSNQPQHF

SEQ ID NO: 86995 - protein, 14 aa, Homo sapiens
  CDR3 for alpha chain variable domain of TCR clone 43498 (TRAV12-1, TRAJ30)
CVVNIGGRDDKIIF

SEQ ID NO: 86996 - protein, 15 aa, Homo sapiens
  CDR3 for beta chain variable domain of TCR clone 43498 (TRBV18, TRBJ1-2)
CASSPPNTPNYGYTF

SEQ ID NO: 86997 - protein, 15 aa, Homo sapiens
  CDR3 for alpha chain variable domain of TCR clone 43499 (TRAV8-3, TRAJ45)
CALSYSGGGADGLTF

SEQ ID NO: 86998 - protein, 13 aa, Homo sapiens
  CDR3 for beta chain variable domain of TCR clone 43499 (TRBV10-3, TRBJ2-7)
CAAKLAVNYEQYF

SEQ ID NO: 86999 - protein, 12 aa, Homo sapiens
  CDR3 for alpha chain variable domain of TCR clone 43500 (TRAV13-1, TRAJ21)
CAAKEGFNKFYF

SEQ ID NO: 87000 - protein, 14 aa, Homo sapiens
  CDR3 for beta chain variable domain of TCR clone 43500 (TRBV5-4, TRBJ1-1)
CASSLDSRRDEAFC

SEQ ID NO: 87001 - protein, 14 aa, Homo sapiens
  CDR3 for alpha chain variable domain of TCR clone 43501 (TRAV26-1, TRAJ34)
CIVRVAYNTDKLIF

SEQ ID NO: 87002 - protein, 15 aa, Homo sapiens
  CDR3 for beta chain variable domain of TCR clone 43501 (TRBV20-1, TRBJ2-7)
CSASVPAAYFYEQYF

SEQ ID NO: 87003 - protein, 14 aa, Homo sapiens
  CDR3 for alpha chain variable domain of TCR clone 43502 (TRAV12-1, TRAJ23)
CVVIVYNQGGRLIF

SEQ ID NO: 87004 - protein, 15 aa, Homo sapiens
  CDR3 for beta chain variable domain of TCR clone 43502 (TRBV20-1, TRBJ1-5)
CSAKPPGQGPQPQHF

SEQ ID NO: 87005 - protein, 16 aa, Homo sapiens
  CDR3 for alpha chain variable domain of TCR clone 43503 (TRAV14/DV4, TRAJ54)
CAMREGRIQGAQKLVF

SEQ ID NO: 87006 - protein, 16 aa, Homo sapiens
  CDR3 for beta chain variable domain of TCR clone 43503 (TRBV5-1, TRBJ1-1)
CASSSGGNSLNTEAFF

SEQ ID NO: 87007 - protein, 14 aa, Homo sapiens
  CDR3 for alpha chain variable domain of TCR clone 43504 (TRAV27, TRAJ13)
CRSSNSGGYQKVTF

SEQ ID NO: 87008 - protein, 17 aa, Homo sapiens
  CDR3 for beta chain variable domain of TCR clone 43504 (TRBV7-6, TRBJ2-1)
CIAVPAAWGGGADEQFF

SEQ ID NO: 87009 - protein, 16 aa, Homo sapiens
  CDR3 for alpha chain variable domain of TCR clone 43505 (TRAV12-3, TRAJ53)
CAMSPGSGGSNYKLTL

SEQ ID NO: 87010 - protein, 11 aa, Homo sapiens
  CDR3 for beta chain variable domain of TCR clone 43505 (TRBV29-1, TRBJ2-5)
RSEDRTGTQYF

SEQ ID NO: 87011 - protein, 11 aa, Homo sapiens
  CDR3 for alpha chain variable domain of TCR clone 43506 (TRAV21, TRAJ9)
CAVPGGFKTIF

SEQ ID NO: 87012 - protein, 12 aa, Homo sapiens
  CDR3 for beta chain variable domain of TCR clone 43506 (TRBV20-1, TRBJ2-3)
CSARVGTDTQCF

SEQ ID NO: 87013 - protein, 14 aa, Homo sapiens
  CDR3 for alpha chain variable domain of TCR clone 43507 (TRAV13-1, TRAJ44)
CAAKATGTSSKLTF

SEQ ID NO: 87014 - protein, 17 aa, Homo sapiens
  CDR3 for beta chain variable domain of TCR clone 43507 (TRBV7-3, TRBJ2-3)
RASSLMKRMRGADTQYF

SEQ ID NO: 87015 - protein, 15 aa, Homo sapiens
  CDR3 for alpha chain variable domain of TCR clone 43508 (TRAV26-1, TRAJ22)
CIVRVSFWFCKATDL

SEQ ID NO: 87016 - protein, 16 aa, Homo sapiens
  CDR3 for beta chain variable domain of TCR clone 43508 (TRBV7-9, TRBJ2-1)
CASSDVAGGSYNEQFF

SEQ ID NO: 87017 - protein, 13 aa, Homo sapiens
  CDR3 for alpha chain variable domain of TCR clone 43509 (TRAV30, TRAJ24)
CGTVTDSWGKLQF

SEQ ID NO: 87018 - protein, 15 aa, Homo sapiens
  CDR3 for beta chain variable domain of TCR clone 43509 (TRBV19, TRBJ1-1)
YASTSGQIQNTEAFF

SEQ ID NO: 87019 - protein, 12 aa, Homo sapiens
  CDR3 for alpha chain variable domain of TCR clone 43510 (TRAV12-3, TRAJ17)
CAMTLTGNKLTF

SEQ ID NO: 87020 - protein, 14 aa, Homo sapiens
  CDR3 for beta chain variable domain of TCR clone 43510 (TRBV20-1, TRBJ2-5)
CSALVPGYQETQYF

SEQ ID NO: 87021 - protein, 16 aa, Homo sapiens
  CDR3 for alpha chain variable domain of TCR clone 43511 (TRAV30, TRAJ24)
CGTEIVDADSWGKFQF

SEQ ID NO: 87022 - protein, 16 aa, Homo sapiens
  CDR3 for beta chain variable domain of TCR clone 43511 (TRBV7-6, TRBJ2-3)
CASSARTSRGTDTQYF

SEQ ID NO: 87023 - protein, 13 aa, Homo sapiens
  CDR3 for alpha chain variable domain of TCR clone 43512 (TRAV30, TRAJ24)
CGTVTDSWGKLQF

SEQ ID NO: 87024 - protein, 16 aa, Homo sapiens
  CDR3 for beta chain variable domain of TCR clone 43512 (TRBV7-3, TRBJ2-2)
CASSLKRGTLSRELFF

SEQ ID NO: 87025 - protein, 17 aa, Homo sapiens
  CDR3 for alpha chain variable domain of TCR clone 43513 (TRAV26-2, TRAJ42)
CILRDVGYGGSQGNLIF

SEQ ID NO: 87026 - protein, 16 aa, Homo sapiens
  CDR3 for beta chain variable domain of TCR clone 43513 (TRBV12-4, TRBJ2-7)
YASSLIGGTGTYEQYF

SEQ ID NO: 87027 - protein, 15 aa, Homo sapiens
  CDR3 for alpha chain variable domain of TCR clone 43514 (TRAV14/DV4, TRAJ12)
CAMREGWDSSYKLVF

SEQ ID NO: 87028 - protein, 16 aa, Homo sapiens
  CDR3 for beta chain variable domain of TCR clone 43514 (TRBV2, TRBJ2-5)
CASSETQGVGEETQYF

SEQ ID NO: 87029 - protein, 14 aa, Homo sapiens
  CDR3 for alpha chain variable domain of TCR clone 43515 (TRAV1-2, TRAJ8)
CAVREDTGFQKLVF

SEQ ID NO: 87030 - protein, 12 aa, Homo sapiens
  CDR3 for beta chain variable domain of TCR clone 43515 (TRBV12-4, TRBJ1-2)
CQQLRQGKGYTF

SEQ ID NO: 87031 - protein, 12 aa, Homo sapiens
  CDR3 for alpha chain variable domain of TCR clone 43516 (TRAV12-3, TRAJ17)
CAMTLTGNKLTF

SEQ ID NO: 87032 - protein, 16 aa, Homo sapiens
  CDR3 for beta chain variable domain of TCR clone 43516 (TRBV7-8, TRBJ2-4)
CASSAERTLAKNIQYF

SEQ ID NO: 87033 - protein, 13 aa, Homo sapiens
  CDR3 for alpha chain variable domain of TCR clone 43517 (TRAV27, TRAJ56)
CAGKPGANSKLTF

SEQ ID NO: 87034 - protein, 12 aa, Homo sapiens
  CDR3 for beta chain variable domain of TCR clone 43517 (TRBV11-2, TRBJ2-3)
GASRGAPNTQYF

SEQ ID NO: 87035 - protein, 16 aa, Homo sapiens
  CDR3 for alpha chain variable domain of TCR clone 43518 (TRAV12-3, TRAJ53)
CAMSPGSGGSNYKLTF

SEQ ID NO: 87036 - protein, 12 aa, Homo sapiens
  CDR3 for beta chain variable domain of TCR clone 43518 (TRBV5-1, TRBJ2-5)
CASSLGLETQYF

SEQ ID NO: 87037 - protein, 16 aa, Homo sapiens
  CDR3 for alpha chain variable domain of TCR clone 43519 (TRAV3, TRAJ37)
CAVRPHGSGNTGKPIF

SEQ ID NO: 87038 - protein, 14 aa, Homo sapiens
  CDR3 for beta chain variable domain of TCR clone 43519 (TRBV4-2, TRBJ2-1)
CASGLDRAYNEQFF

SEQ ID NO: 87039 - protein, 14 aa, Homo sapiens
  CDR3 for alpha chain variable domain of TCR clone 43520 (TRAV1-1, TRAJ33)
CAVRPEDSNYQLTW

SEQ ID NO: 87040 - protein, 15 aa, Homo sapiens
  CDR3 for beta chain variable domain of TCR clone 43520 (TRBV20-1, TRBJ2-1)
CSARSPGGPGNEQFF

SEQ ID NO: 87041 - protein, 16 aa, Homo sapiens
  CDR3 for alpha chain variable domain of TCR clone 43521 (TRAV30, TRAJ24)
CGKEIVDADSWGKFQF

SEQ ID NO: 87042 - protein, 12 aa, Homo sapiens
  CDR3 for beta chain variable domain of TCR clone 43521 (TRBV11-2, TRBJ2-2)
CASSLPTGELFF

SEQ ID NO: 87043 - protein, 15 aa, Homo sapiens
  CDR3 for alpha chain variable domain of TCR clone 43522 (TRAV2, TRAJ22)
CAVPSRGGSARQLTF

SEQ ID NO: 87044 - protein, 14 aa, Homo sapiens
  CDR3 for beta chain variable domain of TCR clone 43522 (TRBV7-6, TRBJ2-3)
CASSLGTVTDTQYL

SEQ ID NO: 87045 - protein, 12 aa, Homo sapiens
  CDR3 for alpha chain variable domain of TCR clone 43523 (TRAV12-2, TRAJ26)
CAVNNYGQNFVF

SEQ ID NO: 87046 - protein, 15 aa, Homo sapiens
  CDR3 for beta chain variable domain of TCR clone 43523 (TRBV11-2, TRBJ2-7)
CASSFNTGQGYEQYF

SEQ ID NO: 87047 - protein, 14 aa, Homo sapiens
  CDR3 for alpha chain variable domain of TCR clone 43524 (TRAV3, TRAJ40)
CAVRDRRGTYKYIF

SEQ ID NO: 87048 - protein, 15 aa, Homo sapiens
  CDR3 for beta chain variable domain of TCR clone 43524 (TRBV28, TRBJ2-1)
CASSIIAGDRSEQFF

SEQ ID NO: 87049 - protein, 14 aa, Homo sapiens
  CDR3 for alpha chain variable domain of TCR clone 43525 (TRAV8-2, TRAJ4)
CVLSPSGGYNKLIF

SEQ ID NO: 87050 - protein, 15 aa, Homo sapiens
  CDR3 for beta chain variable domain of TCR clone 43525 (TRBV2, TRBJ2-1)
CASSELAGSYNEQFF

SEQ ID NO: 87051 - protein, 15 aa, Homo sapiens
  CDR3 for alpha chain variable domain of TCR clone 43526 (TRAV8-3, TRAJ40)
CAAPSLGSGTYKYIL

SEQ ID NO: 87052 - protein, 16 aa, Homo sapiens
  CDR3 for beta chain variable domain of TCR clone 43526 (TRBV7-3, TRBJ2-3)
CASSLSGYRPEDTQYF

SEQ ID NO: 87053 - protein, 14 aa, Homo sapiens
  CDR3 for alpha chain variable domain of TCR clone 43527 (TRAV3, TRAJ21)
CAVESQANFNKFYF

SEQ ID NO: 87054 - protein, 18 aa, Homo sapiens
  CDR3 for beta chain variable domain of TCR clone 43527 (TRBV12-4, TRBJ2-2)
CASSLVAGTRGRTGELFF

SEQ ID NO: 87055 - protein, 14 aa, Homo sapiens
  CDR3 for alpha chain variable domain of TCR clone 43528 (TRAV12-2, TRAJ13)
CAVKKTGGYQKVTF

SEQ ID NO: 87056 - protein, 14 aa, Homo sapiens
  CDR3 for beta chain variable domain of TCR clone 43528 (TRBV19, TRBJ1-1)
CASSPNRGDTEAFF

SEQ ID NO: 87057 - protein, 14 aa, Homo sapiens
  CDR3 for alpha chain variable domain of TCR clone 43529 (TRAV12-2, TRAJ17)
CAVLFKAAGNKLTF

SEQ ID NO: 87058 - protein, 16 aa, Homo sapiens
  CDR3 for beta chain variable domain of TCR clone 43529 (TRBV20-1, TRBJ1-4)
CSAPGQGLLTNEKLFF

SEQ ID NO: 87059 - protein, 14 aa, Homo sapiens
  CDR3 for alpha chain variable domain of TCR clone 43530 (TRAV12-2, TRAJ40)
CAVKIPSGTYNYIF

SEQ ID NO: 87060 - protein, 17 aa, Homo sapiens
  CDR3 for beta chain variable domain of TCR clone 43530 (TRBV11-2, TRBJ2-1)
CASSLYPPGVEYNEQFF

SEQ ID NO: 87061 - protein, 13 aa, Homo sapiens
  CDR3 for alpha chain variable domain of TCR clone 43531 (TRAV17, TRAJ9)
CATDCTGGFKTIF

SEQ ID NO: 87062 - protein, 16 aa, Homo sapiens
  CDR3 for beta chain variable domain of TCR clone 43531 (TRBV7-7, TRBJ2-1)
CASSLASGTSYNEQFF

SEQ ID NO: 87063 - protein, 12 aa, Homo sapiens
  CDR3 for alpha chain variable domain of TCR clone 43532 (TRAV12-3, TRAJ17)
CAMALTGNKLTF

SEQ ID NO: 87064 - protein, 12 aa, Homo sapiens
  CDR3 for beta chain variable domain of TCR clone 43532 (TRBV2, TRBJ2-1)
CAYGPPGNEQFF

SEQ ID NO: 87065 - protein, 15 aa, Homo sapiens
  CDR3 for alpha chain variable domain of TCR clone 43533 (TRAV3, TRAJ47)
CAVRDIGEYRNKLVF

SEQ ID NO: 87066 - protein, 14 aa, Homo sapiens
  CDR3 for beta chain variable domain of TCR clone 43533 (TRBV13, TRBJ2-5)
CASSLERVGETQYF

SEQ ID NO: 87067 - protein, 12 aa, Homo sapiens
  CDR3 for alpha chain variable domain of TCR clone 43534 (TRAV13-1, TRAJ21)
CAAKEGFNKFYF

SEQ ID NO: 87068 - protein, 13 aa, Homo sapiens
  CDR3 for beta chain variable domain of TCR clone 43534 (TRBV4-1, TRBJ1-1)
CASSRKMNTEAFF

SEQ ID NO: 87069 - protein, 14 aa, Homo sapiens
  CDR3 for alpha chain variable domain of TCR clone 43535 (TRAV9-2, TRAJ36)
CVLPWRTGANNLFF

SEQ ID NO: 87070 - protein, 14 aa, Homo sapiens
  CDR3 for beta chain variable domain of TCR clone 43535 (TRBV2, TRBJ1-2)
CASSELQVNYGYTF

SEQ ID NO: 87071 - protein, 14 aa, Homo sapiens
  CDR3 for alpha chain variable domain of TCR clone 43536 (TRAV12-2, TRAJ45)
CAVNIGGGADGLTF

SEQ ID NO: 87072 - protein, 17 aa, Homo sapiens
  CDR3 for beta chain variable domain of TCR clone 43536 (TRBV7-8, TRBJ2-6)
CASRAGTGGAGANVLTF

SEQ ID NO: 87073 - protein, 15 aa, Homo sapiens
  CDR3 for alpha chain variable domain of TCR clone 43537 (TRAV8-3, TRAJ11)
CAVGLLNSGYSTLTF

SEQ ID NO: 87074 - protein, 15 aa, Homo sapiens
  CDR3 for beta chain variable domain of TCR clone 43537 (TRBV27, TRBJ1-4)
CASSAQQDLNEKLFF

SEQ ID NO: 87075 - protein, 16 aa, Homo sapiens
  CDR3 for alpha chain variable domain of TCR clone 43538 (TRAV26-1, TRAJ37)
CIVRGDGSGNTGKRIF

SEQ ID NO: 87076 - protein, 17 aa, Homo sapiens
  CDR3 for beta chain variable domain of TCR clone 43538 (TRBV4-1, TRBJ2-7)
CASSRDPLGVRGGEQYF

SEQ ID NO: 87077 - protein, 14 aa, Homo sapiens
  CDR3 for alpha chain variable domain of TCR clone 43539 (TRAV17, TRAJ15)
CATAPNQAGTALIF

SEQ ID NO: 87078 - protein, 16 aa, Homo sapiens
  CDR3 for beta chain variable domain of TCR clone 43539 (TRBV12-4, TRBJ2-1)
CASSAVGQGNGDEQFF

SEQ ID NO: 87079 - protein, 14 aa, Homo sapiens
  CDR3 for alpha chain variable domain of TCR clone 43540 (TRAV1-2, TRAJ15)
CAVGDRQAGTALIF

SEQ ID NO: 87080 - protein, 14 aa, Homo sapiens
  CDR3 for beta chain variable domain of TCR clone 43540 (TRBV4-1, TRBJ2-2)
CASSQAVNTGELFF

SEQ ID NO: 87081 - protein, 11 aa, Homo sapiens
  CDR3 for alpha chain variable domain of TCR clone 43541 (TRAV39, TRAJ49)
CAVDISTQFYF

SEQ ID NO: 87082 - protein, 16 aa, Homo sapiens
  CDR3 for beta chain variable domain of TCR clone 43541 (TRBV7-3, TRBJ2-2)
CASSLKRGTLSGELFF

SEQ ID NO: 87083 - protein, 16 aa, Homo sapiens
  CDR3 for alpha chain variable domain of TCR clone 43542 (TRAV20, TRAJ53)
CAVQAESGGSNYKLTF

SEQ ID NO: 87084 - protein, 16 aa, Homo sapiens
  CDR3 for beta chain variable domain of TCR clone 43542 (TRBV7-3, TRBJ2-1)
CASSPNSGSSYNEQFF

SEQ ID NO: 87085 - protein, 13 aa, Homo sapiens
  CDR3 for alpha chain variable domain of TCR clone 43543 (TRAV12-2, TRAJ15)
CPHAGQAGTALIF

SEQ ID NO: 87086 - protein, 14 aa, Homo sapiens
  CDR3 for beta chain variable domain of TCR clone 43543 (TRBV7-2, TRBJ2-7)
CASSPKTSFYEQYF

SEQ ID NO: 87087 - protein, 16 aa, Homo sapiens
  CDR3 for alpha chain variable domain of TCR clone 43544 (TRAV3, TRAJ10)
CAVRDMRSGGGNKLTF

SEQ ID NO: 87088 - protein, 19 aa, Homo sapiens
  CDR3 for beta chain variable domain of TCR clone 43544 (TRBV6-3, TRBJ1-2)
CASSYSKGRTGPPNYGYTF

SEQ ID NO: 87089 - protein, 13 aa, Homo sapiens
  CDR3 for alpha chain variable domain of TCR clone 43545 (TRAV36/DV7, TRAJ53)
CALSGGSNYKLTF

SEQ ID NO: 87090 - protein, 13 aa, Homo sapiens
  CDR3 for beta chain variable domain of TCR clone 43545 (TRBV28, TRBJ2-4)
CANSQSSKNIQYF

SEQ ID NO: 87091 - protein, 17 aa, Homo sapiens
  CDR3 for alpha chain variable domain of TCR clone 43546 (TRAV4, TRAJ18)
CLVGERSVGSTLGRLYF

SEQ ID NO: 87092 - protein, 14 aa, Homo sapiens
  CDR3 for beta chain variable domain of TCR clone 43546 (TRBV6-5, TRBJ1-2)
CVSSYDGTGGGYTF

SEQ ID NO: 87093 - protein, 13 aa, Homo sapiens
  CDR3 for alpha chain variable domain of TCR clone 43547 (TRAV22, TRAJ44)
CALNPGTASKLTF

SEQ ID NO: 87094 - protein, 12 aa, Homo sapiens
  CDR3 for beta chain variable domain of TCR clone 43547 (TRBV5-1, TRBJ2-7)
CASSLDSYEQYF

SEQ ID NO: 87095 - protein, 13 aa, Homo sapiens
  CDR3 for alpha chain variable domain of TCR clone 43548 (TRAV27, TRAJ41)
CAGEGNSGYALNF

SEQ ID NO: 87096 - protein, 14 aa, Homo sapiens
  CDR3 for beta chain variable domain of TCR clone 43548 (TRBV7-2, TRBJ1-1)
CANSFLTGTTEAFF

SEQ ID NO: 87097 - protein, 12 aa, Homo sapiens
  CDR3 for alpha chain variable domain of TCR clone 43549 (TRAV12-3, TRAJ40)
CAMSSGTYKYIF

SEQ ID NO: 87098 - protein, 15 aa, Homo sapiens
  CDR3 for beta chain variable domain of TCR clone 43549 (TRBV7-3, TRBJ2-2)
CASSDTGQGTGELFF

SEQ ID NO: 87099 - protein, 15 aa, Homo sapiens
  CDR3 for alpha chain variable domain of TCR clone 43550 (TRAV8-3, TRAJ40)
CAAPSLGSGTYKYIF

SEQ ID NO: 87100 - protein, 16 aa, Homo sapiens
  CDR3 for beta chain variable domain of TCR clone 43550 (TRBV7-3, TRBJ2-3)
CASSLSGHRPEDTQYF

SEQ ID NO: 87101 - protein, 11 aa, Homo sapiens
  CDR3 for alpha chain variable domain of TCR clone 43551 (TRAV21, TRAJ34)
CAHYNTDKLIF

SEQ ID NO: 87102 - protein, 15 aa, Homo sapiens
  CDR3 for beta chain variable domain of TCR clone 43551 (TRBV7-2, TRBJ2-1)
CASTHGTGIYNEQFF

SEQ ID NO: 87103 - protein, 12 aa, Homo sapiens
  CDR3 for alpha chain variable domain of TCR clone 43552 (TRAV17, TRAJ20)
CATDSNDYKLSF

SEQ ID NO: 87104 - protein, 13 aa, Homo sapiens
  CDR3 for beta chain variable domain of TCR clone 43552 (TRBV28, TRBJ2-5)
CASSFAGGETQYF

SEQ ID NO: 87105 - protein, 15 aa, Homo sapiens
  CDR3 for alpha chain variable domain of TCR clone 43553 (TRAV8-4, TRAJ36)
CAVRKSWTGANNLFF

SEQ ID NO: 87106 - protein, 17 aa, Homo sapiens
  CDR3 for beta chain variable domain of TCR clone 43553 (TRBV3-1, TRBJ2-2)
SASSQDSQGPNTGELFF

SEQ ID NO: 87107 - protein, 12 aa, Homo sapiens
  CDR3 for alpha chain variable domain of TCR clone 43554 (TRAV12-3, TRAJ17)
CAMTLTGNKLTF

SEQ ID NO: 87108 - protein, 14 aa, Homo sapiens
  CDR3 for beta chain variable domain of TCR clone 43554 (TRBV7-3, TRBJ2-1)
CARSLAGGTNEQFF

SEQ ID NO: 87109 - protein, 14 aa, Homo sapiens
  CDR3 for alpha chain variable domain of TCR clone 43555 (TRAV16, TRAJ33)
WALSAMDSNYQLIW

SEQ ID NO: 87110 - protein, 15 aa, Homo sapiens
  CDR3 for beta chain variable domain of TCR clone 43555 (TRBV19, TRBJ1-1)
CASTSGQIQNTEAFF

SEQ ID NO: 87111 - protein, 13 aa, Homo sapiens
  CDR3 for alpha chain variable domain of TCR clone 43556 (TRAV8-3, TRAJ36)
CAVGATGANNLFF

SEQ ID NO: 87112 - protein, 15 aa, Homo sapiens
  CDR3 for beta chain variable domain of TCR clone 43556 (TRBV7-2, TRBJ1-2)
CASSPRAGWNHGYTF

SEQ ID NO: 87113 - protein, 14 aa, Homo sapiens
  CDR3 for alpha chain variable domain of TCR clone 43557 (TRAV13-1, TRAJ35)
CAASKGGFGNVLHC

SEQ ID NO: 87114 - protein, 14 aa, Homo sapiens
  CDR3 for beta chain variable domain of TCR clone 43557 (TRBV18, TRBJ2-5)
CASSPGVSQETQYF

SEQ ID NO: 87115 - protein, 11 aa, Homo sapiens
  CDR3 for alpha chain variable domain of TCR clone 43558 (TRAV3, TRAJ21)
CAVGNFNKFYF

SEQ ID NO: 87116 - protein, 14 aa, Homo sapiens
  CDR3 for beta chain variable domain of TCR clone 43558 (TRBV20-1, TRBJ2-2)
CSAPGTANTGELFF

SEQ ID NO: 87117 - protein, 14 aa, Homo sapiens
  CDR3 for alpha chain variable domain of TCR clone 43559 (TRAV8-1, TRAJ34)
CAVNLSYNTDKLIF

SEQ ID NO: 87118 - protein, 16 aa, Homo sapiens
  CDR3 for beta chain variable domain of TCR clone 43559 (TRBV7-2, TRBJ2-6)
CASSLAGRSGANVLTF

SEQ ID NO: 87119 - protein, 14 aa, Homo sapiens
  CDR3 for alpha chain variable domain of TCR clone 43560 (TRAV27, TRAJ22)
CAGVSVLGKRQLTF

SEQ ID NO: 87120 - protein, 17 aa, Homo sapiens
  CDR3 for beta chain variable domain of TCR clone 43560 (TRBV14, TRBJ2-1)
YASSQDRRVTSYNEQFF

SEQ ID NO: 87121 - protein, 13 aa, Homo sapiens
  CDR3 for alpha chain variable domain of TCR clone 43561 (TRAV1-2, TRAJ9)
CAALNTRGFKTIF

SEQ ID NO: 87122 - protein, 15 aa, Homo sapiens
  CDR3 for beta chain variable domain of TCR clone 43561 (TRBV7-2, TRBJ2-1)
CASSSGLAGGNEQFF

SEQ ID NO: 87123 - protein, 13 aa, Homo sapiens
  CDR3 for alpha chain variable domain of TCR clone 43562 (TRAV2, TRAJ40)
CAVVTSGTYKYIF

SEQ ID NO: 87124 - protein, 15 aa, Homo sapiens
  CDR3 for beta chain variable domain of TCR clone 43562 (TRBV7-3, TRBJ2-1)
CASSLSSGSFDEQFF

SEQ ID NO: 87125 - protein, 17 aa, Homo sapiens
  CDR3 for alpha chain variable domain of TCR clone 43563 (TRAV4, TRAJ18)
CLVGERSVGSTLGRLYF

SEQ ID NO: 87126 - protein, 14 aa, Homo sapiens
  CDR3 for beta chain variable domain of TCR clone 43563 (TRBV19, TRBJ2-1)
CASPTFVLSGEQFF

SEQ ID NO: 87127 - protein, 16 aa, Homo sapiens
  CDR3 for alpha chain variable domain of TCR clone 43564 (TRAV12-3, TRAJ53)
CAMSPGSGGSNYKLTF

SEQ ID NO: 87128 - protein, 20 aa, Homo sapiens
  CDR3 for beta chain variable domain of TCR clone 43564 (TRBV7-8, TRBJ2-2)
CAISHLFPGPTIHITGELFF

SEQ ID NO: 87129 - protein, 16 aa, Homo sapiens
  CDR3 for alpha chain variable domain of TCR clone 43565 (TRAV4, TRAJ22)
CLVGDLYSGSARQLTF

SEQ ID NO: 87130 - protein, 12 aa, Homo sapiens
  CDR3 for beta chain variable domain of TCR clone 43565 (TRBV7-9, TRBJ1-4)
CASSTDREKLFF

SEQ ID NO: 87131 - protein, 15 aa, Homo sapiens
  CDR3 for alpha chain variable domain of TCR clone 43566 (TRAV35, TRAJ52)
CAGPRGGTSHGKLTF

SEQ ID NO: 87132 - protein, 14 aa, Homo sapiens
  CDR3 for beta chain variable domain of TCR clone 43566 (TRBV20-1, TRBJ2-7)
CSAWTALSSYEQYF

SEQ ID NO: 87133 - protein, 13 aa, Homo sapiens
  CDR3 for alpha chain variable domain of TCR clone 43567 (TRAV12-2, TRAJ37)
CAGGSGNTGKLVF

SEQ ID NO: 87134 - protein, 14 aa, Homo sapiens
  CDR3 for beta chain variable domain of TCR clone 43567 (TRBV6-1, TRBJ2-6)
CASQQGAGANVLTF

SEQ ID NO: 87135 - protein, 11 aa, Homo sapiens
  CDR3 for alpha chain variable domain of TCR clone 43568 (TRAV21, TRAJ34)
CAVTNTDKLIF

SEQ ID NO: 87136 - protein, 17 aa, Homo sapiens
  CDR3 for beta chain variable domain of TCR clone 43568 (TRBV11-2, TRBJ2-1)
CASSLYPPGVEYNEQFF

SEQ ID NO: 87137 - protein, 15 aa, Homo sapiens
  CDR3 for alpha chain variable domain of TCR clone 43569 (TRAV14/DV4, TRAJ10)
CAMRELTGGGNKLTF

SEQ ID NO: 87138 - protein, 12 aa, Homo sapiens
  CDR3 for beta chain variable domain of TCR clone 43569 (TRBV14, TRBJ2-5)
CASSQLKETQYL

SEQ ID NO: 87139 - protein, 15 aa, Homo sapiens
  CDR3 for alpha chain variable domain of TCR clone 43570 (TRAV3, TRAJ5)
CAVRDLDTGRRALTF

SEQ ID NO: 87140 - protein, 13 aa, Homo sapiens
  CDR3 for beta chain variable domain of TCR clone 43570 (TRBV10-2, TRBJ2-7)
CASGASGGYEQYF

SEQ ID NO: 87141 - protein, 16 aa, Homo sapiens
  CDR3 for alpha chain variable domain of TCR clone 43571 (TRAV17, TRAJ28)
CASYAYTGAGSYQLTF

SEQ ID NO: 87142 - protein, 15 aa, Homo sapiens
  CDR3 for beta chain variable domain of TCR clone 43571 (TRBV4-2, TRBJ2-1)
CASSPSGGLYNEQFF

SEQ ID NO: 87143 - protein, 12 aa, Homo sapiens
  CDR3 for alpha chain variable domain of TCR clone 43572 (TRAV13-1, TRAJ21)
CAAKEGFNKFYF

SEQ ID NO: 87144 - protein, 15 aa, Homo sapiens
  CDR3 for beta chain variable domain of TCR clone 43572 (TRBV7-9, TRBJ1-5)
CASSQGHQPNQPQHF

SEQ ID NO: 87145 - protein, 15 aa, Homo sapiens
  CDR3 for alpha chain variable domain of TCR clone 43573 (TRAV8-6, TRAJ50)
CAVSVRRTSYDKVIF

SEQ ID NO: 87146 - protein, 11 aa, Homo sapiens
  CDR3 for beta chain variable domain of TCR clone 43573 (TRBV7-2, TRBJ2-7)
CASSLGLAMHF

SEQ ID NO: 87147 - protein, 14 aa, Homo sapiens
  CDR3 for alpha chain variable domain of TCR clone 43574 (TRAV1-2, TRAJ8)
CAVREDTGFQKLVF

SEQ ID NO: 87148 - protein, 16 aa, Homo sapiens
  CDR3 for beta chain variable domain of TCR clone 43574 (TRBV25-1, TRBJ1-1)
CASSGDRDRGRIEAFF

SEQ ID NO: 87149 - protein, 15 aa, Homo sapiens
  CDR3 for alpha chain variable domain of TCR clone 43575 (TRAV30, TRAJ40)
TASQLSYSGTYKYIF

SEQ ID NO: 87150 - protein, 15 aa, Homo sapiens
  CDR3 for beta chain variable domain of TCR clone 43575 (TRBV7-3, TRBJ2-2)
CASSETGQGTGELFF

SEQ ID NO: 87151 - protein, 15 aa, Homo sapiens
  CDR3 for alpha chain variable domain of TCR clone 43576 (TRAV8-3, TRAJ45)
CASSYSGGGADGITF

SEQ ID NO: 87152 - protein, 15 aa, Homo sapiens
  CDR3 for beta chain variable domain of TCR clone 43576 (TRBV7-2, TRBJ2-2)
CASSSLTGGTGELFF

SEQ ID NO: 87153 - protein, 17 aa, Homo sapiens
  CDR3 for alpha chain variable domain of TCR clone 43577 (TRAV8-6, TRAJ58)
CAVSSWAGETSGSRLTF

SEQ ID NO: 87154 - protein, 14 aa, Homo sapiens
  CDR3 for beta chain variable domain of TCR clone 43577 (TRBV4-2, TRBJ2-1)
CASGLNRAYNEQFF

SEQ ID NO: 87155 - protein, 13 aa, Homo sapiens
  CDR3 for alpha chain variable domain of TCR clone 43578 (TRAV12-2, TRAJ31)
CAVQAIGGARLMF

SEQ ID NO: 87156 - protein, 14 aa, Homo sapiens
  CDR3 for beta chain variable domain of TCR clone 43578 (TRBV2, TRBJ1-5)
CASSGTVSNQPQHF

SEQ ID NO: 87157 - protein, 14 aa, Homo sapiens
  CDR3 for alpha chain variable domain of TCR clone 43579 (TRAV17, TRAJ57)
CATDPQGGSEELVF

SEQ ID NO: 87158 - protein, 18 aa, Homo sapiens
  CDR3 for beta chain variable domain of TCR clone 43579 (TRBV6-6, TRBJ1-3)
CASSYSKWDSISGNTIYF

SEQ ID NO: 87159 - protein, 13 aa, Homo sapiens
  CDR3 for alpha chain variable domain of TCR clone 43580 (TRAV8-2, TRAJ13)
CVVSDLRYRKVTF

SEQ ID NO: 87160 - protein, 14 aa, Homo sapiens
  CDR3 for beta chain variable domain of TCR clone 43580 (TRBV25-1, TRBJ1-1)
CASTHLGGNTEAFF
